United States Patent Application Publication US 2019/0348154 A1 - sequence listing, part 89

SEQ ID NO: 335196 - DNA, 1008 bp, Pseudomonas aeruginosa; identical to SEQ ID NO: 318618

SEQ ID NO: 335197 - DNA, 477 bp, Pseudomonas aeruginosa
atgcacaaccctcatgagagcaagaccgacctgggcgcccctctggacggcgcggtcatggtactgcttgtcgatgatcaggccatgatcggagaggctgtgcgtcgctcactggcgagcgaggcgggcatcgacttccatttctgttccgatccgcagcaggcggtggcggtggccaaccagatcaagccgacggtgatcctccaggacctggtgatgcccggcgtcgacggcctcacgctgctcgctgcctaccgcagcaacccggcgacccgcgacatcccgatcatcgtcctgtcgaccaaggaagagccgacggtgaagagcgcggcgttcgccgccggcgccaacgactacctggtcaagctgcctgacgccatcgagctggtggcgcggatccgctaccactcgcgttcgtacatcgccctgcagcaacgcgacgaggcctatcgggcgctgcgcgagagccagcagtag

SEQ ID NO: 335198 - DNA, 1200 bp, Pseudomonas aeruginosa
atggcaaagatcaagctcaccaagaccgccgtggaggcggcccagccccaggccaaggatgttgaactgcgggataccgtggtgcccggcttcctgtgcaagattaccccgacgggccgccgggtgttcatgctccagtaccgcacgaactccggccagccccgcaagccctcgctggggctgtacggggaactgaccgtcgaacaggcacgagtcaaggcacaggactggctggccgaggttcgccggggcggcgaccccggcggcgccaaggccgaggcgcgcaaggcgcccacgatggccgagttgtgcaagaagttcatggaggactactccaagaagcgcaacaagcccagcacgcaggacggctatcagggcgtcatcgaccgcaacatcatcccgctgctgggccgcaagaaggtgcatgacgtgaagcggcccgacattgccgggctgatggagaagctggcctacaagccgaccgaggcgaacaagaccttcggcgtgctgcgcaagatgttcaacctggccgaagtgtggggctaccgcccggacggcacaaatccgtgccgccacgtcccgatgtacccgccgggcaaggaaacccggctcatcgtggacgaggaaatggtgcggctcttccgccatctggagaagctggaggcggaagggctggagaactacgtcatccctctggcgatccggctgcaattcgagttcgccgcccggcgctccgaaatctgcccgctcgaatggagctggctggacttcgagaaccggcgcgtggtgtggcccgacagcaaggtcggcggcatttccaagcccatgagcgaggaagcctatcggctgctttcgacggcgccgcgccgggagggctgcccttatgtcctgccgtcgcccaacgacccggccaagcacctgacctttggcgaacactatggcggctggtgccgggtgctcaaggccgccggcgtcccgcacgtcggcacgcacggcatccgccatcgctcgacgaccgacattgccaattctggcgtaccgaccaaggtggggatgaagctgacgggccacaagaccgtggcgatgttcatgcactacgtccataccgaggacaagccggtgcgcgatgccgccgagctggtggccagccggcgccaggccatcacgggcgcgcgccagcttgcggaggcggcagcatga

SEQ ID NO: 335199 - DNA, 1167 bp, Pseudomonas aeruginosa
atgagcagacatcccctgaagatcgtcatcgccggcgccggcatcggcgggctcgccgcggccgcctgcctgaaagccgccggcttcgaggtcgaactctacgagcgggccagggagctgcgcgcggtcggctcggcgctgtcactgatgcccaacgcgctgaccgccctggagagggtcggcgtgcgccctgaccttacccgcgcccaggccttcgactcgctgcggttcctcacccggcgcgggcgaccgatccgcgccatcgacttcggcggcctggcccgtcagctcggccagccgagcctggcgatccaccgcgcgagcctgcagcaggcgctgctggaacaggcccgcgactgccgcatcgaactgggcgtgagcgccaccggctacctgcgccacgccgacggcgaaggcgtcaccgtgctctgcagcgacggccgcgaagtgcacgccgacgtgctgatcggcgccgacggcttcaactcggcgatccgcgccaccatgaccggcccggagcgtcccaccgactggcactacgtgatctggcgcgccacgccggcgttccgccatccgaaggtgacgccgggctacgtcgcccattactggggccgtgggcagcgcttcggtctcgccgacatcggcgaaggcaacgtctattggtggggcacccgcaacatgccggccgaacaggcgaaggactggcgcggcggcaaggcgggcatccagcgcctctacgccggctgggccgacgaagtgcaggcggtcatcgaggcgaccccggaggccgacatcagcagcctgccggcccaggaccgaccgttcctggagcgctggggcgacggcccggtgaccctgctcggcgatgccgcgcacccgatgctgaccagccttggccagggcgccgccatcgccatcgaagacgccgcggtgctggcccactgcctggccaccatcgacgacccgcaagccgccctgcgcgcctacgagaaccgccgtcgcgaccgcgccagggcgatggtcgagacctcgcgggcgctgagccgcatcgagcagttggagcatccgctgcgcaccgtcgcccgcgatctctacttccgcttcgctccggagcgaaccttcgcccggcagaacgaactggcactgaccttcccaggagtcgaatga

SEQ ID NO: 335200 - DNA, 1779 bp, Pseudomonas aeruginosa
atgaacgcgctcctcgccctccccgacctgcagccggaacgcctgttcgtgcaatccggcgacgtgcgcctggcggttcattgctggggcgcgccggacaacggcaagccgacgctgctgatggtgcatggctacccggacaaccacgagacctggctgccgctgatccgccaactggccgggcgctaccgcatcgtcgcctacgacgtgcgtggcgccggcgcttcggacaagccacgctggagccgcgactaccacctgcagcggctcagcgaagacctgcaggcggtgatccgcgccaccagcccggaccgcccggtacacctgctggcccatgactggggctcgatccagacctgggaaagcgtcaccgatccgcagtgccgaccgctgatcgcgtcctatacctcgatctccgggccctgcctggaccatgtcggtttctggatgcgcgaacacctcaggcagcgcagtccgaaggccctgaaagcggtattcggccagttgctccactcctggtacatcgccttcttccatacccccgtcgtacccgagctgctctggagcgccggcctggcccggctctggccgcagttcctgaagcacgccgaaggcgtccgccatccgcaggtcaacccgacccaggccagcgacggccggcacggggtcaagctgtaccgcggcaacttcatccgcagcctgttccgtccgcgcaagcgccacaccgaagtgccggtgcaactgatcgtaccgacccgcgaccgttacgtcggcgcccagctgttccagcacctcagcctgtgggcgccacgcctgtggcggcgcgaggcgagcgtcggccattggcaactgctggccgagccggagcaactggccggctggctcggcgagttcatcgacgcccaggaaaccggcgagtcgccgccggccctgcaacgcgcccaggtccggcccgacgcgcgctcgatgagcggcaagctggtggtggtcaccggcgccggcggcggcatcggccgttcgaccctgctcagcttcgccgagcgcggcgccagcctgctcgccgccgatctcgacctggaagccgccgaacgcagcgccgaactggcccgcgcccttggcgccacggcccatgcctaccaggtcgacgtcggcgatacccaggccatggagaccttcgccgagtgggtgcgcgacaccctcggagtcccggatgtggtggtcagcaatgccggcatcggcatggctgggccgatgctcgacacctcgcctgcggaatgggagcgcctgctgcgggtcaacctgtggagcgtgatcgatggctgccgcctgttcggccggcagatggtcgcggcgaacaagccggggcacctggtcaatgtcgcctccggcgtggccttcgcgccgtcgcgcaactaccccgcctacgccaccagcaaggccgcggtactgatgctcagcgaatgcctgcgggcggaactggccggacgttcgatcggagtcaccgcggtgtgcccgggcttcgtcgataccggcattgtccaggccacccgcttcgtcggcatggacgccgaacgccaggcacggcgccaggcgaagatccagcgcttctacaagcgacgccggctcagcccggacaccgtcggggaaaagctggtgcgcgccgtggagcgcaacaaggcggtggtctcggtgggcagcgaggtgcacctcggcgccctgcaatggcgcttcgcgccctgggccacgcggtttctcgcgcgcttcgacctgacttcctga

SEQ ID NO: 335201 - DNA, 177 bp, Pseudomonas aeruginosa
atgagccgtatcctgatagtcgacgatcatcccgtgattcgcatggccatgaagatgttgctggaagccgaagggcaccagatcgtcggcgataccgataatggcgtggatgccatcagcctcgggcgggagctgaagccggacctggtcatcctcgatatcgtaaccgctccataa

SEQ ID NO: 335202 - DNA, 573 bp, Pseudomonas aeruginosa
  misc_feature (521)..(530): n is a, c, g, or t
atgcaccaacccgaaaacccggcgcgccgcaccttgctggcgcagaccgtcgccggctccgccgcgctcgccctgggctcgctgctcggcggcgcgcccggcgtggccagcgccacggcggaaacgccccgcaaggccttcgatggcggcaggatcgatgtgctgatcgtcggcggcggctccgccggcgcggtcctcgcccggcgcctgagcgagcgcggcgaccgccgggtactgttgctggaagccggccaggcctatccggcctgggactaccccaggatcatcgccagcagcgacagcgtcggcggcgacccctccagcgactggggctaccagtcccaaccgggggcgatcgggcacccgatccatgcggtccgcggcaaggtcctcggcggcagctcggcgatcaacggcgcggtggcgatccgcgcgcggcgcgaagacttcgcccgctggaatctgccgggctggtcctacgacgacctgctgccggcgttccgccgcctggagacccgccnnnnnnnnnngccctgcaaggcggggacggaccgctgccggtgcggcaactga

SEQ ID NO: 335203 - DNA, 429 bp, Pseudomonas aeruginosa
atgaccagcctgccgctcgaagccaacgccgccgccaccctcgccgaatggcacgggctgatcgcccgccgcgacctctccgggttgccgcgcctgctgcaccccgacgccgtgttccgctcgccgatggcgcacaagccgtatgccggcgcaccggtggtctcgatgatcctgaataccgtgctcacggtcttcgaggatttcgcctatcaccgccagttggccagcgccgacggccgcagcgtggtgctggaattcagcgcacgggtcggcgaacgcgaactgaaaggcatcgacatgatccgcttcgacgacgacggccggatcgtcgacttcgaagtgatggtccgtcccatgagcggcctccaggccctcggcgaggagatgggccggcgcctggcctcctatctggccacgagcaaggcctga

SEQ ID NO: 335204 - DNA, 1086 bp, Pseudomonas aeruginosa
atgttcgatcttgaccactccctcgctcaggaaatcgtcgaccgagcgatggccatccttccgcgaaacgtgaacgtgatggatagccagggcttgatcattgggacgggcgaggctgagcgcctctatacccgccacgaaggggcccagctggtactcgccaacagcagggctgttgagatcgacaacgcagccgctggcgctctcaggggcgtgcaagaaggggtgaacttcccgctttgcctggatggccaggtgatcggcgttattggcgtatctggtgcgcctgatgaggtacgcacgttcgctgagatggttcgaatgaccgctgagatgctggtcgcccaacgaaatgatcagcagcaccggatttggctccagaagcggatcgaagacgttctgacagccatcctcctgtctggccaatctgctcaacgggccatcgttgaggcccaacgattggggctgagacctgaccttcgccgcacggcagtccttctcgagatggcaaccccagaagaccttgacctggcggccgaatggattcggcaccaggccgcagacgcctggtgtgttcctctacatgccttgggcctagtctggtgtccgccccggtcagcaccaccggattttcgtgagcgggtagcccgcgctggaattccgtttacccgggtagcgatcggaactcctaacaccgaaacgaaggctctacattctgaagttgagcagctatcggacttgatggcctatgcccaagccaaaatgccagatgcacaatggctggacctggctgctcacagaattccggtggcggtgtggcgctttcgttctgagaacggctttctgcaactggcactcccctacgtcgctctgcagcaagaggacagcaatgggcagcttcgcaggacattgaaatgctggttcgagcatggaagtgacggccaggcctgcgccgaggccttgaatatccaccggaatagccttcgctacagacttgagcgaattgccgatatttccggggtcgacctcgcatcaccgaaaggtacgactgaactctacctggcgatgatcctggcggcagagtaa

SEQ ID NO: 335205 - DNA, 264 bp, Pseudomonas aeruginosa
atgagtgagtggatcaagtgcagtgaccgtatgccggagcactcagatgaagtcatggtttgccgaaagtggccgggccaggactgtttcgctcccgagttcgaccgctgggtatctgacgaaggctcggatgaaggcggtttctggatgctggctgaggactcttgccagcgcatcgaaacctgtgccgatggaccgggccatgtagaacggcctgaaaccactcactggatgcccctacccgaaccaccgcaagacgcctga

SEQ ID NO: 335206 - DNA, 231 bp, Pseudomonas aeruginosa
atggaaaaggtactaaatctcaaagccggcgatttggttcaactctctccagaggtgagtaacccgatgttcgccggatgcatcatgaccgttacagagccgaagtcctggggcgctcaaggatatgttcagggccttggatctgatggaaagccagggggacaggcctactaccgggcgaactggaacgagttcgaatatgtcggcgctgctgtatgggtgatttcatga

SEQ ID NO: 335207 - DNA, 420 bp, Pseudomonas aeruginosa
atgaacaccgcatttcaatgcgcacagtcgctacatgacgacgcgactcctgacgatacccctcccgccgctaactccgatgagttctgcgactgggcagaacacgcagtcaacgatctgcggtgcggcatggacgtgaagatcgaaaccatgcgcgagcgcgtagtggtcttcgccagcactcttaccgaacgggtgcaggccgaactgctgaaactcgtccaggctgacgaagaatgctggctcgcgcagatgttccaggccgccgaagacgagttcacctctaccgcccgcgagtgcgcggcaaaccttgagcatcaccagggaatcactgaacgcatcgcgctcggactcctgaagccgcacgcggacctggtgctggaaatgatcgcagaacagaacatggaggatgcagcatga

SEQ ID NO: 335208 - DNA, 279 bp, Pseudomonas aeruginosa; identical to SEQ ID NO: 59589

SEQ ID NO: 335209 - DNA, 1212 bp, Pseudomonas aeruginosa
atgagttatctctgttcgcgggcgctggtggaggcattctcggcggccacctcctcggatggcgcaccgtatgcgctgtcgagttcgagccctacgccgcaagcgttcttgtcgccagacaaaatgacggaattctcccgcccttcccgatctgggatgacgttcggacctttgacggaagaccttggcgaggccttgttgacgtggtttctggcggattcccgtgtcaggacatatcagctgccgggaatggagccggaatcgacggtgagcgatcaggcctttggcgagaaatggcacgaatcgtcggtgaggtacgaccgcgattcgtcttcgtggagaactcaccgctccttgttcgaagaggacttgccgtggtcctcggtgaccttaccgaactggggtatgactctggatggtgtgttatgggagccgccgacgtcggggcgccccatcagcgggatcgcatctggattgttgcccacgccaacgacggtcgacaccggaagcctgttcaacaaatcggacagtcctggcgcgaaaatcagcccgacgcttggcgctatggcgaagttcaatctctggccaacgccagttcgtcgtgactatagagcacctggtcgaagccgactggagcgtacaggaagcaaagctggcgaaggcctacctcagatcgtaggtggtcagctgaatcccacgtgggtggaatggctgatgaactggcccatgggctggacgtcattggaggctattactcatgagcacttcaaacactggcaggaaagcggcgcagcgtatctacgcggcgaccgagtgcaagaactgtggttcgaccaggacccttcagagacaccacaaggatcggaatccgctgaacaatgctccagagaatatcgagattctctgtcggacttgccacaagaacgagcatttgaaagacgggacatggggtcgtggattggttgctccagcaatctgcgagatatgcaaagaaccatttcagccaacaaggaatcgtcggaaaggtcgtgtgctttgcgggggtccgaaatgcctgagcgagattggaaggcgcgcggcgttaaagagatggtcagcaagacagtcactggaatgaattcccgagttgaccgcattaaagcccttgggaatggacaagttccacgagtggcagcggcagcattctcctatctcgcgaccagatggatctga

SEQ ID NO: 335210 - DNA, 1065 bp, Pseudomonas aeruginosa
atgtccgcagaaaatcaactggtcgaagtaccagccaaagaaaccgctctgcaagtctactcggcagccaatggcctggatcctttcctggccaagattcgcgaagagatcgactcattcgtgccggacgtaagcactcgcaagggtcgagaagccatcgcttccatcgcctacaaggtagcccgctccaagacggcgctggacaacgtgggcaaggaattggtcgctgagctgaaggaggttccgaagaagatcgatgccgagcgtaagcggatgcgcgatctgctggacagctggcaggctgaggttcgcaagccgctgacagagtgggaagaggcggaagcggcgcgggttgctcgccatcagggcgagatcgacaagatcaacctgcgcctggaatgccgcgacctggactcggccgaactcaaggccaacatagcttggctggaaggcctggccatcagcgaagcctgggaagagttcgaggcagaggctgctcgcgccaaagatgaggctttgatcgctctccgagaatccctggttgcccgtgagaagttcgaagccgagcaggccgaactggaacgcctgcgcgccgaagcagcagcacgcgagcagaaagagcgcgaggagcgcattgcccgcgaagcagcagagcaggcacggcgtcaggaagaggccaaggcccaggcagaacgcgacgccgcagtacgccgtgaagccgaagcacaggccgcagcagagcgccgcgaacttgaacttaagcttgccgccgagcgcgccgaacgcgaagccattgaagccaagcagcgcgcagaacaagcagagcgtgatgcgcaacgtcgcgctgaagaagccgcagcggcagaacgcaaacggcaggccgatgagcaggcccgcatcgaacgcgaggctgctgcacgcgaagccgacaaggcgcacaagaaatccatcaacaacgaggcgctggcggctcttatcgccggcggcatgcccgaggaatgcgccaagcaggcgatcaccctgatcgctcagcgaaaggttcctcacatcacgatcaactattga

SEQ ID NO: 335211 - DNA, 750 bp, Pseudomonas aeruginosa
atgagcaacgcagttgcacagcggcatgaaagtgctgccgtaattcaggccggagagtcggccaccatcctccaagttatccagcgcgccgccgcagaccctcagtgcgacatcgagaagatggagcgcctgatgcagatgcacgagcgattccaggccagacaggcagagcagcagtacaccgaggcgctagctgcaatgcagcaagaactgcccgcaattgcggagcgtggagacgcgaatggccgctacagctacgcgctctgggaggacatcaacgagcgcctaaagccgatcctggccaagcacggatttgccctgacattccgcaccccgcgcaatgagaaaggcgtcgaagttgaaggcgtcctcagtcaccgcggcggtcacagcgagcgcacctcgatgctgcttccggcagacaccagcggcaacaagaacgccgtccaggccgtggccagttcggtcagctacggcaagcgctacacagcaggcgccctgctcaactacacaacccacggcgaagacgatgacgcgttcaacgccgtatcgcagcagcccgctctggatcagcaggtcgttatcgacattctggagcgcattgacgaggccaaggataaggacgaactcgccgcgatctggaaggcggctgtcggggtgcttcgcgcggccggcgacacgactggctatgagcgcgttaaagcggctgcggccgaacgtggcaaggctcttgaggggacagagaaatga

SEQ ID NO: 335212 - DNA, 645 bp, Pseudomonas aeruginosa
atgattattatcacctgcgaccaaggaagccccgaatggcaccaggccagggccgggtgcatcaccgccagtatgttcggcgatgcccgcgcaaggcttaaatctggcgccaacaaaggccagccgacttccgccgctctggattacgccttcaagctggccgttgagcgtatcagcgggcagccgctagatggaggattcgagacctggcagatgaagcgtggtcacgaactggaaccagaggcccgcatggagcacgagattcagacaggcctgatcatccagcgcgccggcttcgtgacaaccgacgacggcatgttcggagccagcgctgacggactgatcggcgaggatggcggcagcgagtacaagtgcttcctcgccccggagaagcttcgcgccttccacatcgacaacgacgccagcggaatcatggatcaggttcaaggatgcatgtggatcactggccgcaagttctggcacgtcggcatgtactgccctgcgctggagcctgtaggccgtcaactctggtggcgagagttcaagcgcgacgacgactacatcgaggaacttgagtccgacttgtggtcgttcaagctgcttgtcgacgagtacgaggcaaagttacgggagaaggcagcatga

SEQ ID NO: 335213 - DNA, 213 bp, Pseudomonas aeruginosa; identical to SEQ ID NO: 330465

SEQ ID NO: 335214 - DNA, 207 bp, Pseudomonas aeruginosa
atgccattcgacgaaagccccgcagtccgccgcataaacgccctctgctcccccgcgccagcacgctacctgcacattcccaccggcattcactgggtcgtcatcgacagcctgggcaatgtcctgcaactcgaaaacatcgagcgccggcgccgactgataaccgtttctgacctcgaaaccgaggcctggagaaagctcccatga

SEQ ID NO: 335215 - DNA, 1119 bp, Pseudomonas aeruginosa
atgcggtgcggcggccctgcgctttgctcggaatgcgctgccgacgcttaccgtgcccgcgccgccctggcgcaaccctctggcgaggttgttgtcaccaagaacgaatccggcgccatcgtatcggtaacccgccaggataaagaggggcgcgtccttagcgtaatcgctgaatcggcaaccctcacggcgcaggccgagaaagcggaggtggtggctcgcgtcgtgcactcgaatcctgtcgtcctcggtcagtgcggtccgctcaatgcaaacgatgaactgatgaccgtcgcgcagcatgccgccagcgttgcccgttgggcagaaatgttcaatcgcgtggagcagcagcgcgacgccgccctggccgaagtcgagcgcctgcgccagttcgagcgcatctgcgaagggctgccgcaagacgccatcgatggcggctggaccgtgcagggcattcgcggctatgccaagcgcttggaggatcaactgaaggccgccctggccagggtcgcagatatgaaaactatggcagacaactattgcgcgctgctgatggacgccaacgccaaactggcggagatggagaggcaggagccggtagctctcgccaatcggggccttcatgccttctgggtgaagtggacggaggccgccgccgggctctacggcccaggcatcaagctctacgccgcccctgtagcccaggctcagcacagcgtgccggtagcgcgagagcagttggagcggctggttcgaattctcgacgcccacaactacgcaaaagatgctgaagcactaatggctctgctcgccgccgcgcccggcaaagaagtgccgcaggcatggctcgacgttcaagccgaacgacgccggcaggtcgaggccgagggctggacaccggagcacgacgacctctattgcgccgccgaacttccgcgagccgcagcggcatacatcctcaacggagccaacgacgaggcgccagctatctggccgttctcggcgaagtggtggaagccgagagacgcgcgatccaactacgtgcgtgccagcgccttgatcctggccgagatcgagcgcctggaccgcgccgcgcccggcaaggagggggtgtga

SEQ ID NO: 335216 - DNA, 273 bp, Pseudomonas aeruginosa
atgcaactgttacgcgacgaacttcggacggcccggaagcactatcagtgtgatgcctattactggttcgaccgtgccggcttcggaaggcaagacgttggtgcggatgactggctaatcgttgaggccgttcgatccgaccgagggaagatccttccgggaacaaagtacatctatcaggtgagtgtcgatggtggggagttctggattttccgcgcccgcccggaaatggatgccatctgccgcaagtacgacctgtatccggaggactga

SEQ ID NO: 335217 - DNA, 336 bp, Pseudomonas aeruginosa
atgagtgaggtgaagcggtactactcgttcttcacaagccatccgggagattggcgcccctgctccaaggagcaccacgacatggtcagagcaaaccctcaggactggccaggctatgaagttagggagttggcagttattcccgagggccatgtggtggtcagcgaggggctgttgcgcgaggcaaggcgacatctcggaaactggctggaactccacgagtgcgagtgcgaaggcggctttcattactgcgggcgcgaacaggtggcgaagacccatcgggaacttcgctccctgctcgacgaggggaaggaggatgatcgagatgaagcctga

SEQ ID NO: 335218 - DNA, 282 bp, Pseudomonas aeruginosa
atgaagcctgaagcctggaaaatcacgggtagccgcacatggtgcgacaaggttgtggaaatagaagatcgtgcagaccgctcgattcaagagcgagatgatggatcgttcaaggttccgctctacgccatccacgcgggccatgtggtggttccgcgggagttgctggaggaacttcttgaggccgcgaaggacggtgcggcgcacaagggagaatacctgtccaagaagtatggcgagccagagctgttcgcgaagttcgataccctcctccagtcctaa

SEQ ID NO: 335219 - DNA, 480 bp, Pseudomonas aeruginosa
atgaccgaccacgcagagctgcggaggctggctgagagggctgatgccttgtacggaatgcctagcctagagcacgaatacgccatatccaagttcagggttgcctccactcccaaggccatcctcgccctgctggacgagatcgacgggctcaaggcggagaaggaggcgctgcgcaagttcgcagccgaggcatatcaagttctcggcgctctggacgcacccgagaatgtcctgaacaacgcttcggatgcagcaagcggggatccgttacgccacgaaacgctactgcctttcttcgctgaagactatgaggcgctgcgcaaggatgccgcgcgctaccggtggctgcgagagcgagacctcgaaacgatcagacaaggcggtgtattcgccgggatgacccctgagaacatcgtactcaaccaggaagacctggacgctgtaatcgacgcagccctagaaggagcaacgcaatga

SEQ ID NO: 335220 - DNA, 357 bp, Pseudomonas aeruginosa
atgaacgaccgcgaactactcgaactggcggcgcgggcggcgaggtacagggtcaatgaaaaattccagtccgaacgcgactctatagttgaccctgctaccgcaagcctttgccttcttggtggctgtacggcctggaattctctcaccgatgacagtcatgcgctgcggcttgctgtgaggctcggactcatagtcaacccagaccgagataaccagcgaaccctggtatcgaaccaggcaggccatgaatactgcgcgatctattgggacaagctaggcgagatggcagcaaccaggctggcaatcaccgaggccgccgccgagatcggcaagtctatgggaggtggggagtga

SEQ ID NO: 335221 - DNA, 342 bp, Pseudomonas aeruginosa
atgcgggaggtattcgagaaacgaatgaccggcatattcgacctgtccgcccacgtggacagccagggaaacatccgatattcggacagccacacacaggccgcttgggatggatgtcaattggtggtggatttattcgagccggcgccatcagccgaggcaaggatggacctcgactacatcggaaggcttcatgctctggagaagctgagactacgcatcgccgctcacatgttcatcagggagaatggagagctgctcggatatggcgtaacagtccctgagatgcgtgagttccgggaactccttatcccgttcaacggcgaaatcaagatcaagtaa

SEQ ID NO: 335222 - DNA, 150 bp, Pseudomonas aeruginosa
atgtttatcgagtccgccatagtcatttacgctctggaactcgacatttccagaaacgccggatggagttcccttgatttcgaatcggcgactcgacttcggcgcgaccatgtcggcatcaacaacatagtaggcattgccagcttttaa

SEQ ID NO: 335223 - DNA, 3087 bp, Pseudomonas aeruginosa
atggctgatgttcgcattcgtcttgtggctgacctcgatagcgcattgcgtgaggtttcagggttcaagaaggaatatgctgatcttgttcgggtggttgagaaaccactccgccagataagtgcatttcgtgacctagagagcgcgcttgagcgtacgcagcgcgagatgaaccgcgctcgggataatgtccgcagcctcggggacgaactggccaggacggcagccccctcaagagcgttgcaagctagctaccgggatgccctggcggaacttggtaggcttgagcgatccgaaagaactcttcgagcatctatcgcgagccgaagaggcgagttgcgtgacgctggagttgacaccaagcggcttgcagaagagcagcgtcggttaaacgatgaactgacccggcgcctgggtgccggtcgcgcagacagggcgatgagcgctgcgcgcgaggccctgggggttgggcagcttgagcgggagcagcgagccctggttgagctgcgccgccagtatcagctgatcagccaggatgcaactctttccggaaaacagcgtgcagaagccgaggccaattacaggcgatctgtcgatcaatctctgggcagactgcgccagctgagacaggagatgtcaggtccggctaatcgacctgatagctctctgtcgtcggcaaagaacgccctgggactggcgtcgatcaagaatgcgcagcaggctcttgttgaactccgccgacagtatcagcaggtgcgcgactccggggtgctgtcgtctcgcgaactgactatcgcgacagccaactatcagggccaggtcaaggcgttgttggcgactttgcgcgagcagcgcacggctcttacccaatctgcagcggagcagcgccgcacggctgatgaaatagtccgccggcaggctgaagcgcgagccgctgtcaatcagctggttgcggagcagaaaaagtccgccatagcagcccgccagcaggcgcttgaggccgcgcgaggcgatcttggggtcagtcgctatcgggctctcgccgggcaactgcaacagctacagttgcagtatcagaacctacgagccaatggcaacctgaccagtcgtgagctaggcatcgcgcaaaacacgctgaatcagcggctgcgcgagactcagcgagagctgaagcaagtggcgcgcggctaccaggggcttaatggccttggtgggaacattctgtctggccttggcaacgggctgggaggagcgccaggcgtcgcgaacattgctgggctcgcccgcggaggcgctgcggttggggcggctgcagcagtgtcggcgggcctcgtaaagctggcgtcagacgccgtgaaggggtcggacgaaatctcccggctggatgcgatgctgcggctggccactgcgtcccaggaggagttcaaccgagcgcaaatcgagcttgatcgagttgccgatgatactcaaggggatgtatcggacctgatcgttctctacagtcgtctgcagcgtcctctggcggaactcaaaatggggcaggaggctgctcttgagacaaccgaggcggtaacgctcggcctgaagatttcgggggcgtcagcagacgaagcagcaaatgccgtcaggcagttgtcgcaagctatggcgttcgggaagctgaaaggccaggacttcaactcggtaatcagtttcgccccgaggctggctaatgccctggcggactcgctcggcgtgacgtccggcgaactgaaagagcttgctggaaatggagagatcactgccgaagtcatcgtcaaggccttgcgtgatgtactgcctcagctgaggaaggagtacagcgagttcgcgccagaagtcggcgcggcttgggaccgtgtttggaatgagcagcgcaaggccctcggccggatggcgaaggaatctggaattaccgactggctggccggaaagctagatagttacgcgaagaacttgaacagttccaacaatctgatccgtaagggacaggcggctgtgactgactcaatgtccgccgaagccgcacgtcagcaggaaatcattactcggcaaaacgacatgctgcgccgggcaaaagatcagcggattgcagatctccagacggaggccgtgcaggcaaaagcggcgctggctcagtcgacaaaggtgctacaggacgccttaaagaaacaggctgaggttcgcaaagagttcgctgatctggtgaaggggatcactagtgcgccggccggtgatccatccgttggagatgttgggagcgcaactgcgaatgcccgcaatgctcttactgcgggaaacacaagcaaggcgattgacgaagccaggcgtgggctagagctgctccagcaattgaaggatgcaggagagaacagttacgggtttgccggtatggccaaggagttggagaggatcgccaacaaggccgccgaggttgaggcgggaaatgccaaggccgcccagcaggtaaacgaactgaacctggccgacttggagaagcggatcaaggatgttgagaacgtccaggtgtccttcggcatggacttcgaaagcgttgatgcactgaaggctcagttggatgcggtagctgcggatctcgcaaagcggatgtttatcccggttaccgttgtgccgggcgttggtgcgggattgccgggcggtggagggggggcgccgaagctgcctggctttgccggcggcggccggatcaatgggccagggacggggacttccgacagcatcctggctcgcctgtctaatggcgagttcgttgttcgcgcagcagcggttcgccattacggtccggatgtgctcgatcggctcaacagcctgcgcgttccgaggttcgccgacggtggcggggtgaacattcccaggctgctcccgagtatcccggatgttccgtcggcactgttgcagcagtcccgcagccccgttatggagagcatgggatcgctgactatcaacctcggcggtcaggatagcgggtttactgtttacggaacccacgacacgctccgcgatatacgcaaggccgcctcgaagttcgggcggacgcgcccaaaatga

SEQ ID NO: 335224 - DNA, 303 bp, Pseudomonas aeruginosa
atgtccgagatgaccgcaagcaaggttgtgaaagtgggtgaagcggaagtgatcgttcgtgaactgagtgttgctgatgtacgtgcactgatcagtgcaccgcaatcttctgatctgataactgaggctttatttaaggatatgcgcctgagtgatattccgacgttcacctctttgagcgagggcgacgtagagattatgcgaccaagcgagctgtcgctgctgattaagcactgccgggagatgaaccccgattttttcggcatgctggaccggctgatgagtccaagtcaaaagcgttaa

SEQ ID NO: 335225 - DNA, 753 bp, Pseudomonas aeruginosa
atggctatcgagaaagagacgtatgtgatcggcggacccttcaagatccgcgagtccggcgctaccacccccttccagttcgctggcctggtgtccactatccagcagaccatcgagaccaacgagatcactttgccggataccaccaccccgcagggcggtgagtacgatgccgtttcgcgcatcacttcggtcggtttgtcgatcaacttccgcgagctcaagaccagcatcctggctgccttggtgtggggggacgccaccaatgttccttctgccacccacaccgacgaagcgcacaccgccgttccaggaggcacgatcgcgctcgacttcatgccgctggagatcaccagcgtgaagagcgatgacggcaccactacctacgaagagttcgacgactggaacatgaccggagctggcctcgaaatcgttgaagggggtgcgatctctgcggccacaccgatcaaggtgacctacaagtccgccaccgtcgatgtgatcgaggcgctgaccaacagcggcaagacgttcgagttcctcttcgagggcgagaacgccgctggtacccagcggcgcatccaggcgcgctacttcctctgccgcttaaacccgtcgagccagcaggattggatcaacaccgaagacttcctggccgccgaggccactgccaaggtgctgatggacccaaccaaggtcggtgctggaaagtcgaagtacttcaacatcaagaaggaactggcgacggtgtga

SEQ ID NO: 335226 - DNA, 231 bp, Pseudomonas aeruginosa
atgacctcacaaccaaaaccgggccggatcaccaccagccccaacggtcgcccggtgatcgccgggccctggccgtcctaccgtcaattccgcgacctgtgcgaaagcgaccggcttctgatgtaccgccacgcgaagctgtgcagagcctcccttgaggtccagggcttcgagatggctgaggactacgacgctttcgtgcggcgcgtcaccgaggagctcgacatatga

SEQ ID NO: 335227 - DNA, 309 bp, Pseudomonas aeruginosa
atgaacctctcgacgctgctcagcaatctgtgctcccgggtcccgggcgaagacctgaccgataaacagattctctccatcaagtcggatctggggtcggctcggaatgctgctcagaacatggcgcttggtgtcgccgcagtcgggaatctgctggcgaacgttggcgctgaaggcgaagtaggccaggaaacctcagagcgtctcggctggtttctggaggagatcgggggggccatcttcatgttggtggagctcgagcaggtctgcacggaacgcatcaaccggcagaaggaggctcagcaatga

SEQ ID NO: 335228 - DNA, 390 bp, Pseudomonas aeruginosa
atggattgcgccaccaccatcagcactgatacctggcaaggccgtctcggcatgggtctcgctccgcgcgaactggaggccaccctgcatgcggcgagcgacctgaccgcaaaggagatcgccaagctgatgggcatcgcgcctggaaccgtatccaagcggttggatgatgcgcggttcaagctcggcgccaagactatccgcggcctggtgctggaggcgtacaagcgccagatcatcagccccctgtgcgttggcatcctcgccatcctcgcggcagcacaacccctccttgatgaagacccggccatgcgggcgcgccgtggcggcgaaaggaagatcgaaactcgtctgactgctcgccgcgatggcgtggcctgggtagcgtga

SEQ ID NO: 335229 - DNA, 708 bp, Pseudomonas aeruginosa
atgacccatgccctgtttaaacagatcgatctgaccgccaagctcggccaggacggtagctcgctccaggccatgaacgcgctgcgcgtcatccgggaaacggtagcgaagcacctggccggcgccgaggctgcagaagagcatccgctcgagcgcgccgtcctggcgctccgcaccatcgccgagttcccctgtcccgagcaggacaacatgccggcggcgaacatgcgacagatcgcactggcggcattgagtggcgctggagcgagttcggagccgggcaatcctggcggcgaacctgtttccggaccgggtaatgccggcgagcaaacccaccccgcgccgggattagcccgcgagcacgccgaactacgccgaattgctgtcgcgctcaagaacccgctgctcagcggagaggaggcctcgaatctgatggtgcgttacgaggccttgaccatgcctgaccacatcatcgcgctgatcgacggacaggctcaggctaccgttccgaagggctggaagctggtaccgcatgagccgaccccggaaatgctggacgcgcgccgcgacagcgaggatggaatggacggctatctcgttgaggataccgagtactacttcccggatcggggtgcggttcgcgacttcctggcatgcgtctatcgcggactccttgccgcagccccagcgcctggaggtgagcgatga

SEQ ID NO: 335230 - DNA, 690 bp, Pseudomonas aeruginosa
atgaggggcgcaacgttgcacaggctgatcgatatctacgccgacagtcgccgtgacctgcgcgtccgtttggcggccctccggatgttcgtccgcgcggtgtgcgccgatcgcgacaccagcttcgccgagcatcgcaaggcgtgtcggcggctcctcaagggcatgccgttcaccgagcaggcgcttgaacgcgaacgagcggcatatctggatcgcaccagagctgcgaggcaagccatggaggagagcggcgcctggcttatcggaaactcagccatgatcgagcaggccctgtcgttcgacgatctgtgcgacctcctggtggtgaaccatgcccaccgtgccgaggctgccgaggtctgcgcgggcgacgccggagtcgttggcggcctgctctggattggcggggagttcgaggacagcgcggaccacaagagtggccgctccaaccgagggaacacggggccacttaccgcagcggtccagaacctgttccagaagttcttgcttgaaaatccgtcggccatccctgacccgttcgccccgggcggccctttctacggagttccgcgccaggaaatggcgccgaacggaactgtgcagattcggcggccggcactcaccgtccacagcaaggatggatcgatccgcatggttgagcgaaagccggaggtgattggtgagtag

SEQ ID NO: 335231 - DNA, 348 bp, Pseudomonas aeruginosa
atgaccgcgcgccgactgacccgggccgaaatgaaccacctgcgccgcctgatcggttgggttcgctgcgaggtgggggcagagcccgaggaaatcgtcaccgccgccaaagaggcgctcgaccacttccaaggcgcgtcggaggacggtaagcggaggttgctcgagcactaccagaagtcagcagccataccgaagtacatccgatctgcgatcaaggccctggagaaggtgtgcctggaagagccggccgaggtggttgacggtgagttggttgcccgcacgcgcgacgaagcaacacagcgccttggcgtggcgcgcaacgaagagggtagcagccatggctag

SEQ ID NO: 335232 - DNA, 831 bp, Pseudomonas aeruginosa
atgacgcgaatgccgcgcgcgccaaggcgagacgatgaggttgactccgtaaggacgatcttctggtttcattgcttgggagatcgcttgggaaagcatgaggcacgtgcagttcagcgtgcggttgcgcccaacaccatcggcgtggatagccacggcgaccccatcaaaaatggcaagtttctggcttataagagaggcgcgaggactccatccgaccggctagtggagcaaatcgagcagcaggtaccacgatcagctcggagcctgaatcatccgctttggcaggtgcttcggacgtcaaagtcgatcaagacctcagcgtgccagtgggtccggcaacttgatcccgagatccagcgctttgcgctatcaaatggagaggtgtcgatgagctgggggcgtcacacattggaacctttggagcggcgtgcaagcctggatagccttgccgctcttacaattatgatgcgcctccatcatgagcaaggaaaccagctggcgacgtgggattgcgcccaagcggtttttcgagtgctgcttattctgggcccgatgttcgaagaacatgccattgcagaacagatcttcaaaatatacgtctcgagggtgtttagccttgtcgtgctcccaggtaggcgtattgcgctggaggactatgactacccgacacgatcgggctttctgaatctgctggcggatgaattacgcgcacaatccgaaccacaagcagctcgtcgattgccaaccttctatgcactgcaggtactggatggtaaacagcaacgagcccgattgctcttcactctgccagtaatagaagtggcttga

SEQ ID NO: 335233 - DNA, 1557 bp, Pseudomonas aeruginosa
atgcggaaaatccgcgatgctctggtgtactcaattgatcaacggctctcttcccgcaaagtcgggcaaatcatcggcattcatccttcaacggtatgcaattacctggatcgctttaaagcatccggactcgcttggccgttgtcggaggagcttgacgatgccgcgttagagaaaaaactctttccaagtgatgtggttcgaggccatgcctccgaaggcgacgtcgattttgcttatgttcataacgagttgcagaagcgtggagccacgcgagccatgctctattcagagtggctggagcaaacctccatgaccgtacccattggctaccagcagtactgcaagctctacaagaaatacagaaagtcacttcgtatatcgatgcgacgtaacgagatcttcggagaaaattgctacgtcgactactccgggatgaccatcaccatccataaccgggataccggtgaaaaacgaacggcacaggtttttatcgctgcgctaggaggctctagctttacctactgcgaagcaacatggacacagcgcattcgcgattggattagttcgcacgttcgtatgtttgagtatttcggcggcgtcccacgcgtcctggttcctgacaatctcaaagctgccgttactaaggcagaccgttttgagccggaaatcaatccgagctaccaggccctgtgccgctactacggtattgcaccgctccctgcgcgaccgcgatcccccaaagataaagcgaaagccgaaggtgcagtgctcttggcgcagcggtggattttgtttgccctgcggaagcacactttctactccctggaagaggcgaatcgaaaaattcgcgagctgcttgaccaactgaacagcaagccctttcaaaagcgggtcggtagccggcacagccagtggttggagcatgagcttcctgctctcagactgcttccagctcagccctatgagttcgccgagtggggcaaggttcgggcgggtactgactaccacgtacgcatcgatgggcacagctacagcgtgccgtatcagctccgtgggaaagagtttgactatcgcctaacagataaggtggtggagctgatcttcagtggccaatcggaggctgtccatcctcgcagcttcgagaaggatcaaacgagcacccaagcttcgcatcagccacgtgaacaccgtgaaatgcaatgggatcgggatgaggctttggcttgggcatctgctatcgggccgaacactacttcggttctgcaggccaagcttgaggggataagcaatgtgctaatgggctatcgcgctacgcagaccatgaagtcactgctcaaagctcacggccaagtacgcctggaagaggtttgtgcctacgcggcagcacacggcataacgaagagtgctgacctgcgcaatgtgctgcataagcgcctcgatcgccttttcgcccaggaccctgcctcgcctcagacgcccgcgagtgaccatcaaaatattcgcggagcacgctactacgacaacctgctttccaccgagatggacgaggcctag

SEQ ID NO: 335234 - DNA, 765 bp, Pseudomonas aeruginosa
atgatgaacaatcccaccatcgacaagctgctctcactgaagctacccggcatggccgaagagtttgagcggcagctcatgactcctggggcgaacgacctgccattcgagctgcgagtgaacagccttactgatcacgagatcactcttcgcgcgcataagcatttacaggcgctactcaagaaggcctgcctaccaatctcggcagccagcgttgaggatgtggactatcgagcgcagcgtgggttggacaaggccacatttctgactttggccaggctggactggatcaggcaccagcagaacctggttctgacggggccaaccggcacaggcaaaacgtggcttgcttgcgcacttgcgaatgcggcatgtcgtgcagggctgtcctgtcacttcattcgaatgtcggctctgacagaaatgctgacggcggcacgagcaacaaccaatttggcgcagaagttagcgcagctgcatcgtttcgaccttctgattctggacgactggggcttggagtcgttttcccgccatacgcaaagtagcctcctagagttgatagacaagcgtcttggcgcacgctctacgctgatcaccagtcaggtaccgatgaacctgtggcatgacctcttcgataacaagacgatcgccgatgctgtgatggatcgcgtgattcacaactcgcaccacatgcagttcgctggagagtccctgcggaaggtaaaggggctcgttacaaagacccttgagaagtcttccgtgtaa

SEQ ID NO: 335235 - DNA, 516 bp, Pseudomonas aeruginosa
atgagccccaccagcgccctacctgccctagcctgcctggctgttgcgctcgccacctgtgagttcattcgtcgccttggcagcgcgcgcctgcccgcttcccggttcgtcaccatcgacggcctgcgcggttacctggcgttcttcgtttttctccatcactcgtccatctggtactactacctgaaggatggtctctggcaactaccgccgtcccggctctacgcccatttcggccagaccagcgtcgcgctgttcttcatggtcaccggcttcctcttcgctcacaagctcctgcacagccgcggcacgccgatcagatggctggatgtctatgcatcgaggattgcccggctgctcccagcctatctcctggcaatggcactgctattccttttggtgttcacggccaccggcttttccctacgcgaggcgccctcggccctgcttggcaagatgctcgactggttgctcttctcgataccgagcaagcctgacatgaacggtttcatctag

SEQ ID NO: 335236 - DNA, 303 bp, Pseudomonas aeruginosa
gtggaatatgcgctgaaggagagcgacggcggagtcgagctgaagtgccggccaagccgcgaagcggagatcttcagctccttccccaggcggctgtggccgtcgctgggcaagatcaccacgccgacccgcgtgctctacggtgaccgcacctaccctttcgtcgccaagtcggtggcgcgctggtgctcgctcaaccctcaggtcagcgcccacgtggtggtcggcggccactgcttcatgcaggaagacccggccgatgccgccgaacgcgtacgcgactttctcctgcccaatccatga

SEQ ID NO: 335237 - DNA, 234 bp, Pseudomonas aeruginosa
atgagatattcaaatggaaaaaaagtagagctgggagacaaaattgatcttggcgacggagatacagctataattgtcggaatcattgatgagaatctctactcagaagaataccccaaaagtgattgggaatacttaaaatcaggactattgatgctcacaagagactcaacactactccactacccaaaaatagaagacgagataaaactaataagcagaaaagccaagtaa

SEQ ID NO: 335238 - DNA, 5220 bp, Pseudomonas aeruginosa
atggaaaacgaaacgtcagatgtgagcaagcagcagttggaggccagtctcgcccaggccatcggcactatccgcagcctgaaggagaagctggcgggaaggacgcacagcggggccggaccgatcgcggtggtcggcctgggttgccgcctgccgggtggcgcggatagccccaggcggctgtggagcctgttgaagaacgctaccgacgcgaccggcgacatgcccgccgagcgacgctacgccaccgattactacgatcccgacccggatgtcccgggaaaggcctacgtgatgcgcggcggcttcgtcgaaggcgtggagcgcttcgacgcggccttcttcggtatctcgccgagcgaggccgagggcatggacccgcaacagcgaatcgcgctcgaagttgcctgggaagcgctggagcatgcggctatcgacccgttttccctcgatggcagcaagctgggcgtgttcatgggggccagtaccaacgactatgtacggctgcgccagcaactcggcgaggtggctgacgtcaatgcgcaccagttctacggcgagaccagctttatcgccggacgtatcgcctacaccctgggcgggcaaggcccggcgatgatgatcgacacctcctgctcgtcttcgctggtggcgctgcaccaggcctgccagagcctgcgcagcggtgaaagcgacctggcgctggccggcggggtgaacctgatcctttcgccctatggtttcgtcctggtcagcaagttgcgggcggtcgccagcgatgggcgttgcaagaccttcgacgccgccgccgacggctatggccggggagagggctgcgtggtgctggttctcaagcgcctggccgacgccgagcgtgaccgggatccggtgctcggggtgatccagggtagcgcgctcaacaacgacggctccagcagcggaatcacggttccgaacatccacgcccagcaagcggtgatcgccgctgccttgcgcaatgccggagcccaggcgagccaggtcgactacatcgaggcacatggtaccggcactccgctgggcgacccgatcgaactgcgcgcgctggatgccgtgctcggcgcgcagcgcccggctgacaggccgctgctggtgggatcgataaaggccaacatcggccacctcgagccagtggccggcgctgcgggactggcgaagatcctgctcgcgttgcaacacgacgagttgcccggacaggtcaacttccacactcccaacccacgcgtcgaatggcgacgcatggcgttgcgggtggtgcgcgaggcgactccctggccgcgtcacgagggccagcggctggccggcgtgagttcgttcggcgtgaccggaaccaacgcccatgtgctggtcggcgacgctacaccgcgggcgcgcggagcgggccggggcaatccctggcagctgttcaccgcgtccggccgtggcgagacaccgaggcggcagatgtgcggacgttacgagcgctatgtcgccgaacatccgcaggtgccgctggaagacctctgctatacggtgaacgccggtcgcgcgcacttcgagcatcgtttcgcttgcgtcgccgacgaccgtgagcgcctacgcgagcaattggcggcctacgcttctcggaagctggtcggcgataccttcgagggtgtctgtcggcctggtgtgccgccggcatccgcctggctgtttcccggccagggctgccagtatccgggaatggccaggacgctgtacgacagcgagctgccgttccgtgaggcattggacgagtgtctcgtggcgttgcgcgggatgggtgtcgagctgtcctgcgccttgttcgagtcgacgccggaggcagaggcgttgctggcgcagacacgctatgcgcagccggcgattttcgccgtggaatacgcgctggcccgcttgtggatggcctggggcgtgctccccggcgcgctgttcggtcacagtttcggtgaaattggcgccgcctgtatcgccggggccctcacgctggaggacgccctgaggatggtcgaggcgcgcggacgcctggcccaggaactgatgaccgccggaggggtgatgcatgccgtgaacctcggtgaagcggaattgctcgggctgctgcgcgagcaaggattggcgggtatcgagctggcggcggtgaacagtcccgaggacctggttgtcgccggtcctgaagcggacgtcgaagtgctgctggaaaaactcgcggcgatgcaggtgaggacccgcaagctcgcggtttcccacgccttccacagtgccgcggccgagcccatgctcgagcgtttccgcgaggtagtccgcgagatccgtttcagcgagccgcggataccgctggtgtccggcgtcagcggacgcctgcatacgctggaaagcctgtcgtccgccgactactggtgtgcccatagccgtgacagcgtacgtttcagcgacggcgtacgtaccttgctggagcagggtaccgagctgttcctggaagtcgcgccggaagcggtgctgacaccgctggtgcttcgtcaccaggtggaccggtcattgctcgtcgtgcccagcatgcgccgtggcggtgatgcagtgcgggaaatacgcctggcggctgcgcagttgtacaccggtggcgtcgacctggattggcagcgcctgcatgcgcacgacggcgccttgcgccaggcgttgcctggctatgctttccagcgcgagcgctactggtttaccccggcccgtgcccaggctggcgggcgcagccagattggcggcgtgggacgcttgctcgggcaaccgatcaatgcgccattcccggtcttcgaggcgaccctcgacgccgatgccatgctggcgctgggcgccacggctagcgaggagctggtgcggctggagccaggcaggctgctttcgctcctgctcgaggatgtccttgaccacctcggtctggatgacttcgagctgagcctggagcgactcggtgagggcctggcgatccatcctggcgatcggctctatctctataccgagctggaagccttgccggaaaaatgctggtccgtcacctgctcgctgcgtagcgaggccgaatgccaggcgggcctgggttggcgcgaggcggtcttggcgatggtccatgcgctgccggcatcgagcgctctgtcgccgctggacggggaggggcggtcggtggaactcggcggcgctgctagcgggtgcctgttcgcccgcctgctcgacggcaagccggcttccgccctcgagtcgatccgcaggatgcgcggacgccgtgcgctgttgaaccagacctggcgatcgctcctcatgccggccgaggatggcgtgggcttcgactgcaacctttacgacgccggtcaggagctcctcggtacgctcgaggggatgtcgctcgggatggcgctggaagatgccaggttggtggaacgcatcgcgcaacccgatgtgctgtatcggctcgactggccatcgcggccacgccagccaggcaacccgtgtctcggcgaacgaggtttcgcggtgctgtcgtcggatatcgaggccgctcgccagttggcggcgctcatgcaggcacgcgggctgcgcgcgcaagccttccagcctggccaactgcaggaggcgctggatagcgtcgccccctgcgatatcgtttttctcgacgaacgcgcaaggggggccgggccatccctggatagcctggacacgctgcggtcacgggtactgcatccgttgctggcgctgatccaggcgattctgccacttggcgacgaggccgttggccggctctggctggtcacctttggcgcccaggccgccgggctcgccagcggcgtgccggtgaacgtggcgggagtcccgctatgggggcttggcaagagcatggcgctcgagcatccggagcactggggagggttggtcgacctggcgccggacgaccccgactggtgcgccaacctgctggacgaactgctgctgaacgatggtgagaatcaggtctgcctgcgtcgcgatggccgccgggtgcatcgcctggagcgcgacaccggcactggttggccgaactccgtcttcgccccgagcaaggatggctgctatctgatcagcgggggaatgggtgggataggcctgggcatggccgattggctactggcgcacggcgctggtcaggtggtcatcaccggacgcagtccggcgcgggcccagggcgagaaactggcgcgcttcggtgcggcggtctcccgggttcgctacgtacaggcggacatcgcctcgaaggcggagatgagcgcattattcgaggagctgtcggcgatgccgggtgggctccgcggaattttccatgccgctggcatttcgattccacaggatcttcgagacgccgaccgcgacagcttcgaccgggtgctgaggccgaaggtggacggcgcctggctgctccatgaattgtccctggggctggaactggagttcttcgccatgtgctcgaccatcgcttgcgtctggggctcccagcacatcgccagctacgccgcagccaatcagttcctcgatggcctcgcggcctatcgccatgccctggggctgcccgcgctggtggtcgactgggggctgtgggctggcggtagtcatctgttcgacgaggaagtgctcggtttcctcaagagcgttggcctgaaaccgctggcgccggcccagggcatcggcttgctggcccgcttgctgggcagcgacgttggccaccaggtgatcgccggggtcgactgggcgcgcttcaaggccttgctcgagtcgcgcggggcgcagcccctgctggagcacatcgaggtcgaggacacaccgaccaggcccggcgatgtcgcggcggaccagggcttgctgcggaagctttccgcggtggaggggcgcgagcgcttccagttggtcgatgactatgtctgggggcagtacgccaacctgctgggtgtgaaggtcgagcaggtccgggccaagctcgaggacggaggcagtctcatggactacggactcgattctctgttggtgatggagatggtggcgcgttgccggcgcgacctgaaggtgcagataaaggcccgggaattcctcgagtgccccggcctgatgtggccggatttcctcgccaggtccatcgaacaacaaggagtgctcgacgccgtatag

SEQ ID NO: 335239 - DNA, 6684 bp, Pseudomonas aeruginosa
atggttccgaaggcatctgcgggtttcgaacccgtcgcaatcatcggcagcgcttgccgttttcccggcggagcgtcgtcgccggaggcattctggaacctccttcgtcgtgggaccgatttcgtcgggccggtccccgcgggccgctgggatggcgaggcgattcacgacgctggtgcgagccgtcccggtaccacctattgccgggagggggccttccttgatgaggtggaccgcttcgacgcgcgtttcttcgggatatccgcttccgaggctcgcgaaatggacccccagcagcggctgctgctggaggtcgtctgggaatgcatggaacgggcggggctctgctctgaacgcctgaaaggttcccgcactgcggtctacgtcggcatgctgggcatggattaccttaccctgcatgcgcgcgaggccggtatcccggcgatcaatccattctatgcggctggcaaggagttcagcttcgccgccgggcgcatcgcctatcaccttggcgtgcacggtccggcgatggcggtgagcaccgcctgctcctcttcgctggtggcgattcacctgggttgtcgcgccttgcagaatcgcgaggcggacctggcgatagccgctggcgtcaatctgatgctgtcgcccgagctgactatctacatgagccagatcaaggcgatttcgccgagcggacgctgccgggtcttcgacgccgccgccgatggcatcgtccgcggcgaagggggtggcgcgttgctgctcaagcgtctggaggacgctcgagccgacggcgacccgatcctggcggtgattcgtggctcggcgatcaaccaggacggcgagagcgccggccagaccgtgcccaacgccaatgcccaggccgctgtggtacgcgcggcactcgacgctgcggggctggagatcgacgacatcgcctatgtcgaggcccacgggaccggaacgcccctgggcgatccgatcgagctgtcgtcgctggccgaagtcttccgccagcggaagaaacctctgctggtgggatcggtcaaggccaacatggggcacctcgatgccgccgccggcatggctagcgtgatcaagacgatgcagttgctgcgccatggcgaagtaccgccgcagttgcacctggtcaagccgaatgcgctggtcgactggcagcgctccagcctgcgggtggcaacttcccttgagacactgccggaaggaccgcgcctggcaggcgtcagtgcattcggcctcagcggcacgaatgtccacctcatcctcgaaggggcggatagcgctgaagcgccgccggatgctgtcgacattcagcggacctgggtgctgccggtgtcggcgaagacggaagcggccgtacgcgagctggcgcggcgctatgcccaggcgctgccggaggaagacgcggccctgcgcaccttcgtcgcccgggtggccagctaccgcgaccaccatgtccggcgcgcggcgctggtcggtggcgacgccgcgagcctccggcaacagcttgcgtatcttggcggtggaacgcttgctgtcagcgagatacgcgacggcaagccggccgacgggccggttttcgtctataccggccagggcgcgcagtggctcggcatggccaccggcctgctgcaacgcgagccggccttcctcgagacgatccgcctgtgcgatcggcacatgcgcgagtggtccggttggtcgatcgaaaccgagttgctcaggccggcgggggagtcccgtctgcacctgaccgaaatcgcccagccggcgattttcgccatccaggtcgccctcaccgaatgcctgcgccgctggggtgtcacgccaggcgcggtggttgggcattcgatgggcgaggtggcggcggcctggtgcgccggcgccctggatctgcgctcggcggtacaggtcatctatcaccgcgccaacgccatgaagggtaccctcggcggcggccgcatgatggtggtcggggcttccgccgaagagctgcaacccatgcttggcccgtcgctggaaatctcggtggtcaacagccacgtctcctgcgtggtatccggtgaggcgggcgccgtggccgccctggaacagcgcctgggagaagccggcaggttcaccttcctgatgccggcaccctatgcgttccattcgtggcagatggagccgtgccttgccgacatccaggccagtctcgccgacatcgagccggatgccgcgaaaattccatggatttccagcagcgccgctaacctgcagggcgaatgcgccgacgccgcctactgggtgcgcaatgcccgcggagtggtgcgcttcgatcgtgctatcgagcgactgctcgaggacggcgcacgcctgttcgtcgaattggggccgcacgcggttctggcgcagtcgatccagcaactggcggtgcgcgccgggaaagcggcgcgggtgttcagcgccctgcagcgcgagggcgatggatccacggagctggcggctatcctcgccggcctttacgaaaacggtgtggcgccggactggaaggcataccagggggacgctggcttcgtcgaactgcctacctacccctggcaacgcgaggcctactggttccaggcgacgcagggcgtgccggcgcgcgcgcaagccttgcatgccagggtgcaggtgttcgacgctgagggacgactctgtgccacggccgaggatgtcgccctgtgcacggtcgacgagcctgcggcagcgcttgccaatgttctggcgaagaaggctggggcgcgcccggcggtcaccctggcgcaggcgcgggaagtggtcagcgcggcgttgtcggagatactcggggtgccatgcgacgagctggatgccgaaaggggttttttcgaactcggcctgacctcgatctcgctgatcgagttcaagcgcaagctggaggcacgggtgggattggaactgcctgccacggtcggcttcgactatccgaatctggaggcgctggcgcggcgcctcgagcagttgggtgcggcgaaggaaatccagccgacgacctgtgcgccggccgcgcgcggggcggataccggacacgaggtggcagtgctggggatggcttgccggctgccgcgtgcggacagtcccgaggcgctctgggaagtattgctcgagcaggcgacatgcgtcgtgccggtgccgtcgtcgcgcctgaccgagccggtcaacacccggcgccatgccagcctggtcgagcgcgtggaagggttcgacgaggactttttccggatctcgccacgggaagcgggcagcatggatccgcagcaacgcctgttcctgatggttgcctgggaggccctggagcgggcaggtattccgccgcatgacttgcgcgaacgccaggtcggtgttttcgtcggcgccaatgcccacgactacgaggcacgtttgctggcctgcgccgccggcatcgacgcgaactacggtaccggcagcgcgttctcggcgatttccggccgactgtcgcatttccttggcctgcgcggtccctccctgaccgtggacacggcgtgctcgtcatcgctgacggctgtgcacctggcctgcaacagcctgctagccggggagtgcgagattgctatcgtcggcggggtgaacgtcatcgcatcctcggcaatcttccaatccatgggcgatgccggtgcgctatcggcggacggcacctgcaagaccttcgacgatcgtgccgatggctacggccgcggcgagggttgcggcgtggtgatcctcaagcgggcggaacgggcgcgggcggacggcgaccgggtcatcgccgttctgctgggctcggcggtcaaccatgacggcgcctgcgcggggctcacggtacccaacggaccggcccaggaggcgttgattcgcgaagcgctggccaacgccagcctgtcggccgcggcggtgggctatgtcgaggcccatgggaccggcacagtgctcggcgatccgatcgagttgcaggccctggccaacgcctatcgaggtactgagcgcgtgcccttggcggtggcatcggtgaaaggtaacgtcggacatctggaggccgccgccggtatcgcttcgttgatcaaggcctgcctggtggtcgagcgtggggtgattcccggacaggctggcttccagcgtcctaacagccgcttcgactggcaggcaacgagtctccaggtgccgcaggccaatcagccctgggaggtgccagcggcagaacggatcgcgggcatcagcgctttcggtttcaccggtaccaatgtccatgtgctgttgcgcggtgaggtgcgggaccccagcgaaaggagcgacggcgacggttcgcgaccctggccgttgtgcctctcggcgcataccgacgaggcgttgcgggacatggccgccagctacgagcgcttcctggccgctggcgaagcgtccgcagcggcggtctgccgtagtgccgcgctcggccgcagtccgctcaaggcacgcctgctggtgttcggacgcggttcagccgagctcgcggtggcgctcgcggactggcgccgggggatcgatgcaagcatgcctgctgagctggacgaagggactcgcagcgcgtgcacggccttcctgaatggacagccggcggactggctcgcggtgttcggcgatgtccgggcatgggtcgacctgccgacctatccctggcaactgcgtgattactggctcgagtatggcgtccgggagccggcgctggaggatgatcatccgtgcctgctgttgcacagccgtgggatgggtggcgagtggcaatggctgggtcgcctgcccgaggaaaagagcggcgacgagactcactggcatccgtccggtgcgcttctgctggatgccttgctgcaggcgctggcagtggccgagccggagcgcgccttcgccctggtcgagctgcgcctgtcggtgccacgattttcgcgttgcgggccgctcgcttcgcggctgaccttgagcctctcggacaaggcctcgatcaccctggcgttgcgtggcgagcatgaccatgaatggcgtgacgtgctcagcgccgtgccgttggagtgcgcctccccggatgtcgatcagctcgaactgtccccggcggacctcggccaggccgaagccggcctggttgcggccgcgctcgaggggcagcgcgacggccggtacggcaactatcgctttcctctgcgcagcgatgcggctcgtcgacggctgctgctggcggaaaccctcgcgctcttcgaaggcgcccatgccgctcccgtggtcggattcgcccgggtgcaggtcctggacgacctgcccgagcacattgcggtgcgggtttccggcgccgaactggggcgcctgcaatcgctgtacgcggtcgacgaggatggctgcgtggtggccctgttcgaagggccgctgttgctggcggacgaaccagagcaactggccttggcggatgaaccggcagcctccttcctggtcgctcgctgggaggactttccggatgagccggtggtacggaaaagcggcgagtggcggcttctgcttcctggtggagccggcatgtcgcgcctggtttcggcattctcggcgcgcgggctgggcgtccgcgagatgccctgggaggacgtcccggaccgctcggagtggctggccgaggctgcgctcgatacgacctgtgagggcctgctcgtgccctgctgcggtgactgcgacgagcagcgtttcgctgactttctgctcgccctggggcgggcggtggcgacgtgcccgacgggtaagccgatctggttcctgcatccgccagccgagcgtgccgatgccgccgcagccaggaggctcgggatactgtatggggcgacgcgggcgttggcgctggaacaacccgcctggtggggtggggtggtcgagctcgacccggccgacggtcgcggcctgcatcgcttcgctcgcctgcttgtcggcgtgccccggcacgatcacctgaagatccgcggaacgcgggtcttcgcccggtatctggaggtccgaccggccgcgtcgcgccgaatcggtagcgcctcggcggggggcggcacggttttgttgcatgtccgcgccggtaccgacctgacgccctacctgctgctctcgccggtacgccgggcgcggcgcctggtggtgctgtgcgaacagccaccgagactgcccgtggagtgggccggcgcgccactgccggagacattgattgtcgattgcgcggaccgtcgcgccctggccgaggtccttgggcgcctgcaggcggagcagccgatcactggtttcatccaggcacggccggaatggaccgctggtcggttggaagagccgacatccgccacccaggttgccgccgctcggcgcgaaatgcacgcgctggagaacttccatgggttgctggcgggacagccgctggcgttcttcctgattctgggcagcctgtcctcgctgctgggggggcgggtttcgcccaccaggcgatggtcgatggcttcgccctgtggcttcacggcgaacgccgccgcgcgggacttccctgccagttgctgctgggcctgcagaccgaggccgagctggatggtctgcacgaggttcgtcaacgcctgctgggcagcggcctgcagccgctga

SEQ ID NO: 335240 - DNA, 1146 bp, Pseudomonas aeruginosa
atgatcatttccgcttccaccgactaccgcgccgccgcccaacgcaagctgccgccgttcctcttccactacatcgacggcggcgcctacgccgaatacaccttgcgtcgcaacgtcgaagacctgtcggccatcgccctgcgtcagcgggtgctgaagaacatgtccgagctgagcctggaaacccgcctgttcgacgagaccctggcgatgccggtggcgctcgccccggtcggtctcaccggcatgtacgcccgccgcggcgaggtccaggcggcgcgcgcggcggcggcgaagggcgtgcccttcaccctgtcgacggtatcggtgtgcccgatcgaggaggtcgccccggccatcgaccggccgatgtggttccagctctacgtgctgaaggaccgcggcttcatgcgcaacgccctggagcgggccaaggccgccggcgtcaccaccctggtgttcaccgtcgacatgccggtccccggcgcccgctaccgcgacgcccattccggcatgagcggcccctacgccgcgccgcgccgcatcctgcaagccatgacccacccggcctgggcctgggacgtcggcctgctgggcaagccccacgacctcggcaacatttccgcctaccgcggcaacccgaccggactggaggactacatcggctggctgggcgccaacttcgacccgtcgatttcctggaaggacctggagtggatccgcgagttctgggacggcccgatggtgatcaagggcatcctcgaccccgaggatgccagggatgcggtgaagttcggcgccgacggcatcgtcgtctccaaccacggcggccgccagctcgacggcgtgctgtccagcgcccgcgcgctgccggcgatagccgatgcggtgaagggcgaactggcgatccttgccgactccggcatccgcaccggtctcgacgtggtgcggatgatcgccctcggcgccgacagcgtgctgctcggccgcgccttcgtctacgccctggccgccgccggcgaggccggggtgcgcaacctgctcgaactgatcgaaaaggaaatgcgcgtggccatggtcctcaccggggccaagtcgatcggcgagatcagcgccgactcgctggtccgcgaactgggcgcctga

SEQ ID NO: 335241 - DNA, 3132 bp, Pseudomonas aeruginosa
atgaacctgccccgcctaaacgatcagcagagcagtgtcatatggtcggctctgcttcatgagccggaatggatgcctgagatgcgggcacttctgaaatcgaaggctgcggagtcaggcacagcgttcggaagatggctactgagtgaaagtggcatatccgggatttcgaaggcgcacgtacgtgaatttgaggcgtggctcggcacgaatcacacgctgcgtaacgtattgcgtagcatcacccaacgaatcagagatcagattccagggttcccgttagcgcgaattgctattgccatcaagcgggcagcgaacccgatcaatccggacgtctacacagccgagagaattcaacgcagcggccaactggttcaagctctgcaacagggcctgaaaatggatctcgacgcgctgagtagagaagagcgtatcggtctactgctgctgagcgcagcctacagcggcggattgctcgatgtggctcagctgaatgcgatgctcggctcatcgttggaaagcattgagtgggtggcgggaattcccgagatacgtctgcctttatcaatccgtggcaagaccggcgcggaatttcggcagtggttccctgaccccgccacgctggccctgttaattcgctgcgcggatgatgttcaaaaaagcagttacaagatgcatcgtaggaattggcacatgcgctgtgtggatgcatttctgaggaaggtcgatatacctgaacaggatcagccacaaaatcttagtgagctgtttgatctgtttaggatgcaaatgcaactgcggcttccgcaggtgctggtgaattttgcttgccgacaagagtttgtctctcaatccctgcgcccctcatcgtggggcaatatctgcggccaagaggatctcgaggatccggcggggacttatgacgatgaatctgtttcggatggacctgaggatagccctgacccacccgcatggttgctggagctgcgcgatcgggtccgggataacctgcccatcgagatgccgttgcaggcagagggttccggagagcttcccggcctaatccagagttggattgcctacatgctgggcggcgcctctgcatacggccacagtgccgggcgcagcaccatagatcgatatatccgggtactaggcgcagcacttacctctcagctggatggcataagcattttcgagctcgaaattgacgcgctggaaattgtctatgaatccacattggatgcgcaggccacagatagcaaaaggcgtactctggccaaggcaatccacgagtttcatacgtttctgcagcgtcggttcaactatccgccagtcagcccctactccatcctaggcatcggcaaaggcgtgccccgggtggatgctcgcattatcagcgaggatcagtaccagtctgttctgcagacgcttggcacctgcggtctggagttgcgtacaccgcgcttggtcacagcagcgagactgttgttgatactggggtttcggttgggtttgcggcgcaacgaggctctaaagctgcgcctatgcgatttgcatttgcccgagtattcgacagaggacgcagcacgtattcaggcgcgccacccgaacatgcgcagactatccagcgatgaactggccggactagagctgcccgttgatctgctaattcgccctcatgtcctgcgccaactaaaaaccctcaatgcggtccggaatctcccactgcgggtgctgctcgaaccagaagaactccaattgctgattgaatggtatcgggagcggcgggctgaggagcgcatcaaaccaacctcggatttcctgttctgtatcccgcagttgaaaactcaatggatcagcgaaagcgctctgttcccggccctgcacaactgtatgcgcgcagtgactggctctgagttcctgcactaccaccacctgcgacattcctgcgcgacatggctgtttttcaaactgatggcggcgcataaccgcctctcacccgagctgtttttccatgatctacccctgacagtacgctggctgagggatgacctcagattgcgcaaagcaatgctgcccacagacggccctacccggaaaatcgttcatattgtcagtgccattctcgggcatggcagcccaaaaactacgctgctgcattacatccacagcctgccgcaggtcatggccatgatgtggcaatggaacccccaaaattggctattcaacgctgcaaacgttgcccatataggtggcgtcagccagcccaccaaaaaagctgagtatgttgatggcatgtcagttgactgcggtgtgctgctcgacgtcattggccgcataaagccgctcaaagacatccggcatactcggaaaaaatcacatccagttcaggctcagcaggtgaatcagaactgggcgatggggcgcattcaagctgtcgagtcgatgctggcgtatgcctcatatgcagagcagacaggccgcgaggtcaatcttgattgggtcgagttctctgccgaagagcgcgaaatgatgctggagcgggcacgctgtatccgcgatatgctgcagcgcccaggagcccgcggcgcaagccctaaacacaggctgcgacctgctctgcacgcaaaagcttcatcgtcgctgtcgctgttgccatcgccaccgaagcatggaacgcgtgaaggggtggccgactatgcacaacgtctctacgacctgctcgaaggccccgacagcgatcgcgcccagcgtgttattgacgattttgttgagcgctgttggaagacggaaaccacgctgcgattccagcgtgatcgtgacgaagaccatgcacaggactatctgtggctgctcagtgcgataggtgttccgactcaatccattgagctgatcatttatgacaccaacaagccgaggacaaccaagtcttactggcgccagcaacttgggagcattcgccggcccttcagtcagcacgcgccagagagcaacgatgtagcgaacctacacctggggatcagggcgaagcttgaggtgaaggatcaggttgcggagaacattcactccggcgccgccttgcgctatctgatgctgatggcttccatcgactggcatttccgcgcctga

SEQ ID NO: 335242 - DNA, 2448 bp, Pseudomonas aeruginosa
atgagcaagcgcgaaatcctgttgaggctcgcctctgagcagggacagtctccttggatcgtcagtgaaattctcaatctgctaggttttcaccccgaactaattgacctgccacgtgcgattgatcagctcgtacgagtgctccgcacatgcaatgttggtgtgccgattggtctagaaaactctgatgacatcgttttacatgaggcctgcgaatggcttatctccctatcccgccaacccaacatccgagtgcttttgggcgagcagttttggctggggaacaacaggtcggcaaggaatcctgtccaccagcgcggtgtaaaaatttttggatttccctatgcctcttttctgcacatattcagagactacgaaaatgctcaggactacgagcgactgctcgcgcagttgctcattgcatctcataaaacaggcaccgatcgcctgatcagtcagcgctacgaggtttacaaagcgctcggcaacttatgcgaacagcgaaacttcttcatcccacctgagttaaaggtctgggacacctccgagaagtttgtggtgagctgtagaggatttttgcctggaaagtcgggatcagagaatgccgagagttttgctgcaatcgcccgatttgtccgttactgcaacggcgagtcgccacgtgtgggtggcggcggaggcggacatagaggccagcgtaaggagcagagtcgaccagaactgatcaacttcataacagaggatccccggggatttgtgctgggtgatcccgatgatcctgaccagctacctggtcactacgacatcctagtggggcatacagacaccgttgatagtgatctggcacccggtgagatcagcccatcaactgagatttgggtgctcgatgatgatggttgcgagcgtccgtatgttgctgatctcctaggccaacaaaatgttgaggcgcatatagtacgaagcagacagttcctgccattttcgtacaaccagctcaccttggtggagttgcggaatttgttgtttggcgccagcgacctattccactcgtgtctgcaagaactgtcctgcacaaaagacccagctcggatccagctacgaatggaggcgattgttgctctgcatatcagcctgtggctggggcagtcgatgacgcaggtcgtccagttatccgtcgttgatgatgaaacagatgacgccgatggtctggcattgatcctaggggattcggcgctgttcagtatggtcgtcaggcgcccagacctggctggcgacgatcgttggcaggcctcttctggtgtccgactatcgttgctgcgaattctattgcccgatctcgctggtagtgcccagttggtaaagcagctgctcaaggcatttcctcactctgccaaccaggtattcacctatcaaactgagcagctggacgccgagatcaaagcactcctgctggaattgggtgaagacgaccgacgctatacgcgaaccaaactgcgcagttatttgtttcaccaaatagtcactgacactcaggacgtagcagcggcatccatgctgtcaggcgttgaaatcccctcggcgcaaaccccgcgctattacctacagctcgatgccaaccacctccgcaacatttatacgacctcactggtgcgagtgctgacgcaggtttatgcatgtgctggtctggcgtatgaacctgtcggcctcaatcctgatcaacagggtgggctgggagcaactcactgcctgctgcccgaaaccattgcgtacaatgtaagtgcaatggccgcggttttgcggaagaaagcgaacgggcgtctcagcgatatgctcgcttggcacaactgttacaccctatggtcagtgcagatgttttcgctgattacagcctgtagggcgatccgcaaccctctgatgctcatcgacgagtttgattctgtgttgggtatgggcgcgctgtcagacaaggatgccgatgatcgtcatatgagtcggctgatttgcatgcctccgatgttgaggcggcaaataacaaattacctcgagcactgcgcatctatcagtaggcaattgatcggctatctgtcacgggatgatgatcgcgatagatggtcacgaggttttttcctgtggattagtccgactggaatacgtcgtgctgaaattgccccggacacaattgttcaacagatggtgcaggtagccggttataccggccatcgagtcaatagttaccggaagttcctacgtacggagctcactgagcggggctgccctcccgaggctctgactgcgctcatggggcactggctaaggggcgaagagccgcaagacgcctattcgtcgttctgccctgcggcatatgccaatgttctcgatgaatggattaccccgctactgcgggaacttggctggtcagccctgagcagccagtgggtgaccgaatga

SEQ ID NO: 335243 - DNA, 552 bp, Pseudomonas aeruginosa
atgagtgactggaaatcatacgcaggggaaatgagcgatcgtgaagtggccaggcgttttggtatcggcgccagcactgttcggcgcttccgtcattccagcgacattccaaagttcttccccggaagggccgagcttcccgcggcgctggttacgcaactggcgatggaaaccaatcatcgacttgcgaaaggattcggtgtttccatcaaacgtatcgaacaagccagagcagagcttaagatcccagagccaaagacaattcgagagcgcttcaagcctctcgaggacatttggaccagcgaggccatagcactgctaggaagaatgccggacacagaggttgctgaccggctcggcgtcagcaatttcccggtcaagaaaaagcgcaaggagcttggaatacagtcgtacaaacgaccgctgccagaaataacccccgaaattgcatcggagttcgggggcgtttctgatgcagagcttgcgcgccggttcaatgtgtcggtgagctttatacgcagggcgcggataaagatggaaaagggcagctag

SEQ ID NO: 335244 - DNA, 3348 bp, Pseudomonas aeruginosa; identical to SEQ ID NO: 332473

SEQ ID NO: 335245 - DNA, 6216 bp, Pseudomonas aeruginosa; identical to SEQ ID NO: 332474

SEQ ID NO: 335246 - DNA, 1140 bp, Pseudomonas aeruginosa; identical to SEQ ID NO: 327753

SEQ ID NO: 335247 - DNA, 825 bp, Pseudomonas aeruginosa
atgcccctgcaatctctcctcaatgcatcccgaatcctcctgcgcggcatcagccaggtgttcctccagggcgacccacgcctgggcctggcctgtctgctggcgatcgccgtcggcgcgccgccgctgctcgccggcgccctccttggcggcgccctcggcccgttgctggcgcgcctgttgcactgcgccgacagcgacatcgaggccgggctgtacggctacaacgccgtgctgatcggcatgctgctggcattccgcttcgcctggtcgccggggctggtgtcgctggtagcgctcggctgcctggccagcgtggcgttgcagcgcctgttcctgcatgggctgcgccgacgccgctggcttccgccctataccctgggcttcgtcctcaacggctggtggctggtgcccctcggcgcctggctaggcctggccccggcgacccatggcggctgcttcagctgcgcctggagcggcacggcggagctggcggcgctagcgcaggggatcggcgagatcatcttccttggtgaaccgctggcagggctgctgggctacgactgggcgagcgcgctcgccgggttctacggcctgaacgccgcccttgccgggctggccctggccttgcgctaccgcagcgtctggccgccactgctcggcatggtcctggcggtggcgctgcaaccgctgttcggcctgctcggcctgccggcgctgaccgcaccgttcatcctcgcctgcctgctttgcatcggcggcgagcgcctgtacctgcgcctggccggcagcctcggcgcgcgcctcggccggcgacgctcctga

SEQ ID NO: 335248 - DNA, 525 bp, Pseudomonas aeruginosa
atggcttccctacgtcagaaacagtactccgtcctcggcatgagtaccttgtccttcgcggtgaatttcgccgtgtggacgatgttttcgatcatcggcatccgcatcaaggacgagctcggcctgagcgaatcccagttcggcctgatggtcgccctgccgatcctcaccggctccctggtgcgcctgccgctgggcctgatcaccgaccgcttcggcggccgcatcgtgttcttcatccacatgctgctggtggccatcccgatctacggcctggccttcgccagccagtactggcactacctggtgctcggcctgttcgtcggcctggccggcggctccttcgcggtcggcatcgcctacacctcggcctggttcgagaaggagcgccagggcaccgcgatgggcatcttcggtgctggcaatgccggcgcggcgatcaccaacctggtggcgccgatgatcgtggtcgccttcggctggcgcatggtgccgcaggtctactcggtagccatgctggtgtag

SEQ ID NO: 335249 - DNA, 849 bp, Pseudomonas aeruginosa
atgtcctttcgctgttccccgcgccgcctggccggcatcctgctggcggcgctgttcgttccggggctggccgcggcggccggctcctgcgagcgcctggtggccaccggcaacccggagtacccaccctacctgtggcgcgacccgcaggatccgaagcgcctgatcggagccaatgccgacctgttgcagcgcctgggcaaggaactcggcgtgcgcatcgacgtgctctacagcggctcctgggagaaggcccaggaagaggtgaccagcggtcgcgccgacctgctcgccggggcctacctgaccctggcacggctcggcagcatggactacgtgcatccgccgttcctgatgaccagcggggtggtctgggtgaacaaggacgccgcgttcccgttcatcggccgcgacgacctgatcgggcacaagggcagcgtgctggccggcagcagcctgggcgaggagttcgaccgcttcgccaaggccagcctcgacctgaagccggtgccgagcctgacccagggcttgcaggacctgatgctcaagcgcagcgagttcctcctctaccaggcgctgcccgggcaggcccaggtcgaggcgctgggcatggccgacgacctggaggcgctggaaccggtgctgagtagcgaggggctgtacctgacgctgtcgcacaactccgcctgcaacgatccgtggctgcgcggacaactggcgaaaaagatgacagaattgtcggctgccggcgttcccgtaacgctcttgcaggacaatctcgaacgctggaaagcccagcaattgccggcttccggcgccagttcgactacgcaggaaagtgacttgtga

SEQ ID NO: 335250 - DNA, 2784 bp, Pseudomonas aeruginosa; identical to SEQ ID NO: 324580

SEQ ID NO: 335251 - DNA, 432 bp, Pseudomonas aeruginosa
atgcttcttcatcactccccccctgactggcggccacaaacgctggccgttggcttactactggtactgctgagcggcgcgagccaggccgaaacctgggtcatcaccgacaaggctcatccggtctctgccaccggatcgtcgcgcgttctgtttctggacgcccaggaacacctcgaggaacaactgactacggccttgccccaggatccacagcaagctcaagcggcgtttaagcgattgctacaaagccccgatgggcgccgcctgcaggcagagctggtcaaggcacaacaagacgtcgccgatgcgtggagtctcggtgtcgagaagatccctgccgtagtagtcgacaggcagtacgtggtctacggcgagccggatgtaccgcgcgcgcttgagctgatcgccaaggccaggaggtcgcgctga

SEQ ID NO: 335252 - DNA, 228 bp, Pseudomonas aeruginosa
atgccgtgggaaggcccgctgcaatccattttggagtcgatccaggggccggtggctcgcatcgtcgcggtcatcatcattattgcgacgggcctggcgctggccttcggtgataccagcggtggcttccgcaagctgattcagatcgtcttcggcctgtccatcgccttcgcggcttcgagcttcttcctgtcgttctttagcttctccggcggggccgtcgtatga

SEQ ID NO: 335253 - DNA, 294 bp, Pseudomonas aeruginosa
atgacaaaccccttgcaaattatgtcgtgctttatcgaagcgctcctgccttatctgcatgacttcttcataaatgtacgatttggcgttgtcgccttcagcttcccgctggactcccttgaccttacgagtcatccgctcgtaatcttccggccacaacgcttgctccatgcgcaacgatgcctgacccagcaaatgcagcaggccgaacaggcgcatatcgttggtggcaacgatgtgttctcgaatccactcttgggttactccgcaggccagatgtgtttctggcgttga

SEQ ID NO: 335254 - DNA, 1044 bp, Pseudomonas aeruginosa
atgggcatgtcgatgctcggccgggtgctcgatggcgctggccgcgccctcgacggcaagggcggaatgcgcgccgaagactgggtgccgatggacggcccgacgatcaacccgctcaagcgccacccgatcagcgaacctctcgacgtcggcatccgctcgatcaatggcctgctcacggtcggccgcggccagcgcctcggcctgttcgccggtaccggggtgggcaagtcggtgctgctggggatgatgacccgcttcaccagggccgacatcatcgtcgtcggtctgatcggcgagcggggccgcgaggtgaaggagttcatcgacgagatcctcggcgaggaaggcctcaagcgctccgtggtggtcgcctcgccggccgacgacgcgccgctgatgcgcctgcgtgccgcgcagtactgcacgcggatcgccgagtacttccgcgacaagggcaagaacgtattgctgctgatggactcgctgacccgctacgcccaggcccagcgcgagatcgccctggccatcggcgagccaccggcgaccaaggggtatccgccatcggtgttcgccaagctgccgaagctggtggaacgcgccggcaatgccgaagccggtggcggctcgatcaccgcgttctacaccgtgctctccgagggcgacgaccagcaggacccgatcgccgacgccgctcgcggcgtgctcgacgggcacttcgtattgtcccggcggctggccgaggaaggccactatccggccatcgatattgaagcttcgatcagccgggtgatgccgcaggtggtcgaggccgagcacctgcgcgacgcccagcgcttcaagcagctctggtcgcgctaccagcagagtcgcgatctgatcagcgtcggtgcctacgtggccggcggcgatcccgagaccgacctggccatcgctcgcttcccggtcatgcgccagttcctgcgccagggcctcgacgaaagcgaaagcctggcggaaagccgtgcgcggctggcgagcctgctcgccggcgggcaggcctga

SEQ ID NO: 335255 - DNA, 3393 bp, Pseudomonas aeruginosa; identical to SEQ ID NO: 324624

SEQ ID NO: 335256 - DNA, 837 bp, Pseudomonas aeruginosa
atgattcgaatctcttctccggattcagtcatcgctacctccagatcgcttcggcttggcggccacagcagaggccgcgcgctccatggcaactcgggcccacttcttggcccattcacgcgtcttgttacagaaggtgcacttggtcatcagctgcgccttcccttaattgcctcaagatacgcatcgtatgagatgcgcgactccatctcttcgccgcagagcctcacccgcttgttaacgagtgcgaacgtgaccgtgacggttggcacgagaccatcgttgctgacgctcaacgaaagctggccagggagcggcttcccgttgctgtcacacaaaatcaggcatgtaccggtgttcttcagcagaagcggagcatccatcagtacaccctcagaatgtgggccaggttcccccgcgcacgacagacaaggccgagcagtattgccaggaccagggtcagccagggggagacaggattcagtctgtagccgtgtagcgcatcgagcatcacactcagggcgaaacacccactaccaacgcacagcaggtatgcgagccaggacactccccggcgatacctcgcgccttgccggcggtatgtcgccagcctcatgcagatggcgccgcaaatcatcgcggctaccagagtccaagggtcaaccattacgacctccaaagcggtccgctatgaagcggagccaaccaggcgtcttccccccctgcacccactccaacaagctggtgcccactgcgacgcagaacaatgccccaccaaaggcgaccaggcccgatgttcttgcccactcccgcccgatgacttcgccggcgacgtag

SEQ ID NO: 335257 - DNA, 300 bp, Pseudomonas aeruginosa
atggcaaacttcattgtcacgtttcaaatcaaggccgatgatacctaccagtctcgatatagttcttttaaaaagaaaatcaatgagttaaccaattacaagcactgggatgagacaacctctttctattgcttcgagttggactacacagcccaaagactttgctctgagctgtacaccggcagcgagttcaacgcaaccaaagacataatggtggttatcgatgtgtccaatcgagagaaggccacgaaaggtccgatccagtaccccgcgctgctggactcctacctcggcttctag

SEQ ID NO: 335258 - DNA, 618 bp, Pseudomonas aeruginosa
atgcagtgccgcgtagatggatgcgggcgtgatgcccaatacaagacagcccagctctgccagatgcactacttccggatgcggagaaatggctcggtagccaagaagctgagcagccgccagcagcgaatcattacgccaaatggatacgttcggatattcgaaccaggccatgccctcgctgacaagggagggtatgtcttcgagcatcgacaagtgatgtgggcgatcgcagggtctgactgccggccgtgcgagctgtgcgggaaggctgagacctgggcaacctgccatgtcgatcacaaggacgatgatcgccagaacaatgccgagggaaacctccgaattctctgccgtggctgcaacgtgaagcgcggatttcgaccggagtcgtacgagtcgcgcagccaggtcggactaatcgagttcgagggaaggcgcgatacagcaaccaactgggctagagatccgcgcgtgaaggtaagcggacacaccatccttcgcaggaaggccgccggcatgtccgacttcgacgcgctctttgccccgaaattgacgcacaacggaaaggccaagttccgggcctgggtgcgcgaactgaagagggcaacggcatga

SEQ ID NO: 335259 - DNA, 597 bp, Pseudomonas aeruginosa
gtgattgaggcaaagccgaaactgaaaaagtgccagaaccctgcatgcagccaggagttcacccctcgcttcagcagcacgcaaaaggtctgctcgccagcctgcgccctggccatcaaggacaagcactcaaagccggcgagaaaggccatcgccgaccgcgagcggagggagatcaaggttcggaaggagcggttgaagagcagggcggatcacctgcgcgaggctcaggcggtaatcaatcgctacgtccggctccgtgatgatcatctcggttgcgttagttgcgacaagcccgccacgtggggcggccagtggcattgctcgcatttccgtagtgttggggcagcacctcagctccgcttcaacctttggaatatgaataagtcctgcagtgcctgtaacaaccacctgagcgggaatttgatggcctaccggccgcgcctgattgagaagattggccaggccaaggttgatcgactggaaagtgacaactctgttgcccgtcatgacatcccctacctgaagcgcctgaaggctgtcttctccaagaaaattcgccggctggaggctcgacgcaaatgcagtgccgcgtag

SEQ ID NO: 335260 - DNA, 168 bp, Pseudomonas aeruginosa
atgagcggtgaacttgtcattgaggcatccatcttcttcgccctgttcgtggtattcgctggcataaccatctactgccagcgtcgtgactcgtccttcgaggaatatcagcgcaggtttcggcgtttcaaggaagaggtagagcgagagtcgaggaggcggctgtga

SEQ ID NO: 335261 - DNA, 264 bp, Pseudomonas aeruginosa
atgagcaagttcaagcctggcgatctcgctcttaatctgcaagacatccccagctgcatcagtgcgggagtggtagtcgagttgatgtctcgacttgcccctggtgatctgtttgccgaagacggccagacctttcaggtgattcggccagcttggtgggtgctccatgaaggagaccggctctacatacctgaacggtatctcatgcccctgcgcggcgacttccagcccgagcagcagaaggcgaaggaggtcgaggcatga

SEQ ID NO: 335262 - DNA, 630 bp, Pseudomonas aeruginosa
atgagcggtccggaacgcattaccctggcgatgaccggcgcctccggcgcccagtacggcctgcgcttgctcgattgcctggtgcaggaagagcgcgaggtgcacttcctgatctccaaggccgcgcaactggtgatggccaccgagaccgacgtggccttgccggccaagccgcaggcgatgcaggccttcctcaccgaatattgcggtgccgccgccggacagatccgcgtgttcggccagaacgactggatggcgccgccggcctccggctccagcgcgcccaatgccatggtgatctgcccgtgttccaccggcaccctgtcggcggtcgccacgggggcctgcaacaacctcatcgagcgcgccgccgatgtcgccctgaaggagcgccggccgctggtgctggtgccgcgcgaggcgccgttctccagtatccacctggaaaacatgctcaagctgtccaacctcggcgcggtgatcctgccggcggcgccgggcttctaccaccagccgcaatcggtggaggacctggtggacttcgtcgtcgcgcgaatcctcaacaccctggggattccccaggatatgctgccgcgctggggggaacagcaccttgtcagcgacgagtag

SEQ ID NO: 335263 - DNA, 519 bp, Pseudomonas aeruginosa
atgaaagcatcccaactcgccgccgtcgctttggcggcagcgcttttccccgcattagcctccgcgcagcaggactcaaccgctgctaaatcggcccaacagcaaccgataagcgttgagcaattcgaccaagagatggcgaaggcacaagaaaatctcaagaaaatgcaggagcaaatgagccaaatccagaaagctagcgaccctgcacagcgtcagaaactgatgcaagagcaccaaaccatgatgcagcaaggaatgcacatgatgaacggaatgcgtggcggcggaatgatggggtgctgcggagggggcatgatgggtggccatatgatgggtaacggtcagatgatgggaggtggccacatgatgggtgacggtcagatgatgggaggtggtcacatgatgggctgggatcaaatgggcagccactactcccagatgacgcctgagcagatgaagcagcatcaatacatgatggaggggagcccgcagaattcggaaaaaatcgtacgctaa

SEQ ID NO: 335264 - DNA, 195 bp, Pseudomonas aeruginosa
atgcccatgatccttcgctacctctccgtctccctcgcttccgccctggtggccggttatgtggccctgtggctggccaaccccgtgcccctggaacagccccatgccgttgttcgcccgccgcttactattgagcagcaaggcgatgacctgatgttggggtttgaggcgcaacggaacagaaagtgcacttaa

SEQ ID NO: 335265 - DNA, 384 bp, Pseudomonas aeruginosa
atgaccggctcaaagaagttgcgtagcgctggggattttccgaacaaatcggtcgtggagtacgcgacggtccgagtcgagataccccaccgtcttatcccgtcgaatcttagtaatccccactatagagatgaggacatcgttgccgggctctatgcgagccctaccggtcgcctctcgtacaagacgctctacctggatagcgtcgagctagctgagcgatttgtagcttacctccggcagctctttcagaaccgaccctatgccaatgacttctccctcaagattgaagtgattacaaccacccagaaggtcactgcaaccaaaggtagggccaagcattctgccgcagtagctgaaacgctccagaaaactcagttctga

SEQ ID NO: 335266 - DNA, 1524 bp, Pseudomonas aeruginosa
atgaccaagaaaaagaagaagagtcgttcaggcaagatcacgacaccgctcgccggccacaaaagggtcggtaaagctctcgtgcccccaatgctgcagctagagggggtgagcttttcatcttgggtcaatgaccgtctacccgagatgctatgggccagcctcgtgatcacagtcatccccagggatcaggcgcttgaggcattccgtgacattgccgcgttaggtcttcgctatcgcaaagacgaacgggagcaggcgacaggttggacgctgagacacacccatcttcccgctcaaccgcgtgagctttttgaagcgctcgttggccgagtattgcggtgccacgcaggtgctcaggccctacgccccctactccttctggaaaaccttccaggtattacctggtggaaagctgcacttggtagcgaaccaatcgaagatgactggcagacacttgggcaggctgttcaaaagaccttcgaccaccagtctcaagaagcaacagacgttcgctgggtcagcattctgttcaaaatcgccttgggagaaatgctgttccccgcaggttttgaggagcaccttctagagattgttgagtatccaaatcgcggagatatgaggagcgttcgcccctctatcagggccatggagatgacgttcactcatctgggtcaaagctcatggtctgagtcattttggaccgacatgctgcaacaaacgggttgcactcctgctccgttgctgcccagagaaaagccctcaaatgatcttcaggctgtccggctggggctcgttgaggtccggaaagctttacttgaacactggtttacaactctaagcacttctgggatagaccctaagcaggacggcgtctttggtttcggctttttcgcgctgtcctgttttgcggaaatgagttcaggcccattgaacgaaggcattgccggcaggctcctgcttcgtgcgcttacagagtgcaggatttcgttggcatttttggttcggtgcggcgatgacgccatgtggaagaagttccgatcctatggcgccggccaggcaaagctcgcattgctcaagcacgaggagatgacaggcgaaaggcctcgattcgtaaccctggaaaccctggaacgcctggcgaatgaagactacttccaagaatacgtcgagatcgatctaggccattggtgtggcaaagatcttcgaaaactggcagaggagtcaggcaccaaggaagattatgaccggtactacggctgggcttcaggcttcgttcatggacagtggggcgccatgcgagacagcaacttcactcactgcctgaatccgttgcaccgtttccatcgtgttccactacctttccatcggaagctcgaaccaacgcttgatgacggattgcaattggtcaactccatcctcgacgacgttagcactgcgtatcctggcttcaatgctcgtatcaagatcagttctgactctatggagcggcaagaggatgctgcgacagtagagcctacgtag

SEQ ID NO: 335267 - DNA, 1713 bp, Pseudomonas aeruginosa
atgcgccgatttgaagccaaggacctaattgcgctcgcgaccgcgccaatgaatccagatgatcattggtacgtggatgctgaacaagcctcgcagtacctggtcgcgaatgcgaatgctgatgagatcgtcatctatgcatccgctcccgcggtattgatcgtcggagctctcgtaccaaccgttaacgtcacaccggttgacggaggcgcgcttcagaatacgtcgctttgcactgatgcagcttggaagattcaaaagtcttggaacgcggctgaaggttaccgcgtatacctagagccaccatttccgaatgaccgggtatcagccctctctggcggcgagacgctcgtcacaaggcgatatctttcgggcgtgcacaaaggtccggctccaattgaagtcagccagaaactcgtccactgcctggacattcactatatccccgagcggaatgcctactgtcgcctagacggcaacggggatatcgaggatgtgatacgggttttgacgcttccaatcgatgagcagttggaaggtagagaagtcgtaacgatccttcgcaaagatctggacacatacatggcagtcgcggatctagcgctggttatcaagtttgacttcacgcggaccgttcgcggtagcttcagcggctggaatgacgtaagccgctaccatcgcgatggggaggatcttttttaccatggcggttcagccgctcgtgccagcttcatgcacggcgctatggttgtgcgctcacgaacaaccctggctgaacaggaagaggcgtggcgcagggattttgaaggtgcccctgaccgggagtatgcagttttcaaaatttacgaccgcaaaaatgatcgcaatgtcgagacatccgctagcccgcttcatatcgtcagctacttcgagcaaagcgacctgccgtggcaaatctctcccgcattctttaggcctgaggttctccagcgcttcaaggccgacccagaaaaatacacgctcgaagaccgaagcatctcctgccgcggagcttggcacatcaagtcatacgacataaatgaggcaggccaagtccacgtttacatcggcgacctcgccaagcttcctattgcagagcaaaactactggaaggcattcaacgaatggccgaagtcatccatctcggcacgagcccatcggacggatatagaggggcagtggtgtacgacctacgaccccttaaattctttaagaaataaggtgagagcactggataaggcctgcccggaatggtggaaccggagaggcgatgcactgatggatagcgtactggccccggctaccgactccccgaaagaatggggagatgaaatattggcgctcgaccaattgctggtggagggcttcctggataagcctctgcgaaagatcgcccaagaaaaagggcgagaaatagagcctgtgtggcgctcgctgaagcttcttcatgaaattctgcttggaagcactctgagtgaggaggctgccaaacaactgctggctcctatgaaaaagctccatgagcttcgcaatgagatccgaggacacgcgacccatgagaaaaaggaggtcgcaattcgcgaggcccgtactacccacggtaattttcgagctcattttttccatcttgcagaaggctgcgaccaggctctcatcggcgtgctaaaggcactcgagttcgaaatggaagattag

SEQ ID NO: 335268 - DNA, 285 bp, Pseudomonas aeruginosa
atgaagcgttttatccagggagagcatcgaggccaaagcgcgctgcttcccgagagcctggatgactacgtggcggacaccaacccggtgcgggtggtcgatgttttcgtcgatgaactcaaccttggccagttgggtttcgagggcgtcgtcccggctgaaacaggtcgccccgcttaccatcctgccgacctgctgaagatctacatctacggctatctcaatcgcatccagtccagccgccgtctcgaacgcgaggctcacacatcggtgtctaggggttga

SEQ ID NO: 335269 - DNA, 720 bp, Pseudomonas aeruginosa
atgatcctgcgcctgcacgaggtcgcccgcagccacggcgccggtcgccagcgctaccgcctgcgggtgccggcgctggaattgcgcgcgggtcgccagctggccatcgtcggccccagcggctgcggcaagagcaccctgctcgacctgctggcgctggccctggcgccggacccgggcgggcgcttcgaattcctcgccggggaacgcccgcaggacatcgccgcgctctggcgcgacggccgccaggaccgcttggcggcgctgcgccggcagcactgcggctacgtgctgcaaagcggcgggttgctcgagttcctcgatgtgcggcgcaacatcggactgccctgcgcgttgctcggcgccccatccgccgagcgcgtacaggcgctggccgagcggctggaaatcggcgaccagctggacaagaaaccggcggcgctatcggtcggccagcgccagcgggtcgccatcgcccgcgccctggcgcatgcgccgcgcctgttgctggccgacgagccgaccgcggcgctcgacccgctgaacgccgaacgggtgatgcgcctgctggtggagcaggcccgcgagcgcggcgcctgcaccgtggtcgccacccacgacgaacgcctggctcgcgccgccggcctggaagtcctggccatccgctggcaacgcgaggccgacgacagcgtcggcgcctgcctcgaggaagttggctga

SEQ ID NO: 335270 - DNA, 1308 bp, Pseudomonas aeruginosa
atgtgtatccttcattttggaaacggtttggccagccactctggctatatgcgagagcgcgtagggatttattttgatgataatcataacgtccttgaagcaccgaccatgtgggcgatggctgtctcgaagatacgttcaaggagtgatgaaacgacaagaaactatgcgaatatcctgagaaggtttttgcagtggttggacgatagcccaatcgaaggggctgaagttgtatttggcgcgcagaactggcagttggtggatgaggatgtttttgatgccttccttgttcacatagcatctccaacggatgcgcttcctgatggtccgtctcacaaaaccatgtatcacattgcggcaagggtctggagcttctatcagtgggccgaaaagcagggctataaacactatttggatatcagtaggactgatatccgatacatgctgaaagaccagaaactcctggcccatatcaacccagtggttaaagttactaccttgggatttaatctgcccagtggtagaccagcaatgcatcaacgagaaatgcagaaatttgtaaggcaaactgattatgaaatagctctcagcgtgttgaatgatcctgtttatcaaattatcgcagcgatcatacgaattaccgggcttagaccgattgatctttttcaattgccttaccgagggagaaatgaaaattatggattcattccttatgatgagggtgagtacccagaagggttagataatggcgcgatctattattattttaggtccaagggaaaatggcgctccatagactttccagggaagctgtggagagttatttgcgagtattatttacccttaaggcggcaacgagcgaagctatatgaggctaagcatggcattccaccaaggaatagcgacttgtttctttccgctcgtggtgatgttgttactcatggaatgcttggttataactttagcaaggtggtttctgcagcgaagaactccgagagcgctactgattttaaagccatacgattcaatgcacgaatgctcaggcacacctgtgcgacatattttgtttatgaggcgttgaaagcccagaatagacttggaaggagttttgtttacgatgcagcgctcgacgaagatctcaggaaaatgctgggccacactgatgttagaactacacttgaatactatgttcatctagtcaaccgatatgtgcacgacaatcttctgactgatcttcatcgttcgcgcgttgatgctggtttgtccgctattttagaccgacataattactctgagattgtggtatag

SEQ ID NO: 335271 - DNA, 945 bp, Pseudomonas aeruginosa
atggctaagcaggatctcctcaatcgggtgtatgcgactatttcagcgctccaaagcgacggccgaaaaaagttatcagtgatggaagtttctaaattatctggtgtcggtcgtgcaacaatcaatcaaaagcatgatcctgactgggtgaaggtcagagaagtcataaaaggaacaactcattctggggtttatacaaaggattcaagtgaggatgtcaaaaagccactcaaaaatactcaagaaatacatcatcgactgaaagagttggaggagcagttagccctactaagggagcgcgctagcaccacatataatcagttgatcgacagggtacaatattactttgcgttggctagtgaaaagcctgctaagcaagttgagaaggctaagctccttcaagagctaactcatcagaagaatcagaacgcaatcctacgtgcagatctcaaggcggctcttgctgaatcattaactcctgcggtatcaggatttatcacttcaaagattattttggaagtgcctaatgcaggctcagattctgaggccattctgagttttttggagaaactggattcgttatctagtcagaatcgatcttcacttgttaccgcagtctacataatgtgtggtcttccaatgtgcggcaagtcatcttggattgataatcacaagccacctactccaggcgtatccttatatgtcagtggggcaagtgatacagtttcaactcggaatttgttagtttctagggttaggaaagaatttaacgcgcctgtgcactgtgttcgatttagtctaggccttgatgcctgtatctctagggccgaaaaacagttcaatggtgcggctcttgaattgaatatttcatccatcaaagttgtggctgcgcggttcgaagaaatacaattcagcgaaaatttcgactcaatcatcttggcttga

SEQ ID NO: 335272 - DNA, 2103 bp, Pseudomonas aeruginosa
atgacaactccaacacgtgaccaaataaaagccgttttagaagaaataaggaatggactgggttgtcacgaggaagagtcagagcctatcgctactgaagaagatgatgagattctgagtggcgactcttcacttgggatcatttgcgatagtataaatttactcaatctttccagaattgataagaacgagtggagttatattagggtaagtcctagaagctctttcggcgatccggtttgggattttggggattacccctcccctaatggatttcccatacgtatcaattttgattatgtgaatatgtatggcgtgaatgtttgtggagtaggtcacgaacattgggtgaatattgctagggcgctactattttaccgtgtaccgcacttcggaattcatggtcgcattaatgcttatacatctcttgagtcagataaaacaaaagtattaagacttgtcgggttgtttcaagccgaaggtctatatttaggttcggaaaattcaccagattttaggacggtgaatgatttggccaagtcgagtgtggagcactatatagagtcgctgcccacatctgggattaagtgggaattctgttacttaatgtccttctggcagggcgtgtcatcgatgggtatgcttccgtcagagtactcactatacgattcatacgtaactaaagagcttgtcgccaaatatagaagagaatacgacgagtcctctcgacctttcgaacccattccgctcgatgactatgcagaaatatttagatactgtgtggggtttgttgaaaactatagtgatgacgtcctttggctgtataaaaattttgcgccaaccatagtaggtgcttttgagaaccccggaaagcttgccgcgatgaatattggtgtgtcaacggcgtccgttgagggagttaaaagatttagggcttataaacctaagttactagatagcggtattccctggtggggaatagaaatcaaggaaagaacgcatgagaatgatgagggggagtatataaatcaaactgctgtgattagcgttgttgtctctctgatcgatgcgtgtatcgtgcttcttctatgtcttactgggatgcgccgatcagaggtcattggtcttaaggtggattgtctttcgtttaagtctgagggttattggcttacttatactgttttcaaaacctccatttcgtcacagggcgacattaaaacaatacctatcccaaaaattgctgctgacgcaattgaagtaataattgaaatagggcgggatgctcgtgcttacggtaatcacgactatctgtttgtcaagataccaaagttaagttttggaaacactccgcagtccactgtggtagagcgagcttgcaatcgagtggcaaacaacctgggtattgattatagagtacacccacatcgttttcggaagtcacttgccctttatataattcatcaagattcgcggaatcttgaaattattaaacgcctcttttctcaccgcagcttaaaaatgacgttaaggtacatcctttctttaccaggcatgaacgatgaagtcaaagctacgttgattgaagaaaatacggaaattctcgtcgaggttttgcaaggtgtaatttctggtcaaattgggggcattggcggcaaaaggttggccaagactgctaattcgtctccaatactcagggctaaattgcaaaacgcgggaaaagagagtttaagtcagtatgtcgcctctttgcttgatgaaggtgtgaagcttctgcatagaacgaatcttgcaatctgtatgcgaacgccgggtctttccagcgagtcaccttgtgatgctaagaatgatagccctgggtcgaggcttcatccaaacttgtttgcgtgtgacccatataattgtagatatgctgcatttgtcgaggccaatgctccatcattaaaaaatgagataattttccacgataatatgattaagcataggtactgtggagcgactcagaaggaatattcgcagaggcgtatcgctgaagcctttaagcgacttcacgaggttgtaggggatgaagcacataatttcctaaagcaggtagcgcatggctaa

SEQ ID NO: 335273 - DNA, 2355 bp, Pseudomonas aeruginosa
atgcctcgcaagcctttctccaagtctgcacttgagtcgcgagaacgaccgaccctccagcgaaagctcccagaaaacaccccccaagcgattcaagaaagaagcactgctaggggacaagtcgatgtttcagctcaagggttgcttgtccgaaacaagactactggcacaagggaatacgtccgtgacttcacagatcttgtcactgagtatccgcaccataaattaattgtccagcagttacttataggtgcgcagctccattccgcaaagagattgatcacatatcaatcccatcaagacatctattactcaattcaagagtttgtgctgtttcttaacagcgctgagccgatcaataaatcagtcaaaggtgttgctgatgtcgatgggcaggtatgcgcgaattttaggtcatttctaattcgttcgtatccaggtcgcaccgtaaatagaaaaagatacggcgcattaaaaaatatcttcctttcgttgaaaaataaatataaagggcagggctgggtcggcaaagggtttgaatggccgactggaccggggatgaacgagcaaataacagaaggatacagcagggagattcataataagcttgtggagggatgcctgatcgatattaagtttattatgaagtggatggagagttacaacagtgtagtggaaggcgagaagccaattctggcatacgatctttcattagaaaacttgatgtttgatctggttgtaaaagagcaaactaaaagatccaacgggtcaatcaaggcgacacacattaaagggtttgagtgggttatacgctccactggagatgttaaagaatacatacgggcaaatggaataagtatagagaggtttctgggcatttaccgagcccgcgcccatgaactggcggctaaaggtcgccctgtagttggtactgaggtcagtgaacgggggatggtgtatggctgtgatcgagaagaatctgggcgaattgcaactgcaaatgtaggaagactttatcctgattggcctatgcaagtgagcttcgaggaagctggacatctcttttccactgagtggagtaaaaacaccgctcacggaacaaacaaaaaatattctacgctggaaaaaagattacggtcggccttgatgtatatgaaggttgggccagagcacctaccctatgaagtaggtcaaatggcatacttcagcagagtagccttcacaatgggaactatattcccattctttctcttcgtgatgttgcagacgggctggaactttgaggtcgtggtatcgataagcgataacctagacgaccacattgaggaggaccttctggatgatgactatgtgattatttatgggtacaagggacggtccaacaaaagccaaatgcatagatcaaacaagcgagataagtttggcacgtatcagatcttgcgctttgttgccgctgaagtaaccaagcatttctcgtcgcctcattatttaaagggtaaattatttcagtgtgtcatttcgaagaatctgtggaataagtttggccgcttatgcacgccggtgaccactacgaattttgggcacgcatcaacggagtttctacatcgccaccgcataaaattggatacggataccaaatcccccagaattgaaacgaaacgtcttcgaactacttacgaaactcgacggagagaacagggtttagatatagacgaagtttcgacaatgatggggcattcggatatcgataccacagtgaatcattatgatagtgactgggggtcggcagaaatattaaatgggcgtctaagaaagattcagagaaagcatgaagaagattttaggcgttactcagcaaatcttcttacagatgtgtctttggttgagctgcgtgaagccactctacgctgcggtagcaaagaaaaactacggtcagttgttgcaccattagtcggcaggctgaattcttctgaagattcggtaatacagttgctttctccggaaggtcagacattcattgcaagttgtctaaattcaagacgaccagattggccaggcgctgaaagttttcttaggacggatacgccttgcaactacttcaatcgttgcccgttatgctcacagtgtgtgatcttcaaagaagcattaccttttattgcaagaagaatttccgaccttgacggtctgagggagcggttaaatcccttagaatgggagaaaagctatcgcgctgagtatttagcgtggaagggggttctagagggctggggggatccgattgaggttgctgaggcaatagatcgatcagtacataacgattttgcactgccattgacaatgatagggctctcatga

SEQ ID NO: 335274 - DNA, 243 bp, Pseudomonas aeruginosa
atgtttggcaatcagaccgactcggacatcccggcgattccgaaggctccgcccgctcctatggggttcccggcctcgttcggggctagcgatgacttcaggctctgcgatgctatccggaacaccgtggatgctgcgcaagacgcccaaggtatgacgcttcggattcttcaacgacacctcctccgtctgtgcaacctgcaggtcgagcaactggagggatgtggtgatgatcacatttga

SEQ ID NO: 335275 - DNA, 162 bp, Pseudomonas aeruginosa
atgtctgattttctctttgcggtaaccggacttgtggtcagcgtgctgttcatcttgctactcctcggcgcctcgtttgcctcctggcagttgcagaaggctcgcctggagctctactcgttcctgattcaggaagttatccgagggctcgatgatgactga

SEQ ID NO: 335276 - DNA, 243 bp, Pseudomonas aeruginosa
atgagtgccttgaaagccatccgcaagcaggcgggtgtgacccagacccagcttgccgagcgagttgggctgacccaggccgcgatcggccactacgaaacagggcgccgtaagcctgggctcagtgaatgccgacgtatcgtggcggcactgaacgaccttggtgctgagtgcacgctggctgaagctttccctgagccagagcatgactcgcttgctgtatccgtccaaatggcgtcctga

SEQ ID NO: 335277 - DNA, 1326 bp, Pseudomonas aeruginosa
atgaggctgtcgcgctttcccatctcgacactgctggactcggcctcgggacatctcgaggcccatttgtataagaagcggcttgctgccgaaagcggcgaaccgctggctcaacaatattccggcatcattttcagcggcaacccgcatgaaaccgttcctcggcgcctgctgctggataaacgcctcaccccgctggagcggaactgctggcaagtgttccgcttgctcattaacgacgacgggctgaccgcgttccctacatacgagcaactacgcccttatctcggcatgcagccgggtaagatcgcctcgcgcgaaaccatcgccaaggcactcaaggtccttcggttgacacgctggctcagtctcggccgccgcctgcgcaacgacctcaacgggcaagtacaaggcaacgtctacatcctccacgacgaaccggtatccccggcagaagccctggagctggaccccgactacatgcagttgctgagccagtccaccggcgacagcaacggagccatacgcgaaatcggccagatcacatggcgggagttcagggatgacccggacgttggtcgccggctcccaacccatctggagaagctcgagggacgcttgaaccaccagcaatgggctattgatagtcagctcgaagcggatccagcggcagagttcggcatccgaactctgcccgatctacctcattcaaccccgagttcggatgccgaactcagtgaaatcagcggcaagcaatgcgctttaccgctgagttcggatgccgaacccagacagaatccgccgagtacgcccttggttcggatgccgaactcatatagtacgtatacatacaaacaagattctgtatgtaaaaagccagtacaaccgcaaacacgcgaggaagcacatccgaactggcagggcctcttgcacacactggaggccgagcaacggatccaagccgtaagcgcgctccgacgggtgtccgaggatcttcggctacccatcatcgagcaatggcagcaccgatgtgccggcggaaccgtcggtaatccgttcggctacctcatgacgctcatccagcgtgcagtccagggaaagttcaacgcttcttgggctccggaagaaccggctgaacgaaccatcccagcagcggaacgccccagtcgtgctccggcaccatcaagccccatagcgcctacacagcctcaggtccagcccaggggggatacccggacagggagcgaggtcctcagccggctcaaggacctcattcggcccaggcacggatcgagcgtgccatccgagcggggtgatgagccatga

SEQ ID NO: 335278 - DNA, 768 bp, Pseudomonas aeruginosa
atgtcgaagtcgttgatcaatgaagcggtcctgacgcaggtgctcaaccacctgcgcaacggccagctcaggcgttgtgccgagatggggctgcggccggagattctggctcagctccaacagcctgccgtcatgagcatcctgaccaataccccggtttcctgggtagacgtccgagtgaacatcgacgtcatggagaaaatcctggccacagccgagcgctctcagcaagaggagctgcaaattgagcgtgctctcaaactcggagctaccaccacgatgattcagagcttcttcggtctgtcgccggaagacactgcgatcaagcggctgatcatggagatacacccccgacggggccgctggcggcagctcgatgaacagatcgagcgccagatatggttccgctgggagcacctgatgcaggaaaaccaggtccgccttgaggacagcatggagttgctggatatcgcgatgatcctcaccgaggaaatcaacgccggaatcgaacaagacagtccagagttcatcagcctcgccattgtttggtctctcatccagagctggttgaaagacgggctctatccgtctggcaaatcgagccagagccaggcgggcctgcaaaagtcccaatccactctttacctcgctagcgtcagctcacacctgccccactctgccccatccgcaacaacgcaggtgaacgctgagacagaacgtcaacaactactgaacctggttcagtcggaaggcgacacagcaccatga

SEQ ID NO: 335279 - DNA, 1728 bp, Pseudomonas aeruginosa
atggccaagatcaacccgcaagatctgaaagaccggctacttgcccctggtttcaccgcgccgcccgttcttgaacagttgtcggacccgatcagcgacacgcccatggtgctgacactcgaccaggtcctcccctggcacgataacccccggaccactcgaaacccgaaatacgatgagttgaaagaatcgatccggcatcgaggcctcgatacaccgccaccagtgactcgacgccctggggaagacaaataccgcattcgcaacggtggaaacactcgcctggaaattctcaacgagctctacaaagagaccggcgacgagcgttacttccgcttcaactgcctgttcaggccctgggacaagcagcgcggcgaaatcatcgcgctgactggtcacctagctgagaacgatctgaagggtgacctcaagttcatcgagcgagccgtgggcattcagaaagcgaaagcctggtatgaggaggagaaaggcgaaccggtcggcatccgcgagctgtcacggaagctcaccgatgacggctatcctgtttccccctcacacatcagcaggatgctggatgccgttgagatactgcttccagccatccctgtgatgctgtattcagggctcggtaaaccgcaaatcgaaaaactcctgtcactcagaaagtcggcatcctcctgctggacacgtctatacgccggtgaagggatcgacttcgaaatgatgttccaggacactctggcgatcttcgacagtagccctgacgaattcattttcgagcgtttccaggacgaactcatcgaccagatgaagcggcccctgggcctgcgttatgaccagattctgctcgagatcaccaacggccagcaggaacagcgccggggcactctgatcgacctgcccgcacctaccgcaccacctgaaattccaccagtagggcaggaaagtcctgctgcgtcgactactggacaagcacaatcacagagccccgctgccggcctccaaacgtccaagatcaatagcctcccgggtaatccctctaccccgccaactccgccgctacctgtacaacagcagcaactgaccgacgaggagcgtgctgagctcttggcaggtcatatcgtgagcccggtatccacaaagatccagcagactcgccaacggctggccgctctcgagggtgaacatctacctgtcttcgaggaaacagctctgcaggcaatcccagtgcaagtcggcggcctgcacccgatcaccgatctctggtacatcgagcggtcgatcgatacccccgagatcctgcgacagcacatcgctgatctggctgaagagatcgctctgcatgtcggcgccccaggagagatcgtcaggattcagggcggtgtgggttacacgtatcgcgagcccaatgaagaccctgagattactgattcagcgctgcacctcatgacgctgcttcaagcgctcagcggccaggtccaagtcgtcctgaactcacacgaccagcagacctgccgcgacgccctgggcgagtttcaattctcagctggcctcgctcagttgctgctgggccaacccaccacaggcgatcagccatccagccaggcaggccgtctcaatgacgaagccctggtgaaactgttccggatcattcgtcttgcccgacgcctggttgaccttgagctgccgccggccgcctccgagcaagcagctaccgaccagtga

SEQ ID NO: 335280 - DNA, 270 bp, Pseudomonas aeruginosa
atgaagaacgttacttcgatcgaccgcaaacacgcagaagacaagtttgttgtacgcatgccgcaagggctccgcgatcaactcaagcaaaaagccgcagataaccaccgctcggccaacagtgaaatcgtctaccggctggagcgcagcaacgcgctcgaagaagaactcgcgcgagcaaaccgaatggtcgacgagctcttcgccaagaaccagcgtctgcaggcagagctggctgcggcgaacacgcctcaggtggcggaggcatga

SEQ ID NO: 335281 - DNA, 1023 bp, Pseudomonas aeruginosa
atgcctatcaaacacgccatcgtccacctgatcgagaagaagcccgacggcaccccggccgtgctccacgcgcgcgacgccgaactgggcgactcccaggccaccgagaacctgctggccgacctcaacgaaagctacaacgccaagaacaaggcctggggcttcttctacggcgagtccggcgcctacccgttcagcggctggctcggcgagtacctggagggcggccgcgacttcgtcggcttcagccgcgaagcggtggagcacctgcagaagctgatggaagagtccaacctctccaccggcggccacgtcctgttcgcccactaccagcagggcatgaccgactacctggcgatcgccctgctgcaccacagcgaaggcgtggcggtgaacaaatcgctggaggtcaccccgtcgcgtcacctggacctcggccagttgcacctggccgcgcggatcaacatttccgagtggcgcaacaacaagcagtcgatgcagtacatctcgttcatcaagggcaagggcgggaagaaggtcaccgactacttccgcgatttcatcggctgccaggagggcatcgactcaccgggcgaaacccgcgccctgctcaaggccttcagcgacttcgtggagagcgagggcatggccgagcagcaggcccgcgagaaaaccgagacgctggtcgactacgccacctcccaggcgcgcatcggcgagccgatgaccctcgacgcgctttcggaactgatggacgaccagcagccgcgggcgttctacgactacatccgtaacaaggactacggcctgtcgccggaaatcccggcggacaagcgcaccctcaaccagttccgccgcttcaccggccgcgccgagggcctgtcgatcagcttcgaggcgcacctgctgggctccaggatcgagtacgacgaggagcgcgacacgctgagtatcagcagtctccccactcagcttcgcgaccagctcaagcgccgcaaggcggagcaggagagcacgtcatga

SEQ ID NO: 335282 - DNA, 234 bp, Pseudomonas aeruginosa
atgcgtagtttccttcgcggcgcccgggaaagcgtccgccggctggtggccttcgctcaagctgaaggctggagcgtcgaccgctccgccggcggccacttgaagctcagcaagatcggctgcgcctcgatcttcatctcttccacgccaagcgacgcacgcggcgagctcaatgcccgcgccctgctccgtcgagcccacaggcagcgttccctgaaccaggagtctttctga

SEQ ID NO: 335283 - DNA, 177 bp, Pseudomonas aeruginosa
atgctgcgttccgcgcatgacgacctggcctgcagccggcagagcgatcgtcgcagccttcaggcgctggtgaaacgtctcctgcatgccgcctccaccgacagccttccccgctccttggcagagatggagacctggctgcagctcaacagtagtgaggagaccacggatgcgtag

SEQ ID NO: 335284 - DNA, 258 bp, Pseudomonas aeruginosa
atgaaggcgtcccagacctatcagtgcatcgtcaagttcgatggtgccggcttctggaccaataccattaagaagcagcgtgcgacctgcacctggagcgacaaggtggcagcctcccgccttgccgaacggctgtttggcgaggacaacgcctacatcacccgtatgccggcacaggcaggcgaccacgaaaagcgcatcgagagccgctgggagctgtcctgtagaaatcccaaggaggtagcgtgcgatggctga

SEQ ID NO: 335285 - DNA, 528 bp, Pseudomonas aeruginosa
atgaacactgaagcccgctttccgagtatccacgcctcggccgcgttcaccgactcggcggtggttcatgccaatcacgttggggtcaaccccatcgagctggacgccctcagccaagtgatctcgcgcctttcgcgggacgagagcacggtcgcacccagttcgatggagcgagagcttcgtgagctggaggaactggggtacatcgaaatctcgaccacccaggccggaaccctggtggtcactacgcgcgctccggggcaactgctttcggcctacttctggtcggtatggatccctcgccacctgttcagttgctcgctgaaagtgagcctggtgccgcacctctgctgcggcactcaggactcacagcacctcaccgccgtgttccgcattgcaggcagcaaggacgccgcgcgtgagttcctgcatcagttggccaacaactatcccgggcatgagccggagttgcccgaactggtggccgttcaggtcggtgatgcactcagcaaggaggccgaatcatga

SEQ ID NO: 335286 - DNA, 186 bp, Pseudomonas aeruginosa
atgaacacttcccagcacctggtcacccaccagtgcatgaattgcggtcagcaccaccctctccacctggtgcgccaaatcctccctgcagagaacaccccggaaggtgaagccgaggtcttggtctgcccctgctgcgggagctacgacgtccatcagttggaggctgtctttgatgaacactga

SEQ ID NO: 335287 - DNA, 489 bp, Pseudomonas aeruginosa
atgagcgccatcatcagcgaatgcggccagtaccgttaccttctgactcgccctggcgactgcctggccgacaaaggcacagcggttttcctgatgctcaatccgagcaccgctgatgccgcgctcgacgatccaacgatccggcgctgccgcaacttcgcctcggcctggggctgtaacgggatcgccgtcgtcaatctgtacgccttgcgcgcgacgaacccgtccgacctctggcagcacagcgacccagtaggcccagacaacgactggcgcctgcgcgcgatcgcccgagagtacaccgacatcgtgtgcgcctggggcgccaatgcgaagcccgagcgagtagaagccgtaaccagcatcttgaccgccgccggcgggcgcctctggtgtcttggcacgacgaaggatggccacccgcgccaccctctgtacgtgcctggaaatcaagcgctccagccttgggcgccgagggcggtcccatga

SEQ ID NO: 335288 - DNA, 639 bp, Pseudomonas aeruginosa; identical to SEQ ID NO: 334831

SEQ ID NO: 335289 - DNA, 861 bp, Pseudomonas aeruginosa
gtgaacgaatcggcataccctatggacctgaagtgcacagacgatgactacaacgacgcgctcttgaagctagacgtcgtcacctgcgaggcgatggcagtgagccaggctatccgcgaagagagctccgatctgcacatggagttttccgctcaagtatttaaaaggctatgcgcccactcaatggcaattatctgcgcactgcctagatcccgatgggtagcgtcggacttcgaaaactgggactttgcctgcattgcagggcactcaagagcacttcttgaaggatatctgctgtttcggtatctggctaaaaccccatcctgcaacgcggagtggtctgcaagattgtatgtcctgtacattaacgaccactcgcgtagagcggagatgatgaccagggtcagggctgaggaagaagcagcagattggatacgccaagcagatgaactccgtgagaggcttggcccaaatccatggtttcaagcactggacggaaagaccaaaaagcgcagcctagcgggggacaacgtcacaatttcgactcgggacgagatcatcgagtatgcatacgcagggctagacaaggcaagtttctacgcggtctggaacctgctttctcaatactcgcacgttcttcctatgtcatttacaacgacggagaacaacgggcgcggctccggactacccaaccaagctgatcttgactacatgactacaacggcttcgctagccgctgacacactacacaacgcgacgaatctcatgaccgatgcctttccagacgctcaatcggtgagaaacgggatagagtcaaaattcactcctgggcctaaggcaaacgccccagatggcacatag

SEQ ID NO: 335290 - DNA, 618 bp, Pseudomonas aeruginosa
atgttcatccgagcttaccttcgagcctctactgacgggcaaaacgctggccgcgctcgcgaattgctggagcagttcgccagcgagtacgaccaagccatcgccagtgtttatcaggagaacgccagcggcgcggctgcggatcgacctgagctgctgcgcttactgaaggatgcgcgcaaaggagacatcctactggtggagtccatcaaccgattgtcccgcttgctgctggaggactggcaaaaactcaaggcagctatcgactcgaagggcctacgcgtcgttgctctggacctacccacaagccaccaggggacggccaacaccaaaggcgacgaattcaccagccggatgcttgcggcgatcaactcaatgctggtggagatgatggcggccatcgctcgtaaagactatgaacaacgcagggagcgccaagccaagggaatcgaaaaagctagggccaagggtaagtacgaagggcgtccagttaactccgatcttcacaagcgggttagcgaactgctcaaggccggattaggtatccgtgcggctgccagatacgcgcactgctcaaccactactgtgttacatattcgcagtcaatgcgggaagtag

SEQ ID NO: 335291 - DNA, 1056 bp, Pseudomonas aeruginosa
atgaaggacagcagtggtataaattttaactattcctgtatttacgctgcaacaggaatttacaatccaagcccagatttgaacgctgtactactgcatgatgagaatgtgtcgattcgtattctaggcttaaaaagctatgtgaatctggtggatagggtattttgcccgcaaagtaaagaaagctctgaaaaaattagcgaaaagaccaaggataataatgaggttcgccggaacaattttatcctgcaaggccaggatcatgctgttatacatgtagaatcatgtctgccactcgaagctgtcaaaagctatcacgaagaaaactccgaaattcaaactttcgtcaaggcaccattgaaacgcaatgcagaaaatgcttttaaagctgtctcggcggcgatgacgtttgccagagggatttcactctcaaagaactatgaattcatccatgaccggtactacgttacagatagtgaggcctcgataataaaatttctacaccccgtggaagttttggaaggaggaacaatgtcggaaatcgacatggatgaaatagaagtcgcaaaagcactctcttcaatccttcatcgcgaccaaaaaacaaaagaattaatttccatatattcagagtccctgactccagataagagcggccatcttcatgcttttattgctgcttggacagctctagagattttcgttgcaaagcagtttaaggagctgcaatcgagcattaccataaatatcaacggcgcaacggcacataatgagttttcgagccggatgctcgacgtaatgaaagacaagtatcgtttggtagacaaattttccgccttgtcaaacctttatgatagtgcgaattctgatgcggacatcgcagaattcaaaaggataaagggcatcagagataagttcttccataggatggagggagaggtcaaaagcctgccattagaagagactagacagttgatgttcaagtattttgttctttatcttgaaacaaagcaggaaggtttcttttttcaaagagcaacaaagcggccgtcatga

SEQ ID NO: 335292 - DNA, 2721 bp, Pseudomonas aeruginosa
atgactgacttctcgcgcaccttctcgggcactccatccgccgtcctgccgacggccaaccgctttttccgccccccgctgccgtcggcccatgtggcgcgcccgcgtctttgccgtcgactgcgcgacggactggacggtcgcctgctgctgatcgccgcgcccgccggattcggcaagagttccctggccatcgagttctgcgaaagcctcgatccgcgctggcagagcctctggctgggactgagcagccgcgagagcgatcccggacgtttcctcgaacgcctgctcgatggcttgcgacagtaccacccgaccctgggcgaagaggccctcggcctgctgaagatgcgccagcgtcaccagccgttcgccttcgagacctggctcgacgacctgctcgacgaactcggcccctgcctggacccgcagcgtcccctgctactggtgctggacgattaccacctggcccagggcgcggtgctcgaccgttgcctgcaattcctcctcaatcacctgcccgagggcctggtgctgctggtcaccagccggcagcggccggactggcacctggcgcgcctgcgcctgtcgcggcaattgctcgaactcagcgaacaggacctgcgcctgaccgccgaggagagcggggcgctgatggccgccagcggcctcgaactcgacgaggacgcgctggacgcgctgctcgagcgcagcgaaggctgggtcgccgggctgcgcctctggctgctggcgcgcggcgatccagaggagcaggtcagccccggggtacacggcgccgacgaactgatccgcgactacctgctggaggaggtgatcgagcggcagccgcccgaggtccaggcgttcctcgcccagaccgcgcgcttcgagcgcttctgcgccgagctctgcgataccgtgcgcgaggccggcgacagcgcggcgatcctcgaccacctgcagcagcaccaggtcttcctcgtgccgctggacgaaaacggccagtggttccgctaccaccacctgttctccgacctgctgctggcgcgtcccttgcccgacttcggtccgtccgccggctccctgcacctgcgcgcctgcggctggttcagccgccatggcctgctcgaccaggcggtggagcaggcgctgcgcgccggccagccggacgtggcggcgagcctggtgcagaacctgtcggaagagcaactgctggcggagcagaacatcgccaccctgctgcgctggaagatggacctgccggacagcctcctggcgagcacgccgcgcctgatcctgctgtacggctgggcgctggcgctggcctgccagctggatgccgcggaagagctggccggccaactggcgcgtttcctgccggcgccggacgagtccgcgcaacgcgacctgctggcccagtggcaggccctgagcggggtgatcgcgcgcggccgcggcgacatcgacaaggccgaggcgcactgccgcgaggccttgcaggacctcgccggggagcgctacggcacccgcctgcaatgcctgtcgacgctgagcaacctggcggtgacccgtggcgacttctggcaggcgcgcaactacaaccgcgacgccctggagttcgcccagcgctacggcaacccgctgttcgaggcactggtccattacgaccgcgcccgcgtcctccaggcgcgcggcgaggtggcgcgcgccgaggaggaggtgcgccagggcctggaacgcctccagcacctgccggcacaacgccgctacgcggtgcgcgggcggctcctgctgtaccgcggctacctgcgcagcctggcgctgcagccggacgaagcgcgcaagtggatcaagcagggaatcgaggaaacccgcagctgccgggatgtcagcctggtgatcggctattgcgtcctggccagcctggaagggcgcctgggcaactacgcggcggcgttcgcccggcttggcgacgtcgagcggctgatgcatgcctgggatatcccgccgatctactacctggcggcgatcaccctgatcaagtgcgaactctggctggcccagggccagaccgaactggccggcgtctggctacagcgcctgggcggcacctacggcgggcaggcggccacgccgccggaatgcagtccgctgctgccgctgcatgtggagttgctccaggccggcctggagcgccgcgaaggacgcccggaggaagccgcccgtcgcctggaccggctggcccgctcgacgcgggagaacggcgcgttgctaccggctcgcctggccctcggccaactggccgcgctgcacctggagcagggccgcgagcgcgaggcgctggcgaccctgcaacaggccatggagggcgcagtcggcggagccttgctgccgctccacgaattgctcgtgcagcagccggaatggttgcgcgaacagttgcagcgcttccctgcctgtcccggcgcccagcgcatgcgcgcgctgttgccggagccgcccgccgagcccgcgggcggtgcgggcgaggtgctcagcgggcgcgaactggcggtgctggagctgatcgcccaggggttgtccaaccaggagatcagcgagcggctgttcatctcgctgcatacggtgaagagccacgcccgccatatcaacgacaagctcggcgtcgagcgtcgcacccaggcggtggcgcgggccaagcacatggggttgttgcgctag

SEQ ID NO: 335293 - DNA, 1368 bp, Pseudomonas aeruginosa
atgaaaacaacgaagattcttctgcataccggtgtactggccctgagcctgctggccacccaggtgatggcggcggtatccgccgacgaagcggccaagctcggcaccagcctgactccgttgggggcggagaaggccggcaacgccgacggcagcatccccgcctgggacggcggcctggcgaccaacgccggcagcgtcgacagccgtggcttcctcgccaacccctatgccagcgagcaaccgctgttcaccatcaccgcgcagaacgtcgaccagtacaaggacaagctgactcccggccaactggccatgttcaagcgctacccggatacctacaagatcccggtatacaagacccaccgcagcgccaccgtcccggcggcggtgcaggaggcggccaagcgcaacgccaccaccaccaagctggtggaaggcggcaacggcctggagaacttcgataccgccaacccgttcccgatcccgcagaacggcctggaggtgatctggaaccacatcacccgctatcgcggcggcagcgtccggcgcctggtgacccaggccactccgcaggtcaacggctcctaccagctggtctacttccaggatgccttcaccttccgtaccaacctgaaggactacaacccgaacaagccgagcaacgtgctgttctacttcaagcagcgggtcaccgcgccctcgcgcctggccggtaacgtgctgctggtccacgagaccctcaaccaggtcaaggagccgcgcctggcgtggctctacaacgccggccagcgccgcgtgcggcgggctccgcaggtgtcctacgacggtcccggcaccgccgccgacggcctgcgcacctcggacaacttcgacatgtacaacggtgcgccggaccgctacgactggaagctggaaggcaagaaggaaatctacattccctacaacagctacaagctcgacgatccgaagatcaagtacagcgaaatcgtcaaggccggccacatcaaccaggacctgacccgctacgagctgcaccgcgtctggcatgtggtcgcgaccctgaagccgggcgagcggcacatctacgccaagcgtgacttctacatcgacgaggacacctggcaggccgccgagatcgaccattacgacggtcgcggcaccctgtggcgcgtggccgaggcgcatgccgagcagtactacgacaagcaggtgccctggtacgcggtggaaaccctctacgacctgctctccggccgctacctggcgctgggcatgaagaacgaggagaaacaggcctacgacttcaactacagcgcttcggaaagcgactacaccccggcggcgctgcgccaggaaggggtacgctga

SEQ ID NO: 335294 - DNA, 1926 bp, Pseudomonas aeruginosa
atgacaacccgtaatccgttctcgcgtcgggcccggttgccgttggccgtcagcctggcttcctcgctggcggctccggcctttggggtgaccttcaacatcggggaaatcgaaggttccttcgactcggcgttgtcggtcggggccagctggtcgaccgccaagccgaacaagaacctgatcggtgtgaacaacggcggcaagggacttttccagacctccgacgacagccacttgaacttcaagcgtggggaaacgttctcgaaggtcttcaagggcatccatgacctcgaactgaagtacggcgataccggtgtgttcctgcgcggcaagtactggtacgacttcgagctgaaggacgagcaccgcgagttcaaggacatcgacgacagcggccgcaagaccctggccaagtcctccggcgccgaactgctcgacgccttcatctaccacaactatgccatcggcgacctgccgggcagcgtgcgcctgggcaagcaggtggtgaactggggcgagagcaccttcatccagaacggcatcagcgccatcaacccgatcgacgtcaccgccttccgccggcccggctcggagatcaaggaaggcctgatcccggtgaacatgttctacctgtcgcagaacctcaccgacaacctgtccgccgaaggcttctaccagatcgagtgggaccagacggtggtcgacaactgtggcaccttcttctcccagccggacgtggtggccgatggctgcgaccagaacctggcggtgctgaccaacaacaaggcgtccatcaacctgctcaacaacgtgctcgccggggctggcctgagcgttaccccgtcgccctgggacgagggcatcctggtccgccgcgggccggaccgcgacgctcgcgacagcggccagtacggcttcgccctgcgctacttcgccgacgaactgaacaccgagttcggcgcctactacatgaactaccacagccgcctgccgatcttcagcggccagggcgcctcggccagcaccatggcggcgatcaacgacctcgccacccgcctcgccgcgatcaacccggcactggccgcccaggccgcggcggcggccaccgccggcaactccagctacttcatcgagtacccggaggatatccgcatgttcggcctgagcttctccaccacgttgcccaacggcaccgcgtggagcggcgaagtcagctaccggcccaacgcgccggtgcagctgaacaccaccgacatcctcttcgccggcctcgacccggtgagcatcggcggcaaccgcccctacgacaacgcctcggtgctgaacggccaggccgggcaggacctgcacggctatcggcgcaaggagatcacccaactgcagaccaccctgacgcacttcttcgaccaggtgatgggcgccgagcgcctgaccctggtgggcgagatcggctggacccacgtcggcggcctggaaagcacctccaaggcacgctacgggcgtgacccggtcttcggaccggggccgctgccggggaccatctccggcctggccagctgccaggcgctgaacgtcagcacgctgggcaccgccgaagcgaacaacgtcagccgctactgcgagaacgatggctataccacctcggacgcctggggttatcgcgcccgtgcgatctgggactacaacgacgtgttcatgggcgtgaacctcaagcccagcgtggcctggtcgcacgacgtcgatggctattcgcccggccccggcgccaacttcgaggaaggccgcaaggcggtcagcctgggggtggacgcggagtaccagaacacctacaccgcgagcctctcctacaccaacttcttcgacggcaagtacaccaccgtggacgatcgcgacttcgtcgcgctcagcttcggcatgaacttctga

SEQ ID NO: 335295 - DNA, 1683 bp, Pseudomonas aeruginosa
atgctgaagacccgtctcatcccggccgccgccggcgcttatcagtatccgttgctgatcaagagcctgatgctttccggccgtcgttacgaaaagagtcatgaaatcgtctaccgcgaccaggtgcgctacagctacgccaccttcaacgagcgcgtcgcgcgcctggccaacgtactcagcgaggccggggtgaaggccggcgacacggtggcggtgatggactgggacagccatcgctacctggaatgcatgttcgccatcccgatgatcggggcggtgctgcataccatcaacatccgcctctccccggaacagatcctctacaccatgaaccacgccgaggatcgcttcgtgctggtgaacagcgagttcgtcccgctctaccaggcggtggcggggcagctggccacggtggagcggaccatcctgctcaccgacggcgcggagaagagcgccgaactgcccggcctggtcggcgaatacgagtcgctgctggccgcggccagcccgcgctacgacttccccgatttcgacgagaactccatcgccaccaccttctacaccaccggcaccaccggcaatccgaaaggtgtgtatttcagccaccggcaactggtcctgcacaccctggcgatggcttcgaccatcggcagcctggacagcatccgcctgctcggtaccagcgacgtgtacatgccgatcaccccgatgttccatgtccacgcctggggcactccgtacgtggcgaccatgctcggggtcaagcaggtctatcccgggcgttacgatccggaactgctggtcgaactgtggaagcgcgagaaggtcaccttctcccactgcgtgccgaccatcctgcagatggtgatgaacgccagggctgcccagggcgtggacttcaagggctggaaggtgatcatcggcgggagcgcgctgaaccgctcgctctacgaggcggccaaggcgcgcggcatccaactgaccgccgcctacggcatgtcggagacctgtccgctgatttcctgcgcctacctcaacgacgaactgctggccggaagcgaggacgagcgcaccacctaccggatcaaggccggcgtgccggtgccgctggtggatgcggcgatcatggacgaacagggccgcttcctcccggccgacggcgagtcccagggcgagctggtgttgcgctcgccatggctgacccaggggtatttccgcgaacccgagcgcggcgaggagttgtggcgcggcggctggatgcacaccggcgacgtggcgaccctggacggcatgggcttcatcgagatccgcgaccgcatcaaggacgtgatcaagaccggcggcgagtggctgtcctccctggagctggaagacctgatcagccgccatccggcggtacgcgaagtggcggtggtcggggtgcccgatccgcaatggggcgagcgcccgttcgccctgctggtggtgcgcgagggccagcaactggacgcccgtggcctgaaggagcacctcaagcctttcgtcgagcagggcaacatcaacaagtgggcgatcccctcgcagatcgcggttgttaccgatattcccaagaccagcgtcggcaagctggacaagaagcgcatccgtatcgagatcgcccagtggcaggaagccggcagcgccttcctgtcgaccgtctga

SEQ ID NO: 335296 - DNA, 1203 bp, Pseudomonas aeruginosa
atggctaagatcaagctcaccaagtccgcagtagatgcggcacaaccccaagcgcaagccatcgagctgcgcgacacccttgttcccggcttcctgtgcaagattacgccggtcggtcgcaaggtgttcatgctccagtaccgaacgaacgccggcgagcgacgcaagccggccctgggcctgttcggcgagctgaccgttgaacaggcccgctcgctggcgcaggaatggctggcccaggtgcgccggggcggcgatccggcagcggacaaggccgaggcacgccaggcacccactgttgaggagttgtgcaagaggttcatggaggactactccaagaagcgcaacaagcccagcacccgagtcggctatcaaggcgtcatcgaccgctgcatcatcccgctgctgggccgcaagaaggttcacgacgtgaagcggccggacgttgccgggctgatggagaagctttcatacaagcagaccgaggcgaacaaggcgttcagcatcctgcgcaagatgttcaacatggcggaggtgtggggctatcggccagacggcaccaatccttgccgccatgtcccgatgttccctgccggcaagtccacccatctcatcagcgacgacgacatgggcaagctgttccggcagctcgacaagatcgaggtcgaagggcttgagaactacgtcatccctctggcgattcgcctgcaattcgagttcgccgcccgccgctccgaaatcgtcacgctcgaatgggaatgggtcgatctggagaatcggcgcgtcgtctggcctgacagcaagaccggcggcatgtccaagcccatgagcgaggaagcctaccggctgctttcgacggcaccgagacaggaaggcaatccctatgtgctgccgtcgccacgccatccggcgcagcacctgaccacaggcgaatattacggcggctggtgccgcgtgctcaaggcggcgggcgcgacgcacgtggggacgcatggcatccgccatcgctctgctaccgacattgccaattcaggtatcccggtcaaggtcggcatggcgctgacggcgcacaagaccgtcgtgatgttcatgcgctatgtccacaccgaggacgatccagtgcgcgaggcggccgaactggtggcgaaccggcgcaaggcgattaccggcgccaagcagcctcctgcggaggcgacagcatga

SEQ ID NO: 335297 - DNA, 2061 bp, Pseudomonas aeruginosa
atgaacgccgtactcaaaaccgaagccatcgccatcgaagccgccgcgccactggaagtggccgacccgaccaagaacctgatcttggttccgctgtcgcagttgctgccgcgccgttccaagcgcaacgtccgcacgaccccgcgccagtccattcccgaactggccgcgagcattgcccgcatcggcctgctgcaaaacctgatcgtcatcctcgccgccgatggcgagcaatacgaagtcgtcgcaggcgaccgccgcctgaccgccttgaagctgctggcaaggaagaagcgcatcgccgccgactacgaagtgccgtgcctgctagtggcggatgcttcggcccgtaccgtgagcctcgccgagaacgtgcagcgcgagaacatgcaccccgccgaccagttcgcggccttcgccgcgctggtcaaggaaggacgccccatcgaggacattgccgccgatttcggcgtgtccccgctggtggtgcagcgccgcttgaagctggcgaacgtctcgccgcgcctcatggccgactaccgggccggtggcgtgacgctggaacagttgatggccttgaccatcaccgacgaccacgccgcgcaggaggccgcgttctatggtgcgccggaatggcagcgcagcccgtccaagctgcgcgagcgcctgaccgagcgcgaaatcgacgccgcgcacgcgctggtgcgcttcgtcgggctggacgcctaccggcaggcaggcggcggcatccgccgcgacctgttcgcggaaggcgatgccggaacctacctcaccgataccgcagtgctggaaacgctggtgcgcgacaagctggcaacgctggccgaggacgtgcgcgccgagggctgggcatgggtggaggccgtgccgcatctggcctacgaggaacggcaggctttccagaacgccccgcgccagcgccgcgagccgaccacccgcgaggcccgccgcattgcctcgctgcaaacccgcctcgacaagatcgacgccgaactggaagaagcctgccaaggtgaaagcagcgaggacgaggccaaggccgagaaactggaacagcggcgcgatcaggtggtcggcgaactgcaagacgcggaggacgccttgcaaggttatgcccccgaggtgcgcgaggtggccggtgccatcgtcaccatcgaccgcaacggcgaggccgtcattcatcgcggcttgctgcgcgaagccgaggccaaggcgctgcgcacgctggaaaagctgcggcgcggtttcggcagcaccgaaggcgaagccgccaacgacgagcacgaggacgccgacgacgcacccaaggccgcgagcctgtccgaccggctggcgcagcggttgagtgcccatcgcacggcggcgctgcaaatcgaagtcgcccggcatccgcaggtcgcgctggccgcgctggtgcatggcatggtgcagaaggtcttgcagcccgacgcctacggcgatggactgccgctcggcgtgcgcctcacggtgcaagaccggctggaaggcatggccccggactggccggaatcgtccgccgccgtggcgctgcgcgaactgcaacaggtggcaggtgttgccttgccggaggacagcgccgaactgttcgccgtgctgctggcgaagtcgcaagacgaactggtgcggctgcttgccgtgtgcgtggcttccacggtggacgtggtgacgcctcgcgccacgccgcaccggcccggcgaggaactggcgcaggccgtgggcctcgacatggccgcatggtggcaaccgaccgcagaaggctacttcaagcacgttccgaaggccgcgatcctgcaagccgtgggcgagtacgcgcccgagcacgtcactaggctggcgaagttgaagaaggccgacattgccagcgaagccgaacggctggcggatggcacgggctggatgcccgccatcttcaagaccgaaacgccggaagccacgcaggaagaaccgcaggagcaggacgacgccccgcaggaagccgaggcaatggcggatgaacccgccgaggcgctggccgcttga

SEQ ID NO: 335298 - DNA, 825 bp, Pseudomonas aeruginosa
atgcaactcgcatcccgcttcgcttcccgctccccggtgctgcgttcggaacgtcccttgtcggatgaccaaatccgggccgtggccccgtcgatcttcgccaaggcaccgcacgaaagccgctccgagcggtacagctacatccccaccgccaccgtgctgcaggaactgcgcggggaaggcttcgagcctttcatggtgacgcaaacccgcgtgcgccacgacgaccgccgcgactacaccaagcacatgatccggctgcgccacgccagccagatcaacgggcgcgaggccaacgaaatcatcctgctgaactcccatgacggcaccagcagctatcagatgctggccgggatgttccgcttcgtttgcagcaatggccttgtctgcggcgacaccgtggccgacgtgcgcgtaccccacaagggcgacgtagccgctcacgtcatcgaaggcgcatacgaagtcctgcacggcttcgaccgggtgcaggaatcgcgcgatgccatgcgcgccatcacgctggacgccggggaatcggaagtgttcgcccgcgctgcgctggcgttgaagtacgacgaggacaagcccgcgcccatcacggaatcgcaaatcctgatgccgcgccgccatgacgacgaccgccgcgacctgtggagcgtgttcaaccgcacgcaggagaacttgaccaaaggcggcctgtccgcccgcgccgcgaatggccgccgtcagaccacccggcccgtgcagggcatcgaccaaagcgtgcgcctgaatcgcgccctgtggctgctggccgatggcctgcgccagttgaaagcctga

SEQ ID NO: 335299 - DNA, 279 bp, Pseudomonas aeruginosa
atgagcagccataacgactacatcatcgaaatcacggcgcagcacgatgcgctcaagccgttcgcgccggagaacggccagcccttgcgcttcaagatcggcgacgcggtgatctacaccaacgaatttggcgcacagttccggcgccgcgttaccgggttctaccggccaaccgcgctttcgggcctgtacgcgcgcggtgcgcgctacctgctgaactcgtcatcgccctggatgccagtttcggaatccagcctgcgccctgacgactcggcgtga

SEQ ID NO: 335300 - DNA, 1311 bp, Pseudomonas aeruginosa
atgctctccgttctgaagaaccgcacctatcgccacctgttttccgcccaggtgatcgcactcgtcggcaccggcctgatgacagtggcgctcggcctgcttgcctacgatctggccggcgcggatgccggtgcggtgctcgggacggcgctggccatcaagatgctcgcctatgtcggcgtcgcacctgtcgcgcaggctttcgccgaccggctgccgcgacggtcgttgctggtcgccctcgacctggtgcgagcatccgttgcgctctgcctgccctttgtcagcgaaatctggcaaatctatctgctgatcttcgtgctacaggcggcgtccgcaggcttcacgccgacctttcaagccaccatcccggacatccttcccgacgaagacgaatacacgaaggcgctgtctctttcccggctggcctacgatctggaaagcctgatttccccaatgctggccgccgcgctgctgaccgtcatcagctttcacaatctgtttgcgggaacggttctcggcttcctcgtctcggccgcgctcgtggtcagcgtggggctgcccacaaccgtacccggcccacgccggggcatctgggatcgcactacgcgcggcacgcgcatttacctcgccacgccacgcctgcgaggtttgctggcaatcagcctcgccgtggcggcagcaggatcaatggtgatcgtcaacacggtggttatcgtcaaggcgcgcttcggcctgggcgaatccgaggtggcgtgggcgctggccgccttcggaggcggctcgatgattgcggcattcgcgctgcctcgcttgctcgacaagattgctgatcggccagccatgattgcgggggcaacgatgctggtgttggggacagcagccggagcgatgattccgacctatgccgtcctagtggtgatctggctggtggtcggctttggctacagcgtggcgcaaacgccatccggtcggttgctgcgtcgctccgctcaccccgaggatcgtcctgcggtctttgctgcgcaattcgccctgtcccatgcgtgctggctcatctgctaccccttggccggtcgcttcggtgctgcctttggactgcaatcgaccttcatcgtcatgtcgctgatcggtcttgtaggagtgggattggcgttgcggctctggcccgctagtgattcttccgacatcactcacgatcaccctgatctgccgtcagatcatcctcacttgcgcgaacacgcagatcgcggcgggcatcgccaccctgcgatcgtggacgacctgcaccgggactggacgcgcgtttag

SEQ ID NO: 335301 - DNA, 258 bp, Pseudomonas aeruginosa
atgaaagcgacgcacaagcactcaacccacaccgaccttgtgaagcgactcaaacgcgccgagggccatcttcggcacgtcatcggcatgatcgaaggtggtcagtcctgccttgacatcgcccgccagctcgcggcggtggaaagcgcggtgacggcggcaaagcgcgtcctgatccacgaccacatcgaccactgcctgtcccatgacgaggactccgttctggccgaaatgaaggcgctgaccaaactgctctga

SEQ ID NO: 335302 - DNA, 360 bp, Pseudomonas aeruginosa; identical to SEQ ID NO: 324725

SEQ ID NO: 335303 - DNA, 1293 bp, Pseudomonas aeruginosa; identical to SEQ ID NO: 324726

SEQ ID NO: 335304 - DNA, 1020 bp, Pseudomonas aeruginosa; identical to SEQ ID NO: 332088

SEQ ID NO: 335305 - DNA, 276 bp, Pseudomonas aeruginosa
atgcgcaaactgctgatcgctttgctggcggccttgccgctcgcggtgctggctgccaccccgaaatccatcacgctgtccgtgcagaacatgacctgtgcgctatgcccgttgacggtcaagaagtcgctggaaaaggtgtctggcgtcaatgctgttcacgtcgatttcgacaagaagacggccaccgtcacctatgacgctgacaagaccaagccagaaactttgacccaagcgacaacaagcgcgggctacccgtccactgtgcagaagtag

SEQ ID NO: 335306 - DNA, 348 bp, Pseudomonas aeruginosa
atggcacaactcaccgggaagggctcgttgatcgcgggcgtattggccgccatcggtgcgtcggtgtgctgtgtcgggccgctcgtgctgctgacgctcgggatcggcggcacgtgggtcgctggcctcacggcgatggagccgtatcgacccatttttatcggcctgacgctgctgtttctcgggctgaccttccgccagctctatctggtgccgcaagtctgtgcgccggatacgtcatgtgccgcccctcgcacgcgcgcacgccaacggctcgtgttctggattgtcgcggcgttgctggtcggtctcttggccgttccgtggctggccccgctgttttactga

SEQ ID NO: 335307 - DNA, 399 bp, Pseudomonas aeruginosa
atgacagccgatctaaccatcagcaggctggcggaagctgccggggtgaacatcgagacaatccgctactaccagcggcgcggcttgctggacgagccacccaaaccgcagggcggtcatcgacgctacgaaccggggcaggtgaagcgcgtacggttcatcaagcgcgcgcaggcgctgggcttcaccttggacgaggtgggcgccctgctgactctcgacgcggcgtgcgcctgtagcgagacgcgggcgctggcggtgcgcaagctgagtctgatcgaacagaagatggccgatctcgcggccatgcggcaggcgctggccagcttggtgcagcagtgcgatgccgggggtagacatgcttcctgcccgatcatcgacgtgctggagtgtgattga

SEQ ID NO: 335308 - DNA, 2055 bp, Pseudomonas aeruginosa
gtgctttattgcaatgagccgggtagtgaaatccacttcgctcttttccctagcgaagccctgcgtcacgctctcaagtttggcttcacacgcttcgactggcctctcggcaccaacgatccagttgtcgccaacgctgctgccgcttacatctacagcgccatcacggtgctggaaaacatcccgatggcaaagaacgctcacaacgctgggcacccgcttatcacgatgctgtcgctctacgagtatctgtgctttgcgcggcccgaccagggccgcaatcttctgcatattccgccaggactgccacagtcggcacatagcacaatgtttcacctgagccggatttccgagcaagccgatcactttgtgttctgtcaccactttcagaccctgcaagaagaaagcgggctctataccattttgattcccttgggcgatccgagtctgaaacgtgacccaaattaccccgagaagatgcgcatcgagctgctgactagctcacccatccttgcatcgatcctgctgcacttcagtctggggcagatcgacaaaatcctggtgaaaagctttatcgaagccccttcagcagatgcttttgagcgcgccctgcaagaaatccaggaactgatccgacggatgctcggcccgatcccgcccgccgaaccgatgtacaccctgccggacatgagcgcgtccaacgacgcaatcacagcaccgcaagacgccggaacgctagcactgctgggtgcactgagcagcgtgctgtcacccgctcagaacgcaaagctacaagcactgtttgaagcaccgacagcaaatgacggcctgatccagcctccaacaacgggggcaccaacccttcacttcggcaccctcgccaaggagttcgaagaacgccaggtacgcgagggcgcctggcagaacccgcgcacacgcatcaccatgcactcaagactcgaaggcttaaccgaacttatcggcggacatcgcccactcaccaccctcacccgagcggacttcaatgcgctacgcgatcagttgcgcggctatccgaaaaaccgtcatcgcctgcgcgccactcgatatcaaccgttgagccagattattcaaggcggcaagtacgagcccatcaacgcacgcacagcgaaaaaattctttgaactggctcgggcaatcattagctacgcgcacgaccaaggttatttgaaagagaacctggcagccggattggcattcagcacgaagggcgctccctcgccgcgcaagcgcacctacaaccccgggcaaattgagctactgctcaatgggcctgcctatacgctcaaagcaccaccccgctggcgcctggatgactaccgcttctggctgccactgctcgggctctataccggcgcccgcttgagcgagctttgccagctccagctcggcgatattcgcgaagagctgggcgtatgggtgatcagcatcagcagctccggggcacgacagttgaaaaccgtcgattcggagcgcctcgtgcctctgcacagagtcatcttggaggctggattcttagcgtttcataaacagcgcctggaggcgaatagcggcgatctgtcggcctctctttttgaaaatctccgcgtatatggcgacctttcaccagggcacattgccagccgctggtaccgcggctcagacaaagatgacaagggctacttgggacagtgcgggctcggcgatgatgaactgacctaccatgggctgcggcatacgttcattcagcagttccgtcgacaaaaattggacatgctgattggcaaagccttggtaggccacgctgaccgaagcaccaccggcggctacggcgattgctacccgagctacgtgctgaaaaaggagctcgacaagatcgagtttgaagcctcgactgcacatattcactacagccactacaaggagctgcagactcagcagggagtcttccgcatcgggcgcccagttggcgcaggcacaaccaaaaccgctagcaggcccgcaaaacgtcattggcaatcccgcatcacccgatag

SEQ ID NO: 335309 - DNA, 1272 bp, Pseudomonas aeruginosa
atgaatgcactgaaccaatccaacatatccgtcccaatcacccacggcctatcgctgtctttcgccgctgggcacgacccgaaaatcttggagctggcactgccgcacctcaccaagatttctgaatcgatttatcgccaccacaactctccgctgctagccgaattcatcgatatcgttctgaatcggttccttcgagaaaatcatcgcaacgcaaagtcggtttaccaactcagagctaggatggccaaaatcaaggccgtccttactcaagatgatcccttacgccgactagccagcctaaacaatcgcgatatccaagcgctaaaggatgagctcccaaagctgctcaggaagaacaacacatcgagcagtcaaggcgataatctccaggcttactaccgactttttaatcgcatgctggatcaagcaaccaatgatcattggattgatgaagacctcaagatcaaaggctgccagaccaccaaatcgaagatcaccaagtctttcctagactcaaacttggtcagtcttttcaatagctggccctatcagacatatgccccggacgcaccgaaagccactgtgcgccacgacgctcatagctattgcttttggctgatgccacttgggctcttcacgggagctcggctcaacgaaatctgccagttgcgcgttcacgatgtattccacgacacacatggcgtccccctgatcagcatcaacgacagcggcttcaacaagtcactgaaaaatgaacagtcgaagcgagatatcccgatttgctcgaagctgatcgaaatgggttttctagattttgtagcggagcgccgccaggcccaaggcccagatgcattgctgttttcagagctgcgctttgacgaaaagcatctttattcacgtgctgcgagccgtttcttctgcggacccgtaacgggtgcaggatttatcggccagcattgcccagtcgcactcgcaggcggtttcaatttcaaaagttttcgccggacattctcagtgcaacttcagaagtctggcgtgccagcgacaaccattgcacacctactgggccatgatggcggcaagctcgaagtcaccaacgagcactatctcgaaaagtcgccgtccgtgatcttgctggatactctggagcacaacttgagctacaacctacccttggacgcaatcagctggcagcacttcaaacatctgatgaccagtcaggcaggacgcagcaagcgaggccggaaagccaataaaacgctgcactag

SEQ ID NO: 335310 - DNA, 597 bp, Pseudomonas aeruginosa
atgcctcatccgctcacccttttgcagatcagcggacgcggctacccgccagccccccttcggcagagcaccttgctgatcatcgatgcccaggaagagtaccgcagcggcgccctgcgcctgccaggcctcgacgccgccgccgcggagatcggcgtgctggtgcaggcggcccgcgccagcggtacgcccatcgtgcatgtacgccacctgggtatccagggcggcctgttcgatccgcaagggccgcgcggccagttcctcccggaactgcaaccggaagccggggaaaaagtcgtggagaaacgcctgcccaatgccttctccggcaccgagctgcacgacctgctgcagaaccacggccgtctcgacctgatcgtctgcggcttcatgacccattccagcgtcagcaccaccgtgcgcgcggccaaggactacggctaccgctgcaccctcgccgatagcgcctgcgccacccgcgacatacccaccctgaacggcggggtcctgagcgccgcggacctgcaacgcgccgagatcgccgccctcggcgacaacttcgcggcgatcgtcgcccaggcccgggaacttctctga

SEQ ID NO: 335311 - DNA, 408 bp, Pseudomonas aeruginosa
atgccgaacagatacctcaccgccatctataccgagggcgggcgggccctgccgtgccttgactgctggggcctgacgctcatcgcgcgggttgagttgttcgggctgccgatgctgaccgacttcggcggtgtcacgcggcgcaccccggtttcgatgcaaagggcgtgcgatacggagatccagcgcgcgctcgagcaatgcgagccaggacctggggtcatcgccgcggcctacagagggcggctgctcgatcacgtaggtcttctggtcgaagtggatggacgcctccgggttctcgaaatcaacccgggaagcggggtttcactcaccccgctccagaagttctccgacaaatactccaaggtggtcttctaccgtgatcgaaatctacccatcgctccttga

SEQ ID NO: 335312 - DNA, 2730 bp, Pseudomonas aeruginosa
gtgatcgaaatctacccatcgctccttgacggagaaccgctggagcggcatccgatcggccgcaggatgacgattcatgcctggctgaccgcgaattcgcccgggtaccgctgccacgacgtacacccgttctctatcggtgttgtccccgctgaggttgcgctctgcgatgacctcaccgacaagcagaaaaaggcccatgaggagttcatccatcccggtgagtgggctgagcgcatcatcgaccgcggcgacattgtgaggatctacaagctcccgcgcgggactgatccgttcacgattactgcggcccttttcaagggggcgcaatcggtttttcggatgctcatgcctcaattgcccggcatgccgacgaaccccgggcagggcgcgtcgctctctgaaactagcgcgcgcgggaacaaggtaaaactcggcgatgcgatccgcgaagtcgctggccgtcgtctgatttatccagactacatcctgccgccccggaagtacttcgccggtccgcgtgagcagtggaccgaaatgctcctgtgtattggccgtggtcggttccagatcgccgaaggggcagcgaaaatcggtgacacgtcgttcctggcactgggcgctgatgcctctttccagattttcgaaccagggcagaacgtcagcgggcacccggcatcggtctggtggcacctggttgaggaagttggtgcgagctcgactggtaatgccggcctggacctgaccgagagttccaatctcaccccgaacccgtcggcaactacgttcacgttttccggaacgaacatcattatttctgccggagccgggtcgttcccctctgactgggttgcggggacgatcctccgggttgaggcgatgtacccctattcggtgaacgatggcggcggcacgaatcgcgacgtcgtgacgggggatatcgctcagctcgggctggatgttggcgatgagatcgaggtggtcggcaccaacggcggcctctacctggtgaacgacatcacctcaacgtcgatgacgctcaactacagcaacggttcgccggccaatgcgttgcagaccggctccggaaatgcagcaatcggcccgcgtgggctgcgctatcggatcacggcgtacagcgcgcagcaactcaccgtcgagcggctgaccagtgcgggcggtgtcgatgttgactggccaggattcaccgctctcaactcgtctacgtcccgagtcaccattgatccgaccagcctagaagggggctggcgcggtcccttcccggcgtgcccagtatcggagaagaccaacttcgtcgagatcgacgtattttgcccggaagggctttgcggtgtaggcagggaagggcagatctaccagatccgcacctattacgacatccagtggcgagacatggccatcggcggcgcatggacgacggtcagcaagaaccatgctggcagttctctcgaccagcagggttttacggacggcatcccgctgccgtacatgatgcggcccgagtttcgcatcagaaaagttttcgtcaaccagggcggcaactcaacatccgagtaccgagaccgcacccagtggtacgggatgcgcgcgcgcctacaggctccatcgtcctacgccggcgtcacgacgatggccgtcaggtatcggtcgtctgaccgtatcgcagcgcagaccgaaagccgcgtttcggtggaagctactcgcatgctaccgactcggcagaacggtgcatggacgagcgagatcgctacgcgagacatcgtcccgttcctctgctacatcgccaaagagcgcggctacacagacgccgacctcgacctagaagagctcgatcggcttgacgccatctggaaggaccgcggcgacacgttcgacatgatctacgaggacggtaaggtcacggtcgcgcaggtcatggacgatgtgcttgccgccgggtatgcggagaagacgatcaagcgcggcgtgatctccgcagcccgagacgaaccaaggaccacattcgggcacatgtactcgccgcagaacatggatggtccgctgaggatcagcatcagcgctccgtctgaggacgactatgacggagtcgatgttgagttcgtcaatgccaacggctggatagaagataccgtccagtgccgcttgcccggggatgtcggcaggaaggtcgagaagatcacggctgtcggtgtcacaaaccgcgatcgcgcctggcgctacgggatgcgccgccggatggctcagcgataccgtagaactgagcactcgttcgataccggcctcgacgcgctgaacagcgacttctgggattacgtggcccttgccggcgatgttcccggcccaggactggcgcagagcgcatacctgaaatcgttcgtgatctctggaagctcggtgctgatcgagtccagtgagccacttgactggtcgctgctgaactcgccagcgctctacctgcggcgcccagacggaacggtttccggtggatatccggcgtcgaggatcgacgactaccggctgagcattcccagcatcgatttcatccctgatgtttcttgggagatcgaacctccacacctgctgctgggaaacccatacccggccctgatcagttccatcgatcccaacggcaatacctcggcatccgttcgtgcggtgaactacgaccccagggtctacacctacgacaacgccagcgccccaaactga

SEQ ID NO: 335313 - DNA, 486 bp, Pseudomonas aeruginosa
atggcccagctacgtatgatcaatgaacctggactggtcgagcaggtgcaatccagcctttacgaggccggaatgatctccctgacagaagtcagagactgcttctcgaaccccaggatccgggacttctacgtgagggatctcgacgcatcgggtcttccgctcgccggtatcagtgccctgagtgaaatcagcatgctggcggacaactggcagaaaacctatgccatcagccttgatggctggcgagacaggcaggggtcgcttcagcttgtcgatggcttccacttccgggacccgagcatctcgatcgtgcaggtctggtattgcgatccactagagattcactcgcacgaactgagctggctgctcgcgctggcagtgtcattcaccgattgcgaattgcgtcgctgcgaacggacctgcggggcgatcaacgaagtactcctaccccatggctttgcgctggaggactcctggttctga

SEQ ID NO: 335314 - DNA, 1509 bp, Pseudomonas aeruginosa
gtgatcagtatggaaatgatgggcaaaattcgccggatgtatttccgcgacaagctgtcgctgcatgagatagccaagcgcaccgggttggcgcgcaacacgattcgcaagtgggtcagagcacctgaggccaagccgccggtctaccaacgccgcgcgatcttcaacaaactcagcccttttcacgccacgctggagcaggcgctaaaagccgattcgctgcggcccaagcaacagcggcgcagtgccaaggcgctgttggcgcaaatcaaagccgaaggttatgacggtggctacagccagctcaccgcgtttatccgtgcctggcgagggggacagggcaaggcgtcgcaggcctttgtgccgctgacctttgctcttggcgaggcgtttcagtttgactggagcgaggaaggcttgctggtcggcggcatttaccggcgtatgcaggtggcacatctgaagctgtgtgccagccgtgcgttctggcttgtggcgtatccgagccagggccatgagatgttatttgacgcccatacacgctcgttcggctccttgggcggcgtgccgcgccggggcatctacgacaacatgaagaccgccgtcgacaaggtcaataagggcaaaggccgggcggtgaatgcgcgctttgcggtgatgtgcgcgcattacctgttcgatccggacttctgcaacgtcgccgctggttgggaaaagggcatcgttgaaaagaacgtgcaagacagccgcaggcgtatctggctagacgcccaggactgccagtttcactccttcgaggaactcaatgcctggctgggccagcgctgccgcgcgctttggaacgagctgacgcaccctcaatacagcgggctcagtgtggccgaggtactggagttggagcgcgccgaactgatgcctatgcccgcggccttcgacggttacgtcgagcggcctgcgcgggtctccagcacctgcctggtcagtgtcgggcgcaaccgttactcggtgccgtgtgagtacgcgggtaagtgggtcagcagccgtttgtatccgacccgcatcgaggtggtggccgatgatgcgctgattgccagccatgcgcgcttgctggatcgcgaacaggtcagctacgactggcagcactacatcccgctgattgagcgcaagcccggcgcgctgcgcaacggagcgccctttactgatctgccagcgccgctgcgtcagcttaagcacggtctggggcgtcatgccggcggtgaccggatcatggcgcaagtcctggctgccgtaccggtcgccggactcgatgccgtgctggtagccgttgagctggtactggagagcggcagcctgagcgccgaacacatcctcaatgtcgtggcacggctgacagcatccgaaccgccgcccagcgtcgaaacccacttgtcgctcaaggaagcccccgtcgccaacacggcgcgctacgaccgcctgcgtggccagaccaaggagatcggtcatgcgtga

SEQ ID NO: 335315 - DNA, 321 bp, Pseudomonas aeruginosa
atggagcggttacgtcgcaacagcggctgcgacactcatggagtatcgcaagacaccggtgcgacttaccaaggctgtcgcaaactcacaccgcgatacacttgctgtgccgtaagcggcatcaagactgcctgtttgggcacccaaaacggccaatacagacacgaaaactgccacttttggcaagaagagcgcccgaactggcactgcttttatcggttatatttcgatattaaaaccatacaaatcaataatttatctgaattttctgtaaccgactggctaccattagtccagctgttgccgctgaccgaaaactga

SEQ ID NO: 335316 - DNA, 858 bp, Pseudomonas aeruginosa; identical to SEQ ID NO: 324555

SEQ ID NO: 335317 - DNA, 1551 bp, Pseudomonas aeruginosa
atgaaatgcgcccctgataaccttcccgacgatcccgtcctgctcaagcagatgctgctgttggctcagggaaaggtggcgcaactccaggaacaagtcgccttgctgcgccacaagctgttctcgcccaagtctgagcgcagccctgaagacgccgactcaccgcagttggccatgttcaacgaggtcgaagagctgatcgcagcgccggccgccgagccagccgaagccgaagccgaagccgaagccgaagccgaagaagtcgttgcgccggtcaagcgccgtggcaaacgcaagccgctgccggccaacctgccgcgtgtggaggtcatccatgagctgcccgagcacgagctgacctgcgcctgcggcgcctgcaagcaggtgatcggcgaggagaccagcgagcagctggagatcatcccgatgcaggtgcgggtcatccgccacatccgcaagacctatgcctgcaaggcctgtgaaaccgccccggtcaccgccgacaagccggcacaactgatcgagaagagcttggccagccccagcgtattggcgatgctgctggccaccaagtacgccgacggtattccgctgtaccgcttcgaaaagatgctcagccgccacggcgtcgacatcccacggcagaccctggcgcgttgggtgatccaaagtggcgagcaactgcaaccgctgctcaacctgatgcgcgacaaactgttcgaataccccgtgctgcactgcgacgaaacgcgcttgcaggtgctgcatgaaccgggacgcgacccctcggcacaatcctggatgtgggtgcaaagcggtgggccgccggacaagccggtgatccttttcgactacacagccagccgcgcgcaggaggtgccgctacgcctgctcgatggctaccgcggctacctgatgaccgacgactacgccggctacaacgccgtggcggcacgtgacggcatcgaacgcctgggctgctgggcgcatgcgcgacgcaagttcgtcgaagcccaaaaggtgcagcccaagggcaagactgggcgtgccgacgtggcgctgagcctgatcaacaagctctacggcatcgagcgtgacctgaaggacgctaaccatagcgaacgcctcgacgtccgccagcaacgcagccagcccctgatcgaccaactcaaggcctggctggacaaaacccagccgcaggtcgctgggcagacggccctgggcaaggcggtaaactacttggccagcaactggagcaggctggtgcgctacatcgaaggcgggcatctaccgatcgacaacaaccgcgccgagaacgccatccgtcccttcgtcatcggccgcaagaactggctgttcagcgacacgcccaagggtgctaccgccagcgcgcagatctacagcctgatcgaaactgccaaagccaacgggcaagagccttacgcctggttgcgccacatccttgaacgcctgccgaccgccagtagcgtcgaggattacgaagcgctgctgccgtggaactgctcgccagcttctgcctctgcttcctga

SEQ ID NO: 335318 - DNA, 360 bp, Pseudomonas aeruginosa
atgatgcgtcccgacgccaaagtgcagaaggtctatctctacccaaagcccgtcgacttccgcaaatccatcaacggactggccgcgctggtcgagctggacatcaaggtggaggtgttcaacccggtgctgttcgtgttcttcaatcgcacgcgcagccaggtcaagattctctactgggagcgcaatggcttctgcctgtggctcaagcgtctggaagccgagcgcttcaagaccaaacccgatgcgggtgacgaagccatcgaactgacggtcgacgaactgaactggctgctcgacggcatcgacctgtggcgtaaccgtccgcatcaggttctgacgccgcgttacgtggcctga

SEQ ID NO: 335319 - DNA, 279 bp, Pseudomonas aeruginosa
atgagccagatctcaatagtaggctacgaaagcgactgcaattgcgagcactgtgggcgcgccctgaggcacggaatccgtcttagcgacggcaggcttgtgggcgccacctgcctcgacaaaaagctgaccaagccgcgcttgcatcagggcaagtcctttcgcttcggtgctgaacacatcatcaagattgcaaaggttgttcagttctactcgccgggcaactgggcgcgctttggcgtttccgcatcgagcacgacgtttgagggggtcgcatga

SEQ ID NO: 335320 - DNA, 174 bp, Pseudomonas aeruginosa
atgaagatcagaccaaaggctgcgcccgcaagcctgaaagcagacgggcgcgaatactcgcgcctagttcttgcggcattcaactggatcaacgaagacgatgaagccgagcggctcgtagagctgaatagcaggaaacgcgaagtgaatgagaacgcaaagaagcggttttga

SEQ ID NO: 335321 - DNA, 342 bp, Pseudomonas aeruginosa; identical to SEQ ID NO: 324664

SEQ ID NO: 335322 - DNA, 942 bp, Pseudomonas aeruginosa
atgctctactggcgcatcggccagcgcatccacacgcaggtcttggacgggcgccggggcgcttatggcaaggaagtcctgcctaccctggcggcgcagttggtgaaggagtacggcagcagctttgccgagcagaacctgcgccgtatggtgcagttcgcggccaccttccccgacgagaagattctcgtatcactgatacgagaattgagctggacgcacttcatcgccctgatcccgctgaaagacccgctccagcgggactattacgcgcagatggcgagcgtcgaacgctggagcgtgcggacgctgcgcgagcgcatcgactcgatgctgtacgagcgcacggtactgtcccaaaagccgggcgagacgatcgcgcaggagctggcgacgatgcgcgatgcgcagcgcatgtcgcccgccctggtcatgcgtgacccgtacatcctcgacttcctgggactgcgggacacatggcaggaaggcgacttggaggcggcgatcatccgcgaaatggaatccttcctgttggagctgggcgcaggtttcagcttcgttgcccggcagaagcgcatccaaattgacggcgaagatttccaccttgacttgctgttctacaaccgcaaactgcggcggctggtggcagtggagttgaaggtcggcgagttcaaggcggctttcaagggtcagatggagctataccttcgctggctggacaagcacgaacgggagccggaggaagcctcgccgctgggaatcatcctttgcaccggcaagaagcgcgagcagatcgaattgctggagctggacaagtcgggcatccacgtcgccgagtacctgaccgccttgccgccgaggggcgtgctggtggagcgactgcaacaggcaacgcagcgggcacagttgcagatcgagcagcgcaaaatcgacaacgagtag

SEQ ID NO: 335323 - DNA, 687 bp, Pseudomonas aeruginosa
atgtcggtgatgttcagccccaactgggtgaggatggtcgggctcagcaggttcagcgagaagtttccggacgaatccgcctggatcggcagcaattcgacgttcaacgccggggtgatgacccggatcaccacgctggagtcaggctcggtggttccgctgaaaccgaaacgcgggttcagcgggttgaggctgacgtcgaggccgaagttgccgatggtcaccggttgctcgatgctggtgccgacgccgatgctcgccgtgttgctcggattgccggccgggtcgcgtccgaccaccgacacctgggcattgagcaactggtcccaactgaagtcgatgtccaggtcggtgagcaggttcagcgacgccagcccgctgttgtcggcggtcaccgtggcggtggcggtcaccccgccgacgtcgacggtcaccgtcaactcggtccctggctccgccgagatggtcaggatgttgccgaccagggacagcaccggggtcgccggcggaatggtgtcgatggtgaacggcaccggggtcgacgcggtgccgccgttgatgtcggcggtgacggtcgaggcgccctccgggaacgggcccatgccgccgggaggcgtcagggtcagggtcaggttgccggcggcgatgtcgccggcggtgagggtatggctgacctcggcctcgtag

SEQ ID NO: 335324 - DNA, 1575 bp, Pseudomonas aeruginosa
  misc_feature (452)..(461): n is a, c, g, or t
atgagcctggcgctgctgttgcgcgtccgacgcctgcgcctggaccgggccgagcgcgcccagggccgccaattgctacgggttcgcgccgcggcgcaggaacacaccgagcgccaggcggcacaacgggactaccgcgactggcgactggccgaagagcaacggctgtttctcgcctgccaggcggccatgctcgaccgccggcgcctggaagcctggcagcagcaggtaggactgctgcgggaaaaggaagccggcctggaacaggactgcgccgaggccgcgcagcgcctcgaaggggagcgcgagcgcctgcggcagtgccggcgagaactgctggaacgccagcggcaactggagaagttcgccgaactggagcgccacgtcgacgccgagcgccaggggctgcgcgaacgcagcgaggaaggcgaactggaagaattcacccgccnnnnnnnnnncccgccacgagacctggccatgctcaagctgaacgccgtggatacggctccgctcgtgtcgtccgacacccctgccccccttccgccgctgcgcgcgcagcagatcgccttcgaacaggccctgcccgcgcaccgaccgccggcgcccaggccaccgttcgacaagggcgacgaaacgacagaggccgaagagcccgccgcgacagccgacgcgccgacctcgacgcctctcgccgaccagcccgcggcgcctgccgccgaccggccgccgaccactcggcaagcccccgtgccagttgccgcggacgcaacgccaacgccaacgccaacgccaacgccaacgccaacgccaacagtgtcgccgtccggatcggtagcacggcaagcgccggcggtctccgcgcgcgtcgcggcgtccacgcaagcccgggagccggccagcgtttcggcgcctccggtcgacgaaccgccgctggtgccggtgtcctcccacccgcaaatcgcaggtcggacgcatgagcggccacagcccggccccggcttcccggcgaaaaccgcagccgaggtcgcgtccacggcgcaggccagtgtccaggcttcgccgcccgcgccgacagcgggcggcgaaggccgcggagaggagcgtcggcaacccggagaaaccgatccatccgcactgccccccgacgaccaagcgcctgtgccactgcctgccatgcaaacccccggcgaccgcctgctggcacgcctgctggcatcgagcgggagccggccactgccgctggccgatctcgcgcgcctgctcgatgccgtgcaggggcgcatccaggtcgccagcgcagccgaaagccatgcggcgcgcctgcaggtgcgactgccccagctcggcgccgtggaggtgcaggtcctgcatggccatggccagttgcaggtcgagatcagtgccagccccggcagcctggcgtttctccagcaagcccgtggcgagttgctcgaacgcctgcaacggctgcatccggaacaaccggtgcaactcaccttcaaccagcagcaggacagcggccagcgctcgcggcaacgtcgctacctgcatgaagagtggcaagccgaatga

SEQ ID NO: 335325 - DNA, 336 bp, Pseudomonas aeruginosa
atgaaaatgcccgacaaagaccccatcacgtgggctgcgctgcttgcgtggctgtctgcgcactatccgcagttgtacgccgccggcctgtcctttgtggtcgcgctgacccgggtgatctacggcggtggaacgcggcgccaggcgctgctcgaggcaacgctctgcaccttgattaccttgggcctgattccggtccttgagtggttcggcctgccacagaacatggctaccgctgctggggtgttcaccggcttcctaggagtgaagaagatcgccgagttcgctgatcggatcgccgactggaagtttccgcgtcgaggggctggcgaatga

SEQ ID NO: 335326 - DNA, 216 bp, Pseudomonas aeruginosa
atgccgttggtcgttatcccccaccctttcccggctagcccgctgcagacgctattcgactccgaggacgaagcgaacgcccgggcccaggtgatggtcgagtcatcgtcgaagcagccggtccccgttgctgaactgcgcacgctctaccagggctcggtcaacgtcagcgcgtcgccagcgatgggccaaccgaagggacctaaacagggttga

SEQ ID NO: 335327 - DNA, 180 bp, Pseudomonas aeruginosa
atgaagttcagcgaattccgacgctggctgagggcacaaggcgtgaccttcgaagctggcaagggcagtcacttcaaggtgaccgccccgaacggtaagacaacgaccttcgcagatcacggcgccaaagaaatgccggagccgacacgcaaggcgatcatcaagcaactggggctctga

SEQ ID NO: 335328 - DNA, 186 bp, Pseudomonas aeruginosa
atgaagatgactgaagccattacccattttgggtccaagaagaagctcgcccaggccctaggcattagccctagcgcagtaaccatgtggggcgaatctatccccgagctccgccagtaccagatcgagcgcctcacgaaagggaagctcgctcggtctgcagacaatgccgcgttggcgtcctga

SEQ ID NO: 335329 - DNA, 345 bp, Pseudomonas aeruginosa
gtggatttgaagctcattcaggagcgcatcaggcagttcagggacgaacgtgactggatgcagttccacaatccgaagaatctggctatatccatcagtctcgaggccaatgaactcctcgagcacttccagtggaagaccatggaagagagtgaagcctatgtcgtgcaggccaaggaagagatcgccgatgaggtcgcggatgtggcggcctacctgatcgagcttgcggacaatctgggtatcgatctccaggaggcgatcctcaacaagctggccaagaatgaggctaagtaccctgcgcacaaggccagggggaatgcgaagaaatacaccgaactgtaa

SEQ ID NO: 335330 - DNA, 639 bp, Pseudomonas aeruginosa
atgcctgagttggtgcgtatatatagttgcgaacacgacagggaggttgtcgatatggcgattagcttcgagccgctcgatgttgagggtgttgattttcgtggggttgatgttgtcgcttataaagcaagaaaaggtcgtggaaggtcgggggatattggtttgggaaaatgcttcggcgcaataaggttgcttgacaataacaatgctcgaattggaaaagaccataaggcttcaagcacccctgctggatcagcggggctccacagcgagcgggttgccttggaacggtgcgttagggccaactgggagcctccgcttaccaatataatgatacttggtatgcagaattctcctggtcctataggaagagaactctatgcacggggagtccgaacaattatatgcttcacggaactcccaccttgtccagcctgtttgacgtggtggaaggcgcttgatagtaagtttcaccctggctctatcagattgcagtacttcggttggttcgaagactactatggaggcaagacgccagaggaaaggatggtcgatgactctgacggaaataatagaaatgagcatgcgatagaggctttcaagtcctatcgagattcgttcgaggcccctaccagatag

SEQ ID NO: 335331 - DNA, 765 bp, Pseudomonas aeruginosa
atgagccagaacaacgccgccttcctccacatgaccgccgacacgctcggcaagagcctgctgcagggactgatccaggaaatccgcatcctgccggacgtgtggcagaagctgtccgaagccaagcagaccgatgtgatcgagcgcctggagcagcaggtgcgcaacgccgccaccatcgcggtgcacactatcgccggcgccgagcgcgagaccgtctacggcaagctcgaatccatcgcggccaaggacaagatgaaggccgtcatcgtggtgaatcactccagcccgaacaagcacgaccttctggacgcggtgaacgaggactgcctgctgatcatcggcggcgccgctgagttcctcgacggcatgaaggacgtgaaggcggatccggaccagaacccgctggacctgaatggcggtgacggcgacatggaggaagacggcgcctggggcggcgagcagcagcccgacgatgatgtcgtagatgccgagttccaagaactgccgcaactcaccgtcgagcgcttcgccggccacaccctgggcgagatcgccatcggcgtcgccaccaagaaggacgtgttcgacgcggcctggctgcaatcgcgcttcgctctcaccaccgaggaagccgagcgcgtcattctccaactgctggaccagggcgtcatcgtgctcgagcaggagaacgaggaatcccgcgagttgaacacttaccgcgtcgtcaagaagccgggggatatcgccctcgacctggagtga

SEQ ID NO: 335332 - DNA, 348 bp, Pseudomonas aeruginosa
atgcctgatcacctcccctacaccatccatgtgggcgactgcctgcatgaactgcagactcttccagacgagtcagtccactgctgcatcaccagcccgccctacttcggcctgcgcgactacggcgtcgacgagcagatcggcctggagcagacgcccgccgagttcgtggcgcgcctggtggaagttttccgcgaggtccgccgcgtgctacgcgatgacggaaccctctgggtcaacatgggcgacagctacgcctccatcgcccgccaccgcctggccgctgcctggctggagggcgccgcgcagatggacatattccacgacaccaaggagcccatcgcgtga

SEQ ID NO: 335333 - DNA, 864 bp, Pseudomonas aeruginosa
atgatcgccgggcatcttgttcgaaaacgagcaagcgtctgggttgatcgatgggaacttaagccaggtgattcgctaataaatcgagttcaagaagctgttgaggggtcaagtgctctgctcataatgctgtcctctgcatcggtagagtcagagtggtgtaagaaagagttaactgccggtctcctacgtgaacttgaagaaagacgcgtggtaaccattcctgtacttctggaagactgcaagattcctctgttcctccgtgacaagatgtatgcagattttcgaaaagatttcgatgttggcatgagtgcgttgttggaggctgtcgccggacactctaatcctgatcagtcccgtattgaggatgttgacggctatctggactgggcaacggactggggtgaagtcgaggggaatattagtattaactatacgttggtgcagaattcgtccaataccgaaatgacgttccttacccagatattttgtatcttagggagtgtcgcctcagctagatatcggcagtaccagaagctcggtatagactgggtgtaccgcacgatgcatgcgctatctttgcaggcattttcaaaagataacgacgatatgttcgtgattctggatgacacaattccaaagacccgaagcttaatgtgtgttgatcccaagactggcagcgattacgaggtgaaaattatctgccgtaaaatggggaacgacaacggtaaagaccaactcctcaatattaccgagtatttggagcggattttcgaattcacgatgcaaacgaatcgaaagccaactgccgaagaggaagagaagatcaagattattgcagctaccccgtggccgcgcgcatag

SEQ ID NO: 335334 - DNA, 741 bp, Pseudomonas aeruginosa
atgttcagggataaagtcagttgggttgtcgcaggactcctatttctaactggaggcctgtttttcaggatcattcctgcgagtaacttctggaaagctgatatggcggcgttgcttggtatgatctcttcagtcgcaactgctattggcgtttttgtggccgtttacttcggaaagaaggggttggatacctggcgatatcaaaatgatgcctcgatcaataatgatttagttcgacgaatttcaattgctcttctgaagtacgaggaagctattgcgcagatgagaaaccccgctatgtttccgcacgagatggcgccgaaggatggtgagcaggatagcgggacttccgaggaacgaagccatcgtgagcgtcagcgcggctatgcgaggcgaatggagaaggcttcgctggcgagactggaggtctacgcagtgctgcttgaatcccagatattttggggcgatacaccgctagatatgttcaagaaggtgttcgagttcgaaaaggaactcatcaactatatcagaatctattttgaatggataaagccaggccgcgttgatgatgagagaaaaccatacaaggatatgctcgataagaggcgagacataatgtatggcgatctttcagatgatggtgatgaattccagaaagaactcaaagcgagtgtcgagtcgatgaagtcatacctaaagggtaaacttgtttatgccgatcaccagttagatgggctgtag

SEQ ID NO: 335335 - DNA, 12543 bp, Pseudomonas aeruginosa
atgccgtcccgttcgccgtcgtccgcccgttcctcccgcgcgctttacgcgccgcgcctgaagccgctggcccaggccatcgccctgctgctggtcgcagggggcgcccaggccgccgggcagccgttcagcgccgcctggttcgccgccaagggcgcggctcagggcggcgctgccggggcgccgcgaccgggagcgcagttgccgggggcgccgccgccgctggcgcagcagcagcgggtcaaccagcagttgcagcgttcgatggccaacctgaacaacaccgtcgccgccattgccgcccagcaggccgcccaggccgccggacgccaggcggcgctgaatctcccgcaggatgttccggacgggctcggcgagggcggcctcaaggtcgacgcctcgctgccgttcgagcaggcctggcagaacgccaagggaccggtgcagacccaggccgccggcaagaccacggtgagcatcgagcagaccgccgacaaggcggtgctcaactgggagaccttcaacgtcggccgcaacaccaccgtggacttccagcagcacgccgactgggcgctgctcaaccgggtcaacgaccccagcgcgcggcccagccagatccaggggcagatcaaggccgacggcacggtgatgctggtcaaccgcaacggcgtggtgttttccggcagcagccaggtggacgtgcgcaacctgacggtggcggcggcgaacatctcggacgaacagttccgtcagcgcggcctctactacgacaacgccggcagtcgtccgaccttcaccgacgcggccggcgccgtgcgcgtggagcagggcgcacagttgcgtacggcagcgccgtccggctcgaccaggggcggcggctacgtcctgctgctcggcagcgaggtggacaacgccggcagcatcgtcacaccgaaggggcagacggtcctgtccgccggcgacagcttcgtcatccgccgtggccagggcaccgacggcaacctgacctccaccacccgcggtaacgaggtgctgccgggcttcgccgccgacagcagtgccggccgggtgcgcaacagcggcctggtgcaggccgccaccggcgatatcagcctcagcggccgcgaggtggagcaggccggcgtattgctttccagcagttcggtggacagccgcggcaccctgcacctgaaggccagcgagcggatcaccctggccgaaggcgccaccagcgccatcctggtggatagcagcggcagcgccgccctcgacagccagcgcgaggccttgctcaagccgttgaacggctccagtgccgccgtcagtcggggcgacggcgaccgccgcgacctgtcgcgggtggagatcgactccgccggcagcgtcgatttccgcgacggctccatcaccctcgccagcggtggccaggtggcggtcaacgctggccagcgcgcgctgctgcgcgacggcgcggtgatcgatgtctccggcgcgcaaggcgtgcaggtggcgatggagaccaacaacatcaaggtcaacgtgcgcggcaacgagcagcgcgacgcctcggtcaaccgcgagggcggcggtctgaacagccaggacgtgtgggtcgacgtgcgcgacctggtacgggtgcctgccggcaccaacggctatgccagcgaccgctggtacaccgctggcggcctgctggaggtcggtggctacctgggcacccagggccactcggcgggcgagtggatggcccagggcggcatcgtcagtttcaccggcaacgacgtggtgacccaggccggttcacagatcaacctgtccggcggaaccctcgatgtgcagggcggctacatccgccagacctggctgaagggctcggacggacgcctctacgaactcggctcggcgccgggtgacctgctctacgacggcatctaccgcggctacgaggcacacagcgagcgctgggaccagacccgttatttctacaatccgctgatcgcgccgacccagcgctacgagaacggctacagcgttggccgcgacgccggcagtctggtgatcggcagcgccaatgcgcggctcgacggccaggtggtcggcgatacctatcgcggcgagcggcagaccgaagcgccacaggccggcctggacggctacaaccagtcgcagaatgccgtggcgcgcggcgcgcagctggtcgtcgggcgctacaccccctactacgtgaagagcagcggcctgctggagtacgctctcggcgccgatgccggcagcctcaagcaggtggtcatcggtaccggcgaggtggcggccgaggagccgaccctggacgctccggtggccgccgagcgccagggccgcctgagcctggacagcgaactgctcaacggcttccagctgggcggcctgaaggtggcggccggcgagagcatccgcgtcgacagcgcgctgaccctggccaatggcggcgaggcgatcctgttcgccaacgacgtggcgatcgacgccgacatcaccgctcatggcggcagcctgcaggccggcaacgtactggcgcagatttcctcgaacgggacgatcgatggtttcgtcgatgccggccgcgaagccggcatcttgcgcgtgggcgatggtgtacgactggatgccagcggcttgtggagcaacctgctgctggcgccggaggacaacgatacgttggcctaccgcgacggcggacggatttccctgcgcagcggcggcgacctgagcctgggacagggcagtctgctcgacgtgtcgtccggggcggcgctgctggccgacggcaagcgactgggcggacgcggcggcgacatcgccttgcacgccagtgccgggctggcgcaggccagcgatggccaattgcagttgggcggcacattgaatggtctcggcacgagtggcgccggcacgctgtcgctgcagagcggcaaggtgcggatcggcggcgacgacctcggggatggcagcctgcaactggccgaagatttcttccagcagggcttcgccagctaccgggtggtcggtcgctccggattgacggtagccgaggatgcccaggtgcgggtcgcgcggccggtctaccgtttcgccagcggggccggcgaggtcgcggctggcgaggcgccgcgagaggcgctggaggcctggataccgccgctgtacctagaggatgccttggccggacgcttggtccaacgcgaaggggcggacctgtacctgcaggcaggcggcgacggcaatatcctcgggcagctcgatcccgccagccagacgctggagctggggcgcggttcgctggtcgaggtcgatccggggcgcgccatcgtcctgcgcggtcccggacagatcaccttggatggcattctgaacgcttggggcggacgcatcgacgtgcgccagcagcagttcggcgcgctcgacgttacccaggacaatcagcccaaggcgcaaggccagccccatgctcgctccatctggattggagagcaggcattgctggatgttgccggccgcgctgtcactgccttggatgggcgcggtcgccgctatggagaagtgcagtccggcggcagcatcgtcatcggcggcgagatcgatccgggcaaggcgatcgcgacctcggcggatgcgttcgtcatcgtacgccccggtgcacgactggaggcctccggcagccaggcacagctggatgtaccgggactgggaagggttttgctggccggcgacggcgggcgcatcgctctcagttcctacaatgggctgtatctagacggctcgttgcgcgccgcagccggcggctcgggagcggcgggcggcagcctggagatcattgcggacgctcccctgtaccaaggttttactgtcgtggatgaccgggtattggccatgcgtgagctgatcctgacggcagggcacgccgattcgggattaccgaccttgctgcaaccgggaatggacgattcggctctgcgctatggccagagccgagttgggactcagtcgctgacgggcggcggattcgaccaactttcgttgttcagcaacggtccgctgtcgttcgaggggaacatcgatcttgcgatggggcgcagcctgaatctgtacgcggggacgatagccgccacaggtggtgggccgagcgaggtgaagttgcaggcgccctatgtccgcctttccggcatcgggatgtatgggcagcaggcctctggcgagtttcgtccgcgtctcacgtacgggccgaccgcgacagcggagcaggttcgcttgcaggtttctgccgggcgcctgctggatatcgccgggcgcttgtcattcggtagcgacggggtgatcaatggggtcaacgcagaggctgtccgctatcagcgaccaggtttcgagaaggtaacgctgcgcagcgagggcgacctgcgtttcgctggcgactatccagagaatggcgatccgtcggggcgcttgataacccacggcgatctgcaactgactgcggcccaactctatccggtgacgggagcgagttcgaccctctatgccgggtatggactggatgagggggggcaggctgtcttcgatgccgaacggcatttggctatcgaacgtagcggcgagtccttgccggacactccgctgtcggtattcggcagtctggcgttcatggcatcgaatatcgagcagggtggcgtggtgcgtgcgccgctggggctcatccagttcggcagcaatctggatcgtgccccgggcacggtaaggttgttgccgggtagcctgacctcggttagcggcgctgagctggtcatgccctatggaggcacgaccgatgggatcaactatctggtcaaccaggtccccattcaactgaccggtgccgggggcgctctcgctgctgggacactggttgcgggagtcggcctttatgccagcgaggtcgatgtgcaacagggcgcgcggctggacctgtccggcggcggcgaactcgcgggggctggattcatctccggcagagggggttcgaccgatgcgcgttttcatcccctggtgcagcaggacaatgatgggttccgtctgccggagctgtccagcaacccggtgtatgccatcgtgcctggacaccaggccgttagtgcgccattgggcggcgaggcgggcgccatccagccgttggtcgggcaacaggtcaccatcggggatggcgttcccggcctggccgccggtacctacaccttgctgccttcgacctatgccctgttgccgggcgctttccgcgtcgagatcaacggtctggcggggcaaggcgcgcccatggcgacgcaggggttgcgcaatggctcctgggcgacgtccgggcagttgtcgattgccggcacgtccatccgcgacagtctgagccgtcaggtcatcctgtcttccgccgatacgctgcgccgctactcgcagtacaacgaaatgagctatgcggatttcattcgcgccgatgccacgcgcaagaacatccccagagcgatgttgccagtggatgccagatccctctacctgggattgcgcgcggatgaggagcttcgggaaaacgccctgagcttcgaggggaaggtcgacttcacgccggaagaaagcggatatggcggcagcctcatcgtggatgccgaggcgggcatcgagattctgcctgaaggtgggctgcccgactccgatttcgctggcgtgtcgttggttgcggacgatctgaatgcaataggcgccagccgtatcgccattggcacgctgccctacgtcgaatacggcgagcaaggaaacttcgtccagttcggcgggagcaaccggctctttcccgttgtgctgcgaaagggcgcgcacctttccgcaccggaggtgatcattggcagggatatcacccttgaaggcgggagtggcatcagcactctggggaaaggcaagactgcatacgattcgtccgatggtttcatctatcaacccggcggccgtaacctgctgctcttgtccaacggatggctgaacctgctggcacccgcagcggatagctcgttaccggttcgtctcggaggttgtgcggaaggggcgggctgcgccgacaccgaactctattcggagggcactctgggtatcgccaccaatggtacggtgacgtttggcgacaacgttcgttacgggacacgcaatctcagcctggcgctgagtacgatcaatatcggctccagccagtcgctggccgacgcggccgctcgcggcgtgttgccgaacggcctggcgctggaccagacggtgctccagcgcctgctgcgcggcgagcgcggggcgggtattccggccttggaaaacctgatcctcagcgcccgcgatgcggtcaacatgtacggtagcgtcagcctcgacacctacgacccggccaccggcaaatccagcctggccaacctggtgctgggcaccccggccatctacggccatggcaccggcgaggatgtcgccagcattcgcaccgccagcctggtctggagcggctccagccagccggccgcagcaccggtcgccggcggcgccggtagcggtagcggaaccctgcgggtggatgccgagcgcatcaccctgggctacggcgcgaatacccagccggccggcgagaccgacgaggcgcgcctggcgctgggcttcgccgaggtgcaactgaacgccagcgagcggatcagcgccaaccacaagggcagcttgcgggtctaccagcgcctggagggctacgtcgccggcgaaggcttgcactacagcggcggcgacctgcgcctgagcacgccgttgctgaccggcgaggccggttcgctgagtcggatcagcagtggcggtagcctcagcctggcggcaccggcgggcgctgccgcggtgaccttcgacagcggcaccgccgggcttggcgccgagttgtccctcagcgcccgcgagatccgcctggatagcgcggtctcgctacccagcggcaagctgagcctgagcgccgaagacgacctggagctgggcgatggcgcgcgcatcgacctggccggacgcaaggccagcttcaacgatgtggataaatacagctggggtggcgacctgctgctgagcagtcgcgccggcgacatccgccaggccgccggttcgctgatcgacctgtcggcgcgcaacaaccgcggcggtaccctgagcgccgtggcgttggccgaggacgccggggtggtggacctgcagggccgcatactgggtggcgccagcggcgactacgatgccggcggcacccgcgtgccgttcctcggtggcgagctggagatccgcgcccagcgcctgggcgacggcggcagcctgagcgagcagttcaccgccttgaaccagcgcctgaaccagggcgaggtcttcggcgcccggcgcttccagctcaagcaaggcgacctgcagatcggcgacggcctgaaggcgcatcgcatcgaggtgtccctcgacaatggccagctcggcgtgagcggaacggtggacgccagcggcgcgcaggtcggcgagatccgcctggccggtggccgcggcctgagcctgggcggcaacgcgctgctggatgcgcatgggagcctgctgcggcgcgacagctacgggcagatcatcgacagcccgaaccgggcgatggtcgagctgagttccggcagcggcaccttggtcctggccggcggcgcgcgcatcgacctgcgccatggcaccgcggcgccagcggaacaggttgatggcgtcgcccgtggcacgttggagttgaacgcgccacgcctgggcggggtcagcgccggcgacatcgccatcgatgccagcggggcgctggacatccgcggcgccggcagcatcgccctgaacgcggtgcagcgttacgacgatgcgccctggggcaacgatccggcggccggcgggcggccctaccaggtgatcgaccaggcttacctcgatgcgcggcatgccgagagcagcgcgttcatcgccgcggcgctggccaaccgcgagttgctcgacggcaagctggccggactgaccaatgccacctacgcggatgctttccacctgcgtccaggggtggagatcgtcagcgcaacggcggacggcgacctggtggtgcagggcgatctcgatctgtccggctaccgctacgccagcctcaatccgaacacgccgctgaccgaggtctacggttccggcgaggtcggcgcgctggtgctgcgcgccggcggtgacctgaacctctacggcagtatcaacgacggcttcgcgccgccgccggactcgccggacgacaagggctggatcctcaccccgggggtgcagccgttcggcggcgacctggtggttcccggcccgggcgtggtgctcggcgacggtaccgcgttcctcggcggccgcaccctcaactacgacctgccgatcaagggcaccaccctggccgccggcacccgtctggccaccgaggcggtactcgaacagccctataccctggccgccggcagcgtgctggtagcggacatccacgatgccgccggcaacctgctgtacgccgcgggcagcctgctgcgcgacggggtgacgctggaggtcggcagccggctgggtgccggtaccctgctggctgcaccggccagcgtgcaggcgatgacctggcctgcgggcgtgcccttgccgagcatcctgcgcgaggggccaagcagacccaatgtcctgctgctcaatggagagctggccttggcacgtggttctctgatcccttcgcagaccgaggtggtactggctggcgatgcgcctttcatcgaattgcggcccagcgacggtgtccgccagggacgcaactgggcattggccgagatgctgccggccggtagccagtcctggtccatgcgcctggtcgccggtgccgatctcgcggctgccgacaaccgtctggtgcgtccggactcctcggccagcctgaacctggccgatacgcactatcaggcgaagatcgaacagagctcgggagggctggtgttcaccgatcaggctaccgactgggggatgaccccgggaactccggtcgacgagagcaatgaatggatctgcgggctggggccgtattgtgccgagcctccccgctggacctgggcgcccggcaattacctgggcatgcctgctggtacggcgatcggcgagggcgatctgtggtggtgcagtgtcgatccgtccctgtgtatcgagaatctcggcaaaaccgtggtcacaccgcagaaccagttgttcagtgtgctgcgcaccggcactggcgatcttgacctggccagtgccggtaaccttacgcaatggtcgccgtacggcgtctataccgccggaacgcaggccgccgatgtcgcgacgggattcaaacagcctcgcggtctgttcaatgggtcggtactgggcgccggtggcgcggattacgaagtgctctcaaccagccagtaccaggcctggtatccggaacatggcggcaacctcgatatcgccgttggcggtgatgtggttggtgatcaatgggccgagaaactgacaagtagcgatcccattcgccccttgccccccagcgctgcagtcggcaactggctctggcgccagggcagcgccgacagggaaggagtgccgacggcctggtgggtcaatttcggcagctatgtgcgtggcgcggagggagatgctccctatctggtcggcttcaccggtttcggcactctgggaggcggcaatctcagcatgcgaaccggaggtgatgccggcaatatcgcgccacgcggagatggttcgataccttcatccggtaaccttaatccgcgcagccagggactggtcttggcggttgccggcactggccggctcacctccgacggcgcgctgcaacttggcggcggtggtgacctgaatgtgagaattggcggggaggtgaacccgagccgggaggcgcgggctacccagacctactcgagttcggggtttgacggtctttacagcggcggcaccattcacgatctgcagggggccctgatcaatctgcgcggttccgcgagcttgtacagtggtgcgctgggaggcatcgatcctcgctacgacactctactgcgggaccccgccgaagtgcgcagcagggatgcgttcagcccgacgctggctagctccacgggtggcctcaccctggtggccggagatactggcatgcgtctggaaacccgtggcgacctggtcctgggtggggtgactgaccccggtagggtgggggtgccgaataccgttggcttcacggctcccgatggcagcgtctaccaagggggcgggatcggttggttcagtctctggactgcacacacctcgatcgatctgtttgcggcgggcggcaacctgacgcccagcacccaattggtcgaggcaaccaacgctattcccatggcaggccgaaacctgtcgcctagcgatgggcgattcatctatccatcgatagtacgtgcggcggccccggaaggaagtatctatctcggtccttccagcggttacatgggaggcgtgagcctgaatgtctcgaccactccctactccttgttactggcaccgtcgctcaacggtgaactggagttgctggctggagactccatttatgccggtggctattcggtgcaacgctcaggtgccgatcctgcgaacctgccatcgatctggacgccggcatttgccggctactccgatgccgcgctgctcaacccgatagccggcaacggcagtccggacgggaatccggccgtcattggcggattgcctctgttctacttcggccccgatagcgctgcgagcctggcgcgcgatctgcaaccggcgcgtttctatgcgttgacaggagatatcgtcgggctcaatagcggtgcgcagattcgtttcggcgagcaggcggggaaccgcgccgggcaaacctggtatgaaggtgcgggtcccgtctggatgcgtgccgggcgcgacatcgttgcctccggaaccccattgggacagcgtatcagcgctcccagtcagatcagtacggatgcctcgttcaccggcaacctcttcgtccacgacgaccccaacgacctctcgctggtccaggccggccgcgacatcctctacggcaacttcaacgtcgccggccccggtaccctggagatcagcgccgggcgcaacatcctcatggaggaccgcgcggcgatcaccagtctcggcgcggtggtgccgggcgacagccggccgggtgccgatatcgtgctccaggccggcgcggcgggggccgactatcaggccttcctcgagcgctacctggatccggccaacctggcgcaggccggcaccccgctggccgagcagccgggcaaggtggtcaggacctacgaaagcgagttggccaagtggttgaacgagcgcttcggcttcgccggcgacgcggaacaggcccaggcgttcttcgccggcctgcccgccgagcagcagcggatcttcgcccgccaggtgtacttcgccgaactcagggccggcggccgcgagtacaacgaagtcggcggggtacgccagggtagctacctgcgtgggcgcaacgcgatcgccgcgctgttccccgagcgcgatccggcgggcaatccgatcagctacgaaggcgatatcgtcatgtatggcggtgccggcgtgcacaccgacttcggcggcgacatccagttgctcagccccggcgggcgccaggtgttcggtatcgagggcgaggcgccgccgtctaccgcaggcatcgtcacccagggccagggcgatatccaggcctactcgcgggacagcatcctgctcggccagagccgcatcatgaccaccttcggcggcagcatattggcctggtcggcggaaggcgacatcaacgccggtcgcggttcccagaccaccgtggtctacaccccgccgcggcgcatctacgacgcctggggcaacgtcagcctgtcgccgcaggtgcctagcaccggcgccggtatcgccaccctcaacccgattcccgaagtggcgccgggcgacatcgacctgatcgccccgctcggcaccatcgatgccggcgaggcgggcatccgggtctccggcaacgtcaacgtggcggcgctgcaggtggtcaacgcggcgaacatccagacccagggccagtccagcggcattccgctggtggcttcggtgaataccggtgcgttgacctccgccagcgccgcggcgagttccgcgacccaggcggcggaggacgtcagtcgccagcagcaggccgccgcgcggcagcgcatgccgtcggtgatcacggtgcaggtgctcgggttcggcaacgagcgcctggagccttcgcgcgacggcgccagtcgttcgccgggctacaacccggacagcgccgtgcaggtgctcggcgccggagccctcggcgaacaggcgcgcagccaattgaccgatgaagagcgcggcaacctgatcctgtaa

SEQ ID NO: 335336 - DNA, 1200 bp, Pseudomonas aeruginosa
gtgtttcagtcgtcactccgagagggccttcgccatgcgctcccccacccgtcccccggcggccgccgatccggccagccgccgcagcgtctttgccgtggtcctcggcaacgccgtggaattcttcgacttcggggtctatgccaccttcgcggtgatgatcggacggactttcttcccctccgacagcgccttcgtcagcctgctcctgtcggtcaccgcgttcggcgtcggcttcgtcatccgccccctcggcgcgatccttatcggcgcctacgccgaccgcgccgggcgcaagccggcgatgctccttaccctgttcctgatggcgctgggcaccggcggcatcgcggtgctccccggctacgacagcatcggcccggccgcgccgctgctgctggtgctgacccgcctgctgcaaggcctggcctggggcggcgaggccgggccggcgaccacctacatcctcgaggcggcaccgccgcacaagcgcggcacctacgcctgctggcaggtcgtagcgcaaggcatcgcggcggtcgccgccgggctgatgggctacctgctcaccctctggctcgacgagcgccaactgcaggaatggggctggcggattcccttcgcggccggcctgctggtcctgccgatcggcctgtacatccgcctcaacctggccgagacctttgccggacgcggccgccaggccagcacccggagcctgctcggcgaattgttcggcaatcatcggcgagccctgctgctcggtctgctgatcctctccggaagcaccatcacccagtacttcctcaactacatgaccaccttcgcccttaccgagctacacctgccggcgggcatcgcgatgctctcgacgctggtcgccggcgccgcactggcgctctcggcgttgctcggcggcgtgctctgcgaccgctacgggcgccgcgccgtgctgatcctgccgcgcctggcgctgctcgcggtgctgttcccggcactgcaggcaatgacccgtcaccccgagccggcagtcttcctcgccgtcctcgccctgctctcggccctgcatggcatgagcggcgcggcgctgatcgtgctgctggtagaaagcttccccccgggcgctgcgctccaccggtttttccctggtctatgcgaccggcgtcgccgcgttcggcggcaccgcgcagatcgtggtga

SEQ ID NO: 335337 - DNA, 894 bp, Pseudomonas aeruginosa
atggatgatctgtatcaacttctacgcgaagacgcactgcagctctctagtgagttccgcaaggcatccattcaggggcatggaacctcgcaagaaattgccgagttccgagaaaatgccgtgcaaacgtttttggcgcgttatttcccgttcccacatcggatcgcaaaggggaaagtccgcgattcgtttggcagcatcgccgcatccatcgactgcgtcatctgcgccccaaaccatccatacacggtgagcgctcgagataagttcagcctgttgctggcagagggcgtggactccgtcgttgaggtcaagccgaatatcgctgataaggccgaacttcatcgggcacttgaacaggggctaacagtcaagaagttgcgacgtgcaaccaccttgctttttcgtaagcatcatccaatgtcggagtgggcgaggcgggtgccctttggtgttttctccatgcagtgcaaagcctctccaatcgaaactgggtttgagatattggagttttaccaagagcgtggcatcgatccaatagatcaagccgatttcgttgtagtaaacgacgtgtgtgtattctcaaactttgtcgataattctctgaatccttggaatatggaaggatttccaaacaagactgggtggttttatgaaggttgggggaaagacagcctagtagggttcttgatgaggcttcatcaagtagcacacgccggaatgaaactacaagaagacgtcttgccgcgttacctaaccccgcctgcggatgcacgatttatggttgtggatctcgcctataagtatggaatctacaagcagcttcaaagccaaccgggtgtcgacaccgccacgatgcagcgcgctgttcgggctatgagtggagaaggctag

SEQ ID NO: 335338 - DNA, 132 bp, Pseudomonas aeruginosa
atggtcagcgatgacgaccagtatgagtacgtgtattgccgctacaggaagtgcggtagccgccttttggatgctcgggcttatggtctgaaggcttggcgccttcgcatccgtcggaagaaggagaagtaa

SEQ ID NO: 335339 - DNA, 1155 bp, Pseudomonas aeruginosa; identical to SEQ ID NO: 321176

SEQ ID NO: 335340 - DNA, 1128 bp, Pseudomonas aeruginosa
atgcggcaaagattctggcaaggaacattcaagaccctgggcctcctcggcctgacggcggggctcgccgcccaggccgcggagccgtccggcaaggccctcagcgccgccgccggcgtgccctggccggcggtcatcgcccaccgcggcgcctcgtacgacgcccccgaggaaaccgccgcggcctacctgctggcccgcgacctcggcgccgactatctggaagccgacgtgcagcgcagccgcgacggcgtgctggtcgccctccacgacgacaccctggagcgcaccaccgacgtcgccgaggtcttcccggagcgcgccaaggacccggtgagcagcttcactctcgccgaactcaagcgcctggacgccggctcctggttcaatcgcgccttccccgagcgcgcccggcccggcttcgtcggcctgcgcatcctcaccctcgacgagatgctcgacatcgccgaaggcggcgccaacaagccgggcctgtacctggagaccaaggtaccggcgcaattccccggcatcgaagacgacctgcgcaagctgctggaacgccgcggctggctgcaaccccgcgagcgcgccgccgccgggcatgtcgacgtggcccacggcaatggccgggtgatcctgcagaccttcgagaagagcagcctggaactgctgcaagaaagcatgccgcaagtgccgaagattctcctgctgtggctcggcgacggttacctggaagcccgttcgccagtgaccttcaaggaatccggggaaaccgacaaggcggccttctatgccaggcaggaagtgaagtccgaagccgagttcggcgcctggctggactgggccaaggcccacggcgcgctgggcaccgggccctcggcgaccctcagcgaacgcggcgaacagagctacgccgacctggtgaaaccctggatgaaccgcatgacccacgcgcgcgggttgttcatccatgcctactcggtggactcggcggaagacttcaaggccctaggcgcggccggcgtcgacggtttcttcaccaaccgcacctcggaactgctgaagttccagggccgcccggcggcgcaagacatggacgcgctgctgcgccggcacggctactga

SEQ ID NO: 335341 - DNA, 720 bp, Pseudomonas aeruginosa
atgcccctgcctgccctacccctggatgcccttctcaccggccgcgcccggcccttcacccgccccggctcgcgcagcggcatcgccaagtctccgcgcgacggtgcgctcagggtcacccccgtcggcctggaaggcgacgaacagggcgacctgcgcgtccatggcggcgtcgagaaggcgatccaccattatccgcgcgaacactacgccgcctggatcgccgaactgggcgaacatcccctgctgatgcaggcgggcgccttcggcgagaacttcagcaccagcggctggagcgaagccgacgtctgcctcggcgaccgcgtgcgggccgggaccgcgctgctggaagtgtcccaggggcgcatgccctgctggaagctcaacgaccgcttcgaggtcgccgggatgtccctgagggtgcaggagtccgggcgcaccggctggtactaccgggtgctggaggaaggcgtgttggcggctggcgatatcctgcaactggtcgaacggcgccatccggactggtcgttgttgcgcctgtccgaggtgctgttcgacaggcgggccgacgccgagctgctgcgccagtgcctggcgctgccgctgacgccatcctggcggcgcaccctggagcggcgcctggaaaaaggccaggtcgaggactgggggccgcgcctggagggagcccccggccaggccgagacgcccaggccgacctga

SEQ ID NO: 335342 - DNA, 741 bp, Pseudomonas aeruginosa; identical to SEQ ID NO: 321968

SEQ ID NO: 335343 - DNA, 729 bp, Pseudomonas aeruginosa
atgaagcgcctgttgctgctcggcgggatcggtgaggccctggccctcgcccgccggctcggtccggcgcatctctacagcctcgccgggctgggcaaggtgcccggcgacctggcctgccgggtccgggtcggcggctacggcggcgccgaagggctggcggcgttcatcgacgagcagggcttcgacctgctggtggacgccacccacccctacgccgcacggatcagccagaacgccgtgcgcgccgcgcgactggccggagtgccctgctgggcgctgcgccggcccggctggcaggccgggcccggcgacgactggcgcgaggtagccgactggcgcgagctgatcgccgccctcacacccttccgccgtccgctgttcaccctcggccgcgaaccgctggagcatctcggccaggtcccgccgcaccagcactggaccgtgcgctgcctgcaaggccagccggccgcgccgcgcgccgaggtgatcggcgcgcgcgggccgttcagcctggatggcgaacgggcgttgttcgagcgcctcgcctgcgacgtgctggtgagcaagaacagcggtagccaggccaccgagccgaagctccaggtggcgcgggaaatgggcctgccggtgctggtcctggcgcgtccggcgctgccgccggcggaccgcgagttcgccgacggcgaggcgctgctgacggcgatccgcgattgggaaagcgcctga

SEQ ID NO: 335344 - DNA, 792 bp, Pseudomonas aeruginosa
gtgaagccctacgtgaagagcaacaagaacgacgccaatgatgctgaagcaatctgcgaggcaatgagccgtcccagcatgcgtttcgtggcgatcaaaacggttgaacagcaggacattcaggccgcacatcgcattcgagcagggctgattgaacaacgcactgccaaggccaaccaggttcgtggcttggtcgcagagtacggcctgattgcaccgaaagaattgtgttcactgcgacgtgccatcccctgctggctggaagatgcagacaacggtttaacgctgcgctttcggcatttgctggatgggttatggcgcgacttgcgcatgctggatgaacgggtaaaggagctggatagtgagatatccgggatcgcggcaaatgagccaaacgctcagagcttgcagcaactgcgcggcgtcggcccgataattgccaccgcactcgtcgcggccatcggtgacgcccgccagtttgccaatggtcgacagtttgctgcctcgctggggttgacgccgaggcagcacagctccggtggcaaagatcgactgctgggcatcagcaaacgtggcgatgtctacctacgaacactgatgattcatggcgctcgatccgtgctgcgcacagccccatccaaggatgactggctgagccaatgggtcatccgtttggctgaacgatcgcacaccaacgtggccgccatcgcgctggccaacaagaccgcgcgcatggcctgggcgatgctgcgcaatggcactgactaccagcctgaacgggccgcggcctga

SEQ ID NO: 335345 - DNA, 459 bp, Pseudomonas aeruginosa
gtgacgaaggatatcttcgaccacctcaagaccacctacaagatccgcgagcgcgctgccgacggcgacatgggcgagcgctttgtcaagaccgacgacaacgaccatcggatgcgcgcgctgaactactcgacggtggcccaattggtggtggaggagggcgccccgggcgaggggagctccgagcctcctatggtcgggaagatgatggtgggcagcaccgcggcgaaccagacggtcgatacccaggccagcctgcggaatctgctgaaggggcgggtgggctggtggcgcgatactgaggcatcactcccagtcgttccatccggtaaagttcaggacatttctgtggtagacgagctcaagatcttcggtcttgaatttcctgcaccagtaggccacccgattgtccatgtttgcatcaacaccgtcccactcgacgacttggacgtgctttga

SEQ ID NO: 335346 - DNA, 744 bp, Pseudomonas aeruginosa
atggacgtgcactggctatcggaagagggtcaggagtttcccgtcgccgtaggcaactacctccacaaggtggccaccgatctccatctgtatgaaggtcgactccctcgcaactttatagaccctctgatcgattttatccgccggaccgggtctcatgtcgccacgctgaactacgacaagttgctgtatgaacccttcatcgactcgggactgctggctggctacaacggcgtgctagtcgacggcatgctccgcgctggattcagcgaagatgccctcgagcgccgcaacggcaacgactttgggtactacctgcatctgcacgggtctcctctcttctacgacgacgacctgggcgtcacaaggaaaagggatcggcacgagctaagccctttagctgaccagggctctgaccacatagtcttgactcatgtccatcacaaacggtcagtcatcggtgcgtcgccggttctgtcagcgtactggaactacctgaacttctgcctggcagagtccgagcggatcgtcgtttttgggtactccggcggtgacaaccacctgaacgccgttatcgcggcgcacgcacagtcaaagcacgtccaagtcgtcgagtgggacggtgttgatgcaaacatggacaatcgggtggcctactggtgcaggaaattcaagaccgaagatcttgagctcgtctaccacagaaatgtcctgaactttaccggatggaacgactgggagtga

SEQ ID NO: 335347 - DNA, 756 bp, Pseudomonas aeruginosa
atgctgcaccatccgaccctggacaaactccagagcctgcacctgaccggcatgctcaaggcgctgagcgaacaactgaaaaccccggacatcgacagcctgagcttcgaagaacgcctcggcctgctggtcgaccgcgaactaaccgaacgcgacgacaagcgcctgagcagccgcctgcgtcaggctcgcctgcgccacaatgcctgcctcgaggacatcgactaccgcagcccgcgcgggctggacaaggcactgatcctccagctgagcagtggccagtggctgcgcgacggcctcaacctgatcatcggcggcgccaccggcgtcggcaaaacctggctggcctgcgccctggcccaccaggcctgccgggacggctaccgcgtgcgttacctgcgcctgccacggctgctggaagaactgggcctggcgcatggtgatggacgcttcgccaaactgatgagcagctatgccaagaccgacctgctgatcctcgacgactggggcctggccccattcaccgccgagcagcgccgcgacatgctggagttgctggacgaccgctacggccagcgctcgaccctggtgaccagccagatgccggtggacaactggcacgagctgatcggcgatccgaccctggccgatgccatcctcgaccgcctggtgcacaacgcctatcggatccagctcaagggcgagtcgatgcgtaagcagacaccgaaattgacgccgccgggcgcctcggactaa

SEQ ID NO: 335348 - DNA, 414 bp, Pseudomonas aeruginosa
atggccctgaccggcgaggccggcgagctgacggagatatttcagtggatgagcgaagaggattcgcgatcggcggccagccacccagagcacagtcaggccatcagagaagagctggcagacgtcttgatgtacctggtcaggctcgcggacgtgctgggtgtggacctcaatgctgccgtcgagcaaaagctgaaactcaacggggagaaataccccgtcagcgcgcagatgaaggacctgttcgagagcgccaagccaggtttcgtgtgcggcacgatgaccttcgagcgtgctggtatgggctggagcggcttcgtgccattcgtctatgaccgcaagcgcggagtggtcacggtgctcggcgcgacgtcgggcaaagtggtgtacgatgagttctgccagcgagcgtga

SEQ ID NO: 335349 - DNA, 777 bp, Pseudomonas aeruginosa
atggctagagaaatagaatcattctcagtatgggcaccaaaaaatcttcatgcggaatccgatatcgcctgggtacaaaactacctgcatgaaaaaggggaaatatctctccatgggcctgtagatttagatcgacttattagagcgggagtacaactcgagaaaagcgactcaggaagaaattcccttagacagttaaaggctgcctataggacaaggaaaagcaggagtacggaggaaagatcaagcgctggggacataaatcctgcaaaacaaaaatcatcctctcaaagcaagaatcacaaagccctaacaaaattattcgatgaaatattaaaaaccgaagaatcacttagagagaaatcaaaaaccctagaaaaccagaaaaaagaactaaaagataaaatattaaaatcccaaagaattaccaaaaaagctctcaacaaatcaaaaaaggcagaacaaaaaataagaaacctccaggaaaaacatcctaacaacccagaaatcggaaaagccgccctaaacaacagagaaataaaagaactgcttatcgatatattaaacacactagacccacctcccaccagaactcgaaccacaagagagtcagacataaccagacattcaaacagaaaaaagccaaaaatcaataccccgaaacctcaagaacctcaagaacctcaagaacctcaaaatagaaacacaagaaaaactccatcaacaatacttgcactactgaaagaaacaaataaaaaatttacaggagagacttaa

SEQ ID NO: 335350 - DNA, 141 bp, Pseudomonas aeruginosa
atgcgtttcagtgatatccgggcgctccaggctgcgctgaaactccaggtcgttggggtgagcaatgaaaacctcatcgacggcgcgcgtgatggccacgtagaacagccggcgctctgcctcgatttcgtcggcgcttag

SEQ ID NO: 335351 - DNA, 204 bp, Pseudomonas aeruginosa
atggcctgcgtggacatggctcctgccgcggctcaaccgacatccgcaaccaccacccacaccggggaagcctccgccttgcaggtgaatagaggcgaaagcccgcattgcgccatcagtcgcaagggtgcctcaagccaggataaccccgcctgcacctgctgctggttacacaagagtttgctgcaccgccctactctctaa

SEQ ID NO: 335352 - DNA, 1359 bp, Pseudomonas aeruginosa
atgaacaagaaaaacctggcgtgcgcatccctgctgttcctcaccctgcccctggccgcccacgcggcggtgtccgaggcggaggcggcgaagctcggcagcagcctcaccccgctcggcgccgagaaggccggcaacgccgacggcagcatcccggcctggagcggcggcctgccggtcaacgccggccagcgcggcagcgacggtcggctgagcgatccgttcgccgccgacaagccgctgttcaccgtcaccgcgcagaacatggcgcagtacgcggccaacctgacgcccggccagcaggccatgctcaagcgctatacggactaccacatcaccgtctaccccagccaccgctcggcgacctaccccgccgcggtgctccaggcggtggccagcaacgcccgccacaccgccctggtggccggcggcaacggcctgcaggacttccggacggcgatccccttcccgatcccgcagagcggcctggaagcgctgtggaaccacatcacccgctaccgcggcggcagcgccgaacgcctccacgtgcaggcgacgccgacggccaccggcattttcaccccggtctacttcaagcagcagttcacctaccgcgaccagctcaccgactacgccgccaacaaggacaacaacgtccttttctactacaagcagttggtcaccgccccggcgcgcctggccggcgacgtggtgctggttcacgagaccctcgaccaggtcaaggaaccgcgcatggcctgggtctacaatgccggccagcgccgcgtgcgccgcgccccgcagatcgcctacgacggcccctacccggcctccgacggcctgcgcgtggctgacaacctcgacatgtacaacggcgcccccgaccgctacgactggaagctactgggcaagaaggaaatcttcgtgccctacaacaccttcgagctggagtcgacgaagcacaagtacaccgatctggtgaagaccggccacctgaaccaggacctggtgcgttatgagaagcatcgcgtctgggaactggaagccaccctcaagccgggcgaaaggcacatctatgccaagcgcgtgctattcctcgacgaagacacctggcaggcggtgctggccgaccactacgacggccgcggcaccctctggcgcgtgggcgaaagcttcatggtgccgctgtacgacaagcagatcccctggctgggcgtggaagcactgtacgacctgatcaacagccgctacctggtctcgggcatgaccaacgaggagaaaacccaggtggagttcggcttcaaggccagcagcgccgactacacgccgacagcactgcgcaacgagggaattcgctga

SEQ ID NO: 335353 - DNA, 1845 bp, Pseudomonas aeruginosa
atgaaccgcaagcagccacccctcgggcgcctcgccctgcccctggccatcggcctggccagcgcctcggcgcaggccgtcaccttcgacctcggcgagatcgagggccagttcgactcgagcctctcgctcggcgccagttggtccacgcagaaccccaaggccaacctgctgcacagccacagctcggacgacggcaagcgcaatttccgcgacggcgacgagttctcccgggtgttcaagggcatccacgacctcgagctgaagtacggcgattccggggtcttcgtccgcggcaagtactggtacgacttcaagctcaaggacgacgacctgcgcttcaagaacatcgacgaccatggccgcgaggaaggcgccaaggcctccggcggcgaattcctcgacgccttcctctaccacaactacgacatccacgacctgccgggcaccgtgcgcctgggcaagcaggtggtgagctggggcgagagcaccttcatccagggcgggatcaacgccatcaacccggtggacgtcgccgccttccgccggccgggctcggagatcaaggaaggcctgatcccggtgaacatgttctacgtctcgcagaacctcagcgagcacttcgccaccgaggcgttctaccagctcgactggcagaagacggtgatcgacaactgcggcaccttcttctccaccgtcgacgtcatcgccaccggctgcgacggcctcgccgccggcccggtgatcaaccagaacgccctggcgcgccaggccctggagccgctgggggtgaacctctccgacgaaggcatagtgctgccccgcggccgcgaccacgacccgcgcgacagcggccagtggggcatggccctgcgctggttcgcgccggaggtggacagcgagttcgccgcctacttcatcaactaccacagccgccagccgtacatgggcgcgcgcaccggcccgcacgccgccgacctcggcttcgccccgcagctgtgcggcaacctcggcctctccggcgccggctgcgccgggctgatgggctcggcggccggccagctgctcggccaggcctaccgcctgggcagcggtgagtactacgtcgactaccccgaggatatccacctctacggcctgagcttcagcaccagcctgcccaccggcaccaccctggccggcgagatcagctaccggccgaacatgccgatccaggtcagcccggtcgacctgatcagcgccaccctcggcgtgccggccgtgagcccggtgtacggcgacggcgtggcggtggccaacgacgcggacctcaagggctaccggcgcaaggaggtcacccaggcgcaggtcaccgcgacgcacttcttcgaccaggtgatgggtgccgaccgcctgaccctggtcggcgaggtgggcgtggtccacgtcggcggcctcgaaggccgcggcggcctgcgctacggccgcagcccggcgttcggccagggcgcgctgtacccggacaacaccctgtgcacggccaatagcgccaccccggagtactgcaacgacgagggcttcaccaccagcacctcctacggctaccaggcacgggcgatctgggagtactcgaacctggtcgacggcgtgaccttcaggcccaacctcgcctggtcccaggacttccacggctacgccccggaaccgggcttcagccagggcgccaaggccgccagcgtgggcctcgacgccacctacctgaacacctacaacgcgagcctttcgtacaccaacttctttggcggcaagtacaacgtcaacaccgaccgcgacttcctggccctcagccttggcgtgtcgttctaa

SEQ ID NO: 335354 - DNA, 1902 bp, Pseudomonas aeruginosa
atggccgtccgcagccttgccgacatccacgccctggaggccacgccgctgcagcgccgcggcctcgcgccgagcacctacgaggcgctacggcgctgcgccgcggaacatgccgacgccacagcgctgagcttcttcctcgatgccggcagcttcgccgccacccacgattggagctacgccgagctgttcgccgacatcacccgcgcggccaatgccttccatgccctgggcgtgcgcgccggcgaggcgatcggcttcgtcctgccgaacctgccggagacccacttcagcatctggggcggcgaggccgcgggcatcgtcatggcgatcaacccgctgctggacgcggcgcagatggccgagctgctgcgcgccgccaaggtcaagctgctggtgaccctggcgccgaccccgggcagcgacctctggccgcgcctggccgggcagctgcacggcctgcccgacctgcagcaggtggtctgggtcagcatggcgccctacgtcagcctgcccaaggccctcgccctgcgctggctggcgcggcgcgagaaagcccgccacccgcgcctgccgatccacgacctgcgcacgctgatgaagcgccagaacggcgaccggctgaacagcgaccggcgcatccaggcccacgagcgctcctcgtacttctgcaccggcggcaccaccgggctgccgaagatcgccgcgcgcacccacggctcggaggtgttcaacgcctgggccatggccgccaacatgcagccgcgcggcgccgggcagacgatcttctgcggcttgccgctgttccacgtcaacggccagctggtcaccgggctgatgccctggacccacggcgaccgggtgatcctcggcacgccccagggctatcgcggcgagggcgtggtggcgcgcttctggccgatggtcgagcacttcggcgtcaacttcttctccggcgtgccgaccgtctatgccgcgctgctgcagcagcaaccggaacgccacgacctctccagcctgcagtacgcgctgtgcggcgcggcgccgatgccggtggagctgttccgcgagttcgagcgcaagaccggcgtgcgcatcctcgaaggctacggcctcaccgagggcgcctgcgtatcgtccagcaacccgcccgagggcgagcggcgcatcggctccatcggcctgcgcctggcctaccagcagatgcgcgcggtgctgctcgacgaggacggcgcctacctgcgcgacgccggcgtcgacgagatcggggtgattgccatccacggcccgaacctgttcgacggctacctggaggacggccacaaccgcggcatctggctgcagatcgacggccagcgctggctcaacaccggcgacctcggccgccaggacgacgacggctacttctggctcaccgggcgcaagaaggaactgatcatccgcggcggccacaacatcgacccgaagctgatcgaggaagccctccaggcgcacccggcggtggcgctggtggcggcggtcggcagccccgacgcgcacgccggcgagctgccggtggcctacgtgcagctgcgccccgggcagacctgcagcgccgaggagttgcaggtgttcgccagccgcaccatcagcgagcgcgccgcggtgcccaagcgcatcgagctgctcgacgccctgccgctgaccgcggtgggcaagatcttcaagccggccctgcagcagcgcgagatcgcccgggtggtcgagcaggaagccgagcgctcggggctggcccaggtcgccgtggaagtggtccaggacaaccgccgcgggctggtcgcgcgaatcgccgccggcacccagcgcgaacgcctggcgccgcagctgggacgctacagcttccaggtcgactggctcgactga

SEQ ID NO: 335355 - DNA, 954 bp, Pseudomonas aeruginosa
atgcccgtccacgtcgtccgctacgaacaccagaacgccatccgctggggagtgctccgccagggccgcatcgcgcccatccccggcgacttcgccagcaccggcgagctgatccgccaggtgcgcgtcgaggacctggccgccctgcccgacggcccgctggaggccggcgaggtgcgcctgctgtcgccggtgacgcgcaaccagcagttcgtctgccagggcgccaactaccggcagcacatgatcgagtcgggcatggacccggacgccaagcacttcaacatgatcttcaccaaggcgcagagctgcatagtcgcggccgacagcgagctgatcaaaccgcgcggcgtgcgcttcctcgactacgagatcgagctgggcctggtgctgcgccgggcgatcaccggcaaggtggcggtgagcgacgccaacctgcacgagttcgtcgccggcgtggtgatcgtcaacgactactcggcgcgcgacatccagatcccgcagatgcagttctacaagggcaagagcttccgcaccttcggcccggtcggcccctacctgtgcctgctgcaggccgccgacatgccctacctgaagaacctgcagctgcgcctgacggtcaacggcgaggtgcgccagaacgacagcaccgccaacctggtgcacggcccggcggcgaccctgagcgagctgtccggcgtgcaggacttcgaggccggcgacctgatcgccaccggcaccccggccggctgcgcgctgtcgatcccctcgccggccaagcagcgcatcgccgcgctgctgcccgagcgggtcaagtggcaggcgttcatgaaggcccaggccgagcgcagccagtacctcaaggccggcgaccgggtcgaggcgagcatccgcagcgccgacggcgtcatcgacctgggcgtgcagcgcaaccgcgtggtggaggaagcctga

SEQ ID NO: 335356 - DNA, 1092 bp, Pseudomonas aeruginosa
atgacccaagccacttcccagcccctgctcgccaccacccagccgaaacggcatccgcagcccacggtgcgggcgcgggcactggcgcacctgatcttcgcgcggccggacatcgccaccgccgagcgcttcctgctcgacttcggcctgctcccggcgcggcgcgacgccggctgcctgtacctgcgcggcaccgggccggcgccctactgctaccgcatcgagcgggccgagcaggcgcgcttcctcggcttcggcctggccgtggccagccgcaccgacctcgaacgcctggccctgctgcccggcgcctcggccatcgagccgctgagcacgcccggcggcggccactgcgtgcgcctgcgcgacccctccggcttcctggtcgaggcgatccacggccagcagccggtgccggcgctgccgcaccgcccggcgctgccgctgaacgcggtcgacgagatgccgcggatcaacgccacccagcggccgccggtcagcccgccggaaatcgtcaagctcggccacgtggtgctcgaggtcgccgactaccaggccacctgcgcctggtacacggagcatttcggcttcattcccagcgacgtccaggtgctgcccgacggctcgccggccgtgaccttcttccgcctcgacctgggccagacgccggccgaccaccacaccctggccatcgcccagggcttcatggccgcctacagccacagcgcctacgaagtggtcgacgccgacgccgtgggcatgggccagcgggtgctgcgcgagcgcggctggaagcacgcctggggcatcggccggcacatcctcggcagccagatcttcgactactggcaggacccctggggcgacaagcacgagcactactgcgacggcgacctgttcaccgcggagcgccccaccggcctgcacgcggtgagcccggaggccatggcgcaatggggccagcgcatgcccaggagcttcaccaaaccggccatgaccttcgccgccttccgcgcgctgctgcacaacctgcggcacagcccggacctgaccctgcgcaagctggtcacgctggcgcggatgttcggctag

SEQ ID NO: 335357 - DNA, 615 bp, Pseudomonas aeruginosa
gtggaagttctcaaccccgtgcagcgccgcatccaccaggccgccttgcgcctgttcgccgagaagggcgtcagccaggtcaacatcagcgacctggcgcaggaggccggcgtggcgcgcggcaccatctacaacaacgtgcagaacatcgagcagctgttccgccaggtcgccagccagctgagcaaggagatgcacctgcgcgtgagcaagagcttcgccgacctgcaggacccggccgagcgcctggccaacggcatccgcttcttcatccggcgcacccacgaggagccgcagtggggcgccttcctcaaccgcttcgcgatgagcgacgcggcgctgcgcgagatgttctacagccaggccaccaccgacctgctcagcggcctgcagggcggccgctaccgcttccgccaggagcagctggtggcggtgatctcgctggtggccagcgccaccctgggcgccatgttcctggtgatcgaaggcctgaagacctggcgcgaagccggcagcgacaccgccgagctggtgctgcgctcgctgggcatcgacgaagcggaggcgcgccgcctggcgaccaccgacctgccgccgctgccttcgctggactga

SEQ ID NO: 335358 - DNA, 1074 bp, Pseudomonas aeruginosa
atgagcatccagcaaggccgcatcgacgttcaccaccacatcatcccgccggtgtacgccgaggccatctaccgccatggcctgcagctgcacgccggcgcgccgctgccgaaatggtcggcggaaaaatccctggaggtgatggacctgaacggcatccagcgggcgatcacctcgctgaccacccccggcgcccacctgggcggcggtgtcgcccaggccggcgcgctggcgcgggcctgcaacgaattcgccgccgacctctgtgcgcgccacccgcagcgcttcggcagcttcgcgctgctgccgctgccattcaccgaggcgtcctgcgccgaggccgtgcatgccctcgacgtgctcggcgccgatggcgtggtgatgttcggcagcaacgacggcgtgttcctcggcgacccgcgcctcgacgagctgatggccgagctggaccgccgcgccgcggtggtcttcgtccatcccaacctgcaccagaccagcgagcagctgggcatgcaggcgccgggcttcctcatcgagttcctctgcgacaccacccgcgccgccgtcaacctgatcctcaccggcagcctggagcgcttcccgcgcatccgctgggtcctcgcccacggcggcggcttcctgccctacgtcgcctggcgggtgtcgctggccaatgccctgccgcagttccaggagaaggccccgcaaggggtgatgagctacctgcggcgcttctacttcgacaccgcgctgtcgccgtcgcgctattcgatggccgcgctgaaggagctggtcgagccgtcgcagatcctcttcggcagcgacttccccttcgccccggcgccgctgaccacgctgcagtgccagaccctcgaagagaacccgctgtggtcgcccgagcagctccatggcatccaccgtggccacgcgctgcgcctgttcccgcagtaccggcaggccgacgagcaggtgatcccggcgccgatctacgccggcgaacccttctccagccgcctgaagcgcagcctgacccggccgctcggcgccttcgtcgagcgcgtgcgcagccgctga

SEQ ID NO: 335359 - DNA, 1194 bp, Pseudomonas aeruginosa
atgaaacgacgagaattcgtggtcggtgccggcgtgctcgccggtgcctcgctgctggtcgatggcctgccggcgctcggcgcgccgggggcgccggagcagtccccggaacacctgccggagcgggcggcgcccaccgcggggcgcatcgatgtgcaccatcacctgctgccgccgttctacgccgaggcgctgtggcgccaggggctcgaccggctggtcggggtgccgctgccggcctggacggcggagcagtcgctggcgctgctcgaggcccggggcatgcaggcggcgatcctgtcgctgcccgcgcccggtgtctggttcggtgacgcccgcgccgccggcgacctggcgcggcgctgcaacgagtacgccgccgagctgacgcagcgtcatcccggtcgcttcggcagcttcgccgcgctgccgctgccggccaccgatcaggcctgcgccgaggcggtccatgcgctggacacgctgaacgccgacggcgtggtgctgctcgccagcaatgccggggtgttcctcggcgacccgcgcttcgaggagctgatggccgagctggagcgccgcgaagcgaccgtgttcgtccatcccaacctgcacccgggcagccagacgctggcgctcgacacgccgggcttcctcctcgaattcgtctgcgacaccacccgcgcggcggtcaacctgatcctcggcggcaccctggagcgctacccgcgcatccgctggattctcgcccacgccggtggcttcctgccctacgcggcgtggcggatctcgctcgccaacgccatgcctgaattccaggagcaggcgccgcagggggtgatgacctacctgcaacggttctacttcgacaccgcgctggcgccggccgcgccgtcgatggcggtgctgcgcgaactggtcgcgccgcgccaggtgctgttcggcagcgacttcccgttcgccccggcgcgcctggtcgagcagcagctcgccgaactcgaccgtgcctcgccgtggtcgccggagcagctcgccggcatcgcccgcggccatgcgctgagcctgttcccgcgcttcgccgggcgcggcgaggcggtggtcgccgccccgcgtttcgaatccgaatccaccctgcactggctggggcggaccgccacccaaccgctcgccgcgctggcgcagcgcctgaaggactga

SEQ ID NO: 335360 - DNA, 1233 bp, Pseudomonas aeruginosa
atgagcaagctattccaaccgctgcgcctgcccaacggccaggtgatcggcaaccgcctggccaaggccgccatggaagagaacctggccgacgccgaccacgcgccgggcgaggcgctgatccgcctctaccgcacctgggcggaaggcggcgccgggctgatcctcaccggcaacgtgatggtcgaccgccacgcgctgaccggcccggccggcgtggtgctggaggacgaccgccacctgccgcgcttcgccgcctgggcgcgggcctgtcgcagccgcggcgcgcaggcctggatgcagatcaaccatcccggccgccagctgatggccgacctcggccagccggcgctcggtccttccgcggtggcggtgaacatccccggcctggagaaactgttcgcccagccgcgggcgctgagcgaggcgcagatagaacggctgatcgagcgctacgtcagcagcgcgttgctcgccgagcgcgccggcttcagcggcgtgcagatccacgccgcgcatggctacctgttcagccagttcctctcgccgctgtccaaccgccgcaccgaccagtggggcggcagcctggagaaccgtgcgcgcatcctgctgcgcaccgtggccgcggtgcgcgcgcaggtagcgccagacttctgcgtggcggtgaagctcaactcggcggacttccagcgcggcggcttcgatgccgaggacgccgccggcgtggtgcgcatgctcgacgggctggcggtggacctggtcgagctctccggcggcagctacgaaagcccggccatgcagggccaggcgcgcgacggcagtagcctggcgcgcgaggcctacttcctcgagttcgccgaacgcatcgccgcggtggcgcgcatgccgctgatggtcaccggcggcattcgccggcgcgcgatcgccgagaaggtgttgcagggcggcgtggcgatggtcggcatggccaccgcgctggcggtcgagccgaacctgccgcgccgctggcaggccggcgaggaggcggcggtggagccgatagtggtgagctggaagaacaaggcgttcgcctcggcggcgacccagtcgatcgtcaagaagcagctggccctgctcagccgcggcaagccgacccggccgcggacctcgccgctgctggcgctgatcggcaaccagctgaagacccgccggcaggcgcgcgactaccggcgctgggtcggcgagcgggtctga

SEQ ID NO: 335361 - DNA, 633 bp, Pseudomonas aeruginosa
atgagcaagacagccaaacccgacgcccccctgacccgcggccacaagaagcgcgagcgcacgcgccagggcctgatcgacgcggcgctgcgcctgttcgcgcgcaaggaggtcggcgaggtcgcgctgctggaagtggccagcgaggcggaggtcgccagcggcaccatctacaactacttccgcacccgcgacgaggtggtcgaggcggtgggcatcgccctcgccgacgagttctccgagaccatctcggcgctcagcgccgaggtcggcagcggcgccagccgcctggcgatcggcgtgcggatgttcatccgccgcgccctcgcctatcccgactgggccagcgcggtgatccgcgtggtgcacttcgaccaggcgatccgctcgaagatcgccggctacgtgctcgccgacctgcgcgccggcagcgccgagggcgtgttcgactatgccgacgaggacatcgccctcgacttggtggtgtcgtgcggcgtcggcggcatgcgcgcggtggtcgaaggccgtggcgtcgaggagcacgacagcaaggtcgccgagatggtcctgcgcgccctcggcgccaccccggcgcgcgcgcgcgaactggcccggcaggcgctgccgggctga

SEQ ID NO: 335362 - DNA, 1581 bp, Pseudomonas aeruginosa
atgcacgacaacaagaatccacccgcgcaggcggtcgacgtactggtcatcggcaacggcccggtgggcgcggcgctggccgccctgctcggccgccacggcgtgcagacgctggtgctggacaaggcccacgagatcctgccgatgccgcgcgccatcgccctcgacaacgaggcgctgcgcatcctccagcaggccgggctggccgaggacgccttcgagaagatcgtcatccccgaggtgcgcatgcactgcccgatggtcggccagttcggccgcgccaacaccagcggcagcgtcgacggccatcccaagctggtgaccttctaccagccggacctggagcgcgcgctgcgcgggcagtaccgccgcttcgacaacgtgagcagcttcggcggcttcgagctgcaggacctggagcaggatgccgacggcgtcagcgccaccctgctcggcgaggacggtacccggcaccgggtccgcgcgcgctacctggtcggcgccgacggcgccagttcgaaggtgcgcagcctgatcggccaggacttccagggccgcagctacagcgaggactggctgatcgtcgatgccgccgaccgcgcgcagcaggccatcgaccacgtcgagttcctctgcgatcaccgccgtcccaccccgcacatgcccgcccccggcggccgcgagcgctgggagttcatgctgcaggccggcgagacccgcgagcagatggaggacgacgagcgcatcgccgcgctgctgcagcgctgggtcccgcgcgagcagctgaagatcgagcgcaaggcggtgtaccgcttccatgcgcgctgctgcgaacgtttccagaacggccgggtgttcctcgtcggcgacgccgcgcacatcaccccgcccttcgtcggccagggtctggtggccggcctgcgcgacgccgccaacctggcctggaagctggcctgggtgctgcagggccgcgccgccgccggcatcctcgacagctacgatgaggagcgccgcccgcacgcccgcgagatgatcgccctggccaagctgatgggccgcctggtgatgcccggcaacgcgcccatggcgctgctgggccatggcctgatgcgcggcctgcgcctgctgccgccgttgcgccggcagttcgaggagctggagatcaagccgaagaacattttccgcaacggcctgttcgtgcccccggcgcgcggccgccgcttgcgccgcggcggcctgttcccgcagggcctggtgcgcgcggcgaacggcgccatcggcctgagcgacgacgtgctcggcgaccgcctgaccctggtcggcctgggcctcgatccgcgcgtgcagctcgaccctgacctgcaacggcgctgggaagcggccggcggcggctacctgcaggtcggcctgcacggccagaaaggcaacgccgccacgcccttcgtcgaggacatcggccaggcgctgctcggcggcgcggacggctcgctcgccgtggtgcggccggaccgcatcgtcatgcacgagggtgtgcagggcgccgagctgctgcgcgaaagcctggtcctgctcggccgctga

SEQ ID NO: 335363 - DNA, 702 bp, Pseudomonas aeruginosa
atgtccgagcatttgcccaacctcgacctttcgctgttcgacctgccgccagcggcaacccgcaccagcgagcacaagccacacatcctgctgctctacggatcgactcgcgaacgctccttcagccgcctgctggtggaggaagccgcgcgtctgcttgagcacttcggcgccgagacgcgcatcttcaatccttctggcctgccgctaccggatgacgtgccggtggagcatcccaaggtgcaggagctgcgtaacctggtgctgtggtcggagggccaggtgtggtgctcgccagagcggcatggcgcgctgtctgccgtgtttaaggcgcagatcgactggattcccttggcgctcggcgccgtgcgccccactcagggcaagacgctggcagtgatgcaggtctgcggcggctcgcagtcgttcaatgtagtcaatcagctgcgcgtgctcggccgctggatgcgcatgttcaccatccccaaccaatcgtcggtacccaaggcttacctggagttcgacgacgcgggacgcatgaagccttcggcgtactacgatcgtgtggtggacgtcatggaggaactggtgaagttcaccttgctgctgcgcgatcgccaggagttcctggtggatcgttattcggagcgcaaggaaagcgccgagcagctttccgcccgcgtgaatcagcgctcgctctga

SEQ ID NO: 335364 - DNA, 471 bp, Pseudomonas aeruginosa
atgcgagtcctgttcatgtgtacggccaacagctgccgcagcatcctctccgaagcgctgttcaaccacctggcgccggaaggcttcgaggcggtcagctccggcagcttccccaagggccaagtgctgccgcgtagcctcatcactctgcagcaggcaggcatctccatcgagggcttgagcagcaaaggcaatgacgccttcgaaggcaatccgccagacatcgttatcaccgtctgcgacaaggccgccggcgaagcctgcccggtgtacttcggcccggcgctgaagtcccactggggtctggaagacccgtctgatgtcgtgggtgatgaggcatccattgacgccgcttttcgcgccacgctggcgcgcatcgagctgcgctgccgggccttcttcgtccttcctttcgccaccctcggccgcgacgaactcaagcgcgagctggatcgcatcggcgatctctga

SEQ ID NO: 335365 - DNA, 1284 bp, Pseudomonas aeruginosa
atgctggtcgccgttgctgtcttcgtcttcaccctcgttctggtcatctggcaacccaaggggctcggcgtcggctggagtgctgcgctaggatcgatcatcgccctggcagccggcgcggtttcgctgcacgacatcccgaccgtgtgggcgattgtctggaacgccaccgccactttcatcgccgtcatcatcatcagcctgctactggatgaagccgggttcttcgagtgggccgcgttgcacgtcgcgcgctgggcgaatagcagcggctaccggctgtttgccttctgcatactgctcggcgctactgtctcggcgctgttcgccaacgatggggcggcactgatcctcacacccatcgtcatgtcgatgctgctcgccctgcgcttctcgcccgccgcaaccttggccttcgtcatagctgcgggcttcatcgccgacacagcgagcctgccgctggtggtctccaacctggtgaacatcgtctcggctgattacttcggcctgggcttcgccgagtacgcctcagtgatggtgccggtgaacctcgccagtgtcgccgccaccctgctggtgctgttccttttcttccgtcgcgacatcccgaggcaatacgcgctcgatgcgctgaaggagccaaaggcagcgatccacgaccgcgccaccttcatcgtcggctggtggacgttactggtgctgctgattggcctgttcgccctggagccgctgggcatccctgtcagtgccgtggccgccgtctgcgcagcaatcctgtttgccgtcgccgctcgcggacaccgcatctccacccgccgcgtactgcgcgaagcaccctggcaggtggtgatcttctccctcggcatgtacctagtggtgtacggcctgaagaacgccggcctcacggacttcctcactcatctgctcgaccgccttgctgaacacggcttgtggagcgccgccatcggtaccggcctgctctcggcgctgctgtcctcgatgatgaacaacatgcccagcgtgctggtcggcgccctgtcgatccaggccagcggcgcagaagggctggtgcgcgaggcgatgatctacgccaacgtcatcggctgcgacctcggcccgaagatcacccccatcggtagcctcgccacgctgctctggctgcatgtgctggagcgcaaaggcatgcgcatcacctggggttactacttcaaggtcggcatcctgctgaccctgcccgtcctgctaatcaccctttcggccctggcactgcgcctgagcctctga

SEQ ID NO: 335366 - DNA, 348 bp, Pseudomonas aeruginosa
atgttcactccacccgaagtcttcaagaacctggccgacgagacccgcgctcgcgccactctgctcatcgccagcctgggcgaactctgcgtctgcgagctgatgtgcgcgctggacgacagccagccgaagatcagccgtcacctggcacaactgcgcagcagcggcctgctgttggatcgccggcagggccagtgggtgtattaccgcctcaaccccgaactgcccgcctgggtgcacgaaatgttgcaggttaccctgctggccaacgcgcaatggttggccgacaacaccctccgcctgcagaacatggacagccgccccgtccgtgacgccgcctgctgctga

SEQ ID NO: 335367 - DNA, 891 bp, Pseudomonas aeruginosa
atgagcaaccacctttccggcccacacgcgtgggccggttttcttcgaacccttgcggcgctgctgatcggcgcccttctcgccgggtgccagtcgccccgcgagacgctgcagcagttggtggatgcgcatgggcggcagttggagattctgccggggcagccgttcccgctggccatgcttccaccacagagcaccatgaaagccactcgcctgcgcgtctatctggaaggcgatggccatgcctgggccacgtcgacacaacccagcctggatccgagtccgcacaatctgctggtggcgcgtttggccgtggacgatccaacgccaaatgcctatctagctcgcccctgccaattcatcatggcaccagattgcaaacctacactctggaccagtcggcgcttctctcaagaagtcgtcaccagccttagccaggccctggaccagatgaagcaacgctatggcaatcgagaattcgagctagtggggtattcgggaggtgcagcgctggcgctgctgctggcagcccagcgggaggatgtggcgcaggtacagaccgttgctggcaacctcagcccacggctttgggcgcaaatgaaagagctttcgcccctcaatggttcgctggatccgttggactatcgagatcaactggcagcaataccacagcgacacctggtgggagacgcagacgacgttgtccccacatcgctggccaacgcctatctggtacggctacacccatacgcctgcagtcaggttgtactctcacctgcgacagatcaccagcagggctggggagctctctggaagacctggcgagataaaccattaaattgtgagagcaaccgacctcaaacacgtactgattcgccctcagcaaagtaa

SEQ ID NO: 335368 - DNA, 447 bp, Pseudomonas aeruginosa
atgcacaagcaactgcttatggcttctctcctcagttggctggccaccagcaccgcttttgccggcacctctgaagggaccgctagctacacccagggcgtcgaagaacacctggtcgacgacggcaacggcaaccagttggatatcacctgcccggacgatgacgagagccccgtctctgcctacgccaccatcgccggtaagcgctactcctccgaaagcgatggcttcgacgtcatcgtcgacggcaccaccttcagcaaccccttctacacggactgcgaagcctgcagctccagcttcccaggtttctgggcggcgctgcgcaaggccaactctctgcaactcagcgccggcggccagacggtgaggctcccgacccagaaccttccccaggttcttcagcctctgaacagccagcagaacctctgccgctccggctggtaa

SEQ ID NO: 335369 - DNA, 402 bp, Pseudomonas aeruginosa
atgggcaggctgttctcatcccgtacccgggcagagctgatccgggacctgactcaacctgaagaccatgtgcacgcccgcattcacgtcatcgcccacaccctgcggggcaacgtgctgtggtcggtcaccgaggtgacggcgaaaaccgaaggcgttcacccagacctcgctcccggcgagtccatgcgctacatccgctgcgatctgctgcaacgcagtggcggtgagtgggggtacaaagccatggacgagtccatggcgccgtactactacagctgcccactgcgctatctcgatatggccaaggaactctcgcccggctggcgcgagaaggttcgagcccatcacgcacggcgacgtcagtcggcgaccgccgtggccggtggtgcagcccggtaa

SEQ ID NO: 335370 - DNA, 861 bp, Pseudomonas aeruginosa
atgcaatcagttacctatcgtaaggattcaagtcgttgtactacttacgattatgagcaggagcctgataagtacgcaggtaatatcgagtgccccgagtgtaaggagcggtcgtggtatgtcagagccacgaagaccaaaaagtcctcgaaggctgcgtactttgctgcacaccataaggacggatgtgatgccggcactattactctcattgtagaggatgaggatgcagtccctcctgaagggctggatccttctcgaattaatgtcgatctggataagcgtaggctcgcagatatcataattccagaaaattcggataaaccatcaattgaggatcctcggtgggggaatgttcagaggaggtatgcaaatgcttccgaatacccggtcaacaagtcactcaggcagatcctcacgtatttgatacgcaaccctgcatatcctggggatgataggggtattcgtatatttgctgacaatggtgtaacggtagtggaggggaagctccaggagcttctagtacatcagagccagttggagggggtcgatgttggatcggttcggttgttctgggggacaattacgaacataaagcccaccgaggatggtgtgctctggttgaacaccggtgattatctaactgagccaagcctgattgtccggactgaggatttacaggacgatttgatatcggacttcaggctgggtgatatgagccgactgcagggcgcgcggttcattgtgattggatggctctaccggtcagctcgtggaaagccaattattgccttcggcttcagcaaatacatcgcctttgtgaagtacaaggcggatgagtcaaccttgctggatgagtag

SEQ ID NO: 335371 - DNA, 426 bp, Pseudomonas aeruginosa
atgtgtgcagacatcctgaccccccaagaacgctccctgatgatggggaagatcaaagggcaaaacaccaagcccgagttggtcgtacgctctctgtgtcacgcgatggggctgcgctttcgtctgcaccggaaggacctgccgggcacccctgatcttgtctttcccaaataccagctgtgcctgtttgtgcacgggtgcttctggcatcgtcatccgggatgcaagtacgcctatacaccgaaaaccaagctggatttctggctgccaaagctgcagagaaacatggagcgggataaggaaaaggaggatgcactcagagagttggggtggcaggttgaggttgtatgggaatgtgaaaccaagcgcccggagctgttaaggttgaggctgaaagacatactggatgcctctcaccctcgctaa

SEQ ID NO: 335372 - DNA, 2037 bp, Pseudomonas aeruginosa
ttgatcggtagccataagttggctgtctttgagcttgtgaagaatgcgtatgatgctggtgctaatgaagtattagtagtcctggatctcacggatgcggagaatcccataattaccgtcaaagacgatggtgatgggatgtcacttcagactatccgggaagtttggcttgtgccaggcaatgatcatagaaaggcgcagcgagagagcctgataaagagggggaaatatcaccgactccctctgggggagaaagggcttggcagatttgccgtgcataaactggggaatctgattcgtttgacaaccagagcggcagggctgcctgagtatgttgtggagattaactgggaaaatattattgagcagcctttcctggacgaagctccaataacaatcaggcagcgtgatccggaagttttttctggtgagagtacaggcactctcatcgaaataagtgatctgcgcaataaggactggaagcgtggagaggtgcgaagcctgtataagcagataacttcaatctgctcaccctttgaagggcctgagtctttttcggcagtcgtgagtgttcccgggcacgaggagtggttgaaaggacttctggatacggacgctattctggccagggccccttggaagtttgagttcgaaatttccgcatccggtgaaattacctggagctatgagtttagatcgataccagggattcagctggaaggtagacgagtaagcaagtcgaatgctgctctccttctgccgaaaggtaacggcaagcagagaattctggctgataaggaatatttggctggagtgggacctatcaagggtgagttctatgtttatgatcgtgagcgtgaagtgctaaagctcatgtctgacgttcagatgctcacggattatcttgatgagaatggtggtattagaatctatcgcgatgggattcgagtatacaactacggtgagccgggtgttgattggttggggttggatcttcggcgcgtaaatagaccgacgcgtaagattagtaacaatttggttatcggtgtgatacacctttctctgaaggattcgggtgcgttgctcgaaaaaacaaaccgtgaagggtttgttgagaacgatgccatgaggcaccttgaggatctagtgctatccagcttggctgtctttgaaacagagcgggatattgataaggagcgagtccgaaaagctattaataaaagcaccgatcccgtcactgctaacattcggcgaccaattgaagagctgaggggagccatgcagaagcatggcgtgctggagacattcgagccttatttgaataagcttgaagaagactatcactctatgcaggaaacactactggcagctggtatgtccgggctgaatcttgcagtggtgtttcatgaagttgagcgtggcgtaagaacactgcatcgcgccattgaagatggggctgatatccaaggcgcagcacgacaggccaaggatctgaccaaactgctggatggcttctctggcttattacgtcgtgacgatcaaaaagcacatgatgcgagaaagctaattctacgtgctcgtgatctgaatctatctcgtatgcgttttcataaggttcaactggagtgtccatttcttgaaactggagagaaaggtttcagctcgatatttccttttggattggttctcaatgcacttgttaatctgatcgataatgccttgtactggcttcaagtcagatggccggactcggagtcttccagaaggaagctatatattggtatatccaatgatttcgagttggggccggcgattatcattgcagataatggccctggttttcaggatgatgctgaaaatatggtgcgcccattcttcacgcgtaaggctgcaggaatggggcttgggctctattacgctaatttggctatggggcttagtggtggcttgctcgcctttcctgataaggaggaagttgaattgccagcaggttttgatggtgccgtagtagctttgatattcaaggaagccaagtga

SEQ ID NO: 335373 - DNA, 1326 bp, Pseudomonas aeruginosa
atgttgccagccccaaggatagttgcagttgacgataagaaagatgagctggaggcgttgacggatgctctttcgcggactggagcagcatgtctcggtattctatttaatgcagaagagggaagggtagaggcctgtccagatgcaagggttatattttttgatctccatttacttggagatgctgttggatctccggagaagcatttcagtactattgtgagttgcttggagcaaatggggccacaagggccctatgcgattatagtttggagtcagcactcggatgaagctgatggggatgactctggaaatagcctgtaccactatatttgtgagcgcttggatagagcaattccaaggccatatgtcgttatgcctttgccaaaagttgagcacttgtcccgacttgacggggtgtatgtggttgagaatcctgaattgctcagggttaaagtggatgaattattatctagccacccgcaagctagtgccctacttttgtgggagaaatatgttctgtccgctgcagctggcactgttgcccaattgattgatttgtcagggggaagagccgaacagattaagggtgtgatggcctcccttgctactgcggcggtagggaagaggaatgttgatcaggatagattttacgcgttgaatgaggctctgttgccgattttatctgataggctagatttttttgctagtactcctgaagatttaaaagtttgggaaaattcattctctgttcaggattatgaagctatttcagtcgaaaaaattggtaaaattaacaaatttattaatttgtcaatgtcgatcgagagattgagcgcggcggatagaggggctgtaatcccctatgattctatcctgagggaggggttaacaaaaaacgtcgaaagctactttggcttgaggttgggcgagattataactcgttgttttggcattaagagtttaaaggattttgatggggcgagatgggttcttgtgcaaagccaagctgcatgtgattatgctcagaaaaaaccacaaatgcttagttatttcttggggttagagatatctagttcagcagttcgtgattctcgctctggtgatacgccacctttgccagagtctttatgggtttcacctgtattttcaatagatgatgcagataaagtcctgctatttaatgctggctctctgcttgtgttcccggtcgatgtgatttctaaggttcgaccgatctataggctgagagagcaaattctaaacgatcttctgtttaaactgaggaatcatcagtctcgtccggggattatttctttatcttga

SEQ ID NO: 335374 - DNA, 945 bp, Pseudomonas aeruginosa
atgggcctggtgggcgttgtccgcctcggcctggtagcggcgcatgcggtcgctgacatcgctggcgaacttgaccaccttgtagagcttgccgtcggcgtcgtagaccgggttgtagctggcttccagccagaccggctggccgttgcggtggacccggcggaactgcccggtgacgtactcgccgcggttcaggcggcgccagaggtcggcgtactgcgggccgtcgcggtagcccggttcgcagaactgacggtggttggcgctggccagctcggctcggccatagcccatggtggcgaggaagttgtcgttggccgcgaggacattgccgtcgaggtcgaactcgatcatcgccatcgagcgggacagggcatccagcttgctctgcatctcgtgttcctggtggacgatggcatcgatgtcgctggcgtacttgaccaccttgagcagtcgaccctgcccgtcgcgtacggggttgtaggtggcttccagccagagtggccggccctcgcgggtaatgcgcttgcagcggccggaaaagtgttcgccgcgccgcaggcgttcccagaagcgccggtagtcttccgattgcgcgtaggcgccgtcgcaaagctggcgatgcggtttgccgaggatctcgtcgcggcggtagcccagcagggtcaggaaattctcattggcatcggtgatattgccgtccggatcgaactccacgcgcgccatggagcggtccagggccgccatgtgcaggcgctcggcggcgagttgctgttgcaagtcggcgttcatctgtcggtacttgcgagtgaacatgagaaaaatccttggatagagagaggggctcatccctgtcttcggcgccgatgggcgggagttgagagggtgggacgattgtattttttcattgaacgacaaaaattcgtcgttattcttaatgggtga

SEQ ID NO: 335375 - DNA, 615 bp, Pseudomonas aeruginosa
atgacagagttgctagctttcctgaccatcactgtgcttgcggtgatcagccccggcgccgatttcgccatggtctcgcgcaacagcctgctgtattcccgccgcgccggcctgctcaccgcgctgggcatcggcgcgggggtgacggtacatgtcggctacagcatcctcggcgtcggcgtgctggtgcgcgagtcgctggcgctgttcaccgcgctgaagctggcgggcgccgcctacctggtgttcctcggcctgcgcatgctgctggcgcgagaggactcggtggcggaggaggcggcgggcggcgccggggtttcgtcctgggcgatgttgcgcagcggcttcctgaccaatgcgctcaatccgaagacctgcctgttcgtggtcagcctgttcatgcaggtgatcgatccgcataccgcgttgccggcgcaactgggctacggggccttcatcgcgctcgcccacgtggcctggttcggcctggtcgcctgctttctctcgagcccggcggtgcgcggccggctcctgcgtttccgccggcgcatcgaccagttcttcggcgccctgctggttggtttcggcgtcctgctgggggcgaaaagcccatga

SEQ ID NO: 335376 - DNA, 660 bp, Pseudomonas aeruginosa
atggccgcgtctggttcctcgacggcgaccgccaatccagggtgcccagtgacaggcgctggcgtcgcgcccgttggttcgctgccggcagcgcctcgccacgctccagcgctcgggcctcgtgatcgctggcgaggatcagcaggcgtccgtcgggcaggcgcgtcaggcccggcgcctgccagtcgatcccggcattcgccggcggcggcgggtcgccgtggaaataccgcgcggcatcgacttccggagcttcgcgcagggccaggctgtcgccgtcgaggaaccagacgcggccatccagcgcgagcatcagcaatccgccccggccttcgtcgtagcgataggcgtccttcccccagggcgccgacttcaacggcaggccgccagtgcgccgctccagctcgtcgaacgccagcgcaggggcggcgtcgcgccggtcgagtacgtagagttcgttgcgcaggaagaacaggtagcgcgacgactggcccagcagttcgccggaaccccagtcgtcgccgcgctcgttgtcggcatccaggcgcatgctccagcgcaggctgccgtcctccaggtcgaccacctgggcatagctgcggctgctgccgtgtaccacgccgttgtccacttcgttggcgcgatagtcgtcgagggtga

SEQ ID NO: 335377 - DNA, 405 bp, Pseudomonas aeruginosa
atgttccgcaagctgctcgacgaaggtcgtgctggtgagaacgttggtatcctgctgcgtggcaccaagcgtgaagacgtagagcgtggccaggtgctggccaagccgggcaccatcaagccgcacaccaagttcgagtgcgaagtgtacgtgctgtccaaggaagaaggtggtcgtcacaccccgttcttcaagggctaccgtccgcagttctacttccgtaccaccgacgtgaccggtaactgcgaactgccggaaggcgtagagatggtaatgccgggcgacaacatcaagatggttgtcaccctgatcgctccgatcgccatggaagatggcctgcgcttcgcgatccgcgaaggcggccgtaccgttggcgctggcgtggttgccaagatcatcgagtaa

SEQ ID NO: 335378 - DNA, 309 bp, Pseudomonas aeruginosa
atgagcaagcaacgacgtacgttttccgccgagttcaaacgagaggccgcggccctggtgttggaccaaggctacagccatattgacgcctgccgttcgctgggggtggtggattcggccttgcgccgttgggtgaagcagctcgaggcggagcgccagggtgtgaccccgaagagcaaggcgttgacgcctgagcagcaaaagatccaggagctggaagcccggatcaaccggttggagcgggagaaagcgatattaaaaaaggctaccgctctcttgatgtcggacgaactcgatcgtacgcgctga

SEQ ID NO: 335379 - DNA, 1026 bp, Pseudomonas aeruginosa
atgccggctaccgcaatcatgcacaaagggaaaaatctgtctcttcacaaagcggtttcatcgccgcacttcaatgaaaaaaccgttttagttacgagtacctgggactatgttgatctttggctgaaacgagccagaaaacatgatgctcgatttttctggggtcaagcacgaagcttttacgaggcgactcagaatcttcctaaaacttcagccccgttgacggcgtactattgctttttgaatgctacgaaggctttcctcttgacgcgaggacaacagttcggagaccagcatggggtgtctggctatgctctggttggtccttcagccctcagcaacgaaaaggttaaattcaagaatgggggtattcttccggctctatgccaactccttggggagcaggtcaaccaagatatatatagcctcaaggacatattgtataatttgccctatattcacagggcttacaacctaaccatcccatcagatcccgaattgtttatccccctcagcaaccccaaaattgtcaaatcagacaggacccacgaggcctggcttagcgccaaactaagcggaaagtatgcaacccaacacactatcaataagcttccaaatggcttcgagcgtgatatgggctattccaatgaatttgtgattcgttgcgtgcggcgctttgattggcgccctcgtgacaagtccgcaagtttagcaaggtacaaaaactaccatcaccgactccgccaagaaattctctacatcaacagcagcagtacacggtggtatcttaagcgtggaaatatggataatagactaatcgcaagaagcgcgctacctctcgcgtttgcggcaatgcaccgactgtccgagttatcccggtactcacctgacaaacttgccaagcactttgagtgccagcacaactggctactatcagagttcatctctgcggccccgaatcagttcattgactccatatcttctgaaatcacaggacatgagttcgcattacccgaacgaatctag

SEQ ID NO: 335380 - DNA, 690 bp, Pseudomonas aeruginosa
atgttcctcgacggcttcggcccgcagatactcgccggcaccctggtgaccctgaaactggcgctgggctccctgctcggcgccgtgctcatcggcctcctcggcgccagcgccaagctcgccgccaaccgcccgctgcgcgccctggccagcggctatacgacgctgatccgcagcgtccccgacctggtcatcatgctgttgctgttcttcagcctgcagatcctcctcaaccgcgtcaccgacgccctcggcatcggccaggtcgacatcgacccgttcgccgccggctgcgtcaccctggcgttcatctatggcgcctacttcacggaaaccttccgcggcgccttccaggcggtcccggccggccaggtcgaagccgcgcaagcctacggcatggggcgctggcgagtgttccgccgggtactcctgccgcagatgctgcgctacgccctgccgggcatcggcaacaactggcaggtgctggtcaagtccaccgcgctggtctcgatcatcggtctcggcgacctggtcaaggccacccaggacgccggcaagggcaccctgcagttcttccacttcaccctggtctgcgggctgatctacctggccatcaccgcaatctccaacgccgcgttgctgtggctggagcggcgcagctcgctgggcgtcaggaggccgctgccatga

SEQ ID NO: 335381 - DNA, 990 bp, Pseudomonas aeruginosa
atgatgacaacctttcgttgtcacctcggtaagcccgtgaaactccaccagttgcaagccctggtcgccagtgccgacgccggcggcatccgcgccgccgcccgcgtcctggggatttcccaggcggccgtgacccgcgcgctgcgcgaactggaaaccgaacagcatctgccgctgttcgtccgcacgcccagcggcctgaccttcaccgaatacggcaaggcgctgctgatccacgcccggctggtgctcaagcaactggagcacgcgcaggtcgaactcgaccacctgcgtggccaggccagcggccggctgtgcatcggggtgacgccttgggtggcgctgaccttcctctcggaggcggtgcaggcgttccgcgagcgcatgccggaggtgcgcctggagcttttcgaaagcctgatggcggtggcccagccattgcttcgcgacggcagcatggatttcgccatcggcccgctgcacggcgcccaggcggcccaggaattcgcctgcgagaagctgctcgactacgacaccgcggtgctggtccgccaggggcatccgctggcgggttgcggctcgatccacgagctgctggaacaggactgggcgttgaactacaccggcgacggccacgacgccctgatgcgcgagttgttctggcgccacggcgccttgatcgacgagcggcgcatcgtccgcgcgcactccgtggcgatcctgcagaccctggtggagcaggccgacatgtgcacctgggtgccggcgatcatcggcgccgccccgccgttgctcggccgggtggtgccgctggcgctgcgggaaaccttcgagccacgacggctgggcatcatcacccggcgcggcggagccctcagcaatccggcgcaatgcttcgtcgagtgcctgctgcaggcgatccgccgccacgcccgctcggcgaagaaggatgaccggcgcctgttcgaaaccctgcgcctgctagtctga

SEQ ID NO: 335382 - DNA, 1269 bp, Pseudomonas aeruginosa
atgagcaaacgtatcgtcgtcaccggcatgggcgcggtcagcccgctgggctgcggagtcgaacccatatggcaacgcctgctggccgggcaatcgggcatcgccacgctcccggcggagctgatcggcgacctgcccatcagcatcggcggccaggtccccgaccgtgtccaggacccgcaggccggcttcgaccccgacctgctgctggccgccaaggaacaacgcaagatggaccgcttcatcctcttcgccctggccgccgcgcaagaggccctggcgcaggccggctgggcgccgcagagcgccgaggcgcaggagcgcacggcgaccgtcatcgcctccggggtgggcggcttccatgccatcgccgaagcggtgcggaccacagacggcaaggggccgcgacgcctgtcgcccttcaccatcccgtcctttctctgcaacatggcggccgcccatgtgtcgatccgccatggcttcaagggaccgctgggcgccccggtgaccgcctgcgcggcgggcgtgcagtccatcggcgacgcggcgcggatgatccgcgcgggagaggtcgacgtggcgctctgcggcggtgcggaagcgaccatccaccgggtcagcctggccggcttcgccgccgcgcgcgccctgtccagcgatttcaacgacagccccgagcgcgcctcgcgccccttcgaccaggcccgcgacggcttcgtcatgggcgaaggcgccggcctactggtcatcgaggaattggagcacgccctggcgcgcggcgccaagcccatcgccgagctggtgggctacggcaccagcgccgacgcctaccacatgaccgccgggccggaagatggcagcggcgcccgccgggccatgcagcaggcgctgcgccaggccggcgtggaagcgaccgcggtgcagcacctgaatgcccatgccacctccacccaggtaggcgacaagggcgaactggccgccatcaaggccgtgttcggcaccggcagcgggctcgccatcagcgcgaccaaatccaccaccggccacctcctgggcgccgccggcggcatcgaggcgatcttcacggtcctggcactgcgcgaccagctcgcccccgccacgctcaacctggaaacgcccgacaccgacgccgagggcctcgacctggttcgcggcgaagcccggcgctggccgatggaacatgcgctgtccaatggcttcggcttcggcggggtgaatgccagcctgttgttccggcgctgggtgtag

SEQ ID NO: 335383 - DNA, 1257 bp, Pseudomonas aeruginosa
gtgttcttcgatttccgctacgtggcgccggtccgcggtatccgtccggtggacgccggagcgcgcagcagctacggcagtccggcccgcttcgatgcgttgcggcggattccctgggcgtgggggcggccgaccgatccggtgccgacgggcattgtctaccccgactatccggggccggtggtgccgatagatccacccgccgagcccgagatactggagacctacatgataggaaacacggtcaccctggtggtgctgccgagtcgcacgccgctggatgcgaccagcattcgcatcggcctggatatcgactcgttcgcctggtcgttctcggctgacctgttcggtcgcacctcgctggacctgacggcgccggatgccaacgggccgaagacggtagaactggagatcaacggctggacctggcggtttctggtcgagcgttacagcggcagcggcaagcatccgagcgagcgctacaccatcagcggcgcgagccgcacccaactgctggacgcgccctatgcgccgaagcgcagcgcggtgaacacggcgccgctgaacgcacgtcaggttgtcgacgaccagttgcagtacaccggcttttcagtgtcctgggacgtcgagaacatggggccgccggactggacgctgccggccggcgccttcagctatcaggatcagacgccgatgcaggtcatcgtcaagctggccgaggtcgccggcggcatcgtccggccgggcctgatggacgactcggtgacgatcctgccgcggtatcgtgaggcgacctggtactggggcaccgcgattcccgaccggatcatcccggccgccatcgtcgccgagtggggcagcgagtggagtccccagccggcatggaatttcgtctacgtcagcggtaccagctacggcgtcagcgtgcaggtgcggcgcgccggtaccgccggcgaggagtcggcgcccgacgtcatggaggactggatgaccggcaccgaggtggcgcgctcgcgcgggatctgcgagttgtccaagggaggcaaccaggcgatcgagacgcgccgtatcccgctgttccagaaggatgatggggtaccgggcctggtgcagccgggcatgttggtcgaggtgcgggacgaacaggcgacgtggcgcggtctctgcctggccaccgatatctcggccgagggggtaggggctagccgcgtttggcagaccctgcgcatcgagcgccactacccgggaggctcatga

SEQ ID NO: 335384 - DNA, 132 bp, Pseudomonas aeruginosa
atgctgtcggagaagaaccacggcgtgcagctgtcgctctgcggggagaagaaactgtcctgcgtcaaagtgaacccgaaagcgggagcttatggggaggaagggaactggatggtactggagaggaaatag

SEQ ID NO: 335385 - DNA, 1578 bp, Pseudomonas aeruginosa
atgtctgaatcattgaaacatctcgagctacctgaaacctatgaaaaaataacagctttactaggaggcagtgactctaccaacactcttcttagtagattcatacttcctatacaagatgcggaaaaagagctctctgagataaccgcacagacatacggtgacggaaaagtaatttttatcttaggaaagcctggaataggaaagtctacattcattcactccctagcgtggcgtccaacaatagaagtttgctctgtcacagcaatgaactgttcagaagtagacagcggaaagcttttagaggaaatattagagaatatcagaaaaacttcaaaaaaagcgagagccaatagagatcttggccacacagctatagttctagactatatagaaaaccttgaagaacaagaccatactaagataagagctttttttaggacattgaacggtctcttaagatcttctccaattcttattctgtggccagttaccgatctacacgatgttaaaacgatgattggatatgcatcagcagtatccagcacggtatttgtaaaagggaaagaaatactgagttttagcggcccccctattagcgcctacccaagcattgcaaaaaacacaatatcagtcttaaacgatgggctttccatttcagactttaacttaacggacgaagactttgatgaactcctaaaagagctacgttcagagggagaagacaaaacgactttaagaaactacctattgaaagtacgccagagatggtctgacataaataattatttacaaaagaaaagagagaaagtacctcaacaaacagaaatctggtttgttattgcctatccagatgcagaaaatatagctggtcagttctctagaaaaagcaaagatgtattcgatgcttggattgcctcccatgcaaaactatcggaatacattcacaacaaccaaaaggaggctgcctgggatgccaagcgacttcagtatgcactaaccgggaactttacaaccagaatcctttacctcccagcaaacacactagcctcaacagtctgtgcatacggagagatcccggactttccaccaagcaatgttcctgtaccaacttcttggttcaagaaagaaactgccaggaaaactttaagaaacagcccattagtacgccaactcttaaaccagcatgtaaagatgggaaaaagaagggggggaacggcatctcaagccctcatagatgcagctccggtatataaagttatttcagagcgcgccacaggaaaaagtatatacagcgaccacccctttaacaaagcattaaaaacagcgctacaggatgtactaggaaatcaagttaaaagcatcgattttgagaaagtccatccttggctaccgagcatcagacccgacatccagataaaaactaatgatgaccgaatagtctgtattgagatgcactacacatctaggcaggattcttacattttagcagactacatcctcgaaaaacttgacaaatatatgagacaacttgataggtacatcagaaactctcaactccgcctacctggcctatag

SEQ ID NO: 335386 - DNA, 1044 bp, Pseudomonas aeruginosa
atggaatttaaatggcccggcgaagcattggtagaaaagctatgggaaacaattgcagagaaaggaataggcggacttcttaagccttggcaaatagctcgagaggggcgcgctatagtcgaaacaagaaagtacgaaaagttattactggcacaagctgaagtagatgccaatgaaatcgccaaggggactaaattcctggataaaaacggaattctaagacccttaataaaagatgcagaagaagaaaagagaatagagccaacaattaatctaaagtccttatctgactctagcgcccgtcttaaaatcgcgtcatcagttaaatctgaaatcaatgcatccaaagctattctttatgcggaagaatcccttctaaatgatacttccgagccacccaccaaaagaatagatcccgactggctcgacgcatggagagaatatgttggaaaaatttccaacgaagatatccagaaaatgtggggacaggcattagctggtgaattaaagtcaccaggctgtttttccatgcgtacgcttgatttcttaagatggatatctcaagaagaggcccttgtgattagtagggttgcgagctttaatatagaaggccgcttgatcaagctaaaaaatcatagcttcaatgacttcggcctaaaatttaatgacatattaataatgcaagagcttggattactgcaaggaggagagattgattctatccaaacaacttttgctagcacatctactgatgaatttataaaccccatgaagtctaatggaaaagtcatattggttactggagaagatccgaaaaaaacctttgacttaaaggttagtatattcacaaaactagggagagagattctgaaacttgggaaattcccccataacattgaatacttgacagctgttgcccaggagatagcttcaaaagactataacgttaagataggagactgggagcagttaaatgaaaatcaaggacgcgtgaccaaccttataagtgtacccactccagcgagtacaattaaccctacctga

SEQ ID NO: 335387 - DNA, 159 bp, Pseudomonas aeruginosa
atgaacaccttccaattctgcttcgcgggcatcgttggcagcgtttctggcagggtcgtgacctggggcggcctgactgtcgatatcgaccggatagagaacgcttggcttcgtcgggcgattgaagactatcgcagtggtcgcagggggcagaaatga

SEQ ID NO: 335388 - DNA, 243 bp, Pseudomonas aeruginosa
atgagtgaccaatactggcttgtgaagctggacgtgcacggcaatcccactctgaaggatggcccgcatcaggatgtatccggtgtacagaaggcgctctacctgttcaacagccttggctttgtacgggaagatgatcagttcggctgtgcgcgaatctccatcagcagcgtcgttgcggatggatctgacgtgaaccacgaggccattgcaattctgaactccgccggcctcaacccctaa

SEQ ID NO: 335389 - DNA, 771 bp, Pseudomonas aeruginosa
atggctagctctcttgctccacgtcaggtgattcgtgatggacagttcatcacctcgccgaatgggaaatacaaattggtcatgcaagcggatggcaacttggtcctttacgaggatggaaccaagcctatctggaatacaacgccggtagggccgggtgcgaaggcggtaatggagtttaaccttaacctttacaataaggctgggcaggtggcatggtctagtaatgtatacactgcatatctgtttgaagagttcaaggatgaggcgtacctgaatctccaagatgatggggactttggcatattttctgacgaagcgaagtgggggtcgatagttctttctcgccctgaagttggcgtgaaaaacaagattattcctactggtacggtaatggttcctggtaccgaatacatcaatggaaactatcgcctggcgtttcagggagatggcaacctagtgatctatcagatcagccctcaagtggttatttgggctacctacactatgggtgcagatagagcagtagtgcaagaggatggaaattttgttatctacaaaggaactaccgctctttggcatacccacactgcgaccggaatgcctgcgtaccttaagtttaccaacaccggtaaactatttttgagtcagccgacccttctttggactcttaagcgcggctctttaagtaaaccaccgaaggtgattcccggtcagcatggtcctctggatacaactccaatctggtcttggccccacgactatccataa

SEQ ID NO: 335390 - DNA, 240 bp, Pseudomonas aeruginosa
atgcgcgaactcaagcaggccgtcgagaaagccggcggcgtaagtcaggtggctgcgagctgcgaggtaagtcctcgagccgtttacaagtggctggcaagcggccgccttccgcgaaccgactacaccggcgaaacggattacgcggagcggatctgtgggttggcaagagggaagggtttcgatctctctcccgctgaactcagggcttcgccgcgaactggcgaccaggccgcttag

SEQ ID NO: 335391 - DNA, 333 bp, Pseudomonas aeruginosa
ttgccgacccgttccgggccggcggctagcgaagcgctgcaggaggcttgccggagtgtgtgggcagcgtaccgggcagcgtacgaggagcgctggggtgttcagccggtgcgaaacgccaaggtcaactcccaggtgaagcaactggtggccgccctcggcgccgaggcgcctgcggtggcggcgttcttcgtcgggctggatgacaagttcctggtcgacagttgccatgagttcgggttgctgctggccaaggctggcgcttaccgcacgaagtgggcaacagccggttccgcgccgtcgaccgattggactgatcaggtgcagctatga

SEQ ID NO: 335392 - DNA, 297 bp, Pseudomonas aeruginosa
atgaagaagcatggtcctgatctgacgaccaagccgcgcctgctcgctcagtgccccgtttgccacggaaaaggatacagcgttggcgttttccatgagatcgattgcgccgcttgtggagcggcggggttcgtcgatggcgtgacggggctggcgctggagcagcgggatgcggtggttcaactgcggatgtgggtaaagcggctgctggaagagcagcgacgccaggcgagcaggctggcgcgagaagagaacaaccagcggggcgccggcggctcccacttcagaggcgactga

SEQ ID NO: 335393 - DNA, 375 bp, Pseudomonas aeruginosa
atgaacatcaaggcgttggaatttctgatggagcaatacgggctgtgggtttggtccgacaatggcacgcctcgcggctcttcgccgatgctggcgctgatgaagcggaaccctgcgaacgaaaaacggtttgctgctgtgatcccctgcatcagtgatgatcgggcgatgcaagtggaccggtttctcgctcgcctctacgacgaagacccggatgccatccgcagcctgatcctctacttcatccatggcatgtcgtatcgagatattcaggatcggatgggcatcagctacgcggacgcacgcatgcttgttcgagcgggcctgtcggctctgctggcgtgcttcgtgatggaggagaaaaaggccgcctga

SEQ ID NO: 335394 - DNA, 348 bp, Pseudomonas aeruginosa
atgagcgagcgaccatgcggaaacgaaaggccggcgttgatggtgaaggttccccacgttccgagcaaggagcatctggccaccgtgagcgctgatgttgatcggctcgctgagtcgcttgggatgcgtccgctgctgctggcttgtggagcggattccaggatcgagagcaatctgcgccctctgctggttgatctggttgccgagcagcgcaagaccaacgacctgctcaccgcgctgatcacggcgatggcagatgaaggcgctggcgatttcgaggccgagagcatcatcacgcatgacctgtcaggcaggccgctgaagaagccgggcggtcaccatggctaa

SEQ ID NO: 335395 - DNA, 252 bp, Pseudomonas aeruginosa
atggtcctggtaacagcacttacgggcttcgaccacggcggccgtcgccggcgcgatgagcaattcgacgtcagcccgcagcatgccgccgcgctgaagcgcaacgggctcgtcacctacgacgagaaccaggcggaccccgatccagccgctggcgagaagtcgtctgcatcgcaagtggccccagtctcagcgcagacgactgcgaaacagtccgggcgtggcgtgaagaagaagccggccgcggagtaa

SEQ ID NO: 335396 - DNA, 387 bp, Pseudomonas aeruginosa
atggatgcggcatggtggagggttcatggcgaagaggctgccaatgctttcggcggcgagctctgcgcgccactgaccttccctggcgtgaagaagattcgcttccatcatttccagaatagcggggccggggctgcgtcgctcgcctccttctggggcgctcggcgcatcattctgctgggctacgactgccagaaaaccggcggccgcgctcactggcacggtgaccacccggccgtcctgggaaatgccggcagcgtcgacaagtggcccgcgcagttccgccaactggcggaccatctcgctggccttgatgtcatcaactgcagtcgagagacggccctggaggccttcccgcggcgcccccttgaagaggttctctcgtga

SEQ ID NO: 335397 - DNA, 2724 bp, Pseudomonas aeruginosa
gtgatcgaaatctacccatcgctccttgacggagaaccgctggagcggcatccgatcggccgcaggatgacgattcattcctggctgaccgcgaattcgcctgggtaccgctgccacgacgtccacccgttctctatcggtgttgtccccgctgaggttgcgctctgcgatgacctcaccgacaagcagaaaaaagcccatgaggagttcatccaccccggtgagtgggccgagcgcatcatcgaccgcggcgacattgttcgtatctacaagctgccgcgcgggactgatccgttcacgatcaccgcggcactgttcaaaggtgtccagtccgcatttcggatgctcatgccacagttgccaggcatgcccacaaacccggggcagggcgagtctctggctgactccagtgcacgaggaaacaaggtcaagctcggcgacgcaattcgcgaagtggccggccgccgcctgatcttccccgactacatcctgcctcccaggaagtattttgctggaccgcgcgagcagtggaccgaaatgctgttgtgcatcggccgtggtcggttccagatacaggagggcggggtcaaaatcggcgataccacgttcctcgcgctcggcgcggaagcctctttccagattttcgagccaggccagagtcttggttcccacccatccgccatctggtggcactccgcgccggaggttggcgctagttcgacaggtaatgctggcctggaactcaccgagtcctcgacgctcaccccgaacccaaccgcaacgaccttcacgttctcggggagcaacatcattatcccctctggcgccggctcgttcccgtctgactgggtcgccgggacgatcctgcgagtagaggcgcagtatccgtacaccgtcgtcgacggcggtggaagcgcgcgcgacacgatctcgggcgatatcgcgcaacttggtctgtctgttggaaccgagattcaggtcgtcggcgttaactcggggctctacgtcgtaaacaccgtgaactccaccaacttgacgctgaactacgatagcggcgcccccgtaaatgctctacaggtgggggccggcgacgctgcaatcggtttgcgtgggctcaggttccgaatcactgcgtacagcgcccagcagatcaccgtagagcgcctgacgtctgctggggctaccgatccagcctggccaggcttctccccgctgaactccagtacgtcgcgcattaccgttgatacctcgaactccgagggaggctggcgcggcccattcccggcgtgcccggcgggcgagaaaacgagcgttgtcgagtgggacatcttttgcccaaacgggttgatattcatcgaccggaagggcaaccagattccgctgagtggctactacactgtccagtaccgcgacatggatatcggtggcgcatggacctcgctcgactaccagcacaacggagccacgctcgaccaaatcgggttcacaacgcgcctgaatctcccgtatgccatgcgaccagagatccgcatgcggcagcgataccccatcgggaaaaacgaattggagttccgcgacacactgcaatggtacggcctgcgttcgcagctccaggcgccgacctcatacgcgggcgtgacggtgctcgcggttcggtaccggtcttctgatcgcatttccgcgcagaccgagagccgcatctcggtagaggctacccgcatgcttccaacccgccagggcggagcatggacgactgaactcgcaacgcgagacatcgtcccgttcctttgctacatcgcgaaagagcgtgggtacaccgatgccgatctcgacctcgatgaactcgaccggctggacgccctctggaaagcccgcggcgacacgtttgacatgatctacgaggacggcaaggtcacggtcgcgcagatcatggatgacgtgcttgcagccggatatgcggagaagacgatcaagcgcggcgtgatctctgcggcacgagacgagaccaggaccacgttcgggcaaatgtactcgccgcagaacatggatggcgcactaaagatcagcatcagcgccccgtctgaggacgactacgacggcgtcgatgttgagttcgtcaatgccaacggctggatcgacgataccgtccagtgccgtctgcccggcgatgtcggaaggaaggtcgagaaggtcacggctgtcggcgtgacagaccgtaacagggcgtggcgctacgggatgcgccgccggatggctcagcgataccggagaaccgagtattcgttcgataccggactcgacgcgctgaacagcgatttctgggattacgtagcccttgccggcgatgttcccggccctggcctggcgcagagcgcatacctgaaatcgttcgtgatctctgaaaactcggttctgatcgagtcaagcgagccgctcgactggtcggtgctgaattcgccagcgctttacctgcgtcgcccagacgggacagtttccggtggctacccagcaacccgggtcgacgactaccggttgagcattcccagtatcgatttcgtccccgatgtttcctgggaaatcgaaccgccgcacctgctgctgggaaacccataccccgccctgatcagttccatcgatcccaacggcaataccgcggcgtccgtccgagcggtgaactacgaccccagggtctacaccttcgacgatgcaagcgcccccaactga

SEQ ID NO: 335398 - DNA, 261 bp, Pseudomonas aeruginosa
atgaggatggtgctgatgctggtggtgttcgcgctggcgggatgcgccggccaggtcgagcttgagccgcgcacggtgcgcgtagaagtgccggtggcggtgccgtgccgagtgccggcggtggaagtgccggcatgggcagcggctgggctgaagaagagcgacgacctacagaccaaggtccgtgcgctgctggccgagcggcggcagcggatcgggtatgaggcccaactgctggctgccaacagagcatgccagtag

SEQ ID NO: 335399 - DNA, 681 bp, Pseudomonas aeruginosa
atggccttccagtggccgcgctcggccgccttgctgtacaacccgacgatacgaggccacggacgcaaggtatcgggcttggccagggtcgccgcttcgcgataccaagcatcggcctgcgggtccagagggggtagatggtccttttcgttaacgcagacaaaaggcttgctgtcagccatagcgggaactgctgcgagacaaagtacagcccatattccaatagccattatccgaatcactgacccggcttccagtcgggtcgagctgcgtcgtagccctggacggggtggggtggcaaggggttatcttttaccaaattgggaaaacgaagatcggggtcggcatcaatttgcagatagagggagtagtagaatttctcaagcttttcatccggcgtataccacattgcacttgaaggaggcgtcctctttccgaagacgcgcgagagaaaaaaggctgcactcctgccgccttgagagacggagacttgatagtagccaagtgcctttggataattatgctcaaccaactcatagtagcttccaagctcatagctcgccggagcataaccttgactggaagcacaactggtatacaccacccccaattccttttccttggccacataaatatagagtttacccaactcggtcagtgctggcgggttccccaaactag

SEQ ID NO: 335400 - DNA, 816 bp, Pseudomonas aeruginosa
atggaagagcaggccgagactcagccggctggtcgggaaggcgtcctccagcccttccaggcgcggcttgtcgacttcggaaaccagttcgaagggctggtagcttcgctccgcgagcggacgcaccaggcgctcggcgaggcccgccaccgtcgggttgcgcatcaggtcggcgagttcgaagcccaggccgcgccgctgtgcggcggcgcggatgcgcagcatcaggatcgagtcgccgccgagggcgtagaagtcgtcgtgcacgccgacctccgccacgccgaggacatcggcccacaccgccgccagttcggcctcggtcgccgtgcgcggcgcaaccgccgccacctgttccggcggtgccggcagttgccggcggtcgagcttgccgttggcgctgagcgggaggctgtcgatgcgcacgaagaaggctggcagcatgaagtccggcagcgtcgccgaaagtccggcgcgcaattgaccggggtcgagttccgccgcagccacgtagtagccgaccaggtgcgtgccgcgtaccgccgaatcgcgtgccacgaccgcggcgtcgcgtacgccgggaagcgcggcgaggcggtcgcgtacttcgtcgggttcgacccggttgccgcggatcttcacctggtcgtcggcgcggccgaggtattcgaggttgccgtcggccagccagcgggccaggtcgccggtacggtagagacggccgccggcgacgaaggggtcggcgaggaagcgctcggcgttcagctccggccggttcaggtagccgcgggcgacgccgacgcctcctatatatag

SEQ ID NO: 335401 - DNA, 756 bp, Pseudomonas aeruginosa
atggtcggacacgtcgacggtggcctcggtcggtccgtacaggttgaccagtcgcacggcgtcgccgaacagccggcggaagcgcgtgacctgcaacggcgcgagggcttcgccgctgcagaacaccaggcgcagcgagcttgccgccgcgcgggcggtcgggtcgccgtcgagcaggtcgaggaacggcgtcagcatcgacggtacgaagtggatgaccgtgaccgcgtcgcgctggatgctccgcagcatttcccgcgggtccttctcggcgccgggcggcaacagcgacaggcgggcgccggtgaagctccaccagaacagctcccagacggatacgtcgaacgtcaccggagtcttttgcagaagcacgtcgcgttcgccgatcggataacgacgctgcatccagttcaggcggttgaccaccgagcggtgctcgaccatgacgcccttgggcatgccggtcgaaccggaggtatagatgacataggccaggtcgccgggcgccacgttggccgccggcaggtcgccggtgctctgcggcaggcgttcgaggtgcagcacgcgcgtctcgccgaggctctcgccgagtgtcgccgcgcgttcgtccaccagcaccacgcgggcgccgcagtcttccagcagcaggcggacgcgctccaggggatggtcgggattgatcggcacataggcgccgccggcgcgctgcacgccgaggatcgccggcagcaggtggggaccgcgggcgaccagtag

SEQ ID NO: 335402 - DNA, 909 bp, Pseudomonas aeruginosa
atgcgcttcatggactggaagaccccgaacggctgtgccacctgccgcccggccctgaactactacctgatctcgacctggccgggagaagccaaggacgatccgcagtcgcgcctgatcaacgaacgcgcccacgccaacatccagaaggacggcacctactcggtggtaccgcggatgtggggcggcgtgaccaacgccgccgagttgcggcgcatcgccgacgtcgccgacaagtaccaggtgccgatggtcaaggtcaccggtggccagcgcatcgacctgctgggggtgaagaaggacgacctgccggccatctggaaagacctcgacatgccctccggacatgcctacggcaaatccatccgcaccgtgaagacctgcgtcggcagcgaattctgccgcttcggtacgcagaactcgacgcagctgggcatcgatctggaacacgacctgttcaacatgtggtcgccgcacaaggtcaagctggcggtctccggctgcccgcgcaactgcgccgaggccgggatcaaggacgtcggcatcatcggcgtggactccggctgggagatgtacatcggcggcaacggcgggatcaagaccgaggtcgcggagttcttcgtcaagctcaagaccgccgaagaagtgcgcgaatacaacggcgccttcctccagctctaccgcgaggaagccttctacctggagcgcacggtgcattatctgcagcgggtcggcatggagcacatccgcaaggcggtggtcgaggacgcggaaaaccgcaaggcgctcaacgaccgcctgcaattcgccctgtccttcgagcaggacccatggaagcagcgcatcgaacagccgcaattgaagaaggagttcgaacggattccgctcaagcaactggaaaacgtctga

SEQ ID NO: 335403 - DNA, 1053 bp, Pseudomonas aeruginosa; identical to SEQ ID NO: 319051

SEQ ID NO: 335404 - DNA, 321 bp, Pseudomonas aeruginosa
atgaagttgtccgatagtttcgatgcgcgccggctgcgcccgcgccggccgagagtctggcgctggcgcctggcggcggcgttcgcggccctggtggcgagcctgggcgtgctgctgtcgctggccggcacctcggccttgatcggccgccagccggctgtcggcatgctgcatatcgaacccgccgctggcggcgtcttgctggcccttggcctgctgtcgctctgcctcggcgtgttgttctggcgtttcagccgccgccgcagccgccgcaacagcgacctgagcctgtcgccgaacctgatgaaaaagcgcgactga

SEQ ID NO: 335405 - DNA, 558 bp, Pseudomonas aeruginosa
atgcaagacgacgacttttccctgttcaagagcgagatgcgcggcgtcaagcgcatctcggtcgatcgagccgataccggcaaacctcgcaacgaccgccagcaactcaagcaacgccagctcaatgccagcgtgcgcaacgacgaaatccgcgtcgatggcctgtccgaccagttcgtcatcgacgtcggccccgaggacgagctgtcctgggcccgcgacggcgtccaggaaagccagttgcgcaagctcaagcagggcctggtgcccttcgacggtagcctcgacctgcacggcatgagcgtggagaaggcccggcagacgctatgggacttccttgccgaggccacccgcctggaaatccgctgcgtgcgcgtgacccatggcaaggccgcgcgcaaggacggacgcagcccgctggtgaaaagccacgtcaatacctggttgcgccagcacccgcaggtgctcggtttcacctcctgcctgccacgccacggcggcaccggctcggtctacgtgatgctgcgcaggaccatgctcgaaggccgcgacgagtag

SEQ ID NO: 335406 - DNA, 546 bp, Pseudomonas aeruginosa; identical to SEQ ID NO: 319862

SEQ ID NO: 335407 - DNA, 462 bp, Pseudomonas aeruginosa
atggcgcatctggtctggcaggatgacctgaataccggtattcaggtcatcgacaatcaacacaaacgcatcgtcgagatgatcaatcacctgcacgacgcccagcaaggcaaggaacacgcggcgatcgccgaggtgatcgaggagctggtggactacacgctgtcgcacttcgccttcgaggaaaccctgatggaggatgccggctaccagttttcccgggcgcacaagaagatccacgagctgttcatccgccgggtctccgaataccgggtgcgcttccaggccggcgaggatgtcggcgacgaactcaagggcttgctctcgcgctggctgttcaaccacatccgcaacgacgacgccggatatgtggatgcggtacgccacagcatgtccgaactggtcaaggacaagagcgagggcggttggttgtcgcgctcgatgaagcgcttcttcggctga

SEQ ID NO: 335408 - DNA, 381 bp, Pseudomonas aeruginosa
atgaacctgatcgcgcacgtggaaataccggtgtccgacctggggagggcgatgcgtttctacgcctcggtgttcggagtggcgttcggcgaggtagccaccctgcacggaagcagaatggcgcatttccccttcgaggaaggccgtgacggtgccagcggcgcactcgccgagggcgacgtctacgtgcctacgctacatggggcgatcatctacctgaatgtcgcggacctggatgccgtcattgcccgggccctcggcgaaggcagcgaaatcctcttcccgaagacgccgcttggcgacggcgtgttcatcgccgagatcagggacagcgaaggcaatcgtatcgccctgcggagcgcttgcggagagcggccgtag

SEQ ID NO: 335409 - DNA, 1332 bp, Pseudomonas aeruginosa
atgaacgtgcacaagatcgtctggcaggaaggcatgctgctgcgcccgcagcacctgcaacacaacgaccgctactacgacaaccagatgaaggcccggacccagttgctgggcagctacaactggggcttcctcgccctggagctggaccgccagttcctcaacatgggcaagctggtgatcagccaggcctccggcgtactgcccgacggcagtctgttcgaactcggcggcaacaccgagccgctcgccctcgacgtgccgcccaatacctcgaacgtgccgatctacttggccctgccgctggtcaccggcaaccacatcgaggcgcgccggccggagcaggccgaggtcctggcgcgctataccgcctacgacctggaggtggcggactccaacgccggcgaggattccatggtacaggtcagctgcgcgcggccggattttcgcctgctgctcggcgagcagcagagcgaccaggcctacgtcaaactgaaggtggcggtggtgctggataccacgccggacggggtgatcagcctcgatcccgacttcgtgccgagctacctccacgcccacgcatccgcctacctgctgtcctgcctgaaggaagtgatcagcatgctcggccatcgcggcgacaccatcgccgagcgtatccggtccaatggcaaggtcggcggcgcggaggtcggcgatttcatgatgctgcaactgatcaatcgcaccgagttgctgctgcgccactacctgggattggagcaggtgcatccggagcagttgtaccgggtgctgctgaccatgctcggcgacctcgccaccttcggcagcgagagcaaacgtccgcgcctggacagccgttaccagcacagcgaccagggcgccagcttccgcaggctgatggaggcgatccgccaggtcctgtcgatggtgctcgagcagcatgccatcgaactgcctctccaggcccgccagtacggcatcctggtctcgcccctgcacgaccacaagttgctcggcagcgcctcgttcgtgctcgccgccagtgccaattgcgagtcggaggaactgcgccagcggctgcccgcgcatctcaaggtgggtgcggtcgagcacattcgccaactggtcaacctgcacctgccggggatccgggtcaagccgctgccggtggcgccgcggcagatcccgttccactccaacaagacctatttcattctcgaacccaacgccgaggacatggcccagctggagcgctccggtggtttcgcgttccacgtatccggcgagttctccgagcttgaactgaaattctgggccatcaggaactga

SEQ ID NO: 335410 - DNA, 1113 bp, Pseudomonas aeruginosa
atgagtaccgatccacgcgcctttctcaccgagctgttcaataccgcggtggcagccggccatccctaccaggtgctggccgaccacctgccggaagatcgcagcgggcgcgccatcgtcatcggtgccggcaaggccgccggagccatggccgaagtggtggagaagcactggcagggcgagatccagggcctggtagtggcgccttaccgctacggcgcgcaatgcagtcgcatcgaggtggtggaagcctcccatccggtgcccgacgacgccggcgagcgcgtcgcccgtcgcgtgctggaactgatcagcggcctgaacgagagcgaccgggtgatcttccttctctccggcggcggctccgcactgctttcgctgcctgccgaaggcatcggcctggcggacaagcaggcggtgaacaaggcgctgctcaagtccggcgccgccatcggcgagatgaactgcgtgcgcaagcacctctcggcgatcaagggcggtcgcctggccaaggcctgctggccggccagcgtctatacctacgcggaacccgtcaagcccgacgccccgtgcctggcgcgcagccacttccagttgatcgccacgccacagaacgccctcgacgcagcagcggtgaagtgccgcgcggccggcttctcgacgctgatcctcggcgacctggagggcgaggcgcgggaagtcgccaaggtccacgccggcatcgcccggcagatccgcaagcacggccagccgctggcggcgccctgcgtgatcctctccggcggcgagaccaccgtcaccgtgcgcggcaacggtcgcggcggacgcaacgccgagttcctcctcagcctcaccgccgagctaaagggcgaaccgaacatctgggccctggccggcgacaccgacggcatcgacggctcggaagacaacgccggcgcgctgatgacgccctgctcccatgcgcgcggcgaaaaggccgggctgaagatccgcgacgagctcgacgacaacaacggctacggctatttccaggccctcggcgacctgctggtgaccggaccgacccgcaccaacgtgaacgacttccgcgccattctcatcctcgagtcctga

SEQ ID NO: 335411 - DNA, 240 bp, Pseudomonas aeruginosa
atgaagtacgaaactttgaggaacaccatcgcaacgctccaaaagctgcgcgatgtgcattacagccaactcgatgctggcgctctggcagaactggatgatgtgttgcagcaactgcgcagcatgcttgaaggttcggaaaggcgggagcttgaacacggtgaactcgtgttccgggctctgcgcatcaccgacatcgtcatccgcgcagtgagtaatctcactgactggatgaagtga

SEQ ID NO: 335412 - DNA, 306 bp, Pseudomonas aeruginosa
atgaacgttggacaagcaatcaagctgtgccgcactcggcggggagtctcccaggctgatctcgcacgtcaggctgagtgctctgtctcctacctgtccatgctggaaaacaacaagcgtgacccaacgctttccaccatgaccaagatcgcacacgcattgcgcgtgcccgtgggtattctttttttcctaggtgcagaaggtggcgacctagacggcattgataagacgctgcaaggggaacttgcgcgtaccgcactggaattgctcaatgagcctgccagcaaccagcgcgccctcatatag

SEQ ID NO: 335413 - DNA, 960 bp, Pseudomonas aeruginosa
atgagcctgccagcaaccagcgcgccctcatatagccaacgccgtatcggcacgctgaatgccctgcgcgtgccattgggtttgtctgtcgatgagctgcgattgcttgccaatcgggccgacagcctataccgcgtcgcaaagtccattaccaagccggatggcagcatccgcaacacctacgatgccctggcaccgctgaagaacgttcaccgaaggatcaaaagccagatcctagaccatgtggactacccagcctatttgacaggaagcatcaaaggcagcgactacaaagtaaacgccgcgctgcatatcaacgccagaattgtcatcaacgaggacatcagcggatttttcccctctacatccgcagaacgtgtattcaatatttggcatgggctgttcggtttcagtcaggacgtgtcgcaatgcctgaccctactaacgacccgacaaggcgagttgccgcaaggcgctattaccagctcattcctggcgaacctcgtattttggcaggacgaaccaacgctacacgccagactcgcatctcaaggacttatctactcccgctacgttgatgacatcgccgtgtcgtcaaaaactttcctgactaatcaggaaaaatcggaagtggtgcggcagatatacggcatgttgctcaagcatgggtatcaacccaaacgggccaagcatgagatttctacatccggcacccgaatggaagtcacaaagctttccatcaacgccaagcctggcctggggaaagccgtatacggcaagactcgtgcggccgtacatgacatagagcagcgcatagcgaatggagaggtgctttcgtttgaacgtggcccttatgcccaagcgatgggtcgggtactgcatctggagcggtttcatccggggaaagcagccccgttgaagaagcgattgcttgcgttaaaggaaggcgctgagacctaa

SEQ ID NO: 335414 - DNA, 303 bp, Pseudomonas aeruginosa
atgatagattttgacaaagctataagcgttgctcatgaaaacgtaacaaagctagtaaaaggagcaaaaaacctggttctagaaggggttctcatttcctcagacaacaaactctatgaggtcacctatagctacgatcttgaaagacaagctgatttcgacatattgaagggaaagacaacgaaagccgccaatctcgtgacactagcgagcctaatggggaagcgaagggaatataaagttttcttagtggatagcaaaagtggtcaattcaggggtttcaaaaattacaaggagagttaa

SEQ ID NO: 335415 - DNA, 144 bp, Pseudomonas aeruginosa
atgaagatcgacaccaacatccgccatgtgaccaagccgggtgcgaatctgtttctggagctgggctttccacccaaagaagccgagcggctgcatctagcgtcgcaaaagcagatcaatgacacgaagcagctcaaggaatag

SEQ ID NO: 335416 - DNA, 321 bp, Pseudomonas aeruginosa
atgagtcgcaaagatacccctcaaggcacagacaacgtactgctggacctcggcttcgacgatgcggaggaactgtcggcgaaggccgcgctcgcgctcaagctcaacgagctgatcgaccaacgcgacctgagccagatggaagcggcccacatcaccggcatgacccaacccaaggtgtcccaggtccgccgctacaagctccagaacatttcgctggagcggttgatgcaggcgctggtgtcgctggatcagcatgtgaaaatcgtggtgcagcctgcccggcgcgagcacgcgccaggcatcaccgtcgcggtctga

SEQ ID NO: 335417 - DNA, 363 bp, Pseudomonas aeruginosa
atgacagagaaacgcaagctcctgtattgggaaggctcctcgaagaaggacttcaaggaatttcccgtccccgtgcagaaggacatgggtgtgtcattgttcgttgtccagttgggcggcacgccggactcggccaagccttggaaggggctcggctccggggtgtacgagctggtggaggaccaccgaggcgacaccttccgcgcggtttacacagtgaaggtcggggatgcggtgcatgtgctgcatgcgttccagaagaaatccaagtccggcatcgccacgccgcagccggacgtggagttgatcgagaagcggttgaaggcagtgctcgcccgctatgcggcgagcaggagaacatga

SEQ ID NO: 335418 - DNA, 882 bp, Pseudomonas aeruginosa
atggcgcgtgcgatctggaaaggcgcgatcagcttcggcctggtgcatataccggtgagcctgtcggcggcgacctcgtcgcagggcatcgatttcgactggctcgaccagcgcagcatggagccggtcggctacaaacgggtgaacaaggtcaccggcaaggagatcgagcgcgagaacatcgtcaagggcgtggagtacgaaaagggccgctacgtggtgctgagcgaggaagaaatccgcgcggcgcatcccaagtcgacccagaccatcgagatcttcgcgttcgtcgatagccaggaaattcccctgcagcacttcgataccccgtactacctggcccccgaccggcgcggaggcaaggtctacgcgctgctccgggagaccctggagcgcaccggcaaggtcgccctggccaacgtcgtcctgcacacccgccagcacctggcgctcctgcggcctctgcaggacgccctggtgctgatcaccctgcgctggccgtcgcaggtgcgcagcctggatggcctggagctggacgaaagcgtcaccgaggcgaaactcgacaagcgcgagctggagatggccaagcgcctggtggaggacatggcctcccactgggagccggccgaatacaaggacagcttcagcgacaagatcatgaagctggtcgaggaaaaggccgccaagggccagctgcacgcggtggaggaagaggaggaggtggctggcaagggcgccgacatcatcgatctcaccgacctgctcaagcgcagcctgcgttcccgcgccggcggtggcaaggacaagggcagcgaaaaggccggggccgacgcgaagggtcgcgccaagtccggtgcctcgcgttcgcggcgcaaggcctga

SEQ ID NO: 335419 - DNA, 1995 bp, Pseudomonas aeruginosa
atgagttcgattgtccgcaacagcgacgatgatccgctggtcatcgccatccagcagccccgtatcgccatcgagtcggtcagccctgtggtggaagagggtgcctatcccgcgaagaccgagagcgaccgcgacctgcgcctggccgcgcgaatcttcgccgatggccatgaggtactcggtgccgaggtggtctggcggcgtgtcggggaaaccgcggagcggcgcctgccgctgctgcccgaaggcaacgatttctggagcgcgcagttgcgcacgccgccctgcggccgcctgtacttccgtatcgaggcctggatcgaccgttttgccggctaccgccgcgaattgcgtgccaagcatggcgcacgcctgccgctggacctggagctgcgcgagggcgacgaactgctgcagcgctgcgccgagcgcggcggtccggagatcgccgccgcctgtgcgccgctggccgaacgcctgcaggcctgccagagcgtcgaggagcgggtggcgctgtggctggcggcgcagaccggcgaactgttgcgtctggtcggcccgcgcgagcacctggtgcgcagccgcgaatacccggtggaggtggagcgaccgctggcgcgcttcgccagttggtacgagctgttccctcgctcggaaagcggcgacccgacacgccacggtaccttcgacgacgtgatccggcgcctgccgcagatcgccgcgatgggcttcgacgttctctatttcccgccgatccaccccatcggccgcacccatcgcaagggccgcaacaattccttgcgtgccgaggccggcgaccccggcagcccgtatgcgatcggcagtgaggatggcggccacgaggcgatccatcccgaactgggcgaccgcgaggatttccgccggctgctcgttgcggtgcgcgagcacggcatggaactggcgctggacttcgccatccagtgctcccccgaccacccctggctgcgcgagcatcccggctggttcgcctggcgtccggacggtagcttgcgctacgcggagaacccgccgaagaagtacgaggacatcgtcaacgtcgacttctacgccgaacaggccctgccgagcctgtgggaagccttgcgcgacgtggtgctgggctgggtcgagcagggcgtgacgctgtttcgcgtcgacaacccgcacaccaagccactgccgttctgggagtggctgatcgccgaggtgcgcggccgccatccgcaggtgatcttcctttccgaggcgttcacccgcccggcgatgatggcgcgcctgggcaaggtcggcttcagccagagctacacctatttcacctggcgcaacgacaagcaggaactggcggagtacttcgccgaactcaaccagccaccctggcgcgactgctaccggccgaacttcttcgtcaacaccccggacatcaatccctggttcctgcaacgctccggccgccccggcttcctcatccgtgccgccctggcgaccatggggtcggggctgtggggcatgtactccggcttcgagctgtgcgaggcggcggccttgccgggcaaggaggagtacctcgactcggagaaataccagttgcgtccgcgcgactaccaggcgccgggcaacatcgtcgccgagatcgcccggctcaaccgcatccgccgggaaaacccggcattgcagacgcacctcgggttccaggcctacaacgcctggaacgaccgcatcctgtatttcggcaagcgcaccgcggacctcgccaacttcgttctggtggcggtctgcctggacccgcacgaagcccaggaggcgcatttcgaactgccgctgtgggagttcggcctgcccgacgacgccagtctccagggcgaggacctgatgaacgggcatcgctgggtctggcacggcaaggtccagtggatgcgcatcgaaccctggcacctgccgttcggcatctggcgcgtgcggcgcgtcgacgcataa

SEQ ID NO: 335420 - DNA, 417 bp, Pseudomonas aeruginosa
atgaaaccgcacctgatctactacgtcgccaccagcctggacggcttcatcgcccgtcccgacggtagcgtcgactggctcgaccgtttcgccgagggcggcaacgaccatggctacaacggcttctaccagggcatcgacgggctgctgatgggccgcggcacctacgatatcgtgcgcggcttcggcgactggccgtatccgggcaagccctgccaggtgctcacccgcaatccccgggagagcgcggtggaaggcgtcgagttgcgccatggcacgccccaggaaggcctcgcacgcctcggcgaacagggctgccggcggggctggctggcccaactgctggaacaacatggctacaacagcggcatcgtacagatgcgctaccaggtgatcgccgaggacgacccgcaatga

SEQ ID NO: 335421 - DNA, 219 bp, Pseudomonas aeruginosa
atgagccgtttaagccttatgccccagaagaaagcctgcaccatcggacagcgcatcgacttcagcaagaatctcggggagatttttctagaccttactatcaagctcgacaccgaggtcaggtcgcgctgccccgaccttaaagatacgatctggatgcccttccttaccgggagcgacctccagatcgatgaccaagctcttgagttggggaactga

SEQ ID NO: 335422 - DNA, 2133 bp, Pseudomonas aeruginosa
gtgaaagcgaccgaagccaatctgctcaagtttctccgcaagtcaccgcagtttgtcattccgatttatcagcgcaactactcgtggacggaggagcagtgccgccagctttggtcggacatcctgcgcgctgggcgagaaaagtccgtcaacgctcacttcatcggctccatcgtgtatatcgagcgtgccctatcgtcggtcaccagcccggaagccctgctggtcatcgatgggcagcagcgcctgacaacctgtacgctgctgatcgctgctttggccagccatatcgcgagtcttcctgccgatcaattggaggcgcttgatgaactgcttgagacgttctcggccaggaagctgcgcaactactatctgctcaacccggacgaggacggggatcgccgcttcaagttgattctttcggaaaccgacaaggaaacgctgctggcgatcctcaagcagtcgccgattcctgccgaacacagcacccgtatccaagagaactttcagcttttccagtccctgcttaaccagaacagttgcgagctggttgcgatctgtgaagggctcgcgaagctggtcatcgtcgatgtctcccttgatcgcggtcaggataatccgcagctgatcttcgagagcatgaactccaccggcctggagctcagtcaggccgatcttatccgcaactacatcctcatgggactggagcctgcgctgcagacggagctgtataaaagctactggcgccccatggaaaaagccttcggccaggcggcttatacccagcactttgatgcattcatgcggcactacctgaccacaaagacgggcgacattccgaatgtccgcgaggtctatgtcgctttcaagagctatgcccgcaacctgaaaaacgatgtttctgcgttggtagccgacatccacgcctacgcaacttattactgcgccattgcgctgggtgcggaaagccatccgcagctcaggcaggcactccatgatcttcgcgaactgaaggtcgaggttgcataccccttcctgctggatgcctaccatgactacaagacggaagctctgagcgcagacgagctacgccaggtcatacgcctggtggaaagctatgtatttcgccgagcagtctgcaacatcccgacaaattcgctgaacaagacattcgcaggcctctcgcgcaccctgaagaaggaccgctatctggaaagtgtgcaggccagtttcatgctgctgccttcataccgccgctttcccagtgatgacgaattccagcgcgagctcaagcagcgagatctctacaacttccgtagccgcagttactggcttcgtcgtcttgaaaatcatggaaggaaagagcgtgtcgccatcgaggactacaccatcgagcacattctcccgcagaacccggagctttccccgagctggcaggtcgagcttggcgaggactggaaggctgtccaggaaacatggctgcacacgctcggcaacctgaccttgacgggttacaacagcgagtatcgcgatcacccgtttgcgttcaagcgagaccaggttatcgacaaggatggaaaccccgtagggttcgcacacagcccgctcaggctgaatcaagggctgggcactgctgaaaaatgggacgaagcggcaatcaaacaccgggccgagcgcctggccaaggaggcggcgaaggtctgggatgctccacggctggctgcggacatcctcgatgcatatcgcccatcgagtcttccgactggcaaccagtacagcatcgacgatcacccgcaccttgcatcaggtcccgttcgtgagcttttcgaaagcctgcgcacagcggttcaggagctcgatccctgcgttaaggaggacgtactcaagctatatatcgcctacaagtcagaaaccaactttgtcgatgtggtgccacaagccaagcggctgcggctgtcgctcaacatgcccttccatgagatcgatgatccgaaggggctatgccgtgatgtcacgaacctggggcgctggggaaatggcgacgtcgaagttgccctcgccagcgaggaggaactgccctatgtgatggggcttataaggcagtcgtttgaccggcagatgggagacatctag

SEQ ID NO: 335423 - DNA, 2769 bp, Pseudomonas aeruginosa
atgagcggttcgcgtattcaacatcacgtttccgggcgcctgtcgctgcgcccgccgcaggccgagtcgctggccaagctggtgcaggcgctgggcgctgcgccggagctgctggagcatcagcagaatgtgccggccatcctcgccaccctgaaggcccagtttccgaccctggaggacttcgagcgcgatttcccctcgctgtgcttcgctctggccaccggtgtggggaaaacccggctgatgggcgccttcattgcctatttgcaccttgagcaccagatcaacaacttctttgtgctcgcgccgaacctgaccatctacaacaagctgatcagcgacttcaccccgaatacgcccaagtacgtgttcaagggcatcggtgagttctctatcaacgtgccgagggtcatcaccggtgacaactatgaccagcagaacatcttgggcggtgagctgttcggcgaggtgcgcatcaacatcttcaacatctccaaaatcaactccgaggtgcgcgggggcaaggagccgcgcatcaagcggatgcgtgaggtgctgggcgacagctacttcaatcatctggccagcctggacgatctggtgctgctgatggacgagtcgcaccgctaccgtgcccaggccgggatgcgggcgatcaacgaactcaagccgctgtttggtctggaagtaaccgccacgcccttcacggagtcgagcaaggggccggtaccgttcaagaacgtggtgatggattacccactggcccgcgccatcgaagacggcttcgtcaaggaacccgccgtagtcacacagcgtgagttcaaccccaagcagcatgcgccggacgtggtggaacgggtcaagctggaggacggcgtgcgactgcacgaggcgaccaaggccgaattgctgacctacgcacgcgaaaacgatgccaaggtggtgaagccttttatgctggtgatcgctcgcgacaccacacatgccgggcaactgctggcgttgctggagtcggatgccttctttgaggggcgctatcgcggcaaggccatccaggtcgactccagtaagagcggcaaggatgaagaggaaatgatcacccgactgctggccgtggaaagcgtgggtgagccgaccgagattgttattcacgtcaacatgctcaaggaaggctgggacgttaccaacctgtacaccatcgttccgctgcgggccgccaatgcacgcacgctgattgagcaatccatcggccgcggcctgcgcctgccttatggcaagcgcaccgaagtggaggcggtggatcgcctgaacatcgtcgctcacgacaaattccaggaaatcattgacgaggccaaccgtggtgattcgccgatccgcctcaagcaggtgatcctcgatgcgcctaaggcggacgacgataagaccagcgtgcaggtgcagtcaggtgcgcatgcgatgctcggcctgagcgaaagtgcagagcaggcggttgcttcgcaggagagcaagcctggcgagacaagcagctccggtgcgaatgccgaaacacagaagcctacgccgattttcaccaccgaagcggagaagcaggctgcccgtgtggtgatggaggtgatcggccagtatgaaactcgtcgtgatctggtgtcgggcagtaaggatctgctgaagaaggaagtacaggagcagatcaaggctgaagtagccgagcgcctcaagcctcagcagggcacgctattggaaggccaggacgcgagcacacctgagctgaatctggaggaggtggtggccaagaccaccgaagtggtggtgcagcagaccatcgatattccacgcatcacggtggtgccgaccggtgaggtaatctcgggctaccacccgttcaccctgggctgtctgcccaactaccagccgggccagcgcgagctcctcgtgcaagagctacgcaccagcaagcagtccacgctgtgtcgtgaaagcggtatccgcgagaagcgcctcgaggactatatcgtcaagaagctgattgacttcgatgatgttgattatttcacccaggccgagctgctctacgacttggccggacaggcggtggcctactaccagaagcagaactacgccgaaagcgagctgcacgaaatcctcgatacccgcggtgcagatttggctcgcctaatccatgcagaaatgcacaagcacttctgggaagaggtcagtggctacgaggtaaaggtcagccgcggtttcaccgagctcaaaccctgcaactatacggttgccgctaaccagccggtacacagcgtgcgcgagacagtcaccgagaccagccgtatcaagcagatgctgttcggcggattcacccgctgcctgtatccgctgcagaagttcgattcggacaccgagcggcgttttgccgtgatcctcgagcgcgaggcgctgaaatggcttaagccggctaaggggcagttccagatcttctacaagctcggtgctgagcagccggagtatgtgccggacttcgtagtggagacggacagctgcattttcctcgccgaaaccaaggctgccagcgacctggagacccaggaagtgcaggccaaggctgccgctgctgcacagtgggccaagcatgcgtccgactacgcaaagagcgtcggcggtaagccctggaagtacctgctgatcccgcacagcgaagtaaccgaggcgaagcggctgatggactatctgcggtttgaggtgaaggcgccggtatcggtcgctggctga

SEQ ID NO: 335424 - DNA, 648 bp, Pseudomonas aeruginosa
atggggcgccgctgggtcatggtcgagctgggagagcactgtcatacccacgtcattccgcggctgaaaaaagttatcgatggcactgaccagggcggcatcagccaggcggtcaactggcaaggcggcggcggcttccgctactacaagttggccccctcattgatcgtcaacgaccggtggggcaacccagtgatcaatcccgagtacaacgctgccatgttggccgaagctttggccaagctggaaggcttcacctatgcgccctcggaagctcactggtggcaacatggccattccagcgagcgcgatttcatctacatcactacccagaacctgtctgcccagcagctgcaggcgctggccgacgaggtcggagccgagcagagcctgctggtctgctgtgctgccttccacggcgtgaccgccacccaggccgaagcacgctggccgaacctgacgctgaagaagatccccaagatggtgctatcgcgctgcgagtggggccacgacgactacagcctgaacgtcgctaatctgccgctggccgagcaacccgttgccgcgcccgatccggtgaaaaaagcaaaaaaaaacaaggttgctgagccagcacaagccgcgctgtttggtgaagacgagtcgtga

SEQ ID NO: 335425 - DNA, 1821 bp, Pseudomonas aeruginosa
atggctgcgcttgccccggactacatgatcattctcaagaggattctgcttgagcgatttgtagattcactgccaccactgctggacacgaagaagccaccagcggagcagcaagacaagcaactttcgcgtgcgttcagtgcttttgtgctgcataagctgcttgatctggcaccagtggaggccgcagcagcggttgtggatgacttccatgacaagggcattgatgccatctactaccatcagtcatcggagacgctctacctgctgcagactaagctgagagagtcagagcagttcaagcaggaggatgcacaatcgttctgtgaaggggttcgtctgttgttgaagcagcggtttgctgccttcaacctgaatgtgcagcagcgccaggctgagatcgaggcggcactggatgcctgcagccgcattgagctggttgtgccctacacgggtgatagtgtctcgaagaatgccagtgataccctgcaggcactgcttgatgacgaagaccttgatgaggagcgtctggtcaggcaggtgaagtactacgcagcagatgagatcactagcgatcttctggctgaagaggcctactcgccggtgaatgctgacgttttcctgcagaagtgcagcaagattgaggagccccgtgcgacttactatggccttgccaggctttctgatctggttgcgttacacgagaaccatggtaaggcgctttacgagcgcaacattcgatacttccttggcagtagcaaatccgacgtcaatgttgccatccagacgaccctgcgcgatgctcctgagaagtttttctacctcaataatggcgtcacggcggtttgtgaccatgttgatgagaaaggtaagaaacctgccacaggctttcggaggtaccaggtcagagggctgtccataatcaacggtgcgcagacggtcgcctctgctgccgagtttgtagcacagaacccgcagagcgatatcgagagcgcgaaggtgctgctcaccctgatcaaggcgcccgctgctggcgattttggcaagcaggtcaccagggctcgtaatcaccagaacccggtgcagatggcgaactttgctgctctagacgagaatcaggagcggttgcgccaagagattgcgctcctgggcttcgactatcattatcgccccgaggcgcggggggaaagcgctgcagccgtcactcttgatgaggcggcccgagcgcttgcgctgctgcaagctgatccccgtcatgtcagctggctcaagagtgatgctacacgacttaccaacacggattccgctgagtatcagttgcttttcgcgaagaccttgtcaggcgccgtgttggtcaacaccgtgctgtgccagcgagttatgcgtgggttgctgaaagagagcgagcaacatgcaccggctggcagccaagagcggttgatctaccgccatggcatcaacgtgatcatggcagtcatgctgaagcagctgagcactcatattgagggaggggcagtgcttgatgttgccaaggttagtgccttggtcagccggccgcttgatgagctccgccagcgttctgtggatctttggcagcaacagcatcaaaacgaggggccactggcctttttcaaggcgatggatcgtacaacgccattccttattgcccttatgaaaaagcagtacgggcttgagggttttcaggaagaaagaaatccggaaaggctcggtcgtcttgctcaggaaggaattagcctcacacaagatctggtcgagcgtttgtccaaggctgccccgcagctgaaagagagcaagaaatga

SEQ ID NO: 335426 - DNA, 2880 bp, Pseudomonas aeruginosa
ttggccatccttaccgaacaccagcgccagtactacgcttggctgctgacccgacgagctgcaggggattcggttgaatcgcttgcctcaacgctggttgactcgcaggttgatctcaaccctcatcaggtcgatgcggcactgttcgcctgccgcaacccgctatcccgtggagtgatcctagccgacgaggttggcctgggtaagaccatcgaggccgggttggtcatttcacagcgttgggccgagcgccgtcggcgcatcctgatcatcgctccagccaacctacgcaagcagtggcaccaggagctgcaggacaagttcaacctgcaaggcctgattctggaaaccaagagctacaacgcgctccgcaagcaaggcgtcaggaatcccttcgtgttcgcctgtggtccagtgatctgctcctaccagttcgccaaggccaaggcgaaggacgtcaaggcaattgcctgggatctggtggtgctggatgaggctcatcgcctgcgcaacgtctacaagagcaataacgtcatcggcaagacgctgaaggatgccctagctcatgtgcattccaaggtgctgttgaccgcgacgccgctgcagaactcgctgctcgaactgtacgggctggtcagcatgatcgatgaccgagtctttggtgatatcgacagcttccgcgcccagttcgtcaactccgacagagcgcaggcctttggcggtttgcggcaacgcctgggcagcgtttgcaagcgcaccctgcgccgccaggtgcaacagtacgttccctataccgcaaggcgcgcgattgttcaggaattcatccccagccaagaagagcgtgagctctccagtctggtggccgaatacctgcgtcgcccgaacctcaatgccctgcccgaaggccagcggcaactgatttctctggtgctctggaagctgctggcgtcttcgacccatgcgattgccggggcactggataccatggccagacgcctgcagggcagcctcgataaatcggctgaagtcatcgacctcactcagatcctggacgaagactacgaaggctttgatgagttggccgacgaaagcgaaaaggagctggacggcgaagaggtagtaaccctctccgctggcgagcgcgatgccattgcggctgagatcgccgagctgcagcagttcaagaacctggccaccagcatccgtgaaaacgccaagggcaaggcactactgatcgcactggtgcgtgcctttgccgagcttgaacgtcttgacgccgcacgcaaggccatcatctttaccgagtcgcggcgcacccaggactacctgctgtcgctgctggccgatacgccctatggcgaaggcatcgtgcttttcaatggcaccaacaccgatgccacagcccagcgcatctacaaggactggctgcagcgccacgccggcagtgatcgcatcaccggctccaagaccgccgatacccgcgccgcgctggtcgagcacttcaaggagcgcggcaccatcatgatcgccaccgaggcaggggctgaaggtatcaacctgcagttctgctcgctggtgatcaactacgacctgccctggaatccgcagcgcattgagcagcgcatcggccgctgccaccgctacggccaaaagcacgacgtggtggtggtgaacttcgtcgaccgcagcaacgaggcggatgcacgggtctacgaactgctggccgagaaattccagctgttcgagggcgtattcggcgcaagcgacgaggtgctgggctccatcggctccggtgtcgacttcgagcgccgtattgctgatatttaccagaactgccgtgatcctgaagagatcaagcgcagcttcgagcagctgcagttgcaactgtccggggaaatcagcgaggcgatggtcaagacccgccaggtgctgctggagaacttcgacgaagaggtacaggacaagctgcgtatccgtgccgaagacagcagcgccacccgcaatcgcttcgaacgcctgctgctcgacctgacccgtgctgaactcaacgactacgctcgcttcgatggtgacagctttgagctgcacagactgccagctggcagcgctgctggcattgccctggggcgctacgagctgcctcgccgtgccggcgagtcgcacctgtaccgtctcggacacccgttggctgcttgggtgatcgaccaggccaagagccgcccgctcgatcagcaaccggccgccagactggtattcgactacgccgcctatggctcccggatcagcaccctggagcccttgcgtagccagcgtggctggctagccctgaaactgttctccgtcgaggcgctgggcaacctggagcagcatctggtcgtttccgccgtcacggctgacgggcaggcgctgccagaagatgacccggaaaagctgctgcgcctgccggcacgcctggagcagagggactcagcagcagccggaacgacactgctagccgacgacctggagcagcgcaagaataagctgctgcgcgagatcaaccaacgcaacatcggttacttcgatcaggagctcgccaagctcgacgcctgggtggaagacctcaagctggggctggagcaagaaatcaaggcgattgatggtgagatcaaggaagtacgccgaatcgcagcgactgcggcgatgctggaagagaagctcggctaccagaagcagcagcgtgagctggaaggtaagcgcaacaagctgcgccgcgagctgtatgcccgccaggatgagatcgatgcagagcgcaacgagctaatcgatcagctggagcagcagctgcagcaacaggtagaggaagtcaccctgttcaaggtggagtgggtactgcaatga

SEQ ID NO: 335427 - DNA, 1011 bp, Pseudomonas aeruginosa
gtggatcacctcggtaccgccgcgaaccatgaagaacggcggcttctcgatcacgtcgtggccgacgttgacgatcaggtcggccgcctccaccgcgcgatgcacgaagtcgccggcggacagcgcggcgttgccgaggaagcgcgggtgacgctcgtcgaccacgcccttgcccatctgggtggtgacgaagggaatgccggtcttgtcgatcagttgcttgaggaccttggcggtcatcttgcggttggccccggcgccgatcaccaggatcgggctgcgcgcggcgcgcagcttctccaccgcggcgcagatcgccttgtattccgccagcggccggcggctcaggctcggcgggatgggcaggctgtcggtctgctcggcggcgatgtcctccggcagctccaggtgcaccgcgccgggcttctcttcctcggccaggcggaacgcctcgcggacccgcgagggaatgttgtcggcggaggccagttggtgggtgtacttggtcagcggctgcatcatgccgaccacgtcgaggatctggaagcggccctgcttggacttcttgatcggcttctgcccggtgatcatcagcatcggcatgccgcccaggtaggcgtaggcgccggcggtgaccaggttggtggcgcccgggccgagggtcgacaggctgaccccggtcttgccggtgaggcgcccgtaggtggcggccatgaagccggccgattgttcgtggcgggtgagcaccagccggatctgcgacttgcgcagggactccagcaggtcgagattctcctcgccgggaattccgaagacgtactgcacgccctcgttttccaggcattgcacaaccacatcggctgccttggccatctgcgttctacctcgggtggtggcggttctgaccgctcgaacactgcgcccctcgcgtctcgctgtccagcccctcccggccggcggaaggctctggcgccggcttcgccggcaagcgaacggcgctcccgccattag

SEQ ID NO: 335428 - DNA, 876 bp, Pseudomonas aeruginosa
atggaatttactgagccaaaagttcaatcggcactgatcgctgcagccgtttcaatactaacacttctcttgcgcgccgtaacaaatccgatatgggagcgtaattttcacaagttcaagctggaaagcaattacaaatatgatcagcgaaaaagagttagggaagccatatcaaagcataaggtaccactactaaactcagccgagtcacttaatcatcggctatggaatttctctaaaaacgcaccaaaagcatggcacatccaaaaagatggcgaagatatttcagaaaagtactatctattgtcattttgctatagattcttattgtttttttcaatttgccgcaagatcgatcttgagcttatatatcttgacagcacagtcagcacaaaaaaagatctcgactttctaaagtatctaaaacttttcccacaaatatttagcgataccgaaattttcaaaggtacggactacaatcactcagtagccactgatcatttctttagcgatgaattccgagagcttgtcagagtaatgagcgatgatgatgacaaaacactgagttattccgaattcaagaaaaaagtcaaagaaaaagaattcacaaatttaatttcttatttttcaggtatttcagcaaaccatagctgccttcgctggcaactgttaaatagctttcacttcatactcatggcatttctaaatgactatggctatgattttcaaaaaacatcaaaagtaaaaattttagaattagcccagagcctacccccaaaccgcctaattaaaaacgcttgtatactcattgagcgagtatgcctcaacaataacaaagaagtccgaaaggctatttccgcgtttcctaaggattaa

SEQ ID NO: 335429 - DNA, 795 bp, Pseudomonas aeruginosa
atggacgcacaacccatcatcctctggatcggcagcaaacgtcggctcgctgatcggatacttccgctgatgcccaagcacagttgctacgtcgagccattcgctggcagcgccgcattgtttttcctcagacagataccggcagaggtggaagtactcaacgacatcaatggtgacctgatcaacctgtacaaggtcgtgcagtaccatcttgaggagttcgtccgtcagtttgagtgggcactcagcagccggcaggtcttcaagtggttgcaggcgactgaatctgccgccttgaccgacatccaacgagcagcgcggttctactatctgcaacagtcggcctttggtgctcgcgttgacggccagagctatggcatctccaccgttcatccgccaacgctcaatgtgcgtcgcatcaagagcatcctgtctgccgcgtatctgaggctcaacaatgcgtatatcgagaacctcgactggcaggaatgcatcaagcgctatgactgcggccatgccttcttctatatggacccaccatactggggcacgagaggctatggtgtaccattcgagtttaaccagtacgaaaaaatggcccggctactcaaagacatcgagggcaaggcgatcatcagcatcaacgaccatcctgaaatccgcaaggtcttcgctggctaccacacggaagcagtagatcttcgacataaggttggcggtggcaatggcagcggcgccacggaactgctagtgttcagctgggacacccgggcggaaccttcgggattgttctag

SEQ ID NO: 335430 - DNA, 267 bp, Pseudomonas aeruginosa
atgaagcgatctatccctttgttactggttgctgcactcgcggcctgcggcccgtccgagccaccgaaggagcaagccaatgtgcctaccgtcgaagaactggctgccgcccctgaacgattgaaggaactgcgccgccaatgcaagaccgagcgtccgacgatgggcgatgtgctgtgcaaccgcgtggccgaagccacgaacaagcgcttcttcggagacagcaaggtgccttacacgccatcggagacgccgccgaagttctga

SEQ ID NO: 335431 - DNA, 1488 bp, Pseudomonas aeruginosa
atgcacacatcaccgaatcgcactctctcgcggcgttgccgcgtactcatgatgctctcgctctttgttggactatcgggctgcacgacggtcggccctgactatcaacgacccacggtgcaggttcctgcaaactgggttgaagacgcagaaaccataagcaacccagatcaagatggtcttcgtacctggtggcaatcattccaagacccaatgctcgatagcctggtcgatcagacattgatgcgaaaccaggacctcgacattgctctggctcggttgcgacaggcacgtgctgagcgggtacaaatcgcctcttcttctgggcctacggtttcagccggtggtacgggagaagccctgcgcagcagcaaagcgctgacttcgcaatcgggtggtgagtcacgcgcctggcatctaggatttgacgccagttgggaactggatctatttggtggaactcgccgagcaattgaggccgctgatgcgggtatagaggcgcttgctgaagatcatcgtgcgctacaagtgagcctagttgcggagctggtgtccaattacgcagggcttcgagctacgcaggtacgcttggatatctcgcgcgacaatatccgcacactcattgacgccgaacgattggccgaacaggcgtatcggttgggcttgggtaccttggcagatgtcacgcaggcgcgtgccgagcgtgaaacagccgaagcgaaaccaccgttgatggaagcggacattgctcgcttcagccatgccattggtgttttggcaggtggtttccctggagactggcacgatgccttgggcagggctgcacctatgttgccaatgcgtgccgatctgccactttccatgccgtctgaagtgatccgtcaacgcccggatctgcgggcggatgagcgacgccttgccgcagccagtgcccagataggtgtcgccgaggcggagcgttttcccaagtttcgaatcccattgggcataggtactacggccagcgtcattcacagtctcttttccggtgccagcttggcctggtcggccggaatacagagcaaccaatcactctatgacggaggacgtgcgcgagcaggagtagaagcagcgcaagctaacgccgatgccgcaagactggtctacgaacgagatgtgcggctcgcactgcgtgatgtggaggatgctttgacggcatggacgagtgagcgccagcgccagacatccttgaacaaggcggttatcacgagccaacaagccttggagcattcgaccaggctctacaagcgaggattaagtgcttatctaccggttctagtggcgcagcgtgcgctcaaccagtcgcgagacgaacttgctcttagtcagctggaagaactccgaggtcttattgccctctacaagtcccttggtgctggctggcgggacgcgcccttgggtcaagacattggccgatctgatggtttcgaggcggcaagggcgcaatga

SEQ ID NO: 335432 - DNA, 930 bp, Pseudomonas aeruginosa
atgtctaagatttcattttcagtaaagccgctcatacgggcgggacttacattgattgttgttgtggctgccggatggctcgtggatgcgctctggcacgcctatgttctggctccttggacacgcgatggccgtgtgagtgcgcagatcgtacgcatggcaccagaggtttcaggtagcgtggtcgaagtcgctgtgtcagacgatcagtacgtgaaacagggtgagatgctctaccgcattgaccctgccagtttcactctggccttggcgcaagctgaagctcgactgactgctgcctcggctctgttgcgccaaaaagtcgaggatgctaagcgacgtcagggcatggagagcttggttcctactgaagaaatccagcgagcggcccaagcagtggcgacggctcaggctgaacagcgcagtgcgcaagtcgatgtggacaaggccaaactcgacctggcgcgcactgtcctgcgcgcgccagtggatggctatatcacacgcctgcgattgaacaagggtgattacgcagcgattgggcaacccaacatcgccttggtggatgcaaacagtttctggatcaccggatatttcgaggaaacgaaattgcatggtatccgtcccggtgcgtccgcacagatccggttgatggggtttgacaaggtcatccctggccgggtcgtcagcatcggacgaggcatcactgatgccaaccagcaggccgatgcccaaggcttacccagtgtagagccgacctttagttgggttcgcctggcgcagcgcatccctgttcgggttgagttcgagcagcttccgcatgacatcgttctggctgcaggcatgactggcagcatcggagtgaatatgccggagggtgactcaccgccgcagggctggctcgtatcaatactgcaacgctggatgtaa

SEQ ID NO: 335433 - DNA, 234 bp, Pseudomonas aeruginosa
atgctgattacttttccaaacgatctggaagccaaaccaatgctcagtgaattttcgttgggaggcatttacctgccgccattctttgtttatgcgtgcatcacgttgccgatctatctgggggttcggttcgtacttgcgcgtagcggcgtattgcggtgggtctggcatcccggcctgttcgaattcgctctctctctctgtctcgtttcagtgttgattctctatgtctaa

SEQ ID NO: 335434 - DNA, 2139 bp, Pseudomonas aeruginosa
gtgcgttccgcgaacgtgccttcggcatctctaagcatcctttcgcgctgtttttcccaaatttttgggtggttcgcgcatgggctgcagtacctcgacctgacgacaccgcgcgcgacctatgtcatgcgttcaattcttgccgcctggttggcactcgttgtcgcttacttattggatctgcacgcaccgtattctgctgcgtccagcgtgctgcttgtcattagcccggtacagggagccgtgatcggaaaaggaacctggcgggtactgggcaccttgaccggcatgttggcagccttcgttttgatgagcgcatttggtcagatgccttggctattcttgctggggtttggtctatggctgggaatttgtgtagcgggtatgacactgctgcgccattttcgcgcctacggtgcaactctggcgggatacaccgtggggttggctgcgtacggtgccatgcagcatcccgaactcaccttcgatcaagtcatgggtcgcggtgcgtccgtgctgattggtgtggtgtgcctggcggtggtgtctgccctcttcagtacccaaagcgtacgcagtcgcctggcgagtcagctcaatcgccttgcagcgacaacggcaagcattctttcaacgaatcaccaagcgattcatggtggtgacgcgcctggtggaaaacctctggagcttggtaggcgcaacctcatcaccgaagtctatggggtggacgacttgcttgcgcttggcaaagccgaatctgctgacttggcacagcgtgctggcacggtgagacagacgatgatgtccttgttttcggcattggtaggtggcgctcctcctatgcaggagaacagtgcaagccttaacgctttgaggtcactacagcctgcatgggagcaggcatggcagcaagccagtctggtgctcgcgaaggagccgggcgccaaggaaatgacgcacgccattcaggttttgtcagatgtgcgtacacgactgatagagatgctttctgaggctgaggttgatgatgcgctggaacactccgcgctgatgatcgcgggcgatcgcctgatcgaacaacttgacgattatctggaggctttgaagggaatacagcgcttccatttcccccgtcccacagcagcccaagtttctgtgccgttctaccgagacacgtcggcagcgattcagaacgggctgcgagcgttgctgacggtcgtgttcggtggcgcgttctggatagcaaccggatggtcatacggagccatgatgttggcgggtttggccgccgcttgtgcgttgctatctaccgcccccaatcctgcgctcggtgctgtcgaattcatcaaaggaacagtggccgccgttgtgatggcatttctctgctcttttgtcattcttccctatgtctccgggctgccattgttgttgctgatccttggtttgttctggttgccagctatatacgcaacgacggtgcctcgttatgcattggctggcgtggcctatctcgtggcattcacgacattagcagctccagacaatctaatgcggtacgactttgccgtatttctcaatggttctgtggcctggatattggcgacgttctttacgctgctcgggttcaaggtcgtgctgccgcgcaacttgtcacgcgacgtggcaaggctaagccaaacgatccgtgatgaagcgctcggcacgctgaaaggggcgcggacggatgtgaacacatggcaatggcgtcaacagcatcgtacggcacaactcggtgcattactcaagacccagccggaggtgatggatcgagccatatccaatgctctggccagcattcatttgggccgtgaagtcctgcgcgtacgcaagtggctgcagcgagctccaaagaactccggcttacatcatgttctggcgaatgcgcttcgcagcatgagtcatcgtgcgagccagccctctttggctgcaaaacacgcacgccgtgccgccaagtcattggcgagactagcggccatagatggcaccacgatggccgaaatccagcaactcaaagtcgtcctgttcgatattgctgtattgctggaaaaccatgctgattacttttccaaacgatctggaagccaaaccaatgctcagtga

SEQ ID NO: 335435 - DNA, 933 bp, Pseudomonas aeruginosa
atgtcgcgccctgatctcaacttgctactggcgttggatgcgttacttgatgaaggaagcgtcatcggggctgcgcgccgcatgaatttgagttccccagcaatgagtcgcaccttgagtcgcattcgagaagccctcggcgacccggtgtttgtccaggtcggccgcaagctcatgcccacgccgaaggcgctcgcgctgcgcgagcaggtgcgcatggctgtcgagcaagccacgcaggtttttgaatctgacaccgagatcgacctgaaatcgctggataggcgctttaacgtccgtgccacagatgagttcgtgagtatctatttgggccatctgttggccgcaatggcctcagacatgccgcgtgcaatgctgcgcttctctccggaggaagacgacgtagatgaagaggcactgcgtaatggccgcattgatttgtttatcagtgcttcgcgcaagctagggccagagattcgtgtgcagtcgctcttcaccacaacgttcgtaggcgttgcacgagcacagcatccgatttttgacgatgaaatcacgcccgagcgccttactcgttgggagcacatcaacgtgtcgcgacgcgggaaggctgtagggccgattgacgccgctctagagatgcaagagttgcgccgacatgtcgctttggtcgtacccagcccctacaccgcattgtttgcgctgcaggattcggatttgctgctaccgctgccaaagcacctcgccagtagcgcgcttgcggcaggactgagtattcgcttgtttgaactaccgacgcccctggagacagtgctgctgacacaggcgtggcacccgcgcctggatagtgatcctgcccatcaatggctgcgcaatacgatccatgtactctgcaacatggatgaagctcaggcacccaaacgttcagaaaaatga

SEQ ID NO: 335436 - DNA, 684 bp, Pseudomonas aeruginosa
atggatgggcaactggtggtggcagcggctgtttcggcggcattgcacatcgcgtactcgctgaccttgcaggctggctacgatcgcgccgaccttggggtggtttatccgatcgctcgtggcacggggcccgtgctgacgatgctgttcgcgattctcgttctgggcgagcggctaaacatcgtcgcgttgttcggagcactcctggtcgtctcaggcgcgcttgtcgtcacaggcaacccgctgcgaagcggcagtcgccgcccactccaagggatgctttggggggccgccactggtgccaccatcgccagctataccatctgggacagctatgcggtcacgtcgctgcatgtcgcaccagtgagctactacgcgggaacgcttctgctgcaaagcttgactctgacaccgggcgcactgcggcagcgacaacacatccccgcagcacttcgtaccaatgccgtgcctattctaatcgtggccatcttctccccactggcctacgtcctggtgttgaatgccatgctggcggcaccccttgcgcttgtcgcccccttgcgcgagtcgtccatcatcatcggttccctcttcgcgtatctgctctttcgtgaggaccatctcgcgcgccgcatcgtgggtgccgtggtcgtgctgatcggaatcgcggcgatcagtctgtga

SEQ ID NO: 335437 - DNA, 930 bp, Pseudomonas aeruginosa
atgggcctgttgtgctacttgctcggtgagcgtaatatattacacatgaataacgatattggtaatgaaattacagatagcgagcgacaattgcggcaatggatcggtagcattcaagcgcgaagtggcgacctcgccgcgagcgaggcgaaagttgtcgatctgctgctcaccgaccctttgttcgttggggccagcacgaccgcccaggttgctgcccgggccggcgtttcaccgccgacggtgatccgcgcggcgcgtgcgcttgggttcagcggctttcccgagctgaagatcgaaattgcgcgtgctcgcggtacagcccggttcttcgctccgcccgaagtactcagcgcggatgcaacgtcgggctccgtgctggaaacctccattcgtgccggtaccgacgcattgactgcgctgggcggggctatcgaactctcttcgcttgacaaggccgtcggcttgatcaaggacgcgcggcaggtctttgcgttcggtgccggtccttcgtcgacggtggccgccgatgcggtcttccgtctgcgcgcggtcggcgtgatgactgtgggcgttccggatcacttgtcggccatgatcgcagcgcggctcatgggctcaggcgatgtcttcatcgcggttagttcgactggtcgcacgtcatcgacgcttgctgtcgccgacgcagcgtcatcggccggtgcctcgctgattgctatcaccaaccagtacgacacacctttggcaactctcgcggatgtcgcacttgtcgtcggcggcgcgccgctaccggcacagatggccgctgcgggaagtcggttggcgcaactcgtcgttcttgacacgctggtcgccactcttgtgctgcgcgacccagatcgcagccgcttggcggagcgggcaggcattgatctgcctgacatttcctga

SEQ ID NO: 335438 - DNA, 897 bp, Pseudomonas aeruginosa
atgaacactgaaatcaatactgctgtcgctgtcgtggggcccggcgcgatcggcaccacggtcgcggcaatgctgcatgaggtaggccgaacgcctttgctgtgtggaaggactccccgcgatcacctgacgctgctggaagatggccactccattaccgtgcccggcccggttcggacgagccagaagcagatcactcacacggctgatcttgtgtttctggcagtcaaagccacacagattgaggcggccgcagactggctggccgcgctggtcgggccgcaaaccgttgtgtgtgttttgcagaatgggatcgaacaggtggaaatagttcgctcacacttgccacgcggggatatcgttcccgctgtcgtgtggttcccggcacaggcgcaatacgatggctcggtcagcctgcgcggcgaggcgcgtctgactctgccagacacggctgccgctcgtgtcgtggcccaggcactgcaagggacgcggtgcgccctggacttggccgaaaacttcagttccttggcttggcgcaagctgttgcagaacgcggtggctggactcatggcgctcacgcaccgccgttcgggcatgttcagccgatctgacatcgctggcctaacccttgcctatgcgcgggaatgcctggccgtggcccgggctgaaggcgcagaactcggcgacgaagtgccgcaggagattctcgaaaaattccagatggcaccggcggacatgagcacctccatcctcacggatcgggaagcagggcggccactcgaatgggatatccgcaacggcatcatcctgcgtcgcggccggattcatggggtttcgacgccgatcagcgacatcctggtgccgctgctcgcggctgcgagcgacggtcccggctaa

SEQ ID NO: 335439 - DNA, 639 bp, Pseudomonas aeruginosa
atgatcctcgctctgctcaaccagaaaggcggtgtcggcaagacgacgctcgccacgcacatcgcgggcgaactggcgctgcgcggccagcatgtcgtcctgctggatgccgacccgcagggttcctcgctggactggacgcagcgcagaagccagcagggcttgccacggctgttcagcgccgtgggcctggcccgcgaaacgctgcatcaggaagcgccagaactcgccaggcgggccgatcacgtcgtcattgatgggccacccaggattgccgccttggcgcgctccgcgctgctggcggccgagcgtgtgctgatcccggtgcagcccagcccctatgacgtgtgggccagcgcagagatggtggcgctgatccgcgaggcgcaggtgtttcgtccgctgctccgcgcagccttcgtcatcaaccggcgcgtcagtaccaccatcatcggccgtgaggcgcggcaatcgctggcagaacagccgctgcctgcgctgcactcggaagtgcatcagcgcatcgtgttcgccgacagcgtggccgctggccggctcgcacgcgagacagcgcccgacagcgccgccgcccgcgaaatcaccgccttggtggacgaactgctgcggtggccgacatga

SEQ ID NO: 335440 - DNA, 843 bp, Pseudomonas aeruginosa
gtgtttgacgcacctaggaaaaatgaattaactcagggaaccatattttcctgtgcctatgccgaaaattacaacgaaacctcggcttatgggataactttaacagcgagatgcgacgcatctcaggataaggctccaatttataattttataccaatcgtcccattgggggactggataattcatgatggggcggaaatagttttaaagagagccgaatccgacgctgcaaacacaaagaaaaacataattctacaagccggactatccgagtcgctgataagaacaaaatcgtctgaagaaataattaatgggcatctattgccaaaggcatctgcggacaaagggcttcagaagaaattgcagcaattcaaggagcaggatcagattatcgccgaaataacagcggcgatctcctccgatcgcagaaaaataaccgatacacttaaaaaattccaaaaacacattgatactacaataaaagagctggcaggcaatagattaacagggtactacctgctgagatcaatgcctagtttatacgatgacagtgggagcgattatgtcgcactgcttcgcgaagtacatcatattccacgatctctggcgcaaagaataatttccggagttagcaaggcagaatgggaatcgcagcccgacagggaattaacaaagtgcccagtgttctatggggatgacgactactgcgttcctgtagctcgattgcaatccccttggattgagcacctaatgcagagctggacactcttgttttcacggattggcgtggaagatatagacgcatcgtcggttagaaaatctctggcaaccttaggaatctaa

SEQ ID NO: 335441 - DNA, 2310 bp, Pseudomonas aeruginosa
atgaaattcttgctaattgactcaggatcgctggaggaaataattaatactcggcagtatcaatctgtcgagttcgaggaaggaaagacattcatctcttttctcaagggaaatattaatcgctttcctgtcacggcatcttccgtagcgatcaaaagcaatactggggcatatattctccagaaagaaacaaaagcagatgattatatcgttttcgatttcgaggagatgccagatcttctaagaagagatgatgctggaatcttgctggcaatccagaaaacgcttcggttctgcaagaagcttctagccggtctgtctccaagcaaaaatgaaagagttctttcggaggggaaagccgttatttttccttacccgattggcatgcaaacgtcgcttcgtctaacaatagacagaaaccctgacgtcaaaagaagatccaagcgtgagtcggggcaagcctacttggtatacaagtttggagataatgaggggattggcccaagtgaatcccctagagtcacaaatttcagaaaagcatccgaaggcaaggatagcgccattcgtgacgccaatgatttctgccaggaaatagataataataaaaccccagcaattaagtccttatcaattaccgagcttgatgtccaaaaaggtcttcagcttcacgaatatggactggaaaactggcgccggtggctgacttcttctcaaatgaaatttattgagactggattaacggcaccacacagaatcgaaggcccagccggaactggaaagaccctatgccttgttttaaaggcgatccaccttcttgaaagcgcgaaggcggagggggcaatcaataagtcaatatttatcacacacagccaggcaacaaaaacggcaattgaaaacctttttgcaacaaatgggggcgaggaatttgttttgcaaacctctggcttgcttttagcttcgcaatcagttgaggtaacaacgctgcatgagttgtgtgcaaagttgctgcatcatgagatatctgattccgaactggttgaccgcgatgcttacgagtcaaagttaactcagaagctatactcgatagaagcagttgagaagacaatagcgcacgaactagagtctcatagaccatacttgtcgcgtgaattttctgattttattgaaaataccagcaaatgggctattgcggagatgcttcagcatgaaatgagtgttcagataaaaggccgcgcagagcaagacctttcgcaatacaaaaaactccctccgcttaagttcggccttcccatgaaaagtgatggtgacaaagcgtttgtttttcttatgtatgaagaataccagcgagaattggtggaggctgctcagttcgataccgatgacgtcgtgttaagtgcgatgtctcaactgggaactccaatctggagaagaagacgatcacgcgaaggttttgatagtatttttattgatgaaacccatttattcaacataaatgaattgtctatattccacaagctaaccaggtcagaaaactgccagccgattgcttattcggttgacagatctcaagcgctcggtgatcggggctggacaacagaagcctttgagcacgcatttgaccctgaccagcaatctggaaaaatagattcaataaatgtcaaaagtatatttaggtgttcgcctgagataattgaccttgctttttctgtgacatcaagcggggccactttatttacaaatttccacaaccctctaattgccgcgacaagtgcattttcggcagaagaagaacgacgctgccgtaagcctttgtacattaattatgcggacgatgatctgatgttctctgattcatttcatcgtgcagaatctatggctaaggagatggggtgtcagaaagcagacattgctattattgtattcggtgatgatgcattcaaaagtatgcaggggatatcccacgaccaaaagaagcctgtagaaattataaaaagtcgaggtgatctcgatgcggtagatagggcgaagcagggaggaaaatacgttctgtccgcaccggaatttgttggcggactagagttctccgcagtaattcttgttggcgttgattcaggtagagtgcctccaaatagctctggagctggtgaaagtcaggcatttctgaattattcagcacatcaacgactttacgtatcaattactagggccaagtaccgcgttgagattctcggagtaaaggctagaggcatgagccaagctttggtgagcgcccaaacctcgggcatgcttgatgtggttgatgcgacataa

SEQ ID NO: 335442 - DNA, 396 bp, Pseudomonas aeruginosa
atgaacgacaaatcgcatgtttcgctggaacgccgtgtctgcctggtctgcggcacccacttcgataccggcagcctcctgctcgacaagcgcctgcgccagagcctggagcgctacacgacgacgggctggggcctgtgcgccgaacaccagaagctgttcgacgagggtttcgtcgcgctggtcgaatgcgaccctgagcgcagcggcaagccgtcgggtgctgatcgcctgaagcccgagcaggcgtatcgcacgggccacctagcccacctgaagcgccatgtgttcaccgagatattcaacgtgcagatcgcggccgatcaggtttgcgtcttcgtcgaaccgggcatcatcgagcacatccagacgatggtggcgccggcggcgagctga

SEQ ID NO: 335443 - DNA, 417 bp, Pseudomonas aeruginosa
atgaagagactcacgctcgatgatgtaatttgcccagtctgttgcgtggtgctgcccctggacaacgacggctgccccgagtgtggccatcaggaccagctccagggccgaatccccccgattcgagcctactccgatcggctgcactacccaggcatgagggcgctcatcggccgcctgcaggagcagcacgacgaggcctcttcccaggaggtgacagaagatgtgctcaggcaggaatgcgtcgccatggtgaaggcggggaatgcggtagctgccgtgcgccgctatcgtcacgccaccggttgcggcctgcctcaggctcggcgacagctcggccttacctggccatcgctgatggacattgaacctgcagatcctgatttcctcgtcgatcgcccaggggtaatcaagtag

SEQ ID NO: 335444 - DNA, 192 bp, Pseudomonas aeruginosa
atggaacgagaagaaccgagctttaatgagtggctggacacaccggagcgcgaggaacacttgcgcgacatttacttcgacgaccagctcggccctggctccgagttctacaagtgggccgagtcgatctatcggattcgtaaggcctccgccgagcagacccgttgcccgcgccgttggccgtatgtgtga

SEQ ID NO: 335445 - DNA, 267 bp, Pseudomonas aeruginosa
atggccaagctgccccccatccagaccctgagcgagtgcccgcactgcggcggtgacgagttctatgttgtgcagacctacagcggcaagggggtataccgccgctgtttcaacggctaccgcgccgacaatagtcacatgtatgacggcctaaaccataaggtcggcaagcgggcattttgcggcgactgtgacaagccggtggccagttgggacgatgacgccgattcgggcgcctacctgaaagagcacaaccgctacgcataa

SEQ ID NO: 335446 - DNA, 852 bp, Pseudomonas aeruginosa
atgaagcgcaagtttaagcctctggcgatagctgtattcctagcaatggcaaccatgtctaatagtaatgtggttaatgcatggggttttcctgttgcagacattgctaacctcactcagatggttgagggctatatccaggacctgaagaactacgatgaatacattcagacaacgatcctgaaccaagagcagcttgcggaggctctccggctttataagcagactctcgttgcatatgacgaggtattgcgtcaaatggagtcgctgaagcgcaagctgagtcccagggactggaatgcgctgtttgccagctataaggacattctcgatctatatcctacccaaactcagcgcagcgatgctgagtgggaaagaatcaacgcgaaagtagatcaggtctatgctcgaggtcagaaaatggtcgagcttcagtcgatcgttgacgctattccattcaaaggcaatgggcgagaaacagttgcgagcgacttgaatcgtgcgattactcgttcagatcttgcagtgtctcaatcgaacactgtagagaagttcaatcaaaagctgaaggacaacatggaggacctcacgtatctggatgagaaccgcctttctcttggtgatgaggataatttacgaacgctgcaatttcttgcggaacagaaccaaaaggcactagagcttcaggttgaaagtatggcccagagtaacagtcgcatgttgttctctaaccaactagcatcgcatgtcttttctaaggacaaggaaaatcaggaagcatccttgaaagagctagaagagaagagaaaacagaaaatcaaggttgataattctcctttggcaaactggtaa

SEQ ID NO: 335447 - DNA, 141 bp, Pseudomonas aeruginosa
atgaaacagtctgatgagttacagaaggagcttcccgacctgatccgtatcatgctccgggtgcgtcctgacaggatttgggtagtggagctacgtgatgccaaagcggtcgattcgtgggtcagtgcgactcggatttga

SEQ ID NO: 335448 - DNA, 2121 bp, Pseudomonas aeruginosa
atggaatttttgagaatcgtgatggagcaaacggacccttgggcaccgatgctcgtctctctttttttggggcttatgctggcactatcagtaggaggagcgatccaccacgatagcgatgcaagcggcctaacggtggttgcgacttgggtaaggcgcgccgcaatcatcgtgtttatgaccgccctgcccgtttttgcccttactttgtttgtcgtagccgtctatcagttcggctatgacggtggccaggaatattggcttatctggtttgacatactgctcaacagcctgcgagatctctggtggatagctgttcctttcttcgccctacccttcttcgtcaagatgttcattctccgggtggttcgtccgcgaatttccgccgcctggcgaaactggggagtgatgcaatcaggcgatgcactgagcgacattcgcacggaagtgaataaactcaaggccaagaattttcttcccagcaactactacaaggaggacgaatttttcttcggcctagacgataaaaacatccccctatatgtcccgctgccggtctacgtgaaaacacacatcaaggccctaggaccatcccagacagggaaaggtgtctttctcggggtagaactcgatcaagccatttggcgtggctggggtgcatggttcatagaccaaaaacccgatgacaacatcgttcacattatgagcgaatcttgtgagcgcaacgggcgccccgcaatggttgtgtgcgacttaaccggttcccgagaaacgggctatcaccctttcaaaaacggcactaggcgcgagcgtcgcgaacggatcaccaaagttttgggacttaatgactcaggcactgatgcggaccattacaagagaaatgctaggcgtgttttggatatgctaatgcctcactgggatggcacactttcccatcttgcagagttgatacagtaccctccaaactcgctcactagttccgaaaagaatctcgtagacaattttgggggaaatatcgagtcgtctctcgtggagatgcaatttatcgatgctctcgaaccatttggtgagggactaaacattgagaaagaactattggcgggcagcgtagtttatataaagtctgaccttcaagacgacgttatacgcagagctgcaaattgcttacttgaagaagtaatccaggtagttcgccgaattagtctttcaagcaccccccataaatacgtgcaactcacgattgacgaagcaaggttcatgatgacagacactcttgctaactcgttggcgactgttttatcaaaacaacttctgatgacgctcgcctatcaagcaagagaagatccgctcaacttgacagatagaacccttaacggagactcaatcaagaacggtattgaaacgaacacacagattacgattgttcatcgggctactgagaaagaaactgcccagtggatctccgacagtactggcgaggctcaaaaaagcatcaccaaaatggaacgggtggagcgaaatcaaggcggggctgaagagtggactggcgagcgcagtatcggacagcaagcggagaacttcgtccatacaaatgtgattctggcactgcccccgcgcgtagcggtgctcatcataccgaacgtgctcagcacggtcatgtacagctgctgggtgccctacaagcatgcgtacccactcagccattacgttgctctacagcagagccagaaggacgcccagggttccccggctgccgtcccctcctctactgttccagccgttccagcaccgatagagccgagccctgaggacatgatcggcgatgacccattcgcagagcttgaccagcaaccggatgacacgattccgtttgaccaggaggaagaccccttcgcagacgccgacgatattccagtcgctgcagaacaactcccgcaagcagatgacggcccgtccgggctcaccccggagcaacaagccatgatcgacgcggctgcaaacaatttgttcgcttcttctggcgagaagaagaacaagacgatgaagcaagagaagaaatcacctagcggccagggccaagacgtggacctgtcctctctcgacaacgtagacggaatctga

SEQ ID NO: 335449 - DNA, 270 bp, Pseudomonas aeruginosa
gtggatccgtccggcgcggccggcgagcacctggtggagcacgtcgacctcgatcacgtccaggggatggccaccggcgccggcggcgccgagcacctggtggagcccgtcgacctcgatcacgtccaggggatggccatcggcgccggcggcgccgagcacctggtggcgtggatccgtccggcgcggccggcgagcagctggtggagcacgtcgacctcgattacgtccagggggtggccaccggcgccggcggcgccgagcacctga

SEQ ID NO: 335450 - DNA, 435 bp, Pseudomonas aeruginosa
atggtcgagttacgaacctccaccctcaaaattctcaaccgtctgttctcgttgctggtcgtttacccagcgattgggattttcctacttatagcgttgggttcaggtttctcatttacaggtgcggcccggtggatcaccgatatgcaatacgaagcgcagcagctcggccaggccagccaagaagggcacctgctcacaaagcgttgcaatgaaagccaaccagctacaagggaaatgcctcagctttctgcctgcgccacctggaaagtcgaagaagtagctgttgacgctgcagcgcagcaagctggccagtcgctcaggaatcagtatgtgatgttcatgatcataggcttctgctacttgctagcacgcgacctgctaccgcctgtattgcgtcggttgaaatggttcaacaaccaggtggaatcctaa

SEQ ID NO: 335451 - DNA, 636 bp, Pseudomonas aeruginosa
atgttcatccgcgcttatctgcgggcttcaactgaggaccaggatgccagccgcgcccgcgaccaactggaaaccttcgttactggcttcggcctggccatcgctgcaagctacatggagaacgctagcggttcgcacgccaaccgacccgaactgatccgcttgctgaaagacgcaaagcgaggcgatgtgttgctggtggagagtattgatcgtctatcgcgcatgggtgatcaggattggcgggaactcaagggcgcgattgaccagcggggtctgcgtatcgtcgctatcgacctcccaaccagtcaccagggcatgaccttgcccaccaacgatgaattcaccgaccggatgctgtcggccatcaactacatgatgatcgacatgatggcggcaattgcccgcaaggattatcagcagcggcgggagcggcagagccagggcatagccaaagctaaagcagctggtgtgtacaagggcaggccagtggacgaggatctacgcaagcgggtgcgcgagctactgggcgcaaacctcgggatccgcgctaccgccaggcacgcggactgttcaaccaccaccgtgatgcgtattcgtgatgagttgtcagtcgagccgggcgggaatgggtga

SEQ ID NO: 335452 - DNA, 555 bp, Pseudomonas aeruginosa
atggccaatgacaaaaacgagatccgcgcctatgcgcagcctgcccagcgcggtacatgggtacagactgagcgcgccggtcatgaggcatgggccgcactgactgcacaggcaccccgcgcagcacagttgatgcacatcctggtacagcacatggataagcaaggcgcgctgatcatcagccaggccacgctggccaagctgatggaaacgtccgtggccaccaccaaacgcgccatcgccatcctgaccaagcacaactggatccagaccatcagtgtgggtggccaacggggtggcacgctcgcttatgtagtgaacagccggattgcatgggcggacaagagggacaaccttcagtttgccctgttcaacgctcgggtactggtttctaccgaggatcaggctgatttgggcgatgccaagctcaagcagctgccgacaatggaagacggcgacattcagctacctgcgggtccaggtatggatccgcctgcgcaggagtcgctggagggaatgttgcctgatatgccctctattccccacggtaactga

SEQ ID NO: 335453 - DNA, 663 bp, Pseudomonas aeruginosa
atgtggaagatcgaattcagtaaggatgaccacggcataggtcagttcggcggcagtgtacgaatgaatgatccagcactgtggccggttacgccggacacaaacgttcccctcacgccgctctgtacattgaccgaggcactgttgcccgttcggttcttgccacctggcatggccatgaccgtgttcattgcgcctaaccggaaggccaacggcttcaacttgtcgaccatgcggcgatacaccgtgcatcaacagtcagagctgcaagctgcccgggatagtggatacgcgagggtgattcttcacaccctcacagatcatgagctcccaccgccagagtcagccttcattctcgaccgcgcattcatccgcaaggaagaattcaccgaggcagaggaagatgccgagctggaggacgatgatttcggcctggaaatcagcaaggtgacaggccgacctgcttttctgcaggacccgatttatgaacccagctctcgctacatgtggctgctgcagctaaacgcctcagcgctggaggacattgggcctcggtatgaaggcatctttgaggacggcattggccacctcattcttgataagcaggcccgaaaggcaccgcaaggcgccgaggcgggttatttcttcattcaattcacctaa

SEQ ID NO: 335454 - DNA, 291 bp, Pseudomonas aeruginosa
atgccgaagccaaccaccatgagctttgaacaacaagagctgcacgccaaggcccagtgccacgactggaacagcacctacaagcatggtgccctggtcagctacgccgaaatatacggccagggtgaaacacaccgcgccgaaacaaggggcaatgcgtgggtgatgtgcggccaggccgtcatcttcgtggatggtttgtcaggcgctgtgtcgcttgaccattgcaccgttgtcgccgcgctcgatgccgagcagaaatcagcaaccgaggaaaccgaaaatgtctga

SEQ ID NO: 335455 - DNA, 546 bp, Pseudomonas aeruginosa
atgtctgaggaacgctatgcgcgcctgcagcaggctcttatcgaatcggccaagcaacacctgatcgaattgaccggggctttggcgctgcccagtggggcagaccgcaatgaggggatttcttcggcctggtggcaactgaccggactgactcagctggttcactttgacagtggattggatgaggcgaccaagcaggagctggtggccatcgatcagctggccatccaggccacaaccaaaccggcagacaaagcgttgatggccagcgaagtagacgccgatattgcggccgcattggctgatccaaccgcttcttactggctcaaacacagcctgcagcaagcgctgccgcgtgatccagtggatgcggtcaatgatgcggaatggctttttgaattgctgaataaacgctgcgtggagcagctgcagcacgaagcgccaccgtcgatggaaatggaatttcgcagtgctaacggcactaccactcagatcgatattacccaggttgcgcctgtcatcgagctgggcggcttcaaagcctga

SEQ ID NO: 335456 - DNA, 1272 bp, Pseudomonas aeruginosa
atggccgatcaacgttacccggtaagcatcggacaaggcgagaatgccaagcagtattccgaggcctaccagacccagccaggctatgcggtgcagtggaaaggcatactgcagaaagcacacggccaggccctggtgcgttgcttgtgcccgggcaaaggcactcgacgcttggccgtacggcacagatccgaacaggattcgtttcacctgtcccgctatccgcacaccggcgccgagcatgcgcttgattgcctgtattactcgcccgatcccgacaagtcgggattaggtgcctacagcaagggcgtggtcgaagaaaccaaggacggcgacctcaagatcaagctcaccctttcgctccgcaagaaggatccggctgaaatccagccaatggagggtacttcccctgccccatcgagcagcaaaccttccaagccggcgatgaccttgtgtggcttgctccacttgctctggagcgaagcaggactcaaccagtgggtaccaggtatggcgggcaagcgtggactcgggctgattcacagccgactgcagcacgctgccgaccgcatgctcgcttcgcgcatgcgcattggtgatgctttgctcattgctacaagttcggctggccagcaggccgacgccaacagtcaaaaggtggccagcgcgatcagaaacaaacgccgcctaatcgtcgtcgcccccttggcggcgcactccgaagaacgcgaacaagcaatgagcggctatctcgccatcgctggcttccacggagtaccgcggctgctcatggacggagaactatggcagaggaccgccaggagctacagcgccgcgcttcgtggatggcgggaaggacgccgagtgattgccattgtccagacggatcaacccacagcgcccagtaaagcccaagcgctcaatgtggccctgatggtcgtcagtgacgagtggatacccgttgagtcgggctatgaggcggtgatcgaggcgatgctccgcgatcaggggcgaaaattcatcaagccgatgcgctttgatgcggagcaagaacaggtgtttcctgatttctggctgatggacgtaggcgccggcagggagctgccgatggaggtttacgggcgtcaggatccgaagtacctggcccgcaaggaagtgaagtgcgcctattacacgcggcattacgggccaacgggatggtggtcgtgggatgccagtgcggatccacgaggcttgaacattcccgcattccccccggctcggcacccctaa

SEQ ID NO: 335457 - DNA, 744 bp, Pseudomonas aeruginosa
atggacacgattgactgggcgctgtacgactgcaaattgggccagatgaaggacgttgaactggcccggttgatcggctcgaccccgtaccgggtgcgccgccgccgtgagcaactggggattcccccatggtcggtcggcaagaaaatcgagccctacaaaaacctcttaggttttgccacagacagctcgatagctgctcgctgcggcgtggacaccaaaagcgtcaaggcctatcgcgagtcgttgggcatcttgcccgtgttccggcccgctccacggaagcaggtgctgcccatcggtcacgatctgaggccctataaaccgctgtttggctacgtcagtgaccaggagatcgcccagctcgccggcgtggatttggacctggtgcaagacgtacgcgaggggcttggctttgaacccatcccgccgttgccaggcagtgcaacaccagatccagtaccagactttcacggcccgttgctgggttacgaatcattgttcgtgaccatgacgccgacagagatcagccggaaaaccggcgtaccgtacgctgtgatagtgcagcgctgtgccttcttgggcattcagccctacaagcgtgtttcggtagcgtcccgctacgatcacttgctgggaaaggtgcctgatgcgctggtggcgaagctggcaggcgtttcgcgagccagcatcggcgcccggcgcaagcggttgtcggcccaggcgacagtcgagcttagctaa

SEQ ID NO: 335458 - DNA, 735 bp, Pseudomonas aeruginosa
atgccggttgatgaggtttgggggatcgggcgccgtatgcgcgacaacctggccagcgacgggatcagcaccgcttgggagctatcgcaagcggatgcacgggccatgggtcgcaaatacagtgtcgtactggagcgaaccattcgagagctggcaggcgagtcgtgcatggacctggagcagaccgcgccggccaagcaatcaatctgttcgagcaagatgtttggcaagcgggttcacacgctcagagagctgcaggaagcactggcgacctatattcaccgggcagctgaaaagctgcgcatgcagcgttcgctatgcggcgccctccgcattggtatccagacttcgtttcatggtgacggtcccaagtacgcgaacgcagcgacgtgcattccggctttcccaaccgatgatgtgcggcagctgacgaaatatgccctgcaggcggcaacagagatctaccgacctggctttgcctatagcaaggccgaggtactgctgatggatctgcgcaagcggggagagtacacgcaggatcttttcagcccgagccagccggagcgctcggatgcgctcatggccacgatggacaagatcaaccgccgatgggggcatgactgcttgcgtactgcagcggtcccactgacgcctgactggggcatgcgtcgtgccctgcttagccccagttacatgaccagctgggatcagttgtggacggtgcagtgtcggtaa

SEQ ID NO: 335459 - DNA, 888 bp, Pseudomonas aeruginosa
atggaagaagccctaaatcccccaaaggtatttctatcctactcatgggatagcgatgaacacaaaaattgggttagagcccttgcagaaagactaacaaagaacggtgtgaacgcccggattgaccagtggcacatcagtcccggtcagagtttaactcagttcatggagactgaagcgcagagttgtgactatgcgctaattatctgcactagagactactgcagaaaatcgcttaacagagcgggtggcgtgggctatgagcagcagataatttctggccacatagctgcaggaatgtcacgtgatcgctttattcccattatccgtgatggcgaattcactcctggcccgtcgtgcgcaattcccgcccagttccttggcactttagctattgacatgcgaaacgacgagcatcttgatcagcgtattgaggaactgcttagagctattttcaaagagcccgcattaaagcctccagctattgggcagcggccaattttctgcatcaaagcagcctctaagatcaacgagggaataaaacaacgtctagccgttatagatatagacgggtggcatctactcagcggagttgccagcaatgagcgctggccaaaaactttcacgattccggaagagtctgagcgttacagtttaaaggtgggcgacacagtcaagctgcagttcgagttttctctaccagatgaggacgatgagaatgagcttttcggagagaggatgtgggtagatgtaacaggcagttcaggcccttacttgattggggagctggttaacatgccatgctgctcagatgagcagaacaatttgaaagcaggtgacaccattgtttttctacccgagcatgtaattgacattttggatgagtga

SEQ ID NO: 335460 - DNA, 621 bp, Pseudomonas aeruginosa
atgcgtgcgatcgatgccggcattctggtctgcggcgagtgccaccagttgaatcgcgccgacgggaacgagcatccgcgttgcagtcgctgcggcgcgaagctgcatcctcggcggccgaacagcattgcccgtacctgggcgttgctgatctcggcgatgattctctacgttcccgccaacctgttgccgatcatgaccgtcaacatgctcggcaagggctccccggcgaccatcatgggcggggtcgtgaccctgatccaggccgacatgtttcccatcgccctggtggtgttcgtcgccagtatcgtcgtccccaccttcaagctggtcggcatcgccctgctgctctattcggtgcagcggcaccagccgatgtcggcccgccagcgaatcatgatgtaccgcttcatcgaatgggtcgggcgctggtcgatgctcgatatcttcgtcatcgccatcctcgtggcgctggtcaatttcggcaacctggcgagcatcgaggccaatctcggcgccgccgccttcgccagcgtggtggtgctcaccatgctcgccgccgtgacgttcgacccccggcttatctgggacaacaccaatctggacgacgagaatgagtga

SEQ ID NO: 335461 - DNA, 1101 bp, Pseudomonas aeruginosa
atgaccctgcctctttccggcaacgccctgtccctggaagtgctgctcgaaccgatcgaccccggacagccgtgcggccccagcctgcgctacgacccggactacgaccgcctgcgcgagttgcgccgggaggacgacagcagcctgccgaccggcgtctggcaagcggaggccaagcgcgccgactgggccgcggtggagcagttggccagcgaactgttgcagcggcgcagcaaggacctgatgctcgccgcctggctcggcgaggcctggctgcaacgcggcgggctgggcggattgcagcgcgcgctggtgctgctggcggaactctgcgagcgctaccccgaggaggtgcatccgcaagcccaggacggcgaccagtcgtggcgggtgccgcccatcgactggctgttgcgccgctatgccgagctgctgcacacgcgcctgccgctgatggggcagggcgcgttcgccgagatcaccctctatgcctggcagaggttgcagcgccagcaggtcgccagcggcgacagcaagagcgccaaggcggcgctggaagcggcgcaacttcagcagaagaagctagacgaagcgttgcgcgcggagcccctggtgcaatggcagcgcaagcaggccagcctgctcgcctgccagcagcaactactgcgcctggaacagtggtgcgaccgctgcctgggcgaactcgcccccagttgccagccattgcgcgaggtcatcgcgcaatggctggccttgctcaaggagttcatcgccatgcacccgcaagcgccgctgtccgaagaacagcccccggtcgcggaggcggatgccagcgaaggcgacgcggacggcgaggaaagcgtcccggcgagcgcgccgagcgggccggctggcgcgccgaccagtcgcgaggacgcctaccggcaattgctgctgatcgctgactacctggcgcgcaccgagccgcacagcccggttccctacctgatcaagcgcgcggtggagtggggcaacaagccgctgagcgagttgctggcggagctgatcaatgcggactcggaggcgcgccgagtctggtcgctgcttggcgtactgccctaa

SEQ ID NO: 335462 - DNA, 3816 bp, Pseudomonas aeruginosa
atgagcggcgcgacgctgttcatgctggttctcctcctggtgctgctggcgctgctgctgggggcgctgggctggtggtggcggacccggggcggtacggagatccgcagcttctacgcggcggtccggcagatggagcgcgagcagggctggcagggccgctacgaagcgccgtggctgctgatgctcggcaacgagaccgagggcgagcagttgtgctccacctggcgtctgctgccggtggcgcgcccggcctggttcggccgctggtggtcggacggcgagggggcgatcctgctggtgcccgagtcggtgttcctgcccgacgagggcctgcgccggcaaagcggcgcctggctgcgcctgttgcgtctgttcctgcgcctgcgcggcaggcgcgcgctggacggagtggtctggaacattccgctggcgcggctgcaggatggcgagcaggcggccaacctcggcctcgccgcgcgccgtcgctacgtggaactgacccagcgccttggcctgagcctgccggtttacgtggtgatcactggcatggaagacctgcctggtttccaggaacttctcgcggcgctgcccgaggaggcgcgcgagcgcgccctcggctggtcctcgccgttcgccgccgaagcggcctggcagtcgcgctggtgcgagcaggcgctggaggaaatcaccgccaccctgaccgagtcgatcgtcgaactcggtaccttgcgcggccaggtggacaatgagctgtattgcctgccgccacgcctggaaagcctccgcggttcgttgcaggcgctgctcgaaccggtcttccagggcaacgccaggggcgaggcgccgcgctttcgcggtctctacctgagcggcagcgaggcggcgggcgcggcagccgacgatgtcctgccggcggtcgacgcgccgcgtcggcgcagcagcttcgccagccaactgtgggcacggcggatccttgccgaggaaggcctggcccaggcggtgccgcgcatcctccagctgcgtcagcgctggcagcgcgggatcggcctcgccgcgttgtgcctgtgcctgctctggggcggcctgatgacctgggtctggcgcgacgcgctgcgcgacgccggtgaactgtcgcaattgctgcatggcgccagtgagcgctaccagccgctcgacgacgacactcggcgcgccgcccaggtccggcagaacgtccaggcctggtggcaactggtgtcacaggcgccgcgctggcgcttcacttcgctggcgtttcccagttcctggttttcctccctggatgcacgtatcgacaacgcgtatcgccgcgtttccgagcgcctgctggtgcgaccgctgcgcagcctgctggaaggcgaggcgagcgacctgcgggcgatccgcagcgatggccaacccggcctgaaggagggcgacgaccccagccagtggaaggactacctggcggcgaaggacctggtcgcccgcgccactacgctggagcgccacaatcgcttgttcgcccaggccatcgacaaccgcaggacgccgctcgacgaccttctgcaactgagtaacgatgccttgggcagcagctacaacgccggcagcctggcgcgcctggcctattacaaccgcacgctgttcgccgagcgtccggccgatctcgccgccctcgacctgggccgggtcgccgccacggcggcggataacttccatgacctgatggcacgctggctgaacgcctacttcctcaccgacagcctggaacgcaccggcaatgccctgacccaggaactcgcgcagctcggccaggaacgagacgccacggcggcccagttgctggggatcggcgaattgatcaaccacctgcagcaacaggtcaaccgcatcaacctgatctggggcaatggcgtcggccaggatctcgtccctggctaccagaacctgctcaagagcgcccagcaaagcagcttgctgggaaaccgcgtggaggaactgcagaacctcaccgtgcagttgcagcagcagtttcgcagcgaatggatcgcgcctccggaggctgccggcgacggcctgctggtgaaacagggggcgacgctcaagctggccgatgacctgctcggtctgaagcgcgccatcgatgacctgaagaccaaggacttcgtctccgtggccctggcggacaagacactggcggaccactccttgctgagcatcgacgatatcggcgtgactcaggcgttgagcttcttcaacgacttcaccggctactacgagagcaccctgccatcgctcaacccgcgctatcgctattcggtcctgcacgccgccgccagcgcggcgaccgaggccatgtggcaaagcctcgggccgcgcagtcgtagcctggccagtcgcaatgcctcgcgtttcgacgtgcaggtcaagcaggtccaggtgttgcaggcggcgctgctggagttgcaggacctgcaggccggcgcgcgcctgctgctcagcctcaacgcgctggccgtggccgatatcggccaggccctgcgcgacatcgacgagcaggcggtgctgcgcgagccggtcgatttcagccgctggtcgggcgcgccgaatttcggcctgcagatgttccgcgcccaggacagtgccgagctgaagcaaagcctgaacagccagttcaatgccatggcggccgtcgccgaacgccacgccccggcgctggagtggttgcaggcgcagcaatccagcctggccaccgccgactacaacgcgttcgtgcgcttcagcgcgctcaacgccgaactgcagaaattcaaggccgacaacccggcgagcaccgcggcgcagttggcgaagctggtgggtaacgatttcaaccagatggacatcggcagttgcgccgacattctcaacggcgtgctcctgccgtccagccgcagcgacctggcgacgcgcctggtggacctgcgccagggcgcgctcgggcgctgccagtcgttgcaacagcagcaggcggcgcaggcctggaaggacctcgccgactacttcaaccagtacctcgccggacgcttcccgttcgcctacagcctggaagcggccgatgccgagccggggcgggtgcggcacctgctgaaactgatggagacgcgcttgccgcaggtgcgcgaagggctggcccaggttcgctcgccggacctgccggccgccgaggacttcgtccgccgcctggagcaggcgcagcgctggctcggcccgctgttcgagcgcgacaagtcgggcctgctcggcgtcgccctggacatcgactggcgcagcgaccgcagcctggaacgcggcgccgaccaggtgatcgcctggagcctgtactcgggcgaccaggaaagccgtttccccggcgcgcaggacaagggcctgacctggaatgtcggcgatccgctgaaaatcatgctgcgctgggcgaagaacggctcgcagcgtccggcagacgacccgcgccaggccagcctggcggtggccgacctcgaggccggctggagctaccagggctcctgggcgctgttgcgcatgatgcgcgcgcacttctcccggcagcgcccgccgaacgtcgactacacggagtttccgctggtcctgcaactgccggtgtatgcgccctacagcccggaaaacgaggcgcggatgttcctccgcctgtcgttgatgagcctgggcggcaagaccccgctgtccatccagccgctgccggtgcgcgcgccgcaatcgccgttcgcgacgctgttgccggccaccgtcgccagcaccggaggtaccccatga

SEQ ID NO: 335463 - DNA, 3327 bp, Pseudomonas aeruginosa
atgagccacgatccgccgagcaaggaccgccgccatttcctcactaccagttcggtgctgggcgccgccggagtcctgtggtccgccctgcccttcgccaacgccgccagcctttctcccgcaagcaacccaggaggttccatgaccgccgacctgatcctgcacaacggccgtttccacaccgtggaccgcgacaaccccaccgccaccgccgtggcgatcaaggacggcaagttccttgccgtcggcaacgacgccgaggcgatgctccatcgcggcagcgccacccaggtgatcgacctgcagaagcgcaccgtgatccccggtctcaacgactcgcacctgcacctgatccgcggtggcctcaactacaacctggagctgcgctgggaaggcgtgccctccctggccgacgccttgcgcatgctcaagaaccaggccgaacgcacgcccagcccccagtgggtgcgggtggtcggcggctggaacgagttccagttcgccgagaagcgcatgccgaccctggaggaattgaacaaggccgcgccggacaccccggtgttcgtcctccacctgtacgatcgcgccctgctcaaccgcgccgccctgcgcgtggtcggctacaccaaggacacgcccaacccgcccggcggcgagatcgtccgcgacagcagcggcgaacccaccggcatgctgatcgcccggcccaacgcgatgattctctacgccaccctggccaagggaccgaagctgccgctggaataccaggtcaactccacccgccagttcatgcgcgaactcaaccgcctcggccttaccagcgcgatcgacgccggcggcggcttccagaactacccggacgactaccaggtgattcgcgaactggccgaccagggccagctcaccgtacgcatcgcctacaacctgttcacccagaaaccgaaggaagaactcgccgacttcaagaactggaccggcagcgtcaagtacggccagggcagcgatttcttccgccacaacggcgccggcgagatgctggtgttctccgccgccgacttcgaggacttcctcgaaccgcgcccggacctgccgcagaccatggagcaggagctggagccggtggtccgccacctggtggagcagcgctggccgttccgcctgcacgccacctacgacgaatcgatctcgcggatgctcgacgtgttcgagaaggtcgaccgcgacattccgttcaacggcctgccctggttcttcgaccacgccgagaccatcaccccgcgcaacatcgagcgggtacgggcactcggcggcggcatcgcgatccaggaccgcatggccttccagggcgagtacttcgtcgaccgctacggtgccaaggccgccgaggccacgccgccgatccagcgcatgctcgccgagggcgtgccggtgggtgccggcaccgacgccacccgggtctccagctacaacccctggacctcgctgtactggctggtcagcggccgcaccgtcggcggcatggccctgtatccgcagggcctgccgcgggaaaccgcgttgcagctgttcacccacggcagcgcctggttctccagcgagcagggcaagaaaggacagatcaaggttggccagctcgccgacctggcggcgctgtcggcggacttcttcggcgtcgaggaagaggccatcaagtggatcgagtcggtgctcacggtggtcgacggcaagatcgtctatgccgccgccgagttcgacaagctcggtccgccggcgccgccggtgctgccggactggtcgccggtggccaaggtacccggccactggcggcaaggcgcgccgctgaccgcccaggtccaccagtgcgtcggtgcctgcgcggtacacgcccacgagcacaaccgcgcgcgccactccaacgtaccggtgagcgacttccagggtttctggggcgcattcggctgttcctgcttcgctttctggcttcctctgtcgcggcccgcctcgcccggagttttcccgatgatccgcgttcgaccggtcggccgcctggcccttttcctggcgctgggcggcacctcgccgtgccacgccgcgacagaggaagccaaggcacccgactacctggagtggcgcctgctcaaccgcaactacttcctctacaacgactatcgccgcgcggacgccgggcgcggctaccgcaaggaatgggcacacggcctgatcgccgacctggagtcggcctatactcccggccgcgtcggtttcggcctcgatctccacggcttcgccggcttcaagctcgacggcggacgtggccatgccggcaccggcctgttgccgctggactcatccggcgataacgccagcgagtattccgacgccggcgccgcactcaagctgcggctcggcgagagcctgctcaaggtcggcgagatgaccgtcgagaccccggtcttcgataccagcgacaagcgcctgcaaccccagtacgccaggggcttcttcctgcagagcgacgacctcgaccgcgtgcggatccaggccgggcgcttcaccgccttcaaggaacaggcctccagctccggccatggcgacttcgacggctacggcgcgagcaccgccggcagcgccatcggcttcgccggcgccagcctggcggccagcgacaacctgagcggctcgctgttcgccgcgcaactggacaacgtctggcgccaggtctatctcaacatgaacctgcaacgtgccgcgttcagcctggatggcaacctctatcgcacgcgcgaccagggccgcagccgggccggcgcgatcgacaccctggcctacagcctgcaactgaagtaccgcgtcggcgcgcagggtttctccctggcctaccagcgtgtccatggggatacgccgttcgacttcgtcggaggtgactccatctacctcgccaactcgatcaagtacgccgatttcaacggtcccggcgaacgctcctggcaggcccgctacgacctcgacctggccccgttcggcctgccggggctgagcttcatggcgcgttacgtcagcggccgcgccatcgacggcagccatgcgccggccggcggcgcctacaacccgctgggcgccgatggccgctaccggcccttgcagggcagcggcggcaagcactgggagcgcgacctcgacctgcgctacctgttcgcctcgggcccgttcaaggacctctcgctgaacgtctcgcacctcagccaccgggccaacgcggcccaggccggcgacgacatcgaccgcctctacctgatcgtcgaatacccactcaaaggctcgctctga

SEQ ID NO: 335464 - DNA, 903 bp, Pseudomonas aeruginosa
ttgcaggcggaagacttccagctcggctgcgcgccggcgatcaacctctttccgcggacctcggagccgctgcgcccggacggcacccgcagcgagtaccgcctggtcgccgacagtcaccgcgagaacagcgtggaaatccatagcatccgcgccgtgcgctcggtggccgggagcaccgtgcagccagtcccggcctactatggctgccgccacgacagccacctcggcacgctctactggcacgcccggcgcatcgccgggctgaccccgaaccggctgggcagcgacctgctgctgagcctggtggataccggcttcgacccgttacgcgaagccccggccttcagcctgaccgccgagctgctatgcaccaatcgctatctggccgagcgcctgggtgccggcaccgcgctgggcttcgaacggcccgggccggtcgccgccgcacgcctgcgcaacgcgcccagcgcgcagagccagccgcgcctggacggccagtcgcgctggagactggtctcgcagctgaccctcaaccacctgtcgctggtggaaggcccgcgcgccctcgaagccctgcgggaaatcctagccctgcacaacctgcgcgacgatgccagcgcccgccggcagatagaagggctgaggcaactcgactgccagcgggtggtggcgcacgtcggcgaggatgcctggcgcggctggcgcaatggcctggaaatccgcctgcgactcgatccgcaacacttcgtcggcgccagcggcgtgctgttctccgccgtgctggcgcagttcttctcgctgtatgccaccgccaaccgcttcgtgcgcacggtcctggtggaagccgacaaggaggtgaagacatggcaaccccaggccggctcgccgctctccctctga

SEQ ID NO: 335465 - DNA, 996 bp, Pseudomonas aeruginosa
atgaacggcagcggtcacgaagccacctcgacgccgccgcgccgctctcactggcgctggctgcgcaggctgctgaccctggcgttcttcgtgctggtcccggtgctgctgttcctgctggtgaagaatctcgactggcaggaagtccgccacgccctcggcgagtatcgccccgcgaccctgttcctcgggctgctgctggcggccgccggctatacggtgttcagcagcttcgacctgctcagccgctactacatcggccactcgctgcccaagcggcgggtcttcaccgtggcgttcgtgtgcaatgcgttcaacctcaacctgagttcctgggtcggcgccgtggcgctgcgctatcgcctgtacagtcggctcggcctggacatcgccgatatcacccggatcctcaccttcagcctggtgaccaactggttcggctacctgctgctcgccggcatcctgttcagctgcggcctgccggccttgccgccgggctggaagctcggcagcgacggcctgcgcctgatcggcgccctgctcctggcgctggccgcaggctacctgctggcctgccgtttcgcccgacgccgcgcctggggctggcgcgagcatcggctgaccctgccgtcctggcggctggcggccctgcaaggcctgctcggagcgagcaactggtcgctgatggcgctcctgctgtacagcctgctgccgcacagcgtggattacccgagcgtcctggcgatcctcctgatcagcagcatcgccggggtcatcacccatatcccggccgggctcggggtgctcgaagcggtgttcatcgccctgctccaggggcgcctgtcccagggcgtgctgctggccgcgttgatcggctaccgggtgctgtatttcctcctacccctggcgctggcctgcgtggtctacctgctgttggagcgccgggcgatccgcctgcgccgcaaacagcgccgcctgcgccagggccaggcgtga

SEQ ID NO: 335466 - DNA, 1092 bp, Pseudomonas aeruginosa
atgaccgcactacaggatgaaagggaaggttttttcacgtcaacaaatgtacagaacagaactagagaagtccttctaagactagatgaagagtcatactcaaaagaagaagattctgcactactatttaatttcacagtaaaatcactcaccctcatgctagagcagggggataaatttgacagcctatgcaaatttaacataaagaatatcggcgacgccctattgaggacattaacgacaacgctaacccaaaaaaacaacagagacaagatacttcttctactccctctatgctatagattcctatctgagttcgacttcaaccaagaaacagacgcaagcatagagttattatcaactctaaattcaatacgctacagagaaaaaagtttaccggcagacatagaaaacgccattagatatgctgagctattcatgccagctagaatcctaaaagaggcaagccaagatcctaacctatcatccataagggagttcaataagaacgtccatgaattcccaaaactaaaggctatactagcaaaagatctagatgaacgagaaaagcgcgtaacagacttacgcaccgctctagaccaatacaagcaagccttcaactttatagggctttatgaaggatttaattctttagcaaataaaaaacgcctcatggcttggctacacgtggccggattattaattattggaacctgcatgctacttcccgccacactaaaactatattacctaatagaatccggagaatatctaaaagcagacctaaccataaatatccagcttttaatctccattgccgccattgagcttttattgctttacttctttagggttgtccttcaaagtttaaaatccattagaggacagctactacaactagaccttcgacgttccatctgtcgcttcatccagtcttacgctgaatatgcctctgaaataaataacactcaaatactagcacgctttgaagctctaattttcagcggaattgttgcacaggaagacaacatcccatctacatttgatggaatagagcacataacaaaactaatagatagtgttcgtaggtag

SEQ ID NO: 335467 - DNA, 1827 bp, Pseudomonas aeruginosa
atggctgttggccaccagcaggtgttcgatgtagtcctcgtccttcatcccggtggcggacttgcctttgccgccgcgacgctgcgcctggtaggcggccagcggctgggacttggcgtagccgccgtgggagatggtcaccacgcggtcttcctcggtgatcaggtcggcgatggtcaggtcgacctgggaagccacgatctcggtgcggcgagcatcgccgaattcggccttgaccgcttccagctcctcacggatcacctccatcaggcgcgccgggttggtcaggatgcggatcagctcgccgatcaggttgaggatttcctggtattcggagagcagcttctcgtgctccaggccggtcaggcgatgcaggcgcagctcgaggatcgcctgggcctgttccggcgacaggtagtacttgccgtcgcgcaggccgtactgcggatccaggtcttccgggcgacaggcgtcggcgccggcacgctcgaccatcgcttccaccgcgctggactcccaggcagtggcgatcaggcgttccttggcctcggccggggtcggcgaactcttgatcagctcgatcaccgggtcgatgttcgacagggcgaccgcctggccttccaggatgtgcccgcgctcgcgggccttgcgcagctcgtagacggtacgccgggtcaccacttcgcggcggtggcggacgaacacttcgagcatgtccttcaggttcagcgtgcgcggctggccgtcgaccagggccaccacgttgatgccgaacacgctctgcagctgggtctgggcgtagaggttgttgaggaccacctcgcccacctcgccgcgacgcagctcgatgaccacgcgcatgccgtccttgtcggactcgtcgcgcagctcggaaataccctcgatcttcttctctttcaccagctcggcgatcttctcgatcaaccgcgccttgttcaactggtacggcagctcggtgatgatgatctgctcgcgaccgccgcccttctccatctcctcgacgacggcgcgggcacggatgtagatgcgcccgcgaccggtgcggtaggcctcgatgatcccggcgcggccgttgatgatgccggcggtggggaagtccggaccggggatgtactgcatcagctcatcgacggtcaggtcggggttgtccatcagcgccaggcagccgtcgatcacttcgccgaggttgtgcggcgggatgttggtcgccatgcccacggcgataccgctggaaccgttgaccagcaggttgggaatcttggtcggcatgaccgccgggatctgctcggtgccatcgtagttgggcacccagtcgacggtttccttttccaggtccgccagcagttcatgggccagcttggccatgcgcacttcggtgtatcgcatggctgcggcgttgtcgccgtccaccgaaccgaagttgccctggccgtctaccagcatgtagcgcagcgagaacggctgcgccatgcgcacgatggtgtcgtagaccgcggtgtcgccgtgcgggtggtacttaccgatcacgtcgccgaccacacgggcggatttcttgtagggcttgttccagtcgttgcccagctcgctcatggcataaagcacacggcggtgcaccggcttcaggccgtcacgtgcatccggcagggcccgcccgacgatcacgctcatcgcgtagtcgagataggactgtttcagctcgtcttcgatattgaccgggagaatttctttggccagttcgcccatgagaagcctggttcctttttctggtggaacttcgccgcctcgatcctgaggcaaacgaagtag

SEQ ID NO: 335468 - DNA, 249 bp, Pseudomonas aeruginosa
atgcgtgacgcggggatctacgacggcggggtgctgatcgtagaccgatcgatcacagcgacaaagggtcagatcgttctcgcttacgtggacaaccagccgttggtgaaacggctggccaaggaccacgctgatcgttggctactggaatcggcccatcccgactataagaccatcacccccgatcagtacggctcgattgatgtgtttggggttgttacctgggacctgaccaagcatgtgtgctga

SEQ ID NO: 335469 - DNA, 954 bp, Pseudomonas aeruginosa
atggcttccaagaaaagtgctgtccctgctcgcatccagccgcagctggtcgccttggtgacacggccaccagccggtgactgggcttacgaaatcaagttcgatggctaccgcatgttcgcccgcatcgatgccggcgtgagcctgttcactaagaacggttacgactggacgaagcgaatgccacgactcgcccaggacctgcagacacttcccatccgtggcgcctggttggatggtgaagtggtggtgcaagacgacgacgaccgccccgcgttccagtccctgcaggaagccttcgccactggcgacaccgaccgcttgatctacttcgccttcgacctcctgttcatcgacggcgtggacctaagaccccggcctgtcgagcagcgccggaacctgctacgggtattgctggaacaggtcgaccttgaccaggtgcggttctctgaaaccctcgaagcggatccggcgcatttgctggccagcgcttgcgcgctcggcatcgagggcatagtaggcaagcggttgggcagtacttacgccggcgagcgggatggctcatggatcaagctcaaatgcgtgctgcggcaagagttcgtgatcttgggctacacccgaagctctgccggcatcggctcgctgctgatcggcctgcatgatgacgctggcgagctgcagtacgctggccgtgtcaggtcgggattcactggccgcgagctggacagactcaaaaatcggctcgccccattggtaaggagaacatcggctttacgtacgccgcccaagctgcagggcggggccgtggtatgggtagaacctcagcttgtatgcgaggtgaagtttgccgagttgaccccagctggcaaagtgcgccatgccgtgtatatcgctctgagggaggacaagccggcatcgtccatcagtctggagagcgacaccgacccagtttga

SEQ ID NO: 335470 - DNA, 294 bp, Pseudomonas aeruginosa
atgcgccgggaggcgagtgtgtatgaggttcatatcgacgctgaagcctgtgtcatccagtgcgaaatcacggatgtgatcgaggccgacccaaaccccggcttgtggtccagcgactgggatgcccaaggttatcgcgagctggaattcagggtgctttctggtgtggcgtacgacgcagacggtaaccccagcgatctaggccgcaacggctgcgccgaggtggccgaccgctacgcggagttcatcgaggacgatttgtggcaccagttggataacgagcggggcgaatag

SEQ ID NO: 335471 - DNA, 390 bp, Pseudomonas aeruginosa
atgactatcaccgctcaagcccccgccctcagcttcaacaactggctcaccccagccgactttttgagctttgcccgaaagatctgggcgcctgccgttgattcgagcatcgaggcgatggagcgcaaggttgacgatctctacggcgcggcatgtaagcgcttccccacctatgacaccatggtgcataacgctttctgtgcgagcatggttatcgagttcggcaccgacgagttagccgagggagtggctgaagtttttgcgtatgcccgcgaggcttacggttatatgtccgccagtgagatcgaagcacagcgtcaggaagatggcctttgctggcacggtctggacgccatgacctgcccctgcggttgcttcgaaaacgactaa

SEQ ID NO: 335472 - DNA, 576 bp, Pseudomonas aeruginosa
atggcccgtggcgtaaataaagtgatcctggtcggtacttgcgggcaggatcccgaagtccgctaccttcccaacggcaacgccgtgaccaacctcagcttggccaccagcgagcagtggaccgacaagcagaccggccagaaggtcgagcgcaccgagtggcaccgtgtgtcgctgttcggcaaggtggccgagatcgccggcgagtacctgcgcaaaggctcgcaatgctacatcgaaggcaagctgcagacccgcgagtgggaaaaagacggcatcaagcgctacaccaccgaaatcatcgtcgacatcaacggcaccatgcagctgctcggcggtcgtccgcagggccagcagcagggcggcgatccgtacaaccaggggggcggcaactacaaccagggcggtcagcagcagtacaaccaggccccacgccagcaggcgccgcgtccgcagcaggccccgcagcgccctgcaccgcagcagccggcaccgcagccagcggctgacttcgacagctttgatgacgatattccgttcatggatccgtaccgcttcagctggcaccttcagtaa

SEQ ID NO: 335473 - DNA, 231 bp, Pseudomonas aeruginosa
atgcgcctgctcgccttcattcacgggctgattttgatggttgttatgttcctggtcggtcgctccgaatttgcgcacgattacggatatctcgggctagggctggccataatcgggatggtggggtcaggtcgtagccaaacctggttgggcaaagcggttagcctatgggccatcgtatcaggcgtggcagcggtggcgggctatcaggcctttactctattggcttag

SEQ ID NO: 335474 - DNA, 828 bp, Pseudomonas aeruginosa
atgcgtctatccagcaacttccgtaacccttgcatggtccgcagcgacagcccactgagcaacgacgagattgcccgtgttgccccctcgatctttgccgaggaagcgcacgaaagccgctccgatcgctaccgctacattcccaccgttgacgttcttgaagcgctgcgcagtgaagggttcatgccattcatggcctgccaaacccgcgtgcgcaacaccgacaagcgcgaacacaccaagcacatgatccgcctgcgtcacgccaacaccatcgttgccaaagaggccaacgaaattatcctgctaaacagccacgacggcaccagcagctaccagatgatgggcggttgcttccgtttcgtgtgtgccaatggcctggtgctgggcgatgccgcgatggatcagaaagtgcgccacagcggtcgccaggacgttatcggggatgtgatcgagggcgcgtatgaagtcctaaatcagttcgagctgatcgaggatcaacgcgaaaccatgaagggcatccagctgggcaacgacctgcagcacgcttttgccgaggctgcccttgcctaccgctatgacccggcagacggcccggctccggttactgcacgccagctgctggaaccacgtcgccgcgaagacgctaccaatgacctttggtcgaccttcaaccgcgtacaggaaaacaccatcaaaggagggctgcgaggccgcaacaaacaagggcgccgtaccagcacccgtgccgtgaccggcattgaccaggacgtaaagcttaatcgcgccctgtgggttctggcccagcacctgcgccaagccgcctaa

SEQ ID NO: 335475 - DNA, 423 bp, Pseudomonas aeruginosa
atgcaaaaagttttctatgtacccgggcaaaccgcaatcatcgactacgcccgcgagatcggcccgaatgcctgggccgcgcgcggaacctggctcatgctgccagagatccaggtaaggcaccccggcgctgtgctgggggatgaagtaggctttctgcaagcacaggaagccgcccacggcaccaagccggcgcgcatcaccgaaacccggtatgacttcgcgctaagccgcgctcaggtgcttgattacaacgccggcgaggccggcgattcgttcatactgcaggcccccgaggtaggcgacctggtgcgcgtgtacgcccgttcaaacgggcgttactggacgttcctggcgctgccaacaattacgcattgcgagatctggcagcggatctgcgagcagggggccgcggctgattga

SEQ ID NO: 335476 - DNA, 312 bp, Pseudomonas aeruginosa
atgcagccgatgtacaccaaagaagaatggaagaaggttgcgcccctgtttgcttccaagcgcctggccatctcgactgtagaggtggccaaggccgttctggtcgatggccagcgcatcaccgacgtagccgaggccaggggtatgaccaagcagaccgcgcacgcagcggtaaagcgtgtgcggaaaatcctggaagaacagggcgccggcgaactggtacccgttcttgtgtggctgccccccgagctggccgagcaggtacgggaaatggcaaagccattcccgcagcctgctgccccaaaaaagtag

SEQ ID NO: 335477 - DNA, 1017 bp, Pseudomonas aeruginosa
atgtcgtttgatgcactgatttttcccggcgaccgggttcattcggtttccattcataacgtgacccttgtcggtggccagcttagcgaggacggggttacgccccaaatgatcgttgagtaccaggggaaacagcatgttttgcgcgccactcacccagtgtacgagagggacataggcaaagtgggatatgtgctgccatcacaatttccgtctgttgccgaatacggctccacgattttccgtgcctaccaagatcagagcctgcgccgcgtatacgaactggacaccacgaacgacgcataccagatggtgccgctcaatcatggaaagtggccccatcatcgagcgcacctgcaatgcggttggcgttgcgatagtcggcctactggttttctcgcgcctgcagggcttgtcccgggggccaacggtgaattcgttccagatgaaacggaagtcgtctctgtacgcattccacctgaattcgagtgggaagcgcgccggcatcaaatgaaacctgcggatctgctcgaaagctttatcggtgacctggcgggcattcagaactatgcaaacaaacctcgggctgatcgtttcggtagcaacggcagcgatgaacgcatgctggccgaaaactggctggagcgggcgcatggcatgaaggccatcgacccggaccagctgagccagcagatcgaagaggccgaggaatgggatgcgcagcaggacgagtggtccgacatgctgggcgattacgttgatcgaggcggtgatgctcggcaactgctggatgctgtagacggtgtgttgaccaagctggacgagttggggcctgatttcgttctggatatgcagggcgaggtcgaagcggcgcataccttgcccaagctcaccgagttgaacccatcgcagctggcctaccttgaaaagtggttggccagcaatggcccaaacaacctcctaaagtggccaggttggcatgacgcccgagttggccaggctccgaaagacgtatga

SEQ ID NO: 335478 - DNA, 2382 bp, Pseudomonas aeruginosa
atgaacaatctgcacgacctctttcaacggcaacggcacgcctcgcgtgaaaacgtgcttgactacgcccaacgcatggcagcgttgggcgggcttcttaacgcaatccttgccaatgagcgggcacttgtcgacgcgctgcaccaggacttcggccgtcgcccaacgcaggaaacccgtcttctggaaatcatgccggtcgtcgacgaaattcgctatatccgccgccatttccacaagtggatgaagccccggcgtgccagcgtgaactggcaatttttgcccagcaaagccagggtggtgtatcagcctttgggggtggtcggtgtcataggcgcatggaactacccggtgatgctgacgctctcgccattggccaacgcgttggctgcgggcaaccgggtgatcgtcaaacctagcgaactggcccctgccaccgcagacgtcatccacagaatgatccagcagtgttttgcgaacgatcatgtcgccgtcgtgaccgggggatctgacctcgcagcggcgtttgctgcattgccctttgaccacatcctcttcacggggtcaacacgggtgggcactttggtggcgcaagcggcggcggccaacctgacgcctgtcaccttggaattgggaggcaagtctccggcgttggtgcacgaatcgttttccacggcagtggctgccgaccgaatctgctccgcgaagttctggaatgcgggccaaacctgtgtggcgccagattacgtcctggtgcatgaacatcagcttgaagcatttcaagcggaggctgccaaggtggcgttccgccgtcatgccaaccccgtttcgagtgccgattacgcatggatggtgaatcaagcagggtacgacaggatgcaggcgcttctgcaggatgctcttgacaagggggcgactgtcgtacctctcgttcagaacgaagagacacgtcctgcgggaaatcgcgctttcgcaccagtcattgtggttggggttacggacaccatgcgagtgatgcaggaggaaatatttggtccgatcttgccagtgcttacctaccgaacgatggaggatgccatcaagtgggtcaacgacaggcccaggccattggcgctgtattattttgatcatgatcggcgccgcatcgccagcgtaattgatcgaacggtgtctggcggtgtcactgtcaatgactgcatttatcacctggcgcagcatgacctaccgtttggcggaatcgggccaagcggacagggtgcgtaccacggttttgatggcttcgtcaccttttccaagaaaaagggagttcttctgcagagcgatctgacggcaaacatttttggaaaactgaccaagccgccctataccaagtggacggatcgcatggcgacactcctcataggcaagtccgtgaaacatccatcgccagtgtccaggcgagtcatcaagatcacagccgccttgctggtcgtcggagctattggcatcgcttccgtctgggcaccagaccgtcccgttgaagaactcattcctaccttgggacctgcgccatcacagttcatggatgtggatggaatgaaagcacacgtcagagacgaagggccaagcgacgattccgagcccatcgtgcttttacacggcacttcctccagcctccatacctgggatggttgggtgtctcaattgaagtcgcagcgccgcgtgatccgagtagacctaccgggcttcggtctcacggggccgaaccccaatggcaagtacgacattgagacttactctcattttgtggcatcactgatgagtcagttgcatgtgcagcatgcggtgctggtgggtaattcgctggggggttatgtggcgtggaagacagccgtggactacccgagcagaatcacgaaattgattctgattgatgccgctggctacaaatacgagtcgcaatcggttcccctcggcttcaggctggctcgcatcccactcctcagtccagtcatctcccatatattgccaaagagcatcgtcgccaacagcgtacgcaatgtgtacggtgacccgtcaaaagtgacgcctgcgttgattgaacgctactacgagaccacgttacgcgcgggcaatcgagaggctgttgttgcccgtttcaaccagatgaagggcggcgaattcgagcgagagatcaaggaggtaaaacaaccgactttgatcatctggggcggaaaggacaggctgataccacttgagtatgccgaacgtttccatcatgacattcctggcagcacggtcatgttcttcaacgggctcggtcatgtccctcaggaagaggccccgctggaaaccgtcaaggttgcccaagagttcctcactatgaagccagccgcgaaatga

SEQ ID NO: 335479 - DNA, 1650 bp, Pseudomonas aeruginosa
gtgacgacgcctggtgagtttgatttcgttgtgatcggctcaggctttggcggcagcgtttctgcgcttcgcttggccgagaagggttaccgcgttgcagtgctggagcaggggcggcgctggactcctgaagatctgcctcgaaccaattggaatctcgcccgatgggtttggcgtcccgccttgggcctgcgcgggttcttcaacatgcgcttctttcggcatgtggtcgtgcttcatggctgcgcggtgggtggtgggtcaatcacctacggcaacacattgctagttccccctgagcatgtttggcagcaaggcagttgggcgggactgggcgaatggcaaaaggagatgcccgcccactatgaatgcgccaagcgcatgttgggtgtgaccgtcaaccgacgtttggggcccgtcgaccatcgactgcaggaaatggccaaggtggtcggtgccgaatcgacgttctatcccactgacgtgggggtcttctttggcccagaaggcgccacgccagggacaagtcatgacgatccctactttggcggagagggcccatcacgtaaatcgtgcatcgggtgcggcggatgcatggtgggatgcccacacgacgccaagaacacgctggacaaaaactacctatttctggccgagcgacgcggcgcaaaggtcttcccagaaaccaaggtcgtcgatgttcgaccagccgggaataaagacggcaccgatggctacatcatcgaaaccgtttccacggccgtcggtggcaaaaagcagcgcaaacagatgcgcgctcgaggtatcgtctttgcggcctcgtcactgggtacgcaagaattgctgttccagctgagagagtgcggttcgttgcctgccatttcgctggctttgggacaacgggtgagaacgaatgcagagtcgctcatcgcagtgcgattcccgggctcgaagcttgacctctcggagggcattggcatcggatcaggcctccacatcgacgcgcacacgcatatcgaagcagtacgctaccccaaagggtctgattccatgggcttgatgaccacggtcatgacattggggcgtccgggatggacacgggtattcacttggattggcaccctcgccaagcaattgctcacccatccagtgaccacgttacgggcgatgtcgcccttcggcttcgctcgcgagaccatgatctttctttgcatgcaaacgctggacgggcatttgacgatgcggtgggagcgaccatggttctggccgttcaagaagacgctcatgacgcacgggcagcccataccgacgttcatccctgccgccaatgactttgccgtgaaggctgcccgcgccactggcggcatcgcgcaaacaaccctctccgaaatcctgctcaacgttcccatgactgcgcactgcatgggcggtgcagccatgggacgaaacgccgctgaaggcgtgtgcgacggtcaaaaccgcgtgtttggctaccgcaacatgtatgtctgcgatggatcgatgctgggagccaatctaggcgtaaacccgagtctgaccattaccgcgctcaccgagcgtgcaatgtcaaaaatccctgacgcgcagcatcaggactggaacgccattggaatggagaacgccacatga

SEQ ID NO: 335480 - DNA, 639 bp, Pseudomonas aeruginosa
atgcctcgtcttcggaaccaccctgtcaatgtcgctgccaaccgtgccacacgggaacgactgcttgatgcagcctgtgaggagctggtggaggtcggctactttgagaccgataccaacaagatcgccagacgcgggggcttggcacccgccaccttctacaagcacttcaggaacaagaccgaagtctttgccgcagcctttgagcggctggcagtggctgaggcgcagcagctcggagatgcctgcttgtcttatctgcaagcggggaccgctcttgacgacgtagcaacacggttcgcgcaggcactcattgaaagccgtcgccacctggtcgtgctgcggtcccacgcgaccgtacttcagagcactgagcctacggttcgagaggcaaaggtgacggtccgtcggcttgcggtcgaagcggccacgggatatgccgcaatggcaggcttggaaacctgttccttggaagaacttcacgtccggatgtacgtcattgatggtcttgcagacgctgtagctcgcggtgacttcgggcaacacggcgtcaccgacatgactgcgcaccgcgaaatagtgacgcaatggaaagcttgctttgtgttgccaggaacattcgagcccgaccaatcatga

SEQ ID NO: 335481 - DNA, 330 bp, Pseudomonas aeruginosa
gtgactgcgagcattgaacaccccttccgccggctgggggagacgcgcaagctggccggggagccggctgaccgaagggtggccagattgagagagaaggggggactacgttggatatcgtccgggtcgttgctgctgaccaacctgcaggcgaactaccgggagcagccggaagtcacgttgctggcgttgttgatgctctgccacggcacccgccttggggagactcggacggcccgctggcgcgacttcgccttggtggatgcggtctggaccatcccagcggtcgttggggtactgcacaaaatgggtagtgccacacgccgctga

SEQ ID NO: 335482 - DNA, 378 bp, Pseudomonas aeruginosa
atgacaaggacaggatgttcggactatgcatggggcttctgtattgcgctgtttagccagctttgctgggccgattcttcattcgacctgagggagttcagtgtgcaggctaccttgggaacgacactagttccgcccttgttgacgacgatggggtccggctatgtgagcgatacccggcctttcgaaggaatgttcgtattcaagaagtacgcctatgcccgcgaggacgccgccgccttcatagcctcggcgagtaatatcgacggtgtccagttggagcgcgcctggcgcgcctatctcaccagcgcccctgcgccttggcttgaacggaaggctttcgcggcgggcgtgctggcctggagcacggcggagtga

SEQ ID NO: 335483 - DNA, 1350 bp, Pseudomonas aeruginosa
atgagcggaccgaaagttgtaagaatcgtcacccgggaagaagccatcgccacctgcgagcgcgacctgcaacgcctggacaaggccctcgcgcgctgggaaaaccaggccagccggctcgcccagctcagcgacgccgagcgcgccgccgcccacgcccgccgcgccagcctgcacgccctgctcgaacaggaacgctggctggatgtgcaattgcaggtgaagatcgaaagcgaattcctcaagcgcgacctcgccgaacgcgaagagcgcgccattcgccaggccgcggaaacgcgccagcaacaccgccgcctccaggaaaacgccagcgccctgctccaggccctcgacgccaggcccgatgccgccagcgcggcactccggcaaaccctgcaagcgctggccaacggcgccctccgcgacgacgcggaagccctgctcgcccaaggcttcgccgccctcgccagcgcccccgtcgaagaacgcctcagcgcagcccagcacgaactcgcccagcgcctgaagaccgacgaagcgcctatcaccctggaacagtggcgcgcccgccagcaacaggacgccccgcgcgaacagcgcctggcgcgcatcgaccggcacatcgccgaactgcaactgctgcaaggcgaggccagcgcccaagcgttcctcgagcgactggcccgcgccgaagccgaacagcgcccggagcgccgcaacctgctgctcgacagcctggtcctcgacctcgcccaggccgcccgcgaacaccagcagcaacgccagcgactggaacacctgcaagacctcgccagcgaagtcgccgccctcggcgccgccgaacacgccgaactgctccagcgcgccgccgcctgccagccggacagcgatccgcagcaactcgccgaactcaccgagcgatgcaacgccatcctcaccgcccacctccagcaacaggttgccctcgcccgccgccaggccgtgctccagggcctcgccagcctcggctacgaagtccgcgaaggcatggccaccgcctgggcgcagaccggcagggtcgtcctgcgcaaacccgccccccccggctacggcctggaagtcggcggcaaggccgacaacggccgcctgcaactgcgcgccgtcgccctcaacgccaaccgcgacagccagcgcgaccgcgacatcgaaaccctctggtgcggcgagttccaacgcctccaggccctgctcgccgcccagggcggcgaactcagcgtggaacgcgcgctgggagtgggggaagtggcgttgaaggagattggcgaggaggagcagcgggagatgggggtggtgcggcagagggggttgtga

SEQ ID NO: 335484 - DNA, 693 bp, Pseudomonas aeruginosa
ttggcgcagcgccagcatctgtattacctgatgcgcgagcaccctggagagactctcgccgagcgcttgcgcaaccatggtccgctgtcgctgccggagtggctggggctggccaaccagctgctgcgcgggcttggccagttgcatcgacgcaacctgctgcaccgcgacctcaagccggaaaatctccacctcggccgcgacggcgagctgcgcctgctggatttcggcctggcctggtgtccgggattgtcgcgcgaagacccccatctgctaccgggtacgcccagctacctggcgccggagtgcttctccggcacctcgccctcggtgcgccaggatctctacgccaccggcgtctgcctctaccaggcgctgaccgggcgctatccctatggcgagatcgaagccttccagcacccgcgcttcggtcgccccgtcccgcccagccgctatcgccccgacctgccggcctggatcgacgacctgctgctgcgcgccgtcgcctgcgaccccgcacagcgcttcgagaccgccgaggaatggctgctctcgctgcaacagggagaagcgttgccggccgcggcaacccgcccattgctggagcgcgaaccgctgcagacctggcgcgccatcgccctgctgtccctggccgccaacctggcgctgctcctggtctggctgaagggctga

SEQ ID NO: 335485 - DNA, 507 bp, Pseudomonas aeruginosa
atgtcgcgactctctctcacttccgatgcctcgctgctggtgcgtgacgaccaggggcgctacctgccggcgactgccgaccagattcttgaagccgcacgcctagtcatcgaccagaagaacccgcgcggggcgctgttcacatcgccggcgctggtcagggactacctgtgcgccaagctggccggcttcgagcacgaagtcttcgcggcgctgttcctcgacacacagcatcggctgatcgaatacgtcgaactgttccggggcaccatcgacggtgcatcggtgtatccgcgcgaagtggtcaaggaagcgctgcgggtcaatgcggcggcggtgatcttctcgcacaaccatccgagcgggaaccccgagccgagccaagccgacaaggtgctgaccctgaggctcaaggaggcgctggcgctcgtggagatccgcacgctggatcacatcatcgtcggcggcgagaccacggcgtccttcgccgaacgcggcctgctgtga

SEQ ID NO: 335486 - DNA, 1317 bp, Pseudomonas aeruginosa
atgtcgagtgaagccattcggccgtccacaatggatggtatcaaacgcctcgctaagtcgctcaaagtcgagcgaagcatccagcacacgcaagccttggatgccgccgcgcaagcagcgggattccagaacttccgccatgcaggcaatgtgctgagcgctgcccccaagacggagcgttctcgccccagccatcgcgtcttcctgacttcctactggaaggatcgcgacggtggcgggactggacgcgagacgcttagcatctggctgtccgttccgtggggggacctcatcacgtcgctccagttgcagaaccaccgcgcactggcggacttccgtgccgagggggctgaccatctggcacgcgagcacctgcaaagttcgcaatccgcggccaggcgggcagtctgcgcggccgcacgcgcactgcatttcatggatgcaacaaagctgcgtccgtccaagagccacagccgcgcctttcccggcgggcggtcgagcaatgcagttcctggccgcgaccactacagcatctggtacgaccgtcagacgaagcgctatctctttgcagatgagccctatgagaaggccgttgaaagcaaagggcaggagcgcgagacctgggcgaagaaacatggcttcgtcatcgtcaagtctgagtgggcgggcatgtacgcgcctgatgttggttcccgtctctacctgatcgcggacgagacgaagggcatcccgctggaacccatcgtggcggcactggacaagctgccttcgcccatcgtcgaagcagcgtgggacggagagtccgcgccgatgacaccgttcttcgtgagtcctgacaccattgccaaggccgccgctgcgaaggacaagccgaagacgccacgtaagcaaaatggtcaacgcaattcggtgggctatgtccagaccttcgttggcccgcagcgccgtccgaagggcagaatgccgattgaggcgcacgcgcaagtcggccgcctattgaagtcagtgctcaaggacacctatcaccgcaagggtgtctacaaccgcgtcaatgcgattcgcagtgaactcgacgagtggacgcagcgtgagtacaaccatgccgaactgccgaatgagcagttcttcgatttgtactaccacgagtccggctcgacgttttcgagggcgttggccgaagctgaccgcgagcgtcatgtgcagagtctggcgcacgcgaagaagctcttgggcgagcactatccagactgcccaccactgcggtcactgctgaaaaaggtggatgccgcagtcaagtcgttgcgaaactggaactga

SEQ ID NO: 335487 - DNA, 2394 bp, Pseudomonas aeruginosa
atgtctcgcaaaaaacagaaccaacaagcacagccaccctcgtcgcccgttcgccccgaggccgagttggaaagccggttggcagcggcgttgtccgctgccttccccaatatttcccgagagcaactggtcgagcaacggcgcttcaccgtgcgccttggtcacgaaacacatgaattcgacagcgccgctcagtgggagaaaagcgggcgagcggatgtaatcatctttcatgatgagcgaccgctcgccgtggtggaactcaagcgcgaggatctagcgcttactcatggtgactatgagcaagcgcaaagctacgcgaaccagttgacgccacgacctcctcttgtcgttgtcacgaacgggcgcgatacccgtatttacgatgccaatacagggcaactttggcccggcgagcaagatgccgcgaatgcggtatcccgtctgcttgccaatgccgtcaagttggcggcggcggacatgcggtgggcgactgaagctttgatggggcgggaaaccggggtctgggctcgcatcgtgcgatctgcaactgcaagactcctggccgagatgactgacccacccggccagtccgatcgagccttcgcagagcttctgttgttccctcgtctcagtaccttcaccgcaatcaaatcggcgctggccgggacgctcttcacaatcgtcgaaggtgctgcacagagcggcaagagcagttgtctgcgcgaactcgccttgcgcactcaggacaatgaagacctggccgtcttaatgttgcgaggctcagggcccggactgtttcagtcgctggccaacttgttcgccattgagcttgagtggaatctcaccgcgaatgacgctcgccagtggctgcggcggatgtctaccgggccagcggggccggcgcttttgctcgccatcgacgacgtagagccaggcacgccgatggccgtcgacttggaggaactggcgggcctgcgacctggcaacaagctcaatgtcatcctgaccatcgatcgcgcagagcggctggtcaaggctccaaacggtcgcacgcagacggcggtgggagaccgggcaaaggtcatcgaaatcgcccccttgaggttggaagagtttcaaagtgcgcagcgcactctcgccaatcacaagattctcttccagcagggcgcggagtacacaaaggactaccgtgcgccgtgggtacttcgcacgatttacgacgatgccgcctgtgacccgcgataccaagacccggagtgcgccttgcttcttccgtcggcgcttgacttggcgcttgtggatgccgcacgccggaactacgccaatcaggcggtgctgcttcgcggctatcgggtacttgcccgttgtacccttgccgatgaaggtgcccgttcggccgaactagccttggcagcagcgaatggcttcgtcatacgacaggatgcgctttccaacgaagctcaccatgcggtagccgaacttaaatcgaagggtgccgtgcgcacataccgtcacgcaggcggcgaagacatcgtcgtgccgaccattcctgccgcattcctttcagagcttgccgatgccacaggcgacgaactcgcgcgacgcgccgcagtagacccgcaggaagctggcacttggcttggcaatcgcttggccgctgtctatctcggggacttggtcggtgcgcaggcgattcgcagcatggccgagaaaacaggcggattcagttctggaatcatcgacggccttctcgctatcgaacccacggaggagcccatcgaaaacgcgctggtagcgacggctgcgcctgacggtcggttgattcatctgaagatcgaaggcgaaaaggcttggctgtccaatcgccacggtgatgtcatcggcgaatccgtggatctcggagcggagcgtccgcatacgcatgacaacgcgacagcctggatgatccttggacagcttgccagtcttcccgcagcgatggttggtgacgacagccagcgcatggatgcttgggttttgctgaacattggccagtgtcctttccccttgctacgcgcaaacgaagaggggctgggccatcttgagcacgatctcggcaatcgcggtcgagtcctttgccaagatcaaggccccatcgaggcgacgacacaagcaatggccgatctactttcacgtccgtggacgcacgcggacgagtgggtggatgccgcgattgaagccgactctctgccacttctgcatcgtttaactattgcgctgcgtaccgtgcaaatgcgcaacatacctgacctttccgattgggccgatgtggtgctcaaggagcgcgtgcttcccacgctcaccgctgcccttcgagcgccaatcggcggtgaagacattggcgcacattga

SEQ ID NO: 335488 - DNA, 1206 bp, Pseudomonas aeruginosa
atgggctatgctaggcggcagaacctcgccaaggctgatccccgcccccatggatatagcgctgacccatcgcctgtcgttcaaacaggccagcctcaccgtgctggtggcctttatcctgggaaccctgctcagcctgattcaggttggcgtcgattatgccagccaggacgcatccatcaatcgcgaagtgcgcgcgctgctggacgtcagccacaaccccgccgcgcgaatcgcctacaacatcgatgcggagctggcccaggagctggtcctcggcctgctccgttcgcccgccgtggtccgcgcggaaatcatcgacacctccggcctgccgctggccagcgcctcgcgcgaatccgccgaaagccgcctgcggccgctcagcgacttcctcttcggccacaagcgggtctacgaggacccgttgcatgtcgaccatgcgccgggcgaggccctcggcgtactgcacctggaaatcgacaccttcgtgttcggcaacgacttcctccgtcgcgccggcatcaccctgctctccggcttcgtgcgcagcctgctgctgtcgctgatcctgctggtgctcttctataccctgctgaccaagcccctggtcagcctgatccaggccctcagcggacacgatccacgctcgccggcacgcatgcgcctgccctgccccaagggccacgaacgcgacgagatcggcgtgctggtggaagtcatcaaccgccagctcgggcgcatctcggtagagatcgaacagcgccgggaggcggagaaccgcctgacccagtacctggaggagctggaaagcatcgtcgccgcccgtaccgccgagctgaaggccgccaacgcgcgcctgacgctatccaaccaggaactcgaagaagcccgccagaccgctctcgatatggcccaggcccgcgccagcttcctggccaacatgagccacgagatccgcacgccgctgaacggcctgctcggcatgctctcgctgagcctcgacggcccgctcaccccggaacagcgccagcagctgtcgatcgcccacgactccggcaaggtgctggtggaattgctcaacgacgtgctcgacctctccaagttcgaggccgggcaactggtcctggaacagatcccgttcgacctgggcgtcctggtggaagacctgtctcttatacacatctccgagcccacgagacgtag

SEQ ID NO: 335489 - DNA, 129 bp, Pseudomonas aeruginosa
ttgcgcagcttatgccaggcgccggagagggtcatcatgccgttgatcatgccgccccagctcggcgccaggaggatcagcgacatcaccatgcccagcgactgcgcccagtccggcagcgcggtgtag

SEQ ID NO: 335490 - DNA, 1158 bp, Pseudomonas aeruginosa; identical to SEQ ID NO: 330922

SEQ ID NO: 335491 - DNA, 894 bp, Pseudomonas aeruginosa
atgcagcataaccctgataaaaatattgccacgaaactccaagcagcagtgcagtccgaactggacagactcggcctgctttgccgagtattttcacgcgcaaagtcggaacaatccctcaataaaaaaattgatagagagcctggtaaatacacccctaacgggaaaaaaattcaggacgcctttggggttcgtgtagcgctatattttccggatgatcaagccgtcgccatccaggtacttaaaaagaaatatgaatacgacgagcactcctcaacgatagacaatcctgcaggatcagtcttttctgccacgcgctgcaacttgatatttaagctccccgaagaacttgtcgagcagagttcaatcatcaggaatagcgaaataatcgactccacattcgaggttcaaattcggacgattctatctgaaggttggcatgaggtcgaacatgatatgcgctataaatgccaggaggattgggcgtcctataccgaccttgatagagcccttaacggcatatatgccagccttgaaacatcagactggggaatgatgcgtgtttttgaggggctatcttatcgccactacaaagctcgggagtggagtcagatgatcagaacgaagtttcgcttgcgctctgaaggggtgcttgatgaaacaatcatctccgccctaaacgacagcccagagacaggcaagaaaatatttagagttagccgtgaagagtttcttggctcattcactgagtacaagttagaaatgcctataacgccagacaatatagtttatctatgcaactaccgccacattggtgagacgagcttaagtgccctgacaccagatcctatcttagatatttttaagggcgcaggaatcgaaggaaagcaatag

SEQ ID NO: 335492 - DNA, 2124 bp, Pseudomonas aeruginosa
atgattgatacggaagaactaataaagatttataagcagtatgggttcgaacaagcgaaaagcagcgaacccagcatacatgtatttacataccgctcgggccactttcacaacgccgacatcgtcaaggtagaaggaagtagctgcgacagtgctgaagaaaaagtttttaatgagttcaaaagatccggctacgcatgcaggatccgtacatacaaaacaacggaagacatagagagaactcttttcaaaggctttttctcagtagagtcgacgcgcgacaagctaaagcgtgaatacaatcgctatgccgacgctatcgcaaaagcgcacgatgatgaaggcacctatcaatatataaactcccactacctaatcaatgataagccgggagagtccaccgtaattaatgaaatatactcgcgccttcatgacaacaaacctaggctttttttagtagaggccgctgccggattcggtaaaacttgcgcagcctatgagttacttaaagagatcgtcactaaaacagattctatggttccgctcttcagcgaactagcgagaaataggcaagcaaagatatttcgatatgttctgcttgacgagatcgatagaagttttcccagcctgcgatcaggattagttagatcacaaattcagaacggcaatgtaccggtaattctggacggcttcgacgaactaatcccccaaagcaaaacaaacaaggactctgatagctacgacactacggagccaatgttagaaacgatcggcgaactccttaagaaatcggcaaaagttattctaacaacaagaaggacagcaatttttgatggtgacgagttccattcttgggtggaacttcacaatgaagattttgaagtgtttcggatcagaatttcggaaccaacaatccaggactggatcccaccagcgcgtctcggcgaacttgagaaatcgcactttccaatcgaacggctaaacaatccggttttgctcgcataccttagatgcatacctaacgctgcattcgaagaggccgtcaaaaaccctaactcaatcgttcagcagtacttcgattccatgctagagcgagaaaggaaacgtcaagacctccgagttttgccaagcgaccagtatttggttctgaaaacacttgcagccgacatgatgtcatgcaattacacctcagaatccaaagagtacatctcagacctcatacttaagaaccatcatgaggttttggatgaggctcgtcgtcagtacgctgctgaagacagaccatcactgggagagcttgtcacaaagttagctggccacgctttgcttgacaaaagcaacgaggatacccaaggaatcggttttgttaacgaatttgtactaggaaatttttgcgcagagatcatctccgaagatgaaacaggtgaatgggtaggctacgagagatttgtagagcctgcagtaatcgccaccatcccgcgcgggcaattgccgaagcttcgcctctggaacgcactgcaattcaatcttgagtttcttaccgccacagaaaaagtacactatacagcaactttaactggcaccctggatattaagctagaggacaattctgttgagaacattgagcttcaagacatttcccttggtcggcagagcacaataacaaacttcctctttataaacagcaccttctccaacgtaaccttccacaccactaatctcattgaagtttcatttataaactgcaggttctacaattgcggtgttacgcacggagaggccggaaaaaaaattcacgctttgggatgcttttctgatagagagggtttcctagaggcgctccaagaagcagaaggccatgcagaagacattacaagacgtacatctgacgctgagcttttcatccttgagaaattctggcctcgcggacgtaacattttccacaagcatagacctcttaaaattgtgtgcgcaaactccggaaccattgggcaagaaaaaatactcgaagcaatcgcggggctaagacgacaggggctgatcgtcgatggcgacaaaaataacgtccttgagttgaacataaactttgttgccgatataaaagctatgttggggcgttcgtaa

SEQ ID NO: 335493 - DNA, 339 bp, Pseudomonas aeruginosa
atgccctgttcttctgttatttgtcacaactgcggccattccatggtcccccgtacaacctaccgccgccgtctcatcagatacgcgccggccaccaaccactgtcccttctgcttgagcgaaaactggcacggcaacgccccgacgcttgctgatcggcttctctacctagtggggctcgggttaggagggctgacttacgttctggtccaggccttcctgttcaagatccagtggtggctggacatcgaggacaaatatccgctgctgtccctcgcgacggtggggattgcgatctatgccgggcagcgcttctaccgatggtttgtggacctctga

SEQ ID NO: 335494 - DNA, 495 bp, Pseudomonas aeruginosa
atggctccaggctacctgcagggcggcgccgaggaacggcaccagggccgccggcaggaggtcgaactgaccgctgagcaaggcgatggcccaggccttgcgctggccttcgtcggcttcgcgcaattgttcgagtgccgcgccgacggcggcgttggccggtgccgggtagcccgcgagcagggcatccagccagggcagccaggcgccttcgcgcaccagcaggtcgtaggccagcggcggcatgccgtgctcgcagctcttgcgcaggcgctcggggtcgagcggggccagggccggcgggttgtccagcagcgcctgctggagccggcagagaccggcgaccagccgcaggtagtcgcccatcgggtgcccctcggccagttgcagcagacgctcgccgcggcgggcgaacaggtcgcgcgacggctggtgcaggtgcgggggaatgttggcggcggcttcgatctgccccggctgaagaatggtgcgtga

SEQ ID NO: 335495 - DNA, 756 bp, Pseudomonas aeruginosa
atgaacctgcccccccgacagcaaagcatcatcgaggaggtccgcgagcgcggttacctgagcatcgaggagatggcgcagatgttcgcggtcaccccgcagaccatccgccgcgacatcaaccaactcgccgaacagggactgctgcgccgctaccacggcggtgcggcctacgattcgagcatcgagaacaccgcctacaccatgcgcgccgaccagatgcgcgacgagaagcagcgcatcgccgaagccgtggccagcctggtgccggacaacgcctcgctgttcatcaacatcggcaccaccaccgaggccatcgcccgcgccctgctcaaccaccgcaacctgaagatcatcaccaacaacctgcacgtggccgccaccctcagcgccaaggaagacttcgaagtgctggtcgccggcggcaccgtacgcagcgacggcggcatcgtcggccaggccgcggtggatttcatccagcagttccgcgtcgacttcgccctggtcggcatcagcggcatcgacgaggatggcagcctgctcgacttcgactaccaggaagtgcgcgtatcccaggcgatcatcgacaacgcgcggcaagtgttcctggccgccgactcgagcaagttcgggcgcaacgcggtggtccgcctgggaccgatctcgctggtcaaccgggtcatcagcgacagcccgccgcccgccgccatcgcccgcctgatggcacagcacaaggttcacctggacctggtctga

SEQ ID NO: 335496 - DNA, 2448 bp, Pseudomonas aeruginosa
atgccaacagcacatgcggtttcccctctggcaagggctttaggaagtttgggggcaaacaagatgtccaggcttggcctggcccttctgctggtgagcgcccaggcggtcgcgcaggagtacgaattcaacgttcccgcccagcggctcgacgcggcgcttcaggcgcttggccgccaggcgggtctgcaggtgctctacaacccgagcgacctgagtggtctgcgtagccgcagtgtcagcggcaaactcgaattggaacaggcgatcagccaactgctggatggggccaacggtatcggtttcgaactgcagggcaaaaccctgatcctgcgcctgcaggactcctcttcggtgatatccctggattcaatggtggtttcaggcctggcgctgaatcccactactgagaacagcggctcctatgcctcgcctgcggtgtcgatcggcaagggcaacaagagcatcaaggaaattccccaatcggtgacggtggtcacccagaaacggatgcaggaccagaacatgtccaccgtatccgatgtcctggccaacgcgccgggcgttacctccatcccgatgttcggtaccggcgagcagtactactctcgcggtttcttcatcgaaaacttccagtacgacggtgtacccctggagcgccaatcctatgcccgtggttcggacttcagcgggcagaccgcgatcttcgatcgggtagagattctccggggtgcgcaaggtctgctggagggcggcggcaatccctcgggctcggtcaacttcgtgcgcaagcgaccgacggcggagaaccaggtccggctgactgccaaggccggctcctgggatcactatggtacccaggccgatatctccggcccgatcgacgaacagggaagactgcgagggcgcctagttctcgactacgacaccaagaactcgttcgtcgaccacgtaggcgatgaccgccagaccatctatgccgcgctcgattacgatcttacggaagctacacgcctcggcttcggcttcagtcgcgagcggatcgacgccaacatcgatgtcaacggcttgcccaactataccgatggttcgatgccgcatttcagtcgctcgactttcctcggcggcgactggtcctactgggacaagatccaagagaccttctacttcgatattgcccaccagttcaacgaagactggtcgttgaatgccacggtggtcaatgcgcgcgagaagaacgactacaagtacctgctgatggccggcagcatcaatccggacaataccagtacgctgcggggagatgcctacgtcttcgacttcttttccgagcactggggcggggatgtctatgtcaatggtcgtaccaaggttgccgatcgccagctgaaccttacattcggggcgaactattcggacctggacagcagcgataccttcggctggaggcagcgctacgtacccaactgggatatcttcaactcgccggtcaataccaacaaaccatccgatgacgacatctattccgtcaggcgcagcgacgatggctacgcttcgatccagaaaggcgtctacggcatggggcaatactatctgaccgacgacctgtccgtagtgctcgggactcgcatttcgtcctaccagaaggcttatacctccaatgggccttggggttattcgaaggcggtggccaaggagtcggcgaaggccattccctatgccggcatcatctacgacctcaatccggagtggagtgcgtatgccagcttcaccaagatcttccttccgcagtcggtgcgtaccgcgagcggcagcatcctgggaccgaaaagcgggaaaagcgtcgagaccggtctgaaaggcatcctcaacgatggccgcttgaatgccaccttcgcgctgttccgcatggaacaggacaacatcccgatccaggacgccaacctgcccgatgacgttcaggaagccaactgcggcggtacctgctaccacggcggcggcaaggctatcagccgcggcttcgagaccgagctcagcggcgagttgttcgacaacgtgcaggtatatgccgcctacaccctcaacctgctgcgttaccagggcgaggtgcccagcgaagcggatgacgttggcgccagcgtcaatacaccgaagcacatattccgctcctgggtcgactaccggttgccgggcaattggtcgcgggtatccgtcggcggcggcgtcaatgcacagagccggtcggccgggttcggctactacggacgggagcagagcggcttcgcggtatggaacagtcgcctggcttatcgcttcaccgaagagctgaccggtgcgatgaacgtcaacaacattttcgacaggcgctacttcaagtccgtcgactatggccacaactacttcggcgatccgcgcaacgtgctgttcacgcttacctatagctactga

SEQ ID NO: 335497 - DNA, 1428 bp, Pseudomonas aeruginosa
atgagcagcacacccaaccaggatgcgctggacgctccattgccgctcgttgcggctagctcctccgcttctccctacccaatcgattctctcccgccactgctgcgtgacgccgccgccgcgatcgccaagcacgtgcaagcttcctcagccattgcaggccagtgcctgctgggagccgccgcccacctacttcaagctcgcgtgaacgcaccatccattaataatccagcgggtatgccctgcagcctcttcctgctttcgctcggcagctccggcaatcgcaaaagcgcctgtcgtgacctggcgttcacaccgatcgatcgacatgaacacgcggcatacacccgctaccaggcaacgacgaagagcgcgcgccaaaacaagccaaacaactccctggataagggagagaatgttcccccagcactgcaggatccacgcactcaactcacggatgcgacctttgagggagtcgtgggcgaattcatccgcgggaagtcagcctgcacctgggatacggatgaggggagtcagctactcagtggcgcctctctgaaatccgatcatgcaagctcgatcattggcggcttatgccgagccttcgacaaggggagcttcgacaggctccggtcgaagaacaactcggaaacctctggcactgcctacaacaggaggttgagcatccatctactcgcccaaccggaagcacttttggccgcactctctcaaccattgcttatcacccaaggattcctcccacgcttcctgttcacagctccggaaagcctggcaggcacgcgtttgctcaccgagcagatgcttgagcggccacctcacgtcatcgcagccctacaggcattctgggggcgttgcgaagaactactggaaacaccaactttcgcccacccagatactgcggagataaatcccccagtgctcgacctgacgagaccggcccaagacgtatggctcgatttctacaacgacgtggaggcccagatgggcaacaccggccagtacgctctaatccggccgttcgctgcacgggctggagagcaggcacgcagggtagccactgtcctggccgggtttgcaggggcaaatcgcattgacgagacagccatggagcaagcatgtcgcctggtagaacactccgtgactgaatggcatcgccattccacggcgcggactgctgatccgcagcttgtcgctgccaaagatcttctcgactggctcaaagccaaagggtggaacgacttccatcgcgacaagctggggaagtcggggccaagctatgcccgcaaggccaaggcgcgcgacggactgctggaggtgctgatcgagcaccggcagttactcagcgtcgacaacaaggttttccacctgaatccgcttgcggaagtcgaggatgttgcggagacctag

SEQ ID NO: 335498 - DNA, 999 bp, Pseudomonas aeruginosa
atgaagcccttccaaaaacctgccatcgacattcctgcgcagctggctctgctcaaacaacggggcctgagcattcaggatgaagccaaggcgcattgctttctcgaggcggtcagtttctttcgcctgacgccctacatgcgcccttttcagattccggaggatgctgaccacgctttcaaagccggcacccggctacgcgacctcacacgtttgtacgacttcgacagacgcttgcgcctgctagtcatcgatgccatcgagcggatcgaagtcgccgcacgcgctacaatcagcaaccacatgggaccgacccacggtgctcactggtatctccagcgcaacttgtttcaaggcagctatcgacatcaggaactgctggacagcattcgcagcaagcaggacagggcgtgccaggatcatcagcgcgagtgtcggcgcatcgatacctccaaggcatccgcagagcgcaaagagcaactgaaaaacctacgcgccaaggaaagctacgctcgccactatgcgctgacttatgatgccccagacctgatgcccgcctgggccgccatggaagaagtcaccctgggggacctctcgcacttgttcaaaggcctggcgcgagacgctgacaggaaagctattgcccgccgcctggatctacccggcccgctgctgcagtcctggctccataccctgaccaccatccgcaacatctgcgcgcaccatgcacggatgtggaaccgcgagttgggcattcgacctgagctgccaaagacagtcaccttcctctggccgcagcatctgaaagaacccgggcaacacacacgggtgtttaccgtgttgtgcattctcaacctgttgatgcgccgggtcagcccacacaccagttgggataggcgattgcacgaactactggcggactttccagaaaccaacctgcgagcgatgggctttccccccgactggcagcaggacccattctggcaattgtccagctga

SEQ ID NO: 335499 - DNA, 1425 bp, Pseudomonas aeruginosa
gtgagtggaaggttgaccgatacccaggttaggtcctgggcgcagggtggtttgctgaagaaaagagggattctaaaggaaagtggcacgcactcggagagcttgggagagcgtggggcggggtccttgctgctggagcgccgggccaacggtacgatcgaggtgtatctcctatggcggcgcaatggtgatcaggagcggataaagctgggcacctttggtgcgatcgggccggatggtcatgcaagaggacttgccttttggcggcgggaggcagagagggtgtctgctgaggcaaggcctttctccagtctggatgcgttcaaagagcgactgcggctggaccagcggcaatccgagcgagaggcactgctggaggcccaacaaggcagtttcgagcagttgcttaaggcgtacgtcgacgatatgcaacggcgtgggaggtccagcgccaaggacgtaggccgcgctcttgaactgaatgtgctccaggcctttcccgacctagcccagaggagagccaaggacatctcggcggctgagctgtcgaatattctgcggctctgcattcaccgccaaccggcactgaaagggcggggagcccggaagacggtcgctaacgccgtgaatggcaagcgcacaatggccaatagactacggtcatacctgcgcgccgcttatgtctacggtctgaagcacgatcttgatccattgcgagcaggtgactcggtcctgtttggactgacgcaaaatcccgccgcgatgcttccgacgatcgacggagcggagagagccaataccgattcgctgaccaaagatgagctgcggtacctgctgctgggcgtcgatgcgatggatgaaccgcagcgtgccatcgctcgctgtatggtttacctcggtggccagcgcgtggcgatgctgatgcgtgccaccaggggtagcatcattgaggtggatggttatggcgcggtcctcgcgctcactgagcggaagggtggcaagggggcaatgcccagggatcatctccttccactgacaccgaggttgcaggagtacatgcaacccttgctgcaggcgtccgcaggatcagtttcggatcccctgttttccgtacggacaggtcgacaggtggctcgcgacacggcgctgcatctcttttcggagctgggcgctgagctggctgggaagggacttacgcgtaagttcacctggcgcatggtgcgggccagtattgagactcatttggcgcaactcggcgtggatgagcagcgccgcgcctggcttctgtctcacggtcgcaacggtgtgcaggcccggcactatgatcgctaccattacctgcgcgagaagcgtgaggatctggagttgctcgggcgctatcttgatgaggttaaagttgctgattcactagggagaaagggttga

SEQ ID NO: 335500 - DNA, 1176 bp, Pseudomonas aeruginosa
atgaaaggcaaacccgagttcgtgttgattgacgatcagaaagcaattttcgagtcagcgctggcggcggcaagcgaggcctcggagcaagcacccaaggtgatgatcatcgaaggtggaccaggcaccgggaaaactgttctggctatcaatctgctggtgaagctcaccgaattgaagctgatgagcaaatacgtctccaagaatgctgcgccacgcaaggtctacgaaagcaaactggttggcaccatcaagcgcagccatttctcgaatttcttttcaggctctggggcattcatcgacactgagcccaacacattcgatgcgcttatcgtggacgaagcccaccggctgaatgagaaaagcgggctttatggaaaccttggggaaaaccagatcaaggagctgattgattcagcgaaatgctcaattttcttcattgacgaagaccagcgtgtaaccttgagcgatatcggcagcaagcaggcgatacgcgcctttgcaaaagccaagggtgctgtggttgaagaacacgtgctgtcttcgcagtttcgctgcagtggttctgacggttacctggcatggctggatgacacgctaggcattcgttcgacggcaaatccgacgcttcagactcaagagtacgagtttaaggtgttcaactcacctcaggcgatgcatgaagcaatcaacgagaaaaaccacggaaacaaagctcgtgtggtcgcgggctattgctggccttggttgagcaagaaagaccccgctgctgctgatatcgtcattggtgactacaaacgccaatggaacctggatcaggatggcagcctatggatcatcgctgagaactccatcgagcaggttggctgcattcatacctgccaaggtttagaagtcgactacatcggggtgattatcgggccagatctagtcgtacgtgacggtcaggtagtgacatccccggatgagcgcgacaagcacgataaatcgattcgcggctggaaaaaaatgatgaaagagcaacctaccctcacgaaaagtgaaacagacctgatcatcaaaaatacgtaccgtaccctgatgacacgcgggatgaagggttgctacctgtactgcaccgacaaagagactgcgcagtacttcgagagtcggcttagccaacacggcaatcattga

SEQ ID NO: 335501 - DNA, 750 bp, Pseudomonas aeruginosa
gtgatcgtttacgctgcgaccaaacagcaatttctcaaagacaacgataacgataacgataacgataacgataacgatgacattgaggaggtgatcctcaggcattacaaggaagcaaccggcaagaacgttggcacctcggaaatcaggtcgtggcaagggtccctaacgtacatggccaaggtccttagagatgagggcctgccgagcgatgcaggcctggccattgaattgcacattccgcagtcgtcgaagcgaatcgactttctactcaccggtcgcgacgaaaaccaggcaaaaaaagccgtactgatcgagctgaagcaatggagtaaggccaacgccacaaccaaggatgccatcgtcaaaacggcgttgggtggtggcctcattgagaccattcacccgtcctatcaggtgtggtcatatgcagcgctgttggaaggcttcaacgaggcggtgtatgacaaaagcattgagatccgtccgtgcgcctacctccataactacgtcagcgacggcgtcatagattcagctcactatgagccccacatcagcaaggctccgctgtttctgaaaggcccggaagagctcagtaaactcagaagctttttgaaaaagcatataagccatggcgacaacaaagaggtgctgtacgagctgtccgaaggaaaaattcggccgtccaagagcgctagccgaagccctcggcgggttgatgaaaggcaaacccgagttcgtgttgattga

SEQ ID NO: 335502 - DNA, 384 bp, Pseudomonas aeruginosa
gtgagtgactcagacagctcatccgcgccactggttgacgtagtgaagcttgccgcatcccttcagcggttcgcagatgatcgcgactggcagcagttccactcccccaaaaatctcatcctggctctcactggcgaggtaggagagctgtgcgagattttccagtggatgagcgatgccgattcgatctccgccgcaacaaatcccgaaatcggccaagccgttaaggacgaattggcggacgtattgatgtacctggttcgcctgagcagcgtactcggcattgacctcaacgaggcggtgacacagaaacttgcctcgaatggccagaagtaccccgtggataaagccagaagcagcagaaaaaagtacgaccgactctga

SEQ ID NO: 335503 - DNA, 1296 bp, Pseudomonas aeruginosa
atgaagttccaggttgaggcagttaatgtaggtagagaatttgttcagattagctctgaaacatataattatcacaatgtatacaccttattggttggtcgaaatgcggtaggtaagaccagggcgttgagtaaaatcgcaaacgcatatattttttcagatagacgagaaggctcagctcaagatgtggccgagtcgcctaggtctgtttcgcagccatcacaagtgattgctgtttcgaatagcaggtttgaccggttcccaaagccgaatccatattttattagagagcgtgagctgaagggatatcattatcttggcctctcaggctttcgatcatcacctggctcagtgatatcaaaatcgatagctaatttgatttcaagatttgaaatcgaaagggatcggtctgttaggtttgactatattttagattacattggattccttccgcgcgttattctagagctgagaatcaattcagcgcttttgccacaaagaaacgggaactcgcgagcgtacttggaggatgcagtccgtcgtacagagagtggctttaaatacgattttgaaaaggaaattttgccagcgatttcgtttttttctaatggattcaaaacaagtcgagcttcgacagttaggtacgatttcgatacaggtatgtgggggcaagatggtgtgggcgagtacatgcatattttgcctgtgctaattgagagcgggcttctcaaggtttcccgaatacatctctatgacaagaaaactaaagatagagtgctgctggatcatgctagctcaggccagcaatgtatgtttttaatgttcttgggaatgtcctctttgatcaaggatggctcactgatttgtatagatgagccagagataagtttgcatccaaaatggcagtctgagtttattgggatccttcagggggcgttttcaaactatcgagggtgtcatttcattattgcgacacattctcctcaactagttgcgggcttgacatcggagaacgggttcgtcgcagatttagaaaccagtaatcttttgcgcccagaggattatgcaaaaaaatcagctgactatcagctgagcgaagtttttcatgagcccggctataaaaacgaatatctcatcaggactctcctcgttatcctgtccaaagttaataaggggcagcctctttcaaggttggataggtcaaagcttagggatttggaatatgtgagagaccgtctagatgaatcggatccagtgcttcatcttcttgatcaagtaaaagttatggctggttaa

SEQ ID NO: 335504 - DNA, 636 bp, Pseudomonas aeruginosa
atgatcaaggtgaattatgaaggcgcgatcaaagactttattgatgcatatgacaaagttgatcatgatctctggaatggcactgctgggccaattttggcagttcggaagtacattcgtgatcactacttgatacagcaaggctatcggtgtgcatattgcaagattgagaaaaaagaagagaatggttatacatgggatatcgatcatatactagccaagtctatttatcctgagtttctatttcatcctgagaatctcgcgatcgcttgtaaggagtgcaataaccctaaagatgatcacgatattttagttggggtgaggtcagtctcttatccgcggggtgttgggcgctataaaatcattcatcctcattttgatgtttatgaagatcatattgagattgctgtggtggatggaaggcgtatttacagggttctcaataacggcaaaggaaaagctacatatgcgctgtgcaatttgagtaggtttgactataaatatgccggttgggattcatttgactcggcaatggttgcggagttttcgcgcttcctcgacaattgcccggctgacgcaaatccggccgagatcaagagaatgctcggtcatctgagtttcgttgagcgccactag

SEQ ID NO: 335505 - DNA, 3273 bp, Pseudomonas aeruginosa
atggttgtgctcccaccagtggtttacgagcaacgctgctctgtaggaaagatccgacatcagctacagccagctatcacgacccgagtcatcaatgagaccttggtgaacgtgtcgccccgcatcagagaacgcttgtggctgcttgagtgtggtagccgcgtcctactcaccaaccggcccaatgtcactttgcccgacggagtggatgggatcattcatctgcgagaggacaaagtcgtctggaggactcatcgcctccttatcgatctcaaagcccgagtcctcgaatctgggtgggccgatgtagcccgcgatgcggcgcggagctggcaaaatcaactgtcatatcgagcggaacaacgtgacgccaatgggcaagtcccaacaggacaggagggattgcgaccgccccagttaggcgctctctttgccatcggggctcactggagcctcaatacacagcctgcaacgattgtgatgcccaccggcaccggcaagactgaaacgatgctggctacgctgacggcgtacggccattcgcccacacttgtggtcgttccttgggatcttctacgccaacagactgcgaacaagtttcagagcctgggactgctgcgcgctctgggggtgctgccaaacgaagtggaaaatccagtagtcgggctgatcacatccaaacccaaaacgctggcagatttggacatcttcacccaatgcaatgtggtggtttccaccattagttcactggcattcgaagctggtagcccgctcgctgctgagatggctcaacggtgcaaatcactgatactggatgaagcccatcatgtccccgccaaaacctggagcgggctaagatcagcgtttcactcgctgcccattttgcagtttactgcgacgccttttcgcagagacggtgaactcgtcgacgggaaagtgattttcaactactcacttgccgccgcgcagcgtgacggatatttcaagccaatacatttcgagcctgttcaccagccgagtggtggcacccaagccgaccaagcgatcgccgtgacggccctggctacgctacgacgtgacttgaacgcggggcttaatcacctgctcttagcccgatgcagcagtattgtccgtgcaacctacgtagaacgtctttaccgacacctcgcgcctgagtttcaaccaatcctgattcattcaaagatcaacgatactgaagctaagctggccgatctgcgctcaggggtgtcccgggtcgtgatctgcgtcgacatgctgggtgaggggtttgatctgcccgagctgaaagtggctgcgctccatgacagtcatcggagtttggctatcacgctccagtttatcgggcggttcacacgcgtggcaggaaggagcattggcgaggcgacggtggtggccaacattggcgatcaagatgtcgcccactcactggagcgcctatacagcgaagacgccgactggaatcaggtactgagcgagctgagttctaatgctgtccgggagcacagggagttgattgagttcctgcaagcgtccgaacgtctggatgaggaaggcgactcgaaaatttctctgtcacctcaattactccgcccagttttcagcactgccgcttacagagctcaacagttttttcccgagcggttccaccacgggctttcccaacaacttcacattgagggggtctggctcaaccgagaaatgcgtacactttacttcgtcactcgcgccgaaggcagggttcgctggactaataccaaaggcgttctcgaccgtgagtggacactcttcgtcctccaccacaatccggagcttgaactgctattcctgtcttcaactgatcatagttctttgttcccagagctagcggaagaagtcaccgggcaagcagaccttatccatggcgaacagatgtttcgaatactaggccatataaaccgcttggtgtttcagaacatgggcgtcaagaaacacggtcgacgtaatctgagctacgccatgtacacaggcgccgacgttgcggtagcactcggtgtggccgagcgtagcggctccgttaagaacaatgtcagtggtaccggatgggaaaatggagagcgcgtttctgttggctgctcgtataaagggagggtctggtcgcgagagcaaggctccataccggagttcgttcactggtgcgctgcggctggcgccaaacttctcgatgacagtatcgttgtcgatgacatcattgcaaacgtcctgattcccaaggaagtgacggcgtttccaagcgacaggaatgtgcttgctgtcgagtggccggctgaaatcatgagtattgcagaagaccgggtcgtgctaacaactcgggcgtttccaaacggccttcctatcacgttcgtcgatctgaaataccttgatgtgcgagataacagcatgaggtttgccttgaactgtgacgagaccggccagttcgcagatttcaccttaacggttggcggagagaccggcttcgtcgtcgcacagacaagcggtgaggcagtcgaacttaccatcgggaaagcgtcaagggcgctcagccaatatctgagttcatacccaccgttggtacggtttgtcgacctgagtgagctggacggcaacatgctgatcgagcctaaagaccccaggcatcttgaaatcggagaagagcgcttcgaggcttgggactgggcaggcgtcgacatcacaaaagaatcctactggaaagacggcattgcacgtgctgactctattcagtggaaagccgcgcagcacttcattcagggtgattttgacatcgttttcgacgacgacggcgccggtgaagccgcggatcttgtctgtctcaaggaggaagataatcgcatacgacttgcgctgatccactgcaaatatgccggaggagacacgcctggcgaacgcgtgaaggatgtcgtggaggtctgctcccaagcagtcaggtcggccaaatggaaatggcgcttctctgaactcggtaagcacatacaaagacgtgaggatcggctgcgctccctgcaccgtcaaacgcgctaccttgctggaaatgggttgaggctcaatgacttgatcaagacagcacgcttcaaacccattgaagccgaaattctgattgttcagccgggtctatctgctggtagtcgtactgctgatcaaaacctcgtgctggccgccgctgtggcatatctcaaggaaacgattgggtgtgatatggacatcgtttgcagtgggtag

SEQ ID NO: 335506 - DNA, 981 bp, Pseudomonas aeruginosa
atggcattggtgggtaaacgcgatggccgtaatttcggctacggcaggcaattgagctacgcaggtccgcaagcgctgaaagacatgttcggcggcggccactacggcacggtgaaggcacactgtgatcggtggcaggcattcgtgaaatggtgccgctccgaacaggggcccggtatcaatgatgcgcggcagattgatcgaaaggtgttggccgactacgcggcgtatctgcgcgacacggttaggcgcggtgatctcgccgtcagcaccgcacaaaaccgcctatccagcgttaacaggactatggcggcgcttcgcggtgatcagggcgtgaaattgcccagtccgagcaaggcgctgggtatgcagcgcaccggggttcgacattcagtgccgcagggccaagaccgcgaaggggttaagcagatcgtcgatgcgctttgcaaccaacatcaactacgggccgccgcgattgttttgttggcgcgagccactggcatgcgcttgcgtgaggccatcttggctgacctgccacggttaagccgtgaggctaacaatctaggtagcattaacattcaggatggcaccaaaggcggccgcgccggcgcctcggcgccccgttggattgcggtggatgaccatgttcgaagtgcacttgagtttgcacagcaggtgtcgtctgcgggcagccgcaacctgattgcggcacaagaaaactacctagatcttctgcaacaagttatccgcccggcgcgggatatcctgcatgcacacaacctcaaaggcttccatgagctacgagcagcgtacgcatgtgagcgctacgagcagatcacccgatgccccgcgccaatcaatggtggccaatgttgccaggtagataggaaccttgatggcgaggcccggaggcgaatcagttacgagcttggacacggtcggatcgacgtggtcgcagcctacattggcggacggacatga

SEQ ID NO: 335507 - DNA, 1167 bp, Pseudomonas aeruginosa
ttgcagctccgcgtacgcagcaacggctcgttgctgtggaatttcaactaccgcgaaccggtgaccaagaagcgcatcaacattggcttcgggacctaccccgaactgtcactggcgaacgcacgaaagaaggcagtcgaagcccgcgagctgctcgctcaaggcatcgatccgaaggtgcagcgcaatacgttgaatgaagccaaacgcgcggaaaccgaacacaccttcgagaacgtggccaccgcctggtttgaactcaagaaagactcagtcacccaggcctacgccgaggacatttggcgatcgctcacgctgcacgtgttccccgatttgaagacgacgccactgacgaagatcaccgctccgatggtgatcgcattgcttcgcccaatcgaagcgaaaggcagcctggagacggtcaagcgtctcagccagcgactaaacgagatcatgacctacggcgtaaactccggcctgatcttcgccaacccgctcagcggcatcagggcagtcttcaagaagcccaaaaaagagaacatggctgcgcttccacccgaagagctcccggagctcatgctggagatcgcgaacgccagcatcaaacgcaccacccgctgcctgatcgaatggcagttacacacgatgactcgccccgccgaggcggcgactactcgctgggcagacatcgacttcgaaaggcgtgtctggactatcccaccggagcgtatgaagaagcgccgtccacacagcatcccgttgagtgatcatgctgtcgcactattggagtcactgaagactcacagcggccatcgcgaatacgtcttcccggccgatagaaatccacgcacccacgccaatagccagaccgccaacatggcattgaaacgcatgggctttcaggatcgattggtcagccacggtatgcgctcgatggccagcaccatcttgaatgaacatgggtgggaccccgaactcattgaggtcgcactggcgcatgtcgacaaggatgaggtgcgcagcgcctacaaccgagccgactacattgaacgcagacgaccgatgatggcctggtggagtgagtacatccagaaagccgccaccggcagcctgcttgcctcagcatacggtcaagtcagagacaagagcgtggtaccgatccgctag

SEQ ID NO: 335508 - DNA, 225 bp, Pseudomonas aeruginosa; identical to SEQ ID NO: 330033

SEQ ID NO: 335509 - DNA, 285 bp, Pseudomonas aeruginosa
atgaccagaagagttctactgaaaggcgagttcttcgcagagtgggccgggtcgcttgacgaagccgcagcactcgctggcgtcccggtcggcgacctggcgttccatcccgacgacctcctcgccgaggtccaggagctacgccgccaggcctatcgcgccgagtctgatcctctgcggctagaggccgagtttgacgccatagccgctggcaccgagccggacctggcggcatgggtcgcagctgtccaagcgatcaaagcgcggtatccactacctgaatag

SEQ ID NO: 335510 - DNA, 231 bp, Pseudomonas aeruginosa
gtgacggatctgatcatcacaacagcgcatctgcgcagtgtaccggggctgaccagccggccgggttactgcgtatccggtgcgcgcgcctggttcaatgcccatggcttggactggcaccggttcgttgccgagggagtgccggcatcggtgctggaggctaccggtgacgagctggccctgcgcctggtcaaccacgcacgtgcggaggcgagcaatgggcggccgtag

SEQ ID NO: 335511 - DNA, 198 bp, Pseudomonas aeruginosa
atgaaacgcctgctcatgagctgcctggccgttggcctggtgggctcgatcaccctcggcgccacatcccgcaactggctggcccggccagagttccactattcgccgctccctcgggagagacacggaaagtcgggggtggctcgggcgaaacgtaaggcacgcaagtacaagcggaggaaccatggccatccttag

SEQ ID NO: 335512 - DNA, 210 bp, Pseudomonas aeruginosa
atggctacccagaaggtactgacccctgaccaggtcaaacagcgtttccgccagcgcggaatcaccattacccagtgggccgcagagcatggttacaagcgcaacgctgtgtaccgcgtgctcaacggcttcgacaaagccaactacggccaggcccacgacatcgccgtagccctcggcctcaaggcctgcgaccccgtcgccgcctaa

SEQ ID NO: 335513 - DNA, 1065 bp, Pseudomonas aeruginosa
atgtccatcaatctctttcaggcttctggccagcgcctggctgcttgggctcgccagcaaggcttggtgccggcatcagttgaaaccttgaacgccgcagcagcacctcgggttcatcaaccagcatcccaagcattcgctgaaacagaacgtcctgaagcgagtccggctctatctgctggttgtgccagtccgcaagtagacgggcgtactccgctgtatccaactgccccgtcttgcccagtgccagcactaacgcctgaagcagttgcatcagtccctcgatgccttccagagcccagtcccggcccgtttcctgttcttccatccgtcctcctaccgagggtcaccgccatgaccgaccaaccgcaactcatgaccgaagagatcgaattgatccctcatcccatggacgcctggcgcgccgcactcaacgcgctgatcgcctgcgcccccggtgacagtgcagccatcgccgtacacctggccgaagcccgccagcaggccctggtgtttgtcgatcgcactgctgccaccaagggcaccctcaagttggtcaaccgtctgatgctgatcggcgctggccgtatcgtgggtgatcgcctgcagtcacaagccgctccagcaaccgttgcctctctaaaccgccgcgtaaccgcccgcatgaccgtagtggtcaacggcacggactacgacgtatccgccatgcccggcgtgatggtgggcgacataatccgcgtcgatcccaacaacatgccgccggtactcaatcgggagtggggcttcgatctgccaatacctcacgcaggcgctcatcaatctcggctcggccaagtcctttgctgtggaaaaaattccgcagcaactgatctgccagatggtgcatctgctccatcaacaccgggtgaggctcctgcaggtcgtcaatccgcgagcggatcttcgcttgcaagacctggccactcacaaccccgctttgattcagcagagcgcccagtatcagaaacgactcctgtaggccatcaagccgcgcctgcagaacctcaacatccaaatcagccataa

SEQ ID NO: 335514 - DNA, 489 bp, Pseudomonas aeruginosa
atgaagcgtcgaaattggaaacactgggtgccgcgctcgccagccgacgcactggacggctgcgcgcagctggccatgcaacgctacaaccgaggaatcgaacgtttggcctgtgatcacctgggccagaacaaccacagttctctctataagtggatcggcaacggccgcctgccgctgagcctgatcctgccgctggagcacgcctgcggcctgccgctgatcacccgctacctggcggccgctcacggcaagctcctggtcgacatcccggttggcaaggcctgcaacgccagtgacctgcagcagctgcagggcgtgctgcacaacgccaccggcgcgctgatggccttctacgacggcaagcgaaccgccgaacagaccctggacgccattcgcgccggcctcgaatccctcgcttggcaccacggcaacgtcgcccaggcagaaacccctcaactggactttggagtggctgacgatgagtga

SEQ ID NO: 335515 - DNA, 261 bp, Pseudomonas aeruginosa
atgagtgagtccatcaacctgccggcgctgctgcagcgcctggacgagcaagcctatgagcagctctgcatcgaagctgcgcgccttgccgaagagaacgagtacctgcgcaccgagctgacccgcatggaggaatgtaccgaaggatggtgcaacgaggcccagcatctccaccagcaactggcggaagccaccgctggccaggccgctatcacccaatccggcgccctggtcgtcattccgatggagcgctgcgcatga

SEQ ID NO: 335516 - DNA, 1947 bp, Pseudomonas aeruginosa
atgaacaacatcacactgcaaagcatgcttaaagagttctcaactaaaaactctctaactgatagagacagtctccgctttgaaaaattcgtaatttattcattgctagccaacgactacaacgacacatttgagtctgacgccctaagcacaggtaattgcattggaattgactcggtagcgattgcaattaacgacgtcttggtttatagcgttagttcagccgtaccgcttactacagggacattcgacacaagctttacattcatccaagctaaaacctcatctagcgtggacctaggtgattatcttaagtttctgcagactgttaaaatattttttactggaaaactagaggaccagccagcagagcttagagaagcttatgaaatcaaaaacttcatctacgataaagctggaaaatttcgttgtgacccaacattaacaatgaaatatgtttacactggcgacggaaaatttcctgacaaggattttttacctcaagtaaaagccacgaccagcgagatcgagagtttaaaatacatgttctcatctgttgagaacaaactgatcggggctgccgagttacaaaacctttataaagagacattaaacagaatcactaagcctttgatgtttcaacgccatgttgcattacctaagctatccttggccactgcagcatatctaggcgtctccaagtgtaaagactacgtagagttcattaaaaatcaaagtggaaatattaacaagggtgtattttacgacaacgttcgcgactacctcggcagcacaaaccaagtgaatgcggatattgccgacacaataaaaagcgacgcccaaagaaatttgttttccgttcttaataatggcgtaacagttgtcgcaaaaaaggtagtgccttctggagatgtttttaagatatcgggtttccaagtcgtcaatggatgtcagacgagccacgttctctttgaaaacagagagcatataacggatgacatgtacgtcactatcaagcttattgagactgacgacattgaactatctagcagtgtcattaaagccactaatagtcagtcggtcgtgatgaaggaagcattcgcaaccatcaagccataccacaaacgacttgaagacttcttcgccgctatgaatacacaagggcaccgatttttttatgcgcggcgacctcatcaatatgatgaagatgatacgatactacagagcgaaacagtttcagcacctctactaatcaaatcattcatatccatagcgcttgaggaacctcataaagtccacttttattatggtcaactgctaaaagactacaataatgaagcaagcaaccttctttttagtgaaagtcatcacccggccctatactttgtatcccatttgattttctcaaaatccaaggaatactgcgcaaggcgtcggatatccaaatggagctaccacattgcgcttctagttaagaaactacttcatatcgatctgagtccagaaaaaaagacaactgacgaccatgttaaggatatgattactaaaatcaataacggctttgatcgagagatacaaacggcggaagcgatcattacttcatttggtttcggttcaaatgatcatatggatccacgtcacaccagcgccattcttgagaaatacaaaatcgtcattgcgaactcacatcgtcaaaaagctggggcagcgcaagaaagaaaaaacgttggcccgagcgacacctcgaacctaatgcaatcccaagctcaactcctaaaaggaatctatagagttcgtcgttataaggcattaaatggtactgcgacattcagctacaactccaaagagcatagttaccaatacgaaaatccgaaattcgactccattgaagaggttagctgcactatagtattcgaaggtggagcaattcacgacgtcgtattctaa

SEQ ID NO: 335517 - DNA, 516 bp, Pseudomonas aeruginosa
atggtcgccatcatcgtcgtttccagcctgatcagtctgagtcgcggcttcgtcaaggaagccttgtccctgcttacctggatagtcgccggcgcggtggcctggatgttcggcggggcgctggcgcagcacctgggcgagtacatccagaccccctcggcccgcatcatcgcagcctgcgcgctgctgttcatcgcgaccctgctgctcggggcgctggtcaactacctcatcggcgaactgatccgggtcaccggcctctccggcaccgaccgcttcctcggcatggtcttcggcggtgcgcgcggcgtactgctggtcgtgctgctggtcggcctgctcagcctggccccggtacagcaggacccttggtggcagcagtcggtgctgatgccgcatttcctgatggttgccgactggtcgaagaacttcattctcggtttcgccggccagtggttgccggccgcaccgataacgccgccgagcggcatcggcgggctgcttcccagccagtga

SEQ ID NO: 335518 - DNA, 1212 bp, Pseudomonas aeruginosa
atgactcaggactgggatgccgggcgtctcgacagcgacctggaaggcgcggccttcgacaccctggcggttcgcgccgggcaacggcggacgccggagggcgagcacggcgaggcgctgttcaccacttccagctacgtcttccgcaccgccgccgacgcggccgcgcggttcgccggcgaagtgccgggcaacgtctattcgcgctacaccaaccccacggtacgcaccttcgaggagcgcatcgccgccctcgaaggagccgagcaggcggtggccacggcgtcgggcatgtcggcgatcctcgccctggtgatgagcctgtgcagctccggcgaccacgtgctggtctcgcgcagcgtgttcggctcgaccatcagcctgttcgacaagtacttcaagcgcttcggtatccaggtcgactatccgccgttgagcgatctcgcggcctgggaggcggcgtgcaagccgaataccaagctgttcttcgtcgagtcgccatccaacccgctggccgagctggtggatatcgccgcgctggccgagatcgcccacgccaagggtgcgctgctggcggtggacaactgcttctgcacgccggccctgcaacagccgctgaagctcggtgcggacgtggtgatccactccgcgaccaagtacatcgacggccagggccggggcatgggcggggtggtcgccggtcgcggcgagcagatgaaggaagtggtcggcttcctccgcaccgccggaccgaccctcagcccgttcaacgcctggctgttcctcaagggcctggaaaccctgcgtatccgcatgcaggcgcacagcgccagtgccctggccctggccgaatggctggagcgccagccgggcatcgagcgggtctactacgcgggcctgccgagccatcctcagcatgagttggcccggcgccagcagagcggcttcggcgcggtcgtcagcttcgacgtgaagggcgggcgcgatgccgcctggcgcttcatcgacgctacccggatggtctcgatcaccaccaacctgggcgacaccaagaccaccatcgcccacccggcgaccacctcccacggtcgactgtcccccgaggaccgcgcgcgcgccgggatcggcgacagcctgatccgggtcgcggtcggcctggaagacctcgacgacctcaaggccgacatggctcgggggctggccgcgctgtga

SEQ ID NO: 335519 - DNA, 1611 bp, Pseudomonas aeruginosa
atgagcaacaagaacaatctcagatacgcactcggcgccctcgccctctcggtttccgccgcatccctggcggcaccttcggaagcgcaacagttcaccgagttctggacgcccggcaaacccaacccgtcgatctgcaaatcgccgttgctggtcagcaccccgcttggcctgccgcgctgcctgcaagccagcaacgtggtcaagcgcctgcagaagctggaggacatcgccagtctcaacgacggcaaccgcgccgccgccacgccgggctaccaggcctccgtcgactacgtgaagcagaccctgcagaaagccggctacaaggtcagcgtgcagcccttcccgttcaccgcctactacccgaaaggcccgggtagcctgagcgccaccgtgccgcagccggtcacctacgaatgggagaaggacttcacctacctgtcgcagaccgaggcaggcgacgtcaccgccaaggtggtcccggtggacctgtccctcggcgccggcaacacctccaccagcggttgcgaggcggaagacttcgccaacttcccggccggctcgatcgcgctgatccagcgcggcacctgcaacttcgagcagaaggccgagaacgccgcggccgccggcgccgccggggtgatcatcttcaaccagggcaacaccgacgaccgcaagggcctggagaacgtcaccgtgggcgagtcctacgagggcggcatcccggtgatcttcgccacctacgacaacggcgtggcctggtcgcagaccccggacctgcagttgcacctggtggtcgacgtggtacgcaagaagaccgagacctacaacgtggtcgccgagacccgtcgcggcaacccgaacaacgtggtgatggtcggcgcgcacctcgactcggtgttcgaaggccccggtatcaacgacaacggttcgggcagcgccgcccaactggagatggccgtgctgctggccaaggcgctgccggtcaacaaggtgcgcttcgcctggtggggcgccgaggaagccggcctagtgggctcgacccactacgtgcagaacctcgccccggaagagaagaagaagatcaaggcctacctgaacttcgacatgatcggctcgccgaacttcggcaacttcatctatgacggcgacggttccgacttcggcctccagggtccgcccggctcggccgccatcgagcgcctgttcgaagcctacttccgcctgcgcggccagcaatcggaaggcaccgagatcgacttccgctccgactacgccgagttcttcaacagcggcatcgccttcggcggcctgttcaccggcgccgagggcctgaagaccgaagagcaggcgcagaagtacggcggcaccgccggcaaggcctacgacgagtgctaccacagcaagtgcgacggcatcgccaacatcaaccaggacgccctggagatccacagcgacgccatggccttcgtgaccagttggctgtcgctgtcgaccaaggtggtcgacgacgagatcgccgccgccggccagaaagcacaatcgcggtcgctgcagatgcagaagagcgccagccagatcgaacgctggggtcacgacttcatcaagtaa

SEQ ID NO: 335520 - DNA, 1152 bp, Pseudomonas aeruginosa
atgactctctatatggggcctaacaccgggctattgatcaacggcctgccgggagaagggcattacagcgatctgattcggatgtggcgatgggatgactttctgaggcagccggtcgtcaaggggcgcgtcgccacgctgccgactagcggccaggccgagggtgatacttacattttcaccggggccggggcgaaccagaaccgcctggcccgctggtgggcaacgggtgcgaccacggctatttgggagtacatgccacccaggctgggctggcgtgtccaggtcgcgaacgagacaaccccggcaggccaggtcaagacctacgagtattccggcacggcgtgggtcgagctggtgggcggtatgtcggacgcgccgagcgacggcagcaactacgcacgcaacaacggggcgtgggggaagttgggaaccgctgccggagcagacctcaacggcatgccgttcctcaatctgatacccgatagcgggcggtacgcaggcagtatcaacccgctaatcctgcgattcactgaggctttttccagtacgttcctgacgccatggaatggcgcgtcaatcgctgacggcggaaagtacatctacgacaacaccacaaacggcgggacggctggcaatctgaatcaacgtgtccaggacttgctggtggcgatggggcggtccagtggcagcttggcgcgctatggcgtggaattctataccgctgtgctgaccgctggccccaacgcaacgaccggctctacgggcgccgacggcacgacccgttatctccagatgacgaactcgtcgagggcgctcttcatcgccaacggctggtgtactgcggttctttggatacgcgcggaggccggatcgcttcacttcatgccggctacggccccgacgactgactacaagatatggctgaatggtgcgcctgtactgccggggcaggtgctgaccccggccgatggatggaagcacgtcagaatttccaaaaagagcgcgcagggctacgacaacggcttcccgttcctctatatgtcgctgggcgccagtgcagctatggcctgtccggcattcttcggcggcctggtcgatcccggcatccacgtcgcgcctattgcaaccgtcaactcacagagcgcatga

SEQ ID NO: 335521 - DNA, 285 bp, Pseudomonas aeruginosa
atgacgaaacgagttctattgaaaggcgagttcttcgcagagtgggccggctcgctggacgaggccgccgcactcgctggcgtcccggtcggcgacttggcgttccatcccgacgacctcctggccgaagtccaggagttacgccgccaggcctatcgcaccgagtccgacccgctgcgcctggaggccgagtttgacgccatagccgctggcaccgagccggatctggcggcatgggtcgcagccgtccaggcgatcaaggggcgctatccactacctgaatag

SEQ ID NO: 335522 - DNA, 288 bp, Pseudomonas aeruginosa
atgcccaacaatcaataccgcccgcccgaacgccacgagatcgccggcatccagtacatatcggaggcgttcaagtacaactggctgggtattcacatgtgtgatcgcaacagggcgatagccttactcctggagcgcgcctctcctcccctgctcagtccaatgttcgacctggacgtaggggcggtgctgcagcaagcggatagatacgcagagaccaaatgcgcgaaagacagggacgttctccgcgagctggccatcgacctcgtcgcgaaagccgccggatga

SEQ ID NO: 335523 - DNA, 615 bp, Pseudomonas aeruginosa
atggttgattttgcatggagctacctggcccgtctgctgaccaaaccgcgcatcgcagacgccctcatccggttcgcaaagcgcacgccgtacctgcacctgcggagtcctgacggctcggtgtacatggagcgctactgggtcttcaacccctacgaccgcgtcaccaatgtgccgcgctgggcaccgctgatcccgttctcgatccgcgtgcaccacattcgccgggaagacctcgaccggcaccttcatgaccatccctgggacgcccgcacgatcatcctgaagggctggtacatcgagaaacgcctggtcgacgagagcaatccgctctaccaggcggccatcgctcggatcccggaggcccttggcggctgtgaaatcggggcaatcgaagtcacggaggctatctggcgccgccccggtgacaccgcagccctgaagactggtcagtaccactcgatctgtgaggtgagcgatggcggcgtctacaccctgttcatttcctggaaatggcgcgagacctggggcttcctcgtcgatggggtcaaagttccctggcgggagtacctcggtctgcaaccagggggagacctgcaggagcccaagccatga

SEQ ID NO: 335524 - DNA, 732 bp, Pseudomonas aeruginosa
atggctacccgagcattccctagcattttcaagaaggtcaaggacatcagtgtctacgtctactccgactacacggtcggcgtgccggagggcaaccaggagcggcgcgccgtctacctggaccctcggggcgacacctgcctcgtgatcgcgatccccgactacgtggtcgccctgatgggggtctggatcggcgaccgcatcgacgaccgcatccgggtcgagaaagacccgaaaaccgggacgcactacatctccagcacgcgcggcatcgagggcatcgaagcgcagttcaagatcatcatgaacgcctaccgtgaagcggcactgaccgccatagaagagaaggtgatcgtgatcaaggccgcctacgccgccaaagacgaaaacgggcgccgcgtcgacaagctgccgtcgttctccgatgtctacgaaggcgcactggtcggcttcaatttcgacatccgctggcggatcaacggcaagctctacgctcgcgagtacaccgggcgcctctaccaatgcggctacggcgacgacatgacccgcgactgcaccgtgatcccctggagcgaagcggccgaggctacctgcagtcgcttttaccagggcctgctcgccactggtcagcggctgcacgacttcctcgtgcaggacaccgacgtactggccaagcagcttgaaaccggaggcaatctgctgctggcccatgtggaggagacaaaagcgtga

SEQ ID NO: 335525 - DNA, 375 bp, Pseudomonas aeruginosa
atgaaactcagtaaaacgatgcggaccgatagcggccactggctacgcagatctgcgaacggttgggagttcctgagcgaaggggtcgggtacgaagctgatacctggtgtccggctgccggcgccctggggccgttcagtggtagtggcgtcgacactctgttggacgagcttgccgacgggcaagaacggcaagaacagctcgcagtggcgctgaagggcctgcaaaaagtcatcggcatgctgatgcccggagtgtcgaaaattcccatccaggactaccagttactgaacgaagctcctatcgcagctgcgcaggctctcgccgcctatgagaaagccatcaccgcgccccgcaccagagggggtaactaa

SEQ ID NO: 335526 - DNA, 279 bp, Pseudomonas aeruginosa
atggcatacggcttcaaagtggaatccaggcacgccgctaaagtcgcgtgccgccttattccaagtgcgtctgcgattggcacctgcgccagcaggcgcgcgctcgatgaagcggtggaagggatcgcggacaaatacgaaattggcggcgacttcacttcgaccggtgtcttctacaccgtcgagttcgaaagcgacaccagcactgaacttgtcagcaaagccgcgcgtgacttcacccgctggctggcaggacgtaaggatttttgcgaagcataa

SEQ ID NO: 335527 - DNA, 654 bp, Pseudomonas aeruginosa
atggctaagcaagttcgcagcactaacgccggtcattcgattagcgcttgggtgatcctgaacagcaaaggcgagcacgtcgccaccgtgaacgcgcattattcgaacggcggccgcgtgtcggttgacgtgtggaacatcggcgacaaggcgacccgccgtagctacgaatccgcaatgctgcgcctagcgccggaagcccgcgccgctgcgatggcgaaggccgagcgggacgccctgaaaaaacgcgattggctcaagcctgaagacgcggccggttatgccgcctatgacctgttcgggctccagcagagcagcgccgggggctacggttacgataagttggccgccgcgctgtccggtctgattatcgacggccacacgatagccgaccattgcggccgcgtgccggaaaaggaaaaggcccgcgccgccctgttcgcccagtattgcaagttccacgactattccggcgaacgcacccgcgccgctgaaaacggctgggaccgcacccactgggcgaagcgtgccagcaaaatcggcgccagcttcgccaattgggatagcgacaagggtcggtttacgtcgctgcacttcgacggcggtttgcgccgcctggaaacgctcggttaccgcgttatccaggccatctaa

SEQ ID NO: 335528 - DNA, 399 bp, Pseudomonas aeruginosa
atggccgctcaaaccgacattcgcgagacccagctagcgcaattcacggccggctatatcgaggccctttactggtctagcacggaagtggacgaagacggcgaaacgatcaatatcgaccagttcgaagccagcacccaagcgggcgaccactgccgcgcggcctgccgcgaattcttcgaagcgaattacgcggacatcgtggcggccacggaacagcagcgcggctattcgttcgaacatgccggccatgacttcgccttgacccgcaaccgccacggcgccgggtactgggaccggggcctaaaagatacgggccgccggttgaccgaggccgcgcacaatgccggcgactgctggccgtgcatcggcgacgatgacctgatttacatttcctga

SEQ ID NO: 335529 - DNA, 312 bp, Pseudomonas aeruginosa
atgcctatccgtatttcccagacatacgaaatagtcacgcccgaaagtgccgaagtcggcgacgtggaagaaagcggctttgacttcgaaaacgcggagttcgggcttcgcgaactggtcgactacatcgaaagcaacgggtttaccgagcctagctgttcgcaaggctgcccggattgggtcactcaagcagatggcgacttggactatcagaccggcgccgaagaacgcaaatccttgcatcctggccgtgacgacaggtctcgccgctactgggaaaaggcgctacgtgccgccggggtgatccaatga

SEQ ID NO: 335530 - DNA, 258 bp, Pseudomonas aeruginosa
gtgcaggttcaatttctgttgacggtctaccggccggagccgaacgaaaacgcggcagaggtgcgcaaggcgctagcgaaagccggcattgccgccgctgttgagcgggtcgacttcgacgccctgttgagtgcagcgcaagcggcggccgcgtcgctacgctggcaccgcgagcaaggtcactttgccggaatggatggcgtttatctggagaatctggaagcggcgataaaaggcgccgaagggggcgccccgtga

SEQ ID NO: 335531 - DNA, 4182 bp, Pseudomonas aeruginosa
atggacaaactctggaagcagatcacccaatccgattacacatgggagcgggaagcgctggagtttgcaaagcagctgctgcctgaccacgatccatatcgtgcatgggccaacttcgagttcatcgctcaggatggctccatcaatgaggttgatctcatggtactgacgcccaagggcatgtacctggttgagattaaatcccaccccggcgtgattcggggtgatgcagccaactgggtttgggaaaggcctttgcccaaaggtgggcagaagatcttcgacaatccccgcctgcttgctcggcgcaaagcgcaaaagctagcgtctctgctgaagctgcagccttcatttcatcgaagcaaggaaacggtgccttttattgatgccttggtgtttctctctgcagaggacctggttatcaagctggaaggtaatgcgcgccaaggtgttgtgaatcggcaagagctgctccgagaaatcaccctaatcgatgagaactggaggcatcggcagattactgcgtacgccgccaaagtcatctcgcgcgcggtagaagaggcaggcattaaagagtccgtgcgcatgcgtcgtgtgggcagctatgagcttcagagcctgctcgacgagtccgatacctatcaggattggctggcattgcacccggatcttgggctgcagcgcaaggttcgcatttatctgacccagggtaagccactggaagaggtctctcggctcgaaaaagcggccaagcttgagttccgcctgcttgagggtattgagcatccaggaattctgcgagcgcacgaatttcagcagcatgacagcggccctgcactggtctatgagcatgatcccaaggcatttcgtcttgaccatcttctcatgcatctgggtaaggatcggcgcctggataccgttcaggccacctacctgcttcgtctcattgccgaggcagttcagtacgcgcatgggcaaaagctttatcaccgtggcctgagtcctcagtgcatctgggtcaagcctctgggcgatgaaaagtacagtgtcaaaatcagcaactgggccactgccgagcggatattcgagagtgagtcgcgcaacatcagcgcgctaactcgcctgagcaaccttgtgcatgaagaggccgggccttatgtcgccctggaagcgcacactggtgctgcagatggagtgcacttggatgtgttctccctgggtgcgatcgcctatcacttatttaccggcaagaagcccgcgcaaaccgacatcgagttactggacaagctgcgccgaggcagtggcctgcaggttactgatgagatcaacggtgcaagcgaggctatgcagtacctggtgcagtacgccacgcaccctgatgtcggcagccggttggaatcggtcagtgagttcatcaaacggctggatgaccttgaagacgaggttagtcagccgaacacgcttcgaactaacccaactgaagcccgcaaaggggacctcctgccgggaggcttccaggttattcagccgcttggcaaaggtgcgtgctctgtcgtattcctggtcgattaccaggggcagtctcgcgttctgaagatcgcttcgacacctgaccacaatagccgtcttacgaaagagggcgaggtgctggccaggttgcgtcaccaggccattgttccttactacaaaaccctagatatcgttggccataccgctctgctactcgactacgcgaccgagggcaccctggctcagcgcctccgccatgtcggcgctgtgcagctggagttgcttgagcgcttcggtgacgacttgctcagtgcggttgtgcatctagaagaccaggcgttggtgcatcgtgatatcaagccagagaacatcggcttggtgatgcaaggcagcgttcttcacctcatgctttttgacttctccctgtccagcgtcggtgctgacaatatcagtgccggtactctggcctacatggatccgttcatccgtgatcctggccgccgtcgttgggacgaccatgccgagcgattctctgtcgcgctgaccctttacgagatggccgcaggggctttgcccgggtggacgtcttctgaagggctgccacatcaactcgaaggtgagctggaggtcgaccgaaccgtcttcgacccgagcattcgcgaccgcatggttgagttcttcaaacgggccttggttcgtgatgtgcgcaagcgctttgccagtgccggcgagatgctgcgtgagtggcgcaagacgttccatgacgcgcgcagtgagtcgttgcacgcgactcagcagccgttggagcggacttgtcccatcagcgaggctcagttggatacccagataggcctgttggctctgagcccgcaagctctggataccctcagtcgccggaatatcaacagcgttgcagatctgatcaagctgaatcgctcccgtgttcgcgtttggacgggagtgggggtgaagacccgtaatgagttgtccgatgtcatcggtcagcttcaggcgcgtcttctggatggccagcaggttcagcaattggatagcggtgacaccagcgttgtgagtgtcgaccgtctgtttcagcaggtcctgccgaagtccactgatcagactcggttgagctttcttaacgaatacctgggtcgattggacgaggatgcgccaaagggctctcacaacgttcattggcctacgccggcagccatcagcggccacctcggcattgagactctgctggtgcgcgaactggtcgacaaggttctgacccagtggggcaagaccaaagcgattacggacttgagagaggacattgttggcctgttggacgacaacggcggggtgatgacagcggtcgaagtggctgacgcaatcctgcttcgtcgcggctcggtacaagacagcccactgcgtgagcgctgggcctatgccgttgtgcgggcagccgtagaaacggaattgagtaagcaggagccacgttggcttttgcgtcgctccggtaaccgtttcctgatcgccgataatcgtcaggggcgaggggaggagctggccgattacgcttgcgacctgggcagcctggcagatgagtgtgctcgccagctgccactgcttgctcctgttcgtacgctggagaagatccgtgctgtgccagcgccggagtcatttgccgggctgagtaaccaccgccttctgcgcttggctgcagccgcatccgagagtgcagccctatccagccgtgtggagttctatccgcgagggatgtccgccaagcttgctttggagttggcccaaggcgcgctattgggcagcaaggcgcttaccgtcaaagatattcagacacgtgtagccggccgctatcccgcagcgcaggagctaccaggccgtcctgagctggatgagctggtgcgctcgctggatatcggtttccaatggaatggcagctttgagtttgccaacggcgataggggcggttactgcctgccaagcgcagggatgaccagcttcgcatcagctgggtctactcactacagccagactcaacaaggcgaagacgacaccaccacactcaagtcagttaaagaactgggcttgatgctggagaaggcagtgactgcctcccacttcctcgcgctaaccgtcaggccacgtcagtggtggcaagcgcaggaaaaactctgccgagactatccgtttaagcgcatcagctttgatgagctactacttcgccatgtacaggctgtatgcgccagcatgcctaaagcgcctgactggcaggtggtgctcaaagcagacgcctgcgagcacagttctcgtgattggcagaacctacagcgtctggtccagcgtgtattaccgggcatggctgaggagattcttcaggccggtcaaccagtgcttctgacggagccagggttgctggcgcgctatgagctggtgacaacatggctgaatgacctgcgccaacagttgatgaacgttagcggtcgtagtggcattgcagtgcctgggttggttctgctgatagcagtggatgcgcagcgctccgcggccatgatcgatgacgtattggttcctacaggcgccggtagcaaagagtttgcccatattcccagtagctggctggatgatgcccagctactacctaaggcagttaaaaccactgcctaa

SEQ ID NO: 335532 - DNA, 3693 bp, Pseudomonas aeruginosa
atgcacaaggatttacctgtgattaatcgtgccgatcttctgaaaaacctgcagtccctgttaccgcatattgagaaggacatcctcgcctacagcgagtccaacgcggagctcagtgagcacttgcagagccaatatcgcgcggcggttgaggctgaacgcaccgccgaacacttcgtttcctggcgggaagcgcaaataacccaggccgcagtggcatgggttctgacctgtgtgttcgtgcgttttttggaggacaatggcttactgactgagccggtgttggctgggccggtgcaggatgcgcaagggcgaaatgccttgcagcaggcgaaagagcgtatggtggcttacttcaacgagaatcccacctttgaagaacgtcattacctgcttgatctgttcgcggagcttgaaaaatatccggtgatcgccgagctcttggatcatcgccataaccccctctggcagattccagtttcggctgatggcgccaaacgtctgatcgacttcttccagaagatcgatgcagacagcggaaagatcttgcacgatttttccgaccctcagtgggatacccgttttctgggggatctataccaagacctttctgagtccgtgcgtaagcgctacgcactattgcaaaccccagagttcgtcgagaactttattcttgattacacgctggaaccggcaattcagactttcggtctaccggggctgcgtctgatcgatccaacctgtggttcggggcactttctgctgacgacattcgagcgagtgttcaatcaatggttgaagcgcgagcccggtactaatacccgtgagctggcacagcgtgcgctcaacgtagtgcatggcaccgacatcaacccttatgccattgccatttgccgattccgtcttcttatcgccgccatgaaggctgcgggtagcatcaggattaaagatgcgcctagctttcatttcaatctggcttgtggcgattcgcttttgcatggtcgtcgatttgaatggcaaggacagggcaatcagcaagatttattggatgagaaaagccacgtatacgaagtggaagatgccgataagctgagtactcttcttgggcaacgctatcacgtggtagtgggtaacccgccctacattactgttaaagacaaagcgctgaaccaaatttatcgtaataaatacccgacctgtcaccgacagtattcgctgggtgtcccctttgccgagcgtttttttgacttaacacttttgccagaaggcaatcagtcggccggttttatgggcatgatcactgccaacagttttatgaaacgcgagtttggtaaaaagctgattgaagactatttgccgcgcaaagacctaactcatgtggttgatacctctggggcctttattcctggtcatagtacgcctaccatcattctctttgcccgtaatcaggtgccgaaatccgatcagattcaggtcgtcttgggtattcgcggcgagccaggtgtgccggaagttgctgcgcaaggaaaagtttggtcctcaattgtgcagttgctgcctaaacagaatgcagaaagtgactatgtcacagttacgttacaggatcgttcttcgtacgcgcaacacccatggagtatcggtggcggtggtgcttctgagttgaaagatcagcttgaatcgtttgcaaagagtaatcttaagaaatttattaaggaaattggtaggtcgacccacactggcgaagactcagtatttttcctgcccaaaaactctgtgaaagccttgggctttgatggggatactgttccgctttgtattggtgaaaatattcgcaactgggcagttgagagtgatacttataccctcatgccttacgataaagagaccgcagaggttcttgatccgttgccggagtcgcaagctaggcattattggagatacagggtagtacttaaaaatcgtagggactttggtcagcttattgaggatagagggcttctttggtatgagcattcgatgttctttccaaagagatttctctctccactctctattacgtttgcctttgttgctacacataaccacttcgtgctggatcgtggtggcaaagtgtttaagcaaactgcgcccgttataaagctatctgcgtctgcaacggaagcagagcattttgcattgctcggattgttaaacagctccaccgcatgtttctggggtaggcagactttttttggtcgtggcggattttcggatggaaaatggcaagagcgggtcgaatgggatggcactaagctaaaaagctttcctgtggctggagactcagtgggtaaggctatgcggcttgctcagaagctggatgagctggcactagaattaaagttgcaccagccaagtaatgtattagagcaggttgaagcggacgtgcatcaggctcttaaagatgcagaaataatggatgtggaattgcaagggcgaatgattgccttgcaggaagagcttgattggtatgtgtatggtttgtacggattaattgatgttgatttgtgctgtctcggtcagttgcctgtgattgagttagggcagcgtgctttcgagattttattggctcgtgaattagagcaaggtgagtccgataccatttggtttgagcatcatggaagtcagccaatcactgaagtgccgcgccattggcctgatgattatcaagagttggttcagaaacgtttggatgaaattgaacgaaatccatggattaagcttattgataacaaagatcataagcgccgctggactcgcgatacttgggtggtgcgcgtaaaggcggctgcaagagaatggttattggatcaaattgatgcaatggttcagcagccgcagttgtttacgtgtgcgcagttggccgacaagctacgcactaatctcaaggtgcagcaagttgcaaaaatttatgccggcagcaatatgttggatttgcagttgctggtaagtgacttggtggctggtgaacaggtgccgattatggctgccgcacgcttaaagcccgaagctatgagtaaatggtttgcttggcaagaaacttggagtaaacaacgccaggaagatgccatttatgttaagtacgcggtcgataagcccctgtcagaaactgatgcgttaaacccggataagcaggctgcttatgtcttggcaaagcagagtgccgaaattgaaaagcagcaggtagtgggcactatcgccttaccgccggcttacaagcagcctgacttccgtcaggcaaactattggccgctgcgcggcaaactggatgtgcctaaagagcgcttcttctcactgcctggttgtgaaaaaggcggtgatagcacactggtcataggctgggccggcttgaaccatctgcaacgagctcaggctattgccgcttggtatctggatcgtaaagaaggcgagggctgggaagctgagcgactgatgcccatgctggtggcgctggatgagttgatcccctggttgaagcaatggcacaacgaagtggatccagagttcggcgagcgcatgggggattactacgaggctttcctgctcgaagaactgcgaaatctggaaattacgcgggtcgaccttttgagctggcagccggcagctgtagctggaaagcgtggcggtcgtaaaaagaaagtggccgagcagaactga

SEQ ID NO: 335533 - DNA, 3678 bp, Pseudomonas aeruginosa
atgacattgattaaagagctgatcgagatcccagaaaaggttcaacggggtgatttcgttcttaacttatccagtggtttggcggatgcagccatcagccaaacgctggagcagtatgtggttacgccgcagctgcagcgctcgttcgacgatgccttgagctttatcaagagcaccgtggtgggcaaccagaaccgtcagaagggcgcttaccttcacggcagcttcggtagcggtaagtcgcactttatggcggttctgcacctgctgttgcagggcaactcccaagcccgggcgatcaacgagctggcgcctgctgtagccaagcatgatgagtggctgcagcaaaccaatatcctgctggtgccttaccacatgatcggtgcagccagtattgaggctggtgtgttgggtggctacgcgcggcatatcaagcagctgcaccccgatgcaccggtccccggcttctacatgagtgatcggttgttccgtgatgctcggcaactgcgcagcactatgggtgatgcgaatttcttcgccactctgaacaacggcgcagcagcggccgaggatgatggctggggtgatctgtcgactggttgggatgcagccagcttcgatgcagtgctgaatgaccaagctggggctgacgataaggctcgcctggtcggtgatttgatcggcaccttctacagctccatggcggatatggctaacagcgagtacggcggctacgtcgatttcgatgaaggcctgcgcatcatgactgagcatgccaaagcgctcggatacgacgcgatcatcctgttcctcgatgagctgatcctctggctggctagccacctctctgaccagcgctttatcgctaacaacattcagaaagtggtgaagctggttgaagccagcgagcagcgtgcgctgcctatggccagctttatcgctcgccagcgtgatctgcgtgagttcgtgggggatcagtacaacggtgcggaacagcaagcgctcagcgactcgctcaagtactgggatggtcgtttccacaccatcaccctggaagaccgtaacttgccagtcattgctgagcgtcgcttgctcaagccgatcaatgcggctgccaaggcggaaatcgacaatgcttttgcggccatggatgccggtttgcgcagcgaggtgcaggaaatcctgctgaccaaccagggtgatcgcgagatgttccgctcgctgtatcccttcagtcctgctctggtgcaggcgctggtggcgctttcttccgctcttcagcgcgagcgtactgcgctcaaggtcatgctgatgctgttggtcgatcagcgcgaaaccctggagttaggtggatgcattccggtcggtgacctgtacgatgtgattgcttctgaggctgagccgttctcagaagtgatgcgtatgcatttcgacaatgctcgccatcttttcgagcgtaagctggtaccgctactcgaggaagaacacaacctcaagctggatcagctgctggagctgcctgcgaacgatccaggccgtcgcgcctttaccaacgacatgcgcctgatcaaaaccttgttgctgtcggcgctggttccggaggtggagtgctttaagcagctcaccgccaacaagctggctgcgctgaaccacggcaccatcaaatcaccgatcccagggcgtgaagctcagacggttttgcagaagtgccgcaaatgggcggggcgtgttggtgagatcaagatcagtgatgactccaacccggttatcgcgattcagctttcaggcgtggataccgagagcattcttgagcaggcgaaaatccatgacaacgatggcgcacgtcgcaagctgaccaaggatttgctgttcgaagccttcggtgttcaggatgacaatcagctgtttattgagcatccatttgcctggcgcggcactcgtcgtaccgttgaggtgatgtttcagaacatccgcgagatttccgacttcaccacctttgaggcgcgtggcgatgattggaaggtgctggtcgactttccgtttgaccagggcaaccactctcccgcgagcgatagggcacgcatccaggagtacgaagccactggtaatgcgacacagaccctttgctggttgccgtatttcttcagccagtcggcccagcgcgaactgggaaccttggtgactctagaacacgtactgaaaagcgatgatcgcttcacttccttcagtaagcatctgagtcctattgagagggggcaggcacgtacgcttctcgataaccagcgcagccagttgcgtcagcgtattcgtgactatctgatgggcgcattcggtgccgcgcagccactgtcgggttcgctggatgattcggtgcaactggaaagccaggtttattcgctggagcctggatttactccgcagctgccggtgggcagtaatctgcgtgctgccttcgagcacctgcttaaccaggcactgagcttccagtatccagaccaccctgagtttgatggtgaggtcaggctggcagacttgggtaaggtgatggagcagctgcgtcgggctgtgcatgccagcaatggccgcatcgatatcgacacgccgttgcgctcgatcatgcgttcgattgcacagccactgaagcttggcgagatgcacgagcggcatttcatcttcaaggatgattggccgaagcacatgactcgtgagctggccaaggatgaatacgccggagatccagtgacggtgaagcgcctacgttcggcgattgatcagccgacacccaaagggctgccggacattgtgcagaacttgctgatcatggtgtttgccgagcatggccaatacgccttctcgttgcatggtcaggactatgagccgacgctcaaggacatgccggataacctgttactgaccaagcaggatttggctgagccaaacatctggaagttgggtgtagataatgcttccgccatcttcggcctgacgcccaataagctgcgcaccgccaaccatcagaatgcactggaaaaagatgtgcaggatgaggttaagcgccaacttgggcattgcgaggaacttgttactgagctcagaggtgcattgagccgggttaatcaggggacgcaatgcaatcgtctgcgcaatgccgagtatgcagtgagcctgctgcagaccttgcagggtaagcagggtgcggatctgatcgcggcgctggcagatattcagccgcccaccaacgcgatggctctcgccaagagtatcgtcagcgctgccagcgtgacccaggcaatccaggacaataactggcaactgctggaaactgtttggaagtcaggggcagctgaggcgttgcagattaagcagcgtgtcagtgcagcgttgaccgcggatgaactggtgacggcgctggcccaagcgcttcgacaggctcaggcagatgctacatcgcagttgacgcgcaacgtcgttccgccgaccagtccggatgtgccgcctgccgataccagtgtcaacaaaggtgccggtggcagaaaggtgctggagcaggttcagcagagtggtttgaccagcaagcaggcgcgcaacttgttcgcagagattgagagcaaattgcaggacggctatgtgctggatgtgagctacagcattgtgcgcatggatggggtagaggattga

SEQ ID NO: 335534 - DNA, 2790 bp, Pseudomonas aeruginosa
atgtcgatcatgcaggcgagcgcgacattgccgatgccggtggtgacccaactgcaggcagtttttcagcgtgacgctgaggctgactgtgtggcattagtgtggccaaaccctttatcggctttagctgtagaacaagttgttgaagggcgaaaagtcagggccatttactgcgtctctgagttggcgatgcgcgaggccttggtcaagcatcaacaagatcgaaaggagacctcagagcgtcttgtgctgctgtcgggctttgccgagacggatctggctatggacgtgctggccagaatttggcgtaacgagcctcagcggataagcccttggaagaccctgcagcaactgattcgtgtaagggatattgatcctcgcctaactcgcaagcatggccgttgggtagctgaggcgatgctcaatggtgttgaacactatcagggcaaaatcagcttcggtgagattctggatgaggaaacagcctggcgtgctatcgctatggctcatcttaactaccaagaagccgcgttggatctgcagtcggtattgagttggagtaccaagggtgatgtcagtgcgctgattatggctctgccaggcgatattcgagacaaccttggggattggttggcccgcggcctgcccgacactcatgaggtggtatcgacgctgcttctgaatgatcaggggagtgatctgctcgccgtcgccttggcgtgctccgtgctgttttcctcggacattgaacgtctgcaagcgcttgatttaacccagctgcatatcagtcgtgggattttccgtgagcgctttttgggtgggaagaagatcgaattccgagtcctgcagccgctgggcgaggtcgcagttactctggtcaggcagtggataggtgctctaggtttccctagctatgcacgcttcttgtcgaaagcagagcagattcttgcgagcttagatatgcaggctgccgccgagcactcggcacttttgccttgtggtttgcacgcgcgctttagtgcttttgcttcagccctggatgtagctctggacggcggcgactctatggctgcggagtcggctttgcagcagatagaggggcatcgtctggctggcttggatcgctacagcgagactgttgctcgggccaatatggccatgcgccttctacgttggctcaagcaggcgcctagcctggacggaactgcagttagcctgatcggcgattacatcgagcagggtggtttttgtgattgggcacgaaccgaaatttgggcgggagatgctgaggagtctctgagtacggtgtaccagaagctctcgcagcacgttgtgcgttacagggaacggcaaaaccaggctttcgggcagcaactggcaagcatcgctcgcggtgatcatctgcctgctcgattcgttcctgtcgagcgcgccctggatgatctggttgcaccattggccgagcaggggcaagtgcttttgcttgtgctggatgggatgagcgaagccgtttaccggcagttaagtgcagacctcacccgtaatcattggttggagctacagcccgttggcgcgcagggcgatgcatgtctggttgcagccttgcccacggtgactcaggtcagccgttgctcgctgctatcgggggctctgtgtgagggcaatgccaacgacgagaagaaggctttcagtagccaccctcagctaaaaaagctggcctccaccaagtttccaccgcaagtgttccataagcaggatttgtcccagtctggatctggcagtttgcatagcaacgttcgggggataattgcgggtacagagcaccgagttctggcagtggtgatcaacgccatcgatgatcagctgtccagtagctcgcaagttaaggtcgactggtcctttgaaaccgtggccttactccggcatgtgatggaggctgctcgcgaggctggccgtgtggtgatcattaccagtgatcacggtcacgtgctggatcatgattcggtttaccagcagtcagccgacgaaaacggcgagcgctatcacccggttgctcccggcataacgccctctgagctggaagtccagttgtcaggggaacgtgtcgtgacggccaataagcatgtgatcctcccttggtcagagcgtctgcgttataccaaaagtaggagccatggctaccacggtggtggttcgctccaggaggttgtgatcccgcttggggtctatatcaatgccgccacgcggcaaagggtagagggttggcgtgaggtgcctcgacgactgccagcctggtggtattcgacaaaagccattgaggcagaaatgccgagcgcggttgatgagcccaccgtatcagtcgaagcacccaccaagaaagcagctggcaagaagcaggctgtggctgaggttgtcgaggacatgttcggctttgcatcgccagcgaaagccttgagcaaaagcgctccggtggtcgctacaagcgattgggttgctgagttgctcagttcgccggtctatggccaagttcgcgatagagcaggccgcacagcaattagcgatgaacaaatgcagacgctgctgaggctgatggaaaagcatcgctggcaggtgatggaggcggtgctttgttccgagttgctgatcccgaaactgcggattcgtgggtttctcgcgggagcacagaaactgctcaatgtggatggctatccgatcctttcagtcgagcgtgattcccagacagtgcgtttgaacgttgcagatctgaagaagcagtttgaaattcaataa

SEQ ID NO: 335535 - DNA, 1320 bp, Pseudomonas aeruginosa
atgtcgattagccaacaacgtcgtcaggatattctggacgctctgcggcgtggaactgtgccgcagtatggtttagatgccttagctgttggcttgttgcccttcgagcgcgcctttgatgaagagctggaaaaggtcagtcgaggcggggcggtattcaaggctattcgtggcgagtacggcagcggtaaaacctttgcgtcacgttggctccgtgaaaaagcacaccgactcggctttgcctgcgccgaggtacaaatttccgagactgagacgccgctgcatcgcctggagacggtctatcggcgtttgatggagcgtttaacgacgccagatatgccctcgggcgcttttcagaatatcgtcgaagcctggttctacacccttgaagaggatgtactggcccagcatgacatcgatccgaacgactccgaagcgttgatcgatgccactgatttactgatggaaaagcgcttgggcgaagtggtgcgctcagcacctgcatttgccctaactctacgtgcctaccggagagctctcctagaaggccaggaagagatcgccaacgggcttttggcctggatggcaggtcagccgaacatttctgctgcggttaagcgctatgcaatgatcaagggcgacatcgatcatttcggcgcgttgagcttcctgcaaggtgttttaaccatactcaaggactcagggcatcctggtctgctgctggtgctcgacgaggttgaaacactccagcgtatgcgcggagatgttcgcgacaagagcctgaacgcactgcgtcagttgatggatgaggtggactctgggcgattccctggcctttatctggttatcacaggtactccagccttctacgatggccctatgggcgtacagcggctgtctcctctagctcagcgtctggcagtcgacttcaccactgatgctcggttcgataatcctcgtgccgtgcaaattcgtctccgtggtttcagccaggagtctctggaggaggtcggtcgcaaggtgcgtaacctgtatgccgataacagcgctacggctgaccgcattctgcgactggcagacgatgattacatcgctgagctggccaaggcggtgaccggtaagctgggcggcaaagtcgggattgcaccgcggatcttcctgaaaaaactggtgggtgaggtcctggatcgtattgaccagttcgaagacttcaatccgcgacagcactacgcattgaccatttcagataccgagctgacatcggtcgagcgcgctaccagtgcggcaagctcggtagatgatatcgagctcgatctttga

SEQ ID NO: 335536 - DNA, 2112 bp, Pseudomonas aeruginosa
atgagtgagttcgacaagctccacccagccttgcagcaccatatcgtcaactctctaggttggaacggtttgcggcctttgcaagaggccaccattcagcccgttttggatggtgagcacgcgattctgctggcgccaacggctggcggaaaaaccgaagcggcaagctttccggtgttttcacgcatgcttagtgagagctgggaaggcctttctgttctctacatctgcccgatcaaggcgctgctcaataaccttgagcagcgtttgagttattacggacatcttctggggcgcagcgtcgccctatggcatggcgatatcagtgccgcgcgtaaggccaagattgtggcctcgccaccggacattctgctgacaacacctgagtcgttggaggtcatgcttgtctccaacaaggttgatcatcagcagctttttgccaacgtgcggacagtgattattgatgaggtgcatgcctttgccggtgatgaccgtggctggcacttgctgtctgtccttgaacgaatcagcgttctggctggtcgggagatccagcgcttagggctctcagcaaccgtaggtaatcctgacacgctctgcgattggcttgccggtagctgtaatgcccgaagaagcgtgatcaaccctcctgcagagaacaatgtgattcctgacgtccaggtggattgggtcggatcgctgaaaaacgcagcagttgtcatttcaagattgcacaaaggcgagaagcgcctcgtcttcgtggatagtcgatccaaggttgaggagctcgctgttgagttacggtgccttgatgttgccacctacatctcccacagttccttgagcctggaggagcggagagctgctgaagaagcgttctcccagggtaatgactgcgtcatcgtttctacctcgacgttggagttgggtatcgatgtgggcgaccttgatcgagtgatccagatcgatgccccgtacacggttgcttcgttcctgcaacgcattggccgaactggccgacgcgcgggtagctctcgaaactgtctgtttctggctaccaaggaagatgcgtttcttcgtgctttggcgttgttacagctgtggcggcaagggtatgtcgaaccgatcgttccccccgcgaggccaatgcacatctatgcccagcaaaccatggcattggcgcttcagcaaaaaggcatcatcgctgccgacgtcgatcagtgggtggggcgcatgccgggttttgctggagtcacgaccgatgaccgggctggtgttatcagctacatgcttggggccggcatattgcactctgatgaggggctcattgggattggcaaggccggagagagggcgtttggtgagaagaacttcatggagctcttttcggtgttcacgacgccccccatggtcaaggttttttggggtaagcaggagctgggtgaggttcatcaactaaccttcgctgtccgtgataatggcccggcgctgcttactcttggtggacgcagttggcaaacgacctatatcgactggccgcgtaaaaaggcctttgttgagccttctgaggtgcgcggtaaatcgcagtgggttagtgatgcgcagccgctgagatacgagctttgtcgtgcgatagccgatgcacttgtttctgatctcgtgcctgaggggctttcatccagggctcaagggctgcttgccgatctacgtgatcagtacggatggatggaatcgggtaaaagcactctgatctttgatgccgatggcaatgctacttggtggaactttgcagggaaactgctgaattcggccatgaaggatctgctgactgatgaggcggataagctcatcgcggacaatgagtgcatgacttttcggcacgtctattcagccgaggctttggtaagcgctattcgagagattcttgcaagagacgcgcataatttggcggtactgctggatgaagcctttgtacaagagctgaaatttgctgagtgcttaagtcagaaggaaattgatcgtgagctgggggagcgatactccgttgatagtgatttccagcagttcagccgagtctcgctcgcagttctgtgggtgaaggaagaagcctga

SEQ ID NO: 335537 - DNA, 1167 bp, Pseudomonas aeruginosa
gtgggaaggacattcgcattcgtcgatgagtcgggtaaccacgacctggatacgtcgaaatctggcagctccgctttcttcgttgtctgctcggttattgttgcagagaaagatctccaacaggcttatgagctcgccgaagccgtgagggcacgtaactttcaaactggcgagatcaaatccagcaacttgagagccaaagactcagatcgtcgcaagcgaatcctgctggagctagctgagcttcccctgaggctttatgttacggtcgtagacaaggctcgagtgcatcgcgatggcggccttcgcttcaaacaatcgttcattaagtatgtaaatggactgctgtatcaacgcctatttaaccactgtgatcacctgcaaatgacggtcgatgagcatggcgggcctgagtttcaggccagcttgaaggactatgtcgaagcgcgttatgtggacgatctttttggcgaagaagcatttcacactaaaagcagcaaggatgacgtactgatccaggttgctgatttttttgctggttctatcgcgcagatctacgaggggaaagcgtctgcagatgttgaaggggcctacaaatccatactgcgtgatatcacgcttggaattttggagtggcctcctaagtatcaatcgcttttgctgcctccaatggacgcgtctacctacgcagatcatcgagtgcatcaagcggcgatgaaacaagcagatagatttactgagaaggttggctttaacccagatgaggatcagcggcttcaactctgcatcttggattacttgcgctttcgaagtgagtttgtaagtaatgactacgtctcaaccgctgaaatcgctaatcatcttgctgggcggggatttaatggtctcagcgatcagaagatcaggtcgagcgggatcgcgaagttgcgagatgctgaagtcattatcgccagtgcacccaagggatacaaatttcctaaggcgcgcgctgatataaatgactttgtggagcttgccgcgagccaagtggtgccgctcctagatcgagtaaggaaggctagggaagtttatcttcttagtagtgtaggcgagtacgatattttggaagggaagagctttacgcagctcaaaaatttactgtcatcacttgatgattttggtggttga

SEQ ID NO: 335538 - DNA, 1356 bp, Pseudomonas aeruginosa
atgaaacaagggcagcgccgccctgagcttctggatgagtttgaccacattggtgataagtttttttcgctcggtcaagacgatgaatactacgagaacctcaacaaactagggccgaacattcgtgaccgagtgctacagggtttaggggatattgcattggactctgaccgatgcctcagggcgatggaggaaaaagtcaccggcatttcacttttgaggtcggtcacacgctcaacggtcgaaggacagtttcggcgtctagctaccgggggcgccaggcttaacgaattccgcttcgtctacaccacgccgagcgttcgcagctctcgcgtcgaccagaccacgttatcgtttgaggtcaagccagcctctatgcctccgacaaacattcatgtgttaatcggccgaaatggcgtgggcaagacacacatgctcaataacatgtccagagcagtgattgacaaggaaccggacgagagccaggtcggtatcttcgaatgtgtcactgacgacaaatcctcgtttgccaacctagtatccgtgaccttcagcgccttcgatccgttcgagcctttgcccaaccgcaaagatcgcttagacggattgccctgcgcttatgttgggttaaaacgctctggtaaaacgaaaaatggaagcccactatcacccaaatcccccgaaaaattatccgaagagtttggggcgagtgttttggtatgtagtcaaggtgcacgtctctccaggtggcgccgtgccttgcagatgcttgaaacggatccgattttccaatccaacgatgtcgcgtccttggcagatgacacgctggacgaaaaggagattaggttcgcggcccgcaagttgtttggaaagttgagctccggtcacaagatcgtgctgctcaccatcaccagattggtggaaacagtggaggagcgcacactcgttcttctggatgagccagaagctcaccttcatcccccactgctttcggcatttgtcaggtctctgtctgacctgctggtcaaccgcaatggtgtggccatcatcgctactcactcaccggtggttgttcaggaggtacccgcaagctgtgtctggaaaataagacgaagcggacgcgctgttgcagccgagagacccgacattgaaacgttcggggagaatgtgggaattctcactcgcgagattttcggtctagaggttaccgatgcaggttttcacaggctgttgagggagtcagtccaaagcagcgatacgttagagcaagctctggccaggtttgaaggtgagctgggtggcgaggctcgggcgctgatccgggcgctcgtgctgaaccgagggggcaaaccatga

SEQ ID NO: 335539 - DNA, 837 bp, Pseudomonas aeruginosa
atgatttctatagactgcccagagttggatgccggcgacgtttttaccacatgcatcagtcgggtacgagatgcggatttgaaagcgcgtttgaccgctatcaccggggacgtgaccgcagcttccaccgactatctcgataaagcgcgtaataaccgtcttcatgagatcgtccgccaggcaattattggtggcgtcaccacggcggaaatggaaaaggtatacacccagcggatggcgggtaagaaggggccgggtcgagcggcctacgacgagatctttaattcttctgccaaatgcttgctctgtacccagcgcaaggtcgatacacttgatcatcatctgcctaaggctcactaccccgttctggcggtaacccctgcgaacctcattccggcatgtgccagttgtaacaaggcgaagcttgctagcatccctaccactgcagatgaagcggcgctgcacccttattttgactgcattgaaaatgaacggtggctacatggggaagttgtccccggcaccccagctgtggttcggtttcgtgtcgagcctccagcgcaatggactcaacagctatgcaatcgtgtccaattgcatttcgacgcactaggcctgggcgacctgtactccgccgaagccgctgatgaacttctatcgatacgtcatcagttaaccggaattcatcaggtagaggggcgtcagggcgttagggctgagttggtggcccgctacgaaagtgctcgcgctgctcggctgaatgggtggcgtgcggtgaccttcgaaagcttcgctgcaagtgactggttttgtgagggcgggttcgccgccttgtaa

SEQ ID NO: 335540 - DNA, 309 bp, Pseudomonas aeruginosa
atgagcaagcaacgacgtacgttttccgccgagttcaaacgagaggccgcggcactggtgttggaccatggctacagccatatcgacgcctgccgttcgctgggggtggtggattcggccttgcgccgttgggtgaaacagctccagcaggagcgcgatggcgtgaccccgaagagcaaggcgctcacccccgaacagcagaagatccaggagctggaggctcggatcaaccggctggagcgggagaaagcgatcctaaaaaaggctaccgctctcttgatgtcggacgaactcgatcgtacgcgctga

SEQ ID NO: 335541 - DNA, 1179 bp, Pseudomonas aeruginosa
atgaaagtagcatcacaccttagggatctaagaattaatgccaccaacacactaatagaaatggagatcggcgaatacgtcggaattattagcggagtcttagaaaacaacatcttccagcgaaaaagagtgcgttcatccaagactgtttattcgctattgaaacacgaccttacacgccaatgcgttattccaccagtagttttagccctgactagcgcaattcgagactatgacgagaacacaccggatgacgaagcacgttttctaagcgaggtaattcaaaacgcagcaaacctagtgattctggatggtttacagcgcacatacactattcttgacctgctctctgaactacaagaaaagaacgacatagatgctatagaaagcgtccgccgatctaagatccgggtagagctgtatgtaggcttgaataggctcggaattctctaccgcatgctaaccctaaatactggacaaaccccaatgtctctacgtcagcagatcgagattctttatcttgactacatcgacacaggcgtagacggagtagaacttcttcgagaaactgaaaacaaagttgcctcaaggatcaatcagtacaatttcaaagatgtagtagaaggtttcaatgcctatttagacagggacgagcttccgatcgagaaggcagacatccttgaaaacatcaacagcttagaaaagctttcaaaagaaaaccaaggaacagaactattcgagaaatatctagaagccctacaccatcttgtcaccaagcttgatgaaatatgcggcgattgtgagctctccgatgaatatcttgaaaaaaacaattcaccatttgcaaaaaaacctgtacagctttttaaaaaaccacaagcaatgtcaggtttgggagcagcaattggtaaactaattgattttgaatcggtaagaagtgtcgatgaaatagtaagaataattgatacacttgagattgacgatgcggaagaatttctagaagaggcgaacaactccttagactggctgaagaacaatgccagtaaaattggtaatgcgcaacggacgtatttcaccttcctcttcagagatttattcaaccgagaatcggaaagctacaagaaccttacaaaagctgcaaaaacagctctaagaaaatatcaagcacaaaatatgtaa

SEQ ID NO: 335542 - DNA, 1176 bp, Pseudomonas aeruginosa
atggctttggaatgcacacttcacgagaacagtatatctctaatttatgctggctatacagacaaccaccatactgtttgcagtgaagaagaccagaagctcagctttcagattgaaaccccttttaacctcaatgacgagttcaaggataaggactttgaaattcacttccttctcaaaaaagaagtgagagagaatgatattttcttagctttactaaaaacagaaactgacgaaaaacgtataggctggataatcccgatcaatgcgctagagtcatctctacattcctttgctgaaaacccccattttcaacggtatgcgtacaaggcgatagaactaaccctcaaatcatcctttcttgaaaaatatacaataaaaccggacatcagcggggtagaacatttaaaactttccaatttcctccatccagacactgtattacttgttattagcaaagaaacactaggcggtaaaagcctagaactgggaagaaccattccttcgctcatgaaatatggatttttccctcttacatcaaaaaacccagacactgctaccttcgaggcaaagcgcccagaagaaaacaaagtcaagctattaaacatctccagcgacatcgaaaactatcaagtcatctcctcaattatgggcgaagtattcccatacgaaacaaccccagcatttgcctttttttatatctaccaaattttcgaacttcttctagagaacatattaagacatgaacaagagactgttattgacaagttatttgcttcaaagaaagacccttccacaactaaagacatcctaagagaaatgcaaacattaagctctgaaaaagagagaataaaattattaataaaccaatactgcagatgcccaagttccctggcagatttaaaaacacaatgcgacaccttcttaaatggagtcggcaagaagacagggacgaactttgaggacttcttttacccagtaaggaattttattttccaccagttccgagatttgccaccccaattccagatcaatctatcaagcatcaattcttcaacaattgaactactccccgaactcttatttaaattcaaaaagcctagtattaatgtacaagtagcgctgccagaagatacagaagcgatcacacctgagcccgctcaaaatcccgtatga

SEQ ID NO: 335543 - DNA, 213 bp, Pseudomonas aeruginosa; identical to SEQ ID NO: 326794

SEQ ID NO: 335544 - DNA, 255 bp, Pseudomonas aeruginosa
gtgaaatacacatgggagccgcaagacatccacgcaggtcgcaaggtggatagccgcaaccgcaatgagcgctacatcatcggctacgagccggggcgcaatcacgaggaaggcaacttgatcatggtcagcgtggccgatgggatgctgatgacgaagcatcacaccgaggcatcgctggccgagtacctgaacgagtgcgacaacaatcgcggcggcttccggccggtggacatccgcgaagacgacagatga

SEQ ID NO: 335545 - DNA, 543 bp, Pseudomonas aeruginosa
atggctgacctccgtccagtgatgttcaccgtgcccggcgagcccgtggggaaggggagagtgtccatcgaacttcttcgggagtttcttgattacgacccgataaccggaatcttgaggtggaaaaagcaaaggggtacccgcgggaagatgggctcgatcgccggatcaaaatgcggaaatgggtacgtcattgtcgggcttgctggcgtccgatctgtgcccgcccatcgcatagctttcgcgctgatgaccggaacgtggccggagcttcaggtcgaccacattgacggcgacagggccaacaatgcctggtcgaacctgcgattggtaacggcagagcagaaccatcagaacttgcggcgtgccagggccgataacgggacagggattcttggagtgtcattccaagacggccgctaccgggcgcagatccaggtgcgcggaaagaaacactggctcggtcagttcaataacccgcaggacgcatcggccgcctacatcgaggccaagcgcaagctgcatgagttcgggacgctgtga

SEQ ID NO: 335546 - DNA, 312 bp, Pseudomonas aeruginosa
atggccgctcagaaagcgctcgcaggacgccccctgatcgccggccccgtgctcatcgaactgcggatgttccaccccattcctcggtcctggtcgaagaagcgccaggccatggccttggtcggcgaggttatgcccaccgtgaaatgcgatgccgacaactgcctgaaggcggtgtgtgacgcgctcaacggcgttgcgtggaaggacgacacccaggtcgtcaacgtgatgctggcgaagcggtacgccgaggtaccgcgcgtcgaggtgaagattgttccgctgatggcccagggagcgcagcggtga

SEQ ID NO: 335547 - DNA, 264 bp, Pseudomonas aeruginosa
atgagggtggtgctgatgctggtgatggttgcgctggcgggatgcgccggccggcaggaagccgagccgcgcacggtgcgcgtagaagtgccggtggcggtgccgtgccgggtgccggcggtggaggtgccggcctgggcaaccgctgggctgaagaagagcgacgatatccagaccaaggtccgtgcgttgctcgccgaacgcttgcagaggatcggttacgaggcgcagctcctggctgcgaaccaggcctgccaggattag

SEQ ID NO: 335548 - DNA, 267 bp, Pseudomonas aeruginosa
gtgatactggtgattcgattcaagggctggtcggtgaaactcgaccaccaggtgggcagcgctgggaaacatggcatctggtcgttccacggctcggagagcagctacgtgccggacatggagacgattctccggcatgcagctatccgccctgcggagccgaaagaaggcggggaggtcgaggtattcatctgtgattcgcgcatgccgcaggatgagtggcggcctgtcggtagcggcgttgcggcctacgagtcggaccgctga

SEQ ID NO: 335549 - DNA, 216 bp, Pseudomonas aeruginosa
atgaacgaccgcgaactactcgaactggcggcgcgggcggcgtgtgagcgctggattaccgaccagaaactatgccaaggcagcgatatttcgctgttcaggctggagcgtaatggtgagcttgtgtctctgcacgcccttctgtgcgaggcataccaggctgggcaagtccgcgccgccgccgagatcggcaagtctatgggaggtggggagtga

SEQ ID NO: 335550 - DNA, 360 bp, Pseudomonas aeruginosa
atgaccgaccacgcagagctgcggaggctggctaaggcggcaacgccgggggcgcgctatcaaggaaccgacgagagagtcatcgtcgccgggaatggaatgatcatctgcacagtcagcggcgcaatgtcaggaccgtctgtgatggcagatgcagagttcctttgcgcgactgatcctaacaccatcctcgccctgctggacgagatcgacaggctcaaggcggagaacgaggcgcttctattgggcatgcgcgcaatcctcaacgcatacgactatgcagaccagtacaacaaagagggcgtcgcggttgaggtcatggaagacctgcgcaccctattcaaaggagcaacgcaatga

SEQ ID NO: 335551 - DNA, 228 bp, Pseudomonas aeruginosa
atggagcaagcaatgagagaagagtttgaagcgtggtggaatttgccggcgcaatcggaacttcgcaaatcctgcgcaaggggatgggccgaggtcatctggcaagccagccgcgcggctctgagggtggagttgccggagccttacgcttttcatcaggaggttcagacggtcttcctggatcgcgtgaaagaagccctccagcaagccggaatcgaggtgaagtga

SEQ ID NO: 335552 - DNA, 147 bp, Pseudomonas aeruginosa
gtggacaacgacaacgaaacactagtcgcgctgctgctcatcgcgctgatcgtcttcggcatcttccggatagtcggggacttccagaacctatacgagcagacagaacagaaaggacaggagttgagcagatggagcaagcaatga

SEQ ID NO: 335553 - DNA, 132 bp, Pseudomonas aeruginosa
atgcatcacccgcagatcattggtctggtggtggccggtaaactggattgccgtctccataggcgcaccaatcgtcatctggcggctctggcgtctttcccgcaggaggaagtccaatggctgaagaactga

SEQ ID NO: 335554 - DNA, 411 bp, Pseudomonas aeruginosa
atgagtgacgtgacgcgctacaacttcgacacgacggcttgctggtatgagcatcctgacggggaattcgtcgaacatgacgcctacgccaagcttgccgccgaggcccaggcgctcagggaggaagtcgcggcactgcgcgcaagggtggtggttgtaccggatgctgccaacgaccggaggaagagcgcccactattgcagaggctggaacgcttgcctcgacgaactggcgcgccgcaacggcaagacggtcagcgcgtccgcgctcgataccctgcgccggttcgctaccggggaggttgggcacctgaacaacgggcattgccctgatggtctcgaagggcacgaaacgcgcgatccggactgccccgtgtgcagagcgctgatcgatacggagaagagcaaatga

SEQ ID NO: 335555 - DNA, 222 bp, Pseudomonas aeruginosa
atggccttcagcaatgaacgcgcggttctgatgattgaggaaggcatcacggccatgcgccggtcccacttcccgcgccccgaacagagcttcctccacggccagatcgaactggcctacgcagtggacttcatcgacacccgcctctacgacgacatgcgccgccggctcgacgccgcagcggattcgcgctgggcagaactcaggagcacgaacacatga

SEQ ID NO: 335556 - DNA, 123 bp, Pseudomonas aeruginosa
atggccttcatcattagtgacaatgttgaaggcggcaccgttactcaagtgctggaagaagccctctgcagtcagaatgacaatgtaatcatctgcacacatacagcattactgctgatctga

SEQ ID NO: 335557 - DNA, 681 bp, Pseudomonas aeruginosa
ttgacgaaaaataatctaggatatctgtaccgaatcgtcaggtttgatcgtgcggtggaaattctaaaaggagaccttcacttttcgcatccgtcgtcatgggatgatccatacgaaacgcatgtcaaacatgagtacgaccatgcagtctttggccaatgctggaccaagtcaagcgtatcggacgctatgtggcgtatctactcgccaaatatgctgggggtccggctgagaacgagaagagagactttgttagtagcattgcgagggtatgcaaaagctaatcctggatttaagtgtcgcgttgcagatgtcgaatatctttcgccagtaaaatatcgggatagagtggacgggattgatggcatcatgcagttaattgctagcgagccaagtttagcagcggatatactttgcctgaagcgaagcgcattcaagcacgagaatgaagtaagagcaattctctacaatggaaacgcagagcggatcgaaaacccaaggattagcccggttaaggtcagtgttaatggtcacgaactgatccagcagattgtattcgatccccgcgccccggatgaactctgcaatgcaatggagtattaccttaagaaagtacttaagttcaaaggtgaagttaaaaaatctaaactctacaccgtcaaaaaaagcaaggccgaataa

SEQ ID NO: 335558 - DNA, 642 bp, Pseudomonas aeruginosa
atgaggtctagagatttgcgcacaattcatgatctcattgtgagtaattatagaatttctgcgcttcctgatgggaaatatctccatcagtttactcctgctactactgatacagtatatgagtttgtagctaatagctcgccagtgttgaccgagggtgataggtacaacataggtttttatgtgacgcctaatggcaggaatgttgttgaagtgactgctttggggcgctcggatggtgtcgataaaaatttgagctatcaggtagcaaagaaaatttctttggataagagagatgaaaatgtagcaaaaaatgaccaacgagtaaggcatgaaggtggaggtgactattactgggggaggaaatatgcatggcgtcaatatggactagctgtagcaaaggatgctttttataattatttggaagagatagggcatccttcaataccatgtatcacatcaaatccagaccttccttactctgccaatgaagagtctatcgcttatgctgatcaggggttagaggcagcaatggatagactaatatctagtgctgttaaggatggccgatattttacttctccattgtattcgaggaagtttcaaattcgcccgctcaactcgattacagataaaaagtaa

SEQ ID NO: 335559 - DNA, 2184 bp, Pseudomonas aeruginosa
atgagtatatatcaggttttggcggatagggcatatagccggttagtgggaacggatgctcttgctatgcggaattctgaagcctttgactatattaaataccttgaggatatttataagctccttcaatctgaaagctattactcggttgctgtgcgtgagctgtgcttcgcttgtgaggttgccgacgatagtgattcgctcgcgaagagtattcttcagcagtgtattaaggcgtcacgtatatttttatatgaagagatgctgagaaagcgaggggttgatatatctgaagagaacggtctcttggacttggctcaaaatgctttctattctattgatggcgagattttgctgacaaaagaacagaaagacctatttgacctattcatgcgaaagcggcgcttggtggtaagtgctccgacgtcatttgggaagtcgagaattgttagagagataattacgcactgttcctacaactccattgcggttgttgttccaactaatgcgctgcttagcgagacttatcaggcctttagggaggatgtgcgcctctctgagtatggactcattttctccacccatatagagccgcctgaaggtaaggtgatttatatatttacgcctgagaaatttgatgtctatacagatgagcacaaaatatcttatgacttctttgtgtttgatgaggtttataaggtggacgctgaggatagaagatcgtcggttttctcaaactgtctgtataaggcctacttgaagaagtgtgactattatttaattggcccatattttaaagggtttagtaaagaatatctcgagcgcaccgatggtcacttcgttaagtttgagacagatatagtccaaaaagagactgttaattactatgatggggtcgccatttacgatggtaggacgctccctgctcgagaaagtaaagatgctagattgacccaggtactttcgaagatcgatggccaatcgattgtctatgttggcaggaaggactctgccgaaactagagcgaagtttatcgctaagtctagaaagctcgaaaagaaggatgacggactttttgagttaatagagtatattaagaaaaatatttcctctgaatggcacttgatagattttctgaaggtgggtgttgcttttcatcatgcaggagtccctaagtatattcagtctgagatagttgatttgtttaatgcgggggtgctggatgtaattgtgtgtacgccgactttgacggaaggtgttaatactagcgcaaaaaatgtaatattctacgatactacgaaagctgatatagctttaaccggattcgaggtgaagaacgttgttggccggtctgggcgctttggacaacactttatagggcgcgcaattttcctcgagagtcatgaggagcagagagatatgggggagatatttttcccgatattcgattatgacagtttgttgcccgaggataatattcagatttcttatggtgatttaagtgctaaggctagggagcagagggaggaaataaatagtattgtaggctctaaaaatgtcccgattgaaatcctcaggcagaataaatatgtgccatttgataatcagcttaggttaattgaatatctcaggtcgaaccctgatatacgtttagagctgaagggggctctcaatcccccgaataagcgacaggttgatctgattattgagttggtccacgaaatattatttgctgactctgacaaaagaagggcttggtctacagggaatatttctcgatttgttaaatttcatatttaccataatccgtctattaagcagatgattaaagagcactctgcggctaaggaggatacgaggataaggaatgtccttgacttggtttatacgtattttgaatatgctttgcctaagtatataaagtctttagagaatatatataatttcgtgtatcatgagaaggttagcttctctctttttattacaaggcttcaatatggaagtacggagcctcaagatattttactggcagatgcagggcttccacggtcaataatatcagtgctttcggataggctgtctggggtcaaagatatagaagagattcgaagaaggataaggggggctggggctatggatggtctgagcaatattgagaaaagaatgctgaaaaggcgtctttga

SEQ ID NO: 335560 - DNA, 165 bp, Pseudomonas aeruginosa
atggtaggggacgccgctaggaagagcctcaagatgcaggacaaacgcgaaaaggaagctaatagaggcgtgcgtaagtccatgaaggaatgtattaagcccggaaatgttatcgacgatgacgtgaaagaatgtatggaaggattacgagtcaaagagtggtaa

SEQ ID NO: 335561 - DNA, 1515 bp, Pseudomonas aeruginosa
gtggcggttaaggttaagatttcaaacttaaagtctatcaaaaatctagaatttgatgtccctatgagtggggcttatataatttctggtgcgaatggatgtggtaaaacctcgcttcttgtagcgctacatagaatgggcgcgtcaaacgcttttcaaaccgggtttccaggtgctaagcaagccaatggaattgatggacttgaagatgccgttattgaatatgaaataaatggtcgcttggtcgcctaccgttataatgatgttcggtggtctgctactcctaaggctaatagtaagctggtaacagaagctttttcttctgtgcattttcttaaagctgactcttcgagggttgaaccgacagctaatgaactgaaaggtataaagaagcatcccgttggtaatgatttgaaggtttttttaaattccgtatttgatacggagaagtttgatgatatgcattatgtgactctgcgtggtcgtaatgctgttgcacatttaatagatgtgactgtagagggtgctaggaagaaatcttggtactctgaaaaaagctttagtttaggtgagctttgtgtaatgaggctggctaaaaagcttttggccgctaaagcaagagctttgtatattatcgacgagtttgaaatggctttacatccggctgcgcaaattcgactttttgagcaaattaagagattggcaaaaagtaaaaagtgtgcggttctggtttctactcactccgcaagtttgattcggaatgctcgtcgttcggatctgatttacttggagaacaatgatggagatgtgactgttcatcgaaatgtttaccctacatatgctttgcaatatataactgttgaggatgacaactaccctgattgtctggtttttgttgaggatgtttcagcaaagagttgtgtggatgctatatggcgttattgtgtacagagtaagaatgctgcacacagctttccgtctgtaagggttgtagttgttggtgggtataatgaggttcttaaatttttgcagaggggggcgagttttattccgggtaatgtgagaaccgtagctgctttggatttggatgtgaaaaataagtgtttgccgcctgttgtccaagatgggggagaaattccagagcttagcgttagccagaatttgtatcgagacttaagggatagagtagaatttttgccttggacccctgaggttggagtgtgtgagttattttcaagatcttataaaaagcatgtttacgggtttggtagatattgtggggttgtggaaattggatttagaagtgcatatttctctaggattaatagtctgcgagatggtgagttaagggcggagtgtaagagggtatttgatatgatggcgaatcaattggcgcagaggaagaattggactgaggatcgagctaaggaagagcttttttcttatctggtttcggtatattggaatgagaaaaaacaggagatgaaccgtttgtctggtcggctttttggttaa

SEQ ID NO: 335562 - DNA, 870 bp, Pseudomonas aeruginosa
atgtacttcccggactttgcgccaatcgacgtcaccctgtttttcggcctcccgcaaccaggcgaggctcggatcggccttgaccatgacatcgatggtctcggaaacggtcttctggtcgatatgcttcacatcgatcttcagcccgtccgctgctttgatcgccagattcccctgggccacgatctgggtctgccgaagcgtttcatcggtctgccctttccccttggcgctgttccacgccaggtcgcccttgctcttctcgtggctctcctggtgcaggtccttcaccgcgtcgaaggtcaccgcgccgccgctgacgatggccaggtcgttgcccgattccagcttcgcgccctggtaggtctggtcgccgccgctgagcagggtgaggtcgccgccgctgctgatctggctgcccaccgccttgacgtcggtgacttcgtcgcgccgggtttccttgcggccgaagtcgcctttcttcttcttgtcgtacaggtagtagttgctgtcgttggcggccagcagttccagcttgtcgccggccaccaggtaggcctcgtcgccggcgctggcctggctcgcgatcaggcgcaggtcctgtccggcattgatcgccaggtcgccgccggcgtccacgcgggtgccttgctgggcaaccttgtcttcctggtaggtgaccttcctggtcttgctgtaggcatgctcctcgttcgccgccgccgccagggtcacgtcgcgcccggcggagagggcgatgtcgcggcgcgcttcgagggcgctggccactgcgctgaggtcgcgcccggcgctgacgttcaggtcccgcccggcactgacttcggcgccgagctgggtcacgctctgtag

SEQ ID NO: 335563 - DNA, 219 bp, Pseudomonas aeruginosa
atggaaaaaatgaaagccctgttccgcaacgcttccatcgccaccgtcggcctggccgtggccaacgtctccttcgccgaatcgctgctcgacgaaaccactaagggggttctggcgcaagccagcactgatggcgggtccgtggccaagctggtgatcgccgccgtggcggtgctggtcggcctcgccctggtcatcggcgcgatgcgcaaggcctga

SEQ ID NO: 335564 - DNA, 210 bp, Pseudomonas aeruginosa
atggcgctgggttacgccggtgtggcactggcggtactggcattgattatcccttcgctgttgacctggcaaagcaggaagcacaatcctcaggcgggttaccgggtgaaaggtggtcgtccggcgctggtggtggtgtttctctgtggtattgctgtgattggcgtgcaatttttgattgcggcaggcttgttaccagaagtggggtga

SEQ ID NO: 335565 - DNA, 666 bp, Pseudomonas aeruginosa
atgtcaaactttcccccagccccgcccgagataaaagaaaaatcgataaagcaactacttacatcgacaggaatattactgaggaatattttacggaaaaactggcccaaagagctgaacagccaaatagaccgcgagatcatcaacctggcaaacgtcgaaaaaataaaatgggtagatatatcaaaatgctggagctatacgtataaagaagaaaaaagaagcgccttcaaactgaatttcttttatgcaaaactgtactatctatgcgccaaatcagcatttagcgaagggaaaatcgaggaagcctggccttacctttcctactccgcaaacctaatcggatttttggaaggatacacatacaaaaaagaagaagaaaattttagaagctcccgcgcatcgaaaggcgggaaagatctgcaattaaaaaaacttcaagtaaaggagagaatccgagaactactaaaaagccctcccaagggaggctggaaaagcgaatcatctaccatagaagaaatcctctccagccaagagctcaaagagttcatttccagcattggagctgaaagaacaataagagaccttaaagaattcatcacatctgaaatagtcttgaaccctcaaaatcaggagacataccaaaagctccgcgcaaaagaataa

SEQ ID NO: 335566 - DNA, 1263 bp, Pseudomonas aeruginosa
atgcctaagcaagttgacgtctactacgacggttggggggagcattggcgctggggttcgctcgtctcctcgaccgcgctaaccggtcgcccgctgattgcctttgagtacagcgaagaggcactggctcgagggctggagctgtcggccctgcgcttgcccctgaaggggccaagactgcgcaaggattttcccgatcaccagctgtggctgcctgggccggtctatgactcgctgcccgacggctggggcatgctgctgatggatcgcctgtttaagcgccgcggtctcaatcccgcgcacattggccccttggatcgtctggcctacatcggttcccatgccatgggggcgatgtcgttcgaacccgtagcgccggagctatccgtatcgcccgaagagattccccttgagcaactggctgcagaggttcaggacgttctcgatggcgagggcggggagttcctgcagcaactgctgctgatgggcggctcgccgcacggcgcgcgaccaaaggtattgctctatcgcgatcctgagcacggacgtttcagtacggtggcggcacctggcctggaggcctggttgatcaagttcccggcggcgcgggaacactccgaggtatgcgccgtcgaagcagtttatgcgcaatgcttgcgcgaatgcgccatcgaaaccccggacaccgaacactttgaattaccgaatggattggctgcatttgctactcggcgattcgaccgccaaaaggacatgcgtgtccccatgcaaagcctcgctgcctttaccggcgcagacttccgcgcagccggcgccctggattacaccaatttcctgcgagcaactcagtactgttgcaacgatgtgcgggagaaggcgatcgccttcgagcggatcgtgttcaacgtggcattcaacaatcgcgacgaccaccccaagaatttcgcttacctcatgtcttcgagcggtcaatggaagctggctcccgcttacgacgtgaccttctgcgaaggaccgggcggctaccaccagatggatgtgatgggcgaggcgctaaacatcacgcgcaaacacctactcaagctcgcggtggacgaagctgatctctcgattggaggcgctgccgatatcatcgagcgtatctgccacgtagccagcggtttcactgccagcgccaagcgccagttccctcgcagcattacccgcgacacgctgcacacaattcaggcgcgcatcgacgacaacatcgcacggctcagctag

SEQ ID NO: 335567 - DNA, 318 bp, Pseudomonas aeruginosa
atgatgaatttaagccttacccagccagatgaagtcgtcaaactgctctgcacgcgcctacgccaggagcgtctgtcccagcagatgacgcaggcagaggtggcagctcgcgccggcatcggggtcggcacgctgtctaatctggaggcggggcgcagcgtggcattcgacagcgtggttcgagtagccatggtcctggggcgtctcaacgaactggagcaattgttcagaccgcaattggacagcctggacgatatcctgcgttatgaacgaggcgctaagcgtcagcgtgtcaaaaggaaatccgacaatgcctaa

SEQ ID NO: 335568 - DNA, 1089 bp, Pseudomonas aeruginosa
atgagcaacgttgcgattcagccaggaatgggcacgctgcccaacgctgcaaggctagttgcgttctacctaagtcgtgaccgtgctctagggctgctgaacccccaacacctacctgcccaagtcatggcggcgcttcagggctacaacattcaaatgtcggcagcaatcctctcgaatgctgtcggttcattcctgctgcaagcaatcgcggcaggtaaggtaaagacactgccgcaactggccttcgaaggcgaactgaaggagggcaccccattcatctataacggccatttcaccggcaagggcttcggggctgccaacaagacctctgcgttgagtctcactgagaagctcgacgaaccgcttgccggtaagaaactcgtcttcgagttttccaagaacggcctggtaaacgacaccgcgtacacccgcatgtctggctcgacgcgcctgttcgcgttcggctacatctcggaggtcagtgacaccaccatccgcgctgttccttacgtcgtgggggacctggttgcagacaaccacgtgatggcctcaccgttcttgtcgacgctcgaattgcgccccgaggaaatcaagcaattcggcggaatggacgagacttggtttccttccaaagccgagttccagcgcatgaccatgatctcggaactggtcgtcaaagaactgatctgtcgcctgcttggtgaacactcagtgcccagcgattggggtggagaggagtgcgatgtgttatcggccaatttggttgttgatggccagcggcacacaggggcgttcttgctcaaggggccagcgcggtttcacccaatgaagccaaccgaccttggaaaaaatggcgaccagctctatcgcctctttaacattcctgcccagatctacgtcatccagcattgccacaatattggtgctgctgtccgcaagcaggcagaagcgtttgctctcgcacgcagcttcatcgctccctgcaagatcgttttcatagatggcctcacaacagcgcgcttgctgcgggctcatgggctttggccggaggcaacgatgacttcgataaaaggcaagatggtatga

SEQ ID NO: 335569 - DNA, 1968 bp, Pseudomonas aeruginosa
atggcacaacccagggaagaatggctgcaagcgatagccacgagggcgaaggtggaggcttccgccgttgagggagtcctttctgctcaccgaattcaaccatcacctgtacttgcccagcctcgcaggcttgttctgcgagagatagagttttctggcgagaaggatggagtcgcgaacgttggcgctttcgcgttttcatggaaggcccttgatcacggcctgtgggccatgctctctgaacacaacctgcggggcaaatcaaccatcatcgagatcgttcgatggatgataagaggaagaccgtcaagcaatcttcaagacgatgtaaggcgatgggtccatgccgtgcggctgagtttcctccttgactcagacgaatacgagatcgttgccaagactcagggtgagcctattggcagcctgtaccgtgttcgtgcaccgagtgctaccggagacgagccagggagaactgctcttgccagctttgccaccgatggcgaattcgaagcagtcatggcggacttcttcatgcgcacgttctcgatggacccgatatcgagctggcgacagggaaaagaggacggggggcaatcagtcacacatagctgggtagcattctcaggcgccatgttcatcggcaccaactacgaggtacttcttggagacatgcccgttaccgctggcatcacatcgcgactgatgcagatgtacctcggcgtcccgtgggtttcaacacttgcggccgcaaagaccgcatgccagatagttgagcaagctgttcaagcctccacacgcagaaatgaacagggacgcgaagcggcccaagcgcgcattgcaagcattagcgctcaactggcagagaaacgtgccgagctagcgaagattcctagcgacgaagccgtccgcaacgccattgatgccgatgcgatagaactggctaatgttcggcaccaagagcgatccatggtcgaacatacagaacgcgctgttgccgcgcttcgagagctaacccgcgtccaccaagaggatcggcgagacctccagacgcacatggattccatgtctgcgatggcagtgtttcgtcgcctggagccgaagtgctgtcctcgctgtgatcatacgatttccaaggcaaagaaggagcttgagaactctacacactcatgctctgtttgcggtgagtcgatcacgaactccgaagacggcgaggcgatcaaggcggaattgcaggagcgtgtttctgcatccagggctgcaatggcactcgcctcgactaaaaaggaagaggcggaaagtaaattggccgcccttcaaggaaaagttgatttcctacaaagtcgccttgagtcagctgccaaggtgctaggttccgccgtgcggcggcaagaggccgcaatggctgtggcggtcttagaaggtcgactggaagaagcttcgataagcccagctgcgcaggttgacgaccgaagcgacgagctgacaattctgtctgctatcgtggcggaaacggaggctcgcgttaaggccgtgagggatgggctgctcaacgatgtgtctgcacgcttggtcgaatacgccaaggccttcggaatggagaacttgtcggaagcgtcactgaagggaaatgcggctctgtcgttggtcaaagggggagtatccacgagctacagcaaagtaacggaaggcgagaagctgcgtctgaaagtggcggccgttcttgcgatgattgagattgctgaagagcagggtattggccggcacccgggattgctcatgatcgattcgcctgcggctcaagaggtatctcccgtcgatgtggatcatcttatcgccggccttcagacagtatccaccaagctcccgcactttcaggtgttcattgccggtatttcatccaaggcgataacagatcacatcccgaaagaaaatcgccgtgaggttgccggcaacgccttcctttggtga

SEQ ID NO: 335570 - DNA, 1968 bp, Pseudomonas aeruginosa
atgcatccgattgaagccgagcttatcgacgttgtgaagggcgggcgagactggcagctggaagatcttggcgggatcacaaagctcgcgccggcagcacgatcaatcggcagtacgcccatgatgcccgagttgcttcatccgcttgtgttggggtggagcaatgccacggcagctgatcgagacgcacataagggcgtactgcgcgatctactggaggtcgcgacaacagatttcgtgctcctggaagcggtcgatatcctcgaaaatcatcggccgctgccagacgatggagatgagtgctgcttcatgctcttcttggcaaaggcagcaaccggtaaccattcgctatctgggctatcgcgcggcgcagcactcgatggtgcgtttcgctgggctggcggcaacagacgctggcagcttcgcttgctggacttcttcctcggccttgcgccaagcgacgatactgagttcctgcgacgagccgcgaagattgttggcgtcgccttttcgcactggcgcgacaaggagctggtcgaagttctacgtaagcttgctgaactcgaagcggttcggcctgaggctgcttttgaattgggaatggcagcacttgctgaagctatggacagaacggacagcgatgtggcagccaccgccttccgtgaggcaagagactggtttgatgagtccaacggagcatctgagtaccatccggaagccagcctgtacctcgatggacttaacctgctgctgagcttccacagcgatgccgcaaccacatcgttcggtactgcgagcgctcgagttcagcagcatgctttcgagttgcacgcctggtcgggaggctccggccctccttggttaggaacaagacagaccgaagcagcgtgttggagcgcgttggccggtgccattgcaggactgggaggatcacttgacgaacctagttggtgggaaccagcaactgtcatcgaacagggactcctgtctgtgtactgcgcaggtcggtcgatcttacgtcgagatcagcacggtggcgtggaagcaattgtcagacctcgaattcacgcaagtgtcgccaggcaggccgggcaggcgcatcaaatgcgcacgtggctccaacataacgcgacccacgagtgggctgcggaagcgcgagacctgattgcacaaattgatattttcattgagcaggcaggcagcccgaaaaaccctcctgatgcggcgagcgaacggatctcactcgccgccatcatcgcaaggtccaaaatcccggaaggacagagaaatgtcctcttcgctgtagtcaccaacgccgtctctatgcaacttgataacctgacaagctccgaagctgatgtcatcgagcgctgttgtaacgcggctcagcaacacaccgactacagcgcgaacaagaacggggcacgtctcttcgacacggtgcttctctggttagtccgttttgttttcaatcggttggaattgactaagggagacgaccgaactggcgcctatctcttcgagcgtgatgatggctctctgcctcgcgaggatgaactacagcaggactttttccgttgggtagccacctatgtcgcagggagcgaccttgaaccgacaaacattgcgagtggcagagctgacatacgcctgagatccggtccagaacgtctcgttgtcgaggtgaagcgcgaggaaactgactgctccttcgatgcgctcttcaagtcttacgcagcacaaacaacggaataccagaatgtcagcatccgcctgggcgtactattggtgctcgacctggcgacgccctgccgtgaaggtaccccacatctgacgagcctgtttgaaatgcggcagatccgtcgctacggtgaatcccagccacggctgatcttgatcgtcaaagtacctggccgacgaaaaaggccgagcgatctaacgaagcttgcaaaaaccaaaagagaatga

SEQ ID NO: 335571 - DNA, 1095 bp, Pseudomonas aeruginosa
ttgggtaacgatcaacgatggaggctgttcaatttagactcattgcttgcggagctcgatgacccgatattcgacgcatcatcgatcgatctctatattgcatctctgtcatataaaaatttcgattttatagaacgtcgtctaccttttgtagttgaaagcgtgacctacgaccttgatgtctggaggagattgattgccgctgctcccctgaagtactggattcagggcaatcaggaaggcgtagtggtctatccgcagactgaccattgtggttgtttgagaagttatcgatatcgtggaggtttccctgctgtgaaagggctgtcttccgtatgggtcaccgtcgccgactctcaaactctttatggtgcgctcaatactcctgaagcgcgcggtgtctacgatgcttggtctcagtggatggatgtttgtacccgtgaggcgaccgacttagcggatggacgttacaaaaatactactgttaccaagtcattaattttatctggtctgggtaattgtcttgcctgcagcgctcctgctatagcaagtgcaagaaccacgattgcttgcattcccgggaatgggacactcattcaattggctctgtgcgcggagcatttggggcaagtaaaggatcagcccaatgtactcaaatttctgggtacactgttttcgctatcgatcgatatcccagaattcggacgaactgaggcaatccctgatgatctgatccctcatttgcacgccatggttgctgaagagcttggagggaaagcggctaacgctgaaaaccgcgagaacggttggcatctcaaggtcgaattgccaaacggctggtggtggctgttacgcttaaattcattgatggactactcctacatgctgctcagtcccgatgagaagaggcaggtatatcgcgcagactctgcccctcatcatcgcgaacttccatttttccctgaccacgaacattctcgccccgacagaaaaaaagacattcactcaccaagcttcttgtacggtaatccattttttgatttcaaacgacttcgagacatcggcgaagagcgcatgcgggagcacggggaatag

SEQ ID NO: 335572 - DNA, 717 bp, Pseudomonas aeruginosa
atgtttagttctttgcttgaggtagtcgactctcattgccctgagtcacgaatgcagttcacgccggagcagcacaaggcgttgattgatgatgtcctgcctttgttatccgttgaggcggagccgttactgggcgccgcaaaggcacttcttggtgagcatgtcttcgatgcaaccaagataggatttgaatacagtactgtgaggactgatgaaaatggtatcatggatcttcctgtttctttcgggaagatgtattttcgctcagagaggaataatcgtgctctctcgttgaatttaaccatcttgcgtggctttacaagtcgacttaagcatcattcagcatccatcgaaatagaattggatatctgtgatatcactgccaagacggttttcgagtctatgtgcaaggactaccatgcacaaatatgtcggcttctagaacaggcgcggatagaattctttacatcctactgttctgacatcgtcgggaagtctaagcgtaataaggtgtcggtgaagttagatgaatacttctctgactcgcaggttgataattgctttgcgctgagtaagtcctgcccccgcaatacagatcattctgctgctatccgagcattcttggtgctttcagcgctattcgtcgcgtgccattctgcgctcaatgggaagtcttggcgtcccacacttgaaaaaaaccttcttaggttcgcgtaa

SEQ ID NO: 335573 - DNA, 1347 bp, Pseudomonas aeruginosa
atggccaagattacagaccgccagatgactgccaaacccggtacgagcgacaagtggctgagcgaagttgccatctggggtcacggcagcttggtcgcccgtatcaccccaagcggcgaacgcctcttctattttcgctacaccaacagcagcagtgagcgcatcaccttccccatcggcacatacagtcgcaatggcagcgaaggcactatgacactcgctgaagcaggtcagcgagccaaagagctcgcagggcttcataagtcaggtttcagagatgtgaaggaacacctcgaggctgaggaagccgctcgcgtggcggcacgcgatgctgagtttgcgcgggtcgccgcagagaaagctgcattggaggcggcccaggcccgacaagccgccagaaaaaccgtccagcatctgttcgaccactgggccaaggtcgacttgatcaaccgcaaggacggcggcgcagaggttcgccgcatgtttgagaaagatgttctgccgttcctcggcaaaatggccgtcgaagatgtaaaaaaaggtcatataaccgaggtaactgacgccctgctcgcccgtggcgtcaaccggatggcgaagatgatcttcagcctgatgcgtcagatgttccgattcgccgtagaccgggatctgattgatcatgatccgactgcgagcattcgcaaagccaaaattggcggcaaggatgtcgaacgagatcgtgtattgagcgaggaagaaatccgcgcattagcaaggcttactccgcaagccggcctactcccctcctcagaggctgcaatttggattgctttgtcgacctgctgccgcatcggcgaactgctgaatgcccgatgggagaacgtcgacctcatcaaaggcaactggcacatacccgcagaacaaagcaaaaacggtaaggcccacaacgtaaccctctcaccattcgcgatccagcagttcaaggctgtcatggcattcagctcagccagtgaatggtgctatcccaacacccaaaataatggttctgtctgctcgaagaccgtgaccaagcagctcggggataggcaacgcttgccaaatcaagggatcctgagtaacagaagtgccaatgctcaggcacttctcctttctggaggaaagtggactccacacgaccttaggcgaactggtgccacgatcatgacagctcttggtgtacttccggaagtcgctgaacgctgccttaaccacaccgaggaaaacaaggttaagcgcacctaccagcgacatagctacgcaaaagaaatggcggaagcttggcaaactctaggccagcacctagaacagatagtgcgcagtgcgtag

SEQ ID NO: 335574 - DNA, 2238 bp, Pseudomonas aeruginosa
atgggcagattgaaggcacagcttcgaaagatgtatgccgcagccctgctgcgtctttaccggcttaggatccgcttccaatactggcggcagcgccatgggttgaagtttgcatcgattgtcctgctggccatcgtgacggccagtgtgctgtccctgccatttctacaacgcttcgctggggactttttcagctcccctgaaagcttggctgcactcaggagccttttggggggaacaggaacagctctaattggggccgccgcaatcgcgttctcgctcattgtgtttgctatgcagaccaatgttgagcgcatgccgcatgggttgtttcgacagttaagctcggatcgatggctgctctgctcgtttttaggctcattcctgacggcgatagttgtcgcgagcacgtccctagttcccgatgggagttggggtgttccagcgatagtcatcgcgctgtgggggatagcagtaaccttgctgctatttcttgtggcataccgccgggctcttaaacttatcaatccaatcgaacagctcgccatcatgtcgagggtggctcgaagagacttgcagagatgggggcggttggcagatagagctgccatcgttttgcaagaaaatccgcttcccgcagctgctgaagcggacatagatatccccttcgaccgtcccaaggcccatttctttcaggtcaatgctttctggagcgcgcccgcacagcaggcgattcactatgccgtctcttatgcaaagcgatttgcagagcaaggagactatgaagttaccgatgatgccttcaatcgaatggtgctgatcaacgcctcatattgcgcggcaaagcgaggcacattcgtcgcaagcaaccctttcgttgacgttccgggtgtcgctgacagcttcatcaacaccacgctcgaacagcttcgtcaaacgatgcagactgcacttgctaagggtgacgaacgattagctggttgtaccttgcgtgcaatcggaggcctctatggggtgtacctaagaattgagtattcgggccgcgcttcaagtaagtaccacgcgctgctcgcatctggttacctgagcgcatcggtagagtctgtcgctccgcacgatatgccggacttgatgatggaaggcattcggctgatgggccgcgcatcaattatcgcgctagaccatgttgaccctaacgaagtgctcagcatggcaaagaagatttctgctctatccagcgttggcgtactcaaagtgagccatcgccccgtcacgctgactgctttcgagcagatggctgaaatcaccttcgagcttctgactcgtggaaggggcgacgttcggttccctcttcgtgagctgcgctcagcggtggtcgaggccgccaaagagttcctgatgacgcccgacacgccgcttagttcgatgcaccagaatacactcggcccctacttttccagcatcagcctttcgtcatttcggtcaaagctcacgacgctgaccaatcagttggtgacattgcctgaaggccatgctcgtgctggcgagataatcggcaatgtcgaaaagtgggcagaccagatatatgagccccacaagcagcttctcttaatggccattgaaaggcggtcattctttgcatttgacgcgcttcactgggctaccgggatctcagatttgctgcttgcgctttctaacgctccggcctgttcggagcacgacggcgaggacttgaggcggcatgcgatctggttggtatccacgctgtcttggatcccggacgacagggaggctgtacgctttgtggagaatcacggctttacccaaagcctttttgaggctgctttgaatgggcgtcagcgggggtgtgcggagttctatgatagctgcaaagagctcctcctctcgtgggcactgaaagctggcaaacatgaaactggttggggaactctggagactgcggtcaaagggttggtcgccctggtaattctggaaggaacccaggaagcaataactgcccttgagacagaactccgcgcgcaactagcccgcgagggtgctccttctatggagctgcgtacaagatccgcgatcaatctcactcgaagcgccaatagtgctagacgttatgatgggtttggatcaattgatcgtgtgctagcagagcaagatcaaggtgcagtgcgcaggctgctgcttgaaatggcagcaatcgttgcgggtgaatccccggcataa

SEQ ID NO: 335575 - DNA, 2487 bp, Pseudomonas aeruginosa
atggcaaggaagcgtaggcgcagcagcaagtccggtgtatctggagtgatggttctgagcgccatcgtgatcgggctgcttgcttccattcccaagggtgtttgggttgtcttggggggagtagccattgttggtatgggtgggtggctgatcatcaaggctttcagcaaaccaccagccgtatctttgccaccggctagacagccgctccgtcgagaggtcgctcgttcgagctcctctgatgcccccacgagcaccgggctgacgttttctttggacgagttttttcccttaggtgagccgtctgtatcggctcaagtcccagcctcgccccagcaggtttcggcaaagcgggacagctctggtttctttaccgtaacacttgaggccgctgagcggccttcccaccgaattcctagtactccggccgacctcgctagtgccaaggtgcgctggctttccgctgacgaaactattgaggttgctggcgagaagatctctggcggtctgatctatgtcggtgaagatcgaaacagccgctatggatcttcggaaccctcactgatcaacccgaagctgaaggtcgctcggggcatcgtcgatattgctgagcgtctcacttcctactggcccagttacgacaacatcacccctgaggctcggcgcgcatatctgcaatggctgtccagtggtcggaaggccccgcatgccaatattggctacgtgttcctgttcttctatggactggagcgcagggcctttgttgatgcgaagacgaatcaggctgccgccgccgagatacctagcatcattgccgaggttgaaagattgctttcgatctacgacgagaatcattcgttcaatacctacgccagtcgcttcgtagacttcctacgtcacggtcaagtgcttgctcgccgttatcaaaaggtgccgccggcaccgttgtcttacggctatgaaatgcccatagagctacggattggcctgggccagttggctgctgacaagcagccaatgccggctgactgggcgttggcctgggtgctgtctgatcacaacattgggaagcggacacctgtaacccgctgtaaagaagcgttcgcccagttgttctgcatccgctacgatgaacattatggagccggtatggtgctccctcagaacaagacccctctgagactccaatacaacaccgcctctgcgggactaccaccccaggagctggatggcttatccggtattcctgatgtcactgcgaccagcgcagctcggaagaagctgcagcagttggttgacgaatgcacggtgcagttggagccttatagtcgttatctcggtcgcaaccccggcgctcctgatgcactagaggggttgttacagctacccgtaaacctgtggccgccaactgctagaacagccctcgacgagctgaagcaacgcattggcgacggcatggtggttatgagcttcggtgagctggcagggcgactgcagagtacaggtagcctgtcgcgagacaaggttctgacgctcgcccgcgcgctggagtcattacacatcggtatcgagccggatgtgctgacaggcagccgaacacccaagtccgaggacaatgtagcgctctttgcgacacaggctgaagatggtgatctgcgatcttcgccggcgtatagcgccgcctctgttacgttggaccttgcctgtgcggtggcggcggccgatggtgacacgtcgccgcaggagattatgctgctttcccagcatatcgactcctggagtcacctgagcggtgctcatcggaaacgcctgaaggcccacctgcgtctgcagcttaaccagccgccaactctgcaaagcctgaagaagaaactggagcccctggccgagccagcgaagagggttgtagcgacgtttctcgctcacttggcgcaggtcgacggcgaggttagccccgcagaggtgaagttgctggagcgcgtctacaagaccctgcagctggatccgcaatcgctatacagcgaccttcatgtggccgccagtggcagccccgttggctcatcgcagacaacgccttccatacccggcgcaactccgtccaagcccgttggcggatttgctttggaccaagagcgcatcgctcagttgcagcgcgaaacagagcaggtatccgcgctgctggctcaggttttcgtcgacgacaagcctgctgagccggatgaggtcgttgtcgaagagaccgtcgaggatacttcctccatctgtggattggacgccgatcactcagccttcctgcgtgtactcgtatcccgtaccgagtgggctcgcgatgagttggaggcggtcgccagcgacatggaactcatgctcgacggcgcattggagcagatcaacgacatggccttcgagcatttcgatatgccggtcaccgagggggaagaccccttcgaaatcaaccctgaaatcatggacaaactaccgctatga

SEQ ID NO: 335576 - DNA, 1302 bp, Pseudomonas aeruginosa
atgttcgaatacacgccaaccgacgttgaaaagcggcttgaaatcctcgatgccacagcaatcgcctttctcgaaaagttaccgacctttttgtgtagcgagatcaagcgagctagagacggtgcctcgatgctcatcaaatacggtcgaatttcacaaactacgcctgggcgaaaagaagtctccaccctattcgagactgtgatcgattttggtgaggtcgagttcgacgacgtcgagacagcccggatggtgttcagcgcggatccataccagctccatcgcactcactgggctgtccgtgaaggcgatgcgcagatggtgttgcgccgattggctaatcttaagcccgcccttgctcatctcatcgacatacctgaggcgcctcgcgccgaagatgcaacggtccagcctccgcctcgcgataaaaagattctgggtgtggctgatagcgtggagtctttccttcaactgctctacgcctcgccgggaaaagacgcgagcgaaactttcttccgaggccatagtaacgccagttatgagctgacgccgtcactgctgcgcaaatgggaaaatggtgactggatgtttatgccgagcgaggaccgactctgcaaggaactgttaattgcgcattacgatgaattccagggcgatcaatattgttttgaccgccttgtgcgtatgcagcactacggtttacctacaagactgcttgacatctctagcaatcccttggtggcgctcttcttcgcatgctctggcaagaaggaccaatcgggactcgacggtgaggtcatcgtcttcaaagtcgactcgcaattggtaaaatactttgactcggacaccgttagttgcctttcaaatctctcgaacctcacgtatggacagaagaatgatatcgatctcggtctcgataaggacgcatttaatggaactgatgtcgtagggaaactgctccatcacatcaaatcggagaaaggctttttcgaggggcgtattgtcccagatgacctaaggtctattatctgcgtaaaggcaaaacgaactaatacgcgcatcaagtctcagtccggcgcatttctgctgtttgggcacgaggctgcgcttcctgatgccggtcaggatgggattgaaatcgcacgagtcacgatacaaaacaaaccacatattctcgaacagctcgaccgaatcaacatcaacgccacaactgtctatccgagcatccaagaaactgctgttcatttgcgggataagcatcagtttccgcgaccttgcaaacaagacgctgttgcggactaa

SEQ ID NO: 335577 - DNA, 822 bp, Pseudomonas aeruginosa
gtggtctgttcagctttcgatgtggcgcggtcttgctactacgtccaccgtcttcgacggcggcgtgtcgatgctcgccgcgtggcgctacgcagccaggtcaaccagttgttcagccagagtcggggctcggccggcagccgcagcattctgggcatgctgcgcgaagagggcgtgaccatcggccgtttccgagtgcgtaggttgatgcttgagctgggcctggtcagcaagcaaccgggctcgcacgcctacaaacaggccacggttgagcggccggatatcccgaatcggctgaaccgcgaattcgcgaccgagcatcccaatcaggtgtggtgtggcgacatcacctacgtctgggcgcaaggccgttggcactacctggccgcggtgctggatctgcatacccggcgggtgatcggctgggcgttctcggccaagccggatgccgaactggtgatcaaggccctggacatggcctacgaacagcgcggcaagccacagcaggtgctgttccattcagaccagggcagccagtacgccagccgcctgtttcggcaacggctctggcgctatcggatgcagcagagcatgagtcgccgagggaattgctgggataactcgccgatggagcgcctgttccgcagtctgaagtcggagtgggtcccgtcaacgggttacctgacggcgcaggaggcccaacgggacatcagtcattacttgatgcaccgctacaactggatcaggccgcatcaattcaacgacgggttaccacctgcggtggccgaagaaaaactcaacccactgtccgggatgggttga

SEQ ID NO: 335578 - DNA, 1215 bp, Pseudomonas aeruginosa
gtggcgcaacgagaattttccgcgaccagcggcggtgtgctgctggcgtcggtggtggcgatcatgctcgggcccaccggcatcctgctgaacaccttcagtctgttcatcgcaccgatgagcgccgagtacgcctgggaccgcgccgaggtgtcgttgctggtgacgctgttcggactggcggtcgccatcaccagcccgctcaagggctggctgatcgatcgttggggcgcgcggcggacaatgctcgggctgaccgccgccctgtcgctgccgctgctcggcctggcggcggtgaatgccgtctggcaactctacgcgctgttcctgctgatcggcctgctggcgccaggcaacctgccttacggacgtatcctcggactctggttccgccaacgcctgggcgtggcctacggcctgttaggcctgggcttcggggtgggcgggccgctgggcctgctggtcggccaccagagcctcgaagcgtggggctggcgcggcgctttcctggtctacggcgtgctcgaactgggcctggcgctgccgctgctggcctggctgttccgcgagccagcgccggatgctggcgtggccgccggcacggccgtagcggaaaccgcgctgagcggatcgacggcgccccaggcctggcgcagcgccagtttctggctggtgctgggcaaccaggtactggcggtgttcgtgatgtccgggatcatgacccatggcgtgccgatgctggtggagcgcggtttgtcccggggcgaggcgggcaccgcgctgtcggcgttgtgggtcggcatgatgctgtcgcagccgctgatgggctggcttctcgaccgcgtggcgacgcctcgggtggcgttgcccttcgccctggcggcggtgctcggcatggcctggttcctggtgggcgacacaccgagcggtctatggctggcggtgttcctggtcggcctgggtggaggaggggaaagcggcaccaccaagtacctgttgatgcgctacttcggcctgcgcagtttcggtgtgatctacggttcgatccagccgttcaccttcgccctgtcgatcagtctcggcgcttacctgctgggctggctgtacgaccgcgccgaaggctacgggacggccgaatgggtgctgctcgcggctttttccctggctgcgtgcagcctgttcgcctttcgcccctatccgcagaaattgccctga

SEQ ID NO: 335579 - DNA, 1176 bp, Pseudomonas aeruginosa
atgaaaatcaaatccgtccgtacccgcgtcttcgaatggaagggcaaggtcgtcccgccgcaggcgcacttctgcaccaatgccagcgacatcctgttcgagaagggagacgccatgggctcgttccgcttccacggctggctggtggtggagatcgagaccgacgacggcctcgtcggcatcggcaactgcgccctggcgccgcgcgtggcgaaggaaatcgtcgacctctacctggcgccgatctgcatcggcgaagacccgttcgacaacgagtacatctggcagaagatgtatcgccgcacccacgcctggggccgcaagggcatcggcatggcagccatctcggcggtggacctggcgatctgggacatcatgggcaaggcggtgaacaagccggtgttcaagctgctcggcggccgcaccaaggagaagatctggacctacgcctcgaagctctacgccaacgacaacctcgacgccttcctcgaagaggcccagggctacctgaaccagggcttcaccgcgctgaagatgcgcttcggctatggccccaaggacggcccgacgggcatgcgcaggaacatcgagcaggtccgcgcgctacgcgaactggccgggccggacatcgacatcatgctcgaatgctacatgggctggaccctggaatacgcccggcggatgctgccgaagctcgccgagttcgaaccgcgctggctggaggagccggtgatcgccgatgacatcgagggctacgtcgagctgaagaagatggggatcatgccgatctccggcggcgagcacgaattcaccggccacggcttcaaggacctgctggagcgccgcgcggtggacgtcatccagtacgacaccaaccgcgtaggcgggatcaccgccgcgcgcaagatcaacgccatggccgaggcctggtcggtgccggtgatcccgcacgccggacagttgcacaactatcacctgaccatggccagcaccgcctcgccgatggccgagttcttcccggtgttcgacgtcgaggtcggcaacgagctgttctactacgttttcaagggcgagccgcagccggtcgacggctatatccagctggacgaccacaagcccggcctgggcctggagatatccgaagagcacctcaaggatttcatcatcatcgagtga

SEQ ID NO: 335580 - DNA, 672 bp, Pseudomonas aeruginosa
atgtccgcagaaaagccgcgggagcggccaatcctgttcaacgaccagatggtccgcgccatcctggaaggtaggaagacggtcacccgccgagtggtgacgccgcagcccgacttcctcggctcaatggtcgatcccaatacgccattcaagacgcttgatgccggcctgcacgcacgcatcacctgcccctacggccagcccggcgaccggttatgggtgcgcgagacgtggactgacgtgaacatgtgcggcgcgccggcgctggcatatcgggcggacgaggatattcgcgatcttatggaagagccgggctttctggatgatcgcggagccttcaactacgacgacccgcgcgtcaagccatatccattcgcctgctggtacgccgaacttgatcaggcgcgctggcggccgagcatccatatgccgcgttgggcctcccgcatcctgctggagctcaccgccgttcgcgtagaacgactgcaggacatcagcgaggagcaggcacgggccgagggatatcccgccgagcgcgaatgcgaaacgggcggtagtggcttggatgcttggctctggttccgctccctttggggagagatcaacggcccagaggctttcaccgccaatccctgggtctgggtcatcgaattcaagcgggtgacaccatga

SEQ ID NO: 335581 - DNA, 1638 bp, Pseudomonas aeruginosa
atgatcatccacaacgtagtccagggctcgccggaatggcacgcgctgcgtgcccagcacttcaccgcttccgaggctccggccatgatgggcgcctcgaagtaccagtcgcgcagcgacctactaaagcagaagaagaccggcctggccgccgaggtcagccagcaccagcaggcgctgttcaaccgcggtcacgccgctgaagctgccgcccggctgatcgtcgaggagatgatcggcgaggagctgtacccggtcaccgcaagcgagggcaccttgctggcgagcatggacggcatggacatggccgagaccgtcctgttcgagcacaagctgtggaatgccgacctcgtcgcccaggtccgcgctggcgaactggagccgcactactactggcagttggaacagcagttgctggtcagcgccgccgagcgcgtgatcttcgtctgctccgacggcacccgcgccaacttcgttcacatggaataccgcccggtcgccggccgcgccgaagcgctgcaggctggctggcgccagttcgccgccgacctcgaggccttcgaagtcgaggcgcccaaggccgaagccgtgggccgcgcgccggagcacctgccggccctgcgcatcaaggtcaccggcatggtcgaggccagcaacctggcagaattcaaggccaccgccctgggcgtgctggccaagatcaacaccgacctgaccaccgatcagcacttcgccgacgcggcgctgaccgtgaagtggtgcgagaacgtcgaggagcgcctggaggcggcgaagcagcatgcgctgagtcagacggcctcgatcgacgagctgttccgcaccatcgacgagatcgccgcggaaacgcggaacaagcgtctgacgctgaagaagctggtcgatactcagaaggaagccatccgcttgaagatcaagggcaaggccgagcaggacttctgcgactacgtggcggccatcaaccagcgcctgggcaaggtgcaactgccggtcatccctgtcgacttcgccaacgccatcaagggcaagaagacgatcaccggactgcaggatggcgccaacggcgagttggcccgagcgaagatcgaggccgacaagtgggccacgctcatcgagcagaacctggccagcctgcgcgaactggcgaccgaccacgccttcctgttcagcgatgcgcagcagttggtgctgaaagccaacgacgacctgatgctgctgatcaacgcgcgcatcgccgagcaccaggcggaagaggagcgccgcctcgaggccgaacgcgaacgcatccgcgaagaggagcgccagcgcctggaactcgagcagcaggaagccgctaccgcgcagcaaccggatcccgtagccgagccggagccagttcccgctgcaccggcccctgcccgcgccgccggacgctctcgcactgcgacggcaccgaccacccaatggatcgcccgcgtcaccgacaagtccgcgctcatcgcagcgattgccgcgggccacaccaccgaggacctgctgatcatcaaccagccggccctggacagcctggccaacagcaatggccaaacgctgaacctaccgggcgtgatcgtcgagaaggcacccgcgaaagcggcctga

SEQ ID NO: 335582 - DNA, 264 bp, Pseudomonas aeruginosa
atggccgccacttacggacgcagcccggctgagattgctgaggacatggtactgaccatggccaccacagtcttcaacatcagccgcgagtttgcagcgcgttatagcgagcagcgctttgaactcgaatcagccaagccccttcgtgagcaggcagagacgctgcttgaggggtgggaaggtacgaacgcgaatatcgccgccgcgatgcagatgtggccgatctggtgctacgcaacccgcgcgcatcggttcaacacctaa

SEQ ID NO: 335583 - DNA, 213 bp, Pseudomonas aeruginosa
atgaacatcagcgttatgaacttcacggcctacaagatcaatgtcgattcttccagccgcacaacgattggagtctctgcattcgatgcggacggcgcctcggtgatggagaacttcgacatcgagcagatcgttaaccactttggcgcagaggccctccttgatgagatcggggagcaggttgcacgccgccacttcagcattgagggatga

SEQ ID NO: 335584 - DNA, 3291 bp, Pseudomonas aeruginosa
atggaactgatcgacaacatcaattcgctgctaggtgagagcctcaaggatacgctcaagccgggcgccaagttgaagatcgccgcgtcctgcttctctatatacgcctacgtggcgctcaagcgagagcttgaaagcatcgactccctggagttcatcttcacttcgccgaccttcgtgcccaacgaggcgacggacaagctgaagaaggagcagcgcgagttccacattcccaaggcagagcgtgagcgcagtctgaccggaagcgagttcgagatccaactgaagaacaagcttacccagaaagctattgccagggagtgtgcagactggatccgtcgcaaggctactttccgctccaaccgtggccaggcacccatgcagccgttcattggggtgcgtgcgcaaagctcagagtccgtctacatgccggtgcaagggttcacggcggtcgacttgggctaccagaaggggaacgcgctttccaacatcgtcacccgcttcgatgagccagcccatacgggcatgtttctcaacctgtttgagcagatctggaacgatcaggaaaagctggaagatgtcaccgcccggctctgtgatcacattgcctcggtgtatcaggagaacgcccccgagcgcatctacttcctgatgctctacaacatcttccgtgagttcctggaggatgtgagcgaggatgtgctgcccaacgatcgtaccggctatcaggacacggtgatctggaacaaactcttcaacttccagcgcgacgcaaccaccggcctgatcaacaagctggaaacttacagcggttgcatccttgctgatagcgtaggactgggtaagacgttcaccgcgctggcggtgatcaaatactacgagctgcgcaataaatctgtcctggtactctgtccaaagaagctggcggacaactggctcacctacaaccagaacctgaagacaaatatcctcgctaaggatcgctttgcctatgacgtgctgtgtcacaccgacctgagccgcacccgtggtacctcgcttggtatgcctctggatagggtcaactggggcaactacgacctggtggtgatcgacgagtcgcacaacttccgcaacaacgatgtctacaaggacaaggaaacccgttaccagcggctgatgaaccaggtcatccgtcaaggggtgaagaccaaggtgctgatgctctcggcgactccggttaacaaccgtttcagcgatttgcgtaaccaattggccctggcctacgagggtgacagcgacaaccttaataacaagctgcgaatcgagaaagacatcgacagcatatttcgccgcgctcaggcggctttcaatgcgtgggccaatctgccgccggaaaagcgcacggcagcggccatcttaaacagcctggatttcgacttcttcgagctgctggacagcgtgaccattgctcgctctcgtcgacacatcgaaaccttctacaacaccgccgacattggccgcttcccggagcgtcgcaagccgatgtcgttccattgcccgctgactcagcgcgacgatgtcatcggcttcaacgagatcttcaatcacctgtcgctgctcaagctcgccgtgtatgcaccggtaagctacatcttgcccagccggctgaagaagtacgaggagcagtacgacacccaggttgaaggtgggcgaggcaagctcaagcaggttgaccgggagaagagcctgcaggcgttgatgaccaccaatttgctcaagcgtctggagagctcggtggaagctttccgcctgaccctgcaaagtctgcaggcgagccatcgcggcgccctggataagattgcccaattcaacaaaaccggccagtcaactggttttgccgacgtcactgcggcctttgaagaggctgacttcgatgaggacagctggccgatgccgggcgacattagcattggcaaaaaaattcagatcagtctggaggatatggacctgccctcatgggagcaggatctgcaggccgacttgctatttatcgacgagttgttgggcgaaatgtctaaggttactccggccgacgatgccaagctgcaacatctgaaaacccagatcgccagcaagatcgcctctccgattaaccccggcaataagaaagtgctgatcttcactgccttcgccgataccgccaactacctgtacgacaacctggctgattacctgcagcgcagctaccaggtgcacaccggtaaagtcaccggcagcgacgcgccaaagtctacccttggcaacatccccggtagccggcagagctatgacttccagggcctgttgaccctgttctcgccacgctccaaggagaaggctgcgatctacccggacgagccgcgcgagatagatattctcatcggcaccgattgcatctccgaggggcagaaccttcaggattgcgactacctgatcaactacgacatccactggaacccggtacgcatcattcagcgctttggccgggtggatcggatcggctcccagaacagcagcattcagttggtcaactactggccggatatcagcctggacgagtacatcaatcttaaggagcgggtggagaaccgcatgatgatcgccgacgtcaccgcgaccggcgacgacaacgtactgaatgctcaggccaacgacgtggcttaccgcaaggaacagctgcgccgcctgcaggatgaagtgatcgagatggaggacttaaagaccggcgtctccatcaccgacctcggcctcaatgacttccgcatggatctgctcaactacatcaagcagcacggcgagttgagccatctgcctaacggcctgcacgccgtggtgccggcacagccggaactgggtttgctgccgggcgtgatcttcaccctgcggaaccgcaaccatggcgtcgacattaaccagcagaaccgcctctatccccactatctgatctacatcgacaaccagggtcaggtgatcagtgactacagcgaggccaagcgattgctcgatctggcccgcatcgcctgcaagggagagagccaaccgatcagagaggcctaccagcgcttcaaccaggtcaccgacgatggccgtaatatgcaggcctattccaatctgcttgatcaggccattcactcgatgatcgaagtgaaagaagagagggacatcgacagcctgttcagtggcggcaagaccactgcgttggtggataccattgccggcctggacgacttcgagctgatgactttcatcgtcattcaggatgtggcatga

SEQ ID NO: 335585 - DNA, 675 bp, Pseudomonas aeruginosa
atgactcagcccaaggtgtccttgttcgcgtttcccggccaggccagagttggtcgtccggtgccgaaagccaagatctatgagcacggccagataggcagcgcgctgcgcgataaatttgttgctcaggttgagcaaatcacttgggcctacaagctggcgccggagaccctcaacctaccggctcggccggaggtaccggagattcagattttcgacatcgagctcaagggcgcagagctggacgacgaagtcttgcgtgcaattgatcgagcgattccgctgccgatcatttatcagctgcaccgagaccaagagatttgcatggtggccgcgtataagcgacctagccaagccgagatcggcaaatggatgcttaacgaacatctggctggtccatggctaccggattccacagagcgacattccttgcctgtggctctggatctgcaggggctatacgagcaactgttgcgcagcttatcgcctctagcggctcgccccaacgaaagactgcttgagcatttggagcggttggcccaactgcgtggccgacaaggcgagtacaaaaagctagaagctcgtctgcacaaggaaaaacagttcaaccgtaaggtgatgcttaacgcccagttgcgggaactgaaaaacgaaatcgatcaactgggtgcataa

SEQ ID NO: 335586 - DNA, 369 bp, Pseudomonas aeruginosa
atgaaagaggtgtactactcgccggatacggtctcccaggacctgttatccgatcaggtcgacaatattcgcgaagaccgcacacccgaagacttgttgttccaggtgttgctcgactggggcgtggatttagcgctgccgatcagtcagaagaccatcgccggtaagcatgtgttcttcgtcgacggcaacgccctggtggcctgtttcgataagggtatcgacgaagcattcgtcaaacagattgccgagcacaagccgctgcgcgtggtattccgcgacaacggctttgccagcgatagcgtcaagatcaacgtcgagcaactgttcaaactgctgtcgccgacgaccgaaatcaagacgctgtaa

SEQ ID NO: 335587 - DNA, 3072 bp, Pseudomonas aeruginosa
atgaagctgaaattcaaggagcaggcctaccaactccaatccgtggagtccctcgccgactgctttgccggccaacccaaatcgtcgggcgttagctatcgcatcgatccaggtgtcggcggcgtgccgttggcgcagcagcagggttccctggctggtatggagcagcagccgaccatcgcgcctgtagatgctggttttcgcaatgcggagctggccctgacacaagaccaacttctgactaatgtgcaggcagtgcagcgtcggcagaacctgccgcagtcggctgcgttggttaaggacaagaaaactgcctgcccgatcaacctagatatcgagatggagaccggtaccgggaagacctactgctacatccgcagcatgttcgagctgaacaagcgctacggctggggcaagttcatcgttgtggtaccgagcgttgccatccgcgagggagtctacaagtcgctgcagatcactgccgagcacttcctggagcgttacggcaagaaggcgcgcttcttcatttacaactccaagcagctgcacaacctggagagcttttcctcggacgccggcatcaacgtcatggtgatcaatgtccaggccttcgccgcacgcggtgcagaccagcggcgtatctacgaggagctggatgacttccagtcgcgccgccccatcgacgtgatcaaggcgaaccgcccgatcctgttcctcgatgagccgcagaagatggaaggggccaagaccctcgaatcgttcagtgagttcaatccgctgtttatcgtgcgctactcggccacccacaagaccgagtacaacaagatccaccgtctggatgcgctagacgcctataaccaaaagctggtgaagaagatcgacgtgcgtggcatcacggtgaaaaacctgcccggtaccaatgcctatctgttcctgcagggcatcgacgtttccaccagcaagtcccctgtggctcgggtggaaatggagatcaagcagagcagcggcatcaagcgtgtcatgcgcaagcttggtcgcaacgacaacctgtacgatctctccggtggcctggatcaatacaagggctatgtggtcaccgagatcgatgcgcggatcgataccctgacctttaccaatggcgtggagctggtggccggtgaggccgtgggtaacctggacgagcctgctatgcgccgcatccagatccgcgaggcggtaaaggcgcacttcgaaaaggagatgctgctgttcagcaagggcatcaaggtgctgacgctgttctttatcgacgaggtggcgaagtaccgtcagtacgacgaaaacggtgaacagtcgggcgagtacgcgaaggtcttcgaggaggagtacaacgcctacttcaacgaggttctgagcttagaggacacgccgtacaaccgctacctgaagaggattcaggccagccaaacccacaacggctacttctccatcgacaagaagagcaagcgcttggtcgacccagccgccagcaagaagtcgaccgaaaccgacgacgtggatgcctacgatctgattctaaaggacaaggagcgtctgctgtccttcgacgagccggtgcgcttcattttctcccactcggccctgcgcgagggttgggataaccccaacgtcttcgtcatctgcacgctcaagcacagcgacaacacgatttcccgccgccaggaagtcgggcgcgggctgcgcttgtcggtcaaccagaacggtgaccgcatggacgatccggcgaccgttcatgacatcaacgaactgaccgtggtggccagcgagagttacagggagttcgtcggtgccttgcagaaggacatcagtgagtcgctatcggccaggccgcgcgtggccagcgagaagtactttaccggcaaggttctgcagactccaatcggcgatgtggaagtcacagcgcagatggccaagcagatataccgttacttggctaagtacgactacaccgataacaacgatcagatcactccggcctaccacgtggcgaagaaggaagagcaactggccgagctgcccgaggagctgaaaccttatgcccagcaggtgtttcagctgatcgacagcgtgttcagcgagacgcaactgccgcaaatcagcgatggacgcaaggctaaggtcaatccgctcaacgccaacttcgagcgcaaagagtttcaggcgctatggagcaagatcaatcgcaaggccgcgtacaccgtcaacttcgaggccaacgagcttgtagacaaatgcatagccgcactcaacgataaggatgagggactgtgtgtaaaacctatgcagtacatcatcgagcgcggcacgcagaaggagcacgcaagcatcgacgaactgaggcggggagaggctttcacacttggacagactgccaccgagacttacaccaactctgcatattcggcggtgaaatacgatttgcttggtaacttggccgaggccacccagctgacgcgccgtacgatcgcgcgcattctgcagggcctgaatgctgccgttttcagccagtacaagaccaacccggaagacttcatagccagggccgttacgctgatcaacgaacagaaggccacggccatcgtcgagcacattgcctacgattcggtggaggagacgcacagctcggacatctttacggccgaaaagccgaaagacgacttcagcaacgccttcgaggctcagcgccatatctacgactatgtgttcaccgactcgaccgctgagcgcaagtttgtcgagcagctagatgccagcactgaagtggtggtttacgcgaaactgccgaagagcttcttcatcccgacccccgttggtaactacaacccggactgggctatcgccttcagcgagggcaaggtgaagcacatttacttcatcgctgaaaccaaaggttccatgtccaccctggatttgcgtgccatcgaggcctcgaaaatagcctgcgcgcggaagttctttgccaagatcacgtcggatcaggtgaggtacggcgtggtggatgggtatgggaagctgatggacatagtcaaataa

SEQ ID NO: 335588 - DNA, 1086 bp, Pseudomonas aeruginosa
atgaaggggtatacgcgtacaatgacaagttctattgttacgacaggcattaagggtgagacgtatcaggcgttcttgcgaaagcatgttctaagtacccagccgactgtcgtcggattagcggttgcttatgtatcggtatcgggggttcaccttgttaagagaatttttgacgaggggggcgttaaagaagtgaggctcgtcgctgacacaaaggacggtgtcactcatcctagagcgctccaaactgccttggatagtggatggggagttcgtgtcgttgatagcttgccgggcacctttcacccgaagttatacgttggcgccgatagcttcaacgaagccattggcgtcgatgggctttcgctcgtaattgcagggtcacacaatctcagtctgggagcattcgctcggaacgccgagtgcgccttcttcagcactgtaccccacagcggtgattctgctgctcgggcatggctggattgctggaatctcggtgtgcagctcagcgctactaagctgacggaatatgaaaagtattttgcccttcgcaatcgtaaccgcagacctgaagatctcgtcgcattgggcgttgcagacgatgctcccaaaactcccgcaactggcattctgccaaaaagtgctaaaccgccgaaggctgccgcgaaggccatatctgagacggcggcctccgtggcatgggcagggctacagtcgttcaccggcgaatacaacttgcaggttgagtttcccaaggaggcagggctcgtgctccggagggtttttggaaagtttgctaaagacggttcgatcgacgtgcgctgtgccgacgggatcacccgagtcttcaagtacaaattttatgatcacaacggtatgtttcgcttaaacgttccgaacacggtgccattggtcgactgggcacgcgaaaataagaagggcattgcatacattgaacatgacgatgcaggtcttctttcgtttagaatattgcgccctggacagccgctcatggatgtggtggatcgttctcttgcgctcggcacgtggggccgaactcccacgagattgtacggctggtactga

SEQ ID NO: 335589 - DNA, 216 bp, Pseudomonas aeruginosa
atgttcgatgacattatgccccaggagaaagccagcaccatcggacaacccatcaactttagcaagaatctcagggaggtttttcgagaccttacagtcaagttcgacatccaagtcaggccgtattgctccaactttaaagatacgatctggatgcccctcctttccgggagcgacctccagatcgatcaccaagctcttgggttggaaaactga

SEQ ID NO: 335590 - DNA, 141 bp, Pseudomonas aeruginosa
atgcctgccctgcatgcctgcaagaaccacatcgtgctgcagactctcaccgggtcgctcataacggaaatcagcaaagccgaagtagcgattaagttcatggcgcggatcatgggtcgtacggcagtaccggcagtctga

SEQ ID NO: 335591 - DNA, 2313 bp, Pseudomonas aeruginosa
ttgcatcttcactcttatcgtcttaggaattttcgacgcttgaaggatgctcatattgagctcgctgacgatatatcaatattcgtagggtcgaataacagtggtaaaacgtcggcaactcaagccatccatgcatttgtcacgggtggaagggatcgttttagcctctatgatttcagctcttcgtgttggaaagctttcgacgaagctggaaatataaacctggcggatccgattccagagggcttcgcacttcccagcatagacctcgatctctggttcgaagttgcagctcccgacctctatctagtgattccattgcttccgagtacagcatgggagggaaccaaggtcggcatacgtgtttccctgacagctcgaaaccccatcaacgtccttcaaaactatcaagcagctaagactaaaggcaccgagcagactgcggaacttccgccagaatcgcaatatgttccctggcctcgctccatgacggattttctccagcgagagctcaagaacgaatatgagctgcgctattttattttggaccgcacgcaatttgacgagaaattccgtgaggtcggcgattatgctccgggcgaattaattggagagccgagcggcggaacgattctgaagtcgcttatccatatcgacaacttgggggctcagcgacaccttactgatcctaatccagaagcaggcggtagatcggaagatctttcgaagcgtctgagccgcttctacaaacgcaatcttaatcagaggcaagacgatcacatagccctcaaggcgctgttcgattcagagcaagcgctgaatattcacttggatggggtattcaagcctatgcttgatcggctcgccaagcttggttacccgggcatcaataatccgcgactgaagattatgtcggcgcttgatcccgcccacgtcatgagccaggacgcgcgggttcactacctgatcggagatggcgaagatacagccacccttcctgatagttataacgggcttggattcaagaatttgatctacatggtcgtggagattctcgacgcccaagctaggtgggccacgatggacaatcgtcccccattgcacctgatttttgtggaggaaccagaggcccatttgcacgcccaactccaacaggtcttcatccgtaatgttcttgagctcctgaatatagagggcgacgacgagagtatttttggcagtcaaatggtcattacgacccactcgccgcatatcctttacgagcgaggcttcaagcccatccgttactttcgacgcaagaaggttgggcaggagcagttgacagaggttctaaatctatcggccttttaccaagcccagccagatgatcgtgattttctagagcgatatctaaagttgactcattgcgatctcttcttctctgatgccgcaatccttgttgaaggcaatgttgagagattgctcctgcctgtcatgatccgaaaggtggcgaagacgctccgttcagcttgcctatgtattttggaagtcggtggtgcctttggacaccgcttccagtcgcttatcgaatttctcggcctgacaacgctgatcatcactgatattgatagtgtcgccctcgttgttcctgcggctggcgctgccgctgatgacgaggaggtcgaggagttcgaggttccagccgacgcggaagaaaatgtcgctgcgcgggatcagaatgataggcaagatcccgtcgcggagcctatagccccggcaccgaagaaaaaatacggtaaggcttgcttgcctaatgaagcagacgctgcgacctcaaatcaaactctcataaaatggcttcctggcaaactcacaatcgaagatctgtgcaacgcctcggaagcggataaaactcacaatcttgaagatgatgcgaaggttcgtgtggcctatcagactgagcgggctgtcacctggaacggagccactgaaagcctatgcgggcgcacgcttgaggaggactttggcctcgaaaacccagagtggtctcaagctgcggcaaggaagcctcttggcttggtagtgaaaggcgaagccgccgaccctaaggctcttgccaaaggacttcatgagaaggtttcgcggaagagtttcgataaaacaaagtttgcactcgccgttctcactgaagacgaggatgcgtggcatgtccctgcttacatccgcgacgggcttgtttggttgaaggacgaagtgcggatcgaacttgagaccgtactgcccgccgccgttcccatcgccgaagatggcgcggaaggggacaagcatgagtag

SEQ ID NO: 335592 - DNA, 1956 bp, Pseudomonas aeruginosa
atgagtagccgggcgaataagccggacacccaggccgacatcgaccttcgaaactgccttggagacgtcccgccacgcagcttcataatgaaagctggtgctggttccggaaaaaccacttctctcatcaagggcctgtcgtcggtcatccaaatgcacggagataagctgagaaaagcccgtcagcgcgttgcctgcatcacctacacagagatcgcagcgggagagatatggagggacgttggcagtgatccgctggttcacgtctcgacgatccacagtttcatgtggctactggctaagccgttccagaacgacattcgtgtttgggtgtctggacgtatcgcggaaaaaattgaggtcctcgaagagaagcaggcgacctacggtcctagggttcagcagcgtacgaaggacaaggatacccgagacctagagcgcctccgccgacagtcagggcggatcgctgcagtcaaaggcttccgatacggaaccggcagtgactacgtaaaggggattttgggccatgacgacattctaaagctcgtgccttacctcatcgccgaacgtccccttttccgaacccttctcgcgcgccagttccctttcgtgtttgtagacgagagccaggacacgactaccgaagtcgtggaagctttgaagaccgtccagcgtgagtccggagttccattttgcctcggtttcttcggcgatccgatgcaaagaatttacgccactggcaccggtctggttgaagcagagcccacttgggctgacattccaaagcgtgaaaattatcggtgctcaataaaggttctgaatctcgcaaacgccattcgtcgtgatggtgatgacctcgttcagatccccggccaacgtataggttccgagggcatcatcccgactcctgagggggctgcgcacattttcattttgcctgcggacgatacgcgggatgccaatctggttcgagtacgcgagtggatggcggcgcgaactggtgatgatcattggcgactcggtgatgatgaccaagatcgggtaaagcttctcgtcattgttcaccagatggccgccaggcgcttagggttcggagacctctacgccgcgctcaactccaaagccccgtcagcattcaaagatggttttttggacggctctgcatggcccatttcgccgtgtgtgaaattccttattcccatagcgatcgctcacacagatggtcgccagctcgaagtgatgcgactgatccgagagtattcacccatttttgacaaagacgccctcgccggggggagcgttgccgaacgccttaaagtacttggagagcttgttgcgtcaattgcagacggcatagcagggagttccaatgtaacgatcggcgaccttctaaagcaggtgcatgacgcagagttactgatcctcgacccccggctggtatcgtacttagacccgaatgcagttgcacttgctccgcccgagcccgaagaagaggcaggtgacgaagacgacgcgcaagaagatgatgactctgacaaggagctggcttcaatggatgcttttctagcatgccctgctagccagcttctggcgtaccagacctacatctcggaacgctcacctttttggactcagcaaggcatcaaaggggctgagttcgatagggtgctcgtcgtccttgacgatgcggagagtacccacttccagttttcctacgaaaaatatctgggcctcaaactaccctctgaaaccgaccaaaagcgcatagaagccggtgaagagacgactatggatcgaacgcgtcgtcttttctatgtgagctgtacaagagctttgaaagacttggcagtcgtcctcttcacggctgatcctggacaggcaagtacgcatgtgcgccaacttgatctttttgaattcgaggctatccacactgaggcagttttcgagggggcgtag

SEQ ID NO: 335593 - DNA, 993 bp, Pseudomonas aeruginosa
atgtactcacatcaagctttacctagagcactctcgcagtcagaagcaacgatagctattgaccgtctagtacgagcatgcatcgactctagctcaccagccttccatgtttggacaacaccaacaggccgagaggaaatccggaacacaagactatcccgacacttccaagacgttcagcagttattgaattcttatgatgatcggtacgactacagtcccagcctggagctcttctggcaagcctgtcacgacatcggcttggaaagggaccccaacggccctatctgcagagagtccttcaactctggataccacagccaccacaaatcgatgaacaccttggtagacaagattcgtgagctagctatgcatccgagtttccgacgagcacccgcagatcggagaagcgcattcaaaaaacgaatcgaagtatttgagacctacatcccctacgtaatggagaagtcaccctgcacaacgattgtccggcttgacctccattaccgaagcgcagtcaaccagttcattcgtattgaacacgtctatcacgatctagacactctaattcgtaagcgcgagcagcactctgccttcaagcatgagaccggatacgtatggtctatcgagcagggaaaagatcgaggctttcacattcatatcgccttccttttcgatgggcgatacatcaaggacgactggggaaaatcagtgcaaattggtgagctctggcaagaaatcacgcgtggcaaaggctatttcttctcctgcaacaattcacggcacaaggcaaggttccataaggaaggccgtcttgctgtcggaatgtttgagcagccgtatgaagccgagtattcgaagattttctacggaattggctacgtggcaaagaacgatcagccactccttgtcaaacccaaaggccgcaggacgtatggcaaaggtcagatgccgaagctcagacagcaatggctgctcaaggagccaacatag

SEQ ID NO: 335594 - DNA, 1179 bp, Pseudomonas aeruginosa
atgaaaagattgatagggatcaccctagtcgcactggccatcaccggctgcaagtctgaaatcgacaatgcagagaccgttatcagaaatgggcttatctataaatacggcgagaccgatccatttaccggactggtactaaacactccagcaggaattcccggcatatcagcgctttgcaactcccaagtcgagaaaggtcgctacagcggaaaaagcgaatgtttctacaactctctgaaggtgtacgaggttgagttctcggaaggcagcaaggacggaacagagaccgtattcgatgcggaaactggaaagacgaaatccgtcaagaactggaaaagcaatcgcctacacgggacggtggaggaatacctcaacggaaccctgataagccgaaaagaatacaaagacggcctgcaagacggggacgaggtcggctggtccgaagacggtagaacgaaaattaccgacattacttggagcaatggcaaagagcaaactggatttaaaacaaccttcgacaccaactttaaagcttatccatctggaaaatacaactacctgaacggccaactgcatggacagcaaatcacattcagcagaacaaacagcggaaaacagtacatacacatcgaaaaatactttcagaacgggaagcaggacggcatattcaaaaggtacatcggcatcccgaatacagatgtcattcaacaggatcttgagatcctctacaagaatgacgacaccgtatcgggatggtttaggcagtacagcagagtggacgggagactcattcaagaaatcaagctgattcgagcctccaatgacgaaggaaaaggtttttacgatgactatcctggcaccttagtgccagacggactcataaagaaatacaatgatttacttgacacaactacaggcgaagagttctgggtcaacgggataaaaggtgaccatcctcctcaaccccaaggaatccaagagtctagtagtcatatacgggaagaagagacttcgcgcgaagagtatctcgccgacagaacacaagcattctcatctgagggttgcctggatgcttggatcaccgcctatcgaaaagaaattggcgatgcagccatgatcgtgagcgagcaaatagatgagtggaaggactggtgtggcgaagggaagcttccataa

SEQ ID NO: 335595 - DNA, 306 bp, Pseudomonas aeruginosa
atgaaaagacagtgtttgatctgcgactctagcgccgtgctgacccgggacgcagccaaagggctaagcctgctggccgggctgttcaatggcgcaatcaagggcgctcaacgcccgcttggggagagcggccaagccgatcttctcagcggcctggcggcagtcgcacccgcctacccggaagctcggaacgcggcagaggatgtcgtgcggtttcactttgccggcttcgactgcctgtgcctgcgctgcggtgcattattcgacgagacagcagaaagtaaggagggccttagccccggctga

SEQ ID NO: 335596 - DNA, 273 bp, Pseudomonas aeruginosa
atgaatagtaaaggcggtaatccgcaggaggttgagccgcgcccgattgcgactgtgctccgcctgcgcaaggtggttgaacggctgggtatttcgcggtccacaatctatgactggatgaatcccaagtctccccgtcatgacccgacattcccgttgccaatcaagctctccggcagcagtaatcgcggggctgtgggttggctggaggctgatatttcttggtggattgactctaggagaaccatcactcaggagagtgcgcggaaatga

SEQ ID NO: 335597 - DNA, 1302 bp, Pseudomonas aeruginosa
atgaccacggggctcggaattcccgttgaagcagatgagcaactcatctggctggagcagttggttcagagcaatgccagtgcgttggtttttgcccctagagagggtgcgccggagttgtcgagcaagctgctcaaggcggctgatcgcctgttgtttcctgtgcttcgcgccagcttcgagctggagttcaacaagctctctcactatgtgattgagagcgttctacaagcgcagcgagagcgctttaacgcaactgagcgcctgttccaaacgtacgccgaagccttgcgtaaagagccggacatggctgggcgtctgacgatcctggcctccacactggaacttggcctcggcatcgaggatgcagtgagcggtgtcaccatcgccgagtctcaatcggccaggtatcacacctcggagcaggtcgagcgcatcccgattgctgggcgtgtgcgggcgaacctcgtcattgcacgcaaaggcgagcgcaccctcaatgaccctattctgattcgttctctagtggggctgctgggggtggagctcgaacgcctcatgatccaccgagaccagcagcgtgacgaaggggcgaccctactgcgcagtcttctcggcaacgaggcggaattcacccttgctcggcctatccttgagcagcgcggcctaaccggctctctggtaagcctggcaatcaaacctggtgaagagggcgcgtggaggtcagatgagcttcatcatgcacctgcactgcaccgagcaacccctttgctattgagcgacaaggaattactccttgcggtcagcgttgatgacagcggcctgtttgaggctctgcatagcagtctcggtaaagacacagtgatagggatcagtgggccgattgcgaccgccacagggttcaatgaaagcgtcaggcaagcacgcctggctctgactcaagcgcaggatatggggacttccatgctgcgctacggagaggtggaaaccgggttgatcatggcccccaaatctctggcagaggcgcgggcattggtcgggcgttacctggggccgctgattgagcatgaccgcacccagggggctgccttactggcgactttgttggccttcctcgacaacgacggcagttggaaagcgacggcgtttgacctggggattcaccggcagactttggtttatcggctcaagctggtcgagcagctgacaggcatcaaacccacgaccacgcagggtattgcgcgcttctggatcgctatccaggcaggccggaacactgatctactggagcgtcggggctaa

SEQ ID NO: 335598 - DNA, 1512 bp, Pseudomonas aeruginosa
atgactaccaccatcatgaactggatttccggctcccaagtggaggccaccagcggccagcaactgccgatctacaacccggccaccggagccgtcaccggccaggttcagctggcaagccacgccgatgtggactcagctgtggcttcggccaaggccgctttccctgcctggagcaacctgccgcccctgcgccgttctcgcattctgaatcgcttcctggccttgctcaacgagcatcgcgacgaactcgctcggctgatcaccgcagagcacggcaaggtgttcaccgacgctcaaggcgaggttactcgcggcatcgagattgttgagttcgcctgtggcgcgccgcagttgctgaagactgacttcaccgaccaagtgagcaccaacatcgacaactggactctgcgccaggcgctgggagtagtagcaggaatcacgcccttcaacttcccggtgatggtaccgatgtggatgttcccggttgcgctggccaccggtaataccttcgtcctgaagccaagccctatcgacccgagcccgagcctgttcattgctgagctgctcaagcaagccggcttgccggatggtgtgttcaacgtggttcaaggcgacaaggaagccgtcaacgcgctactcgttcaccccgatgtgcaagcggtctcctttgttggatccacacctattgccaaccacatctacgaaaccggcgctcgccacggcaaacgcgtccaagcactgggcggtgcgaagaaccatctggtggtgatgcccgacgccgatatcgatcaggtggtagatgccctagtcggcgctgcctacggctccgctggcgagcgttgcatggccatcagtgttgccgtgttcgtcggcgaggaaaccgctgaaaaggtcatgccgaagctgattgagcgcaccaagaccctcaaggtgctcaacggcaccaacctcgaagcagagatgggcccaatcgtcacccgtaccgctctcgaccgcatcagcggttacatcgaacaaggcatcaatgagggcgcgactctcctggtggatggtcgtggcttcaatggtgaggtggcgggcgaaggctgtggcgatggtttctggctgggtggcaccttgttcgacaacgtgaccccggagatgcgcatctacaaggaagagatctttgggccagtgctggcttgcatgcgcgtgaaggacttcgctgaagccgtagaactgatcaacaaccacgagttcggcaacggcgtgagcctgtacacccgtgatggccatgtcgctcgcgagttcggccgccgcatccaggtgggcatggtcggtatcaacgtgccgatcccggtaccgatggcctggcatggcttcggcggctggaagaagagcctgttcggcgacatgcacgcttatggcgaagaaggtgtgcgtttctacaccaagcagaagagcatcatgcagcgctggccacaggccattgccaaaggtgcagaattcgcgatgccgaccagcaactga

SEQ ID NO: 335599 - DNA, 1383 bp, Pseudomonas aeruginosa
atgtctgcaaaatttgatttgacccaattgcccaacaggcctctctggtttgagcagagcccagctcgcgctcctctggaaggctcggcggaggccgatgttgtaatcgtcggagcgggatacaccggcctatggacggcctattacctgctcaagagcgatccttcgttgcgcgtggtgctcctggagaaacgggaagttggattcggcgcttccgggcgaaatggaggttgggcttcagcgatcttcccgatctccctgtcgcgtgttgccgaaatgtattcccatgaagcagcgctgaagctccaggctgcaatgaacgagacggtggatgaaattggccgcgttctcgcccaggaaggggtggaagctgattatgcgaaacaaggcttcctctctctcgcacgtagcgcaccacagctggctcgtgctcgggccaccgtggggtcatccgcgcgcttcggcctgccggatcagtggcaggtgctcgatgcggagcaagccagcgccaaggtctttgccaagggcactctgggcggtctctataccgaacattgcgccctgatccatcccggcaagctggttcgcggtctggcacaactggttgagcggatgggcgccaagatctacgagcgcactgccgttaccaagcttgttccaggcatcgtccacaccgagcacggggcgatcagagctggattcactgtgcgagcaaccgaggcttttacatcccagcagcctggacactcgcgtttcgttatcccgctgtactcgttggtactggcaacagaaccgctgcctgccgatctgcgccgcaagctgaatctcgatcagcgcctggctttcaacgatatgcgccacctgcgcgtctatggccaggtgacggccgagggacgccttgtcttcggtggtcgcggtgctccttaccaatggggctctcgcatctccgacgactcggatctggtcgacaacgtccacggcaagatccaccaggcgatgctggagttcttccccgacctggctgatgcacacattacccaccgctggggtggtgccctcggggtctcccgcgattggtgccccacggtgagcatcgaccgggctaaaggtatcgcctgggctggcaactacgttggggacggcgttgctaccagcaacctggcaggccgaatcctccgaaatttgatcctcaaacaggaagacgacctcaactcgctgccgctggtgaatcaccattcgccatcttgggagcccgagcccctgcgttggctgggcgtgaacagcgggctcgccgcggcgtcgctgagcgacattgaggaacgcattacccatcgtccatcacgcactgcgatgttgctggagaagctgacaggtgcgcactaa

SEQ ID NO: 335600 - DNA, 1401 bp, Pseudomonas aeruginosa
gtgcctatacaaacagagcacgacccgcgcttgaagcgtgcactcaagacgcgacacatcagcatgttggccctaggcggcgttatcggcgccgggctattcgtcggctccagcgccgtaattgcctcgaccggccctggagcgttcatcacctacgccatcacagggattatcgttgccctagtgatgcgaatgctcggcgagatggccgcagcacaccctgccaagggatccttcgtcgactacgcccgtatggcattcggtcgcccggctggctacatgacaggttggctctactggtacttctgggtaatcgtggtgggtttcgaggccgtggtaggcggtcagatcatcaatggatggtttccagacttacccgtgtgggccatcgcgttgggcctcatggtcatcatgaccctgctgaacctgatgtcggtgcactccttcggcgaagcggagtattggttcgccggcatcaaagttgccgccatcatcgttttcctgatcgtcgtgggcgcctacgttttccatctgtggccaggctcgactgccagtttcagcaacctgactgagcacggtgggtttctaccgcatggggtcagctctctgttcactggcgtggtcgtggtcatcttctccatgacaggcgtggaagttgccaccctcgctgcagcagaatcggaagacccctctcggaacatccgtaaagccgtcaatgcggtgatgctgcgcatcctggtgttcttcgtcctggcgactttcttcatcgtcgtcgcccagccctggacagaaatcgaagctggtaagtcccccttcgtcgcgacccttgagcacattggcatccctggtgctggccacatgttgaccgccgtgatcctggttgccgttctgtccgtgctcaatgccggtctctatacctcgtcccgtctgctgtatgtcctggactccaatgatgaagcaccaagctgggtcgctggcgttagccgaaaaggtgttccggttcgcggagtcatcgcatcgaccttggtgggctatggatgcgtggtcattgcagcaatctggcctgacaccgtcttccagttcctcatcaactcgtccggcacggttttcctcttcgtgtacctggtgatttgcctgtcgcagataaagctgcgccgcaaatgggtgaacgaggggacgctgaagttcgctatgtgggggcacccgtggctaccgctcctggtgaccgcatccatcgtagcggtgctggtgagcatggctttcgacccctcaatgcagatcagtcttctgcaatgcctgatcgcaatagccgtaatcgccacctcgtacatgctcttcagggctaaacgggcccgccagcaaagtcgagcggtggaagtcactccggtaagaagcgcctga

SEQ ID NO: 335601 - DNA, 360 bp, Pseudomonas aeruginosa
atgcactcgattcgcatcattcttggcgagcacatcatcagtgccacgctcgaagacaatccatctacccgcgacttcctcgctcaactccccctgagtttcgatctcgacgattattcgtccacggagaagattgcctacctgccacacaagctcgccactacgggcgcacctgccggtgtagatccaaaggttggtgatgtcacctattacgcgccctggggaaatctggcgatcttctacagagacttcggttattcacggggcctgatcaggctcgggcgcatcaccgatggccttgagcactttggctactcggggtctaggcaggtaagggtagaactcgtttctgtggattga

SEQ ID NO: 335602 - DNA, 990 bp, Pseudomonas aeruginosa
atgaattacacccatcttggccgcacaggccttaaggtcagccgcattgggctgggcaccatgaacttcggcgaactgaccgacgaggcaaccagtttcaggatcatggacgaggcgctggatgcaggtatcaactttttcgacaccgccgatgtttatggcggtccgcaatcgccagacatgaccaagggctatggtatctctgaggagatcatcggtaactggctatcgcaggatagattgcgacgtgacaggatcgtgttggccaccaaggtttaccagccgatggagactggtcctaacgataaatacctgtcggcctatcacatccgccgtgcctgtgaagccagtatgaagcgcctcaagacggaccatatcgatctctaccagatgcaccatgttgatcgggcgacgccttgggaggaagtctggcaggcgatggagcaactgatccgtgaaggcaagatcacctatgtcggcagcagcaacttcgctggatgggacattgccactgcgcaatgcacggcagcttcgcgccaccagcttgggctcgcctccgagcaaagcctctacaacctgacgcagcgcacgatcgagctggaagtgatcccggcgctgcgtcatttcggtattggcctgattccttggagccccatcggcatgggcctattgggaggggtactacgcaagatcgctaacgggcgacgggcgacgccacatcttcagcagcgcattgagcagctccgtccgcaactcgaagcttatgaagcgttatgtgaagagatgggcgaggctccagcggacgtagcacttgcctggcttctgcacaacccggtggtgaccgctgctctcagtggcccgcgcaccaccgagcaattacgtgaaaacctcaaagctcttgagctgaaactctccgaagatatcttgacgaagctggatgcaatctggcctggcccaggcggcgaggcacctcaggcctacgcttggtaa

SEQ ID NO: 335603 - DNA, 966 bp, Pseudomonas aeruginosa
gtgccactgcaattgacgcaggaatgggacaagaccttcccccgaagtgaaaaggttgagcatcgcaaggttaccttccccaaccgttatggcatcactctggctgctgatctgtatctgccgaagggtcatacagagggtcggctgccggccattgtggtcagcggcccgtttggtgcggtcaaagagcagtcttccggcctgtacgcaaaaaccctggccgagcatggttttgtgacgttggcgttcgatccgtcctacacaggcgaaagtggtggcgaaccgcgtaatgtcgcgtctccagacatcaataccgaggacttcagtgcggccgtggacttcgtcggcttgcttgcggaagtggaccgcgagcggatcggcatcgtcggcatatgtggctggggcggtatggcgttgaacgcagcggcggtggacaaacgcgtcaaggcagtagtcaccagtaccatgtacgacatgacgcgagtcatgtccaagggctacaacgacagcgtaacgctcgagcagcgcacgcaggtactggagcaactgagcctgcagcgttggaatgatgcgaaagctggagcacccagctaccagccgccctacaacgaactgaaaggtggtgaggctcagttcctggtcgactaccacgactattacatgacaccccgtggctaccacccgcgagcggtcaactcgggcaatgcctggacgatgaccacaccgctgtcattcatgaacatgccgatccttacctacatcaaagagatatcgccgcggcccatccttttcatccacggcgagaaagcgcactcgcgctacttcagcgagacggcctatgccgctgccgcagaaccgaaggagctggtcattgttccgggtgctagccatgtcgatttgtacgatcgcccggacaagattcctttcgaccggattgcggagttcttcagcaagcatctgcggtaa

SEQ ID NO: 335604 - DNA, 927 bp, Pseudomonas aeruginosa
atgggcgtgtccggagccatagtcgcgttagcgccggactacttcacctacctgctggggcgggccttgatcggtgtagtagtcggtggtttctggtcaatgtcggcggcgacagccatgcgcttggtgtcgagccgggatgtgccgcgtgcactggccatcgtgaacggcggcaatgcgttagccactgtggtggccgctcctctaggcgcttggctagggaccctgatcggatggcgcggggcttttctctgcctggtgccaatagcgctggtggccctggcatggcaatggaaaacgttgccgtccttgccggccgccgcgcgtacgccgggcccggataacgtgttcaaggtgtttctcctgctcaagaaccccggaatcatcatcggcatgttggccagcagcctgctgttcatggggcagttctccctgttcacctatgtgcggccattcttggagacagtcaccggagtgcacggcgctaacatttccctcgtactgctggttatcggttgcgcaggctttattggcactctgctgatcggacgggttctgcaacggcgcttctaccagacacttgtggtcatcccgctgctgatgtccataaccgccttggccctggtcgccttcggtgattggccggctattgtcgtcgccctgctcgggctctgggggctcaccggcacctctgcccccgtgggctggtgggcttggatcgcaatggcctttcccagagacgcggaagcaggcggcggcctattcgttgcagtcgtccagctctccatcgcattgggctccacgctgggcggcgtgctgttcgatcactacggcttccacagcaccttctatatgagcgccgctgtgctgatggtatcggccgcattaaccgcccttaccgcacgcggaccagccttgtctggttaa

SEQ ID NO: 335605 - DNA, 3555 bp, Pseudomonas aeruginosa
atggcgatcgaagggaaaattctgagtaatccattttcaacaggaagtggtggcgcaagatttgaagcaaatattcaagcaacttttgttacgcttatgcttagtggggggtattcgccttgtctgccaaattggccaatagtagagattaagctacaagggaaagtggctggtttcgagacggatgatcttatcgtttatgttgaaaatccatctacgcaagagcgctgtaagttgcttggccaagtaaagcattcgattggtgttacggaaggtgactctgtttttcaagaagtaatacaggctgcttggattgacttcaataatcccgagatttttcaaaagggtgttgatgttatagctctaatcactggtccgatcagtgcgacggactcagatggagtcagcggacttctggagcaagcccagcggtgtaaagattcggaggagtttattacgaatgtaagtcgggcaaggttttgttcggaaactgtccgtagaaagctgaaggcgttcagagtgcagctaaaaagagcaaataatggagttgaccttagtgatggggaaatattcgattttcttcggagcttccatcttcttggctacgacctgtctcgcaaaggtagtgtggtatcatcccttcttcaatcccatatttctcagtttaataaagatattccggataagatttggtatcatataattaatgaggtgcaggcgtttaatcaggcggccggaactattactaagtctagtttgggtagtgaggttgtcggttattttgaacagccgaagctgacttacattccaagggagcttcttggggtcgaagcacaagttcaagtggagcgcatagagacaagtgtagattggaagacgcaccccgccgctgcgtttatagcgcaagcgaatttgcttggggcgtggaatgaggcatctgctgatgatctacgagtggttgaagagtttgtaaaagaaccatacgtaaaatgggttgagaaacttcgtgatgtgctttggattgagggatctccattgacacatcgtgatggtgtttgggcaataaaggatcgtgaaagatgttggattgattttggatttagggtctttgatgatcatctggaatcaatggctgatgtgtgtaaggctgttttggaggttaatgatccagcgcttgatcttccgggcgatgatcgatacgcagcagctattcacggaaaggtattgccatatacaaacgaccttcgtgaaggtttggcagggacattggcgttgcttggaacgaaggcaggtgcgctaagcaattgtcggaaagggaaggcagggagtattgtcgaagaagtggtttattttcttcttggaaatgctgactgggtgcgctgggcatcactcagcgagctggcgccgacgcttgccgaggctagccctaacgcctttctgagtgcggttgaagaagctacagctcgtcaagattcaccatatttagagctgttttctcaggaagccggtggtgtctttggtagaaattatatggtgggggttctatgggccctagaggcattggcttgggatgaagagctacttatccgagcgacagtggcactagcggaaatcgctgctatagaccctggcggaaactgggtgaatcgtgcaaaaaattcattgacagatattttcctaccatggcttccgcataccctgggatcctcggaaaagaggaagattgcattaaaaacaatttcccgagagcagccaaaagtttgccgtaagttacttggtagtttgattccaaatcaacagaaatcaacctctggaacgtttaagtcagtgtggaggctgaaagtagatgagtgttggaataagaaaatagggcatgctgaatatatagagcagtcaaattattgtgctgaattgcttgtagagctggctgggtgggattctggtgcattggccgatttggtaaataaatatgcaaatttaccggcgaatgctcgcgatttgctattggaaaggttgagctctaaagatttcactagtaagccggagttggagcggtatgaggtatggcaagctgcctggaatttattaaggcatcatagaagatttcctgaggcgagttggagtatgccggaggagcttttatcgccactggagtgtgttgctgacaaaataaaaccggaaagtgctgtgctgcagagtaaggaactgttctcaaataatgattactatttgctagatcactcactggacttcgagcagcaaagagaaaaacttgacgcggcaagaggggtagcactcgaagcgatcttggcggaaggcggttttgattgtgtcattgaattttcgactacagtggctgatcctcaagctgtggggcaagcattagcaactatagatggcattaacttcgatggtgctatttttcctgctttactgagtgagtccggaaagctgaataagtttgtgtctggttatgcatggtataagcggtggaggaaaggttggcaatggtttgatgacttggataagtactcgttttcgccggataatttagtttcattgctatgcatgctgccgtttagtaaggatgcatgggttagggctgagcaactgctcggggatttgcaatctcgatattggttgagtgtacagccaagtgttttccaaatggatagtgatttcgactatgctgtcgagaaactacttgaggtaggccgcgcaggtgccgctttagaggcgtacgcttctgagttatttaataagagagatattgatccagatttggcatgtcgagcgctgatctctttcggcacgaccgggggggactcaaagcgcattgatgcttacagaatttcagaaataataaagaacctacagggccacgcggcggtagataaagttgaactcggacgcgttgaatggatgtacatcgggttgctcgacagtcacaatgaggttcgcccggttacactagagaaaaatttggcttcaagtccagcttttttctgtgaattagtgcgtgctgtgtatgctccaaaacatcggcccgaggagaccgatgcaactgtagtggatagtaatgttgctctcaatgcgtatcgccttcttcagcggtggagcctagttcctggggtaaaagaagatggatcattttgctctgaagagttcaggtgctggcttgcagaggtagacaaattgtcgaatgagacagggcatcatgatatggcaatgagttgtctgggaagtgtcttaattcatgcgccaacgaccgatgatttatggatggcacctgtcattgctgaggttctgaatgaaaaggatagagattcgctaagagaggggtatgcgatttctttattcaactctcgtggcgcacattgggtcgatcctgagggtaaacctgagaaagaattagccgaaaaatatcggcaacaagcgatgctgatggaaactggtggctttcagagattctcaaggaccttgttggatattgccgaagactacgaaaggcaagctgagaggcacattgcgcgttttggtaaaacggatcattga

SEQ ID NO: 335606 - DNA, 351 bp, Pseudomonas aeruginosa
gtgcattccttgggcagctcaccgtcgcgtcgggatatttggcaagccgcagccacctacgccgcccgcgcctgcgaaaaactcagtgcccaaggctccttcggcaagcgcgtgcaggtcagcatccgtactggcatgttcaaccccgacgaaacaaagttcgccaagggcgtcagcgtcgaactcccataccctacctacgacacccgcctgatcaccaaggccgccaccgacggcctggagctggtctaccggaaaggcttcgccttcagcaaagcggaggtgctgctgctcgacctccgccagcctggcaaattcactggcgacctgttcgcgccagagcagccctag

SEQ ID NO: 335607 - DNA, 666 bp, Pseudomonas aeruginosa; identical to SEQ ID NO: 323670

SEQ ID NO: 335608 - DNA, 249 bp, Pseudomonas aeruginosa
gtgctttacatcgcctcgatgtgggtcaacggcatcacccagggcctgatgtggcgcgcggtcaacgaggacggcaccctgacctactccttcgtcgaagcgctggccgccggccaccccggcttcatcgtgcgcatgctcggcggtggtttcttcctcaccggcatgttcctgatggcctacaacacctggcgcaccgtcagtgccgccaagccggccgaatacgaagccgccgcacagatcgcctga

SEQ ID NO: 335609 - DNA, 519 bp, Pseudomonas aeruginosa
atggcaacccccgcctatatgtccatcaccggcaccaagcagggcctgatcaccgccggcgccttcaccgaggattcggtcggcaacacctaccaggaaggccacgaggaccaggtgatggtccagggcttcaaccacgaagtgatcatcccgcgcgacccgcagtccggccagccgaccggccagcgcgtgcacaagccggtggtcatcaccaaggtcttcgacaaggcctcgcccctgctgctggccgccctgacctccggcgagcgcctgaccaaggtggagatccagtggtaccgcacctccgccgccggcacccaggagcactactacaccaccgtcctggaagacgcgatcatcgtcgacatcaaggactacatgcacaactgccaggacccgggcaacgcccacttcacccacctggaagacgtgcacttcacctaccgcaagatcacctggacccacgaagtctccggcacctccggctccgacgactggcgctccccggtcgccggctga

SEQ ID NO: 335610 - DNA, 2487 bp, Pseudomonas aeruginosa
atgaatagcgatgaattcaaaagtagattgagaagaaaaatgcttgccggagaggtgattctttttctgggagcaggggcatccttaacctctacaaacaaatcaggtgaaaagatatgtcttggaaatgctctgaaagataaaataagcgagaaatttcatctttccacaacagaaaccgacacacttggagatatttacaacatagcaaaaaaacgctcaacaagtgacctgtacaacatactatctggagaatttagagacacgtccccatctcatgaatacatatcactccgagagtactcatggaaaagaatatatacaacaaacatcgatgactcctttgagaacacagaaaaatctctcaacgtcccagcacagaaactaataaaaatacacggctctgacaggataaccaataaggagtctttagaaaatctatactttgtaaaactaaacggagacatacaacaaacaaataaaggctttatattttccccagaagaatatggagcagcatctgcaagctttctaaactggtacgaggaactaggaagggactttctaaactacgattttatttttatcggaacacaaataaatgaaccggtattcttccacactattgagtactacaagaacagagtcacacacacagatacgaaagcctatctgatctgtccaaatatatcagaggtaaagaaagaatccctagaaacatccaacatagaggttatcgacgcaaagctatctgactttacaaccatcctatctcaaatatttccacacggccttaacccttcagacatactccatgcgaaaaacccttggttatctataaccaacccagagaaatacaatctatcggccataaaagatatcctaccagtaacaaatgacactttaaaaataccaacttccacagataactctcagcgcgacttttataaaggcttcaaaccaacctggaaagatatcgtagaaaaaattcctgctgaactatcattttacactaaagccctctcatccatatctctcttaacgagagaaaacagcatagttttaacaggccctgctggctcaggaaaaacaaccaccttaaaacaaatggcatggcgcctaagagagagtcatagtgtttattacatagactacacaagcagcctcttagactcctttaaatttttaaatgatctcgaaccaggtaagaaaaaaataatatttatagagcgaatttcaatacacatagatgagttcatagaagctagagatagaaagcttacatcagacttccttatagtaaccgccgagcgcgaaggaatatggaactcaagaatcaaggagcacttcccagaaaaaagcacaaaaacatttgaaacaaatactataaccaaggaagatgcaaaactaataataaaaaaattagaaaaatacggaaattttaccagactaaaaaaactaaaagaaagccagcaaagtaaagaacttcatcaaaagtctaatggccagctgctgataggtctgttagaagcaacttacggccgtggctacgaaaagataatcaaggacgaatatagaaacctagactctgacgagaaacgtgctctagtatttctaaccgcaattggaacggcaaacaacgtaccgtcatctgttaacacagtccaaatcgcattatcctcactgggatacagtgacaacattgacgaatacgaagaacaaatgaaaggaatccttacgaaaagtgcggacacactatcattacgacatccagtatatgcggaaaaagtaatctataactcagcttccacggcagaaaagcatgaactaataaaaggctacctagaagctttctcaaaatatgagaaaccaacaatttcaaacttaaacaaaaacaacaaaacaatcttcaaatccataataaacgccaactatttgtacaaacttttagatggaaaaagaagagaaatattagacatatataagaacaacgaaaaaccatttgaatccgatggacttttttggctacagtatgcattagctctaagaaagttccatgagcacaaaggtgctcttgagaagctaactatcgctaaagatacttggtcagactctgctcaaattagccatgcactagcacaacaactcatgctaatggttatagatgaactttcagactcacccgaagcagatatcgaaatagccgtagaagagtttagacgccttgaaaagttagaaaaaattgtaaacgtatatccactagtaacactagcagagactcatacttgcgctacatctatagtagaaggaattgagcgagcaaaagaagttgccagagcatactataaagagataagtaaaaaactacagaacaaagagaatcatgaacgattaaaatcctgtagtgaaagcctactccgcttttctgtatctggagacatttccgtattcaaagaaatagccacaaccctaaagcaagaggcatag

SEQ ID NO: 335611 - DNA, 1920 bp, Pseudomonas aeruginosa
atgcacatcgtaatcattgaagccccgggcaagctgaaaaagctgaggtcccttctcccctcgattcgtcccgacgtgacctggcaggtcgaagcgactgccggtcatatcagagacctacccgttcacggccaggatccgcagatgctcaccgtcggcgtgggccaggatttcaaaccgcactaccagatcctctcaggcaaggaaaaaaccgtagcacggctgaaggagctgcggcagaaagccgtggaaatctacgtcgcatccgacccggatcgcgaaggcgaaagcatcggctggcacatcctccaggctgccgggatcaagaactacaagcgcgttgccttcaaggaaatcaccaagtcgtgcatcagcgccgagctcagctcgccgcgccgtctggacctcccgaaggtcgcctcgcaggaatgccgtcgcgtcatcgatcgcctggtggggtatctggtcacgccagagctgcggcgcgtgatgggcaggccaaccaccgccgggcgcgtgcagtccgtcgcggtgtacctggtggtcctgcgagagcgggagattcgcgccttcacagcaatcaagcacttcggggtggaactggccttcgtttcgcccagcgacggccgcacctggaaggcggagtgggatccagtgcccacgtttgccagcaaggagttcccgtatgtccaggatcgtcaactcgcagaactggtgggggctatacgcaatgtcatcgtcgagacctgcatcgatggcgaagaaaccgatacgcctccggcaccgttcatctcctcctcgctccagatggccgccgggaatgcgctgaagtggtcacccgacaagacgatgaagatcgcccagcggctgtatgaacaggggctcatcacctaccaccggacggacaaccccaatatttcgaaggactccatgccggatatccgtgctgtcgccaaggcattggggctgaagtgtgttgagcaacagcggatgttcaaggctgaccaggacgcccaagagggccaccccgccatcacccccaccgattggacggccgctaccgccggtgaaactgctgatgagcaggccctgtaccagctcattcgagttcgtgcgcttgccagccagatcgaagctaccgtgtacgcagtgagaaccatcaccctcctgggcgtcggccccgacaaaaagccgctgcgcttcggcgccaaagggaagctgttgaacgtgcctggctggcgaaaactgctgcagggcgatgacgccgaggagcagaagaacgaaacgccttcaaaccccatcccggcgctggagccaggccagatactcaaggtctacagcggcgaagtcctggagaagaaaaccacccctcccaagcgattcaccgacgccagcctggtgggcgagatgaagcgccgcgggattggtcggccatcctcctacgcctcgatcgtgaagaacatcatcgacaagggccaggtgcagatgaaggggcgaagcctggtccccggcgagctgggcgaggccaccatcgcgctcctagagcacaacttcagcttcctcagcctcgacttcacccgcaacctcgaggtcgccttggaccggatcgccaacagcgaggacacctacatgaacgtggtccagcagttctaccagctactacagacagagctgcagacactccgcgcgctccccagcgcacaggacgaaccacgcgcaagctccaccgccaatgtctcctcggcaccgtccgacgacttcctttgcggcaagtgcggtctgcccctggttcaccgcaagaaagccggcaagggcggcttcgacttctggggttgcagcggctatcgaacaacagggtgcaaggttagctaccccaccaagagcggccggcctgacttcgacaacccgcgcgggctatag

SEQ ID NO: 335612 - DNA, 918 bp, Pseudomonas aeruginosa
atgagaaagtctcggccgggcgttgtgcgttttcacagcggcctaggtgtttcggcccgaaacactcagtcaggtcctgacctcggcgccgacggcgaactgggtgttgcggcccgcaacactctgccaaggaacgacctcggcgccggcagcgaactgggtgattcggcccgaatcacttcgccaggtcctgacctcggcgccgacggcgaactgggtgttgcggcccgcaacactctgccaaggaacgacctcggcgccggcagcgaactgggtgattcggcccgaatcacttcgccaggtcctgacctcggcgccgacggcgaactgggtgttgcggcccgcaacactctgccaaggaacgacctcggcgccggcggcgaactgggtgatgcggcccgcatcacttcgccaggtcctggcctcggcgccggcggcgaactgggtgattcggcccgaatcacttcgccaggtcctgacctcggcgccggcggcgaactgggtggttccactggaaccacttcaccaggaactgacttcggcgccggcggcgaactgggtggttccactggaaccacttcactaggaactgacttcggcgccggcggcgagctgggtggttccactggaaccacttcaccaggaactgacttcggcgccggcggcgaactgggtggttccactggaaccacttcactaggaactgacttcggcgccggcggcgagctgggtggttccactggaaccacttcaccaggaactgacttcggcgccgacagcgagctgagtgccttgctccgattcgccatgggaaattccccagcgacgaaccatgtatttcctactgcgcgctcctaccccgatcagcacgatgtggccgaaccccttccctatataggaacactgcaccatggctga

SEQ ID NO: 335613 - DNA, 1674 bp, Pseudomonas aeruginosa
atgcccgaggtactggatacctacgactacctcatcgttggcgccggacctgccggctgcctgctggccaaccggctttccgccgaccctgccaaccgtgtcctgctgctggaagccggcggcccggacaactatccctggatccacattcccgtcggctacctctactgcatcggcaacccgcgtaccgactggtgcttcgacaccgacgaggtccccgggctcaacggtcgttccctgaagtacccgcgcggcaaggtgctcggaggatgctcctcgatcaatggcatgatctacatgcgtggccaggcccgcgactacgaccagtgggtggccgaaggcaatccgggctggagctggagagagctgctgccgctgttccgcaggatggaggaccatttcgccgggaccagcgaaatgcacggcgccggcggcgaatggcgggtagaacgccagcggctctcctggaagctgctcgatgccttccagcaggcggcggcgcagaccggcatcgccagcgtcgaggatttcaacggtggcgacaacgaaggctgcggctacttccaggtcaaccagcgcggcggggtgcgctggaatgcctctaaaggcttcctgcgcggcatcgcccagcgcgccaacctgacggttctgacccatgccgaagtccagcgagtgctcctcgaggacggccgcgccagggccctgtcggtccgttggcagggccgcgagcagcgcttcgaggcgcgccgcgagatcgtcctgagcgccggcgcgatcggttcgccgtgcctgctgcaacgctccgggatcggcccgcgggacctgctggagcagctcggcgccggggtcgtccacgagttgcccggggtcggtggcaatctccaggatcacctgcaactgcgcatgatctacaaggtcgacggcgttcccaccctcaaccagatcgccggcagcctatggggcaagctgggcatgggcctgcgctacctggcgagccgcagcgggccgttgtcgatggcgccgagccaactgggcgccttcgcccgctccgatccgcagcagccctcggccaacctcgaataccacgtccagccgctctcgctggatcgcttcggcgagccgctgcatgccttccctgcgttcaccgcgtcggtctgcgacctgcgtccgcacagccggggaacggtgcgcatccgctcgctcgacccgggcgaggcgccgtcgatccagcccaactacctgagcgatccgcgcgacctgaaggtcgccgccgacgccatacgcctgacccgccgcatcgccgccgcaccggcgctggccgccttccgtccgcaggaatacaagcccggcccggaataccgcagcgaagaggatctgcagcgcgctgcggcggagatcggcaccaccatcttccaccctgccggcacctgccgcatgggccaggggccgcaagcggtggtggatgcgcaattgagggtgcacggaatccccggcctgcgcatcgccgatgcctcgatcatgcccagcctgacctccggcaacacctgttcgccggtgctggtgatcgccgagaaggcggcgcagatgattctcgccgagcgccgccgcgaggccgcgccgcaggtcgtcgaaagcgccatggcggccggcggcaaggaggcggtggaggcctga

SEQ ID NO: 335614 - DNA, 1629 bp, Pseudomonas aeruginosa
gtgaagaactggactgttcgccagcgaatcctggcaagtttcgccgtgatcatcgcgatcatgctgctgatggccgctactgcgtacgtgaagatgttgacggtggaaaagggcgcctaccgtgtccaggacgacgccatgccggggatgtacttcatcacgctggtacgcagttcgtggaccgacaactacttgcagacccaggaactgttcggcatcaccgacgaccacgagctgagcaaggccgaggccgacagtatcctcgccagcgaggagcgcctggaccagcagatcgcctcctaccagaagaccatgaacccggacgaggcccgcgaccacgagttgctcgccggtttccaggccgtgcgcaagaactacctggagcagcacgacaaggtgctcgagctttaccgcgagaagcgcttcgaggaagccggcaagctcgtcgccggcccgttgaccgagcactggcgcgagggccgcaagtacctcaacgagatgatcgagctgaacaaggacatcgccgaccgcgcctcggacaacatcgtaaacgcggtggacgatgccgaactgagcatgctggtgaccctgctgctggcggtggtggtagccggcatctgcgggttcctgctgttgcgggcgatcacccagccgatccagaagatcgtccgcagcctcgacctgatggccggtggcgacctcaccgcacgcctgaacctcggccggcgtgacgaattcggcgccatcgagaccggtttcaacggcatggccgaagagctcaagggcctggtgtcgcaggcccagcgttcttcggtgcaggtcaccacctcggtcaccgagatcgccgcgacctccaagcagcagcaggccaccgccaccgaaaccgccgcgaccaccacggagatcggcgccacttctcgcgagatcgccgccacctcgcgcgacctggtgcggaccatgagcgaagtctccggcgccgccgagcagacttcgaccctggccggttccggccagttgggcctggcgcgcatggaggaaaccatgcaccacgtgatgggtgcggccgacctggtcaacgccaagctggcgatcctcaacgagaaggccggcaacatcaaccaggtggtcaccaccatcgtcaaggtcgccgaccagaccaacctgctctcgctgaacgccgccatcgaggcggagaaagccggcgagtacggccgcgggttcgccgtggtggccaccgaggtgcgccggctggcggaccagaccgcggtcgccacctacgacatcgagcagatggtgcgcgagatccagtcggcggtatcggccggggtgatgggcatggacaagttctccgaggaggtccgccgcggtatcgccgaggtcggccaggtcggcgagcaactgtcgcagatcatccagcaggtgcaggcgctggcgccgcgggtgcagatggtcaacgagggtatgcaggcccaggctaccggtgccgagcagatcaaccaggcgctggtgcaactgggcgaggccaccgggcagaccgtggagtcgctgcgccaggccagcttcgccatcgatgagctgaacctggtggcgaacgggctgcgcaacggcgtatcccgcttcaaagtctga

SEQ ID NO: 335615 - DNA, 915 bp, Pseudomonas aeruginosa
atgtccgagtcccgtctgctcaccctgcgcgactacatccgctgggctgtcagccgtttccacgccgccggcctgttcttcggtcacggcaccgacaatgcctgggacgaggcgcgccacctggttctgggctccctgcaccttccctgggaaatttctgacagctacctggattgccgcctggaagacgatgaacgcgccgagttggcggagatcctccggcggcgcatcgaggaacggattccggcggcctacctgctgggcgaagcctggttctgcgggattcccttcagcgtcgacgaacgcgtgctggtgccgcgctcgcctatcgccgaacttatcgaacagcgcttcgcgccctggctgccggccgagccggcgcgaatcctcgacctctgcaccggttccggctgcatcggcatcgcctgcgcctatgcgttcgagcaggcggaggtggtgctcgccgacctgtccttcgatgcgctggaggtggccaacgtcaatatcgagcgccacgacctcggcgagcgggtctacaccgtccagggcgacggtttcgccgggcttcccggccagcgcttcgacctgatcgtgtccaatccgccctacgtggatgccgaggatttcgccgacatgccggcggagttccatcatgagcctgaactcggcctggcctgcggcgacgacggcctggacctggtgcgacggatgctcgccgaggcggccgaccacctcagcgagaaaggcctgctgatcgtcgaggtgggcaacagcgaggtccatgtgcaggcgctgtatccggaagtggacttcacctggctggagttcgagcacggcggccacggggtgttcatgctgtccgccgcgcagtgccgcgagcaccgggaactgttccgttcgcgcttggaaaagtga

SEQ ID NO: 335616 - DNA, 780 bp, Pseudomonas aeruginosa
atgatcgatagcgatacccaaccggccgcagaagaagccgagaagaaaccgccgcacccctgggccgaactggccccggagcatttccgcctgctccgcctggcgccactgcccaccgaccgcgcgaccggcgcccgccccctgcgcttcgtccagctcggcagggtcgaacggcacagcgcggaccagagcctgctgcgcctgagcatccaggtgccaggcctgatgctgcgcaaggagcagaacctgctggaggtctgggccgatcatcgcaacaaggaagtgcgtttcggttcggacgccgggctcagcctggaacccttgaaccgcgggctgggccgtttcctgctggcccaggcgatcgcctgggcgcaacgacgctgggcccactacaaggtggaaggcggcgcactggcgctgaaggatggcctgaccgaagacgcacgcctgcgccgcgaccatttcatccgcgcccagggcttcgacgtcagctatgaggaccagcggttgctcaaggcccgctacagcgccggccgggtcagtgagctgcacagcgattggcacaaggacaaggtgcagatcgtgccgctgctggacgccgcggcgatgctggaacaggccgagcagaccctgcaggcccaggatgcggagatccgccaactggaacagcgcatcaaccactaccgccgcgacgacaccagcctgcgcttcaccatcgcctgcctgaccgccttcgcggtgttccaggccggcctgctgatctggatcgccactcactga

SEQ ID NO: 335617 - DNA, 924 bp, Pseudomonas aeruginosa
atggcaaaagcacctattaaaaaacatacgtctaaacaggtgaaagggcgagagcgtacatatcgtgtatctgcaataaatatcgtacttcatcctcatagcccagagaaatatgctgaactctggcgtgagatattttccagcgatgatcctgtgaaggttcgaggtacatctgctgtcatgattggttcatgctcggcagtcaacgatggcaatgataaagaaggagttacaggtgtagtatataaattctttaagctcgacgctgccgaaccttggttcgatacgcagaagagaactgctgcagataaaggagagcttagtaagatatctattccggaccatcttaaaccgcatctgcaagagttttcttacgtattctatcccaaagggcaccgtttgtattttgtttcctcgcgtagcggggcgcaattgtctccaaagtttttgctgtcatatttggagcgtgtcgttgagcgcgcagagtttagccggtttggcgagattaagctaacggtggtgccaagtgaagagtctattagccaaatactttctctcagtaggctaaagagtctttatttagatatccacaaacctaatccagacgaccagaaaagtgctgaggcactgatgcaggcaaggctgaagaaacaaaatattaaaaggtctgagattactcttaccgaagcatcaagcagtggaattaagcctgacgatgaaacgaaaattcttattaagatagccgccaacaatggcgaggtgcgtgctcgtggacagaactcgaacggtgagctcgtcactctatctacagagaaacaccctctacaagaagttgtgagttatgattccaatatccagtcggaacgcagtagtttgcaaaatttcgcggcaagtttgcatgccagattttttggtggtcgatga

SEQ ID NO: 335618 - DNA, 1053 bp, Pseudomonas aeruginosa
atgatcatcaaaccgcgcgtgcgtggcttcatctgcgtcactacccatccggcaggctgcgaggccaacgtcaagcaacagatcgactacgtcgaggccaagggccccgtcgtcaacggaccgaagaaggtcctggtcatcggttcctccaccggctatggcctggctgcccgcatcaccgccgcgttcggttccggcgccgataccctcggggtgttcttcgagcgtccgggcagcgagagcaagccgggcaccgccggctggtacaactcggccgcgccgcgccgtacccatccgaagagcggcgaagtgttctcctcgaccctcaagccgatcggcaagtcggtcagcttccgtggcctggacaccgacaaggaagtgatcaaggacgtggtcctggaggcggccagcgaccaggaggtcgccgataccgttgcggtgatgggcggcgaggactggcagatgtggatcgacgcgctgctggaggccgacgtgctggccgacggcgcgaagaccaccgcgttcacctacctgggcgagaagatcacccacgacatctactggaacggttccatcggcgcggccaagaaggatctcgaccagaaggtcctcggtatccgcgacaagctcgccccgctgggcggcgacgcgcgcgtgtcggtgctcaaggcggtggtgacccaggccagctcggcgatcccgatgatgccgctgtacctgtcgctgctgttcaaggtgatgaaggagcagggtacccacgaaggttgcatcgagcaggtcgacggcctgtaccgggagagcctgtacggcgccgagccgcgcctcgacgaggaaggccgcctgcgtgccgactacaaggaactgcagccggaagtgcagtcccgtgtcgaggagctgtgggacaaggtaaccaacgagaacctttacgagttgaccgacttcgccggctacaagagcgagttcctcaacctgttcggtttcgaggtcgctggggtcgactacgagcaggacgtcaacccggacgtgcagatcgccaacctgatccaggcctga

SEQ ID NO: 335619 - DNA, 843 bp, Pseudomonas aeruginosa
atgacccagccctcgaaacggaatgggcaggttccgctggacgacgccctggagcgccatcgcgacgcgctgaaggacctgttcccgctgccgccctcccggccgaaatcgcgcaaggcaagcaaggcggccggcgtcgcgctattgctggcgctggccatcggcgccctggcctggctggacccggcctacaagcgcgagcgcttcgccaccgccatcggtgagcggcgcgacgtgaccctggctgacggcagccagctcctgctcgacagcggcagccagatcgaggtcagttggcacccgctcagccgtcgggtcgcgttgcgcgcggggcaggtgcttttcgaggtatccccggcgcgctatcggcccttcgtggtgtccgcgggttcgaccgacatccgcgtgctcggcacccggttcaacgtgcgccgcctggacgacgatgtccgcgtgaccctggagcgtggccgggtggaggtcggcacctcggctacggcgcaagcgccagtcgtgctcctgccgggccagcaggtcgatgccattggtgggcaactgatgccgctggccaaggtcgatgccgccacggcgatggcctggaaagacgaccgcctggtcttcgagcgcacgcccctgggcgaagccgtcgcgctgctgcgccattatcgcaaggcgcccattctcctggacgaccccagcctggcctccctccggctgaccggcgtcttcgccgcgcacaacgccgaccggctgctcgacctgctgccgagcatccttcccgtggccgtgtcgcggcaggaggacggcagcgtcgagatccaacgcaaatcgacgcgaaaataa

SEQ ID NO: 335620 - DNA, 3336 bp, Pseudomonas aeruginosa
atgacagtgcatgaccccctcattcccactcaggaagatctctttcatgaggaggtattgctgctgctaccagagcgctttgcaatcaattgcaaggtactcaataacccagttcgacagcttgcaagtccagaagcacgtgagctctgcaggttgcggccattttcagttcgtcaaatcgttggctatgaagcgaccttatcatccggcgagactctgaggattatcagcgcaaagacagcaacccaactcaatgtggatttggtcttattggtgccaggagctttggagcccacagaaatcgctctggcgctcgagcgaggcgaaggccgatgggtcgccaacgccacgatcgacctgagtgcgctcgatgcagcagctcggaacgtaagactcgaagcaattacgtcctcttgggacgacgccttccaactccgtgaaagccgtccggctaaaggtgacagacccgccacgccagggttacgtcgtccccaaatcggtgctctgcatgcttcgcttgcccacctcacgcgatcaagttcgcctgccactattgtcatgccaacaggtaccggcaagacggaaactatgctcgcgctaaatgttcaccagcgtttcgagcgattgttggtggtagtacccaacgatgcattacgtgagcaaatcgccggaaagtttgaaacctttggtgtgctcaggcggcaggagtgtctcagctctagagctgaatatccgatagtaatgcgcctttcccacattcctactgcagtggatgaagtggatcagatcttcggtagcgccaatgtggtggtgactaccatgcagattgctggtcgtgccgacgctcagattcaggagcgtatggctgatcacgcatctgctctcttcatcgatgaggcccaccacattgcggctccgacttgggcgcgatgccgcagccttttcgtcgatcgtgaattgccattaccaattttccagttcactgccactccttttcgagaggatgggcgacgagtcgatggcgagttcatctatacatacccgctcaagaaagcgcaggtagaaggctacttcaagccgatccgcttcgaggcggtctttggtctggatcaagccgaggctgatgaggcgattgccgaaaagcttggtgagattctgcaaggcgatctcagtcttggtctaaaccacttggcaatggcgcggtgttccacaattgagcgcgccaaggtgcttcatcagctctataaccggcggttcccacaacacattcctgtccttgttcacagcaaccagtccgcacgggaaaggcgtgcaagccttgcggcgctgcgtcgttttgacagccggattatcgtgtgcgttgacatgctgggtgagggtttcgacttgccggagctcaaggtcgccggcctgcacgacccgcataaaagcgttgcggtcactattcagttcgtgggtcgattcacgcgacaggaccccaggctcggcgatgcaacagtaatcgccaacactggcgtggatgacgtcgaccgctcgttggcgaagctctatgcggaggatgccgactggaatacgttggtcgaggcgctgagttctgcccggatcgaacggcaggtgcggcgtgccgaaatgtttcggggcttcacgggcgatctccgcgacattcccctgcagacgttggagcccaagatgaatgctgtcgcctacaggacgacctgcgaagcctgggatccgctgcgagtagaggacctctgttcacctggcgtgtaccgcggcatgaagctcaatcagcagcgtcgagtagccatattcgttacgcgtaatgaagaacaggcaggatggactacagctcagcaagccaccaatgtcatctgggatctgcacatgatgcattgggatgaggacgctggactcctgttcattagcagctccatgaaaggcccccatgacaagcttgccaaggcaatctgcggcgacaccgcgcgccgaatcgagggtgaagacgtgtttcggagtcttcatggcttcaagcggctgattctgcgcaatctgggactcactcatcatcagggccgtggagtgcgttactccatgtacatgggcgttgatgtcgctgacggcctagacaccgctaagcagtccagaatcaagaacaacgtcttcgccactggcttcctagatggtgtgccggccattcgtggttgctcggtgaaaggtaagttctggtcgatcactccggtccgagacctaaccgattgggtggattggtgccagggaattggtcggttggtgaacgattctggaatcaccactgatgaagtgttcaagagtgcgatgcgaccccgtctgatcagcgagaggcctgccgttcctcccgtcgcgattcactggccggagtcgctaatgacgcagatcgaggaacgtatagaaatcagcttcgatgaccaggttgtcccgttctccgaatgtgatattgagcttctcagtcatgagaagaccggtccgttgcgatttgccgtaaccagcgatgctcatgttgccgagtttgaaattgagttcatcgatgggggcgcccgctatccacagcgggcggggccgaaagcgacgatcaagattggcagtgctttgaagacgttatctgagtcgttcggagaggatgcgccacagctcgactttggagacggatcgcttctgatctacagccatctctatgcactgccagaaggtgtgtctgtcgagccatacccagctgacaagattgttgagtgggattggtccacaaccaacatacgggccgaatctcaaggtgtcgagaagcgctccgattctgtccagcgcagggtcattgattacttactcactgatagcaacgggtatgacctaatttttgatgatgacgggaaaggggaaattgctgacgtcgttacgctacgcgtcacagacagcttggtccaggtcacgctctaccattgcaagttttcgagcagcgatacacccggatctcgtctcggagatctctacgaggtatgtgggcaagcgcaaaaatctgctcgatggcgtgatcgtcctaatcgcatgtttgctcacatgctgaagcgagagaagcttcgtctcaaaaaggggcagagctctcgcttcgagctgggaaccgcagcatcgcttaagaagctgaaggcgagctggcaagactatcgctacgagttcgacgttcgcatcgtacagccagggttgtcgcgctctgcggttggcgaggaggggttgcatctgctagctggggttgaaacgtatctattggaaacccgcgcgatgaaactgcggattattggcagtgcatga

SEQ ID NO: 335621 - DNA, 216 bp, Pseudomonas aeruginosa
atgttcgatgacgttatgccccaggagaaaaccagccccatcggacaacgcatcaacttcagcaagaatctcggggaggtttttcgagaccttacgatcaagctcgacaccgaggtcaggccgcgcggccccgaccttaaagatacgatctggatgcccctcctttccgggagcgacttccagatcgagaaccaagctcttgggttggggaattga

SEQ ID NO: 335622 - DNA, 2121 bp, Pseudomonas aeruginosa
atggacgaactcgaccaaaaactaaatgccacgttcgacggcaaagtgctgcgcaaggacttgctgcatcgaatcaagaaaggcactaacgttccgacgttcgtcctggagttcctgctcgccaagtattgcgccagcaacgaccaggctgaaatggatgccggcatggaggcagtgctctcgtcgctgcaggaaaactacgttcggccagacgaggccaacgcagcgcaatccaaggtggccaccaagggcaagcatcgcttcatcgacaaggtccatgtccgctacgtcgaaaaggaaaagcgccactgggcatcgttggagaacttcaactcgcaacgcatcgccatcggcgaaaagttctatcgagacaatgatcgactgctggaaggcggcatttgggccgaagtcaccctggcgcacaacgacattgatgaagacgactacgcgttttccatcgaggatctgcggccgatccagctgacccgtttcgacttcgaccgctacgcagaaggccgggcagctttcactcgcgatgagtggatcgcggcggttctgcgctctgtggggctcgagccaagcaagctctcgaggcgcgttcagatgcatttcatcgcaaggctggccgctttggtggaacccaacttcaactatatcgagctgggcccgcgcggtaccggcaagtcctacttcttcagcgagttttcgccttacgccaccttgatctcaggcggccaggcgaccaaggcaacgctgttctacaacaacgcgcgccgaaaggtgggcttggtcggcttctgggacacagttgcctttgacgaggtcggtgggatcaaagtgcgcgatccggacacaatccagatcatgaaagatttcatggccaacgggcgcttttcgcgcggggctgaggtcattgctgatgcaagtttgagcttcgttggcaacatcgacgtgtcagtgcagcaggtggtcaattccaacgagcacgacctgtttcagcccctgcctccggagcttgacctggccgtcatggaccgcttcgccgcgtacataccaggctgggagatgccgaagaacagcagtgagttcttgaccagcaattacggattcatcactgattacctggcagaagccttccactaccagttcaagcacacgaaccgctacgaagaagtcagcaagcgcattcgactcgggaaatcgattgaggggcgcgacgagaaaggcatcaaaaaaaccgtctgcgcattcttgaaggtcttgcatccgaatgggccgccaacggacgaggagttcgaggaatacgtggcctatgccacggagtgccgccgccgcgttaaggagcagatgaacaagcgcaaaccagacgacgagtttgctcgcatcaacctgtcctacttcaaggcgagcggtgaggaagttgtggtgttctgcccggagtcgaaggatgcgccggccacgcaagagcctgcgcgccgtcgtctgaatctggcggatgggcaagctgctgaggcagtcgaagtgcgcactgccgcgccaccggcccctgctacacacgagccgccaacagtatcgacgccagtatcagcggcgccagccccggcggaggctttggctgtgactggaccgtcaccggtcgaactcaaggaacagcacttcaccatcctctatggtgataccgggcacagctatgagtcgatcctcggcccttatctgcaaggcgcgaagtccgtcgtgattgaagacccgtacattcgcctgcaacaccagattcagaacttcgtgcgcttctgcgagacggtgctaaaggccggtacggtgaagaaaatcaacctgatcaccggttacgacgacaaaacacaattggccgacatcgccgagaagctcgatgagctgaagcagagcctgctggaaatggatgtcgagttggaggtgaagctcaatccgaacatgcacgatcgagagattcgcattgacaatggatgggtcgtcaagattggccggggtctggatttcttccagaagcctggtggctggtttgaggtgggcgcgaacgatttgagtctgcgcaagtgccttgaaacgaagattgatattttcagggcatcgggctcgccttag

SEQ ID NO: 335623 - DNA, 2529 bp, Pseudomonas aeruginosa
atgacgattgcggaattcattcgagaaagcgtgctgcggccgcgcctgaagcaagctggcgccttggtggtgtatgacgccgacaagcgctaccgcgagcaatgtttcgatctggccaccgataaggtgcgagtggtggatgcgtctgaaagcagcattgaaagccgtgaggcggcgctgcaagcactgcgcgaggtgggtcagcccaaggcgccgcttgaaggtgtgttgatctacgtacctgccaaacgcccggaaaacgacgagcagaagcaagctgatccattcgcgctgtacgcagaatgcggcgcggtgttcccgcaagatgatggcgacgagtatctgagcctgtgcctgcgcgccaggccggatcacgcgaccgagatccggcaggtctttgccacctctcccgctgggccgacctttgcagtgatcgatgccattggcgggggagtgagctggccccagttgcgagccactctgcgcgtggagtctggccgcgagattctggctgcactactggcccccactactagccaatccgaagcgctcaaggggcaggacggctgggtacaagaggctcgtgacttcctccgcgctaccttgggcctgagtgtgaagacgcgtggcaagacctggtctgccctggcggatgaactgtggcgttacgtgctgttcagtgagtttgtgtttgatctgccagtggcgctgccggacaccctgaagggggtgccgcacgcaccgatggaagccagacccatcgtagaggatgtgtgcgaccgtctgcgcagcgatccgaaatcacgcgctatatacatcgagcgcgccgaaaccaccgaggcggaactcaacctgaccgatctttgtggcgcgattgaagacctgggcgagcgcgacaccttccccttcgaggagcggaccttcctgcgcacagcgatcaagggcattgtcagcggcgacactgatgccacgcgccgtgtgctgactcgccataagagctcggtatggctcggcaagggcgaaagccaggcccagtgggagttggtgcgttctggtttgagcctggtcgaggcctgcgacgattttgagcgccagttgccggatcacgcccgctcgcaagcggagctgatcgacttctacctgggcagcctgcgtgaagcagaccgtttgcagcgcgagtttgagcaagcggcgggtgacttcctcgaccagcatggcttgatgcatgaagtaatcagccaagcacgggcgcgctatcggcgcttggcggagaaggttcagggcgtgtttgtgaagcacgttgagaccgccggttggccacccaacgggcgcctggccaatgccgatgcctttgatcgcttggtggcggatcgactcaaagagagcggtcgtaaggtggcctacctgatggtggacgccctgcgttacgagctgggcgtggcgctagaaaagctgctggccgaggacggaccggttgagctgcaagcggcctatgcgcagctgccgaccatcacgctggtgggtatggccagcttgctgcctggcgcacgcacggggctgaccctgtcgctggagagcgatgcaatggtacccaagctggcgggggcgccggtgagcaacgtcccgcagcgcatgaatgttctggccaagcggtatggagatcgcttcgcggaaatgccgctcaacgattttgttcgcggcaaaccgaagatcgcagagactgtcgatctgctggtgctgcgctccacggaaatcgacagtcagctagaaagcaaccccgagacgaccttgggtttgatccctggcacgctcaagctgatccgcgtggcactgcacaagctgcgtggcatgggcttcaaggaagcggtcatcgtgaccgatcatggcttcttcctcaacgcgcaagcggaagctggcgatgtgtgcgtgaaaccgcaggggaaatggccggtgattgctcatgatcgcatgatgctgggcgacggcacagcagatggtcacagcctggtcgtcagtgcagagaaggtcggcattcgcggtgatttcacgcaagtggcactaccgcgcagtatggctccctatcgctcggggcatctgtatttccacggcggagcatccctggcggaagccgtggtgcctgtgctggttgcgcggctagataccgccgctcatgcggatctacgcaaggtgatggtggagctgagctacaagaacggcgccaaacgaattactacgcgattgccggtcatcgaagtaatactggtggccgacgatatgttctcgcaagacatgagcgtggagatattgctggaagcgcaggacagcaagggcaatgtggtaggtgagccgcgcccaggcggggatgtgaaccctgcgaccagaaccgtgaccttaatgccaggacagcgcaagcagattgcgctgcgaatggatgatgagttcagaggcaagttctcggtcaaagcgctgaaccccacaaccctggcggcctacagcaatctggcgcttgaaaccgactatacggaatga

SEQ ID NO: 335624 - DNA, 1809 bp, Pseudomonas aeruginosa
atgattcaggacgtcaaagcgctgccggtcagcttctacttcagccccgatggaacaacgtcgttcttcattcccaagtaccagcgcgagtacgtgtggggcggcaagaactgggacgcgctgttcaatgacctggaggagtcgcctagtgggcactttctgggttccatcatctgcgtgaacactcagcaagatggcatggccggtggccgactggagctgatcgacggccagcagcggttcaccaccatcagcctgttgttctgtgcgttctacgacaagctgaatgccattccgaatccggatcgtcgtttgctggtggaactggacaacctggaaagccgcatcttcgtccgcgccttaggccagtggcgtctggaacccagcgagcaagcgcaaaataaaactgatttccaaaaggtgttgagcgatctgttccccaagcaggtgaaagcgccgaagggtttgagcaatttcggcaaccgacgcattgcgcgcgcctaccgctacttctgcgagcgacttgaagggttgagccaggacagcgtattggccctgctggaaaagctcaaagcggcgatgctggtgaagatcgaggtgcgcagccattccgacgcattcatgttgttcgagtcgatcaacaaccggggtatcccgctctcggccatcgacatcatcaagaacaacctgctggccgaattggacaagcgcctggactacggcatcgaccgggcgtttgacgagtggaaagacctgatcgacctgttgcccgacccggcggtgcaggagcgctttctgcgccagctgtacaacatgttcaagtacctcaagcgggtggaggtcaagggctgcacccgcgccacgcgctcgaacctgatcaccatctacgacaccctgttgcgcaagcgtccggtctggctgttcggtgcgttgcaggccaagggcaaaacctactcggcgttgctcaatcccatcgttgcacgaggggaatggggagatgccgccgcatctgccttgcaggatctgcagcgcttgggggctgcgccggcttacgcattcttgctgtgggccagccaggtagcgcagagccagaggtggaatgagggcgatgcattgagccgcttggccgttttgctcaccaagtggttcttctggcgcaacctcaccgatatgccgcccacccgcgaactcgactcgatgttcatggaactggtcagccacttgctgacgcagattcacagtggcgagatcacgacgctggacggcttcatccagcagaccagtgattggttgctagggcgggcagccccacaggatgtttgcgagtcgcgcctcaagggcgacgtgtacctagagaattacgacgcaacgcggttcatgctctgcaagctggaagagacacaccaaacccgggaaaacaaacgcgacctgtgggcacatgacgtcaatgatcgccccgtatttaccgtcgaacacatcctgccgaagactgagaacttaggaccgggttgggtgacgatgctcgaaggggatcataaaggtattgcggctgccattcgcgagcgctgtgctcaccagctcggcaacctgaccctgagtggctacaactccaagctcggcacaatggaattcatgaagaagcgggatcgtaagaacgaccagggtgatttcattggctaccgcaacggcttgtacctgaatgccgacttggccagtcgagatgattggaacgaggccgtcattacggcgagaacagacaagatgctcaaggaggtgatgtccatcctgagcctgcggggtgacaaatga

SEQ ID NO: 335625 - DNA, 1116 bp, Pseudomonas aeruginosa
gtgttgcccgccgcgctgcgtggtcgcctgggcgactacgacccgcacgcaatcgaagctgagctggcgcgcatccaggccaagatcgacgccatcgccttcgaactctacggctttagcgaggctgaccgcgccgccgtgcagcccagccagggcgcggcgaatgagggcgatgccgagaccaatgcagatgacgatggcgatgaagaagaaagcgccgcgcccatagaccaaactgccggcctgctctcctgggccgtcggtgtggcctttggtcgcttcgactggcgcctggccaccagcgaacgcgctgcccccgccgagccggaacccttcgatccgctgccggcgaaaagccccggcatgctgcccgatggtgcggcgccgtttcacgcccacgccggaatcctggtggacgacgccggccacccccacgacctggcgcgtctgctcgaagaagtgctggcccgtgtcgatgcccccgtgcccagcgacttgcgccgctggcttcaacgtgatttcttccccttccacctacaacgctattccaagagccgccgcaaagcgcccatctactggccgctgtccactacttccggcagctatacgctgtgggtctattaccccagtctcaccagccagacgctgtacagcgcgatcaacgacttcgtcgaacccaagctcaaacaagtcggcgctgacgtgacgacgttgcgcaacaaggctgctgcccgcacgcgtgatgatgagaagcagttcgaggcgctgcaagccttcgagctggagctgatcgagctgcgggacacgctgctcaagctcgcgcccacctacaagcccaaccacgacgacggcgtgcagatcagcgccgcgctgctgtggccgttgttccgccacaagccctggcagaaggtgcttaaggactcccgggccaagctggaaaaaggcgactacgactgggcgcacctggccatgaactactggccggagcgtgtgcgtgagaagtgcaagaccgacaaatcgctcgccatcgcgcatagcctggagcatctctacattgagccggaggctgcgccgaagaagacacgcggcagaaagaagatccgaggcgatgaatga

SEQ ID NO: 335626 - DNA, 1890 bp, Pseudomonas aeruginosa
atggccttcgaccaaacaacaagaaaccgcctacagcgcttcgtcaacgacgcccgccgtgtgctggaagaggaattcacccgccagctccagaacgactacggcatggacccgaatgcgggcagcgtcgcggaactcaccagcttacgccatatcaacgacgctcagcgcgaaaccgcccgcatcttgcgcgacaccctggcgcactataccgccagtggtgacatgaacgccatgcaaggtctggatcgcatcgtccgcgagcaggccttcacggtgctcaaccgcttagcggcgctgcgcatggccgaggcgcgtgggttgttggtcgagtcggtgggtaatggtttccaggccaagggctttcagctctatgcacggctggccggcaccggcttgggtgagaccggcgatgcctaccgcacctatttgttcagcgtgttcgacgaactgagccaagacctgccggggctgttcgatcgctactcaccgcagggccgcctgttcccgcgcgaggcggcgctcctgcaagtgctcaacctgatcaatgatgccgacatcgccccgctatggagcgaggacgagaccatcggttggatctaccagtacttcaactccaaagaagagcgcaaggcgatgcgcgatgcatcgcaggcgccgcgcaacagccgcgagctggccgtgcgcaatcagttcttcacgccgcgctacgtggtcgagtttctggtggacaacaccctgggccgtctctggttcaacgccaccggcggcgacacccatctgcgtgaccgctgccaatacctgctggtcaagcccgacgaaacgcccccgaccgctaccaagctgcgcgatccgcgtaccctgaagctcttggaccccgcctgtggctccatgcacttcggcctgtatgccttcgatctgttcgccgagatctatcgcgaggcctgggcctgggagcagcagcagggccctggctcgctggatgtttctacccaaccccaggcggcgcttaggccactgagccagacctacgaagacgaggctgcctttctgcgcgacgtgccgcgcctgatcatcgagcacaacatctacggcgtcgacatcgacccgcgcgccgcgcagattgcttccttggcactgtggcttcgagcgcagcgtgcttggcacgatgcaggggtgaaggcgagggaccgtccattgatcgggcggggccatgtcatcgcagcgattgcgccacctgcggagcgggaattgcgccagcagtttgctgccagcttggatcagcgcgacgccgaactctttgagaagaccctgcaattgctcaagggactgccggagctgggtgtgctgctccaggtggagcgggagctgccgcacttgattcgccaggtctatgtgggaaaaggcaccggtctgtttgccgcgcaagagcaggagaactggcagcaagctgaggcacggctgcgagcagcactcaccgaattcgctcatgcagcgaaatcgacttaccaaggacgtctatttgctcaggatgctctgcaaggtctgcgacttatcgatctgtgccgcgaggtgttcgatgtggtagtgatgaatccgccctttggggcgctggcttccaacaccaaagaccaactcgccaaagcctacccgcgcagcaagaacgatctactggccatcatggtcgagcgcgggctggagctgctgcgcggcggcgggcgcattggcgccatcacctcacgaacttgcttcttcctttccagttttcagaagtggcgtgagcagatcgttttggacattgccaagccggaagtgatggctgatttgggccacggcgtgatggatgatgcaatggtagaggctgcggcttatgtactggagaaggtctga

SEQ ID NO: 335627 - DNA, 2415 bp, Pseudomonas aeruginosa
atggccaacctcggtgtcattagttaccgagcgccgatcggtcgtctggcgtctctccctgttggcgaagagttcaggcggcccgatggacgcaggttctatgtgcttgaacgatcccaactccgacccaccgcactgacagacggctgggactcgcgcgacagcgtagtggaagccgagcatttcggcccactcactatcgagtcgttgcgagcgctactgactgaggttgccggagaagaagtcaccgaagacctcctaggtcaattgctggccgaggaaaccgtcaaggccaacatcatcgacggcgtgcgccgcagcgtcattaccaagatgggactgcgcgatcagcctgttctggatcaataccaggatgagatcttccgtcttcccctcgacaagcgcctgctgattctgggcccgcccggcacgggtaagacgacaactttgatccgccgccttggccagaagctcgacaccgccttcctggaagaaggcgaacaacgtctggttgagatggtggccaccgctcagggcatcgcgcacgccaacagttggctgatgttcacgcccaccgaattgctcaagcagtacctcaaggaggcttttgctcgcgaaggccttccggcctcggatctgcgcatcagaacttggcaggactaccggcgcgaactggccagaaacgctttcggcgtcctcagaactgcatcgggcggtggcacctttgtcctgaaagacagcctgccaagcctgagtgcagaggcactggatcgcccgattcagtggttcgaagatttcaacacgtggcagcgtaacgcctatgtgcaagaactgcatgaagcgaccaacatcctccgcgaagccaaggcgccagaagtccagagtctgggcgatcggctgcacggcattctgacgcaagcgggcgatggcgcgttggcgtccatcttcggctccctggcagccgagctccccaaagtgcaggcgctcgttgccagcctgaaaggagcctctgacggcaagatcaaagccgcactcaacctccagctcaaccgcaatcgggcgtttctggatgagttggcacacttcatcgatggcctgcagcaagccctggccaccgatgccgacgatcaagacgatctcgatgccgacgatgaagaagacggcactgcgccgcgcacggggcgtgccgccgcactgaatgcctacatgcaagcggtgcgcgcccaagcccgggccgcggcctccaagcgcgcggttagtaagtcgtcgcgcaacggcaagatcatcgagtggctggcagatcgtggcctgacggaagccgaccgcaccgaggtgggggcgagtctactggtgcagaccaacgcgctccgcttcgtgaacccggtcaagcgttatctcgacagcatgccaaagcgctaccgtgcgttccggcgcgaacgccagcaacccgggagctggtatcgcaacgaaggcttcgaggcccgcgatatccatccgctcgaactggatattgtgctgctcgccatcctgcgcgccgcaggcgatctgatcagccggcccaacgtgcagcgcgatatcgacagccccgcttggtcggcactccagcccattctggggcactaccgcaaccaggtcttggtggatgaagcgaccgacttttcgcctatccagcttgcctgcatggccgccctggcgcatccacggctgcgctcgttctttgcctgcggcgacttcaaccagcgcctcaccacctggggggcgcgatccgccgacgaaattaagtgggtctttgccgacttcgacatcaaggagatcaccgtctcctaccggcagagcaagcaactgaacgacctggctcgcgccatgatccgcgccgtcggcggcaccgagcagaacgtaagcttgcccgcacatgtggatagtgacggcttagcacccgcgctcctggagcacgccccagacacagcaatcgtggtgaattggctggcagaccgcatccgagagatcgagcgtttcgtcggccagctgccatccactgccatctttgtgaatgccgaagacgacgtggctccagtggctgagacgctgaacgcagccctgtccgaacaccacatccaggtcattgcctgccgcgagggtcaggcggtgggccaggaaagcaatgtgcgcgtcttcgacatccagcacatcaagggcctggaattcgaagcggtgttcttcgtcggaattgaccagctcgccgcactgcacccagcgctcttcgacaaatacctgtacgtgggcaccacccgtgcagccacttacctgggtgtgacctgcgacggcgctttgccgccagccatagagagcctgcgcgctcactttggccaggattggcaagcgcccggctcacagcaagcaggcacagaacaatag

SEQ ID NO: 335628 - DNA, 3642 bp, Pseudomonas aeruginosa
atgaccattcgctcactcttcgacccaagcaaggacatctaccggaccattgagaaggtcatcacctatggcgcctcgcaagaagaccgcctcaaggctgagatatccgaatacgtggtcactgaaagcattgaggagcaattccgcaagcttctcgatcgcatgcagctcgcgatggaatccggtggtgaaaatgaggtgggcgtctgggtctcaggcttctacggctctggtaagagctcgttcacgaagtatcttggcttggcgtttgacgatcagcgcactatcgacggcacaccgttcatcacctacctgcaggatcgccttcacaagccacagaccaaggctctactcagcactgtggcgaagcgtttcccggccgcggtggtcatgctggacctggccagtgaaatgctcgctggcgcgacgatggaagacgtctccaccgtcctctacttcaaggtgctgcagtgggccggctactcgcgcaacctcaaggttgccgccttcgagcgcatggtcgagaaagacggtcgcacgcccgagctgcacgaccgcatcgcgcaggcgctgccgggtgcaacctgggcgcgagtccagaacaatccgctggccatcgacgggctgatcccaaaaatcgcccacgagatgtaccccgcgctcttccccgaggccaagtccttctcgtccagcaccgaaggcttcttccagttcgaagaccagcgcgtccaggagatgattgacatcgtccgcgaaaagagcggcaagcaaaacatcatcttcatcgtcgacgaagtcggccagtacgttgcttcgcgtgacaacctgatcctcaacctcgatggcctggccaagaacctcaagcggctgggcgacggcaaggcctggatcatctctaccgcacagcagacgctgacggaagacgaccctcgcgccgcgctgaactccgacaagctctataagctgaaagaccgcttcccgatccagatcgacctcgaatcgagcgacatcaaggagatttgctatcgtcgtctgctcggcaaatcgccagcgggcgagaccgagcttggcaagctgttcgatgcccacggccaggctctgcgacacaacaccaagttgcaagacgcgaagtattacgacgcggacttcagcaaagagagtttcaccaatctctacccgttcctgccggcgcacttcgacatcctgctgcacctgttgggtgcgctcgccaagtccaccggcggtatcggcttgcgctctgcgatcaaggtgatacaggatgttctgaaaggcgaaggcggctccaaggcaatggccgatcaacccgtgggctggctggcgaccacggtcacgctgtacgacgagctggaaaaggatatccgtcgcgccttcacgtctgttcaccaggcggtcggcaaggtccagattcgcttcccggattcgcaactacatcaagacatcgccaagtccgtcgccgtgttgcagattctcggcaacctgccagtctcggtgcagaacgtcgctagcctgatgcatccctccgtcacggcaccttcgcagctcgacacggtgaaaaaagccgttgaagaaatgctgggcgacgtgcatgtgccgctgggcgagaaggatggcagcctcgttttcctcagcgagaggctgcgggatatagagcaggagcgtggtgcgattgcgctgcgcaccgtcgatgtgaagcgcatcttcaacgatgcactgcgcgagtccttcgatccgctgccccgcgtcagcctccacggcacgatggcggtggcaacgggcctcaaagtccagtccggcagcgccatcacaggcctggctggtgatcagagtacgatccagaccattgttgagttggttctagctagcgactacgagaccgccaagaaccggatgctggatgactcccgcagccgggcggggcggaatgtcatcgggctcttagctcgcgcaaattccgaactcgacgatctggcgaacgaaatctatcgctgtcagcgcatcgccgaactgcaccgcaacgagcccgaccaagaggtcaaagactactgcaccggccagctcgaccgcgctgccaagctggcggcccagctccagagcaaaatcaaacaaactctgcaagcaggctcgtttgtgttccgtggccaagccacggcggtgtcggcgctggatgccgacctgctggaggccgccaagaagttgctctccgacgtggccgaccaggtgttcgaccgttatgtcgaagccccagtacgcgcaggaaccgacactgccgagaaattcctgaaagttgccaaccccgctgccatcagcagtgcgctggacccgctcggtctggtgcaaaccgtagccggtcgcgcctcgttcaatactgaccacaaggcgataatcagcatccgcgactacatcaataagcgcggcaccgtcgatggcaagcggttgctcgacgacttcagcaacgatccgtttggctggtcacccgataccacgcgctacatcgtggcggccatgctcatggcgggcgaaatcacgctcaaggtctcggggcgtgaagtcacggctgctgggcaacaggcggttgatgcgctcaagaccaacaactccttcaagcagatcggcgtcgcgctgcgcggcgagcgcccgtccatcgagacgctcggtcgtgccgctgaaaggctcaccgagctggtcggtgacatggtgatcccgctggagcaggagatcagcaaggcagcagctaagcacttcccacgtttccagcacgactacggctctttagccgaaaagctcagtggccttggactggcgggcagtgaccgaatccgcaccttgaaccaggacattgccgacgtcctgttcaccgatgcatccgatgccccgcagcgcttgggtgccgaaacctccgccatttacgacaacctcaagtgggcgctcgaagtcaagcgggcgctcgactacgggctcgacgccaccctgcgcgacttgcaagcccatcgccgcgacatcgaggccttgccggacaccggcgtgccaggggagctacgccgcgaacttgccgaagatctgggaaccctgtcagagcgtcttggtaaggaagatttttacaaacacactgccgacttcaattcgcagctcacccatctgaagggccgcgtgcgcgatgcgatcatcacgctctccgatcagcaaaagcttcgtttgaaggaaggtgtcgaggatatgcagcgcatacccgagtgggaagagctcacccaggaggagcgcggcaacgccgtgaaccggttggacgggctcgccttggcagcaacgcaggatctggctggactcaagaagctgttggcccgcgactacgacatcaacagcaccctcgacgacctgaagcggtcgattcagcgccagggtcaggaacgcctgcgccagcgcctggaagaagagcgggccaagacgggtgacaaaggcccggccaagtttaccaagtcgatcgcggtgccggtgaagatgacctcggcggcagacatcgacgcgcttattcagcagctccacgaaatcaaggcgcagctcatgctgtatgccgagatcgaagtgtctcttgtcgtgggtgagcagcccggaacgggtgggagctaa

SEQ ID NO: 335629 - DNA, 576 bp, Pseudomonas aeruginosa
atgtcctcactcaaagctgatttcgacgagttgcgcgagcgcattcggcacgggcgtgagctcggccatgcgagcttcgagccgatttactacctcgtattcgcgccggaacagattctcgaggtgaagcggcaaacgcccgcgtgggtggccaagctccaccaggaaaggtgggacgtgcacacgttctccatcgccgaacagctctgggcactgctcaaagacgacccgttctggtcgctctgcgtgacggaagataagtctgcaccactggattggccacgtaccaataaagcgctagcggacatcctgacggcggataatggcctgctgaagcgactcgaggatgccctgcagccgcttgaaggccagcagagcgcgctgctcttagtaacggaccttgaagcactgcacccgtttatgcggatcggtgccatcgagagtcagctccagggcaagtttcatgtgccgacgatttttctgtaccccggcgtgcgaaccggcaagacgcgcttgaagtttcttggcttctacccggaagacggcaactaccgttccgtccacgtcggcggctga

SEQ ID NO: 335630 - DNA, 288 bp, Pseudomonas aeruginosa
atgttcaaaattactggactggacaaatttcaaaaagacttgaaagatgcgcagcgcgtcttaagtgagttagacggtgagctaggggtcgtgaactttgacccaagtgatcccgtaagtattgagtccgcaattcagtcggtcaaccgattgatcgacgagcgtctaggggaatattctgcaaatcctatcgttggacctctcgcagaacaaatgaaggaaaagtatcgagagaccatccttcaaaaagcggccgaagccaggctaaattcggatgaagatgaataa

SEQ ID NO: 335631 - DNA, 897 bp, Pseudomonas aeruginosa
atggcgcaagacatattctcggaaataaacaatgcagtcctagatttgcaagcctcacagcttcaaacctacgaaaggcctctcaagaaactttctcaactgctacaacatcccgatcttgagccgtacaatgccaagctcagggagggtctcgacctagatgcgttcatttccgaaagcgaaaaaacaacgggaggcacggtcgggggcgctaagcttgcttggccagatgactcccggcagacgctagggttgacattgcttttgatcgagaaatttggggcaaacccccgttatgcagcagatttcgggcaccatttcttttattctggtaagaagatcatcgctggaatccatgcacttaccagccagctaattattccctttgcgcgggactacaagacctatattaagtccaaggggagcacagagaccatgctgaagacccaattctcgcgtaaggtatttattgttcatggccacgatgatggtgctcgtgaaacagtagcgcgattcctagaacgtattggacttgaagccatcatcttacatgaacaggccaaccaagggcgaacaattatcgaaaaagtcgttgctcatagcgatgtcggtttcgcagtagtcctgcttacaccagacgatgagggctgcgtaaaaggaggaacacctgaacccagagcaagacagaatgtactattagagttgggatatttcattggtcgcttgggcagagaaaaggtatgtgctctcaaacgcggggcgttggaaatcccaagcgactttgccggtgtcgtttgggaaacaatggatagcggaggaggctggaaacaagcacttgcacgtgagcttgaagctgctggtcacaacatcgattggaataaggttatgcgtgcatag

SEQ ID NO: 335632 - DNA, 201 bp, Pseudomonas aeruginosa
atggccgaccaccaagcagcactgagcttgctgagcggcctaggtcgtacatgccgttctcgccttggatcaagcggacatagactccgcaagatcaagaaggggactaaggttgagcatccattccgtgtgatcaagcggctgtttggctacaccaaggcccgcttccgcgggctgaccaagaatgacgtgcaatggtga

SEQ ID NO: 335633 - DNA, 672 bp, Pseudomonas aeruginosa
atgagaagagattcgtggagaaactttggtatcactgagcgttactggtctagaatgaatgaagatcaaaaggttaaatggaaattattgactaggattctgacttttgtaggcgcgctggcagtggcaaagactggggtgatttatcttgatggtgtaattgcagcgtgcacttccggattttcatttttgctgatcgaaagccagcgctcgtacacccgttatactttgaaaatgcgtaaaatgctcacgcgaacttcaatcgtactcggtacgtggtgtgttttcagtgtgggagttgtctacttctcacaagtatcagtttttgccttggctagtacattcagcacaatgccggatccggtaggaaatgatgaatttcgtgaggctaaaaatttattttacatagttatttttgtgtgttctggtgcttttgctgttgtgagggcgtttcgtgatctccatatgatggagattatttattacttgccgcgtgcaaaaatgaaagatttgctggtttataagaaatattacttggaggggaggttaggattcatgtgttttgaaatgggagtgatatctggtactgtttgctattcttgggttgcggccacactggtcaatggggtgttggaaatggtgcgtgttgtgctgaagataagcaccatatga

SEQ ID NO: 335634 - DNA, 150 bp, Pseudomonas aeruginosa
atggggctgactcttaccgagattgcgctcaaaaggaatcgaagcatcaagaccatcagcgctcaaaaagtctccgccatgcgcaaactcaatgcggaaaatgaccagatcctgatgacctactgtattcaggcaaggatgtttgagtaa

SEQ ID NO: 335635 - DNA, 3294 bp, Pseudomonas aeruginosa
atgatgcctcccaccatgaccccttccaccgactttctggttcctgccatgagtgatgcccattcaccgattcgaacgttggctaggacatccctgcgcctgaacgtcttcctcgtggtctctgtcttgctcgtcatcgtgctggttctggcctgctactggtcattgctgcggttggtggaggaggagggggatatcgtcgagttccacttcctcagactgatgggcaacatccatagtcatgaggactttcttgcacaactcgcccggcgaaccgacgagacgactcgcaggcttgaccaagcggtcattcccttgcaatacaagctgcttgaacgctctcctcgcataacgctctatgaagggcgtgagttctccttttccttgcctttcaacttagccatgcgcgaggaggggaatggagggctggcagcgagcgacaaagggattctttccctcggcgtgatgctgtcgaacgtctacagttcctactggaccacgtcacactatccggctacgcaggtattcttgctagatatgcagaagcccatcagtctcaccgtcccggcgatggactctgcgtccgaaccctacggaagagagcgtgagacatacttgcagacggtggagaggattcgcgagcatattcgtgcgcgcgcctccgcaggagaggcacggcacgtacgctgggcaaaggctgggcatttctttggcaggggcacggaacacaaccgaaaactcgagctgattgctttcactcaggctgaaattcctgaatccctatggcgccgaacgccagcgccaggggatgtcgtagccgtttccctgcttgatctgccacgtcttaacgagttcgcacatgctctgaagcggccgatcttcgacgcgctggaactgcgctctcccgagggagagacgttggccggcaaggtctcgctagaaggcgaaatcaccggaaagcatgtgttcactcggcaggggctgttcatccgtatcaccagcgaggatggctggacgggaatctaccagatcggctacgacaccctattccactacgccaaatggcatctgctgctgctagcctgtctccttctgctgatttcgtcctgcggcattctggcgctacgttggtatgtctcccgtgtggtgttgcccgctgatgaggcacatcgctatgtggtcgagagcgatgcttttagtgctttgatcatcgagaccggacaggttggcatttgtgtgatccgacggctggatggtggagtggtgctggagaaccgcctcgctcgtgagtggctgaacgactccgaaagcatcgttcgcatgagccgggaatggcgttccgcagagcgtggccgcgaggcgccgctttcctctatcgaggaaacccagattgaagtcaatggacgctttctgcgagtggggttctccctgacccgctaccatggtgaggatgttatcctctgtacattccatgatgtgaccgcacaccgcctgacggaagaaaaactggcggaggccaagcgttctgcggacgctgccagcgaggccaagaccgtgttcctcgccaccatgagccatgagattcgcacccccttgtatggcgtgctaggaacgctggagttgcttggcttgactgagctgagcccgcagcagcgagactatctgcggaccatccagcactcgtcttcgtcgttgttgcaattgatcagcgacatactcgatgtgtccaagatcgagtccgggcagatgccgctggatctagcggagttctgtccactcgatcttgtcgaggaagtcatgcggacctatagcgccgcagccacaggaaaggggttgcagttctatgcctgtatcgattcgcatacgccggaaaaggtgatcggtgatgccgcaaggatccggcagattcttggcaacctgatcaataacgccatcaagttcaccgatatggggcgtgtggccttgcgccttcgctgctccacaggtgagagcggcacagtggatatggaatggcaggtctccgatacgggagagggcattccgcgcgaccagcaggctcacttgttcgaacccttttatcaggtgcttggtggccagtgtaccttgagtggtacagggctcggtctgtccatctgttctcgcctgagtgaactgatggatggccggattgaggtcgttagcgatgttggcctggggagcagcttcacactacgactgagtctcctcgtcgtggaacctccatcagaggaaagctgctttcgtttgctggccgagacggtttacgtacgtgcgcctgtacgcgatctggccgctaatttagccgactggctgaatcgttggggggctagggctgtcgtgatcaggagcgatgagtttccttccagtatgcctggcgccgttctgctcgacctacttcccgacgttcttccgcccatcgagtgggcccatggacgtgtgctctgcatcaacggcccttccagtccggagccggaatgtatcactgcgaatctgtacgccttccgcgagatcggtcaggctgttaggcaggcgcagaagggagaacctccgccttctcgaagcgcttccggcgatcagggacggtcatggaaaaaactcggcctcagggctctggttgcggaggacaatccattcaaccagcaattgctcaaggaacaattggaggaactggggtgtaccgtctgcctctgtcaggatggtagggaggcgcttcaggcttggctttcagggcggttcgacgtgctgctcaccgatgtgaacatgcccgtgatgaatggctacgaactggccgtcgaggttcgggccttagatccactgatgccgatcattggcgtcacggccaatgccatgaaagaggaaggggagcgttgcgtggcggtcggcatgaatacttggatcgtcaagccgctcagcttgcggatgctatacgaaggactttgcaaggtctgcaggatctcccctctcgaagcggcagtggatggctccgagcctcagggcagcctggagctgtcggagaagaccaggtcgttgatgttgaaggtcctcggcgaggacattgacattgcgcgtgcctgtatcgctcgtggagactgcatcggcacgctggatagactacaccgtattcgtggtagctgggcgatcgcccagggtggggaactgttggacttctgccagcgagtcgagcaactcttggctgagcagggagctggcaaagaggctttccgagctgcgtccgttgtcttggatcagatggagatcgtcatacgtactctttga

SEQ ID NO: 335636 - DNA, 1200 bp, Pseudomonas aeruginosa
gtgagggtggcatttccctgcaaagtgctgatcgtcgatgatcacccatttcaactcgcctatctgcgtgaactgttcggacgggctggagtttctgacctgcatgtggccagcaacggcaaggaagcgttgcaaatgctcgagcgggaatcgttcagcctgatcctcagtgacctgatgatgcctgaattggatggtgtccagctcatccagcggctcgctgaatggaaaaattgtccgcctgtggcgctgatgacagccatgccgcatcgcatgctgaagaatgtggcaggcgtggcgagggcgctcggtatcgacattgttgatcaagtgaccaaacctgcgacgccagaagcgatacaacgtctgttgggccgtctggacacggcccgtgagtcaggtcggcggcggacgaagagaagcccgcgggcataccggcgggagcagattgagctagcgctgtccgcgggtcagattcaggcttggttccagccgaagctacatctctccagtggcagagtcatcgcagcggaggccctggcgcgctggtgccatcccatggaaggggtactgatgccgggtgagtttctggacgccttggaacaggcggatctggaagagaaactcttgttccatatgctggagcaggtggtgaggacgcagatttcctggcaatcccggggagggcgaatcaaggtctccttgaacctgcccggccatctgctggatatctcggacttgccggatcgcttgtacagccgggtgagggaactgggcgggtggccgagcgctctggtcctggaactgaccgagagcagcacgacatccctgcccagcagcttccatgccgcagcctgtcgcctgcgaatgatgggtttcggcctgtcgctggacgacttcgggaagggatacagctcgttttccaatttgttcggagccccctttaccgagatcaagattgaccgctcgttggtgagtgaaagcgtaggcgatccggcgtgcgcgagcgccctcgccaatatgatcggcctagccgagcaactggggatggaggttgtcgcggagggggtggaagatcgacagcaactgtcattgatgcgggaactggagtgtgacttcgtgcagggctttctgatcgctcccgcgttgccggccgaggtctttctgcagatgctgcgcgagaaggccgggtctttctaa

SEQ ID NO: 335637 - DNA, 2430 bp, Pseudomonas aeruginosa
atgaaatcctttccgctgttcaaaacagtcgactccctgtcgcttactcccgcaacggcccgcaggttgcttcatctgttggtggggctcttcgtcttgggcttgttctgcacctgcgcgctctatttctggtcgaagatcaacaacggcgtttcatgccagcgccgtctgatgaacgatgcggccggtgagatgctcctttattttggccggcgccagatgctacttgagcgcctgggggcgctcgtggttcgcgactcgactctgccgaagcggacattggacccgcatcgtcaactgcctcgctaccagcaccaatgggtggccctgggggaggcaaggagtgcttggggagtcttgctttcggggcgggatatggccgacttggaccagatgggcgccggcttattgtatgtcaggggcgacaaacgcccggtggttagctacctgcatgggcgtttcgaacgtcgttcgatgttgcctgaaacggtactggatgctttggtattggaaaaaaacggtgccgacgaggaagcgctttggctggctgcgccgcatgatccactacaacgaatctacctattcctcgccgtgcgccgggacgatgaagcgatctggctgggactcgagttgcgcggtagcgacctttcgcacgcgctggcttcgcgtttcggcggagcttatgcattgcgggatgccgtgcgtcacgtggtccttagtagtgaaggtgcgagcgtcgaaggatttgacggttgcatccgtagcgaggatgcattcggcttctgtggcaacggtctgctgccgcagtttctgatactgactaaaggcatggggccttcggggtggcgcctaagctactaccttccagtggagaggctgttgtctccctattggtcgatatttgtcggttgcttgcttttctggggcagtgtggctcttgccgtgcttgggctggcctgtcgtgtcgacaaacgtctgatcaaaccggcccgaatgcagttgcgagatctgttacaacatgacgagtttctccgcactacgcttgaagtcgctcccattgctctttgcctgttgcgttgctcggatgctgccgtggtattggaaaatcgcctagccagacaatggcttggtcaggggggcgggcgatatagcgagagtctcagatgggtcgagctggcccatagagcctcgaccgagtcgaattcgatggaggtgcagagtgccaacgggtgcatgatgcaactgaattttgtgttcacccgttacaaaggcgaggaagtgctgttttgcgcctgcagcgacatcagtgcgaggaaacagaccgagcgggctttgagggaagccagggaggtcctgacttccactcgtgaatccaagcgtctgttcttgagcgcaatgaaccgggaggtacaggcaccgttgtacagaatgctggatttcttgacgtgtcttcgcaccgctgggctggatcggcagcaacggagcagcctggagtcgatgcagcgttcggtgctcaacctccagcatcttctgaacgacattcacaatgtttcgcagctcgaagaggggcgcattgtcctcgaaccgcgggagttctcgccctccatgctgttgcgtgacgtcgccctggcccatgcttctgatgctcactgcaaaggcgttgatctttatgtctgctgtgctcccaacatgccagagaagctctacggtgatgtggccctgatacgccaggtactggataacctcctggataacgccgtgaagttcacggatgacggcttcatcgccttgcgtgcccgggtgctggagatgagtcgcgggtgccaggtcatctggcaggtcagcgataccggatgtggcattcctgcggaacaacaaccggaattgttccagccgttcttccaggtcagcggcaagggaatagcggcgacggatggctccgggctgggactgaccatctgccactacctcgtccagcttctcggtgggacattggaagttgtcagcgagagaggcctgggcagcagtttcgcgatgtgtctacccatgcaatgccccgccgaaaaaaccgttgttgcgttggccgcgagccagccagtgccggtgtatatccgctgccgccccagcgacctgagcgatgccctggcgggctggctgcaacgccagggaatgcagcctcgatcgtggcaagccggacacaattccggagcggtattgcttgagtgcctgttgctcagagaccggcctttggctgagcgggactggcatggcccacgggttatcgccagtgtccaagagccggacaaggcgagcatgagaggacgcgcctggcaggtcagcctgtatgacttggatgccatcggaaaggccgtcaggtcggcccaagagctggtcgtgcacagcgacctttccaactgctatctatcctga

SEQ ID NO: 335638 - DNA, 549 bp, Pseudomonas aeruginosa
atgaaaaagccactcgctacggcgctgaccctgctgctcggcgtcaccgccatttctgcgcacgccgcagatggaatgatcaagattaccggttccatcatcagcagcacctgcaatgtggggggggcgaaagtcgacaccggcacccctgctggcacgctgagcacaatcaatgtggaactagatcccgtgtcggtatctgctctggacgcccaaggcaagtcagctggtggcaaacccttcaagatcagcctcaccggctgtaaggcggtgaaaaaggctcagatgaagttcgagacgtttggaaacgtcgacaccacgacaggcctcctcaagaactctggcagcgccaagaacgtccaagtcgggctgacgactgatgacgacaaggagatcaacctcaccaagggtgaaggaagccaggtagtcgatctcaccgaggatggcacggcggagatcaatctcagagcgtactacatcgctgttggcggagccgccgggcccggcagcgtggataccaccgcgttgttttcgatgaaatacgagtga

SEQ ID NO: 335639 - DNA, 723 bp, Pseudomonas aeruginosa
atgcgctccttaccctttctgctgctggcatcgctgctggtgctgggacaacccgcccgcgccaacgtagtgatcgcgggcacccgggttatctatccggccgacaagcaagaagtcaccctccagttgagtaacgtcggagaccaacctgccttggtgcaggcctgggtcaatgacgacgaaaatgccagctcaccgagcgacagcgacgcaccgttcgtgatcatgccgccgatcgcccgcatcggcccaggcaagagccagacgctgcgcatcgcctataccggagaacaaacggccgatgaacgtgaaagcgtttactggctgaacgtactggatgtcccgccgcgacccgcagacattggcaccaagaactacatgcagatatccattcgcagccagatcaagttgctgttccgccccgcaaatctagccggaagcgcggatgcggccgcggggcaactcgaatggtcgctcgtgacccgcgccgggaaagcgacgttaaaagtcaccaaccccagtcgctatcacgtctcgcttagcgcagtagagctggaggtcggcgcaaagcccttctctgccggcggcggtatggtcggccccgggcaggatctagagctgcctctggatacgccgccctttcctcctgaccagaacgcctccgtccgttatgtctggataaacgactacggcgctgccgtatctggaagcaaaaggctctga

SEQ ID NO: 335640 - DNA, 2556 bp, Pseudomonas aeruginosa
atggtgctcgtgctgacctgcgtgggtggaacagcgaacgactcgtccgcggcaatggcatcccctctggctaacgctgaagacgatctctacgcctcgttcaaccctgccttcatcacacgcggcaatgccgtccagggtgtcgatctatcccgcttcgaaaccggcaactttctgccggccggcgtctatcggatggacatcttcgtcaatgccaactgggtgggccgacagagcatccacatcatcaaccaagggcggagtacccgcgcctgcctgaaaccggaacaattacgcgactggggagtggcggaagaaaaactgaaaagcccccagatggaaaagaacagctgcctgaccctcgaccagtttcttcccgaggccagccttgaggtcaatggctcggaactggaaatacgcctgagcgtcccccaagccttcctagcccgccaagctcgcggctatgtcgatccggtccattgggatggcggaatggccgcggctttcctgggctacaacgtcaatgcattccagtcgcgtcagcagggacggcggcagacccaatacagcgctggcctgaacgccggggtcaatctcggagaatggcgggtgcgccacaacggcaactacagccagtcccggcagcaggatggcgcgtcaacctcgcactacgactcggtcagcagctatgcgcagcgcgatctgaccggcctgcgcgcacaactgaccctgggtcagtactacacccctggagatctgttcgacgccacccctttcaccggcgtgcaaattaccagcgacgaccgcatgctgccggagtctcagcgcggcttcgcccccgcaatccgcggcacggcggaaaccaacgccaaggtcacggtcagacagagcgacaccattctctacgagaccaccgtcgcccccggcccgttcgtcatcgacgacctctacaacagcggctacagcggtgacctggaagtcaccatcgaagaggccgacggacgcgtcaatcgcttcaccgtcccctacgcctcgatcgcacaactgctgcgcccggggcaggtacggttcagcgccagcgccggtcgctaccgcgacgagcgcctgcgcgacctgccgaactttctccagagcagctatcagcgaggcatgtccaaccgctggaccggctacctcggcggcattctcgccgagcactatctttccgcgcaggcgggcctcgccctgaatacgccgctgggcgccatcgccgccgacatgaccgaagcacgcgcctcggccttgccggaaacaggctcaggtatccggcgcaacatgcacggacgcagctaccgcctgacctacagcaagatactcgacaacagccgtaccaacttcacgttggcggcctatcgtttcgccagcgagggctatctgaacttcaacgactatgcccggatcaacggtcgccaaccgggcgaagatagcggtctgttccgccaacgcaatcgtttccagctcaatgtcactcagcctcttccaggcgacgcaggctctctctattttagcggcagcgcgcagaactactggacacctgggcagaacagtgacgttaccttccaagccggctacaatcgaggattttcctggggaaccctgggtctttccgccagccgaacccggaatgccgacagccaagcccataaccagtacatgctgagtctcagcctgccgctgggaagcactaccaccgcgccttacctgagcagcacgctgtccgtccaggatcaccggcattcgctgcaatcgaccctgagcggtacgctggacgacgagcgccgtttcaactacagcctgacgaattccacccaacgcgacaacggcgaacgctcgtcgagcaacggcgcgaacttgcaataccatgcatcgtccggtgacttcggcttgggcctgagtgacggcgacggtttccgacaagtcaacgccagcgcccgcgggacactacttgcccacaccgagggagtcaccttcggaccgccactgagcgaaactatggccctggtcgaggccaagggtgcgagcggcgcgaccgtggtcaacaacggagtccgcctcgacaggtcgggctacgccctggtgaccggcctgatgccctaccggcgcaacgacgtaagcctcgaccccaaaggcagctcccttgacgtcgagctggaaagtacgtcgcagaaagttgcgccgcgctatggcgcgatagtacgcctgagctatcccacccgtagcggcatcccaatcctgctcaaggtccggcagcgtgacggacaacccatcccggtaggcgcagaagtattagacagtcagagcaaatggttgtcgctggtcggccagggagggcgaatattcctgcgcgttcctgatcggcaagggctggtgcgggtaacctggggaaaagagggcagcgaaagttgccaagtcaacttcagcctacctgaacctcgagaaaacagaggccgaagaatgacaatactcgacgggacttgtctgccgccctctacccaaaatccagaaagtcgctcctga

SEQ ID NO: 335641 - DNA, 1026 bp, Pseudomonas aeruginosa
atgatcttcaaacccagtcgaactacacctacaagccaatgtgcagctctaatatatgcgttattcctggtcactctctcaaatagtgcttgggccgtttgtcagtgggtccaaggtagtagcgcccctgtacttagcgctccagcatcattaactgtcctaccggaccagccaattctaactccaatatcaaattggatagaaggttcctacccctcgctctggaagtgcagttccagccttgactcgacaaaggtccgagcagccttcctaacccaatcctcccctaccgggcaagattacgatggactaacaatatataaaacatcaacaccaggagttggatacatagcgaaaatgaggactacttccaaccgtatctcagcatctaattttgtaaacgtacaaaacacctcgattggacgagactccgactctccagcaacattgggtgttgaaatcatggttcagctcataaaaatcggccccattctccccggctcccgattaaacagtaccgctgtcgccaaagcgacttcctatgtgcacaatatttttggcactccgatcccagatctaagcgccaatattttcctcccctcaatcaacttcctagtaccaacttgccaaactcgcgatatgaacgtcaatctcggggatatctacataggcaagtttcaaggaataggaagcgaagcagggaaacaggacttcgatatcaggctagagaattgtccgggaggattcaccaagatactctatagactggatcccattaatgagactattgactcagacaaaggaatcatccgaatagataagggaagcgatgccgccgctggcatcgcagtccgcatagcaagtcgagattcaaaacttaaacttggcacccaacagaaaatacctaactatgtcggagagaaaggcacctatagcatcccattaactgcaagctactatcagacaggagcgatcaccccaggtacagcaaatgcgtctcttgaattcacaatagaataccaatag

SEQ ID NO: 335642 - DNA, 309 bp, Pseudomonas aeruginosa
atgaagcaggccttcgaataccacattgaaaatatcaacatcccctaccaggatctccctcaatccgtgaggctgctgggacgccaacgacggacagataaagccctggagccgaacgccaatgcgctgggcgatccccttcgctgggagcaagtgcagcgcctcggccaggaaggctgggagctggtgagcgttcagccactcatgcggggcgtaaccgagatcggcaatcaaaacgcccaaggctgggcttggggcgtcgctctgcccgtcagctacctgctgtttttcaagcgcgcaacctcataa

SEQ ID NO: 335643 - DNA, 660 bp, Pseudomonas aeruginosa
atgagtttcagaaaacacaccgcgcaacagcaggctcacatcaacacgttccggttcatcaccggcttcttgtgcatggtcatcgtggtgctggcctactgcgtctgggaagcccgcaaagacctctggatccacattccgcccgacttgcgttcagggagcacccggttgtggtgggacattccgccagagagtgtctatgcattcggtctctacatcttccagcaggtgcaacgttggcccaaggacggcgaggtggactacaagggaaacctgttccgctacgccgcctacctcactccctcctgcaaagtcttcctggagaaagacttcgagtttcgtcgtaacgccggcgagctcaggggacgcgagcgcaccacctcggaaatccccggtcgaggcattggcgagagcaatggccgcgtgatccagcactcgatcaatgactggaccgtcaacctggacatggacagcacggaatattacgccggcgagaagatcaagcgggcgctggcccgctacccgttgcacgtcatccgcgccgacgtagacccggagactaatcccttcggcctgcagtgggactgctactccgacacgcctcaacgtatcgagcttgaggagccggccgcccccaccaagcgggagggaggtctatga

SEQ ID NO: 335644 - DNA, 1041 bp, Pseudomonas aeruginosa
atgctgagcgtctacagcgacgatcatcgtctgcacttcggccagtcggaactggtcgacggcaagctgcaaccctgtttcgaaatgcccagccgggccgacaccgtgctggcccgggtgaagtcgcagaaccttggcgaggtgatcgcgccgaaggatttcggccgcgagccgctgctgcgcatccacgacgccgcctacctggacttcctccagggcgcctgggcccgctggaccgccgaaggccacagcggcgacctggtgtccaccaccttccccggccgccgcctgcgccgcgacgggccgatccccacggcgctgatgggcgagctgggctactacagcttcgacaccgaggcgccgatcaccgccggcacctggcaggccatctacagctccgcccaggtcgcgctgaccgcccaggagcatatgcgccagggcgcccgcagcgccttcgccctctgccgtccgccgggccatcacgccggtggcgacttcatgggcggctactgcttcctcaacaatgccgccatcgccacccaggcgttcctcgaccagggtgcccggcgcgtggcgatcctcgatgtcgactatcaccatggcaacggcacccaggacattttctaccgccgcgacgatgttctgttcgcctcgatccatggcgatccgcgggtcgaatacccgtacttcctcggctacgcggacgagcgcggcgaaggcgccggcgagggctgcaaccacaactatccgctggcccatggcagcggctgggacctctggtcggcggcgctcgacgacgcctgcgtgcggatcgccggctacgccccggatgccctggtgatttcccttggcgtggacacctacaaggaagacccgatctcccagttcaagctggattcgccggactacctgcggatgggcgagcgcatcgcccggctgggcctgccgaccctgttcatcatggaaggcggctatgcggtggaagccatcggcatcaacgcggtcaacgtgctgcagggctacgaaggcgcggcccgctga

SEQ ID NO: 335645 - DNA, 1092 bp, Pseudomonas aeruginosa
atgcaatcgactcgcaagctgctggccggcctcgcgctggccgtttccgccgggctggtccaggccgcgccggaagtacggatctacaactggttcgactacatcgccccggacaccctgaagaacttccaggcgcagaccggcatcgcgccgaagtacgacgtctacgacagcaacgaggtgctcgaggccaagctgctgtccgggcattccggctacgacctggtggtgcccagcgacagcttcctgcccaactacctgaaggccgaggtgttccagccgctggacaagagcaagctgccgaactggaagaacctcaacccggccctgctcaaggtgctcgccggcaaggaccccggcaaccgctacgtgatgccctacatgtggggcaccaacggcatcgcctacaacctcgacaaggtccgcgcggtgctcggcgacgatgcgccgctggactcctgggacctggtgttcaagccggagaacctggcgaagctgcaacagtgcggcgtggccttcctcgactcgcccaccgaggtgatccccgaggtgctgcactatctcggcctgtcgcccaacagccaccagccggaagactaccgccgagccgaggagcacctggcgaagctgcgcccgtacatcacctacttcagttcctcgaagttcgtcagcgacctggccaacggcaacgtctgcgtggccatcgcctggtccggcggagcgatgcaggcggccaaccgggccagggaagcgaagaacggcatacgcatcgagtaccgcatcccgaaggagggcgccgcggcctggttcgacgtgctggcgattccgcgcgacgcgaagaacgtcgagcaggcgtacgccttcctcgactacctgctgcgcccggaggtagtggcgccgatctccgactacgtggcctacgccaacccgaacaaggcggcggacggcctgatctcggcggagttgcgcgacaacccgaacgtctacccgccggaagaagtgcaggccaggctgtattcggtggaaatgctgccgccgaagctggagcggctgcgcacgcggacctggagcaagatcaagaccggcaagtga

SEQ ID NO: 335646 - DNA, 246 bp, Pseudomonas aeruginosa
atgcaggaggtattccagcagcgaccacgccaccagaccgaacgcggccagcagcaggcattccagacgcagttctgcggggcagaaaaggccgagccaaacggccagcaccagtaccccgacaacgtagaaggcgatatcggtccggtgtacgagcttactgtgttcgagcttgaagagtggcatgtcgacctcggttcatccggagcggagtgtcctgtatggtcctggcccgggtttgtctga

SEQ ID NO: 335647 - DNA, 1974 bp, Pseudomonas aeruginosa
atgaaccgtccacgcctgatcaaccgtacctccgcgacaccttcgacgcttctgcagcgggcgatcttcgacggctacgacttcggcttgaagatcccctacatcgcaggcagcaaccgcgcgctgctggagctgtccggcttcttcatcagcgcccgggagcatccgttgcaccgctactggcgggtccccaaaggcaagctgctgcctgaactggacactctgtacaaccgtctcgccgagcttgctggaggtcttcactcccagtcctggcgggagttcagctgcttggtcgaatccgcgcaggcctcgcttgaccgacaggccttcacctgggggctgctgctgcgcatcgcgcccctggccgagggcggcgtcctactgtcaggcgagttccatcctggtgtggtggcggtggctcggcggatgcgtggggtgttcctgcacccatcgagttcctggcgcatcgacgccacacctgagttgcttcgcagcaacctgattctggagcttggcctcgccgaggaacaattcgagattctggatactgtccaggagctgctcagcgacggcagcttcgcgccgtcgaccgagctgcccagcatgagcatcggcggtccacagcaggaaccggcagcgccatccctggaggacgagtcagcctctgacatctacctcgccgcggtgccggagatcgagcgcaccgagtacagctcggctgatatagaggtggcgcttcagggctactcactactggcccaccagcctgacggcatcgctcatctgctgcagaggaccagcgccttactggccgacgacatgggactgggcaagacccgccaggcggtcatcgccgcttcgatccgcgcggcgggcagaccaattctggtcatcaccctggccaccctgctgatcaattggcagcgggagatccaggaggtctatccctcggccaccgtggccattcagcaggacaccccagaggcgcagtggatcctcgtcaactacgagcagttgagccccttcgtcgccaacgcttcgcgcttcgccgtgatggtcatcgacgaggcgcagcggatgaaggaaccgacggcgcaatgcacgcggcacggtttcgacattgccgcccaagtgccgaaccgctacctgcttaccggcacgccggtgctcaaccgcgagaccgagctgcacaccctgctgcgcctctcaggccaccccatcggccaactgccgctgaaagagttctgcgaccgtttcgccggcaacccggagttccgccagagtctgcgggcggagctgggtgactggatgctgcgcaggcgcaaagatgtgctgcccagcctcaagggcaagcagcggcagttgctgaaggtggccctctccaccgaggaacgccagcaatacgacgtgctgcgcctcgaggaccgaccggtcttcgcgcgactcggcgcgctgcggcgttacctggaaacggtgaaggttcgcgtggcaatggacctgttgagcgagctcgacgcagaggacaaggtgatcctgttctgcgagttcaagccgaccgtggctgcgctgaaggaactctgcgagcaggccgggcacggctgcgtcacgctggtgggcaatgactctctcaccaagcggcagaaggcgatcgatcgcttccagcaggatcccgactgccgggtgttcatctgcactacggcggccgcagggacgggcaacaacctcactgcggcgaactacgtgtttttcctcggcctgccctggactcccggtcagcaggaacaagccgaagaccgcgcgtaccgaaacggccagctccgcatggtcgtggtgaaaatcccactggtcgaggccacgatcgacgagcaactgtggcaactgctcaacgcgaaacgccaggttgcccaggacctcatcgagcccgagctgctcgacggaaaccgcgcgcttttagccgcaagcctaactggataa

SEQ ID NO: 335648 - DNA, 1383 bp, Pseudomonas aeruginosa
atggacgattccgaactctaccgctccctctgcgagatcctcggcgcccgtggcgtgcgcgacagtgccgcgctcgccgggcaggaccccggctaccatccgcagaacctcgccggaagcttcctggtcctgccggaaagcaccgaccaggtcgccgccgtggtgcgtctgtgccgccaggcgggacgcgccctggtaccccagggcggactcaccggcctggtcggcggcggcgccgcacaagccggcgacgtgctgctctcgctgcgcaggctgaaccgcatacaccggctggatgcggccagccagaccctcgacctcgacgccggcgtcaccctcgaacaggcccaggcgctggccgccgaggccggactcgaccccggcatcgatctcgccgcgcgcggcagcgccagcgtcggcgggctggtcgcgaccaacgccggcggcatccgcgccttccgcttcggcaccatgcgccagcgcgtgctcggcctggaagcggtactcgccgacggcagcgtctacagcgacctgcgcgggctgctgaagaacaccaccggctacgacctcaagcagttgttcatcggcgccgaaggcaccctcggcatcgtcacccgtgcggtactgcgcctggagccgttgcagcgtcccggcgccaccgccctgctaggcctgcccgacgtcgacgcggcgatcaccatcgccgcgcgcctgcgccgcgagcacgccgaacgcctgttcgcctgcgagatcctctggcacgactacctgcaatgcaccgccgcacccatgggcgacagcgcgccgagcctggcgccctgccctctctacctgctggtggaactggccgaggaccgccacctggatgccggcgaggcgctcaccgccctgctggaagactgcttcgaggacgggctggtggaagacgccctgctcgccgccaacgaaacccagcgcctggccatctggcgcctgcgcgaagactccgacgcggccatccacgccggcgtcgacagcctgtccttcgacgtatcgctgccggtgccggccctggccggctacgtcgagcgcatccggcggcgcctggacgacctggtgaagggcatgcaggtcttcctcttcggccatttcctcgacggcaacctgcacgtcatgctcgccgccgacgtcccgctgctgccgctgcaccaggcggtggaggaaatcctctacggcgagttgggcgaatgcgctggcgtgatctccgccgagcacggcatcggcctggagaagaaggaagccctgggacgctacgccgatccgctgaagctcgcgctgatggcgcagatcaaggaactgctcgaccccagcgggctgttcaacccgggcaaggtcataccctga

SEQ ID NO: 335649 - DNA, 930 bp, Pseudomonas aeruginosa
atggatcgtttgctgagcatcgaggcgttcgtgcgggtagcggaaaccggaaacttcgccaaggccgccgtgcagctcggagtgacccgttccgtcgtcacccaccgcatccagcaattggagcatttcatcaatgccccgctgttccaccgcagcactcgccatgtgcgtctttccgaggttggcgagacctactacaaggagtgcgcggacatggtggccggcttcaacagcctcaccgagcagatgcgcaacctgcgcgccaagccgaccggaaagctgcgcgtgcagatgctgccgggcttcgccatcgatcacttcggccctttgctggccgagttcaccgccttgtacccggacatcgaggtggacgtgatcgtcaacgaccgcctcaccgatccgatcgaagagggtttcgacatcgccttccagatgttcccgccgcaggccgagaccctcatcgagcgcaagctgttcagcgtccggcgcctgttcctggcgtcgccggagtacctgcagcggcatccggcgccagagcgtcctgccgacctgctggagcatcggatcggtctctacgaaggctatccgtcgcgtaaccgctggcagttccagcatggcgacgaaaccgtcgagctgagcctggcggggcaggtgcgttccaactcggtccatctgttgcgcgactatgcgctggccggcaccgcgctggtctgcctgccgaccctggtggcgcatgccgacttggagagcggccggctgctgccgctgctgatcgattatccattgtcgtcgttcaacttctccgcggtgtttcccgccacccagcggcgcgccttgaaggtacgcagcctgatagacttcctggtggaacggatcagcgacgagccctgctgggaccggccgttgctggcaaagggctgggtgcgctga

SEQ ID NO: 335650 - DNA, 1194 bp, Pseudomonas aeruginosa
atgtggcatcacggcatcttacagccaacgctgtggcaactgattgtcgcgactttggcgctgacccatgtcagtatcatcagtgtgacgctatatctgcatcgccattcagctcatcgctcggtacaattgcatcctgcgctaaagcacttcttccgtttctggctgtggctgacgacgggaatgaacacccgtgcgtggacggccgttcatcgccggcatcatgcctgctgcgaaacgcccgacgatccgcacagcccgaggttcaagggactgctcacggtgttgctgcgaggtgccgagctgtatagagccgaggctcgcaatccggaaaccttgcagacctatggccgaggctgcccggacgactggctggagcgtcgcctctacagtaggtttccgaacgccgggctaggcctcatgctcggtgtggacttggttttattcggcgtcgcggggctgacagtctgggcgctgcagatggtctggatcgccttctgggctgccggtgtgatcaacggtctgggccatgctttcggctatcgtaccttcgaatgcccggacgattcgagcaatctgctgccgtggggagtcctcgtcggcggcgaggagttgcataacaaccatcatgcttacccgggctcggccaagctttccgtgcaggcctgggagtttgatctgggctgggcgtggatatgtctgctgagagcactcggactggctcaggtcaaccgtgggctgcccaccatccagtgggactgtgacaagcgagcgctggatctggaagccagcgaagtcatcctgcgcaatcgcctgctggtcatggcccaatacgggaaacgggtaatgcggccgctggcacgcgaagaaagcgttcgctgtgatgcggcgacccggcatttgctgcggcgcgccggccgtttgctggtgcgggacccagacaggctgagcgatctgcagcagagcctgttccattcagctgtcggcaggagccaggtgatgcagctagcctgcgcgcatcgcctggcgttgcagcgcacatggagcgatgcgggggctgacctgggcgaagtacatgcggcgttgaaacgctgggtaaccgaggcggaagccagcgggatacgcccgttgagggagtttgccgggctactgtgcagctacagcctgtacgctccgcagcagatcgtgccgtag

SEQ ID NO: 335651 - DNA, 1920 bp, Pseudomonas aeruginosa
atgtttcaactcctttcctggatatccaggaagccatcccgcaccccaccaaccaaaactgccccagggggattcctccctcctctgagcagtatggaactgctcggcacgcctcgccgccggcagctactggagaacatctggcagcgcgcctcgctatccaaaccgcaattcgaggagatctaccggcggccactggccaactatgccgagctggtccagcagctcccagcttcggaaaaccatcaccatgcccatccaggcgggatgatcgatcacggcctggaaatcgtggcctacgcactgaaggttcggcagacctacctgctcccgatcggcgcggcgccggagtcacagtcagcccaggctgaagcctggtcggccgccgccgcgtatggtgccctggctcacgacataggcaagatcgtcgtcgacctgcaggtggagctgcaggacggcagcacctggcacccctggaacggaccgatcaaccagccttaccgcttcaagtacgtgaagtcccgcgaataccagctccacggagcagcctcagcactcctcatccaccaactgctaccgcgcactgcactcgattggctcagtcgctttccagagctgtgggctcaattgatctacctgttcgctgggcagtacgagcacgccgggatcctcggcgagatcatcgtgaaggcagaccaggcctcagtcgcacaggagctgggaggcaatccggatcgagctctggctgcaccgaagcagtcgctgcagcggcagttggctgacggccttcgcttcctggtgaaggacaagttcaagctgaatcaacctggcggtccgtccgatggatggctgacccaggacgcactctggctggtgagcaagcctgcagccgatcaactgagagcctacctgctggcccagggtatcgagggggtgccctcctccaacgcgccgttcttcaacatgctccaggatcaggccgtcatccagaccaacgccgaggacaaggccatctggacggccacggtagacaacggtgctggatggagaaacaagttcacgctgctcaagattgctccagccttgatctggacagaccctgccgagcgtcccgcgccctacagcggatcactcgtcgttgaagatggaaccgcctcaacggaaaagccggaaacgacctgtgaaattcccaacgaaccggctaaacagcagcaagcaccagaaaccaagatgacgctccgccaaccttcgccgagcgttgcgaaaccgtcaaacgagatgcgggcgattgcgaagccctcaattgttgatcaggaagaaacagacgatttgtacgcgcttcttggtaatatcacttcgccactagaagagctagacactagctacgcatcatcggctgcttctcctacgaatactcgcggggaggagaacctacagcagccactagggaccaaggagccaacagattgcgctcctgaagcaattgaagatgtatttatgcctagcagaagcactgatctgggacagggactcattggctggatgaaatctggcatcgcggcccgtcgcctgttcatcaacgacaccaaggctttggtgcataccgtcgacgggaccgccatgctggtcacgccaggaatcttcaagcgttatgtccaggagcatccagagctcgaaaagctggcccaggccaaggatacgaccggctggaagctggtgcagcgcgcgttcgagaaacaagggcttcaccggaagaccagtaaaaacctgaacatctggaccatcaaggtttctggtcctcgcaagacgaaagagctcaaggcttacctgctccaggatcccaaactactgttccctgagcagcctctggacaacccaagcctcacggtcatcaccgaccccgaagggggtgtcgaatga

SEQ ID NO: 335652 - DNA, 690 bp, Pseudomonas aeruginosa
gtgaggcacaagcccctccgttattggcactacgaactctttgtgagtcttctctgtctcgccgcggatgaggatcagttgattttcccagtcgatgtcgcgcttgcggatgcacaacagcgcattcaaccggatgccggtgaagtagaagacctcaaacgtgcaaagccagaaccaggcgggtgtgatccgtgcgcgttcgccggtgcagcactcggcgccgacctgcatgttgagccaattgcgggcgcgcaggatggcttcggcggcgacggttttgcttgctcgcctgggggggatgacggtggtctttctgaacgggttgacttgggagtgcgtcaccaactcgtgctcgatggcatagccccagatcgtccgcagatgattcgagtacgtgttccagctccgcttcgacaggccttgttccagtaccttgcgccgccatcccaagacagcccggtggtccacgtcatgtacggttgccgtaggaccgaagtgcttgagcagcgccttggtcgcggcgcggtagatcttcgcgctggcttctcggagatcgtgcgcgaagatgtactcctcggtgagctgctgcggcgtcattcgacacccccttcggggtcggtgatgaccgtgaggcttgggttgtccagaggctgctcagggaacagtagtttgggatcctggagcaggtaa

SEQ ID NO: 335653 - DNA, 315 bp, Pseudomonas aeruginosa
atgaccaggcagttgaccactctcacgctgtgcttactgctcgccagctgcacgacccacaaggccgagccggctaggccagcctttgacagcagccgcaatccagacctgctctctccggacctgtatccaaacggtgtgcagccggagaaagagcccgtagtgcgctacgggcgctacaccctggtcagcacccagcctgatgccggtcaacgcgacctgatggcccagatcatcgacgtaaccatcccgtcgagcatgaacccgagcgtcaaggacgccatgcagtatgtgatgagccgctcggttttttaa

SEQ ID NO: 335654 - DNA, 135 bp, Pseudomonas aeruginosa
atggtcttttcggtagtacccttggcctcgcccttgcgggtggcgaagaccagccagagcagggcgatcaaggtaccgacggtaagagctgtgatgtacagactccagaaggtggtcattctttgttactcctag

SEQ ID NO: 335655 - DNA, 609 bp, Pseudomonas aeruginosa
atgaaacacgaaatactcgagaagaacgtcggcctgctggcgctatgcatggccgtggccgtgagcatcggcggcctgacccagatcgtgccgctgttcttccaggacgtgaccaacaccccggtcgaaggcatgaagccctataccgcgctgcaactggaaggccgcgacatctatatccgcgaaggctgcgtcggctgccactcgcagatgatccgtccgttccgcgccgaaaccgaacgctacggccactactcggtggccggcgagagcgtctgggaccaccccttcctgtggggttccaagcgtaccggtccggacctcgcccgcgtcggtagccgctactccgacgactggcaccgcgcacacctgttcaacccgcgcaacgtggtgcccgagtcgaagatgccggcctacccgtggctggtggagaataagctcgacggcaaggacatcgagaagaagctcgaagtgatgcgcaccctcggcgtgccctataccgacgaagacatcaagggcgccaaggactcgctgaaaggcaagaccgagatggacgccgtggtcgcctacctgcaggtgctcggcacctcgatcaagaacaaacggtga

SEQ ID NO: 335656 - DNA, 231 bp, Pseudomonas aeruginosa
atgtgggtcaacggcatcacccagggcctgatgtggcgcgcggtcaacgaggacggcaccctgacctactccttcgtcgaagcgctggccgccggccaccccggcttcatcgtgcgcatgctcggcggtttcatcttcctgctcggcatgttcctgatggcctacaacacctggcgcaccgtcagtgccgccaagccggccgaatacgaagccgccgcacagatcgcctga

SEQ ID NO: 335657 - DNA, 339 bp, Pseudomonas aeruginosa
atgatcgaggaacttcagatcggcgcccgcgaggcggtggccaccatgaccgagagccagcgctacagcctggagagcgtggagatcgccaaccgtgccggcgaaagcctgagcagcgtgacccggcggatcggcgagatcgacgggatgaaccagtcggtggccaccgccaccgaggagcagaccgcggtggtcgactcgctgaacatggacatcaccgagatcaacaccctcaaccaggaaggcgtggagaacctccaggccaccctgcgcgcctgcggcgagctggaaacccaggccgggcgcctgcgccaactggtggacagcttcaagatctga

SEQ ID NO: 335658 - DNA, 372 bp, Pseudomonas aeruginosa
atgcatggcgaggcggcccgccaccaggctcgcctggtggagtgcgcggggatccaaggcggcgctaaagcattctggagcgctatcgatgcgatcttcgctcagtcggccggcaacgggggcgggctgcctggcggcacattggactttcctgatctggaccagtctcgactggagaaatgtgcgaaagacatggacctggtggaccagttgatcaagacggacatcgacactgcacggtcgaacggcattacagcgaccccgaccctcgtcatccaggacaaccagacgggacgaagcgtgaagcttgaaggcatggccgacgagaccacgttgctgtcggcgatagactggctagccaaggatctctag

SEQ ID NO: 335659 - DNA, 1746 bp, Pseudomonas aeruginosa
atgaaaagactcgccaccacactcaccgccatcgccttgatgcaggcttcactctcagcccacgcagcggctgacctggttctggtcaacggccgcatattcaccgccgagcaaacccagccacaggttcaggccatggcgatccagggcggcaccatcctggccaccggaaacaacaaggaggttctggctctggcggatagcaacacagagatactcgatctcgccggcaaacgagtcatgcccggactgatcgacacccactcgcatgccatctacggtggcctgtcgttatcgtccgcaagcatgaaagatacagtcgtcgatctgcctgaactggaacaacgcctgcgccagtggcgccacgacggcagtgctcgactgggcccggagattctccaggtgcagggcatgaactccgaatactgggcacgcgtggaggagttgggtcagcgcttcaatcacggcgaatgggccgagacgccgctgatcctgatgggcagcgaccatcacaccgcctgggtcaatgcccgcatgatgcagatggcgggtatcgatcaacctctgctggccagtctcccggaagccgagcgcggaaccatcggcgtgctcgccaatgggcagcccagcggctttctggtcgatgccggctgggatcgagtctctgccatattgccaccgatagacaccgcgaccttgatgaagggcgcccaagcggcagtgcgctactacaacagcgtcggcgtcaccggctggatggacccggcagccaatgcctctccgggtcaggcggtcttcgatatcaaaccgaccgaacacagcactggcgtactccctggctacaaggcgctggcggaaaaaggccacctgagcgcccacgtggccgccctgctggtggccaaccccaagagccgcccggcggatctggaggtattggagaaagtccgccaacagttcgccggcgtgcccaatctgacgctgccgggcgtcaagatcttcgccgacggtgtactggaatttccggcgcagagtgcggcgctgatcgacccttacaacaacagccacaaacagggcgaactgctgatcgacccacaacacttcggcaagctggtcaccgcggtagaccaacgtggctggctgatgcacatccatgctgtgggtgatcgcgccgtacgcgagtcattgaacggcttcgaacaggctcgcgcggccggcaacagtgatatcgcccactcgatcacccacctacaactggttcatccgcgcgagttcgcccgcttcaagaagctcaacgtgatcgcatccatgcagctgctgtgggccacggcggacgaatacgctatcgacatggtcaagccttatgtcagtgccttcgcctaccactatcaataccctgcccgctccttgctgaaggctggcgcgaccatcgccggcgccagcgactggccggtgtccccggccaacccctggctggccatcgcccaggcctccacccgccagggcaacaagggcgtactcaacgccagcgaaaccatcacccgcgacgtgatgttcttcgcctacaccctgaacgccgccaaaaccctgcgtctcgacgaccgcataggctcactggccgaaggcaaatcggcagacttcgccattctcgatcgggatgtgttcagcgtgagcgaacaggcactaagcgaaacgcaggtgctggcaacctattttgcaggccgtaaggtgtatcagcgacagcagtag

SEQ ID NO: 335660 - DNA, 1635 bp, Pseudomonas aeruginosa
atgtccatcctgagaaaggtcgccattgagcgacgcctgtggctgattcttctcgtggccttgctgaccatcgctctgctgatggccctggccctgcgccagatccacgaggggctgtacggcaccaaggtctaccagatccagactgccgtggagaacaccaacggcatcctccagcgcttccatcaattggaaaagcaaggactgttgagccgggatgatgcccagtcccaggcacgcgagatgatccgcggcctacgttacggcggtaacgaatacttcttcatccagaacctgcagcaacgcatgctgctccatcccatgagtcccgagatcgaaggccgcgacgtcagcgacctgaaggacgccaagggcatagcgatcaaccaggagatggtcagcgttgcccaatcttcggggcacggtatcgtcgaatacagctggccaaaaccgggggcggtgcagccagcggacaagatttcctatatcaccctgttcgagccctggggctggattctcggcaccggcgcctacatcgacgacatccaggcgatattccgtggtgaagtcatcaggctgggcggcatcgccttgggcatcactctgctgctgaccctggttaccgcgctgatctcacgcagcatcacccggccactgcgcaataccgtgcaggccatggccgagatttcccgaggcaatggtgacctgacccgccaactagcaaccggcggccgtgacgaactgtccggtctggccaaggacttcaaccacttcaccgaaaccttgcgcggtctgatcggtgaaatcctggtctccgccagcgccactgacgaggcagcccgaaccattcagcacaacgccgcctcggccagggctcagagcgacctgcaggcgcagcaggtcaccctgatcgcgaccgcactcaacgaggtgacctacagcatccaggacgttgccggcaatgccgaagcttcggccagagaggtcgccaacgccgagctacaagcgctcgacggcctgcataacgtagaactcaccctcaatgaaatcggttcgctttcgtcactcatcagccagggggtggaaacaattcattcgctggccgagcaaaacgaacgcatcagctcggtactggccatcgtccgctcgattgccgaacagaccaacctgctggcgcttaacgctgccatcgaggccgcccgggcaggcgagcagggccgtgggttcgctgtcgtcgccgacgaggtacggttactggcgcaaaggacccaggatgccaccgccgagattcagacgatgatcggcgaactgcgcgtcagcagcagctctgcggtcagcatgatcggcgacacccacaaactttccgagcgcaccgtgacccaggccaacctggccgggcaatgcctgcaggccatcgtcgcctcgctgcgcgcgatcaccacgcagggccacagtgtggccgaggcgacacgccagcaatcgttggccgttgaggacatcaatcagaacctggccaccgcctccgtacaggcacaagaggccgcccagttcgccgagcacacgcgcggactgagcgacggcttgcaggcgaattccagcgacctccagcacgcactaaaacgcttcaccttctag

SEQ ID NO: 335661 - DNA, 591 bp, Pseudomonas aeruginosa
atgaatgcactaaacacccgccgcaacaccctgcgcctgttcggcgccctctgcctgaccttggccacagcctggttgccgcaggcccaagccagcgaactgaaagagaagatccccaaccgcctgaccgatgagctggtcatgcagatcaacgtcaagctcggcccgcgcgaagagatgggcaaaggcccggacggcacgcgcatcaactacccgatcatcggcggcacgtttgtcggcaaggacatgaaaggcaccgtggttccaggcggcgctgacatgtcggtaatgcgcgaggacggcgtctccatgatcaacgcgctgtaccgcctgaagaccgatgacgggcagatcatcatcatcgacaacgccggcatctggcgcctcaacgagtccggcttggccaagaaagccaaaggactggagctgcgcgacatgaaggaaagcgacttctactgccgcaccacgcccaagttcaaaacccagccgggcaagcatgcctggctcaacgactacatcttcaccggcaccatcgatggcgtcagcgagcatgaagtgctgatcagcgtgtaccaaatcggcggcgaatga

SEQ ID NO: 335662 - DNA, 1872 bp, Pseudomonas aeruginosa
atgcagatcatccctatcaagcacgccattggcctgagcgccctctgcgtagcgctgctgatggccggctgtaacacccaaccgccgatggaaggcccgccgcctgccgaccgtagcttccaggccttctggggcaagcggattaccggctatatcaccgcagccgacggcaccgagctgcgctactcggtactgctgcccaagggcgaaggcaagtttccggtgctgatccgctacagcggctacgactccggcagcatcggtggctcggcctacctggccgacaacgaaaccttctccgtagcgatggacaaagacctggtcgaacgcggctatgccgtgatgggcgtacaggcccgcggcaccggttgctcccaaggcaccttcgacttcctcggcccgcagtacggcaccgacggtcgcagcgccgtggagttcgccgccgagcagagctggtccaacggcagtgtcggcatgttcggctggtcctgggccggcatgtcgcagctgatgaccgccagcgagcgccccaaggggctcaaggccattgctcccggcatgatcctcggcgatccgcgcggcgacagctgggcgccgggcggtgtgcccaaccaggaattcaccaccacctggcactggttcgtcgacatgcgctgggacgcggtcaaggccagcgccgaaaccgagaaggacgaacgctgcctggcccaggtcgaagagaacaaggccaaggtggtcagctcctcgctgatgtacaacctgattcgccacccgctgcgtgacgagtggaccaagcagcgcgagccgcgcaatcgtgcccacgaggtacaggtgccggtgctgtccatgcagacctggcaggacgaagcggtgctggcccgcgaaggctattaccaggagcgcctcgacccgaaactgttgtggatggtgcagtccagcggcgggcacaacctttacgaatcggaacgcttccgtcaggagaagctgtaccccttcctcgaccacttcgtgaagggtgaacagaacggtttcgagagcgccaaacgcctggaaatctggcaggaaaccgtggctgatgttcgcgagggccgccatcaaccgaacgaaaccgctcgcccgagctggaccatcgagcgcgaccattacccgcttgcggtcaaaccggtgagcttcgccctgagcgaagacggtgagctgatcgaaggcggcaaaggcagcggcgaaccggacgcctacctctacccgatccccggcccggatgtgaacacctacctcaaggacaacgcctggggctggcaacacccgctgtggaaacagggcagcctggcctacaccagcgcaccgttcgagcgtgacttcctcagctacggcaccgccagcgcagacatctggctgtccaccttcctggcgccagatgctgacgtacaggtgaccatcactgaagtgcgcccggacgacaaggaagtcttcgttcagcgtggctggctgcgcatgtccaaccgcaagctggatgagagcaagtccaccgagctgcgcccctggctggtcgacgagccggacgccatccagccgatgctgccgaacgtgccagccctgggccgcgtagaaattccgccgttctcccacccgttccgcaagggttccaagctgcgcatttggatcgacgcgccttcgcgcaccggtggctatggctttgcctactactcgctgcagagccgcaacagcgtctaccacgacgcccagcacccgtcgcgcctggtactgggcgagctgaccggtgtctcagtgccggaagcgctgccggcctgcgacacgctgctcaagcagccctgccgccacaacccgctgtcggctttcagccgcccgctctga

SEQ ID NO: 335663 - DNA, 843 bp, Pseudomonas aeruginosa
atgaacaagattgcaacccggggattggccagcagcctgctcgccctatccctctccgctcaggccgtcgacctgactccggaaaccatgctggacatcaaccttggtattgccagcgactggcgcgtaggtggcctctcgctgaacatgggcggtgcccccgtctaccaaggcaacgcaaccctggtgcacaagctgagcggtctttacctgggtgcctatgccgtatccgtcgacatggacaccgaagccaaccgcgagatgggctactacgtcggcatcgcccgcccgatcaccgaggacactcgtttctcgctgacctacattcgctacgaataccccggcgacagctggatcaacttcgacgaggtcatcggcaccctcagctaccgtcaggccaccctcggcgtgaagtacgcctgggacctgcagacccccaagccgatcgaagacgccaacgaggaaatcgccgcagcccatgcggcccaagccgccgggcagattccgccatgggtgcaactgccgggcctgattcccgaacgcgacccacaccgcaccatcggctgggccgaatacgacttctacctgccctacgcgaccaaactgaacgtgcgttatggccacacctggacccctgacgagaacgcctggcgctcggccagcggcaaaacccgcagcggctacagcgactggggcgtttccctgaccaagcgcatgtgggacatcgagtggaaggccgcctatatcgacaccgacctgtccgaggccgagtgccagaacaacttcggcaagggcggcgactgccaggccaccgtggtgttctcggcgatgaagaacttctga

SEQ ID NO: 335664 - DNA, 462 bp, Pseudomonas aeruginosa
atgtctgaacccaagctgcacctggccatgtgcctgaacgtgtggatcggacccggcatcgaccgaggcctcagcgagcatggccagcgcatcgattacccgattctcggcgggcgctttgccgggcctggcctgactggggagataccttcggaaggtgccgactattacctggagcgcgccgatggcaacggtgtgctgaatgcacagtacagcctgcgctgcgatgacggcgccctgatcaaggtgcacaaccgcggcctgctgattctgtcggacaaaggccatgaactggcgcgcgacgcctggcccataccggacaaggagtaccgctgccgctgcacgccgcagttcagcaccgatagcccgcgctaccagtggctgatgcagcacatgttcctcggcgtcatcacctaccccaccgagcacggggtatggatcgagtgctaccgagtcgactaa

SEQ ID NO: 335665 - DNA, 1104 bp, Pseudomonas aeruginosa
atgaagcactcttctcgatattgcgcagcggctctgttgctggggctaacaagcctgaccgcctcagcagcaacggtcggcggcgagttacgcatctacaactggatcgaatacctgcccaaggacgtcctccaggatttccagaaagagtcgggcatcaaggttacctacgacgtcttcgacagcccgcagaccctggaagcgcgcctgctgaccggcaccgccggctacgacgtggcctttcccagtagcagccaggtgcccaacctgatcgccgttggcgccctgcaaccgctgcagcgccagcagctgccacactggcagcaactcgatgcgcagttcatgcagcagcgcgaaagtatcgaccccggcaaccgctactcggtgccctacctgtggggcagcacgctgctcggctacaaccaggccaaggtcgaagccgtgctgggcaaggatgtcgacatgcgcgactacgacctgatcttcaagcccgagaacatcgccaagctgagccagtgtggcgtggccatcctcgatagcccgaccgaggtggtacctatcaccctgcactacctgggcctgaatcccaacagcaccaacccggacgacttcgccaaggcagaggccgcgctcaaggccattcgcccgcatgtgcgctacttcaactcggccaagtacccgcaagaccttgccaacggcgacatctgcgtggccctgggctggtccggcggcatgctggcggcgcgcaacatggcactagccgccaacaacggtaacgacatccgcatggcactaccgcgccagggcacgttgatgtggtcggatgacatggtcatccccaaggatgcacagaacctcaagcaggcccacgccttcatcgactacctgctgcgtcccgaagtgattgcccgggtgaccaaccagatcggctaccccaaccccaatccggccagcacggcgctgatcgccccggaattgctcaacgagaaaaacctgttcgttccggaagaagatcgccaccaactgttccaggtagagccaccgcaccgccaggttttgcgcctgatgacccgcctgtggaaccgggtgcgctccgatgtctga

SEQ ID NO: 335666 - DNA, 1233 bp, Pseudomonas aeruginosa
atgagtaccgattttgcccaggaattacatagcgcctaccgagcaaacagtgagccagcacaacagctgatgcatggctttccgccgcctccggagcagcgcgtaacctggcacaacttcatgagccctccgcacaaccgctgggcattccacaacctgggccgcatccgccccagcatcactgtcgagcggggtgacgggcaggtttgtcggttgccggttgctccctatgcgatcgacgacttccgcttcgagagcgcagccggacatcaggtgagtttggatgagcacctcaccgcgacccatacagatggttggctggtgatgaaagatgggaaggtggtgcaggaacactatgcaaatggccatcaggaacataagcgccacatcatgttctctgtcaccaaatccttgatcggcatgatcgccgaggagctgatacaggacaaactgctggacgataaggccctggcctctcgctatgtacccgagctagtcggcagtgcttttggtgatgccagcgtacgccagctaatggatatggcggtatccatcgactacgacgaggtttacgacgatcccagctcagggagttctcagtttggatatgcctgcggtctgactccacccccacctgggatcgaagcctgccagtcgctctacgaatatctcccctctacgcgcaagcgcggcgagcatggaggtttctttcactatgtcaccgccacgaccgaggcccttggctgggtcatggaacgagccagcggccgcagctgtgccgagatgctgggcgatgtctggcaagggcttggctgtgagcgtgatgccttcttcgtggcggatccctggggacgcaacgtaaccggctgcggtttcaacgccaccctgcgtgatatggcccggtatggctcgatgctgctcaatcagggccgtagtcagctacgccaactggtatcgcgcaaggctattgctgcagtactcgccgggggcaatccaaaggtctatgccgctaacgagaccttctcccaatggagcccgggcgctacttacaggagccagtggtacgtctatccaggcaatgcattgctcgcggtagggatccatggccagtgcctctacgtggacttcacccagcgggtagtgattgtcaaacagtcgtccatgccggttgccgaaagcatcctggatatcgataccctgcgcctaatccgcaccctggccagcgccctctaa

SEQ ID NO: 335667 - DNA, 603 bp, Pseudomonas aeruginosa
gtgagtggattgcggcagcggcagaaggaacagcgtcgggaggcaatcgttggggcggcactggagctgttcgaggcgcagggcttttcctcgaccacggtcgagcagatcgcagtgcaggcgggggtgtccacgcccacggtgttcaactacttcggtagtaagcaggacattctgctggcaatgatggagcgcgcggatcagcgcgcggtgtcggacgcgcggctgcagatgccggctttcgacaatgctgtcgacgccatgtgccacctggaatcgcagatcatccgccaggaattggaggcgttgccggtggccatctggcgcgagctgctgccgctgggcctgctcacccagcgccccgacgcggcggcccagctcaattcacgcctggtgcagcaggtaggcgatctgttgcgcgagttgcaggcgcgtggcctgctcagggcggacttcgatgtcgacttcgtggccgacttcctcaacgactacagctcggtgctgttcatgcgcctggtgcaggacgaggtgccggatctggtcgcgcatgagcggcgcatccgccagctgacccagaccctgttcgacgggctggcgccctga

SEQ ID NO: 335668 - DNA, 468 bp, Pseudomonas aeruginosa
atgccccgcaagcccaaggaaccgaccccacaagccatgcaggagccgctcgacagcgcgctcaacaacctggtcggctacgtgatgcgccgcgcgcagatgaagctcaaccagcacctgaccaatcgtctggaagaacatgacatccgccctgcccagttcacggcactgagcatcatcgagcagtcgccgggactgatgcaggcagacctggccaaggccctggcgatcgaaccgccgcaagccgtactgatgatcaacaagctggagagtcgcggcctggccatgcgcgtgcgcagcaatccggacaagcgctcctatggcctgttcctgagcaaggccggcgaacaattgctggcgcaactcaaggagctggccgcgcagagtgacctagagagcaccaccgcactgaacgacgcagagcgcgaacagctgctggccctgctgcacaagctctatcgcgactga

SEQ ID NO: 335669 - DNA, 831 bp, Pseudomonas aeruginosa
atgagcagctatgaaggccgttggcagaccgtgaaggttgaactggacgcgggcattgcctgggtaaccctcaaccgcccggagaagcgcaatgccatgagcccgacgctcaaccgcgagatggtcgaggtgctggaaaccctggaacaggacgccgaggcgcgcgtgctggtgctaaccggcgctggcgaatcctggaccgccggcatggacctcaaggagtacttccgcgagatcgatgccggcccggaaatcctccaggagaagattcgccgcgaggcctcgcaatggcagtggaagctgctgcgcatgtacaccaaaccgaccatcgccatggtcaacggctggtgcttcggtggcggcttcagcccgctggtggcttgcgatctggccatctgtgccgacgaggcgaccttcggcctgtcggaaatcaactggggtattccgccgggcaacctggtcagcaaggcgatggccgatacctgcggccatcgtgaggcgctgtactacatcatgaccggcaaaaccttcggcgggcagaaggccgcggccatgggcctggtcaaccagagcgtgcctttggcgcaactgcgcgaggtgacccgcgagctggccgagaacctgctggagaagaacccggtggtactgcgcgcggccaagatcggcttcaagcgttgccgcgagctgacctgggagcagaacgaggactacctgtacgccaagctcgaccagtcgcgcctgctcgatccagaaggcggccgcgagcagggcatgaagcagttcctcgacgacaagagcatcaagccgggcctcgaagcttacaagcgctga

SEQ ID NO: 335670 - DNA, 1449 bp, Pseudomonas aeruginosa
atgaacgatgtgtccctgctgatcgccggccaggcgcgcccggccgccaatggtcgtaccttcgaacgccgtagcccgctgaccggggaggtggtggcgcgggttgccgccgccaccctggaagatgccgatgcggccgtggccgccgcgcaggcggctttcccggtctgggccgcgctggcgccaggcgagcgccgcttgcgcctgctcaaggcggctgaactgatggaggcccgtgcgcccgagttcatggcggcagccagtgaaaccggcgcggcggccaactggtatggcttcaacgtgcagttggcggccggcatgctgcgcgaggcggcggcaatgaccacgcagattctcggcgaggtcatcccctccaacgtgcccggcagtttcgccatggggctgcgtcagccctgcggcgtggtgctcggcatcgcgccgtggaacgccccggtgattctcggcgtgcgtgccctggccatgccgctggcctgcggcaacacggtggtgctcaaggcttccgagctgagtcccaccacccaccgtttgatcggccaggtgctgcacgaggccgggctgggcgatggcgtggtcaacatcatcagcaatgccccggaagatgcaccggccattgtcgaacggctgatcgccaatccgctggtgcgccgggtcaatttcaccggctccacccatgtagggcgcattgtcggtgagctgtcggcgaggtacctgaaaccggcgctgctggagttgggcggcaaggcgccgttgctggtgctggacgatgccgacctggatgccgcagtcgatgcagcggtgttcggtgcctacttcaaccagggacagatctgcatgtccaccgagcgcctgatcgtcgacgccaaggtggccgatgccttcgtgctcaagctggcattccgggtttccaagctgcgtgcgggtgatccgcaggacggcaagtccgtgctcggatcactgatcgacgcggccgccggccagcgcatccagacactggtcgatgatgcggtggcgaagggcgcctgcctggtcgccggtggcggcgtgcagggcagcatcatgcagccggtgttgctggatgaggtgacggcggacatgcgtctgtaccgcgaggagtctttcggcccggtcgccgtggtgctgcgtggcgagggcgacgaggaactgctgcgcctggccaacgactccgagttcggcctgtcggcggcgatcttcagccgcgatgtgtcgcgtgccctgaccctggcgcagcggctcgaatcaggcatctgccacatcaacggaccgaccgtgcacgacgaagcgcagatgccattcggcggcgtgaagtccagcggctacggcagcttcggtagtcgagcgtcgatcgatcacttcacccagttgcgctgggtgacggtgcagaacgggccgcgccactacccgatctga

SEQ ID NO: 335671 - DNA, 1878 bp, Pseudomonas aeruginosa
gtgaatgttgaagcaacggcgcagcgcccggagtcgccgcgctatcgccaggtcgccatcggccagccttcggtgaccatcactcccggcacccatggcgagttctatctgcgtgccgacgagcccttgcagccctatcccgaacacctgcttgaccgcctgctgcactgggccgagttgaaaccggatgcgaccttggtggcccagcgcggcagcgatggccaatggcagcgcatcagctatcggcagatgctggtcaatgtgcgtgccctggcgcagtcgttgctcggctatggcctgtccgccgagcgaccgctggtgatcctctccggcaatgatctggaacacctgcaactggccttcgccgccatgtatgcgggcattccctactgcccggtgtcgccagcctacgctctgctgtcgcaggatctggccaagctgcggcatatcttcgaggtgctgcagccagggctgatcttcgccaccgatgccgcgccatttcagcgcgccatcgaggcgctgagcccggtggaaaccccgctcgtattcacccgtggcgaactgcccggccgggtctgcgagcgcttcaccagcctattgcagcagagcgactgcaccctggctgacctggcgttcgccggtacgaatgccgacagcatcgccaagtttcttttcacctccggctcgaccaagctgcccaaggctgtgccaaccacccagcgcatgctgtgcgccaaccagcagatgctgctgcaaaccttccctgagtttgccgtcgagccgccggtgctggtcgactggctgccgtggaaccacacgttcggcggcagccacaacgtaggcatcgtgctgtacaacggcggcagcctgtatatcgatggtggcaagccgacgccgcagggcatggcggaaactttgcgcaatctcaaagagattgccccaacggcttacctcaccgtgcctaaaggatgggaagagctggtgggggcgctggagtgcgatgccgagctgcgcgacaacttcttctcgcgtatcaagctactgttcttcgccgccgccgggttgtcgcaaagcgtctgggatcgtctcgatcgggtggccgagcagcactgtggcgagcgtattcgcatgatggccgggctgggcatgaccgaggcctccccgtcctgcaccttcaccaccgggcctctgtccatggccggttatgtcggcctgccggcgccgggctgcgaagtcaaactggtgccggtcgagggcaagctggagggacgcttccgcggcccgcacatcatgacgggctactggcgttcgtggcagcagacactcgatgccttcgacgaggaaggcttctatcgttccggcgatgccctgaagtttgccgatcccgagcaaccgcagctgggattgatgttcgacgggcgcattgccgaggacttcaagctgtccaccggcgttttcgtcagcgtcggcccgctacgtactcgggtgatcctgcaaggcgcgccctatgtgcaggacgtggtggtaaccggccccgatcgccagcgcctcggtttgctgttgttcccgtacctgccggcctgccgcgagttggccgggctggagggtgatgccgatgtcggtgaggtgctggcggcagctcccgtacggcactggctggcgggcctgctggcagagctgaaccgcgacgctaccgggttggcctcgcgcatcgcctggctctgcccgatgagcgaggcgccgagcctggatgcgggggaggtcaccgacaagggctcgctcaaccagcgcgccgtactgacccgccgcgccgatttgatcgatgccctgtacgcagcccctggcgccagcggcgcagtggtcgaggagggcgcatga

SEQ ID NO: 335672 - DNA, 1233 bp, Pseudomonas aeruginosa
atgagcgggcagttcgagtccttcgagcgggtcgcgttgctggcggccgcgcgtacgccctggatcgactatggcggggcgctggcgcagatctcgcccatcgacctggggattcacgcggcgcggggtgtgctggcacgtgccggaatcgctgccgagcaggtcgacagcgtgctggccggtagcatggcccaggccagtttcgatgcctacatgttgccgcggcatatcggtctgtacgccggtgtgcctctgcacgtcccggcgctggcggtgcagcgtatctgcggaaccggcctggagttgctgcgccaggccggcaatcaggtggagaagggcgcatcccggttggcactgtgcgtggcgactgaatcgatgtcgcgcaacccgattgccagctacgagcaccgcagcggttttcgtctcggtgcgccggtgggtttcaaggatttcctctgggaggcgctgctcgatccggccatcggccagaccatgatcgacacggcgcacaacctggcaatgcgacatggcctgcagcgcaatgaggtggacgcctttgccttgggcagtttcgagaaagcgctggcggcccaggcgcaaggctggttcgacgaggaaatcgtgccggtggtcagcgcctgtttcgagctggacggctatcagccgcgtgggctgcaactgccgcgcaagatctcccggcttgagcgcgacagccatccacgcgctaccagcctggaagcactggccgcgttggcgccggttacgccgggctcggtgcagaccgccggcaacagctgcgcgctggtcgacggcgccgccgccgcgctggtggcggatgcccgcgaggtcgatagccccctggcgctgttgtgcgccagtgccgtggtgggggtgccaccggaagttatgggcatcggcccggcacctgccattcgcctgctgctgcagggcaagggcctgcagctggatgccatcgacagcctggagatcaacgaggcacagggcgcacagatcgtagcggtgcagcgcgagctggaactcgatccggcgcgcctcaatcgccatggtggtgccatcgccctgggccacccgctggccgctaccggcttgcgcctggcacacagcgtcgcccgccagttgcgtgcccgtggcacccgctacggcattgccgccgcctgcatcggtggcgggcagggcatggcgctgttgctggaaaaccctgcctgcacctga

SEQ ID NO: 335673 - DNA, 1176 bp, Pseudomonas aeruginosa
atgtctacttcatccgcagtgcgcaccattgcgctctgcttcgtcgtcgccttgctcgaaggcctggatctgcaggcaacaggtgtggcggctccgcacctgattcgtgagttcaatctgtcgcccgcggccctgggctgggtcttcaccgccggcctggtgggtttactgcccggcgccgtggccggtggctggctggccgatcggttggggcgtaagcgtgtgctgattgctgccgtgagcctgttcggcctgttttcactgctgaccgcccacagcgccagctatacgcagttgctgattgcgcgtctggtcaccggcctgggcatgggcgcggcactgccgatcctgattgccttgtcctcggaagtcgccagccgcgagttgcgcaacatggcggtgagcctgacctactgcggagtaccgctgggcggtgcctgcgccgcgctgattggcatgttcgcagcggtcggtgaatggcgcttggtgttctatgtcggcggcattgcgccgctgctgatcgccggattgctggtgctgtggctgcctgagtcgcggcctctgggtagccgaccgctgaccttgtcgcaaagcaccaatgcattgctcgggtgccagcgaggccgcagcactttgctgctttggtgcagctgcttctgcacgctgatgattctctacatgttgctcaactggctgcccacgctgctggccgggcgtgggctcgaccgagtcgatagcgcctttatccaggtgctgttcaacctcggtggcgttgccggcgtgctgctggcgggccgcctaatggatcgtcagcgttcgctgctggcggtggtgctggtctaccccggcatgctgctggcgctggcagcgctgggttacttcgaacaactacagctgttgtatgtggcaggtgcacttgctggcgcctgcgccgtaggtgggcagctgattctctatgccctggcaccacgtctgtacccagacgatgtgcgcgccaccggtgttggcgtcgcagtcgcggttggccgcctggggtcgatgagcgggccgctgctagcggggcagatattggccgcgggtgccggcgtgggtggtttgctgctggctacatcgccactgctgctgctcgccgctggaagcgccgcgctggctcttcgtcaggactcgggggattga

SEQ ID NO: 335674 - DNA, 1062 bp, Pseudomonas aeruginosa
atgcatcggttcagacttgagtgcgatacgtcccaacccaccaccgtgatgggcgcagtcgtctccgggctcgcctcatacctgcgtaatcaaggcgccgaagcagaagatatcttcgaacgctcggccataaatccagacgttctggatgatccgaaccagcccatttccctgaatgcttttctcagggccatcgataccgctgcgcaagtcacggatatcgataactttggtttgtggctcggcaatcaataccgtccggaattcctggggctgtggggctacatcggcctgtcatccgccacactcggcgatgctttgacgaacatgagccgccatttcccacagttccagagccgtagctcactaaaaatgagccactatcagggcaaagtgcgccttgagtatgggctgctcgatggcagcattgtcagtcgccgccatgatgctgagatgaccttgggcaacgtgttcaatgtgatgcgacgtgctttgggggatcactgggcgcccctggaggtgcatttcaatcacggccgccccgattactggcaagagcaccagaaggcttttcgctcgcaggtctgcttcgaacaagcgaccaatgcactgatcttcaatgtgtcggatcttgcccggcccatgccgggggcagacccgcagttactgttaatcgcccagcaaagcctgagcgcaatgcgtatctcgaattccctgcaggtttcgctgactgagcgggtgcgctccgagattatcgacacgatccatagcgataccccgcgcctggaacaaattgccgagcgcctcgcgttacctgcctggacgttgaataggcaactcaaggacgaaggccagactttcaccggactggtcgaggcggttaggcgagaactcgcgcgctactatctagaaaggtcaaacatgagcgtttctagactatctgagcttctgcgctacaccgagacgtccagcttcacccatgccttctctcggtggtttggggagtcaccaaggagctggagaagtcgtcatcgaaagaactctgagatggattacgaataa

SEQ ID NO: 335675 - DNA, 1425 bp, Pseudomonas aeruginosa
atggaggttgaaaagcaaaaactgaaaggctcacttggcgtagcgccgatcgtgatgatggtggtcgccactgcggcaccattgacagtgatggtggccaatacccccttgatggtgagcatgggcaacggcgttgccgcccctgtcgacgcctttattgcaaccgtgatcatgtttctgtttacggtcggcttcgtggcgatgtcgaaatacatcaccaacgcaggcgcgttctacgcttttatccagaaaggacttggccgttcaatcggcctgggatcggcaaccctggcggttgtgtcatacgcgatgattctggtcgcactgcaaggcttcatcggctatgccacggctgacgccatcaatgacgtcatcagtgtagatgtcccgtggtggatttattccttcctggccgtcggggtgattgcctatctcggctatcgggatatcgagctgagttcgaagtttctcggcatcgcgctggttcttgagattgccgtagttatcctcgtggatgtcgccattctctgggacaaaggcccttccggtatggaaatgggctccttcgagatggccaacatcatctcaggctccccaggcctggccattctgtttgcgatcttcagttttatcggtttcgagtcgacggtgatctaccgcgaggaggcccgggaccctgatcgcaccatcccacgcgcaacctatatcgccgtattcctggtcggtgccttctatgtgatttccatgtggtgcgcggtcagtgcaatcggccaggaaaacatcgcgagcttctctgaagctcatggcgccgacatgtacctggcagtcaccgagcagtaccttggcgcgattctcatggacgtgatgcatgtcctgctgctcaccagcctgttcgcctgcgcactgtctctgcacaacatcgtggttcgctacaaatacaccttgggccgcttcggtgtactgagcgaacgcttctccaacgtccatgcagaacacggttcgccccatgtgtcctcggccgcactgtcactgttcagccttgtagccttcgtcatcctgatcgccatcggcgccgacccggcgactgagatctatgcctggggagccatggccggaacgctcggctacatgacgatcctttcgttgacctgcgcagctgtcgttgtgttcttccgccgcgagaaagcccagggccagctgtggagcaccctgatagcgcccactggcggcctgcttggaattctcagttgcctctgggtggccatctccaatctcccggatctgatcggcggcgacagtgccaagactgtctcggtcctggttgtgctgttcctgcttgccacctttgccttcggcttctggattgccgagcacttccgtacccgtcaccccgttcgttacgaggcactgcgccagctggcgtaa

SEQ ID NO: 335676 - DNA, 708 bp, Pseudomonas aeruginosa
atgcttaatcgcctccccaataccgccactgttgaagaagtcagcgcctcgctcaaagaacacggctacgtgatcatcgatcaactcgtcagtgccgaagtcatggacaaggttgctgcagagatgggcccgtatatcgaaaccacgccgttcggcgaagacaagttcgttggtttcagtacccagcgcactggcgcgatgattctgcgctcagaaacctcccgcgagctgatcatgaatccgttggtcatcggcgtcgccgggcaacacctgagcaaggcgtcaaccttccagttgcacctgactcaggtcatcaccgtgcatcccggttcccccgcccaggttctgcaccaagaccaactggcctgggatttcttccagtttccagatgactacgaagtgcagtgcaacaccctctgggccatgaccgactacaccgcggaaaacggcgcaacccgtatcgtgccggacagccagttcgccgggccgggccagaaatacccaccggaagccggcatcccggcggaaatgaagaagggctcagtgctgctctacaccggcaaggtttatcacggtgccggggaaaacaagactgacaaggtgcgtcaggcgctcaacatcacttacgccgtcggttgggttcgccaggaggaaaaccagtatctggcgacgccggccgaagtcgcgcgcacgcacgctgcccgatga

SEQ ID NO: 335677 - DNA, 132 bp, Pseudomonas aeruginosa
atgggctatgtccgcgacttcgaagacccactcgccttcctcaaaggcagcactgagcggcgctcttctggcttcaacgccctcagcaatacggccaatcaaagctccgccgaatacgccgacgccctctga

SEQ ID NO: 335678 - DNA, 417 bp, Pseudomonas aeruginosa
atgagcacccttaccgaaacagctatgtcatttttcgaagtctgcgagtcgggtaaaggctggcaagagtgccgtcgctattgccacgaaaatgcagcgttcaacgtgcaagcacagtctctggaacacttgaagtcggtcgaaacatacagcgagtcgataccgcatctaatggaaattcttccagatgcgcattttgagttgattaatgttgcaactgatgagtgtcgtcagacggtgatcgcttatgcgcgcttttttggcacgcataccggtataagtgaacctattccggccactggtaagagcctctcttcagactacgtgttcatcatgaaaatgaaagatggcaaggttgctgaggtgaccaaagtctggaatgacggccacgctgctgttcagttgggttgggcttaa

SEQ ID NO: 335679 - DNA, 906 bp, Pseudomonas aeruginosa
atgacgaatccgcactggctacgctccttcgctgccctggtcgaaacgggcggtttcacccgtgcggcggatcgactgggcttgacccaggccgctgtcagccagcatgtgcgtcatctggaggacaaactcggccctttgctgatccgccgcccccggcagatcgaactgacgcctgcgggtatggcgttgctcgactattgcaacgagatcgaactggccgacaagcgcctgaagctgcgcctgtccgatgccagcgcgcgcagcggagaaatcagtctcatcacgccgggcagcgtggggctcgccctctatccactgctgctgaccttgcagcagagccatcccgggctggtcgtccgtcaccgtttcgcccccgaccccgagacgctcgatgcggtgttgcgcaagcactacgaactcggcctggtcacgctcaaaccggacgacccgcggctcgtcgccacgtccttcatcgaggaaccgctggagctcgtcgtgccggccggtgcagacgtggaaagctgggaggatctgcagcgactgggtttcatcgaccaccccgacggccaagctatggcaacccgtctgctggcgcgacactttcccggcaaccccggaatccgcaacgtgccctgccacggctcaagcaatcagatcgcgctaattcttgaaccggtcgcccgtggtctgggtttcaccgtgattccccggcacgcgcgtcaggccttcgcacaggccgatgccatccgggtagtcgagtgcggcaagccggtggtcgatacgctatggctgatccaccgagcggaatggccgctttcagcccgcgcgacttgggtactggagcaactgaggaagatgtcacctttcaatcagcgacggggaaggcggcgcgagacggtctga

SEQ ID NO: 335680 - DNA, 501 bp, Pseudomonas aeruginosa
atgtccctgacatacccccgcagtttttcgcatatcggcctttcggtgaccgacctggacgccgccgtcaagttctacaccgaagtcatgggctggtatctgatcatgccgccgaccaccatcagcgaggacgacagcgccatcggcgtaatgtgcaccgatgtgttcggcgccggctggggctcgttccgtatcgcccacctgtccaccggcgaccgcatcggcgtggaaatctttcagttccccaatgccgaaaagccggccaacaactttgaatactggaagaccggtgtcttccacttctgcgtgcaggatcccgacgtcgaagggctggctgcgaagatcgtggccgccggcggcaagcagcgtatgccggtacgcgaatatttcccgggcgagaagccgtaccgcatggtctacatggaagacccgttcggcaacatcttggaaatctacagccacagctatgagctgacctattcagctggtgcttaccagtag

SEQ ID NO: 335681 - DNA, 999 bp, Pseudomonas aeruginosa
atgcatgacggatcgttctcgctacccacccactaccgtgcgtggcgctggctcggctgcgccgaaccgctggaactggcgctggagcaggtgccgctgcagccgccggcggccggtgaggtgctggtgcgcaatagcgtgatcgggctgaacccggtggattggaaggtgcttggcggtgggctggtcgattggcagccgggccacatccccggcgtcgatggcgcaggcgaggtggtggctgtcggcgaaggcgtatccgccgaatggctgggccgccgcgtggcttaccacaccagtctgcatggccatggcagtttcgccgagtacgcgccggtggccgcacgggcgctgctgcggctacccgaaaagctggagtttgaggtggccgccagcgttccttgcccggcgcttaccgcctggatggcgatcgagaaggtgccggttcagcgacagcaaccgctgctggtcagcggcgccggtggcgctgttgggcactacctcgtgcaactggcctgcgcccgtggcttcgccgtcaccgccatggccaacatccggcattgggatcgactgcgcgacctcggtgcccgcgtgcggatcgccgggccgttggccgacggccaggatgcgagcggcgagcgctacttccatgccgtgatcgatagcgtcaacgaagaccatgccgcccgcctggctggatcgctgcgcgccaacggacacctggtctgcatccaggggcgcgtgccgcagtggccgtgcgagccttttggcctgtgcctgtcgatgcatgaggtggccctgggcgcactgcacgtccacggcgatgacgcggcgtggcagcgtctgacggccgctggcgagcgcatgctgcacgagatcgccgaggggagcctgaaagcggaggcgcgcgtggtgcgcggtttcgatgaactgtcgcaattgctggaggagctacgtcatcgcagcttctccggcaaacccctggtacaggttcgctaa

SEQ ID NO: 335682 - DNA, 255 bp, Pseudomonas aeruginosa
atggtcgaagtgctggagctgtatcacgcccggatccgcgaggaacttggcgtccctcgagtcgagccacctggcggacgcgatggcggcgtttccagcgcggcgaccgtgacctacccggagttggccgcggcggcgccgttctacggccgcctagacgtgcccgaggacgtgccgaatatcaaggccacgctgatcgatcccaacttcaactcccttggtcggcataagacgcggcgcttagggcggctgtaa

SEQ ID NO: 335683 - DNA, 522 bp, Pseudomonas aeruginosa
atgaccatgaactccatcctctggcccgaaggctacgtgccgggcttcactgaaaacttcgcctccaacgaggtcatcgtcgccggcctgagcgcggccgacgtgtggcctctgctggccacgccgtcgcagtggccgacctactacgccaactcggccaacgtgcgcttctacgatggcaaagggccggtgctggccgacggcgaccgcttctatttcgagactttcggcttcccggtcgaggcgcagtgcaacgagttcgtcgctccggcagctggccagcccggacgtgtggcctggcatggctgggccggcgaggtgggcactgatgcccgcctggacgtgcaccacgcctggctggtcgaagacctcgacggcggccgcgtgcgcatcctcacccaggaaacgcagaagggcaaaccagccgcagaactgcacaacaccaagcccaacccaatgatcaatggccaccaggattggctggacggcctggtcgcagccgcacgcgaagccaagcaatga

SEQ ID NO: 335684 - DNA, 705 bp, Pseudomonas aeruginosa
atgacgggtaccactatcaagattctgctgatcctgacttcgcagactacgatgggcgacgatccgcgcccgaccggcgtgtggttcgaagaaatgtccaccccgtactacgccttcgtcgatgccggtgcccaggtggatatcgcctcgatcgccggcggcaagattccggtcgatccgcactccatcgaggtcgagggcaagaacccgccgagcgtcgagcgcttcctcaaggacaaggcggcgatggccaagctcgaaggatcgttgaagatcgacaacgtcacccccgaaggctactcggcggtgttcctgcccggtggccacggcaccatgtgggatctgccccagagcaccaagctggcggatctgctgtccagcgcatgggccgacggcaaggtcgtcgcagcggtctgccacggcccggccgggttggtgaacgtcaaggacgtcaatggtcagccgctggtggccggccgtcgcatcagcgcctttaccaacagcgaggaagacgccgccggcctgaccgacaaggtgccgttcctgctggaaacccgcatccgcgggctgggcgcgaactaccagagtggcccggacttccaacccttcgcggtgcgcgacggcaagctggttaccggtcagaacccggcttcgtccgagcgtgttgccgaactggtgctggaagccatcaaggacgcccgctga

SEQ ID NO: 335685 - DNA, 1116 bp, Pseudomonas aeruginosa
atgtccgccctgtttgccccgtaccaactcaaggatgtcaccctgcgcaaccgcattgcggtgccgccgatgtgccagtacagcgccgttgacggcttcaccaacgactggcatcagatccactatccggctatcgcccgcggcggtgccgggctggtgatcgtcgaggccaccggcgtctcgccagaaggccgcattacccccggctgcctggggctgtgggatgacgcacagacccagggcctggcccggatcgccgccagcatcgaggcggccggcgctgtgccgggcatccagatcgcccatgccgggcgtaaggccagcgccaacaagccctgggaaggtgacgaccacatccccgagggtgacccgcgcgcctggcaacccatcgcgccgtctgcaatctcctttggcgagaacctgccgcgcgtgccccgtgaaatgaccctgggcgacatcgcccgcgtcaaggccgacttcgtcgctgccgcgcgccgcgcccgcgatgccggattcaagtggctggagctgcactttgcgcacggctacctggcgcagagcttcttctccgagcacagcaaccagcgcaccgaccagtacggcggcagcttcgacaaccgcgcccgctttctgctggagacgctggcggcggtgcgtgaggtatggccgcagaacctgccgctgaccgcgcgcttcggcgttatcgagtacgacggccgtgacgaggaaacccttgtcgagtcgatcgaactggccaagcgcatgcgcgaaggcgggctggatctgctcaacgtcagcgtcaacttcgtcatcccgaacgtgcagattccgtggggtacgccagccttcctagcaccgatctccgcgcgtgtcagccgcgaagccggcctgccggtggcatcaagttggggcatcgacgatccgcaagtggccgagcgcgtggtcgccgacaggcagatggatctggtgatgatcggccgtgcgatgctggctaacccgcactacccgtatgcgctggcgcaggcgctgaacgtggagcgcccggactgggtgttgccggctccctacgcgcattggctggagcgctatcgcggtgcggccaaggcatcggtgtaa

SEQ ID NO: 335686 - DNA, 1047 bp, Pseudomonas aeruginosa
atgggacgcgcgatgagactggccagggggctgctagccctggccgcgctgctgcccctggccgcggcggcccagcttccatcgcgcttgctgctgatcgtgtctaagaccgaccatgcccttgagctgcgcgacccccgcagttttgcactgctgggcagcgcgccgctcgggcccgatccgcacgaggttgaggtgagcccggacggtcgcacggcctacgtgtccaaccctggctatggtgccttccagcgcatcgacgtgatcgacctggaagacggaaaggccaatcccccgctcgataccgggccgctgctcggtccgcatgggctggcgttcgccgagggcaggctgtggttcacggctcagggcgccaaggcgctgggtcgctacgacccgcaaactggccgtttcgactgggttatgggcaccgggcaagacatcacgcacctgttgcacgtcagcgcggacggaacccgtatccaggccagcaactccggctcgggcacgatcagcttgctcgaacggcgcatggtcccgccggcaatgccgcctacgggcgtgctgccggccggcgcaaagcctcgaatggattgggttcacacagtggtaccgactggccccggcacggaaggattcgacgtgtcacccgatggccgtgagctgtggaccgtaggcccggatggcacgctctacatcctcaatgtcgcggcgggcaagttggtggcgaagttcgccagcggcctggacggtgcacaccggctggctttcacgcctgacggtcgccgggtgatggtggtcagcgtcaagaccggggtgttagaggtgttcgatgcggctacgcgaacgaccgtcaaacggcttcagaccgggcgtggcgccggcatttatatggatcccggcggaaaccgtgccttcgtgtcctgcacgcccgatggttttgtcgccgttatcgatttggccacgctggaagaaactgcgcgcattccagttgggcggcccgacggcatcgcattggtagatcgatccgcgacgcaggcgccgtga

SEQ ID NO: 335687 - DNA, 213 bp, Pseudomonas aeruginosa
atggccctggccggcggcgcaggcgcggccctgacgcgcgccatgccagttctaaaagcggtggactcttccatccggaccctcggcgcgctgggcgtcggtgtgctgaccacccacaccgcgttaggcatccaggtcacggtgatcggcgagctaattggcatgctccagtatttccagcgccaacgtgacgcgtgctcgatgtggtggtga

SEQ ID NO: 335688 - DNA, 201 bp, Pseudomonas aeruginosa
atgcaggcgggcaacttcgccccgcagttccccatcgaaaagggcgtcggctacacctggcaggccgccgactccgatgacgctgccccggccattaccgccgtgcgcggcgtgttccgcacagctgtcgagcacggcttcggtaaggacaacatgaccgacgtggtcaaactgttcgctaatccagccgtggtccgatga

SEQ ID NO: 335689 - DNA, 909 bp, Pseudomonas aeruginosa
atgaaagatatcaaagcattggatttcaacctgcttaaggccttagacgcactgctcgacgagtgcaacgtgacccgtgcagctacgcgcttgggggttacgcagccggcgatgagcggcatgctgacgcgattgcgagagaatttcggagatccgttattcgtgcgtgcgcagcgcggcatcgtgcccacgcagcgcgccttggagctgagcaccccactcaagcaggtcatcggcgaaatcggtgcgctgctccaaccgccggtcttcgacccatcagccgcacggctgacatttaccattgcggccaccgattacgcgctgcgcgctatcgcggtgccattcttgtcaacgctcaagcgtcaggcgccgcacgttcgtgtcgcgctggtgcccatcgaggaaaggcaggtacatacgcaactcgaacgtggtgacatcgacctggctttgatgacgcccgagagcacgccccccgacttgcatgcccgaaacctgttcgaagagcgctatgtctgtgtactgcgcgaggatcaccccgcagtgcagggccgcaagcgcctgacggtcaaccagttatgcgcactcgatcatgtgctggtgtcgtacaccgggggaggatttcggggtgtgacggacgactcgttggagaagcttggcaagcagcggcaggtcaccttgtcggtcaagtgcttcctcattcttcccgacatcctgcgagccagcgacatggtggcgatcctaccaagccggctggtggccggcatgagtgggttggcggtgttcaccccgccgatcgacgtccccggttttaccaaggtcgcagcctggcacgaacggacgcaccgcgatccagcccagcgctggctgcgcgagttgctgttcgaggcttgcgctgaccggaagtga

SEQ ID NO: 335690 - DNA, 1596 bp, Pseudomonas aeruginosa
atgcacaacaacaagaataattctgctctaccagaagcagtggatgttctggtcatcggcaacggcccggtcggcgcgacgctgactgccttgctaggccgctatggggtgcagaccctggccgtggacaaggtgcatgacatcctgctgatgcctcgcgccatcgccctcgataacgaggcgctgcgcattctgcagctggccggtctggccgaggatgcattcgacaagatcgtcattccggacgtgcgcatgcattgccccatggtcggccagttcggccgggccaacaccagtggcagcgtggatggtcaccccaagctagtgactttctaccagcctgatctggagcgctcgatgcgcgagcaataccggcgcttcgacaatgtccgcagtctgggtggtttcgagctggagcacctgcagcaggatgccgatggcgttactgcttcgttgcgtggcgaagatggcagccagcacctggtgcgtgcgcgctacctggtcggcgccgacggtgccagctcgcgggtgcgcagcctgattggccaggacttcgaggggcaaagctacagcgaggactggttgatcgtcgatgccgccgagcgtaacggcaaggccatcgaccacgtcgagttcatctgtgatcaccgccgccccactccgcacatgccggcgcctggcggccgcgagcgctgggagttcatgctgcgcgccggcgaaagccgcgagcagatggagtgcgacgaacgcattgccgaattgctgcagaagtgggtcgagcccggacagttgaagatcgagcgcaaggcggtgtaccgcttccacgcgcgctgctgcgacagtttccagcaggggcgggtgttcctggtcggcgatgccgcgcacattacgccgccttttgtcggccagggtctggttgctggtctgcgcgatgcatccaatctggcctggaagctggcttgggtgctggagggccgcgccgatgcgaggattctcgacagctatgaccaggagcgccgaccgcacgctcgggaaatgatcgctttggccaaaatgatggggcgcatggtgatgcccagtaacgcgccagcggcgctgtttggccacggcctgatgcgcagcctgcgggtgatcccagcattgcgccggttgttcgaggagctggaaatcaagccgaagaacatattcaagcaaggcctgtttgcgcggcatgcccgtggccgtcgtctgcggcggggcgggctgttcccgcaggggctggtacggagcagcagcgggagcatcgggcttagcgacgatgtcctgggcgaccgtctgaccctggttggctttggcatcgacccgcgcggccagctggactccgcaacccagcagcggtgggagcgcagtggcggcgcttatctgcaggttggcttgcatgggcagaaggcggccagtaccacgccgttcgtcgaggacattggccaagtgctgatcagtcgggtgggcgaacgctcgctggcggtgattcgtccggatcgcatcgtcatgaacgaaggcccccaggcaagcgccgccgagctggtgcgtgaaagcttggccctgctgggccagtga

SEQ ID NO: 335691 - DNA, 645 bp, Pseudomonas aeruginosa
atgagcgatagcgccactcccgatcttccgctgacccgcggccacaaaaaacgcgagcgcacccgtcaggggctgatcgacgccgcgctgcgcctgttcgcgcgcaaggaggtcggcgaggtcgcgctgctggaagtggccagcgaggcggcggtggccagcggcactatctacaactacttccgcacccgcgacgaggtggtcgaggcggtcggcatcgccctggccgacgaattttccgaggccatcgccgcgctcagcgtggccgtgaacagcggtgccagccgcgtggctatcggcgtgcgtatgttcattcggcgagccgaagccgacccggcctgggccagtgcggtgctacgtgtggtgcatttcgaccaggcgatccgctcgaagatcgccggccatgtgcttgccgacctgcgtgccggtgccgaggagggagtctttaaatactccgacgagaacatcgctctcgacctggtggtgtcctgcggtgttggcggtatgcgcgcggtggtcgaggggcggggcgtcgatgagcacgacagcaaagtcgcggagatgctgctcaaggcgctcggcgccaccccggcgcgggcgcgcaaactggcccagcaggcgctgccgggccaggggccggtttaa

SEQ ID NO: 335692 - DNA, 1230 bp, Pseudomonas aeruginosa
atgagccagctgttccagccactgcacctgcccaacggccaggtcatccccaaccgcatcgccaaggcggcgatggaggaaaacctggccgatgccgaccacgcaccgggcgacgccctgatccgcctctatcgcacctgggcgcaaggcggtgcagggttgatcatcaccggcaacgtgatggtcgaccgccacgccctgaccggccccgccggcgtggtattggaaaacgaccagcatctgcaacgcttcgccgcctgggccaaggcctgccgcagccagggcgcgcaggcctggctgcagatcaaccaccccggccgccagctgatggccgcgctcggccagccggcgcgcgggccttccgccgtggcggtgaacattcccggcctggagaaactcttcgcccagccgcgcgccctgtccgaggcggaaattgaggagctgatagcccgctacgtcgaaactgccaggctggccgagcgcgccggcttcactggcgtgcagatccacgcggcccatggttacctgttcagccagttcctctcaccactgaccaatcgccgcgacgatcagtggggcggcagcctggaaaaccgtgcgcgcatcctgctgcgcacggtggcggccgtacgcgccgaggtggcacccgggttctgcgtggcggtaaagctcaattcggccgacttccagcggggcggtttcaatgcggaagatgcggcctctgtcgtgcaactgcttaatgagcacgccgtggatctggtcgagctctccggcggcagctacgagagcccggccatgcagggccagacccgcgacggcagcagcctggcgcgcgaagcctactttcttgagtttgccgagcgcattgccgcagtggcgcgcatgccgctgatggtcaccggcggtattcgccgccgggcggtggccgagcaggtgctggccgggccggtggcgatgctcggcatggccaccgcgctggcggtcgagcccaacctgccacggcgctggcaggccggcgaagatgccgccatcgcgccgattgtggtggcttggaagaacaaggcgctggcctcggcagccacccagtccgtggtcaagaagcagctgacgctactcagccgcggcaaaccgaccaagccgggcgcctccccgttactggcgctgatcggcaatcagctgaaaaccaaacgacagtcccgcgcataccgccactgggtgagccgggtttaa

SEQ ID NO: 335693 - DNA, 1200 bp, Pseudomonas aeruginosa
atgaaacgacgtgaattcgtgatcggtgccggcgcgctggccggcgcctctttgctcacagatggcctgccggcgctggccgcgcccgagtcggcatcgaccctaccggcggacgaccaggccgccgctgcacggcgcccggcagcgggccgtatcgatgtgcatcagcacctgctgccgcccttctatgtcgaggcgctgcgccgccagggcatggagcgaatggccggcgtgccgttgccgcagtggacagcggagcggtcattggccctgctcgatgcccagggcatgcaggcggcaatcctctcgctacccgcgcctgccgcgagtttcggcgagccaacggctgcgactgaactggcgcgacgctgcaacgaatacgccgccgaacttatgcagcagcatcccgaccgtttcggcagcttcgccgcgctaccgctacccgccaccgaagcggcctgcgccgaggccctccacgccctggacgcactcaaggccgatggcgtgcaactgctggccagcagccagggcgtcttcctgggcgatccgcgtttcgatgagctgatggctgaactggatcgccgcaacgcgaccgtgcaggttcatgccaacctgcaccccagcagccaaaccctggcactggatacgcccggtttcgtgctggagctcgcctgcgacatcagtcgcgcggcggtcaacctgattctttccggcaccctggagcgctatccacgtatacgctggatcctcgccaacgcgggcggttacctgccctatgcggcctggcgggtatcactggccaacgcctttccggagtttcaggatcgcgcgccgctgggggtgatgagctacctgcagcgcttctatttcgacaccgccttggcgccgggcgctccctcgatggcggtgctgcgcgagctggtcgagtcgcgtcagttgttgttcggcagtgacttcccgctggcaccggccagcctggtcgcgcagcaactcaccgagaccgacacagcctcgccctggtcgccccggcagctcagcggcatcgcccgcggccatgccctgagcctgttcccccgcttcgccgcccctggcgagaacgtggttgccgcgccgaaatatgaatccgaatccgccctgcatcgcctggggcgtaacgccacccaaccgcttgccagcctgctgcagcgcctgaaggactga

SEQ ID NO: 335694 - DNA, 1074 bp, Pseudomonas aeruginosa
atgagcatccagcaaggccgcatcgacgttcaccaccacatcattcccccggtctatgccgaggccatttaccagcacgggctgcaactgcatgccggggcgccactgcccatgtggacaccggaaaagtcgctgcaggtgatggacatgaatggcatccagcgagcgatcacctcgctcactacacctggcgcccatctcggcgggggtgagggccaggccagcgacctggctagggcctgcaacgagtacgcggcacaactctgccagcagcatcccgagcgcttcggtagcttcgccctgctgccactgccctttactgaagcctcctgcgccgaggcgattcacgccctggatgtgctcaaggccgatggcctggtgatgtttggcagcagcgacggcgtcttccttggcgacccgagcctcgaggaactgatggccgaactagatcgccgcgctgcggtagtgttcgtccacccgaacctgcaccagaccagcgagcagttgtgcatgcaggcgccgggctttctcgtcgagtttctctgcgataccacgcgcgccgcggtcaacctgattctcaccggcaccctggagcgctacccgcacattcgctggatcctcgcccacggcggcggcttcctgccttacgtggcctggcgagtggcacaggccgacgccttgccgcaggttcaggaaaaagctccgcagggggtgatgagctacctcaagcgcttttacttcgacaccgcactgtcgccgtcgcgctactcgatggcggcactcaaggcactggtcgaaccgacgcagatcctgttcggcagcgacttccccttcgctcccgcgccgctgaccaccctgcaatgccagaccctggaagaaaacccgctgtggtcggccgaacagctttacggcatccatcgcggccacgcactcagcctgtttgcgcagtaccgccaggccgatgaggtggtgacgcccgagccgatctacatcgacgaatccttttcccaccgcatgaagcgcagcctgactcgtccggtcggcgccttcgtcgagcgcgtgcgcagtcgctga

SEQ ID NO: 335695 - DNA, 615 bp, Pseudomonas aeruginosa
gtggaagcccttaaccccgttcagcgccgtatccatcaggccgcattgcgcctgtttgccgagaaaggcgtcaaccaggtcaatatcagtgacctggctcaagaggccggggtagcgcgtggcaccatctacaacaatgtcgaaagcatcgagcagctgttccagcaggtcgccagccagttgagcaaagagatgcacctgcgcgtgagcaagagtttcgccgagatagaggatccggcccagcgtctggcccacggcatccgcttttttatccgccgcacccatgaagagccgcagtggggcaccttcttcagccgcttcgccatgagcgattcgtctttgcgcgagatgttttacagccaggccacggttgatctgatgagtggcttgcaggctggccgttaccagttccgccaggagcaaatggtcagcgtgatttcgatgatttccggttccaccctcacggccatgttcctggtgatcgaaggcctgaaaacctggcgcgacgctggaagcgacgttgccgaactgatcttgcgctcgttaggactgacgagcgaggaggcccgcagcctggccacggtcgagctgccgccgctacccgcactggactga

SEQ ID NO: 335696 - DNA, 1092 bp, Pseudomonas aeruginosa
atgcagcagcactccgcccaaccccttctcgccacggcccagccggcgaggcacgcgcagcctacggtgaaggcccaggctcttgcgcacctgattttcgagcgtccggatctgcagcaggctgaacgctttctcggcgacttcggcctgcgcctggctcggcgtgatgccgactgcctgtatctgcgcggcaccggttcggccgcttactgctaccgcgtggtacaggcgggcaaggcgcgcttcgtcggcttcggcctgcgtctggccagccgcgccgaccttgagcgggtagcggcgttgccgggggcttcgtctatcgaggtgctgtctacgcccggtggtggcgagtgcgtgcgcctcaccgatccctccggcttcctggtcgaggcgatccatggccagctggaagtcgagccgctgccgcaccgtcccgcgcttccgctcaaccaggtcgacgagcagctgcgtatcaatgccacccagcgcccgcccatcgagccgccagaagtgattcgcctcggccatgtggtgctggaagtggccgactaccaggctacttgcgcctggtacacccagcatttcggcttcattcccagcgatgtgcaggtgctgcccgatggctcgccggtggtggcgttcatgcgcctgaacctgggggataccccggccgaccaccacaccttggctatcgctcaaggctttatggcggcgtacagccacagcgcctacgaagtggttgatgccgacgcggtcggtgtgggccagcgcattctgcaggagcgcggctggaagcatgtatggggcatgggccggcacattctcggcagccagatcttcgactactggcaggacccatggggcttcaagcacgagcactactgcgatggcgacctgttcactgcggaccagcccaccgaattgcactcggtcagcgcggaagccatggcccagtgggggcagcgcatgcccaaggatttcgccaagccgaagatggacatggccgccattcgggcgctgctgcacaacctgcggcatagcccggatgtgacctggcgcaagctggtcacgctggcccgactgttcggctag

SEQ ID NO: 335697 - DNA, 954 bp, Pseudomonas aeruginosa
atgcccgtccatgtagtccacttcgaacaccagagcgaccgtcactggggcgtcgttcgcggcgagcgcattgcgctcattccgcagcgctttgccagcaccggcgagctgatcagcggcactcgtctggaggagttggcggcgttgccggaaggcgagctgacgctgggcgaggtcaagctgctgtcgccggtgacgcgtgaccagcagttcgtctgccagggcgccaactatcggcagcacatgatcgagtcgggcatggacccggacgtgaagcacttcaacatgatcttcaccaaggcgcagagctgcatcgtcgccgccgacagtgagctgatcaaaccgcgcgaagtgcgcttcctcgactacgagatcgagctggggctggtactgcgccgcgccatcaacgacaaggtcgcggtcaacgatgccaacctgcatgagttcgtcgccggcgtggtgatcgtcaacgactattcggcgcgtgatatccagattccgcagatgcagttctacaagggcaagagcttccgcaccttcggtccggtcggccccttcctctgcctgctcggcccgcaggacatggcgtacctgaagaagctgcagctgcgcctgaccgtcaacggcgaagtacgccagcaggacagcaccgccaacctggtatacggcccggcggaaacgctcaccgagctgtccggcgtgcaggacttcgccgcgggtgaccttatcgccaccggcacccctgcaggttgcgcgctttcggtgccgtcgccgaccaagcagcgcattgccgggctgctgccggaggcgaccaagtggaagatcttcatgaaggttcaggccgagcgcactcagtacctcaaggtgggtgacgtggtggaggccagtatccgcagcgccgatggcgtgatcgatctcgggctgcagcgcaaccgcgtggtggagcaaggctaa

SEQ ID NO: 335698 - DNA, 1902 bp, Pseudomonas aeruginosa
atggcggttcgcaacctggccgacatcgaggccatcgagagcgtgccgctggaacggcatgatctgccgcccagcacctacgcggccctgcagcgctgtgcctcggcgaatggcgacaggcccgcgctgagctttttcttcgatgccaaggccttccagaatacccatgactggacctacgccgagctgtttgccgacatcacccgcgcagcgaatgccttccatggtctcggcatcggcgctacggacgttgtcgcgttcatcttgccgaacctgccggagacccacttcaccatctggggcggcgaggcagccggtattgtcctggccatcaatccgctgctggaggccgcgcagatcggcgagctgctgcgcgcggccaacgccaagctggtggtcaccctggccccgacgccgggaaccgacctgtggccgaagctggccagccagctcgaccatctgccctgcgtgcaggacatcgtctgggtcagcatgtcaccgtacgtcggtgcgccacagggactggccctgcgctggatggcccagcgcgagaaacgccgccagtctgggcagcgcattcatgacctgcgcagcctgatgcgccgccaacccggcgatcgcctgctcagcggccgatatattcgtgccgaggaccactcctcgtatttctgcacgggcggcaccaccggcctgccgaagattgccatgcgcacccatggctccgaggtgttcaacgcctgggcgatggcgcgcaacctgcagccgcgtgaacccggccaggtgatgttctgcggcctgccgctgtttcacgtcaacggccaactggtcaccgggctgatgccctggacgcacggcgaccgggtgattgtcggcacgccccagggctatcgcggcgagggcgtgatcgcccgtttctgggcgatggtcgagcacttcggcatcaacttcttctccggtgtgcccaccgtgtattcctcgctgctccagcagccgcgtgagggtcgtgagctgtccagcctgcagtacgccttgtgcggcgccgcgccgatgccggtggggttgttccgagagttcgaacaacaggtgggcgtgcgaattctggagggctatggccttaccgaaggtgcctgcgtttcgtcgagcaacccgccggacggtgagcgccgggtaggctccatcggcctgcgcctggcttatcagggcatgcgtgtggtggtgctggatgacgctggccagtacctgcgtgatgcccaggcagacgaggctggcaccctgattatccgcggtccgaacgtcttcgccggctacctgaacgccagccagaacgagggcgtgtgggtggtgatcaatggcgctcgctggctgaataccggcgatctaggccggcaggacgtcgaaggctacttctggctcaccgggcgcaagaaggaactgatcatccgcggtggccacaacatcgatcccaagcagatcgaggaggtgctgcagagccaccctgccgtcgccatggcggcggcagttggcagccctgacgcgcatgcgggggaagtgccagtggcttatgtacagctcaatgccggcatggtttgcggcgcggatgagctgcagcagttcgccgccacccgtattcacgaacgcgcagcgctacccaagcgcatcgaagtggttggcgatctgccgctgacgcctgtgggcaagatcttcaagccggcgctgctcaagcgcgaaatcgccatggccatcgagcaggaagcggaatcggccggcatctccggcgtggccgtcgaggtgctacaggacgcgcagaaaggactggtggcgcgcataggtgcgggggaataccaagcgcgcctggaagacaagctgcgcaagtttaccttcgcggtcgagtgggtgaagtaa

SEQ ID NO: 335699 - DNA, 1824 bp, Pseudomonas aeruginosa
atgatcacaaagcctagccgtttgccaatttcaattggcatgtatgtatgcgtctgcgcttccgcacaggccgtcactttcaatatgggcgaggtggaagggcagttcgactcttccatctcggtgggtgccagctggtcgacacagacacctgacaaggatttgtgggcttccagtggcgatgacggtcgtcgcaacttcgaggacggggagaccttttccaaggtgttcaagggcgtgcatgaccttgagctgaagtaccgcgactccggtctgttcgtacgcggcaagtattggtacgactttgagctgaaggatgaaagccgtcccttcaaggatattagtgacagcggccgtgatgcctccgcgcagtcctctggggcaacgcttctcgatgccttcgtttaccacaactacaccattgccgatcttgatggcaccgtccgtctcggcaggcaggtagtgaactggggcgagagtacgttcatccgcggcggtatcaactcgatgaacgcattcgatgtttctgcattgcgtcagccgggttccgagatcaaggaaggcatcattcccgccagcatgctgtacctgtcgcaaaccctgagcgaagagctcagtgtcgaaggcttctaccagctggaatgggaaaagaccgtggcagagaactgcgggaccttcttctcgcagaatgacttcgtggccgatggctgtggtggcgcgaccgttgggccgatcctggatcagaacgtcgctgcgcagcgggcgctgagcccgttcggcgtcaacctcaccagtgaaggcgtggaaattcagcgtgcgcccaacaatgagccgcgggacagcggtcagtggggcctggccctgcgctggtacgcggccgaactggacgccgagttcggtgcctacgcggtcaactatcacagccgccaaccctacgtgagctcgatcaccagcccgcacaccaccaaccagggcttcggcccgcaaatgtgcgcgaacctgggtattccggcggcggcttgcgcgggctttctcgccagcgccaatggccagcaattgactgcggcctatcgtctgggtactgccaagtactttaccgactacccggaagacatccgcctgtatggcctgagtttcagcaccatgctgagcaccggtaccagcctttctggcgagttgagctaccggcctaatctgccgctgcagttgaactccgtggaccagattggcgcagctaccggcaaccctgcggcaacgcctctgtattactccggcgcttacggcatctacaacgatcgccccttcaacggttaccagcgcaaagaggtttcccaagcccaggttacggcgctgcacggcttcgatcaggtgatgggcgccagccgcgtgactttggtcggcgaggtggggctcacccatatcggcggactggaaggccgtaccggcctgcgctatggacgggcgaacgtcttcggctcgggccggatctatcccgacaacagtctgtgccggggccagtactgcaatgacgatggtttcgctaccaccaactcctggggctacagaatccgcgccatgtgggactacaacagcctgatcccgggctttgaaatccgcccgaatctgacctggtcccacgacgtcgatggctatggccctgagccagggttcgttgagggcgccaaggccatcagcctgggcgtggatgctacctacctcagcacctacaacttcagcctttcgtacaccgacttcttcggtggcgattacaacatgaatgccgaccgagacttcgcggccctgagcttcggcgtcagcttctga

SEQ ID NO: 335700 - DNA, 1362 bp, Pseudomonas aeruginosa
atgaaatctttatctcttgctatctctgctgctgtgctgacgctgcacgtattcagcgctcaagcggctgttcctgccgaccaggctgcgaagctgggcgagtcgcttaccccggtaggcgccgagcgcgccggtaacgcggacggtaccattccgcagtgggacagcggcttgaaagccgacgctggaactgcggatgaccaggggcgcctgagcaacccatttgcggcagagcagccgttgttcaccatcaccgcgcaaaatctggcgcagtacaaggacaagctgagtgccggacagctcggaatgtttgcccgctaccccagcacttacaagatgccggtttatccgactcatcgcagcgcacgtctaccggatgcggtctaccagtcgatcaagaagaacgccacgcagagcgagctggtcgagggtggaaacggcctgaagaatttcgacaccgccgtgcctttccccattccgcagaatggcgtcgagatcgtctggaaccacatcacccgctatcgcggcggcagcatgcgccgcaccatcgtgcaggcggcgcctctggccaacgggactttcgtgccggtgttcatgaaccagcagttcacctaccgcgaccagttgaccgacttcgatccggccaacccgggcaacgtcctgttctattacatgcaggccgtgacggcgccggcgcgcctttccggcaacgtgttgctggtgcatgaaacgctggaccaggtcaaagagccgcgcaaagcgtggatctacaccgcaggccagcgccgtgttcgccgggcgccgcaggtggcatacgacggcccggcacctgccgcggaagggcagcgcgttgcagacaacctggatatgttcaacggcgctccggatcggtacgactggaagatcaagggcaaaaaggaagtcttcattccttacaacagcttcaagctggaatcgtcctcgctgaagtacagcgacatcgccaagcccggccacatcaatgcagatttgacccgttacgaactgcaccgcgtctgggaagttgaggccaccctgaagcctggcgagcgtcacgtatacgccaaacgcgtgttctatttcgatgaagatacttggcaaatcgttgtcgccgagatgtacgacgcgcgtggagagttgtggcgtgtgggcgagggcttcatgacaccactttatgaccgcggtatcccctggttgagcgtggaaactgtctacgacctgcagaacggtcgctattccgtcatgggcatgcgtaatgaagagcgcacacccatcgagtttggattcaaagcgtccagttccgaatatacccctgcggcgctgcgtaaggccggtatccgttga

SEQ ID NO: 335701 - DNA, 1134 bp, Pseudomonas aeruginosa
atgttaaaaataacacccctctttagcagtaataagaataggatcttgcaggtcgcttctgtctggaaaggtattgcctcgctcgcggtgttggtcgggcacttgctgtttgttaatacaagtgtggccgccgttaccttgcctcccctcggttatgtcgacccctaccacaagatcgtcaaggatgcgggtttcgttgagaaaactgcgcaagtcaatcaagtgacgatgagttatgtcgaaggcccgaataatggcccggcgcttgtgttgctgcatgcgcagttcatggactggttcagctacagccgggtgatgccggaactcgccaagcatttccatgtgttcaacatcgattaccctggccatggcaagaccgtaacgcccgccggctacccgatgacggccaaccagattggtgctgatctggccaagttcatcgaggacaagatcggtggccccgtgttcatcaccgggaactcttccggcggattgcttgccacctggctagctgcctatcgcccggatctgatcaattcggtactgcttgaagatccgccgctgttcgcatccgaatacccgcgtatccagaacaccattgcctatcgggcctttgccaccagccatacggctgcgacggtcgatcatccggacgacttcctgctgtattggattcagggcaacgccgagttcttcaggaacaacatcggccctggcgcgcctttcatcctcactcaggaagtgaagcgtttccggctcatgcgtcccggtcagcccgtggaactgggcctcattcaggacgatgcgatcagactgatgatccgcggcctggatcaatatgaccccagcttcggtgcggctttctacgatggcacctggaatgcgggcttcgaccatgccaccgctctggcacgaatcaccaagccgacgctgttgatgcatgcggattggacgattcaggaagatggtgtgctgaacggtgcaatgactcaggctgatgccgatcgcgtcatgtccctgttgcagaacggcagctatgtgagggttgccgcgggccatgtggtgaacctcgaagcgccggaggagttcgtgaggatcctcaaagagttcttcctgcctgccgcaggcaattga

SEQ ID NO: 335702 - DNA, 2010 bp, Pseudomonas aeruginosa
atgttcacttcccgaagccgaatgaggcagagcctgctcgctctgtgctgtacggcggtttctctcgtaggccaggcggccaccaccgggcactccggcgcgaagcagccgaatgtgttggtgatcgtggcggatgatatgggctacacggatatcggcgcgttcggcggcagtgacatccacaccccgcatatcgacagcctggcctcggcgggtatccgcttcagcaacttccatgcgcagcccacctgcgtaccgacccgtgcggaattgctgaccggggtcgaccaccacctgtccggcttcggctcccatgtaatgaccgaggcgcaggcgggtaagccaggctatgaggggcatctcaacggccgggtggtgaccctggccgaggtgcttgcacagcagggctatcgcacctacctgtcgggcaagtggcacctgggtgaggagcccaaatatggtccggccaaccacggtttccaggagtcgttcaccctgctgcccggtggcgccagtcactatgccgacgcccaggcgatccagcccagcgagccggccatctacgtgcacaacggcaaggtcgtggagaagctgccggaggatttctactcgaccaaggattacaccaactggatgctgcagtggctggagcgggatcgcgactccagccagccgttcttcgcctacctggcctacactgcgccacataatccgctgcaggcgccggccagctccatcgccaagtaccacggtgtctacgacgctggttacgaggtgctgcgcgagcaacgcttcaagcgcctgcaggagctggggctgatcggcaaggagcaaaagcaggcgccctggccgaaagaagtggcagcgccttgggcatcgctgagcgagagcgagcagcagaacagccgcagggacatggaagtgtatgcggcgatgatcgactacatggacgagcagatcggccgggtactggaactactggagcgccagggcgagctggataacaccctgatcctgttcttcagcgacaacggcgctaacggctggccggccaagtcctaccccagcttcacccgtgcttactacgacagtttcaacaatgccctggacaaccgcggcgcaccgggctcctacatttcccagggagcgggctgggctacagccagtagcgcggcttacgacaggttcaagattttcgtcagcgagggtggcattcgtacgccggccatcatcaagccggtgggtggaggggctggcggcagcatctctgccgagttcacccaggtgcgcgacatcgtgcccaccgtgctcgatctgctgggcgctgagcacccctcggtgcacgatgccaagctggcgccgttggacggtcgctcgctgctgccgctgttgcagggcaaggccgacgagctggcgccgcgcaggggcacgggctacgaactgcatggcctgcgggcctatttcgatggcgactggaaggcggtgcagactcttatgccgttgggctccgggcaatggcagctgttcaacctgcgtaatgatccgggcgaaacccaggatctggccagccagcatcccgagcgcctggcggccatgcgtgaggcccatgcgcagtacgagcaggacaacggcgtgatctacagcccgccggaaggcatggcggtggtgcgcaaactctatcctgggctgatcgttctggcgtttatcctgagccttggccaatgcgcattggccttacgcggcaagcctgcgcgtcgctggctgcctgtcgtgtcgctgctgcttaaggtcggtttgctgggcctgttgttcagccagtggcgtgatcaggcgctgttgttgctcatgctgttaagtgcgatggagctgcttgtggcgctgcgtggcagtaggcgtagatggcgcttcctaaatgccctcgtatttgtgctgaccttggtgcttctatggctgctgggctcggggcaaatcctgcgttttgttatgcaggaatacagttttcccagctag

SEQ ID NO: 335703 - DNA, 174 bp, Pseudomonas aeruginosa
atggctgaccaacccatgctttgcctctcgcccgaagaggccgcgcatctcgatgcgtggtcaacggtgtacgtcgaagcggatatccgcgccaagcttggcattccgctgtcgcaatttctctggaatccgggccgttacctcacgttggcctggctggcgacgccagcctga

SEQ ID NO: 335704 - DNA, 960 bp, Pseudomonas aeruginosa
atggagttaccccccaagaggcttcttcaaaccgccggtgtagagctgcttcctgccaggcagggcggtgcgttttgtctcgtgtcagagtggttggccaatctcgacagcgtgcaaacgcggcgtgcttatcgcgccgatgtgcgtggcttttttgccctggcagacatccgcagtcacgaagacctgctcggcctggcacgcgggcatgtgttgctctggcgtgcgcacctcgaaaagcaggggctagcggcggccacgcgccggcgcaagctggcggcgctcgccagtctgtttgcttacctgatggagcgtgaccctcggcacgcgagtaatcccgttactggaatcaagcgcccgcgcctcgagagctacgaaggcaagacgccggccctggatggggcgcaggccaagcgactgttggacatgcctcaagagtcctctctgaaaggtttgcgtgatcgcgcgttgctggcggtcttgctctaccacggcctgcgccggcaggaagtggccgatctgcgcatcgccgacctgcaagtccgcgatggcttgccgcaccttcgcgtgctgggcaagggcgggaaactacgttttgtccccatccacgaggaagccttgcagcggctttctatctatatgagcgtgcgcgcctgtactgacaagcaaagcgccctgtttgccagcttccgggggcgccaagccggggatggcctcagtgcagacggggtgtacaaggtcgtttgcagttacgcccgtgctgcccacatcgacgtcgccgggctcggcgtccacggcttgcgggtgacggcggcaaccaatgcacttgagcatcacgccgacattgagcaggttcagcagtggctggggcatgccagcatcaccaccacgcgattatacgaccggcgcgccaatcgtcccagcgactcaccctcattcaaagtgcagtacgagtcatga

SEQ ID NO: 335705 - DNA, 285 bp, Pseudomonas aeruginosa
atgagccctgtgacaaccgctcaactgatgtgcccttccgaccgcgccgcttggaccaagatctataccgaagctcacattgctgagctgatcaagatctcactctctgaatttctccagaaccctaagttctatctgattagtgctggccaggagacggccgtggcttgtgtcatgagtggctacaaacccctgctgcccgcgcaagttcaggccgctgccaagatccaagcgcagtgggacgctgaggacaaagccgccactgcggctaagggctgtctttga

SEQ ID NO: 335706 - DNA, 639 bp, Pseudomonas aeruginosa
atgattcttgttgtcggtagtaataaaggcggttgtggaaaaacaaccttggcgaccaatttggccgttgctcttgctgctcggaatttaaaggtttgtctggtggatgctgccccccaaggctcagctatgtattggagtggtgttcgtagccaaacatcggcatcttcgattgtaactttgatgcagcgagggaatttggttgatcccctgcgtgtgctcgataagcagaatgaggttgtgatcgtagatgttccaggcagaaacagccaggagttgctgactgcggcgatagttgcagatgttctcatcgcgccgcatgcctgcagccagctggacctagaaaccctgcaggagctggaagcgcaggttcggcatgttcgtcagatgaatccgcgattacgcgttctgatctatcaagccttggcgaccactaaccccgctatccgcattcgtgagcgcacggatttccgggactatgtcagtgcgtttgaaggtttcgaattagccagctcaatcggctatcagcgtctggtataccgcgagtgcatctctgccggtatcggcgttgtagaagcgagtaacactcatgccgcgaatgagatctctaaattggtgaacgaggtgctgcatggttaa

SEQ ID NO: 335707 - DNA, 996 bp, Pseudomonas aeruginosa
atgggggtgcatatggctaggcgacgtaatccaagagcgaagaattttggatttggtaatcaaatcttatatgcggcaaaaatggcactgcatgaatactatggtggcgggcattttgcgacggttgatgctcatctagagcgattcagtttgttttgtgattggctttatgagtgctgcaatattcgagatgctagagctgtcacgaaagagttatttgttgagtatgcgttgtatctgggctttctattagttgaagatgaggtcgaggtttcgacggcaaccaaccgagtttctagtgtgaatgttgttctggagattatgcgtgaggatcaagtagttagaattgacaagatagctgaggcgctaggagagaaacggtcttacatacgaaggtccatccccgatggaatggattatcaagaagtcatgaagctacatagtaggcttgtggcagaagggtttcctcgtgctgcggcgatagttctgctggcgcgcacaactggtatgcgcctgcgtgaatgcatactggctgacttgccgcgactctatcgagaggccattctctataataggatcaatgttcaaaacggatgtaaaggtggccgctctggcgcctttgccccgcgttggatatccatttcagacggcattgtatttgcgcttgactatgctgtaagtgtctcgccgagtggtagtgtgaatctgctggatccaagcgagagctatacgaggtttatttatagagaggtaaaccctagtcgcaaaataatgaagttgctcggtgtcaaaggtccgcatgagcttcgcgcagcatttgcctgtcaacgttaccaagaactagttggaattccagcccctgtttttccccgcccaagtggagatggaacagtagatgctgagcttgtgcgtgccgcacgtcagattgtcagccgagaattggggcatgaacgcctctcggtcacaaattcgtatctggggagtgagactagatga

SEQ ID NO: 335708 - DNA, 357 bp, Pseudomonas aeruginosa
atgtcgattattgcggaatataaagccctgaaagcccagatcgtggagcaacaggcacgtctcgaagcactcaaaaacgacgagaaactcaaaaaagaaatcgagtttgaaaataaactacgtgcacttctcgcagattacggctattcgctgcgaaacgtgattgccgtactggatccgcattccggtaagggggcggtcgcatctgtcagaggtgcgcgtcgtgtgcgctccttgaaagtctatacaaatcctcacagcggtgaagtggttgaaactaagggtggaaaccacaaggtgctgaaagcttggaaagagcagtacggtgctgagacggtggatacctggttgcaataa

SEQ ID NO: 335709 - DNA, 816 bp, Pseudomonas aeruginosa
atgcttaagggagacttaaatcgggaacttcgaaaccacgtctacagcctgctcaggcagggggcgagtctcgatggcatcccggagcgcaccatccgggagatattctccccggaagagcgagacatcgagcccgccccaaaggcctataaaattgcactggtcgctgccacccatgccgaggcagaacgactgctggcactgatggcaacagccatgcgcaagcattcgaacagcactgccaagcaccgttttactgcttacgggctggatcaggaatgtcgccccctgcagctctttgatgaagcccactggatcaatgccagcccgaacccactgccaccgccagagcttctggccggtgtcgggcgcatcgtccacacccatcagattggatctggcgacatacccaagggaccaggcgttcggacctatcgctgggagtctgaaaccgcactgactgagttctgggcaagcttctatctcgcctgggaagcaagtggacttctgagcctgaactgggacagctatttcgcctggcagccacctcaccttggtctcgtgatatccagttggggaagataccctggcaccgccatcgatatgctattgacacaagcggcagcgacaaagcttgctaccaacgagagtacaattttgatcatcgagggcagcacctgcaccacgattggcgattgtgtcgagatcgtggatgcgctagagcgcaacctgaaattcgatattgtcaccacgtactggggtagccccagcctgtcaggttatggtctgaaactactgacgttttgccagtcatga

SEQ ID NO: 335710 - DNA, 1047 bp, Pseudomonas aeruginosa
atgtcgcacacaaacaaggacgatagtgtggatcagcttattcgctacgaaaggattctcggcctgcttccccgcaaggaaggtgccattagtatccgcgctatacaccagcagttagcgacccaagggacagacgtcagcataaaaaccatccagagagacatggctgcgctcgaagaaaaatacaggccatacgtctgcttcagggagcaaggtaaagccaccctgtggtgggcagagaagtcgctttcgcgactattcatgctgccaaccgatgcaatgaacctcgttatgatcatgaatcacgctgcaagattcggaatggcggagcaggtagagaatctggcacctcttcgggattacgcaatatcccgactggaaggaggcaggcctcgtcaggactgctctggcaagatcaccagcaatacccgtttcattgtcctgaagcccgggcaagtcaagccagaagtgcttgaagttgttcagcaagccctgctggacgatgtctcaattaaggctctctacctgaagcgccgggccagcgaaccacgcctgatgcacctcaagcctctgggactgtcctaccaggactccaacctctacctctcctgcatgatcaaggggaaaaatgaggtctccgcactcccgatgcatcgttttcaaacggcagcaaccacttgggaaaccctggaagcacccgacgactttgatatcaactcattcgaagccagacgaagcttgattagccaaagatctgaattccccatacagctgaagttgcgcatttcacagacgctttatgagcgcctcagcgaaaacgctctcacctctgatcaacggctagaaccagactccgatagctggtggctgatgaccggcagcctgcctctcagccaaggactagatctatggctgctgagccaaggcgaggacttggaggtgcttgaacccattgaactaagagagcaaatggcagcctcggcgaaaaaaatggcagccctgtacgaaaaagttaaaacgacgacacaggatgtcgcatacccgtag

SEQ ID NO: 335711 - DNA, 876 bp, Pseudomonas aeruginosa
atgagtcagtctgcggacgtcttcaacattctggacagccttctcccccgagctgacttggtcgagcttgccgagcctgacgagatactgcttctgtatgcaggcataggcatgccgtcactgcgcatgttgaagtttagcgggaggaaagcgggcatttcctatcacgatatcaaggcagccaatccactgctggtcttggttgacccgatcaaggttcgcaatcgctatgcggagctgcgtgagcaggccctgtgtggtgacgaagacgcactcaatgatctcgggtggtggtggctcaacggttcacggctcaagtcaaacccagctctggctaggcggttgttcaagatagcggcagtgatgggctccgccgaggcgttattcaatctcgccgagctcgccttttacgacagggggctggagatcaatccgcgattggccatcgactactacgagcaggcttttgaagccgggataccttgcgcagcactggccctaggcggcatgtatgagagcggagatgagggcgtcattgtcgatcatggcaaggccatcagttggtacaaacgcggtgcggccgagcaggacttgatggcgtgcttctcacttggcaggctggtactggatgagacatcaccggagtacgatcccgcgcttggtctgtattggttgcagtgggcggcgatgaagggtgaggtgcaggcatctgagcggcttgccaacctgtactactcaccatttgaatccccgccggatccagatgggttgctgtttcgtttctggagggacttggcgatcactcagggaagctcaggggctaaagaattacttgatctggatggacggctctcaatagcgaatgaaattttatga

SEQ ID NO: 335712 - DNA, 633 bp, Pseudomonas aeruginosa
atgaaattttatgatgagctgctaatgagttcgtcatcaataaaatcttgggccgtgagaataaatgaggggcagatgaagccaatttcgatcacgagcgagcagctagcgggtgcgcttcctaaagttcagccgggtttgaagaagtactgggcaattcagcaaaaggtgaagctcgacacatctggattcactgacccagacttgagacgttcctacaacggattctaccgagtacggcgtggtgagccgtggcagtcgatctacttcgatctcatgcaacaggctcagattaaaggctatgggttttcacaagtgcttagagaactgcataagtcgacgggcagaattgaggcctcgtttgccagtaaaatggctgcgacattggacacaacgcaaccagtcatagactcggtcgttctgaaaaatcttgcttgtaaactaccctctgcaagtgctccagatcgaatgcaaaaaattgagtcactgcaccgagagcttaaggaaagtttccagagctttctggcgaaagctgaaggtaaaaatttggttgtttcttttaaggccgcatatcccacgttcaccatttctgaagagaagatggtagaccttgttctatggcagatgcggtag

SEQ ID NO: 335713 - DNA, 564 bp, Pseudomonas aeruginosa
atgactgcccccagagccctgtaccccattgaaagacacaaacacctttacgcaaaatggtgtgccgccgccgcatatggccgtggacttgtcggcgggggcaacgcactagccttcgagctgattgaagctagcggccttggccaggttactggccctgagcacatcggccagaatgtcgatcagtggcagctcgagtttatgaagaaaattgaagctgaggcagcgctgcggggcgtggccgacttcacgttcggccgtgcccaaaaactggtcaacatttacctgaaaacggtattggtctgtggcggccaccatcaacatccacgtgtggcccttctccacccacctctggatttcgaactcttcaagggcttgcgcagttttctttcgaaaaaccgagccacactcggcaatgctcgctcagccttccttgcagcacagaagctcaatccacgctggaccaaattttcagaggcggattatttggcacacattgatgccatcaagctgctgatggttggcaagccgctttatcaagtcgaagaacattgggagctctga

SEQ ID NO: 335714 - DNA, 621 bp, Pseudomonas aeruginosa
atggaaaaactttggcaagatatacgcgagtcacgcattcgtctggagggcgctgccagtctggcggggtccattattttgaagaatggagattttgacgggaagtgcgagattcttattgattgcggcaataccctgttgtatgtgaacacctttggagaaataaggcatcctattctcttcgcgaatgccaagatcaccgcgcttggttcctgcggatggacgggacggtgtgtttttgtgtggtcattagatcgcagtgagtcgcttatccagcgagtcaggcaggcgcggcattacggactgagtcagatcaaacagctcatcaatcaagctgtcgcttcactgggcaaagaagaaccgtttgctagatttgacagcgaccatgttgaggttgcctaccagcattctttgccgagggaatgcagccagttactccaatctgctttgcaggaactagccgagatgaaagagaagccatatttcgtctgcgaaaattacaaaataactcagagagcctttcggctttcagacggcagtggcatctgctttgacaattacggtgacgtgatggccgttgctgatagtagagacaaagttctcttttattataacgactga

SEQ ID NO: 335715 - DNA, 1224 bp, Pseudomonas aeruginosa
atgcccctgaaggacatcaattgccgtaacgccaagccacaggacaagacctaccgcctgtatgacgagcaaggcctttacctggaggtgcagcccaatggcggacggtattggcggctgaagtatcgatttctcggcaaggagaagcgtcttgcctttggcgtctaccccgaggtcgggttgcaggacgccagaaagaagcgcgaggaggcgcgtgcgcagttgaccgccggccatgatccctccctgcaaaaaaggatggccaaggccgtcagccattttgatcatcagcacacatttgcgtctgtcgctcagcactggctgagtgtgcgcgagtcgtcctgggctcccgagtacacccgtacggtcaagcaacggcttgagctcaatgcatacccctggcttggcaaactgcccatcagtagtatcaccacgcccatgctggttgaaaacttacagcggatcgtcaaacgcggcgctgttgaaactgcccgccgggtcgcgcagatttacaaacagatcttcgaattcgccgaagcatctgggatcactccggctcatcagatcggtaatctgtcgcgcacactacctgccaagcgattacggcattttgctgcggtgacagatcctgccaagctcggtgagttgctcaacgcgctggatcgctacagcggaaccctgccggtctgttgtgcattgaagctggcgcccttgttgttttgccggccgggggatttgaggcagatggagtgggcagagattgacctcgaagccggcgactggttgatcccaggtgcgaaaatgaaagggctcacaacaaacaaacaagacaggccggatcatcttgtcccgcttagcacgcaagcgcttgcggtgctgcgagagctgcaaccactaacgggcaggcgccaatacgtttttccgtcggggaggggcggtgaccggccgatgtcgaacaatgccgttctcgccgcacttcgtcggatgggggtcagcggtgatgagatgacggggcacggattccgcgcgactgcacgcacaattggcgcggaggtgctcgggtttcgactggatttgcttgagcatcagcttgctcatgctgtccgaaatccgcttggtcgcgcatatgatcggactagttttgtgtcggagcgtcgcgagatgatgcaaagctggtcggactatctcgactcactcaaactgtgcgggtccagtgcaaaataa

SEQ ID NO: 335716 - DNA, 129 bp, Pseudomonas aeruginosa
atgagtaagcgaactacctcttggctgggcaagcagatcgaggaggtattgcgacgcctcatattcctgccccgggcgacccaccttgtcagcctgttttttggccaccaacagcccagcttcggctaa

SEQ ID NO: 335717 - DNA, 372 bp, Pseudomonas aeruginosa
atgatcggtcgagagttagcgcaactgaaggtcgggaagccggagcagaacgaggctggctattactggcccaaagtgctcgatcacttttttgaggttgcgttcgactggtccgagcgcttgaagcagaagctcaatggcaaggcgtggccggggtaccagccccagttggttagactgataccagcgccggagtcagaagaggggaatgatagcttgatgatcgtttccctgatcgtctacccggctcccgagaatcagaaaggctgcattgtgtacaaagatgtccctggcggatttcttcgtgagttcgacagcgaggctgacctggatgtgtggaaccgctatgagtttggcttgctaaccgagtag

SEQ ID NO: 335718 - DNA, 702 bp, Pseudomonas aeruginosa
atgctcagtcatcccgataccaccagccactacccgcgtcgtcatccaggcaacaccaatctccgcctgtaccgccagccgacctaccgtggcctacccctgatgatcgacaaggggccattcgttgaggagtatctatcccgtcttctgcgggttatccagcgggcgctcacccagtatccaagggttatggcatttagggtggacctaaacctgccgaaggacaccgaaccgtctgactacgctcactccaacaaggccatcagcaggttcatcgagtccttcagtggcaagatcgaataccaccgcagtcagctgcgtgagcaaaagaaggatgctcgtaattgcagggtacgctatgcctgggcaagggaggttggagtggggggaaggccgcactaccatctggtattcctgctcaatcatgatgcctatcacaggccgggtagggtgcaatctacgaggcgaaatctcgttgcgcgtctgcaggaagcttgggccagtgccttgcagctttcggtcgatcaggtcgatgggctggtacatatcacggacaatgccacgtatcgaatctaccagaacgtccccgacggcaagctggatgaactgccggagttgttccgccgtgcaagctacctgtgcaaggcagctactaagtcctacgggaatcgccagcgcggattcgacaccagcaaggggtag

SEQ ID NO: 335719 - DNA, 2739 bp, Pseudomonas aeruginosa
atgaacgccgtagaaatcgaacaagccatcaccgacctggcaagtcagccgtttgatcaggtcgagtttccctatgccttcctgcaggccttcggcaacaaggaaaccactctcaagcgcctgcgctcgggggtaaccaacaagtccgatctgggtggcgtgctgcaaaccagcaatatccacctggcagtgtgcgaggtcggtaaggtcactgagacgttggcggccctaaaagccagtccggccacggcgcgagcaaaggccaagtacgtgcttgccaccgacggcgagacgctggaagccgaggagctggagagcggcgaaaccgtcgcctgtgcctacccggagttcccggatcacttcggctttttcctaccattagcgggcatctccacggtcaagcagatccgcgagaactccttcgatatccgcgctaccagccgcctgaatcggctctatgtggaactgctcaaggacaacccagcctggggcactgccgagcgccgccatgaaatgaaccacttcatggcacggctgatcttctgcttcttcgccgaagacaccgacatctttaacggtaccgggctgtttaccgacactctgacgcaaatgagcgaccgggatgccagcaacctgcatgaggtgatgggcgagatctttcgcgccatgaatactccgattgctcagcgcgcttccgcaaatctgccgcgctgggcagatgccttcccctacgtaaacggagggctgttctcaggcacgccagatgcaccatttttttctaaaattgcccgcagctacctactgcatattggcgcattggattggaaacaggttaaccccgatatctttggctccatgattcaagccgtagccgatgatgaggagcgcggcgccttgggtatgcattacaccagcgtgccaaacattctcaaggtgttgaacccgctgtttctcgatgagctacgcgccaagctggaagaagcaggtgacaacccgcgcacgctgctcaatctgcgtaaacgcttggcgcacattcgagtattcgacccggcctgtggctcgggcaacttcctggtcatcgcttataagcagctgcgtgagattgaaaacacaataaatgagcgtcgtggcgagcttggccgtaaaagcgatattcccctgaccaattttcggggcattgagctgcgggacttttctgccgaagtcgcccgcttggcactgatcattgccgagtatcagtgtgatgtcctctatcgggggcaaaaggaagcactgctggagtttctgccgctgagcaatcagaactggattacaagcggaaatgccctgcgaatagactggctgagcgtatgtccccccactggcactggggtaaagtttaccgctaatgacttatttgttaatccattagttcaggctcaaattgattttgagaacgaaggcggagaaacatatgtttgcggcaatcccccataccaaggaagcgtaaatcagaaggtcgagcaaaaaagcgacttaaagcaaattttttccggtataacttcatcatttaaagacttggactatgtatctgcctggtttgttaagtctgcacaatatgcaacaaaaggccgtgtttcgatcgggctggtggcgactaactcaatatgccaaggcgagcaggtggctatgctttggccgtacatttttagtcttgggcttgagataaccttcgcacatacgtcatttttatggaataacaatgctgcaaataatgcaggagtgacctgtgttgtacttgggattggcaagggtggcacgaagcgcatctacagcaattcacttgagagggttgtagcttcgataagcccctatctaacggaggggcttcctgttgtagtagacaaacgctccacccctgtaagtgatcttccgagaatgatgaccgggaatttgccgtctgatggcgggcatctgctgatgtcctacagcgaggggcttgagtttaagcaaaggaatcctgaattcgcacactttctaaagagatttattggctcaagggagcttataaatggcggtgatcgttggtgtctgtggattgaggattcaaatttagaagctgcgtgcaggaatgcagagattagagagcggcttcgtatggtgaggatggctcgtgagagcagtcgcggcgagcaagctcgcggcgcaatcaatacaccccataagttcgtttttacaccgcatacctctgggttggcaattgcagttcccaaggtgtcatccgcgagaagagattatattccctgtgccatcacaaacgagggggtcgttgtatctgatcttgcgcgaataatctatggggccgagctttggaatctttcgattattgcatcgcgcctgcatctggtgtgggtaactactgtttgtggaaaattgaaaactgactttcgctactccaacactctaggttggaataccttccctgttcctcttttaaccgaaaagaacaaggctgacttaatgcgctgtgcagagggaatcctgctcgcccgcgaagctcacttccctgcaactattgcggatctctatgaccccgagtccatgccagaaaacctacgcgcagcccatgatcgcaacgatgaagtgctggagcgcatctacatcggtcgtcgtttcaagaacgacactgagcgtctagaaaagctgttcgagctgtataccgaaatgacggccagccggacgccacggaaggccaagtaa

SEQ ID NO: 335720 - DNA, 2067 bp, Pseudomonas aeruginosa
atgacccaaactgttccctccgtttccgtttcttatgcccagaacggacgatccaccaaggccaatgagttgggcatgcgccctatgcaggagcgcgcctatgagaggcgtggcgagcagtatttgctaatcaagtcgccacctgcatccggtaaaagccgtgccttgatgttcatcgctctggacaaactgacccaccagggcatcaagcaggccatcatcgtggtgccggaaaagtctattggatcgagcttccacgacgaacttctcagccgctacggattctggaccgactggcgggtggagccgcgctggaatttgtgtgatgccccaggcacagacgatggtggcaaggtcaatgcggtgggcgcattcctagaaagcagagaccaggtactggtctgtacccatgccactttccgtttcgctgtggacaagtttggcgtggcggctttcgatgaccggctgattgccgttgacgagtttcaccacgtttcggccaacccggacaacaagctgggcacccacctggggcagttcattgctcgcgacaaggtgcacattgtcgccatgactggctcttacttccgaggcgatgccgaggccgtactggcaccgaccgatgaggctcgcttcgatactgtgaccttcacctactacgagcagctcaatggctacgagcatctgaagaagctggacattggctactacttctactcaggggcctactctgacgacatcctcaaggtgctcgatcccagcgaaaaaaccatcattcacatccccaacgtgaattcccgtgagagcaccaaggacaagattcgggaggtggaacacatcatcgaagagcttggcgagtggcaaggtaccgacccggtgacgggcttccagcttgtgaagactgccgatggtcgcgttctgcgtattgccgatctggtggatgatgacccggccaagcgcgacaaagtcgcggcagccttgaaagacccgacccagaagaacaaccgcgaccatgtcgacatcatcatcgctctgggcatggccaaagagggcttcgactggatctggtgtgagcatgcactcacagtgggctaccgctccagcctgacagagattgtgcagatcatcggccgagcaacccgcgatgctcccggtaaggcacgggcgcgcttcaccaacctgatcgccgagccagatgccagcgagaaggtggtggccgaggccgtgaacgacacactcaaggcaattgccgccagcctcttgatggaacaggttctggcaccgcgcttcgagttcaagccgaagacccccaccagcgggcctcaggaaggctttgactacggcgacgcaggttatcagcctgacaagtgcaatgttggcttcaaccacgaaaccggccatctacagatcgaaatcaagggcctggctgaacccaagagccctgaagccaatcgcatctgccaggaagacctgaacgaggtcattgccagcttcgtacaggacaaaaccaacatcgagcgcggcctgttcgatgatgagttggtgcccgaggagctgacccagctgcgtatgggcaagatcatccgcgacaagtatcccgaactggatgccgaggatcaggaggccgttcgccaacacgccattgctgccctgaacctgacccagcaagccaagcagctggtattaggtgatgatccgcaaagtacgcttaatggggggaatggcacccccagcacggctctgattgatggcgtgcgcaagtttgcaatggatgtgcgggagctggatatcgacttgatcgaccggatcaatccgttcagcgaggcatacgcgatcttggccaagaccatgagcgaggaaagcctcaagcaggttgcggcggtgattggtgccaagcgcactcgactgacgcctgaagaagccaaagatcttgccgtgcgggcagtaaaattcaagaaggatcatggccgggtgccttccctgaccgctcaagacccttgggagcggagcatggcggaaggcgctgcagcctttatgcgtttcaagaaagagggccgatatggctaa

SEQ ID NO: 335721 - DNA, 771 bp, Pseudomonas aeruginosa
atggacttcacccccatcatcgcccaggtctggagtaccgtcagttggctaatcccgctgatgctgctgattggcctactcaagtcgccctgggccaagggccatattggcgagctcctggtacgcctgttcgctcactggcaactggacaagcaaatctaccgtggcctgcacaacgtcaccctgaacactccagacggcaccacccaaatcgaccacgtattcctctcgccctacggcatcttcgtgctagaaacgaagaacatgagcggctggatcttcggcagcgagaagcaggcgcagtggacgcagaagctctacaaacgcactttcaaattccagaatccgctgcggcagaactacaagcatctcaaagcgcttgaagccactctgggcgtcagccctgagtacctgcactcggtgattacctttgtcggcggcagcacgttcaaaaccgaggtgccggccaacgtgacccagggaattggttttatccgctacatcaagtcgtttcagcagccgatattcagccagactgaagtcgaaaccatggtgcaggccctgcaaactggccgccgcgcccccactctcgctacccaccgcgagcacgtgcacaacctcaagcgtcggagtgatccaacagcagagcggaaatgcccgaaatgtggcagcgtcctgctgatccgcactgtgaagtccggcccgaaagcagggcaacaattctggggctgttcggcgtttcccaagtgtcgagtgatgcagagtctgtaa

SEQ ID NO: 335722 - DNA, 789 bp, Pseudomonas aeruginosa
atgaaacggatactcagcatcctgctactagccttctgcgtcaatgtcagcgccgctgtcgactacacgtggacgagtctcgccattcccgacgagacatccactagcggtctcccagaagcaattccatgcattacccagaaagcccctgacggaaagccgctgctacggtgcacgtggctagaaatgtcccgcgacgtgctcatctgggatgctcagcgccagcaggatgtgcgttatcgcaaccaagtgagcggtacgtgcctgcgcggtaagtgccggactagcaatgccatcgtgggcgagtggaaccaggatgggttcttcctactctccatctggtatcgcatcggtatcagttccgacggtaaggcggtcgcctatcgcatcgatacctcgcgccaggtgtcctacgccgaggcaggtacgctcctgtatcagttctatctggatattggcgtccctgatgatcatctggtgccgacgttcgatgggcgctatgaaggcggctatgtagcgtggcaggcacagagaggaggagttcaagctggggcctcgccatcgtctggcccctcagatcaatctgaatggccggaagttacatccgcctggtgcaatccgcgcatggatgacgagtgctacatcaataaccagagggtacccgtggcagaccttggtaagtggttgcctgccgttgctgaatcgaacatcgatcagatcggcgggtactgcgagaccatcctctgttttgataaggacaatcagcctgccggttacctactgcagtaa

SEQ ID NO: 335723 - DNA, 354 bp, Pseudomonas aeruginosa
atgcacgtcatcaccggactgaacgaagcgcagatcgaaagtctcgtgcgcagcaaagcgtccttcgagatcaacggcctcagaggcaatttcacggaaggcatcaaattagtcgaaaccaagatcgaaagcgcgggaatgaaatgccgtgtcatcagcgatttgaaaggtgcagctatgcgcggtggagcacttggggcggcggccactgtgatgtcagcaccagcgacactcaccctggctgcactgaccattgcagcaggtgtcggccacgctctcgccacctacaaccccgattacgaaatcatcaaggactacgtgaacaagcggctcaaggtcctctacaagaaatag

SEQ ID NO: 335724 - DNA, 3009 bp, Pseudomonas aeruginosa
atggctgatctcatcgcctcgcttgtcgacttcggcgccgatccgagcgcggttcgtctgttcgataccgacacccccgatctgttgccttacgcgacgctcttggctgcgcgtcgtggcgacaatggtgtgcttggcgccgtgcgtgctgtctacgaatggcaaggcgcgccgcttatattcctagtggacgctgactcgctcgcggacgacgaccagttgcatcgcatacgccgcctgctcgccatgcgtggagacgcaccctacatgggtgtggtcgcgccgggacggctcaatgtgtatcgcattgaactcgacaagtgctccctgcggcaggcgcatgtcgagatgggcagcaacgacgatgaaaagtacgtaacgctggcccggttgggcaatctgcgcccgcgtgccgcgatcagccagcgcggctggatttcgaacgtcgtgctgaatctgcttaccggctcgattacacggctgatcgaattgggcggcgtgtcggacgaagatgccatctcgcttgtcggccgagcgttgttcacgcgtttccttgccgatcgcaacctgttgccaggcggcatgtccacatccggcacggccgcgatgctgttcgacaaccgggcagcagccaaaagcacctcgaaatggctcgacgccacctttaacggcgatctgctgcccctgtcggagggcattttcgatgtactctcgcagcaggcgttcttggtgctgggagacgttctcaggcgggcaccggacagccagctttttcttggctggcaagagaagtgggacaatcttgacttcgcccatatccccgtaggcgtcctgagccaggcctacgagctttatctgcgcaatcatgctccggatcggcaaaagcgcgagggcggcttctacacaccacgcccaattgctgacctgatggttcgtgcctcgttccgcgccctggagcgcaacggagccagcaaggacgccaaggtgcttgatccatcggcgggagccggcgtttttctgctgacggcgttccgcgaactggtggtcgagcgctggcgcgcggatggagagcgccccagcacacgaactcttaggtctattctctaccagcagatcaccggtttcgatatcaacgaggccgcgttacgctttgcggcgcttggtctgtatctcatgtcgatcgagctggatcccaacccaaggccagtggataagctccgtttcgagaacctgcgcggcaaagtgctgcaccgtctcgaggtgcaggccccggaggacggcgctgaactggggagccttggcccgctgatcgatgagcggcatataggcagatatgacctggtgatcggtaatccaccgtggtcgagcggcaccaagctgcgagattggcatctggtgcgcaacgcggtcgcccgtatcgccagcaataggcagatctccaacccctccccgccattgccgaacgaagggctcgaccttccgttcgtatggcgcgccatggagtgggcgaaagccgatggtcagattgcattcgcactgcacgcacgtctgcttttccagcagggcgatggcatggtggaggcgcgccaagcattgttcgaggcgcttgacgttacctcgatcatcaatggcgtcgagctgcggcagaccaaggtgtggcccgagatttcggcgccattctgccttctgctcgcaaccaatcggcggccaggtgtaggcgcaggttttcgcctcatcagccccaggctggagcaggcattgaacgatgcaggcagcatgcggatagatgcgctgaacgccgagctcgtgccgtcctcacaacttttcgaaacgcccgatatcctgaagatactgttccgcgggacaaaggccgatctgggcatagtggagcgcattcgcgcccaggggcacccgacgcttgatgcttactggcgtagccgtattggggtgacagagcggggcctcttgcagggcagcgggaatggctatcagcggctccggccaagcagccgggttcgccggcagggcgatggcctgccgggggtggacgcgagttaccttcacggccttccggagatcaacgccgaaaccttcaccggcctgttcatcgatggcgatggtctggagtcgttttcgcaggcacgtatccacgaccccaggtcaccctctctgttcgccggccccttggtcattgttcacaaatcccctcctgccgcgacggggcggataggcattgcagtggcggaaaaggacgtcgtcttcaacgagaccttctacggctatagcccaggcgcacattccgatgccgcatcgctggtccgttacctagcgctgattctcggcagccaactggcggtttggttggcgctagttaccagcggagagtttggcttcgagcgcgaggtcatcgagaaatacacccttgatcgcattcccattcccgacttcgatgcccttgaccctgtcaagcgcaaagaagttttccagttgttcgagcggttgcgcatgggagaggccacctggcaggacgtcgacgagtgggtggcgcgtctttatgggctgggaacacgcgatctgcaggttatttccgacacgctcgcatacaacctgcccttttccgaaaacaagcacagggcccagtcccttccgaggccggaggaaaaggcgagattctgtgaggtacttgccagggaattgtcaccttggtgcgagcgcttcggttcctctctcgtagtacgaccagcgttccagcctgccgcttcgccctggcacggcatcgagttgcgggtaggcaccacccaggctacctcggagagcgactgggaaggattgttgcgcgccgccgatgagatcatgagttcggaaatcctgatccgcaccgatggcaatggactactgatcggacggctggcccagcagcgttactggagtgagacgcaggcgaggctgcttgcacagcgcatcatctggtcacacctggacatattgaaaggatgcatcgaggtatga

SEQ ID NO: 335725 - DNA, 714 bp, Pseudomonas aeruginosa
atgagcgctccagctatccggccccgccccgaccagatcggcgaactgacgcgcggcctgcacctgccgctcccggcggtggacgccttgcatctggagatcatcgccgaagggctatcccgcgcattcgctgacgttcgcacgcatcacccgctggcggtgagctcgggtagcgaggcagaagtgaccagcctgatggaggcgcgcctgaacgcgctgatcggacaggatcccttctggggccagttggtgacgtgtgtcgttcggggcaaggaaagcgtgagcttcgacggttcgcatatcgagaagcgtccggacctctcgatctatctgtccagtcgggcacggaacttccctctaatcgccgaagcgaagatcatcgacaccagtgctgccaagacagaggccttgtactgcgacaaaggcttgcatcggtttctcgctggggagtacgcctgggcgagccaggaagccttcatggtcgcttatgtgcgcgatgggtcgtcgatcagtgacaggctgctcccatttctggcagacgccatgacccaggcacctcctcgttatgcggtggaagtgctgcccgcttcctgctcaagcggcaccagtgatctggcctggtcacgacacgctaggagcttcgtctacagccatcaggccccgcccgcccatcatcctggctcgatcgctatctggcatctatggctgtcgtag

SEQ ID NO: 335726 - DNA, 1104 bp, Pseudomonas aeruginosa
gtgcgcctcgaagctgatcgacaggccttcggcgcggccggtgaagcggcggaactggttgagggtgcgcttgtccgccgggatttccggcgacaggccgtagtccttgttacggatgtagtcgtagaacgcccgcggttgctggtcgtccatcagttccgaaagcgcgtcgagggtcatcggctcgccgatgcgcgcctgggaggtggcgtagtcgaccagcgtctcggtcttctcgcgggcctgttcctcggccatgtcctcgctttccacgaaatcgctgaaggctttcagcagggtgcgcgtctcgctcggcgaatccaccccttcctggcagccgatgaagtcgcggaaatagtcggagaccttcttcccgcccttgcccttgatgaacgagatgtactgcttcgactgcttgttgttgcgccattcggaaatgttgatccgcgcggccaggtgcaactggccgaggtccaggtggcgcgacggggtgacctccagcgactcgttcaccgccacgccttcgctgtggtgcagcagggcgatcgccaggtagtcggtcatgccttgctggtagtgggcgaacaggacgtggccgccggtggagagattggactcctccatcagcttttgcaggtgctcgaccgcttcgcggctgaagccgacgaagtcgcggtcgccctccaggtactcgccgagccagccgctgaacgggtaggccccggactcgccctggaagaagccccaggccttgttcttggcgttgtagctttcgttgaggtcggccagcaggttctcgatggcctgggagtcgcccagctcggcgtcgcgcgcgtggagcacggccggggtgccgtcgggcttcttctcgatcaggtggacgatggcgtgatggatcggcatgtcaggttcgacctttcaggtaatcggcggcgccgcgcaggtttccgcgacgctgcgggacacgccgctggcgcgcccgcggatcggccagtttacccgaggttgccggcttctgcctgcgtcgcctggcgttcctgcagaccgtgcaggcgcttgatcacgaagttcaggtgcaggtgcagctcgtacagctcgtggtag

SEQ ID NO: 335727 - DNA, 441 bp, Pseudomonas aeruginosa
atgaccgaccacgcagagctgcggagggtggctgaggacgtgatccgaattgagcggagcgaggatgagccgatctctgctgcttgggatttgttcgattccgccgccaaccccaagaccgtcctcgccctgctggacgatatcgacaggctcaaggcggagaacgacaggctgcgtcaaggcatgaaaggcgactacgacattgatgcatggcttgactggttgaaagagaaagagcggatcaaggcggagaacgatgcgctgaggggagcgctacaggccgtggaagccgaagtcgacgggaatctccgcccacttacccgcgacctcgtgaacatggttagcggattaaagaacggcagccacccgaatgacatctacgaacactgcgacgagatcgaaaggatcatcggagcagccctggaaggagacaagccatga

SEQ ID NO: 335728 - DNA, 615 bp, Pseudomonas aeruginosa
atgagtgaggtgaagaagatcagcccggttggaaatatctatggctgggaagaaagccaattcggggagttcgtccttagccaggactacgacgacctcgccgaagaggcccaggcgctcagggaggaagtcgcggccctgaagcacagccagcaggttctaattgggagccgtaacgcgcatcgggacgagcgtgatgctgcactcaaggaagtcgcggacctgcgaatggcgagagacgatttcaaactcgaacgagacctcgctcgaaaaaacttctgcgacgagcaggcagcgaattatcagttgcaagcgcacttgaaagcctgcctcggcgaactatcggaactgcgcgcaagggtggtggttgtgccggagcgcctgacgaacggcgacagtatcagcaggatgttgcgcgaaatcggttgcgacggtgacgtcagttaccaccatgcgcgcgaaatttggaacgcctgcatcgacgaactgtcgcgcctcaacggcaaggcggtgagcgaggggctgttgcgcaggctgtgtgagccactgctttcgcatgctgattacctcgtagctcgcaacgaactccgcgccctgctgagcaagcaagagtaa

SEQ ID NO: 335729 - DNA, 282 bp, Pseudomonas aeruginosa
atgcaactgctatgcgacgagcttcgtacggcacggaagcactatcaatgcgatgcctattactggttcgaccgtgccggcttcggacggcaggacgtcgatgcagacgactggctgatcgttgaggccgttcgatccgaccgagggaagatccttccgagcacaaagtacatctatcaggtgcgcgtcgatggcggggagttctggattttccgcgcgcccggaaatggacgccatctgccgcaaatacgacctgtatccggaggactgatccatgagtga

SEQ ID NO: 335730 - DNA, 210 bp, Pseudomonas aeruginosa; identical to SEQ ID NO: 323825

SEQ ID NO: 335731 - DNA, 303 bp, Pseudomonas aeruginosa
atggccaagaccaacgcccagcgccagcgtgaaaagcgccagcgacagcgagaggcaggcatccccgagcgcaagctaccctccccgccggcgatcgacgccgctttcgatcgcctgcaggcggtcggcgatttcgaggattggagagaagcgttctcgacgctgctcctcaacgcctcagccctacccgatgccgaccctctgcctctcctcgtcgtgtcgcgacacgaatacacgccaagcgaaaacgtgtcgcggcaactactcgccgccggactctccgtagccgacgacgaacagtaa

SEQ ID NO: 335732 - DNA, 414 bp, Pseudomonas aeruginosa
atgcgggcgctactgagcaccaaccacgtagcagtggtgaacatcgacccgagcggacggcaggggctgatcaactggcggaactgcaagaacattgcgccaggtcagaggatcgctgatgctgtctgcgacatcgcccacgcctggacaatctatctcagcgccttctgcatcgaccagcgcggccagcgctactacaagtcgatcgagattgccccgcagggcatctacttagtcaaagacctgacggaaccgattgagcaccactacaacgccattcgagaagagtgcaatccgaaccacttggtaggttctgggtggatcgctatacctgccgcagtttctctcgaagagggacaggcagcacgcgtgttcgacgcatcaggcgcctggaaccagcagagggcggcatag

SEQ ID NO: 335733 - DNA, 237 bp, Pseudomonas aeruginosa
atgcgcatcgaactcaacaccaagcgccagatcgacattgaccgagacagcctcgccgcggcgcaggacgctttcctggccgcaggcggaatcatcgaggacctcggcgcctgcacactggctccgcggccggtgcgcagtgtgagggtcgatcccgagactatcctggttcgcaagcgctatcgaccaacttctcgcgaacgtgctgcgctgcgccaaatggcggaggctctatga

SEQ ID NO: 335734 - DNA, 627 bp, Pseudomonas aeruginosa
atgcagatattcaaggacctggagcagggctcccaggagtggcttgacgcgcgtcttggaatcgcaacctgctccgaactggacgtgttgatggttaacggcaaaggccaggcagggttcggcgttggcgctttcacatacatggaccgcctgattggtgagcggatcaccggagcagaggccgagccatggcgtggtaacggtagcagcgccaggggtcacaagcttgagccggttgtacgcgacctgtactgcctgcgcacagatactgagccagatcagatccagcaggcagggatcattctgaaccacgggatcggctattcgccggatggcctagtcggcgacaacggcctgatcgaggtgaaaaccaaggtaccggaaaagctggtgagcgtgatcatcgcaggcgagctgccttccgagcacgcggctcagtgctatggaggcctttgggtttcggagcgcgagtggatcgacttcctcggctactggccaggcatgccgctttgcatggtgcgcgtccaccgcgatgaggcctacatacgcaagctgtccgagcgagtaaagaccttctacgaactgctcgaggagcgcatggagaaggtgctgggggtggcagcgtga

SEQ ID NO: 335735 - DNA, 762 bp, Pseudomonas aeruginosa
atgaacgaggtaataggctccaccgcaaatccaatctcagcaaccccagcagtggccgccaactcccccatgggaatgatgctcgccgcagtgaagcaaggagccacactggaacaggtcgaaaagatgatggaccttcaagagcgctgggagaaagccgaggcgaaaaaggcctacgacgccgccttcgccaacttcaaggctgaggcggtgatcatcataaagggccgaaaggtcaccgatggcccattgaagaacaagagctacgccgagttgcatgatgtggtgaatgcagtcactccggcgctctccaagcacggactttcctcttcgtggaagctcactcgcgacgagaaagactggatggaagttacctgctacctccgccatgttggaggccacgaggaaagcgtaagcatgggcggcccgccagataccggtggcgcgaagaacgccatccaggccagagccagcaccaaaacctacctggagcgatacacgctgaaggctatcaccggcctgtccgagcaaggcgatgacgacgatggcaggccgaagtcacccaaggcgattactcaggtccagatgcttcgacttcaggcggtcctctcgcaatgcagcaagggcacccaaaagctgttcaccgagtcctggccggacgcacggtccatgccagccgaatacttcgacgccgaaatcgcaaagcttgaatctgcggcagccaagtacaaggcccgcgtcgcagaacaagttcaggagtga

SEQ ID NO: 335736 - DNA, 1065 bp, Pseudomonas aeruginosa
atgtttgcagaaacccaattggtcgaagtgccggccaaagaaaccgcactacaggtctactcggccgccaatggccttgacccgttcctggccaagattcgcgaagagatcgacggcttcgtgccagacgtcactacccgcaagggcagagaggccatcgcctccatcgcctacaaggtagcccgctccaagacggcgctggacaacgtgggcaaggaactggtcgctgagctgaaggaagtgccgaagaaggtcgacgccgagcgtaagcgcatgcgtgacctgctggactcctggcaggcagaggtacgccagcccctaacggattgggagcagcgcgaggaaatgcgcaaggccaaacaccaggccggcatcgatcagatcaacctgcgcctggaatgccgcgacctagattcgaccgagttgaaagccaacattgagtggctggaagacctcttgattggcgaggactgggaagagttcgaaaccgaggccgcccgtaccaagaacaaggccctggccgcgctgcgcgaagccctcgttgcacgcgagaagtatgaagccgagcaggccgaactggagcgactgcgcgccgaagctgctgctcgcgagcagaaagagcgcgaggagcgcattgcccgcgaagcagccgaggccgagcgcctggcagcggaacgacgcgcccaggaagaacgcgaagccgccgctcgccgcgaaaccgaggcaaaggctgccgccgagcgccgggaactggaactgcgactcgctgctgagaaggcggggcgcgagaagttggaagcacagcaacgcgccgagcaggctgagcgtgatgcacagcggcgcgccgaagaagccgctgccgcagagcgccaacggcaggccgacgagcaggccaggatcgagcgcgaggcagcagcccgagaagctgacaaggcccacaagaaagccatcaacaacgaagccctggcggccctgatcgccggcggcatgcccggggaatgcgccaagcaggcgatcacgctgatcgctcagcgcaaggttcctcacatctccattcaatactga

SEQ ID NO: 335737 - DNA, 870 bp, Pseudomonas aeruginosa
atggcggccaaatcgttcaagcagatgatcaaggacggcgacctgaagcgcgcggatgcgatgaaggctcgcctcgaagaccttcacgaagagcccggtttcaacctccgcgccgagggcgaagacctcgaacagagcatcgcggatctggccgactacctgcaccagggcggcatcgttccggcccttgaagtgaggccgcgcgaagacggcggcatgtgggttgtcgacgggcaccgccgccggcgcgcctacctcaagctcgacgccgagggccggttgccacgtgacccgaacggcgagttctgggtgcccatcgttgcgttcaccgggaacgatgctgagcgcgtgcttcgagtgatcaccagtcaggaggggcgcaagctctcccctctggaactcgcacacggctacaaacggctgattgcgttcggatggaccgtcgaacagatcgccaagaagatggggaagacccggcagcacgtcgaccaggtgttggtcgtaggcaacgcgaataccgatgtgcagcagttgatcagctccggcgcagtcgcggcgacgaccgcggcgaaggtcgtcaggaagcacggcgagaaggccggccaagtgctaggccagcagctcgcgaaggtgatcgcggcgggagggacaaaggtcacccccaaggcagtagccgagccagtcgtaccgcgcgccattctcgaagagttgctgaagctcaatcgggagatcgtcacggcgttcccgacagcccttcgcgccggcctggctgaggggccggaagcgatcaccataaccaccagggcttcccacatcgagcgaatgattgaacttgtctcgagcgccgaagaggccctcgcgaaagcatag

SEQ ID NO: 335738 - DNA, 279 bp, Pseudomonas aeruginosa; identical to SEQ ID NO: 324744

SEQ ID NO: 335739 - DNA, 396 bp, Pseudomonas aeruginosa
atgagcgatatcagccgcgaagaactcaacgcacgccttgagaatcagaatctcaaggtcgatgcgcgcctgaaagagttcgaggggaaggtcactgatggcctgaagcagatgaatcacagcctccagctactggagaaggatctttccggcgttcgcgggctaaagggcacgatcatccttaactcggttctgtcggtaatcgccattgtcggcattgttattgctgtcatggcctacggtgttgccaacttcgattccggtcgcgagacgagcgcgctcatccaggaagccaagcagcaggccagcgagacacgacaattgcttgagcagatacgtaccgaacgactggctccctcggacagccaacctcctgctgcccagcctaagccataa

SEQ ID NO: 335740 - DNA, 687 bp, Pseudomonas aeruginosa
atgaaaggtgatgaaaggcggcggactatctatcagcaccagggatacaaactgcgctcctacaccgagttgatgtgggctcgactcatggacgcggcggacatcttctatctctacgagccgcatcttattcaagtcgagggatgcaagtacttgccggatttctaccttccagcggcagatatctatctcgaggtcaaaggcacgcgaccgaccgagattgagatggccaaagcagatcagacgcgcaagtccacggggcgcccagtggtatttctggtttccaggccacagagcgacacgcgcgggttcatgaattgttacctgctggttccgcgcaacgaggagtgggtggaaatgtcgcttgattggttaggtcagatatttcttacagccgcgggggagggcgcatggctcaaggcaattctatcggtccgtgaagacattctggattgcctgcgtccagctagcgaagtcgttgatgaggtcctgctcgaaatgatgggcaggagtgaggcggaggactacctccggcttacccataggcgaaccaacgatgatcgctgctcggttgatcgcgagctgtctatgtcagatcgaggcatcgcttggtggcgcaaccgttacttcccggccgttatggagtgcgcagagtccgatccagaagagatgagggcctccaaatga

SEQ ID NO: 335741 - DNA, 309 bp, Pseudomonas aeruginosa
atgagcaagttcaaggcgggcgacttggcgatgatcatcagttcctatgctgagcagaacattgggaaagtcgttcggctcgttgaatgccacggcaatggcggagtgagcttcggaggtcgcttctactttccaggccctatccgctggacggttgaagccgaggatggaagcgcttgtctagcaatccccaggagtgagggcgtattcgatcgcgcgagctttgggatctgtagcgaattcagactcatgcccctgcgcaaggacttccatcccgagcagcagaaggcgaaggaggagatcgcatga

SEQ ID NO: 335742 - DNA, 534 bp, Pseudomonas aeruginosa
atgaacaagacatcagtactggtcagaatcctgctcgcgggcagcgaggggaatactgcatcctctgcgtgggtcgatgccgacacgggatgcggcggttatggggtgatgtcgaaggacgagcgattcaagctggactgcgagtatcgtcggcacctccgccagaatctcacgcccaggttctgggatgcgctcatcgcgcgctacaccttggatatcaacgaccgcggcaaggcgatccgagggctgggtcgagtggtcgccacacacgcccaccagcatttcaagttctatgccgtgttgacctgggcggagcgccagaaagtaggagcagggaagagatccaccggcgtcctaaagcccgacttctacgacatgaacaggtgggatgacaaccatggcactcctgaacgtactcggcgtcggtggagggctggcatccatgaggctctggatggaatcctcagcgacgctatcgcgtccgctgtagctttacttgaggaacaggggatgttcgagcgaatggcggcttga

SEQ ID NO: 335743 - DNA, 285 bp, Pseudomonas aeruginosa
atggttgacccttggactctggtggctgcgatgatctgcggcgctatctgcatgaggctggcgacataccgccggcaaggcgcgaggtatcgccggggcgtttcctggctcgcctaccttctgtgcgtaggcagtggatgcttcgccctgagcgtgatgctcgatgcgctccacggctacaggctgaaccctgtctctccctggctgaccctggtcctggcgatcctgctcggtcttgtgtgtcgtgcgcgggggaatctggcccacattctgagggtgtactga

SEQ ID NO: 335744 - DNA, 126 bp, Pseudomonas aeruginosa
atggccgaatgcaccttctgcaacaagacgcgcgaatgggcgaagaagtgggcgcgggttgccgtagagcgggcggcctctgctatggccagtaacccaaagcgaccggaggtgcgtgatgactga

SEQ ID NO: 335745 - DNA, 162 bp, Pseudomonas aeruginosa
atgactgataccggcgaagaggctcgagtcatcctacgcaacctgctcgaagaacagcgaaagaccaaccaactgttgcatctgctgatccaggccctcgccgaggatggtgatgatcctgaagccgtgcccaccagctacctgagtggagagccgatctga

SEQ ID NO: 335746 - DNA, 846 bp, Pseudomonas aeruginosa
ttgacaagcaaaaaaacatgcagcagctgcaacgaggaactgcacgtatcagagttcataaaaaataagcaaagaaaggatggactccactctcaatgcaagtcatgcgtaaacgaaaaacgaaaaaaatacagagaattgaattacgaaaaaatccgatcaaagcagaaagaatatgagaaacaaaattatgaaaaaatcctctccagaacaagagaatggcgcgaacaaaatcgtgaaaaaatcagactgaaaagcaagacatattatcttaataactcagagagactaaaagaatactcaaaatcatggaaattgaagaatcaagatagggtaaaggctcatgcaaagtcttgggcatccaaaattcaaggaaggcatgcagaaatatggaagaaaagaaaagaagaaaacccacaaaaacttattgaaaaaagaagaaattactacaggaaaaacaaagaaacagagaactctagagccaacagctatatgaaaactcgaagaagcatagatccaatatttagattaaggtgcaatattcgctctagaatatcaacagtactaaaaagacagggcataggaaaatcatcagccacagcagagatacttggatgcgattgggatacgttacgattgcacatagagactctttttctgcccggaatgacttgggaaaatcgggatttgtggcatattgaccacaagatcccgctttcctctgcatcctctaacgaggaggtaatcaggctgaatcactatacaaatcttcaacctctttgggcagaagacaacctaaagaagggggccaaattggattactcaggcgcaaatgaatcgtcataa

SEQ ID NO: 335747 - DNA, 687 bp, Pseudomonas aeruginosa; identical to SEQ ID NO: 333145

SEQ ID NO: 335748 - DNA, 447 bp, Pseudomonas aeruginosa
atgccaggagcttttacccggttcgcaccaggctggcgaacccttggcctggccatcgtgctgccggcgtcgttcgcggcattcagcccggccgcgttcgccgccgacgtggtggtcgtcaccgacagccgccacccggtcaagaccatgggcggcgagcggctgatcgagctggaccgggcatccgggctcgaagcagagctttccgcagatctgccagccgaccccgagcgcgcagcagccatcgtccggcaacgcctgaaccaaggcggcaccgaccttcagcgccgcattggcaccgcctaccagggcatcaccgacgcatggagtttgggtgtcacgaccatcccggccgtcgtggtggaccaacgctatgtggtctatggcgagcctgacgtggcccgggccgtgtcctgcatcgagcagcaccggaggaggcaaccgtga

SEQ ID NO: 335749 - DNA, 360 bp, Pseudomonas aeruginosa
atgagcaccacgacccgcatcagcactgcggaacgcctcggccgcgcccttggccgcgggtggcgcgcctatgcgcgcagcgaacgtcgggcgtcgaactggttggtgtccaagggtgtgccgttggctgccgccgccgcgctgctgtgggccggcaaactggctgtcctggggctgctgctctacgttgctttctggctggcgttgctgctggtcgcgctggtgtttgtggcccgggggcacgataccgtcgaatgggagccgcccgaaccagagtggcggcacgggcacgccggttttggcctctatacccacgatgagtatcggatagattcacatgatccatctgatgagacctag

SEQ ID NO: 335750 - DNA, 1143 bp, Pseudomonas aeruginosa
atgcccgtagattacttaccggggatgctgggctcaattgccaatagcgccgtgaaatttgcaaaaactgacaatctcgtcaggccgccaagaggacttcctgcgagcccaaatgccgtcgcggcggccacggtctcatgcgatctggtggaggacctgctgcgcagcctgcgctcgctgtgctcggaccaggccctggatcgctgcctgcagcaggccggcatcgtgaaggcattcatcagccaccccggctcgcgtctgacgcacgatcaactggtcgggctgtaccgacgaagcgccgctgccaccggcgatgaaatgatgggactgtggagccggcccatacggaccggcgctttgaagtacatcgtccgagcggtcatggacgcgccaagcatcgaggtagcgctgtatcgcttcacgcaggtctggaacctgctgctggacgactacaggctgagtctcacgaaggcagacgcctccttgcgcttggaacttgtcccgcggtcttccaaagcgggggggaaccgattcgggcacgcactgatgctgaagctgacgcacggcatcgtgtcatggctcgccggccgagaggtcccggtgcgcagtgtggccttcgcttttccacgcccatcatttgcagccgactattcgatcctgtttccggccccgatcgatttctgcggacccctctctcagatcacctttcacgccgaactcgcaaaggtccggccgaaacgcagcgcgtccgacgcgcgcagcttcctggagcgggcgccgcgcgactggattttcacctcctaccaccagcacgccctccggctgaaggtgcgtgagctgctgcatgtggatctcggacggacgctggacgatgtttccagccggctgcacatgtcctcgcggacattgatgcgcaagctgcagcaggaagggctgtcgttccagggcatcaaggatgagttgcgcagggatctggccatcctccaccttgtgcgcaacgacagctcactggaggagatatccgatgctttgggcttcagtgcccctgccgtcttccaccgcgcgttccgccactggacgggtatgacccccggacgataccgggcggcgcagcagggcatttcccatggggttacgctctga

SEQ ID NO: 335751 - DNA, 870 bp, Pseudomonas aeruginosa
atgcctgccggaccgagcatatcgacctgcccgccgcagaccaccatgttcatgacccactgcaaggagaacttcatgtccgagcccattctgctgacctccgaacaagacaacatcggcatcgtcacgctcaacatggcgcacaagcgcaacgcgctcaatgaggaagcgatcgccgccatcgacgcctatttctcagcggtgcccagccacatccgggccatcctcctgacggccaagggcgatcacttctgtgccggcctggacctcaaggaacatcacgacaaggcacgcagcggcgtcgagttcatgcgcgtctgccagggctggcaccgcgcgttcgacaagatccagcatggcggcattcccgtggtcgcctgcctgcagggagcggtcgtgggcggcgggctggaactggccagcgcagcccacgtgcgcgttgccgacagccgcaccttcttcgcactgcccgagggcacccgaggcatcttcacgggcggcggcgccacggtgcgcactgcgcggatcatctccgcccctcgcatggtggagatgatgctcaccggacgggtcctcgatgcgcgggagggccgcgaactgggtttggcccactacgtatgcgacatcgcgaaaggcgacacgcccgcacccgagttcgccctgaccctcgcaaagaagatcgcgggcaatgcgcccctttcaaactacgccatcgtcagcgccatcagccgcatcgccgacatgtcggccacggacgggctgttcaccgaggggctggtgatggccatgatccagcagggtgacgatgtgcaggagcgcctgggcgatttcgtgaacaagaaggcgcacaaggtccaactgaatgcttga

SEQ ID NO: 335752 - DNA, 372 bp, Pseudomonas aeruginosa
atgcagaccaccgacttcgttgcgaccatttttgacggaagaagcaatcccaacaaggtgaccgtgaccttcatcatggcgctcaacgcgctgctcaagggacatacggcgaccatcatcctgatggtggaagccgtggaactgggacaacccggcgcggccgctggattggacatcggcaagcctttcgaacccgttgccgatctgctggagaaattcttggaaaagggaggtcgcattgccatctgcggctcgtgcatgatccacaacggtatgaccgccgcgcagatggacccgcgttttagcgtcatcaacgcacccgatgtggtggagttgctgatgggcgccagggggtccttgcaagtgacctga

SEQ ID NO: 335753 - DNA, 378 bp, Pseudomonas aeruginosa
atgacgacaagttaccggcaactgacgcaggacgtggtggctcacctggcgcccctgcacaagggagtgccgcaggtcatgaagagttttggtgagatgggcaaggcagcgatcgccgacggcgcactcgacgccaagacgaaagagctgatcgcgttggcgatcggcgtggccgcgcggtgcgatggctgcatcggctttcatgccaaggcattggtcaagctcggcgcgacggctgcggaggtccatgaggccctgggcgtggccatctatatgggagggggtccgtcggcgatgtacgcatcgaacgcggtggccgccttcaacgagttcgcggcgctgtccagcattccgggcgcgccggccagcgccccgtag

SEQ ID NO: 335754 - DNA, 1227 bp, Pseudomonas aeruginosa
atgacgccacctgcttcgctgccaccgcccgctgcgacagatgcccgccgcaatgtgggcctgctgatggccgcccaatcgctgggcggcgccgcgccacccatcatcatttcgctgggcggcatcgtgggtcagatgctggccagcaacccttcgctggccacactgccggtcagcctctacaacctggggctggcgctgtcgaccatccctgcggccctgctgatgcgtcgtctgggccggcgcgcggcctatgcgttgggggcgctgctgggttcggtgtccgggctcatcgccgcattgggcgtcctgtggggcagtttcgagaccttctgcgtgggcacggcgatggctggcttctacggcgcgtgcgtgcagagctaccgcttcgcggccagcgatgcggtgccgccgccgcagcgcgccaccgtcatctcgcgcatcatgatcggcggcctgatcgccgcggtcatcggcccgcaggtcgtcatctggacgcgcgacgcctggcccatggcgccgttcgctggcagcttcctcgggcaggcgggcctggcgctgctggccttgccgctgctgctgatgctgcgcatgccgccgccccaggcgtccgccgtcgtgggcgcggcgcgcccgctggcagtgatcgcgcgcagtccaggcttcgtcgtggccgtcacggcgggcatcgtgtcctacggcctgatggctttcatcatgacggccgcgccgatggccatggtgggttgcggccacaccgtgggcgaggcggcgctgggcatccagtggcacgtgctcgccatgtttgcgccgagcttcttcaccggccacctgatcgcgcgtttcggcaagaccgccatcacggcgtgcggactggtgttgatcggcacctctggcctgctggccctggccggcctcgaacttctgcacttctggggctcgctgatcctgctgggcgtgggctggaatttcggcttcatcggcgccacggcgctggtgaccgactgctacaccgcgcccgagcgcgccaaggtgcaggcactcaacgatttcctggtgttcggcaccgtggccgtcgcctcgttcgggtcgggccggctgctgaacacctcgggctgggaaaccatcaacggcctgatgctgcccctcatcgcgctcgtgctggccctgctgggttggctggcttggcgcaaccgccggcagtcggcggcggccgctgcgccatga

SEQ ID NO: 335755 - DNA, 312 bp, Pseudomonas aeruginosa
atgatggttgacaagaaagaccagtcgtttctacaggacggcgcggccaaggctgcggccatgctgcggacggtcggcaatgagcatcgcctgctcgttctctgcctgctgatcgagcatggcgagatgaccgtcggtgccctgcacgaaaacgtggcgctgagccagtccgccttgtcccagcacctggccaagatgcgcgaggaaggcctggtgacctatcggcgagagtcgcagaccctgcactaccgtatcgacaaccccgacgtggccaagctcatcgccacgctcaaggccatcttctgtccctga

SEQ ID NO: 335756 - DNA, 528 bp, Pseudomonas aeruginosa
atgtccctgaaatccatctcgccccaagctgccagcgaactcatgaaccagggtgccgttctggtggacatccgtgcggcggacgaacatgcccgtgagcgcatcgcgcaggcacgccatgtgccgatggaccgcttgcgaagcggcggcctgccgctcgacggcgcttcggcaatcatcttccactgccgctcgggcaaccggacgcgggtgaacgccccgacgctgggggcatgcacggcctgcgaggcctacgtgcttgaaggcgggctggacgcctggaagaaggccggcctgcccgtcgtggcggacgcctctcaacccctggagctgcaacggcaggtgcagattgttgcggggtccttgatcgtgctgggtgccgtgctgggcgccacgatttcgccatggttccatgtgctttcgggcttcgtgggcgcggggctggtcttcgccggtgtctcggggttctgtgggctcgcgcgcgtgctgatgcgcatgccctggaaccgccgcgcgctggccggctga

SEQ ID NO: 335757 - DNA, 879 bp, Pseudomonas aeruginosa
gtgaagatcgaacccttctttgacgaggacaccagcaccttcagctacatcgtgctggacacgaaaagcggtcagtgcgccatcatcgacagcgtgctcggctacgatcctaaatccggccgcacctcgcgcgccggcgcggaccgcatggccgagcgcgtgcgggaactgggggcgagcgtccagtggattctggagacgcatgtgcacgcagatcacctgagcgccgcgccgtatctccattcgtgcctgggcggccgaaccggcattggggcgaacatccgtaccgtacagcaggtgttcggccagctcttcaacgccgagccggccttcgcgcgtgacggccggcagtttgatcgtctgttcgacgacggcgagaccttcatgctcggcacgctgcaggtgcgggccatgcatacccccggccatacgcccgcttgcatgacctatctggtccaggacaacgccacacctgaagcgcctgccgcagccttcgtgggcgacacgctgttcatgcccgactatggcacggcgcgttgcgactttccgggtggcgacgcgcgcacactgttccgctcgatcggccgcgtgctgtcgctgccgccggagaccgtgctctacatgtgccacgactaccgccccggggggcgcgagcttcaatggaagaccaccgtggccgaggagcgtgcgcacaacatccatgtgcgtgacggcatcagcgaggatgacttcgcggccacgcgcgagcagcgcgacgccacgctggcgatgcccgtgcttctgctgccctccgtgcaggtgaacatgcgggccggcgagttgccgcctgccgaatccaacggcgtccactacctcaagattcccatcgatgccctctga

SEQ ID NO: 335758 - DNA, 1671 bp, Pseudomonas aeruginosa
atggacatcaaagccttggaccagggactggccgtcagcggccagatcgctgccaccgacctgcaggccatcgccgaggctggctaccgctcggtgatctgcaatcggcccgatggagaagcgggcgatcagcccggcttcagcgaaatcgagcaggccgcccagtcactgggtatggcggcgacctacctgcccgtcgagtccggcaaagtgaccgaccagcaggcccaggccttcgggacgctgatgacgcaactgcccggcccggtgttcgcctactgccgcaccggcacgcgctcggccacgctgtgggcgctgagccaggcgcagcgtcagccgttggcctccatcctcgaagccgcgcgcggtgccggctacgacctgtccggcgtggcccggcgcatcgccaacggcgggcgcacacccaccgaagtcgtggacgccacgcatgacatcgtgatcgtcggcgcgggcgcggcgggcatcgcggtggcgtccagcctgctcgcgcgcaagccggacgcggacatcgccgtcatcgacccggcggatgtgcactactaccagccggggtggacgatggtgggcgcgggcatctttccgcctgcgcacacggcgcgcacgatggcgagcgtgcttccgcgcggcgtcaagtggatcaagatggccgtcgccgcgttcgagcccgagcgcgacgccctcgtgctcgatggctgccgcgtcgtcaagtaccagcagctcgtggtctgcccgggcctgaaactcgactggaacggcatcgagggcctacctgaaacactgggccgcaacggcgtcacctccaactaccgctacgacctcgcgccctacacctgggaactggtgcagaacctcaagagcggccaggccctgttcacgcagccgcccatgcccatcaaatgcgcgggtgcgccgcagaaggcgatgtacctctcggccgatcactggaagcggcagggcgtgctcaagaacatccacatcgagttctgcaacgcgggaggcgtgctcttcggcgtgccggactacgtgcccgcgctcatggagtacgtgaaggcttatggcatcgatctgcaattcagcaaccagctcgtggccgtcgatggcgcagcgcatgaagccaccttcatccgcacgaacgccgacggcaccaaggagcgcgtcacccgtccatttgacctgctgcacgccgtgccgccacagaaggcgccggacttcatccgagtgagcccgctggcggacgctgcgggctgggtggacgtggacccgtcgagcctgcgccacaagaagtacgccaacgtcttcgcactcggcgactgcaccaacaccaccaatgccaagactgctgcggccgcacgcaagcaggcgccggtggtcgcgcacaacctgctcgccgcccggagcgggtccacgcgcctggccagctatgacggctatggctcctgcccgctcactgtcgagcgcggcaagatcgtgctggcggaatttgcctacggcggcaagctggcgccttcgtttccgaaatggttcatcgacggcaagcggccgtcatcgctggcgtggctgctgaaggaacgcatcctgccgccggtctattgggacggcatgctcaagggccgcgaatggctcgcgcatcctgtcctctcggacgggtga

SEQ ID NO: 335759 - DNA, 1557 bp, Pseudomonas aeruginosa
atgaatgaaagcctagggtttctccttgctctgagctttatcgtctcgctggcggctctgggcgcgttgatctggtccatcgtgacgcgccagatccatgcgggaaagaaggaggcttcgaccatatttctggagggcgaggccggctccccggatgatccatcttcattcgatgaaggggcggccgagcatcgattcgacgccttgcgtgccggcgtcgacgccccgggtcggaacgtcgtactggtcctgtccatcgcttccttcctgttcctgatcgttggctcgctgttcgggatgatcgcctcgctgaagttgcactggcccgactggctggcgagtcaggcgttcaccaccttcgggcgcgcgcgcaccgtccatctgaatctggtcgcgtacggctggctgtccacagggggcatagcggtcgcgctctggatcatccctcgcatgtttcatacgcccctgcgaaggcccgcaatggcgatggtgggcgcggtgctgtgggccctcggcgtggcggccggtgccattgccattgccaatggatggagcgacggcctggagtggctcgaaatcccatggcagatcgacatcgtcctggccctcggcggcttcttcatcgcatggtccgccatcgcgacgacccgaaaacgcaacgttcaccacatctacgtcagcggctggtactacctcgcgggactggcatggttccccattctgttcttcatcgcgaatatcccgggcctgcattcaggcgtgcagcaagccaccaccaactggtggttcgcgcataacgtgcttggcctctggctgacaccgctggggctgggtgctgcctattacctgattcccaagatcatcggcaagccgatctattcgtatagcgtttcgctgctgggcttctggggccttgccttgttctacagccaggtgggtattcatcacctgatcggtgggcccgtgccgacgtgggtggtcacgctgtcgatcgtgcacagcgtcatgatgttcattcctgtcatcgcggtggcgatcaatcagcacgtgacggtcgcgcagaatttctgggcgttcaaggagtccatggcgctgcgcttcgtgtccacgggcgcattgatgtacacggccgcatccttccagggatcgctggaggctgtacgggccatcaactcgatcacccacttcacgcactacacggtggggcatgcgcacctgggagcttacgcattcgtctccatcgtgctgttcggcgccttctactatctcttgccctacctgacgggcaagaactggccctgtccgcgactcatcgccatccactattggctgacggtcctgggttttctgatctatttcctgtcattgaccatcggcggtttcctgcaaggcatgtcgctgctcgatccacagaccagtttcgctgacatcacccgcaacatcgtgccgtatctcgaaggtcgatcggtgggcggcggcatgatgacgctgggacacttcgtctttgccttccatgcgatggccctactctggtcgaaacggcgaggtgacgcatga

SEQ ID NO: 335760 - DNA, 642 bp, Pseudomonas aeruginosa
atgaaccggctgattccattgttcgtcggcgctgtcggaatcttggtgttcgcgaccgtcatgctcgtggtgctccccggcctgcaggtccgtacggtccaggcacctgcgcagttgcagaactacacgatcgaacagctaagaggccgtgcgcagtacgtggccaatggctgtgtctactgtcacagccagcagcctcgttcgagtggccagacgctggcggatcaggcccggggctggggaaggccgtccacgccgggcgactacgcctacgacgctccccaactgctcgggacgatgcgcaccggccccgatttgctgaatgtcggggtgcgcctgccgagccgggactggcaattgacccacctgtaccagcccagggccatcttcgactggagcatcatgccttcgtaccccttcctcttcgaggtcaaggagaaggccgcgcccggcgaggtcgtggtcaagttgccgcaggagtaccgtcccgcggacgggaaagtggtggtggcccgacaggaggcgctcgacctggtcgcgtacctgttgagcctggaccgttcctaccccgtcagcgccaaagaggcgacattgcgtgatcgtggctacgatccgaaaactcagaagggcccgcgtcaatga

SEQ ID NO: 335761 - DNA, 807 bp, Pseudomonas aeruginosa
atgaaatccgagctgagcggcaaggggcgtcgtgttcaagacgtagacccgacattcgacccctgggagcaatcgcgtcccattcccttgtttgtgctggccatcttcctggcgctggcgatctggggcgctttgagctacatcgccgacctggcgccgaatcgcggggcggcgattggcgggaccgttgcgccgaagcagcaggcgcccgcagttcccgatgacgcgccggtgctcgtctttcagggcaacgacatcgtctgggcctgcgcgtcatgtcacggcgaccacggtgctggcgcggggctgacgcccgcgctggccggcctgtccgaagcctacatcgcgaagcaactccacgacttcgctaccggaagccgccccaacgagtccatgcggtacgtggccagtgcaatgagcgccgaggagatcgggcaagtctcggcctattacgctgcgctgccgcacgttgccgggccgcccgtcgatctgggcggagacgcggcgcgtggagaggcactgagccgaacgggcgactggaaaaaggatatcccggcgtgcgtgacctgtcatggccagcagggtgagggtgtcggcggccatttccctgcgctggcgggtcagcagcccgagtacatcttccaccagttggtctcatggaaaggcggccatcgccacaattcgccgcaatccttgatggatgacatcgcgtcgcgcatgtcggaccaagacatgcgcgatgtggctcagtatttcggatctttgcgtccgggcagcaaaggaggcaatcatgacgaacaacggtga

SEQ ID NO: 335762 - DNA, 1098 bp, Pseudomonas aeruginosa
atgacgaacaacggtgatcgccgctctgcgcacacggggacactccggcgtgccggttatgctgcggcgctgggtctcctgctgttttcggcaggttacggcgtctacgagagcggcgtgatggggtatctgtacagcgcgatcagcggcaaaacggtcacgattccttcggccgcgccctattcgagagcagatatggaagctgctcgcaaggcctacgcaaaagacgccaaggcgtctccgcccggtatgcccgtcggtgcggacggctactacctcccgcctgcggaggatgacattccgaaaggaccctatggcgatgccatccggcgaggaatgaaaatcttcaccgacactggcgccatggtcaaagaccacgtgggcaattcgctggcctgcgcgaactgccacctcgactcgggacggcgagagaatgccgcaccgatgtgggcggcctatgcgtcctaccccgcttttcgcagcaagaccgggaccatcagcacgctcgaagaccggatcatgggctgtttcacctattcgatgaacgcccaggcgtcgtcctccgggaaaccgccgcccgctggcagcgatgtgtaccgcgatctcatgacctatatggcctggatggccgatgggctgcccgccggcaacaagccgcgcggagcgctctatcccaaggtgccgaaaccaaaggacgactacgacgtgggccgaggtctggcggtctatcaacaaaattgcgcactgtgccatggtcctgatggacagggcacgcgggaggaaaacggcaagatgagatttcccccgctttggggacccgagtcgtacaactggggcgccggcatggcccgcatcgatactgcagcgggctttatctgggcgaacatgccgcttggaaagccatacagtctgacagaacaggaggcctgggacgtggcggcattcatcaacagccacgaacgccccaaggacacacgccagaccggaaccgtggctgaggcgctggagaaataccacgaaggtgagcaaagctactacgggaaggtcgtgggcggaaaactgcttggggttggaacggatgccaagagcggaccgtag

SEQ ID NO: 335763 - DNA, 2151 bp, Pseudomonas aeruginosa
atggccttgcagcgcgtcctgcagcgtgtgcccggcgtggtctcggcgacggtgaatttcacctccggttcggcgctggtgacctgggtcccggagtcgatcgacttccccttgctgctgcgaaaggccgagggtctgggctacgcactgtccccgttgaaaggcagcgacgagctggaagcggccctgcagcggcaggccaggaagatccgcttgcagttgaccgtcgcggtcgtcttcgggatgtggagcatgctgggctcatgggtgctttacctgaacgccgacgaggcggcggcgctcgtcatcgcctgggccagcgtcgtagcaagccttcccgtcgtcggatattcggcgtgggatttctaccgcgccgccgcccgttcgctgcgcgccgggatcgcagggatggacgtctttgcctctgttgctgtccttggctccctctttgtgtcggtcgggtccctggccatggggtccgtggcgatttacaccgacgccgccaccatgttgatcacttttctgctgatcggaagattgatcgaaatccatgcccggcaggagagcggacttgccgtacaagcattgcgcagccttgcgccggaaaccgcgacgaagctgacttctgccggcggcgaaaaggccgagagcaccgtcctgctggcagagctcgcgcccggtgataccgttttgatacgcgccaacgagcgcatcgcggtcgatggcatcgtcgtagcgggacagtcggccgtcgatctctcgctgctgcaaggcgagtccgcgcctcgcagcgttcagcctggcgaacgggtcttcgccgggtccgtgaacctgcgcggacctctgacggtccacgtgaccgccggtgcgggggaccgacgattggacgtgctcggcctgcgcatgcttgagctgtttggcgctcgttcgtcgttgtccgagacggccgagcgcttcgtccggatactgctcccggtcgtggtgacggcatctctgctcgccttcgtccattacctgtggaacggctcaagcgcagaccaggcgttgctcggtgcgctgagccttctggtcgcagcctgcccttgcgcggtcggtctggcgatgccgctggcctacgcctttacctgccgcgaggccgcgcggcgcggcgtcctcctgagagactccgcgagcgtcgaagcgctcgccagggcaaggatcatggcgttcgacaagaccggcacattgacgtgcggtcagatgcgtatcgtcagcatccagacgcggcacgggggggccgaacaggacctcatcgaccttgcggcaagggccgaggccggcgtcgcgcaccccattgcacacgcggtggtcctcgcggcccggcagtctggaatgagcagcgcgtgcgagcccgacggatgccaggtgacggcgtgcgcgaaaggcgtgacgatgcatgtccccggcggcgagaccgtgtgggtgggtgaaaggcattggctgctcgccgcgggagtcgagggcatgccgccggaagatggcctgccagggctggtacacgtagccaatggccgggattggctcggctccttgcgtctgcaggatgcccctcgcgacgacgcccgttcgtcactgcagcggttacgtgcgcagggattgaaactctggttgctgaccggggattccagcgcagcgtccgaacgcctgacggctgacctgggcatagacttcgaccgggtcgaggccgattgctctccggaagaaaaagccgacatcgtggcaaagagcccagcgcctgtcgcattcgtgggcgacggcgccaacgatggcctggtcctggcccaggcagcctgcggaatcgccatcccaggatcgagttccgtggctgtttccgcagccggggtggtgatcgcgcacggcagcgtgggcgctgtcgtcgagacccgtgagttggctcgcaagtttgatcgcatcgtccggcagaatctcgcattttccgtcgtgtacaacctcgccgtgattgtcgtgctgttcgaagcaggcgtgacgccctttgccgccgcgctcgccatgctggccagcagcgcgtcggtgctcctgaacacctgcaggctgctgcagggccgcgtcgtctgtgacaagtcgatgcaggccaagccggctgcgtcctga

SEQ ID NO: 335764 - DNA, 1599 bp, Pseudomonas aeruginosa
gtgagcaggcttgcgcggtggcgaaatgccgcgaccttggcgtttgccggtagcgcacatgcgttgacgttcgccccggatccgttgccccagtggtcgctgcccatcgttcaaatcctcgcgctggcggtgctggcacgcgccagctttgccgccgagcgcggccggcaggcattccttcgcggatgggcgttcggcttcgtcaattttgcggtcggcttgtactggctgttcatcagcatccatgactacggtggtttgtccgcgccactggccggtgcgagcgtcgtggcgctgtctgcctttctcgcgctgtttcccgctcttgcctgcgcgatcagcaagtggctgcagtctcgcactcggcggggagcagcgctgtcacaagtgctggtctggtcagctgtctgggccgcctcggaatggctgcgcggcgtgctgttctcgggctttccgtggctgaacattggctacgcccatgtggacagccccttggtcggctgggcgccgttgctgggcgtgcatggcgtcgcgctgctcgcggcgtgcgcctcggggaccgtggcgttcctgtcgcgtccggccgcggcttccatgcgctcgaacgtgtctttgctggcgacggtgctgatcctgatcgccacgggatggacacttactcgcctcgattggtcgacggccgaaggcgagccgctgcatctgaggctagtgcagggaaacatcgatcaatcgcagaagttcgacccgaccctgcttgaagacggcatcgccagtcacttgcggctggccgcacagccaccgggccccggagagccgcatccggacctgatcgtcttgccagagaccgtcgtgcccgtattccaagaccagctcgacccgatgatttggaaaacctggctcgacgtagcggcgaaccagcgcagcacgatcgcgatgggcgtccctttgcacagcatggcggccgacggcagttcgcgctacaccaacagcgccatcggcttcgactccggcacgccgttgcagcagcttgtcgacgcctccgtgccgctacgctacgacaagcaccacctcgtgccctggggcgaatatgtaccggctgggttcgagtggttcacgcggatgctgaaaatgccgctgggtgacttcgatcgtggagccccggtccagagaccattctcggtgaatgatcagcatttggcgttcaacatttgctacgaggatgttttcggttccgagctgctcccgtcgctcctgccgaccccaggcgcaggacccggcgcgagcgtgctcgtgaacttgagcaacctcgcttggttcggccagacctgggcgcttcgccagcatctgcagatcgggcggttgcgcagcatcgagaccgctcggcctatggtgacctccacgaatacaggcatcacggcctcgatcgatccgaaaggacgggtcgttgccgctctgccgccacatcggccgggcgtgttgtccgcgaccgtacaaggcatgagcggcctgacgccgtatgttcgctatggcgaccagccggtcctgttgctggtagggatagtattggctgctctcgtacggcgcccgaccccacggtag

SEQ ID NO: 335765 - DNA, 1386 bp, Pseudomonas aeruginosa
atgagcctgcggctgcgcgccgttctgatcgccggcatttcgctgttggttctgtggggcgctgccgccggctggatgatgcgcggcgttcattccaatctcgaccggaccctcgacggtcgtcttgccatgtcggcacgcatggtgtcggggcttcttgaacgcgccgcgctggctccgaatgcagcgtccaacgacttcaccgaggcggtgcgcgtcagcggcaaggagggcatcgcatgcgaaatccggtctttgcagggagagatcctggcacgaacgaccaccggacctcactcggagttcgagtcactgccggccggcttcagcacgcgggacgttttgggacatcagtggagggtctacgttcttcgtgccaatggctaccagatcacgacggcggatcgcgtggatcagcgggatatgctgatcaacgaattgctaagcgtggctggcgtgcccttcttgattgccttcctgggcggcctggctgccctttggatcggcatcggacgggggctcgcccccctggaggctctgtcgcagcaattgcgcgacaaacacgcggacgacacgtccccgatcgccgtcaaccattcaccctcggaactgcgcccggttctggacgcaatgaatgggcttctcaagcgcctggcacggacactcgccagccaacgggcattcaccgacgccgcggcgcacgagctgcgcacgccgttgaccgtgatcgatacgcacctgcaggtggcccggatcagtgaaggcgacgaggtggcgtcctctctttccagtgcagaggaaggcgtgaagcggctgaggcgcaccttggaccagatgatgatactggcccgcgccgagacgtctgccgacaaggcggatggttgcacttcggtggtcgcttccgtcggcggcgtgctggaacagtggaaggccgcagaaaaagagcgcttgtcgttgaacgtcagcggcgaggacatcggaaccccggtgcccaagtcgatgctggaaacggcggttcgcaatctggttgacaacgcgatgcgctattcgccgcgagatacggccatcgaggtgggcgtgttcctggatccgaatgcacagcagtgtgtgattagcgtgtcggaccgtggccccgggctgactgccgagcaggcatgccaaattggccaacgtttctggcgcggtgatcagggccgaaagagcaaggacggggcgggcctgggcatttcgatcgttcgggccattgcagagagatttggtggggccctgaatctcgaaccccgggaaggcggaggcctggttgcgaaatttctcgtgcccaccgaccccgcacccaaaaaaggtcaagctaggcctgcagggcgtggcttggattcaaaaccgtag

SEQ ID NO: 335766 - DNA, 669 bp, Pseudomonas aeruginosa
atgcgaatactgttggtggaagacgacaaactgatcggacgggggatcgtggccggtctgcacaagcacggcatcgcggtgcatcacgtcggcaccgcagaagaagccgaagccacgcatgcggaagacaccttccatgccctggtgctcgatctcgggctgcctgaccgggacggcatggagttgctggccagcatgcgggccgtcgaacctcaattgcccgtcctgatcctcacggcgcgggacgccatcgaacacaggctcaaagggctgcatgaaggtgccgacgactacatgatcaaaccgttcgacctgcgtgaactcgcagcccggttgcatgcgctggtcagacgcacgcaaggccgtgcggcccaggtcatctcggccggtcccctgcggctggagccggagagcgggctggcctggttccagggcgagcccgtctccttgtcgcgccgcgaggtcgatctgctggcccatctcgccaacgccgatggccggtgggtcccgcccgacatgctcaacgagcgcttgtacggcctcggggaagagatcggcagcaacgcgctgaatgtgcatatccacaacatccgccgcaagctcggcgccgaagccatcgagacggtccgtgggctcggctatcggctgggctggaggcttgcatcatga

SEQ ID NO: 335767 - DNA, 687 bp, Pseudomonas aeruginosa
atgagccggcccctcgttgccaatccggtatttgtcgtgatgcgccgggacttgaagctcgccttgctccgaaggtcagacgcgctgatacctctttgcttctttgtcgtggtcgtcagtctgtttccattgggtatcggccccgagcgcgaaatgctccgacggatcgctccgggcgtcctgtgggtatcggcgttgctggccagcatgctttcgctcaatcgcctgttcgagcaggatcacgccgatggcacgctggagcagatgatgctgtcgccagcgccgttggccatgttggtcgtcggcaagatcgcggcgcattggctgttgtccggtttgcccttggccttgcttgcgcccgcgctggcattgcagttcgacctgcctgccttgtccctctggattttgaccgcatcgctcgttatcggtacgccggtgctcagcctcatcggcgccgtcggcgcggggctgacgctgggcgtacgcgcagggggtgtcctcgttgctgtgctggtgctgccgctctacatcccggtgctgatcttcggtgccggcgcggtcgatgcgtcgatcatcggtcagggagcgtcggccaacctctctttgctcgccgccgtgttcgtcttggcggcgttcttcacgccattcgcagcgagtgcatcgctgcgcatcgcactggagtactga

SEQ ID NO: 335768 - DNA, 738 bp, Pseudomonas aeruginosa
atggtcaactggttcaagttttcatctcccaaggcgttctacccactcgcggggaagctcgtcccttggctcggcgtgaccgccgcggcgctgtcgctcgcgggcgtctatgtggggttcttcttggcacccaccgacgcccagcagggagaggggtatcgcatcatcttcctgcacgtgccggtttcatggatgtccatggtcatctatctggcgatggcgttctgggccggcattggcctggtgttcaacagccgcctgtcggcaatgatggcctcggcgctggcccccacgggtgcactgttcaccttcctttctctgtggaccggcgccttgtggggaaagccgatgtggggaacctggtgggtctgggatgcgcggctgacctctgaactagtcctgctgtttctgtacatcggtttcatcgcactccagtcggcgatcgaagatcgtcgccgtgccgaccgggcaggcgccgtgctggcactggtcggcgtggtgaacatccctgtgatctatttctccgtgcagtggtggaacaccttgcaccagggcgcctcggtatcgctgactcgttcgccctccatggcgacggtcatgttgttgggcatgctgatcatggttcttgcggcctgggcttacacggctgcggcggcgctggcgcgtgtgcgctgcatcatcctggaacgcgaacatcacgccggctggctgcaggacatcgaggaggtgaagcgatga

SEQ ID NO: 335769 - DNA, 192 bp, Pseudomonas aeruginosa
atgaactgggccagtgtgggtgagttcctggcgatgggcggatatggcgtgtacgtttggggatccgtcctgacgacggtggtgttgctctggactgaatgccgaatgctccggcgccggcgccgagcagcgctatggcgcatccagtcggaattgctgggcaaggaggcgcggcgtgaagccacgaaatag

SEQ ID NO: 335770 - DNA, 447 bp, Pseudomonas aeruginosa
gtgaagccacgaaatagacgcatcgcactcatcgtcgccgggctatccgccctcggcatcgccaccgcgctggtgctcaatgcctttcagagcaaccttgtgttcttcttcacgccctcgcaggtcagtgccggggaggcaccactggagcgcacctttcgagtcggcggcatggtggaacgaggtagtctgaagcgccagcgtggtgagcttgccgtgcagttcgtcatcaccgatacggtcaaagcaatcccggtcacgtattcgggcatcttgcctgacctgttcagtgaaggaaaaggggtggttgttcaaggacggctggacagtgccggcctctttcgcgccgaggaggtgctggccaagcacgacgagaactacatgccgcccgaggcccagcatgcgctggacgaagtccagaagaagccggcttcaaggaagccttga

SEQ ID NO: 335771 - DNA, 1962 bp, Pseudomonas aeruginosa
atgattccagaaatcggccacctcgccctcatcgctgccttgttcgtggcactcgctcaaggtgttcttgccctggccggcgcggcgcgagccaacctcacctggatcgcgttcgcccgccccgctgcacgcgctcaattcctgttggtgatggtcggttttgccgcgctcacctgggcctttgtcgcgaaggactactcggtcgcctacgtcgctcaaaactccaattctcagctcccgctgggctacagaatggccgcggtctggggcggacatgagggttcgctcctgctctggctgctgatgcagaccggctgggcctatgcggtcagccggttgtcgaaacagcttccggatgccatggtggcgcgcgttctgggcgtgctcggcctggtgacggccggcttcctgctgttcgtcctgttgacctccaatcccttcgagcgacttttcccggtaccgcaagatggatgggatctgaatccgctcctgcaggatatcggcttgatctttcatccaccgctgctttacatggggtacgtcggattttcggtggccttcgcattcgcgattgctgcattgcttgccggacaactggactcgacgtgggcacgctggtctcgtccctgggccaccgcagcctgggcaaatctgacggtcggaatcgccttggggagttggtgggcctactacgagttgggctgggggggctggtggttttgggacccggtcgagaactcgtcgttcatcccctggctggtgggcaccgccttgatccactctttggcggtgacggaaaagcgggccagtttcaagaactggacggtgctgctctcgatcggcgcattttcttgctcgcttttgggtgcctttctggtgcgctcgggcgtactgacttctgtgcatgcatttgccaccgatccgcgacgcgggttattcattctgattctgctgacggtcattgtgggcacgtcgctcgctttgttcgcatggcgagcccctaaggtcggcatgggaggacggttcgacatggtctccagggagtccttgctgctggtcaacaatgtgctgttggtcgtcactgccggcgctgtcgcgctcggtacgctgtacccactgctcgtcgatgcgctgggcctgggcaagctctccgtggggccgccatacttcaatgcggtgttcgtgccattgatgatccccgcgttgcttctgattgcggtaggacccgccgccaattggaaggccgcccagttcggtgccatcttcaggcagttgcgcgtgccgatgattgctgcacccctggtgggcctgaccgccccgttcgtgctggggcactggtcagcttctgcggcgttgggcttgatgctcgccacgtggattgcggtgtcggtggtgacgggcatcttcggccgaatgcgcgccacccgcggcgggttgcgtgcccagccacgcagttggcttgggatgcatatggcgcatctgggcatcgcggtattcgtgactggcgtgaccatcgtcagtgggtatgagaccgagcgagacgttcgattggcccagggcgagtccgtcagcatcggcggctacgacctcactttgatcggcgtcagaagcacgcgggggcccaactacgtggcgcagataggcgatatcgaactgtcgcgcgacggcaaggtcttgcgtcggctgcatccggaaaagcgcaattacccggcctcgcagatgccgatgaccgaggtggcgatcgatgcaaacggactgcgccacgtctacgcggcgctcggcgaaccgctcggcgacggtgtttggagcgttcgtgtctaccacaagccattcgttgactggatctggatcggctgcatcctgatggcgcttggcggtggcttggccatcagcgatcgtcgataccgtctgaagcctcgccgtcaacacgtcgctccgccattgcccgaggccgcatcatga

SEQ ID NO: 335772 - DNA, 525 bp, Pseudomonas aeruginosa
atgaaccgtttcctatggccgctgctcggattccttgtcttggtgtcgttcctcgcagtgggcctgacgctcaagcccagcgaggtgccatcgcccttgatcaacaagcccgcgccgcgcttcagccttccgcaactgcaagctccggacctgaccttctcatccgagagcatgatcgggaaagtttgggtactgaacgtgtgggcttcctggtgcgcgccctgtcttgaggagcatcctgtcatcaccgaattggccagcaggcatgctgtttcggtggtcggcatgaactacaaggacacgccccagaacgccatcgcctggctacggcgcaatggcaatgcctttgaaacgacggtctccgatgcgcatggggcggtcggcatcgacttcggggtgtacggcgtgccggaaacctatgtgatcgataaggcaggcatcattcgctacaagcacaccggggcgattgacgcgggggaaatgcgcggcgagctgctgccgctggtgcgggagcttgagaaatga

SEQ ID NO: 335773 - DNA, 456 bp, Pseudomonas aeruginosa
atgattctctggcgggtggcattgtttttctttctgttcacggctccggtctgggccagcgaccaagcggccgaggaccgaatgctgggcattgcatccgagttacgttgcctggtttgccagaatgaatcgattgcagcttcgcaggccgatcttgccgctgacttgcgccaacagatccgcgagcagatccgtgccggcaagagcgatgacgacatccggacttatatggtcgagcgatacggcgatttcgtgctctatcgcccgcccttgaagccgacaacgatgttgctttggtttggcccgttcgtggtgcttgccttgggcattgtggtcttggtcatgaatctgcgcagccgaaaccgcaagccgaagcatgctgcactcaatgaagaggagcgcagacacgcggacgcgctgctggctccgccacacaatgtactggacgaaacatga

SEQ ID NO: 335774 - DNA, 402 bp, Pseudomonas aeruginosa
atgctggcgcgttcctaccgttacttcggcgatcatgagcaagccgtcaatgccttcacccacgccaatgagctggtccagaacgatccacaggcgttggcggagtacgcggagtcgctgtccagaatccgtggctccggttttgagggagagcccactcgtctgcttgagcgcgccttgtcgctcgatcccaatgcagccctgcctctgactctggccggcgctgctgcggtgcagcgccgggactatcaaacggccatcgcgcactgggagaagctgctcgggatgatgccccccgattccgaggcggcgaaagtcgtcgcggccgggattgaacgggcccggacggagcaggcggaactcgcccatggtcgatcaccagagccaagcgcaaagccttga

SEQ ID NO: 335775 - DNA, 1839 bp, Pseudomonas aeruginosa
ttggctttttatcggcgcatcgtagcgatctttctcctgtgtggttgtgcggtcggcagtgcgtgggcggacggcctttttccctcctggggccgcagcgagcggcaatttctggacgttgccgaagttctcaagctggacgctgtgcagcagcagggcgattcgttctcggccgctggacacgttgccgatggctactacgtttatcgccatgccatcaagttggtcgatgcgcagggccatgaagtcagcctgacgcttccggcaggaacagccaaacacgacgaattctttggcgatacggaaatctatacgggcgatgccctcaatctgcgctttcccgccaccgcccccggcccgctgacactgcattggcaagggtgcgcggaggcaggtatctgctatccgccgcagaccatgaatgtggcattgccggcagtggtggccggcacatccccgaccggcaatgactccgtacagcggagttcggctttgacctccaccaacacagtcagcttgggcggagctaccgaggtggcagaggatcaagcggcagcgcagcgcctagcagcattgggccccgtgtggggaacactgctgttttttggcttcggcttgctgctcgctttcacaccatgctcgctcccgatgatccccatcgtctccaccatggtcgtcggcagccaggccaagccgcggcgggctttcttcctctctctgtcctatgtcctggcgatggcgggcacctacgccgcggtgggcgtggccgctggcttggccggggccaacctgcaagccacactgcaatcgccttggctgctcggagcgtttgcagccttgttcctggtcctggcgagttcactgttcggcctgttcgagctgcagatgccctcggcgctgatcaatcgggtcgaatccgccggtagagatcgctcgggcgggagcatctccggcgcggcggcgctgggcttcctctcggcgcttctggtcgggccttgcatgaccgctccattggcaggcgcattgctgtacatcgggcagaccggcagcgcggtctacggtggcatggccttgttcgcgctgggtttgggcatgggactgcccctgctggccatcgccgtgttcggtgcccgggtcctgccacggcctggcgcgtggatggaccgcgtgcgcgtggcattcggctacgtcatggtgggcatggccgtgatgatgctgacgcgcttcctgcccggcacggtcagcctggttctgtggggcgcatgggtcttgtcggtggcgattggcctgatcgcgtggggccaggccgtggcagcgaagcatcggctggcatggtcgctgcggtccggcgccgtcttcgccggcttgtggtccatcctgatgctggtcggcgcggcctctggcggcgaatcggcattgcagccgctggcccacctgcgcggtggttcgacttcgccagcaccggcggcgggcggcgtcgcttacctgcaggcgaaatcggtcgaggacgtggatgcgcatttggcacaggccgcttcgcgcggccaatggaccctgatcgacttctacgccgactggtgcgtcagttgccatgtgatcgaacgcaacgtattcggcgaccccgccgtcgcgtcccgcctggcccggatgcaggtcgtgcgaccagatgtgacgcgcaatgatgcgaccgatcaggccttgctcaagcattggggtgtcatggggccgcccacgctcattctggttggcccggacggtacggaacgccgggacctgcgcgtcgtcggtgagatcgatgcccgcgccttcctggtgcgcttggacaaggcaggttcctga

SEQ ID NO: 335776 - DNA, 837 bp, Pseudomonas aeruginosa
atgatcagcgtaggtccgttctccgtccaagtcgttgccgtcttcctggccgtcctgctggcctgggcggtggcgcgcatggttgccaagcggttgcccgactctccgtacaaggcggccggcggaatgttgctggacgccgcttttgtggggtttgtggcggctcgcctcggctacatcgcgcaatggtgggaagagtacgcgcagtcgccgatgtccatgatttccattggcgaccaaggcttttcgtggtgggtcggtgtcctggcagcgctggcgctcatctggtggcgcacccgtgcggttcgggcattgcgccggcctgtattggcgggagttgcggtcggactcgcagcctggtttgctaccgggggcgtactggctctgctgcagcgctcggcaccgccgttgccagcgttgacgctcgcaacgctcgatgaacagccagtcgtcctgaattcctatgctgggcggcccgtcgtgctcaacctctgggcgtcgtggtgtccaccatgccgtcgcgagatgccggtgttcgagcaggcacaagcgcagtatcccgatatcgcttttgtcatggtcaaccagggagagagcgcccagcaagcccgcgcctttcttgagagcgaacgcctgcatctcaaggatgtgctgctcgaccccgcttcccagaccatgcaggccgtcgcatcgcgaggcctgcccaccaccttgttcttcgatgagcaaggacgcctggtggatacccatctgggcgaactcacgatggccagcctcaaacacacggtgtcgcgccgattcgcgccagcccaacagatcaagacagacaaggagtaa

SEQ ID NO: 335777 - DNA, 774 bp, Pseudomonas aeruginosa
atgtttgcacaacgctcgcacatttcgttcctgctggccgccagcttcatggtggtcaccggctgcagcaaggcagagacggctgacaagccggccgtcctcaaggcgctggaaggtcagggcctgaccgtcacgcaggaattcaaggtcggcggcggtctgcgcgccttcgctgccgtcgcgggtgaccggcccattgccgtgtacatcacgagcgatggcaatgccatcgtgggaactcgcctgaacgccaagggcgagccaatggacgaagcggacctggaaaagctggccgccaagccggtcagcgacaaggaatggtcgcagctgcagtcgtccacctgggtgctggacggcaaggcagatgcgccgcgcgtcatctacaccttcagcgatgccaactgcccctattgcaacgccttctgggaagctgcacgcccctgggtggattccggcaaggtccagttgcggcacattctggtaggcatcatcaaggatgacagcccggccaaagccgcggccattcttggcgcgcctgaccggagtgcggcgttgttgacgaacgagcggcagtttggccagggcgggattacgccagccaagagcgtgcctgccgatgtgcgcaagatcctcgatgacaacctggcactcatggcgagcaccggcttccgggggacgcccggcatcgttgtacgcggccccaatgggatcctcaagaagtacaacggcatgccgcgaggggcgcaattgggtgaagtgctggggccgcgctga

SEQ ID NO: 335778 - DNA, 807 bp, Pseudomonas aeruginosa
atgctctcgctgacgggtggagtgctgggcctcatcatcggagccgtgctgggattgactggcgccggcggcggcatcttcgcggtgccggcgctggtgttcggcctgggcatggacatccgtcaggccgcgcccgtggcgctgctcgccgtgggagcagcggcgaccctgggcgctttgcagggcttgcgccagggggtagttcggtacaaggcagcgatgatgttggcggctgccggcgccgtgacggctccgctgggcgtgcagtttgcccactggctttcgcctcgatggctgaacctgatcttcgtcgccatcatgctcgtggtggcctaccggatgttcatgtcatctcgcggcagccagacgcaggacgatctggctgacgagccagcccgggtctgcaagatctccaaggacaccggccgcttcgtctggaacgtgcgaacagcgaccacgctggggagcatcggcatcgtctccggtttggccacgggcatgttgggggtgggcggcggattcatcatcgtcccggctctggcgcatttcagcgagctgcgcatgcacagcatcgtcgcgacctcgctcatggtgatcgcgctgctgtccgctgtaaccgtgttcatcgcgtggagtcatggcatgacgctcaccgcgcccgcctggacattcgttctcacggcgctcgtgggcatgtcgctcggccgtgttctggcacgcaggattccctcaaagatgctccagcgggtgttttcgatcacctgcgtggccgtggcggccctcatgctcatgcgcaatgttggctag

SEQ ID NO: 335779 - DNA, 1377 bp, Pseudomonas aeruginosa
atgcagacaaggaaagtagatgtcgccatcattggcgcgggaaccgctggcagcaccgcattccatgcgctgaaagcgacaggcaaacaggtggttctgatcgatcgggggccattggggacgacctgcgcgcgcgtcggatgcatgccctcgaaggcggccctgcatgccggcatgcactggaaggtcgccaaggcactggcagcgagcgccacgccatcgacccaagggccgcaggccttatggtcccacgcccgccagaccagggatgcgctggccggcgccgccgcggagcgcacgcgcaaggcggctggcgagagcctgatcatggccgaagcgcgcttcgtcgcgccgggcatcttgcaggcaggtgaacaacggatcgaggccagcgccttcatcgtggcgacgggctctcgcccggtggtccccaaagcgctcgacggcgttgcctcccgcatcctgaccaccgataccctgttcgacctgggcgtcctgcccgcacggatgggaatcctgggactgggcgccatcgggctggaactcggcctggccctgtctcgcttggatgtgcaggtggtcgcggcagaccagaaagacgccatcggcggcatccaggaccccgatgtcctggagcgggcgatcgccaggttcgagaccgagttgccgatgtggttgggcgccgccgtcgaagtcagccttgaaggcgaccaggtgcgcatgcgcgccggcgagcgcgacgcgctcgtggatcggcttctcgtcgtgacgggacgacaacccaataccgaggcgctcgatctcgccgcggccggcatctccttggatcaggctggccgaccgagcatcgaccccgcgaccatgcaggcctgcgggccgtcccaggtgccgattttcttcgcaggcgatgtgcagccggatcgccctctgatgcacgaggccgcggacgagggtcagatggcagcgcaagccgcactggcgagcttgcgcggcgaaagttggccgggcgcatcccggcgcgtgccgatcacgatcctgttcaccgacccggatgcgtgcgcagtcggcatgacctacgaggcggcggtgcaggaaggcgcggtcgtcggcaccgcggaaggcagcggcaacgggcgctccaagattcttggtgctccggaaaacctgctgcacatctatgccgaccccggctcaggcgccttgctcggtgccagcatgctcctgacgcaaggcgagcacctggcgcacctgatcgcttgggcgatccaggcgaagcagaccgtcaacgatctgctggccatgccgtactaccacccctccatcgaggagatgctgcaaagcgccttgaaatccgcatcccagcagatgcgcccgtga

SEQ ID NO: 335780 - DNA, 324 bp, Pseudomonas aeruginosa
atgacccaagacacccagcgccccacattgaaagtgatcctccacgcaccgacggcagaagcctttgagcgtgcgcgaagcaatgcaaccaatctcaagcgcgcggcgcccgatgccgatgtgcgcatcgttgcgaacgcgcaagccgtcgccgccgccctggacacggcaccttccgacctcgacgcgctcacctgggtatgcccgaacacactttcgcggatcggcagggacaacagagagccgctcgaagtactggacgggcctgctgttatcgagatggcgcgcatgcagcaagcgggatggatctacatacgggcgtag

SEQ ID NO: 335781 - DNA, 891 bp, Pseudomonas aeruginosa
atggaattacgacatctgcgctatttcatggccctggctgaagagttgcatttcacgcgcgccgccgagcgcctgcacatcgaacagccccccttgtcccgtgccatcaaagaactggaggacgagctaggggtcgtgctgttcgaccggaaccgccgtggaaccgtgctgacgtcggcgggtgttgtctttcttcaagatatccgcagattgttcaccgtgctcgaacaggcacgcgaaaacgcccaggccgtggcagcaggtttgcgaggcagtctgcgcatcgcgatttccgacggggcaatcgatgctcgcctgtcggcatttctggcccggtgccgcgcggaggagccggagatcgagatacggctgtccgaggttccgctggccgagcagttgcgcggcctgcggtccggggatttcatgatcggattcgcgcatacggccgacgtcggcgacgacatacgggctgagcccatctggcgagatccattggtcattgccgtgccggcacggcacgcactgctcgcccacaaaaaggtcccgctccaagaagtcgggatccatccactggtcttgtgcgatccccatgcgtgcgagggctactgccgggaactgacacgactgctgcaggtgcttgagcacaagttgaacgtcgtcgaggaggtgtcctcgctggacatgatgctcaccttggtcggtgctggttacggtatcggctttctcgcggcgagcaagattccggtttgccaacgcccggacgtggtgatccgtcccctggccatcgattcagccgtcatcacgacttacttgctgcgggccgacagcagtgatttgtcggcttcgctggagcggttcatcgttcgcctacgtgactctgcgagcggctga

SEQ ID NO: 335782 - DNA, 909 bp, Pseudomonas aeruginosa
atgcgaactcgtcttgcgcgactccttgtgcgacgcgcgcagcgcgcacggcctgtccgaaagctgtcgccgctgcggattcatacgttgttgtgccagaaggacggcctggctgaatggttgatttctgcattagcagaagcgtcaaacaatctgccaaaattaaccacgttaaagataacggcgttaaacttcactcttgaccacgatgcaagttcacctactcggccagaacactttttgggggctcgcatgcatgatgccaccagccagtttccccatctcaggcttgcgatagcacctggggtgccatcctcatgcttctcctcgcttctcgccctgcaacgcgcggaagagccggaaatcactatcgcgttctttgagacatcaagtgacgacctggtgacgggcattgatgaaggtcgttacgacgcaggaatgtcgcttcgggccgtaagcgctccgtctctgaaaagccaacccttgtggatcgagaacatcgctgttgccatgccattgtggtcccccttgctcgcccagacaaagcttacgatcgccgaacttttggactaccccgtgtttcgctggccggcagaaagctgctcactactggatcagcggctgtcatccctcccgtctttaagccggcagagcgtccagcatgtgacctcgttcgacatgttggcgctatgggtcggcgctggctatggtgtcgggatcaccgcgcaatcgcgcatcgagcgcgctgatgcatgggggatcaccgcccggccgctggccgaggggccctacgaggtcgtgactcatctgcagcgcctcaaaggacgaactaacgcggtttctgagcggttcgagcgcagagcgatgcaggtagccaaggatagtgcagtccaatcgaatacccgatag

SEQ ID NO: 335783 - DNA, 1770 bp, Pseudomonas aeruginosa; identical to SEQ ID NO: 324604

SEQ ID NO: 335784 - DNA, 663 bp, Pseudomonas aeruginosa
atgccaaagctaatcccagcatggctgtggccccgcttgacgccttcatcaccagaggatgaatcccgacagcagaagtggcttcgaagtgagcaagaaaaggtcgatcaaggatcttgggcagataaaagtgatgttgcgctggaggaggcacgtaggctctttgacgctgagcatgagcgccgccgaggggcagactccaaagccggcctttatctcgcagcaattaccgcgctgatccctatcctagccacaatccttcctggactctggaatgatcagatcagcagaaccctgagaggcaccctgcttgggatcttcatctgcgcactgctctatctgatgcgtgccgggttgtgggccttgcagaccatcaagaccacgcctgcggcacagttaggtgcaggcgatatcgctgaaagcttcagctccgataagcctgaagagaagcttgtgaagcagctgctgagtgccgtgatttacaacttcactggtacgaaccagaaaatcagctgcataaagatgacgcacgagtttttgctgcgagccttcttttgcttcgtggcctttctggccattcaggcagtttggcctgcggcagcttgggcgattggtcggattcataacgagatcatcaccccgctaatgagctgtttcccttag

SEQ ID NO: 335785 - DNA, 798 bp, Pseudomonas aeruginosa
atgagcgccgaaaaagaaaagaacaatgtcgcagtcttctccgctggctccttgattggtgctttaggagggctcataggcttaggtggcgcagagtttcgacttcctctgctgattggccttttcggttttggggctcttgaggcagttatccttaacaaggcgatgagtctcatcgtcgtcgcgacggctttgccgtttcgtgcaatgagcgtcccctatgcggacgtcctcgaacgttgggacatcattgtcacactccttgccggaagccttgctggagcttggtatggggcggggtgggcaaccaagctcaagagccagactctttacagtgtgctggcagtgctgctggtaggaatcgccattgcgttgctgtttggccatgacgcaaacgcgacgggtgagccactgtttcatggcgcagcgttgattatggtcggtgtggtcgtcggtttcgggatcggcgtcgtagcagcgctgatgggagtcgcaggtggcgaactactcattccgaccatcgttcttttgtttggcgccgacataaagcttgccggtagcctttcactggcggtgagcctgcccaccatgatcgtgggattcacccgctacagccgcaaccagagcttttcggtggtcagaacacagcggacgttcatcctgatcatggccgctggctcgatcattggaaccttcatcggtgggcagttacttgggctgatttccactacatacctgctacccctgctcgccgctattctgctgatttcctcggtgaaggtctggcggcatagctga

SEQ ID NO: 335786 - DNA, 414 bp, Pseudomonas aeruginosa
atgactgacaagatccgcgtcctgtttgtttgtaccgccaacgccgctcgctcccaacttgccgaagcgctgcttcggcacaccgacagtgagcacttcgaggccttcagcgctggaactcagcctggcgtgatcgacccgagaacctatgccgccctcgatcatctctccattgataccagcggcctgcgcagcaaatccatcgaagagttcgcgggtgaacgcttcgactatgtcatcaccctttgcgacaaagccgctcaggaatgccaaacccttccagggactggcgaggcattggcgtggaactttgaagatccggtgaccagcaaccgccacgacgccttccgtcacacgcttcacgagattcacgagcgcatcaagatgttcgtccttgtgaagaccaaacactga

SEQ ID NO: 335787 - DNA, 357 bp, Pseudomonas aeruginosa
atgactgactccctgactccgacccaggttttcaaatgcctggctgacgaaaaccgcatccggatgatgctgttgatcgctcgcgaggaagagctctgcgtctgcgaactgacctgtgccctggatgaaagccaaccgaaggtgtctcgccacctggctcagctgcgtacctgtgggctactggaagaccgccggcaaggccagtgggtgtactaccgactgcatccaaaactgcccgcctgggtacgcgagattctcgtaacgacgcttgaggccaaccgccagtggttgagcacgagctccaagcgactggacaccatgggcgaccgccccgagcgcgttgctgcctgctgctga

SEQ ID NO: 335788 - DNA, 471 bp, Pseudomonas aeruginosa
atgaaagttctgttcctctgcaccgccaatagctgccgaagcatcttgtctgaggctgtcttcaatcacttggccccagccggcatgaaggcatacagcgccggtagccaacccaagggggaagtgaatccgctgtccatcacagccctgcagcgcgccggtatcgccactaatggcctgagcagcaagtccaccgattcacatgccgacctggcaccggactttgtcatcaccgtttgcgacaaggcagccggcgaggcgtgccccgtgttcttcgggcccgctgtgaaggcccattggggacttgccgacccgtccgatctgcagggtagcgaggaagagatggatgctgccttcgatgacacgctcgggcacatcaaacgacgcatttctgcgcttctcgcactgccctttgaacaactcgatgccgcccagctcaaggcagaactggcacgcatcggcactctctga

SEQ ID NO: 335789 - DNA, 1062 bp, Pseudomonas aeruginosa
atgagcaagagtcgtcttactttcctggatcgctacctgacgatctggatctttctcgccatggggcttggtatagcgctcggtagtttcttccaggggctgccggcttggctgaacggcctgtcagtaggctcgaccaatatccccatcgccattggcctgatcgtcatgatgtatccgccattggcgaaggtgaaatacgaggagctgccgcaagtcttcaaggacaaacgcatcctcgccttgtcactgattcagaactgggtgatcggcccggtactgatgttcgtgttggccgtggtgttcctctccgataagcctgagtacatgacggggctgatcctcataggcttggcgcgctgcatcgccatggtgctggtgtggaaccagatcgcgggcggtaataaccagtacgttgcgggcctggtcgccttcaacagcatcttccagattttgttcttcagcgtgtacgcctggatcttcctgggcgtgttgccgcccctgttcgggctggaaggcagcgtcattgaaacgagcttcgtcgatatcgcgcagtcagtactgatctacctgggcgttccgttcctggccggcttcctgacccgcaaaatcctgatcaaccgcaagggtgcagcctggtaccaagatcgcttcattccgaagatcagcccgctgacgctggtagctctgctgctgaccatcgttgcgatgttcagcctcaagggcgacatggtgctgcagctgccgctggacgtactgcgtatcgccatcccgctgaccatctatttcgtggtgatgttcttcatcagcttctggatgggcaagctgctggaggccgactacccacgtaccaccgcgctggcattcaccgccgcgagcaacaacttcgaactcgccattgccgtggccatcgccaccttcggcctagcctcccccgtcgcctttgcgaccgtgatcgggccgctggttgaagtacctgtactgatctctctggtcggcgttgcctggtggctcaagcgtcgctggttcgatcaagcctctggcgccctttcccaggagtga

SEQ ID NO: 335790 - DNA, 717 bp, Pseudomonas aeruginosa
atgaccaatgaccatatccccaatatcgacagcgaactgatcgatctgccgtccccggacaaactggctatcgaacagaaatcgactcacaaaccgcgcatcctcctgctgtacggatcgactcgcgaacgctccttcagccgtttgctcaccgaggaggccgctcgcttgctagagcacttcggagccgagacgcggattttcaatccgtcaggtctgccccttccggatgacgtgtccgatgaccatcccatggtcaaagaactgcgtgacctggtgctctggtcggaaggcatggtctggtgctcgccggagcgccacggcgccatgacaggcgtgttcaagtcgcagatcgactggattccgctgagcatgggcgccgtgcgccccactcagggtaagaccctggcggtaatgcaggtctgcggcggttcgcagtcgttcaacgccgttaaccagatgcgcgtgctcggccgctggatgcgcatgttcactatccccaaccagtcctccgtgcccaaggcctacctggaattcgacgaggcaggtcgcatgaagccttctccgttctacgaccgagtcgtcgacgtgatggaggaactggtgaagttcaccctgctactgcgtgatcgcgccgactacctggtcgaccgctactccgagcgcaaggagtcggcggaagagctatccaaacgtgtcaatcaacgatccatctga

SEQ ID NO: 335791 - DNA, 516 bp, Pseudomonas aeruginosa
gtgcaatcgcatccgtattccgttcttaccgcgtccgatctgagcggccaactgatcttcactccgtgccccggcaccaaggacacgtcggtgtccgaggcgctagccacgcttcgcgatgccggcgcggtggctctggtgaccctgatgccagaagacgaactgctgcagaacgaagtcgatctacttcccgaggaatgccaactgcaagggatcgaatggttccacttgccagtggaggatgaccaggcgcccggtgaagctttctccactgcgtgggaaaccaatcgagatcgcctcaaggagctggtcaatggcggccagaagatcgccatccactgcaagggcggctctggtcgcacaggcctgatcgcagcccaactgttgatcgagtgcggcatgcccatgcgagaagccgtagcccaggtacaagcccttcgtccccgtgcgattcagcaccctgcacacattaactacatcagccagttcgacaaaaaatcgccgaacgctcgctaa

SEQ ID NO: 335792 - DNA, 1005 bp, Pseudomonas aeruginosa
atggccatcaaagtaggcatcaatggtttcggacgtatcggtcgcctggcgctgcgcgcggcatggaactggccggagtttgagttcgtacagatcaatgacccggctggcgatgctgcgacgcacgcccacctgatcaacttcgactcggttcacggtcgttggcatcacgaagcgagctccgacggtgactcggtggttattggtggtaagcgcatcaagatcacggcgaacaaagccatcgctgacactgactggtcgggctgcgatctggtcatcgaggccagtggcaagatgaagaccgttgccgtgctgcagacctacctggatcaaggtgtgaagcgtgttgtcgtgagtgcgccggtaaaggaaaaaggtgcgctgaacgtcgtaatgggcgtcaaccaacacctgttcgacccggctcagcatcgcatcgtgacggcagcctcctgcaccaccaactgcctcgcgccggtggtgaaggtgatccacgaaaaccttggtattcgccacggttcgatcaccaccatccacgacctgaccaacacccagagcatcctggatcagccacacaaggatctgcgtcgtgctcgtgcgtcaggtatgagcctgatccctaccaccactggctctgccaccgccatcgcggagattttcccggagctgcgcggccgactgaatggccacgccgttcgcgtcccgctggcaaatgcttcgctgaccgactgcgtcttcgaagtcgagcggcagaccagcgcggacgaggtcaaccagttgctcaagcgcgccgccgagaatgagctgaaggacatccttggctacgaggagcgcccactggtttccatcgactatcgcaccgacccgcgctcctcgatcatcgatgcgctctcgaccatggttgtgaacggtacacaggtgaagctgtatgcctggtacgacaacgaatggggctacgccaaccgcactgtcgaactggcgaagctggtcggcctggctggctga

SEQ ID NO: 335793 - DNA, 1233 bp, Pseudomonas aeruginosa
atgaaggcgctatcgtcgctctcaccagaagttcgccagtacctgctggtaacgggcaactactgggctttcacgctcaccgatggcgccttgcgcatgctggtggtactccacttccattctttggggtactcgccgctacagatcgcagccctgttcctgttctatgagttcttcggtgtcgtcaccaatctggttggcggttacctgggggcgcgggtgggactgaaccgcaccatgaacatcggactcgccatgcaggtcgtggcgctgctgatgctcaccgtgccgtctgccttgctcacgataccgtgggttatgggagcccaagcgctatccggcatcgccaaggatctcaacaagatgagcgccaagagctcgatcaagctcctggtgccagatgctcagcaaggcaagctctacaagtgggtggcgatccttacaggctcgaagaatgcgctcaaaggcgtgggcttcttcctgggtggcgcgctgctggccttgctcggcttcaaaggcgccgtgctggccatggccgtggtgctagccctcatctgggtcggcagcatgctgtcgctgaaaaaagacctgggcaaagccaaggccaagcccaagttccgcgacatgctctccaaaagccgagcaatcaacattctctctgctgcacggatgttcctgttcggtgctcgggatgtctggttcgtcgtcgcgctcccggtctatttgagcgagacgctgagttgggacttctggctggtcggaggtttccttgccgcgtgggtgatcggctacggcatcgtccaatccttcgcgccggcattgaccggcaagaagcgaggtcacgtccccgacggtcgcgctgccttcatctgggcgctgatacttgcggtgctgccggccgccatcgcccttggtctggatatgaacctctctgctcagatcgtgctcctgggtgggctgatgctgttcggggcgctctttgccgtgaattcctcgctgcacagctatctgattgtctcgtacgccaaggaggacggcgtatcgctggacgtggggttctactacatgtccaacgccatgggacgcctaatcggcacggtgctttccgggtgggtattccaggcctacggactggtggcctgcctttggatctctgcggcattcgttctcctggccgcgctcatttcaatcgccttgcccagacatgcagaggtggtgaccaccccgaactga

SEQ ID NO: 335794 - DNA, 438 bp, Pseudomonas aeruginosa
atgaacaggttgatagggttactaccgcttctcgtctccgcactgtggcttagcgcgtgcgacaaaccgagcgacgcccacaaacccgttgccggcatcgaacaaccgattgccggcagctggttcgatggtcagtggcgggccgaagcatcatccgcatcgagtccgcccctccttacgatctctgcagaggggctgcgctggggggactgcaaggcctctggcgacgggcaggtcagcatcaatggaaagcaggcaacctatgccatcacgagcggattcgactgcatcagcagggacgcgacattgactggcgtggtgttaacccaacggggcaattgcgagcttctgttggaagcgtatgcctccgatgtcgagattgagaatggagttcccgctatccggaacacctacctcaagagtggctgtacgccgtag

SEQ ID NO: 335795 - DNA, 762 bp, Pseudomonas aeruginosa
atggcaccaaaccagcttctgatcgggaaatcagcgttcatcgtcagggcgcagtctctgcccaatggctacaaccagcgccctggcatgaccctgttgctggctgacggcgaaccgctcgagttggagatcgatggtttaccagccgccacctcggaggcttggctgttggcacccgaaatacgtcgccgtttcctgcgcccgcagccgcatacgagcatcaccgtcgagccaagccacccgtcatatcttcgaatgttgcgctgggcccgtagcagccctgatgcggcgcttcgagtcgacgtaccagttgcctctcgcttcaggctggcctccgcaaccacgcagcagaccttcgatgacgcgctgaatgagttgcttgctctgcatgagcagccagagatcacaccaagcccgcgcctggagtatctgttgtcactggtcgaggcatcaggcgaagacagcaccgcagagcagatttggggagcattccggtctcgctattccagtacccaagcacactgctcccactggctacaggagtcgctcggtttgccactgcgcaaattgctgctgtggcgaaagctccggcgtgccctggaggggctcaatgacccgaatggagccaccgccgtcgctcatgaagcaggttttgccgactcagcccacctgtcccgcatctgcctgcggactttcgggcttcgcccttcacaggcgaacaacaacaaaatccttcaagtaagctggctgcaggattgctga

SEQ ID NO: 335796 - DNA, 378 bp, Pseudomonas aeruginosa
atgtcgcttacaaaatttggtatcgccgtccgagagtatcggcgccaattggggctgacactcagcacaatggctgcctcgctcagcacctcgcctgcatttctaagtgccatggagactggtcgaagcaagattccaatggagtgggtggaaaaaatctctgaatattttgccgttaagggaattccagtcaaaaccagagacctcaaagcgctcgcgtgcgaagacaacgaaagcgtttctctagagggcctgcctcaacatcacaaaatgctaatcgcaggattcgccaactccgacctcacccaagaacagctcgccaacttcggcaaattgctcgccgaaatctacgaggagaaacccaaagatgaccgttga

SEQ ID NO: 335797 - DNA, 483 bp, Pseudomonas aeruginosa
atgaccgttgaggaattgccataccggatgaggggccacagggtccccgaattctcctcagttcagatccgagccgttgcgcaaaaagtttgcgatgtgctccatctgagccggaggtcattccgacctggagctgtggaaagcttggtcgccgcgctcgagcactacaggatctacgttgacccaattgaagatgaggaatggctcgacgccacgagagcaacggtcaatccgcagacgggaatgatctatatgcccctaaagctctacaacgagctgtgccgcgggaagccagaagccatccgaatcttcctacatgaattggggcacatcatcctgtgccacaaaccaatgcttcacttctcggagggcccgagtaaaaaggagttcgattcggagtggcaggccgatctttttgcggactcggtgatcgagcacctcaacctgccaaggtttgacggtcagatggaattcaagttctga

SEQ ID NO: 335798 - DNA, 597 bp, Pseudomonas aeruginosa
atggatgaaaagaatctggaagtgcttcgccgactaaaggaggtgatggagcgagagaagcctgtagagcagcccaagaaaccgcatgtacctgggcaaggctttagcgaagagtcggaggagatattcagagagctggctcggcacaagctttccaggccaactaaccagaagaccgctgcggcaaaacctccgaagacttccgtacctactcagccgccagcggtgaaaaagatttgtgctgaatgtaaatcggagtatccgaccgcttcagacaggccaccaaagcgcggttggctatgtcataactgccgtaacgccagacgcgagaagcgtcggcaaaaggtcgaagagaagcgtgctgcgcagtacctagccgctaaaggctcaaaaatcgaacagttggagagaaaaatcgctgcagtgaatactcagctagaacaggcgccgctcgagagacagcgcggcctgttccaccaactaaaacagctagagcgccagctcaggctcgagcgggtacacaaactatctcgcttcaacaacatccgctatcacatcgtttctggaagctacggctctgggaaacgaagcaagtaa

SEQ ID NO: 335799 - DNA, 642 bp, Pseudomonas aeruginosa
atgagcgacctcttctatctccaggacagccgcagcaacgccgggagccgagcaacgttctggcgcgccggcggcggctacaccaccaacctcgacgaagccgagacgttcaccagcgcccatgccgttcggcagtacaagtgccgggaaaccgatctgccctggccggtcgactacgtgcgcgcccgggtcgagtacggcgtcgatcaccaggacctggaactgtcccggacgcaggcactcgccaccgccccagcggacgaccgcatctacgtcgcctacgacagggactgggacggcaactgcctggtctgggtacccgatgccgccggccggacatccaacctggccgccgcacggacctggccgctcgaccacgccggcatactcaccgcgcgcgggctagcgccctggccgaagtcctacatcgaccagcatgccaggcctgttgcggtggcggcctccctcaaccacaagcaggccctccggctcttcggcctgaagctacccaagccggagcaccagggccagcgccgcctgagctacagcaccaggctgaattgcagcggctgcggacgcttcatcacagagcatcagcgcttcgacgactgccccaactgcggggcaaggaatgcaccatga

SEQ ID NO: 335800 - DNA, 771 bp, Pseudomonas aeruginosa
atgtactctgctgaagaggagtttatttcagcaaagtgcaggagtacaatttctagaatatcttctgtttttcctgactttcatagggaaggatttaggaagatgatgcggcatatagttgatcgatttgatgagttaaatagtaagctacagtgcgaactaaaattttctggtgatgagtctcttaggactttattgaagaaagttttgccagatgatgacagctccctgcagtggagcgagctaggtcatggcttggcgattggcagcttgccagatgaactagagcacttatatagtcgtttaatctcaaagtatgatgcacctgcgagtaaggaacgtcgtacagagctagatatatggcgagattttgaacgccatcttgctccatttattccgtctgaagagtttgtctcaaaaaagatttccgtcctagatgatgaattagagtttaagcatgcgtggaagaatgggatatggcattgtattgaaccagtgtcatttgatctttctgatggggactacttgaaggacaaggctcacaagtggctcggtcaaatgactagtattaaaagcacgaaggaatcttttaaggtttatttgataattagtaagccgcaagaaaattctttaagctttgccttcgagaaagcagttagtatccttaataagattccggtagagaaagaaattttcctcgaagaggatgcttcagaattagcaaataagataattcataggtttgaacagcataatagagaggctcattag

SEQ ID NO: 335801 - DNA, 843 bp, Pseudomonas aeruginosa
atgcgtgtagaatcgcgcgagtttttcaagtcaaaatggcatcagggaaggcgcatgtttaggacggcctacgcggtacgcttcgatcggccagctaggaacggcaggaacaaggcgtgtttactggagtgcgcggatctcgcaggggtgcgcattgatgtgatcgctaagttcactgcttgtgagagtggccctacgggtctgattcgcgaagcgctagcagctttttttgcggctgatcttggcctgcatgtgcctgaaccgattttggtcgaagtcccccctaggttcagcgcaggggcttcctttcctgaggttgaccatatgatggccacgagcagtcgttacgcgttcggctcggcggccttgccggctggctatatgatcgttgctccagcattgcctgtgaagggaccgatgctgcagagagctgcggacattttcgccttcgacaccttcgtagcaaatggtgacaggcacccccgaaaccctaattgccttgtccgcggagaggatcttgccgtgatcgatcatgacttggcttttcttatggacgctatcttgttttggaagagtccctgggtgttggggggcggcgaaagcttggctgacccagaaaagcacattttttggcaccagattcgagcacaaaaattggatttcacacgactcggggaatgcctaaaggccataacggatgctcgtctggatgagtatgtggctgcattacctgatgactggaaacttgggaaccaagcagcgcagaacacggtccaatatattaaggacttacggcaaaacgcggatgatgcgttctctgagcttcagagggttttagcatga

SEQ ID NO: 335802 - DNA, 2355 bp, Pseudomonas aeruginosa
atgaccacagaccagatctctgcttcctctctcaccgatagcccacccttgatcccagcggggccttcccccaaagcagctgtagctatcgacaccccgccgctccggctcgcctgccttgaggtctgtaattttcgacgcctagccaagacccgacttgagctcgacgaggtcactaccattttggtaggtgccaacaacagcggcaaaacttcccttctcacagtcctccgcaacttcttgagcgagtcacccggattccgcgcgttcgacattagcctttcgcagtgggcgaagttgcgcgaggtatgccaccgctgggaggcacttgatgaggatcccacgacggactccaaggatgccgaatcatgggaagccgagtatcaggaactccaggcgtgcatgcccttcattgatctttggttcgacgctaaggagggggcgtacagccatgttgcgccgttcatcacctcgctgaagtggtcgggtggcgcagttggtgtacgggtacggctcgaacctgttgcagacgcgaacgaacttcgcaatctggcttggcgctaccgtgaggcgcgcgccccggtccgagagcttccgaaggatggccatgcctggccgatagatctgcttgactactggcttagacattctgcagatctgcgacgcatagcagcttaccgtcttgaccccgtgaagggccccttggccgataaatcgcgccgtgacttgcaggagctgccacttggatcacaaccgatcgagttacagcatctgcgcaagctcattcgtgtggattttgtaccggctcaacgaggactcggtgccgaagaggacgaaatgcggtcagagtccgcaagttctcggcccggattgttctcaagccaactcatgaagttcgctcggcaacacttgaacgtagccccatccggtcacggacatcgagaagacttggtcaaggccgttgctaatgcacaagcagacctcgacaaatctatctacaaggcgttaaagccagcgatggaggacgtggagattctgggttacccaggcctacatgaccctcaccagttccattttcgtacaagaatccagaccgcagaccttcttgctcacagcacggccgtacagtacctcctggacaaaactgctgttgatgagtccttgcctgaacactctattggcctcggctatcagaatctgcagtctctgagcttcatgctcgtgtcgttccgcgccgcacgcctcaatccgccgcagggcagtccggcggcagttcacctcgtgatggttgaagagcctgaggcccatttgcacgttcaggttcaacgaaatttttcgaagaacgcccacgagctcattcgtccaaaggagcacgtgcatagctacctccgcagtcagctgctgatcagcacgcactcgagccatctggctcatggagacaacttcacgcggctacggtacgtgaggcgggtggccagcacgggacttggcgcaaaacccagcacgcaggtcgttaacctgggcgatgcgttcggcgaagacgctccaaccaggacgttcgccgaacgctactttcaggtgcaacacaccgacctgcttttcgctgacgccgccatcttcgtggaaggaacagcagagagaatgctggtgccacttttcatcgagcgggatttccccaagcttgccaagaagtacgtttctttcctcgacatcggcggtagccacgctcaccgccttaaacccctggtggagcgattggggattccgacgatcgttatcactgacttggatccggttctgccaacccgaaccgataaggggcgcctagtccgggcagcggtgcacatcgccggccaagaaaagttagagtgtgggaatgacacattgacctcatggcatccgatgctggcggagtttcaagcttttggaaagccgacgcctgcccagctggtgtggacatccgacacgggcgctcaagtccgcttcgcgtggcagcttccggttgcggctgccagcgagcagtggcccagctcgtttgaggactctctagttctctccaacatcgattggttcaaagcgttggaagaggaggttgaccccatcaccgctgccaaagtaaagcaccgcggcaccttggcaaaggtgataggtcttgtgctcgactacccagaccacgccgagctgctcaaggaactccatgcgatgctccgcgggagcttcagtaaaggagatttcgcggcaaccctgttcgaacggctaaatgctggccaagacctgaaatgccccgcatacatcacagacgcgctcacctggctgagcgggcaactcaacgtcactgcgggagagaccccttga

SEQ ID NO: 335803 - DNA, 1953 bp, Pseudomonas aeruginosa
ttgagtaccgctctgccatcgtttggaaacgatcgcgacgctcatgtcgtcgaagatatctgcggctacatcacgacaaccccgcctcggagtttctttctcttcgctggcgcagggtccggaaagactcgcacgctaattgaggttttgcgtcgagtcactggagtgataaagcatgaagcaggggctcactatgcagaacgacttaggtctcgtggacagtcggtgcgtgttatcacctacaccaaaaacgcgaccgccgtcgtcaacggtcgtctcggcgaaaattacctgaccgaagtatcgaccatccattccttttgctgggaactcatccagggctttgatgatgacatccgggaagccttgcttgcgttcaatgccgaagatcttgtggctgccaaggcccatgcgatgggtaagaaaaggggcgagtccgacaccgaccggcggaagtatgcggagatcgaggcagaggcggaggaattacggaagactgatgaatttaggtatagcccggacagaaacaccttcggtccgggggcgctatcgcacactaacgttctggacgtgaccgcatggctaattgttaaacgcccaacgctgcagcgcatcctagaagaccgtcaccccctcatccttattgatgaatcccaggacacgatgaagggagtacttgatgcactatttgaactctccaaaaaccgtccggatcgcatcacattggggctcctcggggatcatcggcagcgaatctaccctgacggtcaccacgacttaccgtcacacgtgccggaagactgggcgcgccctgcattgcagatgaatcatcgtagccaaaagcgcattgttgaactcattaacaagatttggggctcggacatccagggccgtactcaacccaagacgggtgtcccccagcaccctaggacagagaaaaacggtggaaccgttcgaatctttgtcggcgatgctaagacggattccgccgagaagatccggagggaaacggaatgcgcgttggccatgtcggccgagactgccttatccgcctggcaagagcgtgggcgtggttacaaaaccctcgcccttgaacacaaacttgccgccaaacgaggcaatttttacgaggcataccgctcgattgagctgctggacaaggatgccgcggtgcccaagagcaatggcgagcggacggggcccactatggtgaggccgctcctcggcccaatggttgaacttgccgaatgtctgcagcctaatggttcagtgaacgagttcgccgtcatggatgtgttgcgtaggcacggcgcacttgcaaatgtcccggaatctcgcgccgagcgtcaggccgcgctggacaaagctcacgctgcagttatgaggttcgcaaccgccgccgccaagcccggaataaccgtgcgagaagtcttggaaccaatcatcgaagccagcctcttcgaagcggatagtcgcctagtcgaggcctacggtgattcgtcgccgcctcctccagagccaaagacaaggagcaaggaagcgaaggaggaccgacgtaagcgtggctggcacgccctcttcggcacgccctggcaagaaattgctcgttatcacgcctatcttgggggtgaaaccgaactcgcgacgcatcaagtcgttaaaggttctgagttcaagcatgtcatggtcatcatggatgatgaggaagctggcggcacgtggttctcctacgacaagctcttcggcgctgaggaattgagcccgactgatcttgagaacgttgacgggggaaaagagaccactattgatcggaccctaaggctactttatgtcacctgcagtcgagccgaggaaagcctcgctctggttctttgggcgaagaaccccgctacagcgctcgacgcaatcaaacagtccgaatggtttaccgagaacgagcttaccgctttgtag

SEQ ID NO: 335804 - DNA, 267 bp, Pseudomonas aeruginosa
atgacgtttcccgtgtatctggcgtacaaggattccggggttgagtggctgggtgaggtgccggagcattgggctgtgcatccactcaagcgggctattgaacgaatcgagtctggcaccagtgtcaatgcggcggattttccagccgagcctggttccttgggcgttctgaaaaccagttgtgtttacacaggaaaattcgactgggccgaaaacaagacggtggatgatgaagacctgagcagagtcagctggagtgtgtgctag

SEQ ID NO: 335805 - DNA, 732 bp, Pseudomonas aeruginosa
atgaaattccggcatgtgggtggaaaatgcaccggcggcaacagccagtacatcaccgaggagcagatcgacgaactggtgcgcctgtatggtcgcttcgaggaaaccgcgcagagcaagatcttccccgtcgaaaccttcggctaccggcgcatcaccgtcgagcgtccgctgcggctgaacttccagaccagcgccgagcgcatcgagaaagtgctggaagaaaaatccatcgagaagatggaggcaccggcccgccagcgcctgatcgaagccctgcaggcgatggacgaaagccagctgcatcgcaaccgcgagcagttcagcaaactgctgaaaaagaccctcagcgcccacgacgtatcgcccagcacgcccgagctgaaggccatcctcagcggcttaagcgagcgcgacccggaagcagatatctgcatggtcaaaggccagccggaagccggtgccggcctgcgcgacaacgagaacgtgccgctgggtgagtcggtctacgactacttcgagcgtgaagtgaaaccccatgtgccggatgcctggatcgacgaaagcaagacggatgcgcaggatggcgaagtcggcgtggtcggctttgagattccgtttaaccggcatttctatgtgttccaaccgccgcgcccgctggcagacatcgaccgcgacctgaaagcctgcaccgaccgcatcaaacagatgattgaggggctgtcggcatga

SEQ ID NO: 335806 - DNA, 192 bp, Pseudomonas aeruginosa
ttgctggatattgtcgatcagcgcatgcagaccggctcgctgatcatcaccagccagttccccacggagcactggcacagcatgttcagcgacgccacactggccgaggccatcctggatcgcatcgtccaccgctcgcaccgtatcgggctcaaaggcgagtccttgcgtaagcaggctgccaaggcgtga

SEQ ID NO: 335807 - DNA, 306 bp, Pseudomonas aeruginosa
atgcttttaccgggtgcagaagcgctgggaatgacgcaacgccaatgcctggatttgctggaaagcgccgaggatacactcgacttcctgacgtccagcctgacctacctgattcatgcggagagccagcaggcgcagccagatatggccctgatcgcagagtgggaagccttggatcaggagatattcgacgtgcagtattcgctgccgggctcggacgtgaaggtctatcagcaggtcattgagacttatggtcagcgcaaccgcgagctacgcccggttgttgatcggtacatggcgaagtag

SEQ ID NO: 335808 - DNA, 453 bp, Pseudomonas aeruginosa
atgaagtggatcacccgtgaacgcccgaagatcgaccggatcgcctgcccttggctgatcgcccgttttatcgatacagagccggagtttctctacgtgccgagtggcgatgtgctgcgcctggcgcaagaggaagacgcgacgccttacgacattcccggtgtcgaactcactcatgaaggcgagttgtgcagcttcgatgcgttcttgaagaagtaccaactggacaagccggccttgcagcaactggcgcagatagtgcgtggggccgatacctcaaggctcaatctcacgcctcagtcggcggggctgtatgccatttccctgggattgtcgaagaccttcagtgatgaccatgaaatgctgcgccatggcctcatcatgtacgacgccctgtatgcctggtgcaaggactgccagggcgaatcgcataactggccgccacagatgtga

SEQ ID NO: 335809 - DNA, 327 bp, Pseudomonas aeruginosa
atgagtcgaatctcgatttgcgaactggcggagtggcaggccgcagggcggacgttcagcctactggatgtacgccgcacgagcgttcggcttgccgatgccacagaaatccccggcgcacactggcgtgatcccgaagcagtcttcacctggaaggatcaggttccacgggacaggccagtgattctctattgcgccaaggggcatgaaatcagccagggtatcgccgccacactggaggccatgggcctggatgcgcgctacttgatcgatggttttgctggctggcacggcgctggccagcccacccggagcctatcccgatag

SEQ ID NO: 335810 - DNA, 1362 bp, Pseudomonas aeruginosa
gtgacgcaaacagccgcgcagaacgcggaaacactgacgcaaacaccgcaggtcagcttctggcaggccttcgctttctggctgaagctcggtttcatcagcttcggcggcccggccgggcagatctcgatcatgcaccaggagctggtggagcgccgacgctggatatctgaacgccgctttctgcatgctctgaactactgcatgctgctgcccggcccggaggcccaacaactggccacctatatcggctggttgatgcaccgcacctggggcggggtgattgccggggcgctattcgtactgccgtcactgtttatcctgattggcctgtcctggctgtacatcgcctacggcgacgtgccggtgattgcggggctgttctatgggatcaaacccgccgtgaccgccatcgtggtacaggctgctcaccgcatcggctcgcgggcgctgaagaacaactggttgtgggcgatagctgccgcttcgtttgtggccatcttcgctctcaaactaccgttcccgctgatcgtgctgggtgccgccgtgatcggctatttcggcgggcgtttcgcccctgacaagttcagcatcggcggcgggcatggtgctagcaagcaatccttcggcccggcgctgatcgatgacgacaccccgacaccggaacatgcgcgctttcgctggccgcgcctgctcttgctggcagtcataggcgcggcgctgtgggcattacccatgggcctgctgaccgccctgttcggctgggaaggcacgttgacccagatgggctggttcttcaccaaggccgcgttgctgaccttcggcggtgcctatgcggtgctgccctatgtctaccagggcgcagtcggccactacggctggctgaccccgacgcagatgattgatggcctggccttgggcgagaccacgccggggccgctaatcatggttgtggcctttgtcggcttcgtcggcggctatgtgcagcaggtattcggtgccgatcaggccttcctggccggagccgtggccgccagcctggttacctggttcacattcttgccgtccttcctgttcattctcgcaggcggcccgttggtggagtcgacccacaacgaactgaagttcaccgcaccactgacggcaatcactgccgccgtggtcggggtgatcctcaacctggcactgttcttcggttaccacgtgctctggccgcaaggcttcagcggccatttcgattggccatcagcactgatcgcgctggcagccgccgttgccctgttccgcttcaagcgtggcgtaatccaggtgctggcggcctgtgcgctggtaggtctggctgtgcacctgctgcaaaactga

SEQ ID NO: 335811 - DNA, 939 bp, Pseudomonas aeruginosa
atgaagctgctagcactcatcctttccttgcccaccgagaatgccactgctcggcaacgggcttggcgctcgttgaaagcctccggggcagctgtgctgcgtgacggtgtctatctgatgcctgagcgcgaaggctgtcgcgccaccctggatggtttggcctcagatgtacgggacgctggcggggcagcccatgtgctgcgcgtcgaagagcccgagggggcgaactttaccgacctgtttgatcgcggcgaagactatgcggccgtcttgggtgaagtcgtacaagcgcggaatgtgctgactgccgataccgtgcaggacacgctcaagcaggtgcgcaagctccgcaaagctttcgccagtctggtcgaaatcgatttttttcctggcgaggcacaacagcaaacggataaagccttgcaggagttggagctagcctgcgcccgcgccctgtccccggatgagccgcacgccatggccggtgtcatcgcgcagctgcattcatccgactaccaggggcgcacctgggcgacacgacagcggccgtgggtggatcgcttggccagcgcctggctgatccgccgctttatcgatccgcaggccaggattctgtggctggccagtcctggggattgtccggccgatgcgttgggcttcgatttcgacggcgcgatcttcagtcatgtcggcagtcgcgtcaccttcgaggtgctggcggcaagtttcggcctggagcaacccgctatcgctcggctgggcctgcttgtgcattacctcgacgtgggcggcgtacagccgcccgaggccacaggcatcgagagcgtgctggccggactgcgcgaaaccctgacccaagacgatcaattactgactgccgcttccgccatttttgacggtttgctggccagtttcgataaaggagtaccctcgacgtga

SEQ ID NO: 335812 - DNA, 174 bp, Pseudomonas aeruginosa
atgactgccctagaaccgttcttcctggccgaatttctcggcactgccacttggttgtggctcgtttttatcagcatagtgattggcctgttggtcttcgacctaggggtgcttcaccgcgagcatcgcgaaattggcattcgtgaaagttcattggcaagattccatcggtaa

SEQ ID NO: 335813 - DNA, 309 bp, Pseudomonas aeruginosa
atgaaaaaaacgctgcaattgacagctatggggctgttactggtgggcttggccggctgcgacgcagccgagcaatcggcgcagaaactggccgagaaggctgagcaggcaatgcaagacgtagcccgcgaaacggtcgatgggaccctgcaacaactcaataagcaactgaatgaagtacagcagtcaaccaatgagtggctaggcaagccgccgtccaaggaaacgcaggagggcgagttgcaggaaggtctgcctgaaactaatgagtcaggagagcctatcgacaaaacggcagttgaaacctag

SEQ ID NO: 335814 - DNA, 540 bp, Pseudomonas aeruginosa
atggaagtgctgaccgaacagggttttgccgccaccggcatagatgccgtcctgaagcgcgtgcgcgtaccaaagggttcgttctatcactacttcgacagtaaggaagccttcgtccaagaggtgctgcagcgctatgccgcttatttcgcgcgcaaactggatcgctggctgctggacgatcaggtaccgcccctgcaacgcctgagcaatttcgtcgatgatgccaaagccggcatggccaagcatgagtttcgccgaggttgtctggtcggcaaccttggtcaggagatcacggcactacccgccagttttcgccaagcactggaggatgtcctcctcgactggcaagaccggctggccaattgcctggttcaggcagtcaaccacgggcagctggagcccgacagcgattgcgatgcgcttgccgcttatttctggattggctgggaaggcgcagtactacgcgccaagctggcgcagaacgcccaaccactagacacctttgccaagggctttctggccggtgccgcgaggtag

SEQ ID NO: 335815 - DNA, 987 bp, Pseudomonas aeruginosa
atgttccacgcattactcatcgagaaaaacgacgacaactatcagacgcggctgaccgagcttgatgactcgcagctgcctgagggcgacgttaccgtgcgcgtcgagtacagcacgctcaactacaaggatggtctcgccatcagcggacgtagtccggtggtacggcggttccccatggttcctggcattgacctggcaggcgttgtcgaagccagcgatcatgctcgttacaaggttggcgaccgggtgttactcaatggttggggcgttggtgagacgcactgggggggccttgctcaaaaagccaggcttaaaggtgactggctgattccccagcccgctcaactgagcgcacggcaggccatggcaatcggtactgccggttataccgccatgctgagcctgatcgcactggagcgtcacggcttgtcaccagagagtggtgaagtgctggtcacaggtgccaatggtggggttggtagctttgccatcgcactgctagccaagcgcggttattcggtaaccgcttcaaccggtcgtccggccgaagctgactatctgaagcacctgggtgctagcacaatcatcgatcgagccgagctgggtagcccagggcgccccctggcagcagagcgctgggcagcagtaatcgactcggtgggtagctatactctggccaatgcctgcgccagcacacgtgcagatggcgccgttgcggcatgcggcctggcccagggcatggatttcccagccactgtcgccccctttatcctgcgcggggtcagcttgctgggaatcaacagtgtgacccgcccctatgaggaacgggtaacggcttggcagcgcctgtcctcagaattgggcttggcgctactggatgaaatgactcgggagatcgcgctcagcgaggccattgacatggcccatgatctgctcaatggcaaagtccgagggcgcgttgtggttgatgtcaaccgttactga

SEQ ID NO: 335816 - DNA, 1866 bp, Pseudomonas aeruginosa
atgccagcctcttctttcggtgagtcctcggcgcatatcagacgcagacgcgttgcccactatctacgcacggagtctggcgctgcggtgctgctggtgatcgtcacggttgtggcgctggcgtgggcgaactcgccgctatccgatgcctatttcgggttgtggcacctggacgtcgggtttgacttcgggccgctgggcctgcacatggacctgcatcactgggtcaacgacggcctgatggtcgtcttcttcttcctgatcggcctggaggtgcgtcaggagttcgcccacgggtcgctcagggatcgcagccgtgccggtctcgccctgatcgcgggggtcgcgggtgttgtgcttcccgctctggtgtacgtcctgctcgtggggctggccggagctcagggcctgcacgggtggggtgcggtggtcggcaccgatacggcgttcatgctgggcaccctggcgatcgtcggtccgcggctgtccggtcaattgcgtgtgttcctgctcaccctgaccgtggtcgatgacttcctcgccgtgtccatcatcggcatcgtctatagcgaggagatccgggtcgtcccgttgttgatagccctcgccagtctcgttgcgctgtggtggctgggacgcacccgccagtggcgggcaatgccgtatgtgctgatcgtgatcgtgctgtggctcgcaaccctgtattccggcatccatgcctctctcgccgggatggccgcggggctgctgatccccgcctatgcgacgcaacgtcacggggtcgttgcggcaagacaactgttccgcgacttctggcagtcgcctagtgccgcatcggcccgcgcggtggactgcgggctgtcccggggtatctcggtgaacgagcggttgcacgagttcctgcggctgccgacggcgctgctgatcgtgccgatcttcgccttggcgaacgccggggtggacgtgcgtggcgggctgctcgccgaggcctttggctcgccagtcacgtggggcgtcattgcagggctcgtgctcggcaagctcttgggcatcgggctcaccacgctcgtcgccgtccgtctcggcctgggccggctgcccgagggcgtcggaatggggagcgtgttcggtggtgcggcgctgtccgggatcggtttcaccgtgtcgctgctcatcatcgggctcgcgttcggtacgacctctgacctgggccgccaggcgacggtcggggtgctcgtgtcgatggtactcgccacgttgctggggtggctcatattcaaggtcgccgctctcaagtggggggaggagactgccgatttgccgatggtacttgagccaccagtcgatccggagctcgatcacatccgcggtccggaggacgcccagctcacactcgtcgagtacgtggacttcgagtgcgcgtactgtgcgcacgccaccggttcgtgggacgatcttcgcgcccacttcggtgacgacctgcggtatgtggtgcgccatctgccgcaccacccgcacgggccgattgccgcgagggcgtccgaggcagcggcgaaccaggggatgttctggccgtggctggacttcgtgttcacccgtcagcacgcgctggagcgcgaggatctgatcggctacgccgtagagcttgggctcgacgtcgatcggttcatcgcggatctcgacagccctgcggtgatcgagcgtgtcgagcgcgacctcgccagtgcggtcgccagcggtgcgcatgtcacgccgacgttcttcgtcgagggtcgccgcctgcgcggcagctacgacgcccgcactgtcaccgcagcgctcgaagccagtcgccgcggcccccggactcaggaagtcccgtcctga

SEQ ID NO: 335817 - DNA, 720 bp, Pseudomonas aeruginosa
atgatcctgcgcctgcacgaggtcgcccgcagccaaggcgccggtcgccagcgctaccgcctgcgggtgccggcgctggaattgcgcgcgggtcgccagctggccatcgtcggccccagcggctgcggcaagagcaccctgctcgacctgctggcgctggccctggcgccggacccgggcgggcgcttcgaattcctcgccggggaacgcccgcaggacatcgccgcgctctggcgcgacggccgccaggaccgcttggcggcgctgcgccggcagcactgcggctacgtgctgcaaagcggcgggttgctcgagttcctcgatgtgcggcgcaacatcggactgccctgcgcgttgctcggcgccccatccgccgagcgcgtgcaggcgctggccgagcggctggaaatcggcgaccagctggacaagaaaccggcggcgctgtcggtcggccagcgccagcgggtcgccatcgcccgcgccctggcgcatgcgccgcgcctgttgctggccgacgagccgaccgcggcgctcgacccgctgaacgccgaacgggtgatgcgcctgctggtggagcaggcccgcgagcgcggcgcctgcaccgtggtcgccacccacgacgagcgcctggctcgcgccgccggcctggaagtcctggccatccgctggcaacgcgaggccgacgacagcgtcggcgcctgcctcgaggaagttggctga

SEQ ID NO: 335818 - DNA, 2601 bp, Pseudomonas aeruginosa; identical to SEQ ID NO: 330330

SEQ ID NO: 335819 - DNA, 231 bp, Pseudomonas aeruginosa
atgaaaaacctgaaaaaactgttcgttcgtggtggttccgccgttgcggtaggcgctgccctggtcgtctcgcaatccgcctcggccgctggctgggattacagcggtctgacctccgatattgatttctcgacaatcgcgaacggcgtgctggccgtcgctgcgctgctggcctctgtgtatgccggcattaaaggcgctcaggtggtcctgggcttcctgcggcgctga

SEQ ID NO: 335820 - DNA, 228 bp, Pseudomonas aeruginosa
atgatttccgccctgtcctgcgatggctccatctcgattgcgccggatggggcgcccctttgttcgggcatgtgggtcttgacccaggtgccggagcagttcgacccgtcgatgttggacacccaggcgctcgcccaggcgttctcggtcgggttcggtcttgtcgcgacggtccttgtcggcgccctgggcgtcaaggccgtactcgacttcattaaaagagcttaa

SEQ ID NO: 335821 - DNA, 261 bp, Pseudomonas aeruginosa
atgcaccgcgcccacgtcacctgcggttggtggcctgagatgaaagcacctcttcgttttctcttgggctgggttgtcttcatcgtcttgttcgtgatgttgacgcccattgttgccgccattttcgagttctgtgccgcgtttcctgtgctggctatggtgactgctgtcgtgtccctggtggttttcctggcgctgttcttcgcgttcttccggcgtttcgtgtgttggctcgatgagcctaggaaggctcgctcatga

SEQ ID NO: 335822 - DNA, 192 bp, Pseudomonas aeruginosa
atgtcaaagccctaccgggttcgagataagttcgtcgaggaagtgaaggagcgccgcgtcaaaatgatcatcgagacaaaggacgacgtccgggagtccgaccttgtgaacgccacgctgtggaaatacctgagcaagatcacaacgaaagacgtccttgaattcagagaagagttcggcgggaaggaatag

SEQ ID NO: 335823 - DNA, 351 bp, Pseudomonas aeruginosa
atggccaaggatacccgcgatacccagaccctcgacgccttcccggccaagccatccaggggccggcctcgcaaggctgacgcgctctccaatgctgagcggcagcgcctctaccgtcagcggcaggcgggcaaggcaccccaggtggacgcggatgccctggtccgtctgcagaacgaattcgaccggcacgttgatgatgcgcgcgccctggtcgcccatcttcgaaagaccattgcgcagatggagcttgaggtggatctgtgccgccaagagcgatccgatgccatgcgcgtcaacagcatttaccgcgagcgcctggagcttgctggtctccctacagactactag

SEQ ID NO: 335824 - DNA, 231 bp, Pseudomonas aeruginosa
atgaaacgagcaaccgttgtaaccgaactgccgaccagcaccagccgggacatggacaagttcgttgtccgactgccggacggtctgagggccgaggtggaagccgaagccaagcgagactcgcgcagcatgaactccttgatcgtcgttgccctgcgcgagtacctgcatggtcagcgccggaagcatgcgctcctcgacgccttgaccgctgccgccggaggtcgctga

SEQ ID NO: 335825 - DNA, 372 bp, Pseudomonas aeruginosa
gtggcggtttccgtaattgcaaagttcatcgcagatgagtggttcaagatcatggcgatcctgtgtttcctgctgctggcggcctcgctcactctcgacctcaaggtcgacaacggcatcgttgggcttttcgctttgtccggaatgatctgggggatcggcgagatggcttgccgccccttcgtgtccaggatggctccgcacccataccaatttggctcggtcgtcatcagtggcaggcctcgccggatgaacaagactggcttcgttctgttcgtgctatcgatcatcgtggcgatccttggctgcctgagggcatggccgcttgtgttgcccatgattgaagtagtccttcacccgaacaccctgtag

SEQ ID NO: 335826 - DNA, 234 bp, Pseudomonas aeruginosa
atgactaggcgcattggagcgaaagcactcggtgaccagctctacagctatatcggcgccatccaggacttggctaccgcagttcgcgaagacttggctttccaaggttgcgagccgggcccgcgcctgaccgccgaccaggtggatgcgatccatctgtcgattatcaccatcgccaggttggctggcgaagacttgatccaactgctgaccgagctagaggtgccggcatga

SEQ ID NO: 335827 - DNA, 585 bp, Pseudomonas aeruginosa; identical to SEQ ID NO: 324382

SEQ ID NO: 335828 - DNA, 1176 bp, Pseudomonas aeruginosa
atgggcctggacaagaacatcgccagggtcgagaagctcgacgagcatacggtgaagttcaccctcaacgaggtcgacgcggccttcatccagaacctggcgatgcccttcccatcgatccagtccgccgaatacgccgcgcaactgctcaagcagggcaaggccagcgacatcaaccagaagccgatcggcaccggcccgttcgtgttcagccgctaccagaaggatgcgcagatccgcttcaagggcaacaaggactactggaaacccgaagacgtgaagatcgacaacctgatcttctcgatcaacaccgacgccgcggtgcgcgcgcagaagctcaaggccggcgagtgccagatcaccctcaacccgcgccccgccgacctcgacgcgctgaagaaggacccgaacctgaacctgccgtcgcaggccggcttcaacctcggctacatcgcctacaacgtcacccacaagccgttcgaccagctcgaagtacgccaggcgctggacatggcggtgaacaagcaggccatcatcgacgccgtctaccagggcgccggccagttggcgagcaacggcatgccaccgacccagtggtcctacgacgagaccatcaaggacgcgccctacgatccggccaaggccagggagctgctgaagaaggccggcgtcgccgaaggcaccgagatcaccctgtgggccatgccggtacaacgcccctacaaccccaacgccaagctgatggcggaaatgctgcagaacgattgggcgaagatcggtatcaaggcgaagatcgtcacctacgaatggggcgaatacatcaagcgcgccaagggcggcgagcatgacgccatgctgatcggctggagcggcgacaacggcgacccggacaactggctcggcaccctctacggctgcgacgcggtggacggcaacaacttctccaaatggtgcgacgccggctacgacaagctggtcaaggatgccaagcgcaccaccgaccagggcaagcgcaccgagctgtacaagcaggcccagcacatcctcaaggaacaggtgccgatcaccccgatcgcccactccaccgtgtaccagccgatgcgcaagacggtacacgacttcaggatcagtcccttcggcctgaactcgttctacgaggtcagcgtcggcaagtag

SEQ ID NO: 335829 - DNA, 270 bp, Pseudomonas aeruginosa
atgaagaacgttacttcgatcgaccgcaaacacgcagaagacaagtttgttgtacgcatgccgcaagggctccgcgatcaactcaagcaaaaagccgcgcataaccaccgctcggccaacagcgagatcgtctaccggctggagcgcagcaacgcgctcgaagaagaactcgctcgagcgaaccgaatggtcgacgagctcttcgccaagaaccagcgtctgcaggcagagctggctgcggcgaacacgcctcaggtggcggaggcatga

SEQ ID NO: 335830 - DNA, 1728 bp, Pseudomonas aeruginosa
atggccaagatcaacccgcaagatctgaaagaccggctacttgcccctggtttcaccgcgccgcccgttctggaacagttgtcggacccgatcagcgacacgcccatggtgctgacactcgaccaggtcctcccctggcacgacaacccccggaccactcgaaacccgaaatacgatgagttgaaagaatcgatccggcatcgaggcctcgatacgccgccaccagtgactcgacgccctggggaagacaaataccgcattcgcaacggcggaaacactcgcctggaaattctcaacgagctctacaaagaaaccggcgacgaacgttacttccgcttcaactgcctgttcaggccctgggacaagcagcgcggcgaaatcatcgcgctgactggtcacctggctgagaacgatctgaagggtgacctcaagttcatcgagcgagccgtgggcattcagaaagcgaaagcctggtatgaggaggagaaaggcgaaccggtcggcatccgcgagctgtcacggaagctcaccgatgacggctatcctgtttcacattcacacatcagcaagatgctggatgccgttgagatactgctgccagccatccctgtgatgctgtattcagggctcggtaaaccgcaaatcgaaaaactcctgtcactcagaaagtcggcatcctcctgctgggcacgtctatacgccggtgaagggattgactttgaaatgctgttccaggacacgctggcaatcttcgacagtagccctgacgagttcatattcgaccgcttccaggacgagctcatcgaccagatgaagcggcccctgggcctgcgttatgaccagatcctgctcgagatcaccaacggccagcaggaacagcgccggggcactctggtcgatctgcccgcacctgccgcaccacctgaaatcccaccagtagggcaggaaagtcctgccgcgtcgactactggacaagcacaatcacagagccccgctgccggcctccaaacgtccaagaccaatagcctcccgggtaatccctctaccccgccaactccgccgctacctgtacaacagcagcaactgaccgatgaggagcgtgcagcgctcttggcaggccatatcgtgagtccggtatcgaccaagatccagcagactcgccaacgtctggccgctctcgagggtgaacatctacctgtcttcgatgaaacagccctgcaggcaatcccagtgcaagtcggcggtctgcacccgatcaccgacctctggtacatcgagcggtcgatcgatacccccgagatcctgcgacagcacatcgctgacctggctgaagagatcgctctgcacgtcggcgcccctggcgaaatcgtcaggatccagggcggtgtgggttacacgtatcgcgagcccaatgaagaccctgagattactgattcagcgctgcacctcatgacgctgcttcaagcgctcagcggccaggtccaagtcgtcctgaactcacacgaccagcagacctgccgcgatgcactgggtgaattccagttctcagctggcctcgctcagttgctgctgggccaacccaccacaagcgatcagccatccaaccaggcaggccgtctcaatgacgaagccctggtgaaactgttccggatcattcgtcttgcccgacgcctggttgaccttgagctgccgccggccaccttcgagcaagcagctaccgaccagtga

SEQ ID NO: 335831 - DNA, 756 bp, Pseudomonas aeruginosa
atgtcgaagtcgttgatcaatgaagcggtcctgactcaagtgctcaaccacctgcgcaacggccagctcaggcgttgtgccgagatggggctgcggccggagattctggctcagctccaacagcctgccgtcatgagcatcctgaccaataccccggtttcttgggtagacgtcagagtgaacatcgacgtcatggagaaaatcctggccacagccgagcgcagcgcgcaggaagagctgcagatcgaacgcgcactgaagctgggagccaccacaacgatgattcagagctttttcggtctgtcgccggaggacaccgccaccaagcgcttgatcctggagatccacccgcgccgcggtcgctggcggcaacttgacgaacagaccgaacgccagatttggttccgctgggagcacctgatgcaggaaaaccaggtccgcctcgaggacagcatggagttgctggacatcgcgatgatcctcaccgaggaagtcaacgccggagtcgaacaagacagtccagagttcatcagcctcgccatcgtttggtctctcatccagagctggttgaaagacagcctctaccaaccaaacaggaaagagcaggccaagcccgccaccctttacctggccaacgtcagcgctcacctcccctcgcctacggctcacccgccacagagcccccgcttggagattgagtctgcgcagcagcaactcctcaacctggttcagtccgaaggcgatacgacaccatga

SEQ ID NO: 335832 - DNA, 975 bp, Pseudomonas aeruginosa
atgacccatgccctgtttaaacagatcgacctgaccgccaagctcggccaggacggtagctcgctccaggccatgaacgcgctacgcgtcatccgggaaacggtagcgaaacacctggctgacaccgagggtgcaggagagattccgctcgagcgagccctcctggcgctccgcaccatcgccgagctcccctgccccgagcaggacgacctgtcggcagcgaacatgcgacagatcgcactggcggccttgggtggcgctggagcgagctcagagccgggaaaccctggcgccgaacctgtttccgggccgggtaatgccggcgggcgcacctcacccagcactacgcagggatcgggttacagctcccttgccgagagcctcaatacgttggagcgctggcttgatcgcgtggcaatcgaggacggctacgtcggcgtgccagtgattgaagccgtcgaggtagcggtcaatgagctgaggcgcctgcgccagctcgagcgcatctgcgaagggctgccgcaagacgccatcgatggtggctggaccgtgcaaggcattcgcggctatgccaagcgcttggaggatcaactgaaggccgccctggcgcaagtcgaagcactgcgagcggagcttcaatctcagcgagagcgcaacactgagctgatcttcaagctcggtagcgcaacgaacggctgggggcgctgcgaaaaagagcgagacgctgccctggccagggtcgctgaattcaaagcccaggctcagcacagcgtgccggacgggtggaagctggttccggtagagccgaccccggaaatgctggatgcacgccgcgactgcgaggatggaatggacgggtatctcgttgaggataccgagtactacttcccggatcggggtgcggttcgcgccttcctggcgcgtgtgtatcagggcctcattgccgctgcgccagcgcctggaggtgagcgatga

SEQ ID NO: 335833 - DNA, 336 bp, Pseudomonas aeruginosa
atgaagcaagcactcatcggcaccgcgatcagcctgctgctcagcgcgtgcctgtacttcggtcaggggtcgcttcaccagttcgccttctatgtggcggcggccatgaacgttctctgctggctgctgatattcgccggcggcatcaaggagcaaggagccgcgaacctgctcgcccgcccttggctctccatccctaccggcgctctgcacgtggcggccctggccctcacagatcaccctgcactcgcggcttcgagcctgctggtgcaaatggcttgctacgccctcgcctaccaggcagtgcgcagcgccaagcaagggggtgacctatga

SEQ ID NO: 335834 - DNA, 2109 bp, Pseudomonas aeruginosa
gtgcccatcgcttcacgtgctcccgcctccctgaccctgctggccctgctgttcggcggcaagctcgcggccgccgacctgttcaacgatcccagcggcgttcccgaagtattgaccgcgacacgcctgaaacaatccccggcggaagttcccggcagcatcagcgtgctcgaccgcgagctgatcgtcgccagcggcgcccgcgacattcccgaactgatgcgcctggtcccgggcatgatggtcggctacctgtccggcaaccagcccacggtcaactaccacggcaccagcatgtcgggggcgcggcgcctgcaggtgctgatcgacggccgctcggtgtaccgcccgggccttgccagcgtcgactggagcgacctgccgctggccctcgaggatgtcgagcggatcgaagtgttccgtgggccgaataccgtcagctacggcgccaacgcattgatgggggtgatcaacatcatcacccgcgcccccggcgagtcgcccggcacgcgcctgaagtacacggcgggccagcgcggcatccgcgactggtacgccagccagagcatcgccctggaagacagcgacttccgcctgtcgctgtccggccaggaagacgacggcttcgaccgcgaccacgacggtcacgccctgcgcgacggccgccggctcagccgcttcaacctcaacgccagccacagcctggcgccgaaccagagcctggagtggcaactggcggccaaggaaggctcgaaccagcacccctacgcctaccgctcgccgtttccccaggttcccgacgacatcgacaactccgatacgctcgcccacgactatgccggttcgctgcgctggaatgtcgacctcgacccgcgccacagcttctatatacaaggctacgcacagcactgggagcgccggcaggaatggaacgcctgcgaggcggccattgccttcagcccgcaactggcgcagctctgggaactgaacccggactacctgcgcaggttcgccgacgatccgacccggctgccgcccggcagcgcccaggagttgcaactggcgacccaggtcctcgaccagctacgcaacggcggactgcgcccggtctgcggacgggtcgaccgcaacatccgggaaagccgctacgacctggagatgcaggacaccctcagcctgggcgacaacctgcgcctgctgaacggcctgagctaccgctacgaccaggcaaactccgagaccttctacggcggcagggtcagcagccagatctggcggctgttcagccaattggagtggcatgccggcgaacactggctgctgcagggcggggggatgctcgaagacgtcgagggctccggcagttcgttcagcccgcggctggcggtgaactacctgttcaacccccagcacagcctgcgcgcggtctattcggaggcagtgcggtcaccgggcatgtacgaaaacgacgtcgactggcgctaccgggtccgccacctgacaccggcgccctatgggcagagcgaagcctactacttcgccagcgcccacggccccggcgacctgggcaaggaacacacccgttcgcgcgagatcggctacaacggttttttccgcgagaccgggctggccgtggatgtacgcctgttccacgaggaaatcaccggactgatcagcgatccgctcagcgtcgtcgacttcagtcccgacaacggcgatcgcatccgcttctccggcgcggaaggccagctcgactggcgcctgggcctacgcgaccgcctgcgcgccacctacgcctatctcgactacgacgccaccagtcgctacgaccggcgcctgaccgcccgccacggcggctcggccggctggatgcacgactggggccaaggctggtccagcgccctcttctattatggcgacgactcgctcaatggacatcgtttcgaacgcgtcgacctgcgcctggccaagcgcattcccctgggcaaggccgccctggaactggccggcgtgctccagcagcgtctcgacgacgaaccgctgacgtttcccgacaaccgctacgacagccgccacctgctctacttcagcgccgaggtgacgttctag

SEQ ID NO: 335835 - DNA, 1563 bp, Pseudomonas aeruginosa
atgagccagcgccacggctgggacatccgtacccgcatgctggcgatcagcctgggcccggcgctgctgctgaccctgttgctcaccgcctacttcacctactcgcgcctgcaggacctgcgccaggaactgacccataccggccagttgatcgccgaccagttggcgccggccgccgaatacggcgtgatcgccggcaacacgcccgtgctgcagaagctgctgcaggccaccctcgacaccccgcatgtgcgcttcatcgaggtacgcgaccgcaacgacaatatcctggtgtacgtcgaacagttgcccggcgcgttgcagaacgccgcgccgatcgacatcttccactccaccatccagcgccagcgtatcgccctggccagcgacccgctgctggatggcgccagcgaaggcgacggccagtccggcgaggactacctcggccgggtggtggtcggcatgtccaacgacgccttcagccagcggcaacaggaaatcctcctgaaggccgccctgctggccgccttcgccctgatcctcaccttcctcgtcgcgcgccgcctggcgcagcgcctgtcggcgccgatcagcaccatgggccaggcggtcgaggcgatccagagcggcgactacaagaccagcctgccgatcctcgacgacggcgagatcggcgacctggcccgtcacatcaacaatctcgccagcgggctggaccgcgcgagccgggaacaggaacaggcgatcagccaattgatcagcgcccgcgaggaagcggagcaggcgaaccgggcgaagtccgacttcctggcgatgatgagccacgagcttcgcaccccgatgaatggcgtgctgggcatgctgcaactgctggaaaccaccgagcagacccgcgaacaggccgagtacacggcgctggccaccgagtccaccgaacacctgctgaaggtcatcaacgacattctcgatttctcaaggatcgaacgcggcgcgctggaactggagtgcattcccttcaacctgctggaactggtgcaaggctccgccctggtgttccagcacagcgcccagcaacgcggactggcgctggaattgcagatccaggccggcctggagaatatcgaggtctgcggcgatccgacgcggatccgacagatcctggtgaatctgctgggtaatgcgctgaaattcaccgaggaaggcgccatccatctcagcctggagtggcaggcgctcgatcacgacgtactgtggctgacctgcgcggtgcacgacagcggcatcggcatctcgccggaacgcctggaacatatgttcgacgccttccagcaggcggattcgtcgatttcccgacgctacggcggcaccgggctcggcctggcgatcgccaggaccctggcggaacggatgggcggcaccctgcaggcagagagcaaggaaggctcgggatcgaccttcaccctggagattccgctgcccttccagcagtcgccggcgcaccggcagcagccgccccggtcgccgccggtcaggaaatcctcctggtcgaggacaatccggtga

SEQ ID NO: 335836 - DNA, 1170 bp, Pseudomonas aeruginosa
atgagcaatacccgtcgccacgccgcatgcctggccttcggcctgtgcctgatcaccttggcggtgaacctccaggcgccgctgtacaccgcctacgcggagctttccggctacggcgcggcagctaccgccagcgctttctccggctatgtgctcggcgtactgccggtgctgctggtactcggcgggttgtccgatcggatcgggcgcaagccgccgatcgtcgtcgcgctgctgctgtcgatggtggccaccctggtgatggcgctctggccgcgcctggaggcgctcggcgtggcgcgcctgttgctcggcgtcggcacggctctggcatcggccaccgggacggcctacatgagcgaactgatcgcgggcggggattcccgcacctcggccaactgggtgaccgccagcacctcgctcggcttcggcctcggcgcggcactgaccagtctgttcctgctgttccgggagagcctggtgcccggcagcttctgggtccagttgggactggcctgcgtggccctggcggcggtggcgggcctgccggacgaggcgccgcgcgggcgcgatacgccgatgctgcggctgccgttctttcccgccggcagcctgccgtacggtctctcgatcctgctggcatgggccactgtgggtctggtcatcgcggtcctgccttcgctgctggcggcccacgggctggcgcgctggtcgggcttctcgaccttcaccgtgatcagctgcggcctgctgttccagccgctggcgcggcggatggcgccggcctcggcgacctgcctggggctggtgatcctgccgccgagctatgccctgctggcctggggcgcgatccacggctcattggctgcggtgctgttcggtgcgctgggcgcgagcagttcctgctacggcttcacctacctgggcgggctgtcggcggtgaatgtcctggccggtgcggaaaagccgcgggccagcgcgggctacttcctgttggcctacctcggcttcagcctgccggtgatcttcaccgggttgatcgcggatcgcttcggtgcgtcgacggcgttgctgcttttcggcgtgtcgctgacgttggctgcggttgcggtggcgttttccatcttgcgcggggtcgggcgcttcaaggccagcgcttcgcgtgcctag

SEQ ID NO: 335837 - DNA, 294 bp, Pseudomonas aeruginosa
atgctgctgaccattcgcgacgttcccgaagacctggtgcgccaggccaagcttgctaccggcaagggcactggcagtcaggcgttcattgccggcatcgagcttatgatccgtcagcgtgatcggatcgaggcgatggaagaggaggttcggtcgctgcgcgagaccctcggcgtgttccagggcgtgcttgcagatgcccatgccgccgctgtgcaactggctgagattgccgggcaacgcgatatgctggtgtccgacaacccgctgcggcctgggtatcgtcgccgctag

SEQ ID NO: 335838 - DNA, 372 bp, Pseudomonas aeruginosa
atgcacgatgagtcagcgatgagtgacgtaaccatggcgataggcgagaacatacggaaagccagagagcgcaagggcctgaggcaagagcaagtcgctgaaatggcaggcattcccctgtctacatacaagaactatgagcatggcaaacagccaccacccggcgaccgaataggagccatcgcacgaaccctcggggtatcagctgatgaacttgtgttcgaagagagcgagcgccaagttgctgacgagctacgagccctattcaagaggttcgaagtgcttccaccagacctgaaaacccaagccaaagtggcaattcggggcctgctaatgagctatgaagtcgaggccctcaagcacgaggggtag

SEQ ID NO: 335839 - DNA, 1020 bp, Pseudomonas aeruginosa
atgatcgaactgcaccacgcgcctttgagcagtggggcggtggtctgcatcgaggctgacggcacggttgcctgggaaactccgcgcaagatgctggtccgtggctcccatgactcgacaatccatattcggagcgtaggcggggacgggcagggcaacgcgactcatctgtacatcgacggcaacccaagcaagtggttgcaaggacataaccttgttggttcctgtgatctcgttgccctcgtctgggatgcttttcaacgcctctgcgccctggtgggccttgagccgaatgacattgagcgtcagaaggtcagggcagggcagtaccgcgtcactcgcgtcgattacaaccgaatgttcgaacttccaagccgggccgatgttcgagcctggctgcgtgcgggcgagttcaaatgtaagtctcgtcatggtcgcccagtaaacaatcgcgggactctaactttcggaaaaggctcaagtcattggtcgattgtttgttattgcaaggccgatgaaataacttccggtggttcgcataagttgccagaagagttccaccagtaccctgaaatctatcagtggatagataacaagctccgcgttgaacttcggttgcgctcaaagaaactcaaggcactgaaccttgaatatgcctctcaactcacccccacggttctttggaagctctaccgtgatttcatcggggaactggatatgtcagagcaaatagaacttaattcagagcaaatgatgaaaatcccgagcaaggttctcggcacttacatgctctggaagcaagggcatgacatttcaaacttggtagcgaaggctacttattatcgccatcgtcaagttcttcttgggtatggcatagatatcaatatccgctgtgatcgccgtgacgatagcaatgttgtgccgatgatacgggttcttgaggctaagcctgcggccattccgaacttcttctttgaaagggggctgattcataaatcggcccgtcaggtggctgtatga

SEQ ID NO: 335840 - DNA, 231 bp, Pseudomonas aeruginosa
atgaaaaacctgaaaaaactgttcgttcgtggtggttccgccgttgttgtaggcgctgccctggtcgtctcgcaatccgcctcggctgccggctgggactacagctcgctgacctccgatgtcgatttctcgaccatcgcgaccggcgtgctggccgtcgctgcgctgctggccgctgtgtatgccggcatcaagggcgctcgcgtggtcctgggcttcctgcggagctga

SEQ ID NO: 335841 - DNA, 1284 bp, Pseudomonas aeruginosa
atgcgcaggttgttattgttgttggtgctggtttcttcctctttaagtgcggaagagtattattggtacatggattattttaataagaaagtttcgtcgccctcggcgggttgcgatctttatttcagtggtattactgacaagtctggcctgacttttgctgttgaaccttctccaaatgaccctggcaaaactttttactgcgttgcaagggctgtatctaccgggcgagcaatatttactactgatgtttatttgaaaggcgatagatgcccggaaggtagcaatcttgatatgactacgggtgtcgccatgtgtaagcctccggagccggaagagcctaatgactgtattgaagggttgtatgacctgttcagtagtccgccgtctccagttgttcaggttggcggcaggaatcaagttataagtagtccgccggcaggttgtaagaacgggtgcgcttattctgcggattcttcgaagaccacaagctgttatttcgtcactggctcgacgaatgaggggttctgcaattactcgctgcgaagtactggcgccacgtgtccagccgacacaaacaaccctggaatgaccgggccgtcattgaacagtactccgccgactgacccgaatgaaccgccgtccgatccgaacgatcctggctgtccggctgggtatagctggtctggtacgacgtgcgtcaagacgccgaccgaccccactgacccgacgaatccgggtgatggtggcggtgatggtggaaccggtggtggcggtactggcggtggcggcgatggcggcacaggcggtggtggtgatggtggcggcgatggcggtaccggtggcggtggcgatggtggcggcacgcctggaacgggtggcggcgatggtgatggcggcgggacgggtggcggcactggcggcggtgacggctcaggggagggcggtggtaccggtggcggcactggcctggaaggtggctgtaaggacgacagttgcgcgttcgtgaagaacaacccgtttggtacggacaaggttccgggctttgacgagtcgctgcaaaaggcttggacggatatcaagaaagccccgattggtcaggccctgggcaaaatcacgtttccgaccgggggaagttgtccagttcagagcgttgaactgttcgggaagagtgtgatgttcgattcgcactgctccttgtgggctcagattgagccgatcttgaaagccgtgttcttggcgttttgggcgctgctttctgttcgcgtgttcctgtctgcgtga

SEQ ID NO: 335842 - DNA, 1140 bp, Pseudomonas aeruginosa
atgctgctgatggatttcggcggaactattgaacaactgccggaagattggtttgagcgtgccgatttggccgactttgcgccccctggttctgtcctggtcctcgacgaactctggcggcgctggcccaagggccagaaaaccaacgatgcgccgatggccgacaagaagctgttggccgagcatcggcaccgcgtagacaagaaaaaccggtcgatgcgggttgtgatggtgactcaggacctcgaccagctcgccagctgggccaccctgttggtcgaaacgacataccggatggtcaagaagtcgaagaccatgttccgggtcgatatctacaacggcgtggccaagggcgacagtccgccgaagtcgaagctcctgcgcagcacggccgggcgtttcaagcctgatgtttaccgctactacaagtccgctacgcagtccgaaacgggcgctgtgggtgatgagtccaaagccgatacgcggggctcgttctggcggtcctggggcttctgggggctggttgggctgatcgtggtctgtttgtcggtcggcattcccggggtcgtccggttcttcacgccgccgcagcccaagcaagcgtcgacgccgactcctgcggccaaggttgttgagcaggcgcagccggtggcggctcctgctgggcgcgcgatgcaagcggtctacggcaggtcatcggatgagccggtgccgtccgcgatctggcggattgccggctatgtgcatgctggcctgggccgggctgaggcgtggccgtcgaaggatggttacaacgcggagccggatcgaccgattagcaagacgtcacgcgtggtgctggtgtctgaaggtggccgcacgcggttctggccgattgagaagtgccgattcttcgaacagactcccgacttgtattgcgacatcgacggcgagcgcgtgaccttttggacaggccgaggggccgtatcgactgtgatggatgcgacaagcaccgcgagcggcggcagccagcgtagcgcagcgtccgccgcgaccggtgcgcaggtgcagaccccgcattcgtttcagccgcagcctcagcagcagggaacccgcgtgaccgtagtgtctgatagcagtcgctcaccccgcacgttgtga

SEQ ID NO: 335843 - DNA, 294 bp, Pseudomonas aeruginosa; identical to SEQ ID NO: 335837

SEQ ID NO: 335844 - DNA, 1020 bp, Pseudomonas aeruginosa; identical to SEQ ID NO: 335839

SEQ ID NO: 335845 - DNA, 4800 bp, Pseudomonas aeruginosa
atggatcaaatggccaaaccgcacatcagcggctcgtacaccgcgaacctgcttggaaacatcagaagtcacctggcgggacttcaaggctatgacgtcatggcccttgaactcattcagaatgcggacgacgccaaagcggagtcggtgatttttgacgtcaccgaccaagggctcgttgtattcaatagcggtcagttcacctactgtggcggcctggacaggccgtgcgcctttcttgccgaaggtaactacaagtgtgactaccaccgaatcacggatgtcggcagcggtggaaagctcactcgtggtgagaacattggccgctttggtatcggcttcgtctcgacctatcaggtcacggatcacccagagatccgatccgctgggatcagactgacgttgcaccccgaaaaagggcaatggtccatcgaaccactccagcagcccgagggcaccactttcttcttgccctgggcagacgacccgaatactgaggcacgcttggcgctcggggtgtcacacgtcagcaccgcacacattgatcagctcgtcgacgattttcaaaaggtcctgcgcaaaagcttgttgttcctgaggcatgttcggactgcggagctgcggcgaaatggcgaactgctgttggcttgtgatttggagcgcggggatgggtcggatctgatcgttagttttcgcccgagtggtgaggtggagcagtggcacatcttgcgggctgatgctgcggagtctgcggctcatctgtatgcctcacacccccgacttgaatcccttggtcggggcaccaaggtcagcattggcttgaggatcgatcctgagccgctcgccgagggactgctctacgcgttcctgccaaccgaacagtcgaccggtctgcctctgcatatcaatgcagacttctttccagagtctgatcgaaaggccgtgatttttgctgggcaccagcatgaacaggcctggaatgagatgctcattgacgtcgcggcaacagagctggccagagatcccgagggtcttctcaggatgctcggcgacgttcagttttggcagatcatggcgcgaacgtttgatttgtcgagagcgccaaatcacccggcttgcttcaagcggttttgggaacggatgctggcgacagcctctcaagcgcgcattgctcctgcacaggatgggagtgttcacgttcccagcggcgtattttttcctgataaagcactgaactctgctcaagtcagtgcgttgaaggaagttggcgggcaagtcatcaccgaggatttgcggcctttcagaacggcagtcaatcagttgggagccccatttctgacgtttgaacgccttgttgggctgcttgaacaagccatgtcacctcaggcggctgtcgcactacgggtggaagaagaacgccttgagagcttctatcgtccgctatggggaatgattaacgagttgttcccagaggcaataacgccccctcctgctacgaaggcagtcattcagcggttgcaggcgatttcctttgttgtcactgaagacctgtacgccgctacgatcagtcagtcctttgtcgcgcccgctgcgctagatgttgggcgggtggcgtcgctactgccaaggctgttcattgcgtcgcgccacatccttggattcccgaagatcgcacgacaaattcgacaacttgagcttggtgctgttgtccgccacatcagctcgttatgcgccaccgatgccatcgaggatgtcatcggcgttgagcaacaagagttgcgtgacctgtatgcgatgtttgctgatctggatcgctacggcagtgttgacgcagcggtgtaccagtctcttcgaaatctgccaatctggctttcaagccgaggtctgatcaaagcgtcacaagcgctattgccagggaatttcaccgaccctactggccaggccgatcttctagaaacctctgttctatctgcttccgcgagagagttcgtgtcgagcaaactcggcgttcagacgcagactattgaagcgttcgtacaaaatgtcttgccgagatttttcaatgaggaaggacctctggatgcatctaaatacgcccgcctgattggcgaaatagccaactatccggcgctcgtgaatgatgaaagcattcgtcgactattgggggcactgccgataattcccacgcaggacgggaattggtcacgacccacggaaacctacagacgcaccgatgatttggtgaggattcttggcgatgctacgagtctttggctcgacaccagtcgtgtaccaaacacccggtcggtccactctttcattgagagcattggacttcgtcgctcccccatggcagagcatctggttgagcggatgcttttcatcgcagaaaaattcctgccgaccgaagatgcaaaaagagccagcagcgaggccttctatgtcctgtgcgaccggttcgatgaatggaaggaacagtcgttttttcaggacgccataagcagtctcaaaagatcggcatgcttccccgcgattgatgacgacgaggactggtatttcgcgaactctctgtatgcgccttaccgtgccgaagccttctcatcacaagcgtcagtgctcgactttcggaatatggcaagactcaaccgggacttgctgaagaaactgaacgttgcgctggagccagaaacttcgctggtcatcaatcaccttcgtcattgcgtagcaaaaaaatcaccagcacctttcaccacgtatcagatactcaacgagagatcgaaagacgaaggctcttccatttcgacgttgaccggggaaccgttcatctacatcgaaagccagaagagctatgtgagatccaatcagcttttctggatgcctcagcagcttgggcgctatgcgttcaccattccaggcaacctcgaagcgttcaagcccttattcaatgcgattggggtaaagaatgcccccgaaggtcgggactacgtcgacatcctgctggacatcgtagcggagtatttcgagcaatcgaagcccgttacaggggtagatcgatctgtttacgaagcctgccttatcggcatcgcagcctcagatgagcgcgaagaactgggcgcctcggacattcgaagactgcaggaagcgccgtcgatactgaacctgatgggacagccaacgcaccctgacgaagtgcttcttcaagacagcgagtggcacgcaggtttcttcaacggggagcttgacttggcgctgtgcaaacccgccccggagctgtggccgatccttgagaagatcggcgttaggcggctcagtgagagtgctgaggtcgcacttgagttcgttgatggtcaaaaggcagaggaaccgcagcttgccgagaagctgatggagcgtatcggcatccttgcccgattgctccacgacaaaccgaccacggtccagaagaagattcgagaagcaatttggaagctgaaggccataagccacgaagttgtccgtgttcaatcgtctgtttgcgtcgttggagatggagacgcggctccgccgagattgtcagaacctaaacgcacccaagcgttttacgacatagagacgcaccagttgatcgtggagcggccagtggttgatcggagttggccgcatgttctgaatgccatcttccaccagctgatgccggaagagtcaggcaatgaaatactgaaactcactggcatggcggggccacggatgcggatgtcagtcgaggaggctcatcaagatctaacagactcgggttttccgcaactcgaagcacaggaggactccagccccgaagatgatctgacctcgtcgagcttggacgatttgggaggcacgacagagccggggtgccagccagagagcaaaccggatggcgcgtcagtcgatgtgacaaaaggtggagagcgcgcaccgaatatgcctggtacgaatgagccgacagatgattcgaatgctcctcccaagaatgtgccgccacccaataaagggcgtccacagaccggttctaacgacgcacgagaaatggatgtacctgatggtgaccgggctactgggcacgaccacagaaccgattcgccgattggcagcgcggagcgcgctaagagaccgcgtccaaagcacaaggagcaatgggatcgacgactgctttcttatgttcgaagaaggcaggtggagttttccgatgcggacgagcaggaaggtccgtctgaacacaaccttaccgttgaggttatagctcgcgcagctgtctgcgcctatgaaaggtcccggggacgcgtcgctgaacagatgccccaaacccacccgggctacgacatcatcagccgaaatccgttgacaggcgaagaccgtttcatcgaggtgaagggcgtcaacggcgagtggaatcagacaggtgtgggtttgtccaggctgcagttcagcaacgcccaagactacggtgatcgctactggttgtacgtggttgagtttgtttctgaccctgagcacacccgcgttcacgccattcgcagtcctgccacgcaggtgatatcgttcatgttcgacggcaactggcgcgatgctgttgcagaggagcgcgatgacccagcacttgcatttatcgcgggagcaagggtcaaacaccagcactttggcattgggcgaattgaatcaatggatttacgaggttcaactcgtgtgatgtccatagagtttgagaccagcggtcgacgcacggtcactttaaatctgcagacgatgacggtggttgaagataccgatgacaacgatcattcctga

SEQ ID NO: 335846 - DNA, 1725 bp, Pseudomonas aeruginosa
atgacaacgatcattcctgagctgacagacgcccaattggcagaattgccatcccaggcggaggcgaaggtctatcgggcgctcagggaggggctgcctcaggactttgttgtcttcttccaggtagggtggatcttgcgccgagaggaagagcaagcgaaagatggcgaaacggacttcgtcatctgccacccggatctcgggtacgtttgcgttgaagttaagggcggcggtgtcgggttcgattccagcagcggggactggttttccgttgacaggcaccgtcataaacacgcaatcaacaacccagtcagtcaagcgctgaaagccaagtattcgatccgctccaagttgaatgaacacaagcgttggcgggatctgtctctcgccaacgtcctcagaggccatgcggtgttctttccagatattggcgatgcaaatgcgctcagtcgccccgatatgccaaccgcgctgatcggatgcgccaaagatcttcatgacaccaaagcttgggtcgatgccgtatttgcctattggggcaacgacgcatcgggattcacccccatgggcaggcgtggtgtagatgtttttcgcgaggtgttcgcgcgctcgttcgaagtcgcaccactgatgtcatcgcaattggccgaccaagaggcgcgtcggctggttctcacgaaggaccagattcgtgtgctcgacttcttgcgttcccgccgcagagttgccgtgagcggcggcgcaggtacgggcaagaccgtcttagcgcttgaaaaggcacgtcgccttgcgtccgaggggttcagaacgctgctcacttgttataaccggcagctcgcagatcatctttcaagcctttgctcgggtacccaaaacctcgatgtgatgagtttccatcagctgtgccaccgtcaagtcgagacagccaaccgtgcatctggacgagaccttgttgctgaggcaaaagtcacctatccgggcaaggatctctacgaggtacaactacctaatgcgctcggatactccctcgaaatccttccggatcggtacgatgccatcgtctgcgatgagggtcaggatttccgtgaggaattctgggtgccgcttgagctgcttctaactgactacgacactagtccgctgtatgtgttctacgacgacaaccagaatttgtatgcccgcgcagggacttttccaatccgcgaggaagcattctcactgaccacgaattgccgcaacacggcacctattcacgaagctgcctacaagcactacaagggcattccggtgaatccacctgatatccagggtgacgatgttcagtttgatgagtcgccaaaccgagacgctcaagctgcgaagatcaatgcccgcatcgtcgacttgatagcgaggcagggcgtctcgccaagtgatatcacggtgttgctggctgacgccttgcacaaggccgagtactacgcggccttgcgaagacttccgttgccaaagccggcaacttggcttgaagagggcgtcagaggcaagaccacggtcctgatcgacaccattcaacggttcaagggactcgagtcgccgatcgttatcttgtggggtttggacaccatcgatttgtcacagcgacaagagctgctgtatgtcgggatgagtcgtgccaaatcgttgctgttaatcgtagggcggaatgcaacgtgcgcagcgctcaaggcagtactgaacagttaa

SEQ ID NO: 335847 - DNA, 348 bp, Pseudomonas aeruginosa
atgtcactgcaacgtttcagatattccctccccaagaacctccgactagcttcggtcctgaagatcgtttgcaccatcacccctatcggtatcgctattcgtgaccaccggcagacgatgctcggaggccctgtgacactgactgcgggcacgctggcaacaccgctcagcgtcatgctgtgcacgctggccagcacactgctcagttgcctgtccgaccatagcgagcaaggcccacttgatctcaagcagcctacgaaccagtccctggctgacagtctctggctgaattgtggctatcgcatctgcgttcatgaacagccctccccctctgcctaccattgttga

SEQ ID NO: 335848 - DNA, 1002 bp, Pseudomonas aeruginosa
atgaaagcgactccattgagcaacaagggcaaggtacgcccggcgctgcgcctgatcagtaccaaggagctcccccgagaggactggctcgccgtgcgcaagcaaggcatcggcagttcggatgcagcagcggcggtcggtctcaatccctacaaatcgcaactggagctatggctggaaaaaaccggtcgcgatgctggcatgcccaaggccgatccccaggccgaggaaagcccgatgtactggggcaatgtcctggagcccatcgtcgcctggcactacagcaagcgaaccaagcacaaggttcggcgcatcaacgccgtgttgcagcacccgaatcccgagctgccctggatgctcgccaacatcgaccgagaggtgattggcgctgacgacgtgcagatcctcgaatgcaagaccgccggcataaacggggcacgcctcaggaaagaaggcgtacccgaatatgtgcaattgcaggttatgcatcagcttgcggtgaccggcaaacaggcagctgatgtggccgtgttgctcggtggtcaaacgctggagatccatcgcatcgaacgggacgagcagatgatcgctcgcctgatcgaactggagcggcggttctggctgtacgtagaaaccgacacacctccaccggccgatggtagcgcgtcggccgagctcgccttgcggtgcctctacctggaggacaacggccaagcagtggacttcagcggcaatgctggattggccgcggcttacctggaactcaaggccgtgcgccaatccatcagcgacaaagaaaagcgtgaggctcagctcaagcagatcctgcaacaggctatgggcgacgcgacatgggcggagttctccaacggttacatcagttggaagaaatccaaggacagcagcgtgttcgatatcgagcgcatgctgaaggacaagccctacctgcaggctcgctacaccaagatcaaggaaggcagtcgccgcttcctcatcaattaa

SEQ ID NO: 335849 - DNA, 1416 bp, Pseudomonas aeruginosa
atgcgtgccctcgccggcctgttgtgcggcctgctcggcctggttcccggcgccgccgcctacgagccggacgtgttcggcaccgccggccaggtcgccggccaggcggtctacgacctcggcggcagcggtttgccctgccgcggcgggccgccaccgaccgagctgagcctggaggaagccatcgagcggatcctctgccacgacccacagacccgcctcgcctgggccaatgccaaggcccaggcggcccaggtcgggatcggcaagtccgcctacctgccgcgcctggacggccgtctcgacgccagtcgcggctacagcgacatggattatcgcgatgccccctacctctccggcgacggccatcgccaccggcgtggcgccagcctccaattgagctgggtgctgttcgacttcggccgccgcagcgccgccctgcgcaacgcccagcagttgctgctggcggccaacgccagccaggacgcgaccctgcagaacaccttcgccctcgccgcccaggcctactacgacgccctcgccgcccagcgcagcctggccgcctcgcggcaggtcgcggagctggcggcgcagaacctggaagccgccgacgccaagtaccgggccggcgccgccgccctttccgatcgcctgcaggcgcagaccgcgctgtcccaggcgagcctcgcccaggtccgcgacgaaggcgccctgagcaacgccctcggcgtcatcgccctgcgcatgggcctggcgccggataccccgctgcgcctctccggcgagctggaggcgcaacccgacaccggcttcgtcaaggccatcgacgagatgctcgccgaagcccgccgcgagcatccggcgctgctcgccgcccaggcgcggctgaaagccgccgccgcctcggtggaggaaagccgcgccgccggccggccgagcctggcgctgagcgccaacctggcacgcagccatagcgaccaggcgatggcgttcaacggcgatacccgcgaacgcgaccgcagcatcggcctgcaactgaacatcccgttgttcgaaggcttcgaacgcacctaccaggtccgcaacgccctggcccgccgcgaagccagcgaagcggagctggccgacaccgagcagcaggtttcgctggaggtgtggaacaactaccagtcgctcagcgtcgagacccgcagcctggcgcgcacccgcgaactggtcgagcagtcgcggcaaagcctggaggtggtgcagggccgctaccgctcaggggtcggcagcatgatcgagctgctcaacgccctgaccgcctacgccagcgccgaggaccagcacatccgcgccctcggcaactggcagacctcgcgcctgcgactggcggcgagcctcggtcgcctgggcttctggagcctgcgctga

SEQ ID NO: 335850 - DNA, 822 bp, Pseudomonas aeruginosa
atgacttacgtcgatcttgatgcgatcggcggccggcttgcccttgttgaagcgctcgccagtccagaatgtgtaggcctcatgcgccatcgagctgggcgtcgagaaataggtccgccggtagcgcttctgcatcgccataccgctggcgaccttgttcagctccttgaacttgaacgtccagaagaactcgtcgaagtagaagttaccgtggtagccctgggcagtccgcgcgttggtaccgaggaagtgcagttccgcgccgttcggcaggatgatcgggtcgcccttcagttcgacacctaccgcatcgcgcgcgaaggcctggatatacgccttgaagatgtgtgcctgggccttgctggccgacaggaatatctggttgcgccccgtttccagcgcgtcgatcagcgcctcgcgggcgaagtagaacgtggcgccgatctgtcgcgacttgagaatcacgcgggttcgctgattacccgcgcggtaccagtctttctggtagtcgaagcaaccgtcgaggaaggcctcgaccagtttctcggtcagttcctcgctgatgtcgttacgcttgggcttgcgcttgggaccttcgttacgcttggcaagctcggggttcaggtcggtttcggtaccaccgccctggtagcgctggatccgcgcctggcgctcaagctgccgatgcagcaggtcgatttccttgtagtcaccgccggtcttgccgtccttcaggatcaactgaaccaaccgggcttccagggcgcccccgatccgttctacgctgtcggcccggtcccatccgtcgcggtccttccatga

SEQ ID NO: 335851 - DNA, 387 bp, Pseudomonas aeruginosa
gtgctcgccagaggccgggcggacctgatcccggagctgacctacaccctgcagggcgtgaagacggagatagacgcgatcatctggtacggcggcaatgtgcagcacagcctcagcgccgacggcggctacatcaccagcctggagctggaaagcaagttgcccgaggacctggtcagcgacctggccgacgacaccggcggcgactacaccggcatcatcgcctactaccgtgacgagaagagcgggacggagaagaccatcaccgtgggagaccagagcaagccgcgccgcctgcgctacctgtacagcaccaaggccagcgcgaaacgggctgtggatcgagagtggcagaggttgaagaaaactcgttctccctctggctag

SEQ ID NO: 335852 - DNA, 804 bp, Pseudomonas aeruginosa
atggagcttcaaccaatagtgaaatgggctggcggcaaacgatggttagttcgtaaagagctagatctcttccccaccgacttcaacaaatacattgagccttttcttggcgggggagcggtcttttttcacctccagcctaagaaagcaatcttgtcagatattaactcagagttaataaatgtttacagaacggtaaaagaggactggaaaaaagtagtagaactgcttaaggagcatcaaaagaagcattgcaaggaatactactacaaagtcagagagtcaaaaccaagaacaaaagcgacaaaggccgcaagaaccttatatctcaacagaacatgttggaatggactctatagagtaaacctacaaggtgttttcaatgtcccgataggaacaaaagaaaatatccttatggatatagaggacttcccaagtattgcagaactttttcaaggcgcagagttcagaaactgtgacttcgaagaaaccttagaacttgcaagtgagggggactttgtattcatagaccctccatacactgtaaagcataactacaacggatttataaaatacaatgaaaacttatttaaatgggaggatcaggtaagactgagagacgctgccatgcgcgcaaccgaaagaggggccatggtcttagtcttgaatgcaaaccatgagtcaataaaaaaattatacagtcagtcagaacagattattctatctcggagtaacgtgctcgctgggaaaagcgagttccggggaatataccaagaactcgcaatcaagtgcggaaattattag

SEQ ID NO: 335853 - DNA, 1197 bp, Pseudomonas aeruginosa
atgagctacaatcagaatttgcctttctctgagagtgcccgtaatagggagattagtgttgattgccttctggttgaacagcctctaggtagtttttttattgctaatattccttatgataagctaattgagattacctatgcagatactcgtagggttgaaaaagaggagcatgggtttgagacaatgcttggtattcagcggcacatatctccaagtcgtatcaaggaactaaatcaatatgtgaatacatttgatgcgtgctttccaacagctattattctgtctgtgccagagtgttgtgttgagtatgacgccgcctcaagagtcttaaagatttttgaggctccagaggatggggatcgtgctgctattccatatgaaaaaatagcgaagattctcgatgggcagcatagaattaagggcttggaagcatatagcaaagataaacgatttgatatgaatgtcagtatctttgttgacctggatccagcttccgaagcgtatatattctccgtcgtaaaccaagcacaaacaaaagtgaataagagtttggtttatgatctgtatagccttgccaaagcgaaaagtccgcagaaactctgccatcaggtagctgttgctctaaatgagactgacggtagtccttttaggcataaaataaagcgtttaggtgtcgctgggccaaaaaccgagcctgttgcgatcacccaagctgcttttgtcgaggcgcttttgaaacacattagttatcctacttcgcttgctgtcgaggatagagatctatacctccgtgggaaaaagccagctaggccttcaaggaaagaattagagaggatgatttttcgcgatatgatgcttgatgatcgcgactatgacttaaccgatattatttggaactacttcgaggcggtacaagatagatggcccactgcatggtctagtaatgacaaaggggttatgcttagtaagacgaatggctttatggctcttatgaggttcctgcgcgatatttatttggagaaggactgcattggtgctgtcataagtaaagagcaattttccgaggttttctctaggattaccctggaggatgatgacttcactgtcgataattataagccaggaaccagtggggaaagtgcattatatagagatcttaaatctcagttcttaggggctaaaaatagcctctaa

SEQ ID NO: 335854 - DNA, 219 bp, Pseudomonas aeruginosa
atgggtcatcactctgaaaaggacgtacagcgcttgatcgagcggttgcaggagcgccacgacaaactggtcaaagtcatgaccgggcgctcgacacaaacgcatactgcgtcgggtagctttccagcgttggcggtgaacgcagaagacatccgttttgccgtggatgatctggccaccgctctcaaggaaattcgctcccggctgggaaaggcctga

SEQ ID NO: 335855 - DNA, 351 bp, Pseudomonas aeruginosa
atgaacggcaccaacgactaccgcagcaccatgcagcaagccgccgcagcgtacctgctggccaacgccaaccagtatctgtcctccggctccgaccggttgttcgatgcctgtgtcaaccatctggccaaaggcctcgaggttccccagttcatggccgaacaactcgcccagcgcgcgtgggatgaagtcttcgcggggccagaccctatctggctgggtatcgactggggccagggagacgacgaggtggtctacctgatcgacacccgcagtcactgtcgcttcccgatcccggcccgctatctgcccgcgcacctgctcaaacagcgcccccagcacacccagtaa

SEQ ID NO: 335856 - DNA, 252 bp, Pseudomonas aeruginosa
atgcggatccgctcctccgagggccaaaccccgtgcttccgctcgatgtacgcgcaatgcacaaacgcgctctgcggcgccaccttcaccggctccctgagctgggactaccagctcagcccctcgggcctcgagcggccactgctggtgctccccatggcgccttcgaaaacccgtcaactggcacgccgcgacctcgcggccgcaaccaaccaactggacctgctggatcatgtggagtgcatgcaatga

SEQ ID NO: 335857 - DNA, 336 bp, Pseudomonas aeruginosa
atgagtacgatgaatgaagcgcgtttccacgacctggtcgatgcgctccagcagcaggtggaagacgccttcgatgacagcgacctggacctcgacctggagaacgccggcggcgtgctcaccgtacgcttcgagaacggctcgcagctgatcctcagccgccaggcgccgttgcgccagctgtgggtggcggcgaagtcgggcggcttccacttcgattacgacgaggccagcggcctctggcgccacgatggcagccaggaaccgctgggcgcgctgctcaaccgggcgaccctggagcaggggggcgaggatgtcgagttccccggcctctga

SEQ ID NO: 335858 - DNA, 171 bp, Pseudomonas aeruginosa
atgggggtggtgccgcagaacgcgggtgggttcggatccatcagcgacgcggcagcggtctgggccagcctggagctggagccaatgcaggcgcgcctgcagcaggtcaacgagctgatcggggaagaggtcgtgaggttctcgaagttcgaggcgccaggcggccagtag

SEQ ID NO: 335859 - DNA, 270 bp, Pseudomonas aeruginosa
gtgctcgagtaccgcgtcgacgcgacgctctacctggccaccatcggcccggagtccgagccgatactcgatgccgcccgggcccgcttgacggcctacgtccatcagcgtcgacgcctgggcatggaagtgtccgaatcggcggtgcatgcggccctccacgtggagggcgtgcgcaaggtcacgctcagcaactggtcggacatcgccgctacaccggcccaggcgccctactgcaccggaattacgctgacgctgggggatgagtga

SEQ ID NO: 335860 - DNA, 198 bp, Pseudomonas aeruginosa
atggtcgagggcaccggacgcatctacggcctgtgggtgatcgagcgtgtcaccgagacgcggacactcttcttcgccgacggcaccccgcggcggatcgagttctccctcgagctcaagcgcatcgacgacggccgcaccgatctgctcggctcggtcctcggtaccgccggcaacctgctgagacgcatcctgtga

SEQ ID NO: 335861 - DNA, 198 bp, Pseudomonas aeruginosa
atggtcgagggcaccggacgcatctacggcctatgggtgatcgagcgcgtcaccgagacgcggaccctcttcttcgccgacggcaccccgcggcggatcgagttctcccttgagctcaaacgcatcgacgacggccgcaccgatctgctcggttcggtcctcggtaccgccggcaacctgctgagacgcatcctgtga

SEQ ID NO: 335862 - DNA, 279 bp, Pseudomonas aeruginosa
atgaaagtctactggacgtcggaggccgaacaggaccgcagtgatatctgggaattcatagccgccgacgatctcgctgccgctgtacgtctggatgagcgttttagcgccaccacacaccaattggcgaacttccctgaattaggaaagccaggaaacgtatccggcacacgtgagttcattccccatggcagctaccgactggtctatcagattgacgaggacgcaatctggatcctcgccctggtgcatacgtccatgatgtggccaccgttataa

SEQ ID NO: 335863 - DNA, 279 bp, Pseudomonas aeruginosa
atgactaaagaagcggtattcaccatgaaactcgagcccgagcttcatgccgaattcatggctgccgcccaggctgctcagcgtcccgcctcgcaagtggtacgtgaactgatgagacagttcatccgccaacaacgccaggcccaggactacgacgactacctccagcgcaaggtcgaagctgccagggtttccatgacacggagagaaggacgctcaaatgacgacgtcgaagccaccttcgccgcccgtcgtacccagctacctgacaacgaatga

SEQ ID NO: 335864 - DNA, 603 bp, Pseudomonas aeruginosa
atgaacacaggaacatcaagaatggcgaacatcgggtacatccgagtgagcaccactgaccaaaacacggtacgccagttggacggcgtacaactcgaaaaggtattcacagacaaagtgtccggggccactaccgaccgcccggagcttcagaacatgcttgagtatgttcgtgaaggcgacgtgatccacgttcattccatcgaccgtcttgcacgttcgctggttgacctgctggcgctagtccagagtttgacggcgaagggcgtacacgtccggttccacaaggaaaatctgctgttcaccggagaatcgaacccaacccaggaactgatgttgtccatcatgggttcggttgcgcagttcgaaagagcgatgattcgtgaacgtcaacgcgaagggatagtcaaggctaaggcgaaaggcgtctacaaaggtcgcagcaagacgattgacgatgaagctatacgagcccatgtcgcagcaggaaactcgtacagagcgaccgccaaggcccttgatgttggcatttcgacagttcagcgggctatgaaggcggggtgcccccctacccgggggtggggtaaatcggatggaacctaa

SEQ ID NO: 335865 - DNA, 912 bp, Pseudomonas aeruginosa
atgttcaacttgcttgtaactgcggatgaagaagcttggaacggtcgaccagttacctttccgctaagtcgtagcttgcgcgaatacacggatgcctcgatcacggatcgactgggctcgctcgatgaagccagcgtaagggcattgatcggaatgccagcaatctttgcgtacgagcagttcgttgggaatgcgccaaagttcggcaggatcaccaacatcagcgtacggtcgaaccgtttggaggttagggttgactacgagctgatagaacttcccaggttcttgaccaacgaagaactgtgggcgatgggcactgaacttgatctgggtagttgggaatcgtctcgcacccattgggctgtcaaagacgttgatcttgtgcgagagctgacccccatgggcatcatcttgccagcccggttcgccttggagcaaaggccccctgcggtgccggctagggtagacattactacccactgtttcgatgttgcgctttcatttcctggcgaataccgagagctggtcgaagcggtggcgagggaaacgacggcgctgcttggagctcatgcctgcttttacgatatgaactatcaagggcagctagcccgacccgagctcgatcttttactacaggatatctacggtacccgttcaagaatcttagtggttttcataggctcggactatcagcgcaagatgtggccacacattgaatgggccgcgattcggtctgtcatgactagggctaggaataacgggcggatcatgtatgttcggatggacgacggggctgtggaaggtgttttcgcgcaagatggattcattgatgcgcgtcggttcagtcctgcccagatagccgcattcatcgctgagcgagttgagttcgcccctgcgttgactgtcacgtag

SEQ ID NO: 335866 - DNA, 603 bp, Pseudomonas aeruginosa
ttggaaatcacgtacaaatccacgttcaaaaaccaacgaatcaacaccaatcaagcaatgggcttgggatgctatgtcgcaattctcgacggaatccatcgccagttggtcaatcttcaatcgtatgacagccgaatccaggtcatccgattcgaaatccgcctaccatcgaagatcacctacgatgtcaaagaagaaaacaggcaacttcgagccttctttaaaagtgttaaagaaaacttagctctcaaacactggggagcacatagacgtgtggttcatggctggactagggaagttggaaaaaccaagcatggacactaccatgtattcatagcctttaaacggcttacggtgcgttttggcacgttttctcgcgaaagatataccggactatgggagcttcttcgacgctgctccaaatgcattacaggagccaacctgaggttctgccccgtagttcacattcttgagcgtagcgataccacggcctttgacaactgtttctatcatctgagctatatcgccaagctcagagacaaagaatttggctccgggaaccgtcacaaacttttcgacttctcacgtttgaaacccaaataa

SEQ ID NO: 335867 - DNA, 240 bp, Pseudomonas aeruginosa
ttgaagaaggccgcgctggccggcaccggcatcgcccggctgccgtcatacatggtccacgacgaactgggcgacggccgcctggcctggttgctgcgcgactaccagacgcgcagcacgccgatgttcctcgtccatccgttccagggcggcctgccgcggcgcacccaggtactcgccgattacctgctcgactggttcgagcgcagccggcgacaattgatcggcctggagggttga

SEQ ID NO: 335868 - DNA, 1842 bp, Pseudomonas aeruginosa
atgcaaagcagctttccgcaatcgaacactccccagatccgtcgcgccggagtcgacctcaacggcgtgatgtcggtgctcagcaagcacctctattccacgcccaccgtggcgttgcgcgagctggtgcagaacgcccacgactcgatcctccgtcgccgcctggagcagcccgactggcaagggccgtcgcgaatcgaggtgatcggcgacagtgccagcaacaccgtgcgcatcgtcgacaccggcgccgggctcaccgagcacgaaatccacgcctacctggccaccgtcggcgtcggctacacccgcggactgcgccagtccggccacgaggacagcgggctgatcggcatgttcggcctgggcttcctctccgctttcgtcctggcccgtcgggtcagcgtgcggaccacgtcctaccagcagccggagctgggcttctgctacgtctccagcaacgccgagcaatacagcgtgacgccgatgccggcgcgcccggtaggcaccgagatcaccctcgagctgcaggacgaatacagtgcgctgacccaggccgcgcgcctgcgcgagatcctcgaacgctactgcgtgctgttgcgcgagccgatccacgtcggcggcgacgcccagccgatcaacccggagccgccgccgtggcggctggccgccgacgccgcgctgcacccgctgcaacggcagcgccgcgacctggagttcgccgcgcgtttcgaacatgacttcgaaccgatctgctgcctgccggtgcgcccggacgagcgggtcgacgtgcagggcctgctgtggatccaggacggcggcacctatggcaccagcgacaaccgcaatctctcggtattccttcgcggcatgctgctcgacgatgacgcccgcgacctgctgccgtcctgggccgggttcgtcggcggggtgatcgagtcgaaccgcctgacgcccaccgccagccgcgaggacctgcagcgtgacgaccattacgcggcgatccagcatgcgctggccgaggcgctgatcgccgggctcggcgaggtggcgcggcagcagccggaggcctggcggcgggtcctgctgcggcacaacgaggccctgctgggagcggcgttgtgcgacgagcgtctgttcgcgctgatgatggacagcctgcgcgtacccacctcccagggcgacctcccggcttccgaactcctttcgcgcggagcggtgcatgtgctgctggacaacgacagcggcttcgaggaaatgctgttccgtgccatgggcgtaccggtggcccatggcaatcgctatgcggtggtacccttcctccgtcgctgggctcaggccaaggggatgcgcctggtggagctgggcaccgagcagggcaaccgccagttgttccgcctcgaccgactgcccgagcgcgagaccggctggctggccgaacacctgggcggcgccgaggagcaactggtgatcgcccgcttcagccccgaggaattgccgcttgtggtggtgcccgaccgcgacgccgaactcaagcggcgactggaggacgacgaggccgacaagcgtatttccaccgcggcgttgcgcctggcccggcagttcacccgcaagctcgacaatcgccagccgagccggctctacgtcaacctcgacaatccggcggtgcaggcgctgctcgcggccgtcggcgaggaacgcgacgaagcggcccatgcggcgttgctgctgcgctcgttcaaagtgatcatcgccggacagggacgcggccagcccgcgacctcgctgaaccaggccctggccggactcgccgattcggtgaagcgcctgctggggcaataa

SEQ ID NO: 335869 - DNA, 702 bp, Pseudomonas aeruginosa
atgctgagtttcgacaaggtttccacctactacggcaagatccaggcgctgcacgacgtcagcgtggaagtgaagaagggcgagatcgtcaccctgatcggcgccaacggcgccggcaagtcgaccctgctgatgacgctctgcggctcgccgcaggcggccagcggcagcatccgctacgaaggcgaggaactggtcggcctgccctcctccaccatcatgcgcaagagcatcgcggtggtcccggaaggccgccgggtcttctcccgcctgacggtggaagaaaacctggcgatgggcggcttcttcaccgacaaggacgactaccaggtgcagatggacaaggtgctggaactcttcccgcgcctgaaggaacgctacgaacagcgcgccgggaccatgtccggcggcgaacagcagatgctcgccatcggccgcgcgctgatgagcaagccaaagctgttgctgttggacgaaccttcgctcggcctggcgccgatcatcatccagcagatcttcgagatcatcgagcagttgcgtcgcgaaggcgtcaccgtgttcctcgtcgagcagaacgccaaccaggcgttgaagctcgccgatcgcgcctacgtgctggagaacggccggatcgtcatgcacgacaccggcgccgccctgctgaccaacccgaaggtgcgcgacgcctacctcggcggctga

SEQ ID NO: 335870 - DNA, 1719 bp, Pseudomonas aeruginosa
atggcaaacaagactgacaatcttccagacttccttcaggactacgcatctctttttagtcatttccaaggccagatggatggtttaacaaccgttcaaattggagataaatttgcctctttagcagaacatttgattcctcataccgaggcaggctcagactttgaaagagcaacaaagtcaaaaaagagctgggacaaaggtgtagacctaatatttcaacacaaagaaattaacggcgtagagctaagagtacagtcaaaatacaccatttcatcagtagatgatgtagacttaattataagcaaattccaagagtacgactcaaaagatgcaaccaacaaacaacacgaactagacctactaggatcattagaagaagatagtcgacagacaagcaaatacctgataataacctcctcgaaaatatcaaacataatagcaaagttcttagagagccaacgtccatcaagatttttccttgagagaataaaaaaagaaaaacgctttcattatatcgatggaatagaaatactaactactatacagagcatatatagaagtacatacattcgcccccaagaaacaaaactaatattccaaacgcctcacatcagggttaacaatgtatacattggagtactaccttgcaacgaacttcgacgcgtatacgaagaagctggtgactctatattctttgaaaacattcgtgaatggttaggattccaaggaaaaaaagtaaaatccggcggggttcgtgaaacagtcaatgaagcaatagcatcaacactcgaagactcgccagagaaaatgctcgaaagaaataacggcatagtaatcagagcatcacaagtggaggaaacctcaaactcatccttgaaactaagagatgctagtattgtaaacggctgccagactactatgagcgtatttttcgtcaatcctgccgatggacatgtgctagcaaaaattgtagagacagaagattcatgggagatagctaaggcggccaatttccagacagaaatagaacgaatagaacttgaactagccagatatctaagaccacaacttgccagatctgttggagcagagaataattttaaattcgaccaaaaagaagtaacaaaaggcaaatcagcctttgctctactcgaccaaatatataaagatgaaatttgctatgatgaactaaaatcgatatttatcggactattttcacgctctgcaaacaatgcgatatcgccaaactataccgagcttagaattgatgtacttcaaaacttcgaaagagactctgaaaaatctaaattcctagaggctcttttcgtgctccacagcaaatcatctacggcgatggagtctttgaaagatggtttattaaaacctgaaattatggatctatttaaaagattttggaaagaagacaaaccatcatatagggcatttgtcacactcttagccatattcagcgcccttgacaaaaaaaatcgcaggtttgaagactacaacgacataaagagcggaataataaaactagcaggacaaatagaaatcgaccccggcgaatacatagaaacatatataaaagcctttaaaactatagcgctagacgtcctcaaaggcagcgaggacaaggataaaatgctgcaaagcatgtatcatcacattggctcaatgaattttgaaaatgctttactatccatgtcactattgtaa

SEQ ID NO: 335871 - DNA, 786 bp, Pseudomonas aeruginosa
atgactacagaagtacacgatcaggaaatcataccggttccaagctctgctccggccgccaagcggtcatgggtaggtccaactattacaacattaatcggtataatcgttacattgctggtggcttggtatcagattgcgttgagtgatgagcaagctcaacaggctgaactagagagatcaaaagcagtaaaaaatgagcttactcaaattgttgaggagcatgttttaaatggaatgccattagatatatctcgattaagtaggcttgcagagcttagggctaggcaggaaaaattactggtagcacctctggtttcagaagttattgagagtgccgagtttaatattctcaagagtcagtatcttaaatttgacagaaagaaagaaattaaggttgtgtttgactcaatatacaatgatctctccccgaaagttactagtagctataaggggcttttcaagagctcggtagacggcctgtattcgtcgattcaggccggaaataatagtgaggcgatggttaagttagataagcttttgggtgattttaattccaaggttgatgagctgagtccaaggcctcagctagttgaaactaaaagctttgacgaaatagctcgcgtccttctcgccaaacccggctttttcatattcgcttttgtcatatattgcgtgattctttttgcttggtactcgtcgcgtcggagacgtcgcctacggcgagttgaagacgagattttcaatagtttcgcctttaagcatcgcaatcctcatgagctctag

SEQ ID NO: 335872 - DNA, 165 bp, Pseudomonas aeruginosa
atgcgaccacgtgacaagaaaaccgcagaactgtacctggagaaactgaaagctgagcggcgtgtgttgttgcttaagatttgcttcagtgtggtcaaagtgattggtcctttgcttccactgattgacaaatactggcataagatcgttgcaatgcttgaatga

SEQ ID NO: 335873 - DNA, 996 bp, Pseudomonas aeruginosa
atgcagccaaagaaaagcgaaaagccaaaacgtaagcctgataatgaaatagccattaatcagtgccgtctttataaggttggctcatttaggaagttgtcggatatactgaagactagtcctgccgaaattatggacctgcttgtctcggataagaattataagaaattcactgtttctcaatctgcgaatccatttacggggaagcctaggaaacagcgcgaagtccaagagccaaaatcaaagctgcgtagagttcataatagagtgctggcgctattgcgaagagttggctatccagattacgtccagggcgcagtacggtatcgttcctatcaaactaatgccgcattacatataggctctaggcaaacggcaacttttgatattagcgacttctacggatcaaccaagcgacatttggttcattcgttttttcatgacgttatgaagtgtcccaccgatatagcaggtaagctagccaggctaaccacgtgtgacggcgttatacccaccggtagtcctttgagtccgttgctgtctttctgggtcgcgaaagggttattcgatgagtgtgccgcagtcgctaaagaatacggcatgaagttcagttgctatattgatgacctgactttctctggtgatcgaattcctcgcgagttgaagtctagactaaagataatatgtcgacggtacgggtatcggcttaaaagcgaaaagactaaagtttttcgctttggtgagccggctcatattacgggcgttataaaaatggatgccgtgctatcagtgccatttgctcgtcttatggctgtgcggaagttgatggatgcaattgagggtagaggagactcctacggttatactgtggaggagctcaaaaggaagcttgcaggaaccgtgagcgaagcggcctccattgatgggcagtttaaaaagtgggcgcttcatgccaagcaagatgcaaaaagctcaagtcgacctagtgcaagctaa

SEQ ID NO: 335874 - DNA, 1278 bp, Pseudomonas aeruginosa
ttgaatcacgtaggaacgttcacttgtgagacttgcgatggggatattgattgccgcataggtttttcaaataggatgacgcaacctttaagttttccttgcccacattgcgaaacccttattgaaataaccctgatacttagcgactcgccactctttaatctaaaggaggttatgcaaaaaccagaacggcaatatggagcctttgatgggagaaaccctttcgttgatcttcatttggattttcctatctggtcaacagaatacattatggggatgaccccatacattaccgcaatgcagaagatgagaaaaaaggagcacgaacaagagcagctgaatgaatacctttattttcaagccagactagagaagctaaatgagctgcatgaaaaagcaaaggatataaagagaactataaagctatattttggcgagaacaaaaaattatttgtaaaaagagcagaagaatttgcagaggaaaagctagagagaactctggcaatgaaggacatcaatctggttctttacagattaataggtgtaacattctctccttttatagaccccgtttctaatgctgactttgcaggcggaatagctcgactggtccaagagattgccgaaacaaacgagcatgccttcgacggctttctagacgaaataattaaaactgaattcctaagtaatctgcaaagagattgcctggacatttatccgagaatactcgaggcagaaatagcactaagaccagcactctttatggattttgttgatgaagatccagacaatagaatttccggtagaatttcaacaaaagattttaatgagtacaaagatctatacaaggacataacagagatactaggcaagcaattggtcttggttgctgccataaacaacatactgcatcgaggcgatcacaacaaattcaaagagaaagatggcggagccctatcctctctggcgaagttcgccgacaaaacactctctgacaaatttaaatacctagacgactgctggttcaacttcgatagctcagcgattaatccaggtgcaagaaatgcgatagcccattttgcaacagagtacaatgagaaaacacagttaattcaatatttccctgaaaaagaaggactaaagcaggagaagccccaggagatgtatttccttgagtttatgagaatgctgcttgtggctttccgggaaatgcactatctacatcacgttataaaatgcttattctattacgaatatatcatcagacagaaacagtag

SEQ ID NO: 335875 - DNA, 213 bp, Pseudomonas aeruginosa
atgagctatctcgtacttcagcgtcatgcgaatgagcagatcgtgctgactgccaatccgaatgtgagtgatgaggacctgatccggcagatcagggagcaggggattgccgtgtgtgtgtcgcggatcgggccgaaggtcgcgagcattgcgatcagtgcgccggcgtcgatgaagattctgcggggggagctgctgacgtcctggacgtga

SEQ ID NO: 335876 - DNA, 225 bp, Pseudomonas aeruginosa
atggatgtggaagaaacgaacctcaccctgaaagacctgcttgccccaccgcccttgatgccgtggcgcaacttcgctgactggatacgcatgggagacagccacgacatcgtctggggctggattcgcaacggctacatcccgtcccacaaggtcggcaaacacatgatggtcaatgtggcactgctgaccagccagctgatggataaggagattcgactgtga

SEQ ID NO: 335877 - DNA, 216 bp, Pseudomonas aeruginosa
gtgagcaaaccccagataacccccgaactctgcaccgtcgcggccttcgcggatatgtgcggcgtgtcgtacaccgaagcggagcagtgggccgaagacggcaccatccccagtctggacatgggcaccttccgcatggtcaacctcgcgcgcttccgtgccgaccttctcaagggcaagaacactttcgacgccggggactaccgccatgcatag

SEQ ID NO: 335878 - DNA, 390 bp, Pseudomonas aeruginosa
atgcatagcgaaaaactgaccctggatgcacaaagcgcgctgcgctatctcggccagaccgttctcgtcgaactgggctgggaagatgatcctgaaacggtatggcgcctgctgcgcatcattggcgtcgtgctgccggccgatggcgtgcgcgacgagccgcacttcatgacggtgccggttggcgtgaccgacgaattcgcgaatgagaccttctgggacaccattcgcacgatcagggtgatgcggtaccgcgaccggcagggttccggcaacgtactgggccgcatcgcccaccctgaaacgtcccggtcaggggccgcgctcccggctcgtcggaacagctccaccgttccggcgaacggaagcacgggcgcagcgcacccttga

SEQ ID NO: 335879 - DNA, 153 bp, Pseudomonas aeruginosa
atgtcggagtgcctcttcctcaagaccatcctcttcctgctcaccgcgtacctgttcggtctgtgggagttgcatcgccccgaatacccaagctgctggatgtctcccgaacggctcgcctgctggtcgttggccgcgcccaccggacggtag

SEQ ID NO: 335880 - DNA, 1293 bp, Pseudomonas aeruginosa
atgagaaaagtgacccaccagcaccgcctgatcgttcagcctgacggccagatcattgattccccgcgcggtcgtctgtttgtcgatgcgcagcccggcagcttcaccgacctctccggcgtgcgagtgctgcggtgcggcgtcgacaccgtacggcagctgtacaacggcatgatccgccccgaggtgatggcgctgtttgacgacaaggaaccgaccgccgaattcgccgggcatcgatggtccaagggccgtatcggccgcgactccggctaccagttccgcctgcagaacgccgacctcggcctgatcctgttgatcaagaaccacaacatcaaaatcgacaccatcggctcgcacctcaagatcgaagtgtccccgcacgccatcgacggcatcgatcccgcagccttgcagaaggtgctcgatgatctcgccaccgcggtgctcacgcattgcgaaaccaaccagtgcgccgtccatatcgccctggatgtacagggctggaaaccacccgccgacatcgttgaccgcatgcactgccggtccaaccgggtgcgtcagatcagcggcatcgaccgcatcgaattcgacggcaacgcctcggtgtacggacgtggcgagaccttcatgttcggctccgccaatggcctgcaactgtgcatctacaacaagacgctacaggcgcgcgcgagcgacaagctggactactggaacgccgtctggtccggcctcaatggcgatccgttcggcgcaggggagggcgcctatgaccctacagagacggtgtggcgcatcgagttccgctaccaccactccatcgtcgaacagttcgcccagggcacctgcctgccctctggcgcggtgatcgctactcagacctacgcaggtatctgtccgcacctgcaaggccttcttggctacgcctgcgaggcgttcaagctgctcgcccgggacgccatctacgacccgttctggtcgctgatcatgcaggacgtgaaggtccaagtggagtgcgatccgctgattgatcgcgtcgaataccggcgctactacaagaccgctcagggcttctccggcaagaactgcgagatgttcctgggccagttcatcagcctcatcgcacgggagcgcatccccgcaaaaaaggcgattgagtccgcccaccgactggaattctggcacgtcatcgaagaccactatctggccaagggttggactcgccgcgacctcgagcaacacatcaaggacctgatctcggaccgctatctcaggcgaggctatgccgtctga

SEQ ID NO: 335881 - DNA, 1101 bp, Pseudomonas aeruginosa
gtgcccactgctttctcatcagcactttactatccatatatcgatataagaaatgagcggtggttaagaagcgctgctctgttttgggattctattagaacaatagttcctgtttctcatcgtgatccctattcaaacgaatttgcacgtgctctttacgatgagggtgtgcttaaccctgtcagagtctcttcggatatggatgaggttgaggaactaactgataaagttcttgagtatcttaccgatcctgcctctgctggtgtgatgtttgatactgatagacatccggctcgcaggattcatcccgagaaaatgtcttacgagcttctggagcttgcacatctccaccctgataagcttccgtatatgattcgttcaaatatcgagcgcggtcttaatgatgatggttggcttcacgttgcgcccggatttgcaaatttctacatgacgctacttgcctctcagttggctgagcgattagggcttggcctggtcactgagtcatccgctgccgatcagctagcaatctctgtgagaaagggtaagccacttgggtctgcgcccggtcgacgggttggtcgtcaattcgatgccttcggcccgaggcgcactttgcctactgatgtcgcgcctagtttgcttgttgatcttatgttgcaaggtataacgctaccccaggatcttccagtaagtgaagttttgaaattcaaaaattatcatgctgaagaactttctgtttttaggcgagaggtttcgagacttacctctgagctgccagaggatgtgcctattgaggcccttaggcaggcggtgttggatcaatatcaggctaatgtgctgcctgcgatgcacagcctccgggaatctctccgtgctcagagttgggagtctggtcttggcgggttattgaaggtttcctttttttcagcagcgccgacatcgcttgctatttttgcaggcatttctagcactgttgcgttgattgcaggggcagggatttctttaacggcatcggcggttttgatggcgaatcagagacgacggacgaaaattgatagtccgtattcctatctgctatcgatggagcggcagtggtaa

SEQ ID NO: 335882 - DNA, 867 bp, Pseudomonas aeruginosa
atggacatcctccagagttcctccgccgcgcccctcgcgccgcgggaagcggccaacgcccccgcgcagcaggccggcggcagcttccagggcgagcgcgtccactacgtctccgtttcgcagtcgctggccgatgccgcggaagagctgaccttcgccttttccgagcgcgccgagaaatccctggccaagcgccgcctgagcgacgcccatgcgcgcctgagcgaagtccaggccatgctgcaggagtactggaagcgcattccggacctggaaagccagcagaagctcgaggcgctgatcgcccacctgggcagcggtcaactgagcagcctggcgcagctcagcgcttacctggagggcttctccagcgagatcagccagcgcttcctggcgctgtcgcgggcgcgcgacgtcctggccgggcggccggaggcgcgggcgatgctggcgctggtcgaccaggcgttgctgcggatggccgacgagcagggcctggagatcgaactcggcctgcgcatcgagccgctggccgccgaggcttccgccgccggtgtcggcgatatccaggcgctgcgcgatacctaccgtgacgcagtactcgactaccggggcctgtcggcggcctggcaggacatccaggcgcgcttcgccgcgacgccgctggagcgggtcgtggccttcctgcagaaagccctgagcgccgacctggacagtcagtcgagccggctcgatccggtgaagctggagcgggtcatgagcgacatgcacaagctgcgcgtgctcggcggcctggcggagcaggtgggggcgctctggcaggtgctggtgacgggggagcggggccatggcatacgggccttctga

SEQ ID NO: 335883 - DNA, 141 bp, Pseudomonas aeruginosa
atgaacagcaagaacaccatctgcctctggtacgacaacgccgccctggaggccgcaaccttctacgccgagacgtttcccgtggggcatctcctggcagatcaccccgcgcgtactcagcgaagccatcgccagccctga

SEQ ID NO: 335884 - DNA, 270 bp, Pseudomonas aeruginosa
atgcgtaacggaatccacgctgtatccgccccgctacccaccctgttcgtatctccgccggcggtcttcactgccggggtcgcccggcattcccggcagcgcccggttgcagactggcgccaccacgtcccgctgacgtcccaacgccgacggccatgccgtcgcaagcgcttcatcccccgcgatccgcccgtcgcgctcgtccccatcgggaccaaccgggccgcccccggcccgctccttcgaacctgcgtggagtccatcccatga

SEQ ID NO: 335885 - DNA, 2811 bp, Pseudomonas aeruginosa
atgggccagtaccaaggaatgcgatggttcaaagctgactttcaggttcagacaccggaagacagcgagcactggagcgacaccgagctccgactaggcaatcctcgcagaccaaaggatggaggtatccccgacgagagcgaaataagcagcacggcgcaggctttcctcagaaggtgccatgagctcgagctgcagatcatcggcatcactgaccacaacttttctggccagactgacccgagagattggttcctgactcatctgatcgagcagaacaagtcagtcgccgcagcgctggggcgcgaaatgatccacatcctgccaggctttgaagttgatatcggttatcacgtgctttgcctgttcgagcccgtcaagaagtccagcgatctcgagcgtgtaaacaaagtgctcattcagctgggcctgcctgaatcgcaacggtttgaaagaggcttgccgacgccgctaagacgagaagactctccaatcagcttggcgaagctgttgaaaatcgtgcaggacgacaatgacggcatcgtgattgccgcccacgccgatcaagaggacggcctgcttcagcgtcccaacaaccgccccgattaccagttgcctgatctcttggcactggaggttactcagtacccgttggggcagaaaatatcggacatcttgactggcaaaaatagagactggtctcgccctggaaagcagccggcctacgtgcagtcctcagacgcaaagtcgctgaaagtggatgagcaaggaaaccctaagcccaactctttgggctaccgccacacctgggtcaaatgctcgcgtccgtccatcgctgcgctcaagcaggccttcctcgattccgattcgaggatcagcttgcagaaggcgagtcccagcgagagtgagacttttccgcggatcgtctcgataacggtgaaagggctgaggtacctggaagaccagaaagtcaatttttcacgcaatctcaatacgctaattggcgcccgcggtaccgggaaatcgaccatccttgagcttttgcgcatcatgtttgcccgagacgaggcggacgctatttcagagaaggcgaagctcaaggcccaacgagcaaggcagaccttcactcctgacaccgagattctggttgagtgggaaggcattccgggccaggtcgacgtgctgcgctactcgcctggcgatgacctgtcgctgatattagggactgcacacgatctctcggcgtacctgcgccatctgcctattcagttctacagccagcaacagttgagtgagctcaccgctccaggcgggcaatctcagttgctggaactgatcgacgagatttgcgcagctgagctcgaaaagcttcaaggcgaggagcgtacagttgctgctgacatcaagcgactgttcgccgcacaggaccagatgcgcgctatcgagcacgaactcgacggcttgaagcaagagatcgtcgaggtcgatcgacagtggcaagcgcgcaaggacgttcagggtgaggcggcagcctaccagcgcgctacccacgctaagcgctacttccagaatctaagcgatggcttcgaaaaggatgtcagtgcagtcgagaacgctctggaaagtctcgctcctgcggaaggctctccagctgcagttactgaggcttggccacatgctgactggttcaccgagcagacagccaaggtagctacacgccgagcgatctatcagcagaagctggatgcgctgctcaccgagatgcggaacgattttgccactctgttctccgagaatcggcagtggcgtgagatatcagtggatctggacgctgcgcactccaacttcattacggcatgcgcggcaaaaggtgttcagcctagcgatgtcagccgccttcaagatctggatcggaccaggcaagccaagcaacgcagcctggaagacaaagagctgcagtggaaggcgctggagaagacctcccaggaattggaacaatcgctgaatcggcttttcgatatctgggcggagcagtgcaggctgcgccagcagaccgcattggaaattacggagaaaactaaaaaaaccattcgcgtcaccatcacccccatggccaacagattggcgttcatgttgctctgggggactttggagcccgaccgccgatcgcgggttgggagagattgggacgggatcggcgagtatttgttcagcagctttctagcctctccttctcctcggaagcccagtccctgggagtacatagattgggtgatggaggacacctccaggttgccgagcatcctgcagcaattcaaaacagatctgcccccttacctgacaactgttcaggagaaatggcgcacgctgcgtgtatcacgagtaccagacctcatcgacattgagctctaccggcaagatcacacactcattggcagcgttgagggcaaccagctatccgaggggcagcgcaacaccgcgattctcaatctattgctggtccgaggggacggcccgatagtcatcgaccaaccggaagacgaggtcgacaccagcttcatctacaaggatctggttccgctactgaggcagtccaaaactcagcgccagcttattctggcaacccataacgccaacctaccagtcaacgcggacagcgaatttgtctacgcgctgatgtccgaaggtgggaaggggcgcgtcttggcgcaaggtggcacggacctcaagcaaactgccgcggctatcctcgacatcatggaaggatcggaggaagcgtttaagaggcgattcgagaagtaccacttctaa

SEQ ID NO: 335886 - DNA, 1464 bp, Pseudomonas aeruginosa
ttgggtggttataccaactttatgatgggtgtaatatgtcatgtcgttaaaaaggtaccgcgtttattttctgttcgaatgagacttgctagtgagggctactttaggaatctggatgaaattaggaataatacttttgttcagagttcagagtgtatttctcactacagtttgctgttccctcagtacgactggacctttacgggggttcagcatttgcaacctttgtctatgtccgatgccgttaaggcgatacgctggggggaaaggaataacacctgggagaaagatcgtatagagatcaatccgattgcctctcgtgaggtgagtttggatagacttttttttcaggacaccattgatggtcagaagataccgggaagtcggcgtattaatgctaatagtcaatgggtcacacactgtttcctgtctgtagttgagcttaaaggcggctattactttttatctacacactggtatttaaccgatgcagcagcaacgctactgcagcgcgtgtcagttgaggatatctccctcagttccataaattatgagacctgcaatccttttaggcacaacttttccgccgctaccctccctgggcgtttaaataaaagcgaggatagaattgttagcaacatcgacaagcttcaccaggaaataacacggctggaaaaaatagttcgcgcgcgcctgggcattaaaaaagagcatgaaggagtctataccctggatgcatacaataataatgattgcacttactttgatcttgatcttccgaattttttcagaggaaacgctgctgctggcaggcatgtgatagacacctgcgcctccagtgctagccttattctgggggaaaaaggtgataaggagtttttgatcacatcgaatacgctgaagcgtgcaaaaattccgtatctcgctatttactctgtgcctgctgtcgatgaacaaggaaacagaaagcatatccctcgtgatagggtcttcgcatcagttgagaattccattcatatttttcaattattattcctgctgagacgaaaatttgacgaaactgtcaaggcctatagtaaggtcattgtgtcaggcctcaatagcccaggcaagaactacagtcgcctgtatgatgcaagcattgaattgatggaggctgttcgcatagcagagatacttgaaagcgatgatagcctctatatgtacaaggttagagataagtctgctgcccgtatgcgggagttggttgttcgtcacttaaaagactttagaggtctaaatgaagatgttgcggtaatgaaacagatttgtagtgagaaggtttctgctgagaatctcgtgtatcaacggagaatgacgtatctcgttgtgttcctcgctgcccttcaggtagtgatcgctgctgcgtcgatgagtgagttgaaggagggatttggggcgttttggcgcgtactcactatgtaa

SEQ ID NO: 335887 - DNA, 1317 bp, Pseudomonas aeruginosa
atgaatataaattcatccgaggcacgactaggtgagcttactcgtaagacgtttttatcgatgtgggcgtatcagaatccatactataccaaaggcaaagagctttgtgatgtgctagtggtttttggaaatgacgtgataataatgtcagataagctcattaattttgatgagtcggctagaagggacgtagcttggaagagatggtacagaaaagctgtagcgggtagcatccgccaacttcggggggctctgggccagataaggaagtcacctgattcgatatatagtgacgcaaacgcatcagccccgttcccgctgagactacctagggtcgatgaagctcgcttccatcttgttgccattgcgaatggtactgaaaaaatttgtgcgagcacctttgggtgccctggtcttcgcattgacacacgctgttcagatgatcaactccagctgacggtaggtgtcaattaccccgaatttgtgcatgttattagcaagtctgcgctcaatgcaatttttgactgctttgatactgcgcgagacttaattgattaccttgagagaaagcaagaagcatttctcggtgatacaggctttctgatagagggggaggagaacttagtagcggcctatatgctgagtcaaaaaggaaatcgccaatttcggattcctcatgaatcttttccaattgagagcgatgtacatgttgtcaggtcgggtatttggacggcatacgtaaaaagcgatgaactgcgggctcgtgccaagattcgtaatttttcatacattatcgatcaactaatagagcatatagcgcatgaatatcgaaagggtgctcttttgattggtcaagatcaggctatctcgtaccatgaggaacactttcgactgatggcatcagagtcacgagttggtcgtcagcttatcgctgcggcactgcacgatgtaattaatgaagaccctaggactttctggtgcaatatttcttcatcacttgacgtcgcgggtctcatctatgtgtggctcatttaccctgaggtgccaagctctatttcggatgaggagcttgaacataatcttctaaggcatctaggtgagtatatgcttgtggctcaggcaaaatttagaagtgcaacaagaatatttggtatatgtttgccaaatatggcgtctacacgtacttctcgaatttttcgagtggccgacggtgaggtgtggactcctaagatgcagcagatcgctaaggagctagaaaaaagatatggcattcttgctggtctgcaagaattcacatatggaagtaggcgggtttag

SEQ ID NO: 335888 - DNA, 1332 bp, Pseudomonas aeruginosa
atggcgcgcacagtggtgcctctcaccgatcccaaatgtgatgcggcaaagcctcgggagaaggattacaagctgttcgatggcaaaggcctctacctgctggtgaagccgtcaggggtcaagacctggcgtatgaagtacaccaaacctgatggccgagatggtttagcaacgtttggcaactatccggcgctcggcttgaaagcggctagggagcgacgcgctcaggcgcttgaactccttgctgcagggaaagaccccgtcgagcaggcgcgcttggacaaacaggaagcggctaacgcccgggcgaatacattccgtttgcttgctcaggaatggcacgcggcctgcgctcgtaagtggacacctggtcatgctgccaccgtatggcgacggatcgaatcacacctgttgcccaccctcggtgatcgtccggtcgcggagctgaaaacacgggatctgctcgtcccgctgaaagcggcagaaaagcgggataccttagatacggctgcacgcctacgtcagtacatgacgggcatcctccgcatggcagttcagcatgggcacctggacttcaatcctgcgatcgatctgcaaggcgccactgcttctcgcaaaacagcacatcggcctgctctgccatttgatcggttacctgagcttctgcagcggatggatgccgacagcgggcgcggcctgaccaagctcgcggtgcagttgaccttgctggtgttcatccgctccagtgagcttcggttcgctcgctggggagagatcgacatggggaggttgatgtgggaaatccctggtgagcgagctcctatcgagggagtaaagaactcccatcgcggttcgaagatgagcacgccacacttggttccgctcagtcgtcaatcagttagtgtcttagagcgaatccgtgatctcaccggccgattcgatttggtatttgcaggtgatcaccatcactggaaacccatgagcgaaaacaccgtcaacaaggcccttcgacgcatgggctatgacacgaagtcagaagtgtgcggccacggttttaggacaatggcttgttcagcactggttgagtcggggctgtggagtaaagacgccgtcgagcgacagatgagccatcaggagcgaaacacagtgcgcgcagcgtatatccacaaagcagaacacattcaggagcgaaggctcatggtgcagtggtgggcagattatttggacgccaatcgagtggaagcgatcaccccgtacgactttgcccaccgagatgctgtagcgagcgacattttgacctgccccccgatttcagtaccatgtcaaacttag

SEQ ID NO: 335889 - DNA, 1884 bp, Pseudomonas aeruginosa
atgtgtggtatcgctggcttctggaatattacgggaactctcctaggggataatgcacgtgtggcccggcagatggctgccgccatacatcatcgtggaccggatgagtcggggatttggtacgaggctccgcgcgccccgatacttgtccatgcgcgtcttgcggttctggagctttcccccgcaggcagccagcccatgcactccgactgtggtcggtatgtgctgatttacaatggcgagatatacaaccatctggctcttagggctcgcctgagcgaggcaggtgtaacacattcctggcgtggcggatcggacaccgaaaccttattggcatgctttgcccaatggggcgtggagagtaccctcaagctcaccgtgggtatgttcgctctggccttgtgggatcgacaggagaaaacaattactctggctcgtgatcgaatgggcgaaaagcctctctattggggctggcagaatggcgtgcttttttttgcatccgaactgaaggccctgaaagaacatccgctttttaggggggatattgatagagatgccttggccctatttctacgatatggatatgtcccggctccctatagtatttataaaggtatcgggaagctaagggcagggagctatttggtcctatcggaacgttcattgaacgagacctgcgaacctgctgcctattggagtgcgaacgccgcgatagaagaggctctctccaatccattccagggaacggatgccgaggcagttgatcttctggaaagccagttgagaactagcatatcggatcagatggtctccgatgttcctttgggagcttttctgagcggtggggtggatagtagtacggtcgtggcgctgatgcagcagcagtcctcacgccctatacggacattctctattggctttgatgagcctgggtatgatgaggctgtttacgcaaaggcggttgcagaacatatcggtaccgatcatacagagctctatgtcaattcaaaagatgctctagatgtaattccatctttgccaaagatctactgtgagccatttggtgacagttcgcagataccaaccttgattgtcagtggattggccaggcagcaagttactgttgcgctgagtggagatggtggtgatgaactgtttggcggctacaatccctatcagtttactccccgtgtctggcgcatgctggagcgatttcctcattccatgcggcgtttcgcatcggcttttgctcaggatttacctttacctgacaagttggggaagctgcgtgacgtatttgcttcgaggacggccgaggagcttttctatcgattgaacagtcactggagaaatcacgaatacccggtcataggtgcacaaggtcacacggcactattggatactccagaaagatggccaagggtggactcgttccagcactggatgatggccatggatgttcagggctacatgcctgacgacattctggtgaaggtagacagagcagcgatggctaacagcctggaaacccgggttccactgatagaccatcgcgtgttcgaactggcttggcgcatgccgttgcatatgaagattcgcaatggaaaaggaaagtggttgcttcgtgaagtcttgtataggcatgtttcgcgagagctcatagagcggcccaagaaggggttttccgttcctgtctccgattggctgagaggccctctgaaagagtgggctgaatcgctgcttgatgagcgacgccttcagcaagaaggttatttggatagtaggttgatacgcaggatctggaacgaccacttggcggggaggcgggaccactcaagacgcctctggagtgttctcatgttccaagcgtggttggagtcatga

SEQ ID NO: 335890 - DNA, 1476 bp, Pseudomonas aeruginosa
atgcacaacgagtcccgccctgaagcccccttgcgggtgctggtggtcggcgccggcttcgccggtctcggcttggcgatccgcctgcgacaggcaggcatcgacgattatctggtcctggaaaaggccgccgatgtcggcggttgctggcgggaaaaccgctacccgggcgccgcctgcgacgtcccctcgcatctctattcgttttccttcgagccgaaggccgactggtcgcgcaagttcgccccgcaggcggaaatcctcgactacctgcggcattgcgcggacaagtaccgtctgcgcgagaagatccgtttccactgcgaggtggaggaggcccgtttcgacgccggcagcggcgaatggcaggtgcgctgcgccgatggccagacgctgcgcgcacgggccctggtctgcgccaccggccagttgagccggccgctgctgccgcgcctgcccggcctggagcgcttccagggtccggcgttccactcggcgaactgggacgccgaggtcgagctggccggcaagcgggtcgcggtgatcggcaccggagccagcgccatccagttcgtcccgcggatcgccccgcaggtgcaacgcctgtcgctgttccagcgcagcgcgccttacgtgatcgccaagccggaccgcacctacgccgactgggaacgccgcctgaaggcgcgctggccgtggctgcaacgcctggatcgggggctcaagtacctgcaccacgaatcgcggatgctcgccttcgcgaccttcccggcgctgatgaaggtgatgcggctgagcttccatcgtcacctgcaccggcagatcgccgatccgcaactgcgcgcgcggctggttcccgactacccgctgggttgcaagcgcatcctgatcagcaacgactattacccggcgctggccaggagcaatgtcgaactggtcgacacgggcattcgcgaagtcaccgaagacgccgtggtcggccgtgacggccgccggcacgaggtcgacgcgatcatcttcggtaccggcttcgccgccaccgagttcctcgccccgatgcgcatcctcggcctcgacggacgcgacctgcggcaggcctgggcggatggcgcggaagcctacaagggcatcagcgtcagcggcttccccaacctgttcatcctttacgggccgaacaccaacctcggccacaactccatcgtctacatgctggaaagccagttcccctacgtgctcggctgcctgcgccagctccaggcgcagggcttgcgctacctcgacgtgaagcccgaggtccagcggcgcttcaacctggaggtgcaacaggggttacgccataccgtctgggagcgtggctgcgacagctggtacaagactgccgccggcaagaacaccaacaactggccgggctacaccttcgtctatcgctggcgtacgcgccggccggagcttgccgactatgacctggcccgctga

SEQ ID NO: 335891 - DNA, 1284 bp, Pseudomonas aeruginosa
atgagcggcgtcgcccgcgaggccatggaggacgtcgcgccggcggcgcctggcgtcggcgagttcggcgtggccagttgtggggtgctgctggcctcggtagtgggggtgatcttcggccccaccgggctggtgatcagcagcttctcgctgttcatcgagccgatcgccgccgacctggactgggaccgcggccagtcggcgctgccggtgaccctgctgggcctggcggtagccctgagtagcccgctgaagggctggctggtggatcgctggggcgcgcgcgccctggtcctgccgctgaccgccgcgctggccctgtgcctggccagcctggcgctggcgcgcagcggctggcagctatacctgctgttcgcgctgctcggcctgctgacgccgggcaacattccctatgcgcggattctcggcggctggttcgagcgtcgtcgcggcgcggcctacggcatcctcggactcggcttcggcgtcggcgggccgctggcgctgtacctgggcagcgcctgcatcgacgccttcggctggcgcgccaccttcctcgtctatggcctgctcgaaggcctcctggcgctgccgctgctctatgcgttgttccgcgagcgacccggcgacctgccgcaggcgcggcgcacgccagccgacgcgctgcccggagcgacgccaggccaggcctggcgctcggcggacttctggctgatcgtcggcaacctgatcctcggcgtgttcgccgtcactggcgtgatggtgcatggcgtgccgctgttgcaggagcgcggcctgtcgcgggaagtcgccaccgacgtgctggcggcgctgtgggtcggcatgatcgtttcgcaaccggcgctgggctacctgctggaccgctacgacaccccgcgcatcgccttgccgttcgccctgctggcggcgctcgggctgctgctcctgctccttggcggaccgccggcgctgctctggggcgcggtattcctgatcggcctgggcgccggcggcgagaccggcaccacccagtacttcgtcagccgctacttcggcctgcgccatttcagcgtgatctatggctcgatccagcccttcaccttcgccatcgccatcagcctggggtcctggctgctgggttacttctacgaccgcgcgggctcctacgcgggctcgacgctggtcctgctcggcgcgttcggcgtggcggcagggctgctggtcatgctcgggcgctatcgctacgccatcgacggggaggcatgcagccatgggcgagactga

SEQ ID NO: 335892 - DNA, 1854 bp, Pseudomonas aeruginosa
gtgatcaacgtcatcctcaagtcggccgaccacggcggccggctcgcctacgacaacggtcgctacggcgatggcgacggcctgacccagaacggcggggtgaatggcggcctgcgtttcggcgagagcggtttcctcaacctcagcgcgcagttccgcgaacaggcgcggaccatccgcgccggcatcgaccagcgtaccgggcactacggcaacccgtccatcggcgacccttcgctgcaccgccaggcgctggcctacaacgccggcgtggcgctggacgacaacgtcgagctgtacagcttcgccacctatacccatcgctcggtgtcctcggcgcagatctaccagttgccgtccctggcgccgcgactctatccgaacggcttcaccccgcgcatcaccagcgacgaggacgactattcgctgaccctcggcgcccgtggcggcgagctgttcggcgcctgggactgggacctcagttcgacctacggtgccgaccgcccggagatcggcatggaccattcgatcaacctcgccctctacggcgagaccggcgattcgccgcgctccttcgacctggcgcgctacaaggccacccagtggaccaacaatctcgacctgcgccgcgacttcgacctcgcctggctgccggcgccgctgaatttctcctggggcctggagcagcgccgcgagctctacgaggtcgaggccggcgatccctggtcctactacaacggcggttccaaggcactccccgggcaggcgccggccaccgccggacagtggagccgcgacgtgctcggcgcctatctcgacctgtccatcgccctcgacgagcgctggcaactggagacggcggcgcgctacgagcactacagcgacttcggcagcaccaccaacggcaagctcgccagccgctaccgcttcagccccgaggtatcggcgcgggccagtctcagcagcggcttccgcgcgccgtcgctggcccaggagaactacacaagcctgggcgtctcgccgaccatcgccagcggcctgctggcggtcaactcgccggcggccaggctgctcggcgccgaagacctggagccggaaaaatcgatcagctacaacctcggcctggtgctcgatcccttgccggacctgaacctggccatcgacgcctatcgcatcgagatccgcgaccgcatcgtcgacggtgccacctattccggacagccggcgatcgatgcgctgcgcgccggcgggatcagcatcccggccggactgacccaggtcagcacccactacatgaccaacggcgccgacacccgtacccacggcctcgacctcaccgccagctacctgacccggctcggcgagtggggccggatcgactggcgcctgggcgccaacgtcaatcgcacgaagctggtcaggaatcatcgcggacgcaacggccagccgctgctcaacgaccagcagcaggcctggatcaccagctccacgccgcgcagccaggtcagcctgcaggccgactggagctaccggcgctggggcctgaccctgcgcgaaacgcgctacagcaagacggtttccaaactggactactacaccggcgagcatgcctattcgaccacggtcttcaaccgcttcgagaactcgcccaagtacatcaccgacgttgccctgcgctatgcggcgagccgcaacctgaccctgagcgccggggccaacaatctgttcgacgtgaagcccgacaagctgccggccgagagcgcctacctcggcttcaaccagtacgacacctatgcctcgcagatcagcttcaacggcgccttctactacctcggcgcggcctacaccttctaa

SEQ ID NO: 335893 - DNA, 825 bp, Pseudomonas aeruginosa
atggaacagatcacccatctcagcagcgggattcccggcgtacgcctgatagacgccgagcacaaccgcttttcctttccccggcacttccacctggagtaccacatcggcttgctgttgcagggccggcatcgctatgccgccggcggcgaacggcgcctggccggggccggcgacgcgttgctgatggcgccggaaagcatccacgacggcagcagcgccggcgaggagggctaccgtatccgcgtcctggcgctcgatgccgactggctggagcgcgccagccgtgacttcagcgacggccgtcggggggcgccgcgtctgaccagtaacctgatccgcgacgagcgtctgcagcagcgcctgcgtcagttgcacctgggcatgctcggcggagcggcggcgctggagaaccgtctggccctggaagagcacctctggcaggcgctggcctgcctgctcagcctgggcagcagcctgcgcctggaggagggcgaccgggaaggcttcggccagcgcgactggacgcggctgcgcgactggctggagtcgcgcctggagtacccgccgaacctggaggaactggccgccttctgcggcctgagcccctggcaggtgctgcggcgcttccgccgtcactgcggcctgccgccccaccagtggctgacccaactgcgcctggagcgcgccttgccgctggttctgcgcggcgagcagccattgagccaggtggcccagcagttcggtttctacgaccaggcgcacttcagccgtctgttccggcgcacctatgggttaccgccggcgcgcctgcgccagcgctga

SEQ ID NO: 335894 - DNA, 438 bp, Pseudomonas aeruginosa
atgagcctctggcgacaaacgcccgacctggagcaactgaacgcctcgcagaagaacagcatcggcgacctgcttggcatccgcttcgaagccttcgacgacgagtcgctgaccgccagcatgccggtcgactcgcgtacccaccagccgttcggcctgctgcatggcggcgcctcggtggtcctcgcggaaagcctgggctcgatggccagctacctgtgcgtcgataccagccagtactactgcgtcggcctggaagtgaacgccaaccacctgcgcggcctgcgcagcggccgggtcaccgcggtggccagggcgatccacctggggcgcaccacccatgtctgggacatccgcctcagtggcgacgacggcaagccgagctgcatcgcccgcctgaccatggcggtggtgccattggcgggcagggcgggctga

SEQ ID NO: 335895 - DNA, 1668 bp, Pseudomonas aeruginosa
gtggtcactgcaaatcgtctgccgctcgaagtcttcttcgagcgcgaaaagcgtcatccgcaacggcgttacctggtgcagcccatcggtggcggccgggtcgaggagctgagctggggcgaggtgggcgaccaggcgcggcgtgcagccgcctggttgcgcagcctggatctccccgccggcagccgtatcgcgatcatctcgaagaactgtgcgcactggatcgtcactgacctggcgatctggatggccgggcacgtttccgtccccctctatcccaatctcaccgccgagtcggcgcgccaggtgctggagcattccgagtcggcggtggtcttcgtcggcaagctcgacgactggccggcgatggcgcccggagtccccgagggcataccgaccgtggccatgccgttgcacccggaagggcgtttcgaccgccagtggagcgacctgcaggcctgcgcgccgctcgaaggcgacacgccgaccgccgccgagcaactcgccaccctgatctacacctctggaaccaccggcgtgcccaagggggtgatgcacaacttcagcagtttcgccttcgccgccagccgcggcgtggaactgttcggcacccgcgaagacgaccggatgctctcctacctgccgctgtgccacgtggcggagcggatgttcgtcgagatggggtcgctctacgggggaaccacggtgttcttcgccgaaagcctggacaccttcgtcgaggacatgaagcgtgcgcggccgaccctgctgttcggcgtgccgcgcatctggaccaagttccagatgggggtgtattcgaagatgccggcgcagaagctcgaccgcctgctgaagctgccgttcctcggccgcatcgtcggtcgcaaggtgctcgccgggctaggcctggacgcggtgcgctacgcgctctgcggcgcggcgccggtacccgaggcgctgctgctctggtatcgccgcctgggcctggatgtgctcgaggtctacgggatgaccgagaacagcggttactcccacgtctgccggcccggcaggcagaagaccggctggatcggccagaacagccccggcgtcgaggtacgcatcagcgacgagggcgaggtgcaggtgcgtagcggcgcgaccatggtcggctactacaaggagccggagaagaccgcagaggtgctcaccgccgatggtttcctgcgcaccggcgacaagggcgagcaggacgccgaaggcaacctgcgcctgaccgggcggatgaaggaaatcttcaagaccagcaagggcaagtacgtggcgccggcgccgatcgagaaccgcctggcggtacacgatcgcatcgagcaggtctgcgtggtcggcgagggcctcagcgcgccgctggggctctgcgtgctctccgaggtcggtcgccgggaggccctcaacggtacccgcggggcgctggaaagcagcctgcgggcgcacctggaacaggtcaacggtgcgctcgacaagcacgagcgcctggtcggcctggtcctggtgcaggaaacctgggcggtggacaacggtttcctcacaccgaccttgaagatcaagcgcaatatggtggaaggtgcctatggctcgcgcttccacgaatgggtggaacgccgcgaggccgtgctctggcacgaatga

SEQ ID NO: 335896 - DNA, 867 bp, Pseudomonas aeruginosa
atgggttttcccggccccgggctgggcggcataatagcgcgttcgtcggtgcccggccctttcgcgttagcgcggggccaacgagggccgaagagggaacacggagccgcggtcttttcgaagcccgggcctagccgtggctgcccccgcaactgtatgcagcctgtattcgcgccattcgccactggattaccgggaaggcggcgcgaagcggaggttcctcccccgggtggaacgccgggctgcgagccaggagacctgccgccgaaaccagtcgcgagtgccaacatcgggcggggtgtaccgatgccgtggtctgtccctgggggacagcggtgcggtcgccgcgacgccgattcgagtagcgtttttgaacgacgaccagaccccggcgcccctgcccgtaccacgtccgtcgccctgtcccggcctgctgcgtatcgtccaggcgctggacggcggcatctgccgcatcaagctcgatgccggtcgcctggacgccgcccaggcacgcgccgtggcggccgcggcgcgggattgcgccagcggcgtgatcgaggcgaccaaccgttccaacctgcaattgcgtggcgtccgccgcggcgaggaagagcggctcgtccgccgcctgctggacgccggcctcggtccccggcatggggccctggccggcgccgacgacgtgcgcaacctgatgctcagcccggccgccgggctcgatccgcacctgtcgctggacgtgcgcccgctggccacgcggttgctgctgcggctccaggcggacagccgctaccacgcgctgtcggccaagttcgccatccagctggacggcggcgaagacctggcgatgctcgaacatccccatga

SEQ ID NO: 335897 - DNA, 2157 bp, Pseudomonas aeruginosa
atgccccgctttagccgtttgcgcaccgagcctttcgccctcggcctctccaccagcctgctgctggtaccgcccgccctcgccgaaaccgaggaagccgccctcgccctgcccagccagttggtcagcgttcgccaggatcccgccgaactcgaccacatcgacctcgccactccggtcagtgccggttcgcgcctgggcctcagcgccctggacaccccggcgagcaccagcagcatcagcggcgaggaagttcgccgacgcaacaaccccagcgtccaggccgccgttacccgcagccccggcatcagcttcatcggcacccccggagatggcggtaccggcctctcggcgcgcggcttcagcggccatgcatcggtgatgcaactgttcgacggcacgcgcctgtacaccggcatgggcacggtgaacttccccagcgatccgtggatggtcgagcgcatcgacgtgatccgcggcccggcctcggtgctgtacggcgaaggcgccaccggcgcggtgatcaacgtggtgccgaagaagcctttcgccggcgagatccgcaaccacctgcgcctcggctacggctcctacgacaaccgccagttggccctggacagcggcggctcgctgaccgacagcctcagctaccggctcaacctgaaccagcagcagagccacggctggatcgaccgtggcgactcgcgcaacctgggcatcagcgcggcgctgcgctggcaggccagcaacgatctggccttcaccctcgcccacgactatggcgaccaggagccgatgaacgacttcggcaccccgctggtcggcggcaagtaccacaagcgcctgcgcgagaagaactacaacgtgcgcaacgacgtgcagcgctacaacgaccagtggacccgcctgaccagcgactggagcctttccgacagcgtcaccgcgagcaaccagttgtactacatcaaggcccgccgccactggcgcaacgccgaaacctacgaatgggacgtcccgcgcgaagagctgttgcgcagggactacctgcgcatcagccacgagcaggagcagatcggcgaccgccagaccttcgccttccagcacgccctgttcggcctcgacagccgcaccctggtcggcgccgagtacaaccgcatccgcttccgcctgagcaacaactcgccctataccgatgtcggcggcgactacatcgacccctggcatcccgcgcccggctacttcgaaagccgctcgccctaccggccgcactcgcgcagccagacccgcaccttcgccctgttcgccgagaaccgcctgcagctcaacgagcgcctgtcgctggtgaccggggtgcgccgcgaccagaaccatatcgaccgcgacgacctgcgcgccggcacccgcagcgaccgcagcctgcagggcggcaactggcgcgccgggctggtcttcgcgctgaccccggaactgtcgctgtacggccagtactccaccagcgaagacggtgtgagcaacctgatcaccctcaacgcggcccagcagcaaatggacctgacccactcgaagcagaccgaggtcggcctcaagcaactgttcccggacggtcgcggcgaatggaccctggccgcctaccatatcgtcaagaagaagctgctcagcgccaacccgctgccgccgcacgacgcgcagcaggtcggccagcagagttcggacggcctggaggccagcctggaactgaacctggcccaggactggcggctgtcagcgaacgccgcgctggtgcgtgccgaatacgacgacttcgacgaaacgatcgacaagcagacctactcgcgcaacggcaaccgccccaggaacgtgccacggcgcaccgccaacctctggctggacaagtccttcgccgagaccctgcgcgtcggcaccgggctgcgctacgtcgaccggcgctacgccgacgccgccaaccaggccagcctgcccggctacacggtggtcgacgccaacctgggctggcgggtacggccggacctgaccctcggccttgagctgtacaacctgttcgaccgccagtacgccctggctgacaacaacaacggccagcaatggatcatgggccagccgcgctcgttcaacgtcaccgccgacttcagtttctga

SEQ ID NO: 335898 - DNA, 948 bp, Pseudomonas aeruginosa
atggaaatcgtttatttagatcaaaacaaatggattgaattagcacgcgctcacacgggaaaaacctgtccagactcaacaaaagaactatatatccaattaaccaaagccgtcgaatcgagaaaggtactattccctctatcagtgtcgcacataatagaaacttcaaaacgtaacgacgctatcagcagagcagagctagtagaaactcaagcagtttttagccgaggctactgttacagaagccgcaagagtcgcttgacagttgaaatcggccaagcactacaaagaattttcaatttaactccctctacgctccccttacattgggccattgccccctgtttcctagaggcatttgagcccatggattcccttatcgcctcaacgccggagaggcagagaatagaaaggcttctaaagcacttcactccagccgaaacatatatagagtttatgaaacagcaagacgatagtgtacgacgtcttgttcacaacaaaataacaaacgaactctcatctctaatagatcgaattgaaaaccggcgtacaaaactaagcggcgaaaaatttgaaactcgtcgacgcatacacttagcacagctttttttagagcaccaagaaaaattcataagaactcttacaagcctcagcatccctatagaagagtatgagaaacttggagaaaaactaaaacctctaattgaggacgtgccaactttaaacatcgaagcagaattagctgcccgcttggaggcggaaccaggacctctatcaacgaatgacttctttgatatgcagtccttctatacagcaatgccctactgctcttggataattgctgaaaaggcctccatatcacgagcaaaacaagcaaaattccactcaaagtacaatgtaaaactttcccactcaattttagatttgataaacatatatcaagattaa

SEQ ID NO: 335899 - DNA, 219 bp, Pseudomonas aeruginosa
atgacaggtgggatatttgtcccggtacgcttggttaagcgccttgtctttcaccgtaatgtaaggtggattacccactacgacgtggtaacgctgaccgaggatcctttcgagcttttcaggatcttcaacctcgtaaacatgcttcttttcctcatccagcaaaccgccctgaataccctgcccctgccactcaaatcgacggccatgcaagagtga

SEQ ID NO: 335900 - DNA, 1281 bp, Pseudomonas aeruginosa
gtggcgaatcttgctgttgtgctggacgaggcgcgggctgaggaaagccgcatctgggcacagatgatcgccttgcaggaagaactcgactggcacgtctatcccctttacggcctgatcaacgaacccctctgttatgcaggcgaagtctccgcagtaggcctgggcgaacgggccttcgagattcatctggcacgccgaatggctgctggtgaggttgaatcgacctggttcgagcgtcacggcagctcgccgatcaccgaggttccgcagcactggccagaggattaccgcgcgttggtcgaacgccgtctgcaggccatcgagcagaacccgtggatcgcgctggtagagcagcctgaatacaagcggcgctggaaccgtgaaagctgggaagaccgtctgcaggctgccgcctgtgaatggttgctagatcgctgcgaacaggcctgcaagtctaccggactgcagacctgcgcccagttggccgaccgcctgcgccgagatgccgatgtgctgccagtggccgaggtgtattgcggcagcgccatattcgacctacagacactggtgtgcgagctggtggacggcgaaaacgtgccgcagatggccgccgcccgcctgaaggctgaggccatgttgaagttccgcgcctggcaggaaacctgggacaagcagcggctggaagatgcgattgacgcccgctatggcgtggcgcagcccctacctgccgaagacgcccaggacccggagaagaaagccaagtgggaactagccaaggcccgcgccgagctagagaagcagaagcaggtgggtgagattgtggtaccgccccagtacaggccggtggatttccgcaagccgtcttactgcagcctgcgtggcaagctggatgtcccaaaagagcgattcttctcattgcctggttgcgaaaaaggtggtgacagtacgctggttatcggctgggccggtttgaaccatttgcaacgtgcccaggtaatcgctgcctggtacctagatcgtaaagacggcgagggatggggtgctgagcgactgatccccatgcttgttgcgctggatgagctggtcccctggttgaagcaatggcacaacgaggtggatgcagagttcggcgagcgcatgggtgattactacgaaggcttcttgctcgaagaactgcgtaatctcgagattactcgggctgatcttttgagctggcagcctgctgcagtggctgggaaacgcggcggtcgtaaaaagaaagtggctgagcagaactga

SEQ ID NO: 335901 - DNA, 891 bp, Pseudomonas aeruginosa; identical to SEQ ID NO: 324770

SEQ ID NO: 335902 - DNA, 2655 bp, Pseudomonas aeruginosa
atgtccaacccgcgttcgccacgtcttcgacttgtccccgtgctctgcgcggtcggcctggcctgccttggccagcccggcgagtcggcggcagaggaggtccgcgccaccagcagcgccgagatccagcgcttcgacatcccggccggcgaactggcccaggtactgctgagcatagtccgccagagtcgcaccccgatcgccttcgaccagcacctggtggagggcctgccggcaccggcgatccagggctcctacagcgtcgagcaggcgctgcagcgggccttgcagggcagcggcctggaatacagccgcagcgccgctggcgtgctcagcctgcaacgcgccacggcgccggatgccgcgctgccggcggcgaagcccgccgggaccctggccacggtggtggtcaccggcacccgcaaggccgatgtcaaggccggcgagagcctggcaccgatcgatgtggtcagcgccgagcaattgcgcgacagtggcagcggcgacctgcgcgacgccctggtgcgcctgctgccctcgctgtcgcgccaggcccaggcctacaacgcttcggcgctgaccaacgcgcagtcgctgcgcggcctgagtcccaaccatgtgctggtgctggtgaacggcaagcgtcgccacgaaacggccaatctcaatatcagcggcgggctggagaagggctccaccggcgtcgatctggacaccatcccgatcaacgccatcgagcgggtcgaggtgctgcgcgacggcgcctcggcgcagtacggctcggacgccatcgccggggtgatcaacgtcatcctcaagtccgccgacagcggcgggtcggcggccgctgacgtcgggcagaccggcgacggcgacggcttcacccatggcggcggggggaacatcgggctggccttcggcgatagcggcttcgtcaacctcaccgccgaatatcgcgagcaggagcgcacgatgcgcagcggcatcgatgagcgcaccggtcggcgcgacaacatttccatgggcgatcccgcgttccaccggcaatcgttggcgctcaactcgggtttcgggttgggcgacgatatcgaggtgtacggcttcggcacctatacccggcgcaaggcctcctcggcggccaactatcgcctggcttcggtggcgccgacgctgtatccggacggcttcacgccgcgcccgaacagcgacgaggacgactatgcgttcctcgccggggtgcgcggcgagcgtctgctggatgcctggcactgggacctgagcagtggctacggcgccgaccgtcccgatatcggcatgacccagtcggtgaacgcggcgatctaccgtgaaaccggcaacagtccgagaagcttcgacctggcgcgctaccgcaacagccaatggaccagcaacctggacctggggcgggaattcgaactggatttcctcgctgctccgctggcgttgtcgctgggtgcggaataccggcgggaaagctaccgcatcgacgccggcgacccggcgtcctactacagcggcggggcggaatccctggctggcctctcgccgctcagcgaggggcaatggtcgcggcacgcctgggcgtcctacctggacctgggtacctccctgaccccagcctgggaggtcgacgtggcggtgcgccacgagaaattcagcgacttcggcagcaccaccaacggcaagttcgccacccgttaccagttcgatccgcgggtggcgctgcgcgccagcgtaagcagcgggttccgcgcgccgtccctggtccaggagcactacaccggcctcagcgtcggcccgaccatcgcccttggcctgctggcggccaactcgccggcggcgaagatgctcggcgccgacgaactgcaaccggagaagtcgaccagcttcaaccttggcctggtactcagcccgtgggaaaacgtcgggctgaacatcgacgcctaccagatcagcatccgcgaccgcatcgtcgacagcgccacctattccggccaggaagccatcgatgccctggccgcggcggggatctcgttgccggccagtgccagtacggtcagtacccactacctggccaacggtgccgacacccgcacccgcggtgtcgacatcaccggtcactacctcgtcgcgcttggcgagtacgggcaggtcgactgggaactgtcggccaacttcaaccgcaccaccttgcgcaagaaccatcgaggcgccaacggcgagccgctgctcaatgcccagcaggtcgcctggatcaccagctccaccccgcgcagccaggtttccctcggcggcacctggagccgccaggactgggaggtcagcctgcgcctgacgcgctacggccggaccagctcggaactcgactacacggtagggccggacgcctggtcgacggagaaattcaaccatttcgtcaacgacccgaagtacatcaccgacatcgccgcgcgctaccggctcagcgccgacctgacgctgaccgccggcgccgacaacctgttcgacgtccgtccggacaagctgcccgcgcagaacaccacctatggcgacgtgctgcgctacgacacctatgcctcgcagatcggcttcaacggcgccttctactacctacgcgcggcataccgcttctag

SEQ ID NO: 335903 - DNA, 2973 bp, Pseudomonas aeruginosa
gtgggccaggcggttggcccgggcgtgcagttcggcgtagccgaggctgccgccgtcccactccagggcgacgcgttcggcggaccgcgccagttgccgctccagcagctccggcagccaggcgcgcgccggctcgcagggcgcgctgccccattcggcgaggtgcgccgcctgctcggcgtcgaccagggcgatatcgccgaggcagcgctgcgggtcttccgcgacctggcgcagcagctccaggtattgcgcggcgaaacgccggatgctggcctcgtcgaagaggtccgcggcgtagtcgaaattcagggtcaggcgaccgcgagcgtcctcctcgctctgcagttgcaggtcgaacttggcttcgcggctgtgccagggcagctcgtcggcgagcaggccgggcagccggcgcaacgccgacaggtcgcgctgctggtggttgaacagcacctggaacaactggccgccctggccgcaggctgcgagcacctggtcgaacggcaggtcctggttggcctgggcgccgagggtcgcctcgcgagcctcgccgagcaacgcggcgaacggctggcgcgcccggggcgtgccgcgcaggaccagggtgttgatgaagaagccgaccagcccctgggtctccaggcgctggcggttggcgctgggcacgccgatgcggatctcgccctgcccgctgtggcgatgcagcagcgcctggaacgccgccagcagccacatgaagacactcgcctcatggtccagcgcggcctcgcggatagcccgcgccagggcttcgtcgacccgcaggctgtagcgcgcggcgggcgacgcctggcgcgccgtgcgcggatggtcggtggccagttccagcaccggcgccgcgtcgcccaggcgctcccgccagtaggccagttggcgggcgccctcgcccgcgtccagccactgccgttgccaggcagcgaactcggcgtagtgcagttccagcggcgccaggtcggccggctggccgccgcaggcttcggcgtagagccgcgagaattcgtcgagcagcaggttcagcgaccaaccatcggcgacgatgtgatgcagggtgacccagagctggtgctcctgttcgtccaggcgcaccaggctgacccgcagcagcggccccttttccaggtcgaacggctgctgcgcctcggcttcgcggcgctgcgcggcagccgcggcgcgttcgtgctcggccagcgcggcgaggtcgacgaactgccaggcgaactcgccccgctcgtcgatacgctgcaaggccgcgccgtcgcgctcgaggaaacgcgtgcgcagcgcttcgtggcgttcgaccaggcgctggaagctggcgcgcagcgccgcttcgtccagctcgccgcgcaggcgcaggccgccggggatgttgtaggcggcgctctgcggatcgatctgccaggtcagccagagacgctgctgcgccgccgactgcggcaggtcgacaccgcgcggcaggtgcgccatcggtgcctcggccggcaggccggcggccagttggcgggccaccgtggcgctgaaggcctgcagggtcggcgcctcgaacagttggcgcaggtcgagggcgacgccgagactgtcgcgcacctgggcgaccacctgggcggcgccgatggaattgccgccaagcaggaagaagtgatcgcgcggcgctacctgcgccacgcccagccgggccttccagatctcgccgatgcgtgccagcagttcgtcgtcgcctgccggcggctgcgcctcctgcacggcctggaggccgggaaacagcgcatagctgtccaggctgccgtcttccaggcgcaggcggcaggcggaacgttgcagcttgccgctggacgtcttcggcaaggcgccgggattgagcagcgccaccaccttcggcgcttcctggtaggcctcggccaccgcctggcggatcgagtcgatcagctcctgggccggcaccgatttctggacgccgcgaccgatctcggcggcgatgccgatgccttcctcgccatcgaccgtgaccgcgaaggccgcgaccctgcccttgcgcgccgacggcacctcgctctcgacagtgcgttcgatgtcctgcggatagaggttgtggccgcggacgatgagcatgtccttcaggcgcccggtgacgaacagttcgccgtcgcggaggaagccgaggtcgccggtgcgcagccaggtgcgcccgtcacgctcgacgaaggtcttcgccgaagcttccgggttgcgccagtaaccgtgggcgatgctcggcccggcggcccagatctcgccgacgttgtcgtcgccgaggacctcgccgctcgccgcgtcgacgatcagcacggcgtgttccggctggctgcggccgcagcacatcagcacgctgccttcgccttcggcgatgcggttgcgcgccagcgcctcgccatccaccgccagggcgggaatgccctggccgcgctggccgccggtgacgaacagggtcgcctcggcgaggccgtagcaggcgaagaaactggacgcatcgaagcggctggcggcgaatttctcggcgaagcgttccaggctgtcctggcggatcggctcggaaccggagaaggctacccgccaaccgctcaggtcgagacgctgcagggccgactcggcgacccgctcgctgcacagccggtaggcgaaatcgggaccgccgctgacggtgccgccgtactggctgatggcttccagccagcgcaccggacgttcgaggaagtagcgcggcgacatcagcacgcagggtacgccgctgaagatcggttgcagcaggccgccgatcaggcccatgtcgtggtacagcggcagccagctgacgatcacgtcgtcggcaccgatgccgaagcctcggcggatcagcacctcgttggcgaccaggttgccatggctgacctgcacgcccttgggcagtgcggttga

SEQ ID NO: 335904 - DNA, 963 bp, Pseudomonas aeruginosa
atgccgcgcggaagacggcgagcgttcgccgatcggccggccgctgggcaacgtggtctgccgcgtgctggacgccgagttcaacctactgccggccggcgtcgccggcgagctgtgcatcggcggcctgggcctggcccgtggctacctggggcgcccggcgctgagcgccgagcgcttcgtcgccgatccgttctcggccgccggcgagcgcctgtaccgcaccggcgaccgcgcgcgctggaacgccgacggcgtgctggaatacctcggccgcctcgaccagcaggtcaagctgcgtggcttccgcatcgagccggaggaaatccaggcacgcctgctggcgcagccgggggtggcccaggcggtagtggtgatccgcgaaggcgtggccggcagccagttggtcggctactacaccggcgctgtcggcgccgaggcggaagccgagcagaaccagcgtctgcgcgccgcgctacaggccgaactgccggaatacatggtcccggcgcagttgatgcgcctcgcgcagatgcccctcggcccgagcggcaagctggatacgcgggcgctgccggagccggtctggcagcagcgcgagcacgtcgagccgcggaccgagctgcaacggcgcatcgccgcgatctggagcgaagtgctcggcctgccgcaggtcggcctgcgcgacgatttcttcgaactcggcgggcattccctgctggccacccgcatcgtctcgcgcacccgccaggcctgcgacgtcgaactgccgttgcgcgcgctgttcgaggccagcgaactggaggccttctgcgaacaggtccgcgcagcccaggccgccggacgcaccgacagccacggcgcgatccgccgcatcgaccgcgagcagccggtgccgctgtcctactcgcagcagcgcatgtggttcctctggcaactggagccggacagcccggcctataa

SEQ ID NO: 335905 - DNA, 2322 bp, Pseudomonas aeruginosa
atggtagccgcgcgccaggccggcgccgccgacgtagagttcgccggtcgcgccctgcggcaccagggccaggtcggcatccaggatgtaggcgacccgcgcgccgaccacgctgccgatcggcacgctggcggcaccctcctccagtcgttcgggagccaggcaggccagcggcatgaccaccgtctcggtcggtccgtaggcattgaagaacgacgccggggcgaaggcctggcgaatccgttgcaggtgctcgccggtcagcgcttcgccgccggtgatgcacatgcgcaccggcaactgccggccctggctctccagccactgggcgagctggctgccgtagctcggggtgaagccgaggatgctcacgccctccgcacggatcagctcgcagatttcctccgcgccccactggccctgggcccgcagcaccacgcgggcgccgcacagcaacggggccagcaggcgctcgctggcagcgtcgaagttgatcgaatagaagtgcagttcgcaatcctcggcgcgcatgccgaagcgctcgatcaccgcggcgcagtgcatggcgatctcgccgtgggagaccgccacgcccttcggcttgccggtggagccggaggtatagatcaggtaggcctggtgctgcggcccgctcagcgctgccagcggcgcggggtcctcggcgtccagcgccgggccgtcctcctcgaggcaccagcgcgccacgcctgccggcagctcgccgagggcctcgaacagcgccgcgtggctgagcagcaggcgtacgccgctgtcctcgatcatgtattgcaggcgctccagcggatattccgggtccagcggcacgtaggcgccgccggccttgaggatcgccagcaggccgacgaccatctccagcgaacgctccagggccaggccgacccgcacttccgggccgacgccgtgactgcgcaggacgcgcgccagacggttggagcgggcatcgagttcggcatagctcagggtctgcccggcgaaggtcagcgccggggcctgggggctggccgccacgcgggcggcgaacaggccatggagggtgtcctggagccctgcctcgccggccgtgccggcgagcagcagttgcttccgctcctcggcggcgaacagcggcaattcggcaatgcgccgctgcgggtcgcccagcagcgcctccagcaggttctgccagtgtccggccatccgcgcgatgcgcggttcgtcgaacaggtcgcggctgtaggtcaggcagcagccgaggcgctggtcgaggtcggtgacctcaaggttgaggtcgaacttggtcgcccgcgcatcgttggcgatgtactcgacggtcatcccggccagttgccgggtttgctggaactcccagcgctggacgttgcacatcacctggaacaacgggttgtaggcggcgctgcgcggaggttgcagggcttccaccaggtggtcgaacggcaggtcctggtgcgactggccatcgatcacggtctgccgcacctgctcaagcagctcgccgacgctcatctgtccgtcgagccggcagcgcagcacctgggtattgaggaaggcgccgatcagcccttcgctctccgggcggatgcggttcgccaccggcgcgccgatacgcaggtcctgctggccgctgtagcggtagagcaaggccgcaagggtggcggtcatggtcatgaacatggtcagcccgcgggcggcgttgaagcgacgcacgcgctcggccagctcggggctcaggtcgaagcggtagaggtcgccctggtggctctgcaccggcgggcgtggccggtcgcccggcagttcgagcagcggatgctcgttgcccagctgggccttccagtagtcgagctggcgctggcgctcgccgctctccagccactcgcgctgccacacgctgtagtccaggtactggaccggcaacggctccagcggcgattcgcggtcgtcgaggaaggcctcgtagagcgcgcccagttcgcgggcgaagatgtccatcgcccagccttcggtgacgatgtggtgcagggtcaccaccaggtagtgctcgcgctcggccatcttcaccatgcagacccgcagcaacggcccgctctcaaggtcgaagggacggtgcgcctcgctgtcggcgagggtctgcaggtgctgccggcggctgtcgcggtcgagcgcggagaagtcctgccagtccatgtgcaggccgccatcgctatgtacgcgctgtaccggcacgccgtcgacgctggggaacgtggtgcgcagggtctcgtggcgcagcaccagggcctgtag

SEQ ID NO: 335906 - DNA, 216 bp, Pseudomonas aeruginosa
gtgattaagtacctcgtagaaatgtgcaccttccacggcccgactcggcaacgccgctggcatcgcgtccatcagggcatttcccgcgtggaatgccagcgctgggtcgaagagtcggtggctgtcttcccgaccgaagaagaggcccgccgctccttcggcctgacccgcgaacgcgctcggcaggtgtaccgcatccgtggggtgagggcatga

SEQ ID NO: 335907 - DNA, 1200 bp, Pseudomonas aeruginosa
gtgagtacagctgtagccactgaggaagtagtagtttcagatatcttggactctccggaggcaggctctattcagttttactcacaagaacaacaagcactgctgataggcgagatacacgcagcgtgggaaacctgcagaaaagcggttgaagctggcgacaaagatcttatccgagccctgcatataagtgcaaagctacacgaccagtcaactgacttcaaaaaaatacaaaaaaatttgcataaacacaaaagctactttccacttggacaaaatatagatcccggaaaaataaagcctcgattagtagctgtaaaagaaaaatctttagaagaagatcttttcagaataacgagaagctattggtctatgccttattcaaaaggatatggccgtcgcctgcgctttattcttattgacgaacaccatgaggcagttattggaattataggcctccaatccccttcggcggacctagcctgccgcgatcaatacttaggcatcgaaaaagataaaaagctagagctagtaaataacactttggacgcttatacgattggagcaactccggcctatgcagcgctactcggaggaaaactcgtagcgggctttcttcactccgaagaaataagaaagcaatactggcgagtctacggaaataaaagaacaactcttttgaaccgcaaaacaccacaaccattacttgcaataaccaccgccagcgcttttggaaaaagctcaatctataaccgactaaagtataatgaaactcttttagccaaacctctcggatacaccaagggatatggcactctacaccttgaaagtatttaccctaagatcgtcgattttctgaaatttagcggaaagcacgttccagcgggatttggcaatggccccaaagttagatggcagaacataataaaaggattggcagagctcggaatatctagagactatcttgctcacggtctaaagcgggaaatttatatatttgaatttgtcgacaatctaatcgaggtgtgccgaaacggagagaccccaaatatgactcgcttcgacgataatggctggagtgaatattggaaagaaaaatggggggtgcctcgttccttaaaaaactctcactggaaatccgtggactctgtgagcgagattttacgcgccatcccccaacgagaagctattgtttcttaa

SEQ ID NO: 335908 - DNA, 1161 bp, Pseudomonas aeruginosa
atgaagagattcggtaaggctttcagtggctcggagcaagtttgggtttgcttaacgagcctgcaccatcgaagattcattgaggatgtccttcatgtaattggtatgccaatgggggcaagggtcagactcagatatcgaaagcaatatgtttctaaccagttgtggggcgaggttgctagcggtagatttccgtgcagtcatgtcttaatagctctcggcggaactagtgcggcgggaagtagtttggcaattccacttcgacggggtgaggttgcttcggccgaggtgcaggggagtgttcttgttgtagatgtactattagaggattttgttttcgagcagaacgctaatggtcgattttatgatgagctaaagctagtcgggaaagacattcctttgacttttggtagtagcggccgcggcggctgctatctgcaaaaactggatgcacctctgacggctttgtcttcaaataaagatgtaagcggatgggagaaggtttcggaagcgttttgggggattgatgctctggtcggaggaaaaacagcgaccggggtgccgttccttttttatattaatcccaaagataaaacgaaatccaaaatttcttggggcggacgtctaactctggaaatggcgcgaagttattattttgacgttcacactatttctcgaaatggtggagaagcattcaaaaatcctataggtgaggtggtttttgagttttctaactcagcggcgagctttatcagttctcggcgtgttcgggttgattcacggcgagatgttaagactgtagggatttcaactgctccaatttttaaagttgaagatggccacgtctcgattaggactataagttttgaatacggatcagcagatccgggcaagcaaggggatgcagtattaaatgaggttatcagtctcattcttccatcgaaggagagaaaagaggcagtgctggccaggtacgattttccgctaagaatcggtcgatttatgcctcacatagcatcgctacttttaggtgtagcagccggatttgctgtatttaaactatcatcctcggggacgatcactgcatgggattttttggcccctttgatcgtcggggtcttgagttatggaggattgagtctcgggcttaagaaacaatag

SEQ ID NO: 335909 - DNA, 1089 bp, Pseudomonas aeruginosa
atggcaagatttcctcagttgacagaggtcgagaaagtttcagacgaaattgatattctcatctgtgccgctgggttcgaagatagagttctatgtgtacctggtcggatatccgaaagtcacgaaaaaattcgaaagaaaatacttgttggtcaatataaaactaatatatctgataatgcgcgtcggtatgctgtgctggagccgttgctggcgggtttgtgcgaagatatctccttttttaatgcggactctcccgactgcatctataaggctatctccgctgagataagcaacgctggtgatggtgttaaaattggactagatattagtggggcgtcttccactttaatagtttctgccatttacactgttcttaatcattccgtggattctcaccttacgattttctatgcgacggcagagagttaccatgagccatctctaattgatcgagatgtccctataaatctgtggagcagttgtgattacagagaacatggtgttaatggtgttgaagttaatgagctgatgcctgggttgcatcaggagtcaaatccgacttacgtcatcgctttcccatcaatgttctccgctcgtttagaacgatgccttggccatctgggcgtggttccaaaaagcggatcagagaattccgcattttgggttttaccatcagctgctaacgatgaacacgaatggagacagcgccaagcccatagtattgcaatcgatttggtttacgggacgggcgaggatgcgccggttagccttcctgatgaacgatggtgtagttgtgatgcgctggactataagggaagcgctaagattctatatgggcaaatagatggtaactcagggtcaaatatctcaattgttcatttaggaactaaggcccaggcaattggagtagccctggcgctttccgggaggggagaagtagcatttgttaacgccaggccactttctttctctgctgatacatattctcaaggggtcggtaaactgtataaactggatttgggcagctctcgagttatcaaagatttactttcaagtgttggaagtttgtgcgttaagagcttatga

SEQ ID NO: 335910 - DNA, 2652 bp, Pseudomonas aeruginosa
ttggctctggaattggtggggaatatgaatgataaaaaaggtccagtgatttcagatgaaatatcaaagtggttggatgatggtggcccatttccagaggaattggtttttagaaatagggggggcggtaatactacttataatattcttggtcgagatggcagtggatttgtcagggaagtaaaatatcgaaaaggaaaaaaaggctttgtcctgcatgtagtggatccggctactaatcaagagtttgcagcaaagctctgcattcctgaagactacgaagataatagtccattaaatgaagtttccttggcttcttctttaaaaggagcggaggaatatattcatattcctaaggatgtcgggcgtgtcgatgcatttagctcgcaacctggggcagctggttcgaaatcatgggtttgctttattagcgactggctgactggccatgatttgatgtattacttaaataatgagccagagaaaataacaccgtctttagtggtgaatgttgcccgtgtattaatgtttgtggttttgttttttgagtcgaaaaatctaaagcacgatgatttgcatcttggaaatgtcatgttggtggagaccgatagcgatattctggatataaatccaagcgcgccgccacatgtgcttaaaattatagacttgggcagcttgaagccactatcaagaagcacgcttaaaattgatgatgattggtcatctttagctaagtgcttggttgctctctataattttatacaaaaagatagagcggttgcgtctcggcatcccgaatttatgagacttttctcatgctttatttatgatcttgccgatgcagatcccgcgaggaattttccggagaagtccagttactggaggagaatcgatgatattgaatcggtgcttagtaacgttcctgccgttaacggaagtttccatccatttgaagcgataagcgctgaacatcttgccagtgatgatcttttactaagcttgtttgtcgatcacttggaatgggttcagttgattcaatcgccagacccaacagtgcttatagggccgaggggctgtggtaaatctatggtgttccgatatttgagcataagaactcatatcgcgggacacgataatgatgcgaattttctgagtaaggtgggcttctttggtgtatatgtcggctgtgcaagtgatctgcaaaacgatcttttgtggatttcgcgtgagaaaggaagggtaagtagactagcttctgaaataactacctattttaaccttgtgttgactagggaactactaaagtctctttccataagcgctaagtccgagactttacgctctgttcttgggatgactgatacggcccgggtggaaatcgcagatttcgttgtgcaacaaattggtgcgttacccaaggccattcaagttaaaggtatggatccgctgcaaatttgtgcggatcttgttgatggagcaaggctgaacttaggaaaggaacttctctcaggtgcagatgcttcatatgctcttagtggaacctatgttagagagctatgtaggtttgttcaaaggaaagttccagggctggcgaagtggcgaatagccttcttgctggatgactatacttcgcataggttgagtcttgaggttcagcgggttctcaatccggtcgtatggcaacgtgattcaagttttattttcaaagtttctagtgaacctcatggatttgatccggggcatatagataactcgaaaattgatgctaatcgagaatacacgctcgtagatgccggtggtcaaatagtttcttctgagcggaagagttttgtcgagcaactattagataaacgtttagctgctgctggctacagaggaagatgtgcagatctaattggtgatagtaaatataaaaacgatgttgaacttgcatgcgcaatccgagggaaaaagggtgagcgagtaggtcaacgctcgttctattatgggatacatgtgctctctgatgcgtggagcggagatgtatcaacgattttgcatatggtgcgcgagatgtttgcactgtcaggtgtggactctgatagctcaggaattatttctcctaatatccagcacaaggcaattacaaaggtttcaacggccttgcgtgatagagtttcaggctatcatccttatgggaccgagatggctaaggtcttggcgagttatggcgaattggcgaaaaagttgctcgtggagtctccagaccgcttcgataagaaaggcgatccagtttatcaccggcgatataggattgaaatgacattacctgccggcgccgaagtagaggaagcgttaagtcagctgcctaatggcgaaggtgtcgtagcgcttatgcgagagttagtgcggcgcgctatatttgttcagcttccgtctagtcgaggtaaagaatcatcggagcggcgcactttgcggtggcagttacgtgcgtcactattaccaagctttggtacttctttggttcgtgaaagctatatagacattaaacgactggaagattttgccgagtttctaactaatccagatgcgttctcaagaagcacatacgcgcgctatgcgccgagttctagtgatgatttgtttggcgatctttcggaggatgtcctgtga

SEQ ID NO: 335911 - DNA, 729 bp, Pseudomonas aeruginosa
atgggactggatgatcgcgaatggatgcgtcgcgagagtagtgagcggcagcgagaggggataactcggaagcggcgcaaggccttccgttggaacgctctgcacctgtttggcggcatggtgctgcttacagtcctcacgctgacctggccttatctccgttctttcgtagatcgtctctcgacccctgcgcccgtcgaagagagtattccgattgccgaatatcctcaggaccttccggcacctccttctgaagtagcccatcgctcaaccgcgccagaagcctcaaatcgtcgctcactgcgcgattgcctgaacggtgggaatgccatcgacgaaaacgtcattcgttgccagaacggtggagagctgccgcgcgtccctgctccgcagaatacgtctgagcctcaaggcatggtttctcaagaatacctagcgcaatttcaggctgagcgggaccagcgaatagctcggcagggcagtgctcaaaatcacacccaggagcgtgattcgcagtggataaagagctggggtggtggcagcgctatctggctgagtgggttgttattaacaacgtcattgacggtggatctgtctgccggaatcaaggttggggttctgttgagtatcgggagtgcagaaagggcgcaaaggtacattttcgggagcaatgccgcgcttgggctgcacgagcagatagagatcgctcggattggagttatcggatga

SEQ ID NO: 335912 - DNA, 288 bp, Pseudomonas aeruginosa
atgacccgcccgcagatcgttactattgatcttcgtagcgtgcagggcaaagaggcgctgcatgagtacttagcgcaagccctgaaattccccgattggtatggccgaaactgggatgctttctggggttccatcacgggattggtagatatgccggaggtgttggaattccagggatggtccgtattttccgtgactatgccgcaagagtcgaagcagctgatggatctgcttggcgagatggatgagaaatacccgacagaggcaacgaaggtcatttatcgatga

SEQ ID NO: 335913 - DNA, 387 bp, Pseudomonas aeruginosa
atggatttgtcgattcccggggccaaggaagagcgtgccaagctcaagcgcctccatcagattctgaacacctctgacctagtccccgatcaggcgtatcggatgtcctcgggtctctaccccttggttagcttcgtcaaccactgcatcgggctttacctcagcaagaattatgacgtcattccgttatttctcgcccgagcctattcctttatgcaggatcgaccgccgcagtccaatgccactgcgtactacaagtgggtggatgcctacctgcttcagatggcgtacgtcttgagatgcttctccgcagttgcgcccgagttgctggagctgcatctaccaccggacctgattgaggctgggccccaggacattccggtatga

SEQ ID NO: 335914 - DNA, 999 bp, Pseudomonas aeruginosa
gtgaaacgactgttcagcgcctccctgctggccgccggcctggcgctcggcggcgccgctcacgccgcccagcccctgctcaacgtctcctacgacgtgatgcgcgacttctacaaggaatacaacccggccttccagaaatactggaaagcggagaaaggcgagaacatcaccatccagatgtcccatggcggttccagcaagcaggcgcgctcggtgatcgacggtctgcccgccgacgtcatcaccatgaaccaggccaccgacatcgacgccctcgccgacaacggcggcctggtgccgaaggactgggcgacccgcctgccgaacaacagcgcgccgttcacctcggccaccgtgttcatcgttcgcaagggcaaccccaaggccctgaaggactggccggacctgctcaaggacggcgtccaggtagtggtgccgaaccccaagacctccggcaatggccgctacacctatctctccgcctggggctacgtgctgaagaacggcggtgacgagaacaaggccaaggaattcgtcggcaagctgttcaagcaggtaccggtgctcgacaccggcggccgcgccgccaccactaccttcatgcagaaccagatcggcgacgtactggtgaccttcgagaacgaagccgagatgatcgcccgcgaattcggccgaggcggcttcgaggtggtctacccgagcgtgtccgccgaggccgagccccccgtggcggtggtcgacaaggtggtcgagaagaaaggcagccgcgcccaggccgaggcctacctgaagtacctgtggtcggacgagggccagaccatcgccgccaacaactacctgcgcccgcgcaacccggagatcctcgccaagttcgccgaccgcttcccgaaagtcgacttcttctcggtggagaagaccttcggcgactggcgcagcgtgcagaagacccacttcatcgacggcggcgtattcgaccagatctacagccccaactga

SEQ ID NO: 335915 - DNA, 798 bp, Pseudomonas aeruginosa
atgactgccaggatctaccgggaagtcgtcaacccgggaaaactcgacgaaacacagaggggaaacctcgcaagcgaactctacgcgattcacgccaggatctttcatggcgtccagtatgaatccttcgctcgcgaggtcatccactccaccgcccgcctcacccgcatcgccatctaccgcaaccgccagcacgagatcgtcggctactgcgcggtgcatttccacgactcggaagtcttccagtacagcaaggcctgcgtgatccgcgccgagtcggggatcctcccggagtaccgcgggagcaaccagagcattcccttccttacccgccaggtgctgcgctacaagttgctcaaccccggcaagcgcctgctgttcctcgacaccctgatccatccctccagctacgccctggtgaccaagtacgtggatgacgtctggccctgccactgcgacctggaaagccaccacgtgaagttcctcgaacacctgatcgcccagttcagcttcaagcgcagcagcaacgatccgctggtggtcgacaccggctggaccaccaccgaggccgatcacgaacgggcacgctgggctacgcacagcaatccgaatgtgcgtttcttccttgatcggaacccggaatatcacaagggcaacggattgatcacggtattcccgatcaccttgaagaacatctttacggcgacccggcgtttcaagcgcagttcttcggtcaagcgtaaacagcaccagcgttacaacgcagcttcggcgaaagtcgggaatatcgcgttgtaa

SEQ ID NO: 335916 - DNA, 957 bp, Pseudomonas aeruginosa
atgcgtcagaccctgagcctgttcctgcttctctgcctgctcgtcggccaggcctgtgccgacgagcgcgtgaccctgcgcctggccgaccagaagggcaacatgcgcgcccagttggaggctgccggcgcgctggacgacctgacctacgacatccgctggttcgaattccccgccgccgcccccctcgccgaagcactcaatgccggtgcggtggatgccggcatcatcggcgacgcgccattgctcttcgccctggccgccggtgcccggctgaaggccatcgccgtcgacaaatccgatccctacggtaccgccgtgctggtgagaggggattcgccgctgcgctcggccaacgacctgaaaggtcagcgcattgccaccgggcgcggttccatcggccacttcgtcgcgctcaaggccttggcctcggtcgggctgggcgagaaggacgtcgaattccgcttcctcggcccggtggacgcgaaaatggccctcgccaatggttccgtggatgcctgggcgacctgggagccctacaccgcgttcgcggagaccgccgacaaggctcgggtactggtcgacggtcgcggcctgtgggctggcaacagcttcctcgctgctaccgatagcgcactggccgacccggcgaaacgcgccgtgctgcaggactacctgcaacgcctggccagcgcccagcgctgggcgtacctgcacctggacgagtattcgcgaagcctggcgcagatcatcggcttccccgaggacgccgcgcgcttgcagttcgaacgccggcgcttgcgttggcaggcgctggatgagcgaacgctcggccagcagcaggagaccgccgatttctaccaggcccatggattgattccgcagcgcctcgatgtgcggccgaccttcgccagcggctttgcggtcaggcaggcgtcggatgcggatatccggtag

SEQ ID NO: 335917 - DNA, 2988 bp, Pseudomonas aeruginosa
atgaccgacgaccactccttccgccctcgccccacctcgttgtcagccgccctgctgctgggcgcctggatcgcacagccggccacggccgcctatgtcgaagccggtcggcccggcgatccggccagttggcgctccgccgaataccagcaggactggggcctggaacggatgcgggccgaccaggcctatgccgccggcatcgacggccagggcgtgaagatcggcgagatggactccggtttcgacccgagccatccggatactcccgcctcgcgctaccagccggtgacggccagcggcacctatgtcgacggcacgccgttcagcgtcagcggcgcgatgaacggcaacaacgactcccacggtacccacgtcggcggcaccctcggcgcctcgcgcgacggcgtcggcatgcacggggtggcctacgcggcacaggtgtatgtcgccaacaccaaccagaacgacagcttcctgttcggcccgacgcccgacccgaactatttcaaggccgcctaccaggcgctggccgacgccggggtgcgggcgatcaacaacagttggggcagccagcccaaggacgtcagctacgagaccctcgacggcctgcacgccgcctatgcccagcactacgggcgctccacctggctggacgccgccgccggcgtctcccgccagggcgtgatcaacgtcttcagcgccggcaacagcggctacgccaacgccagcgtgcgctccgccctgccctacttccagccggacctggaaggccactggctggccgtgtccggcctcgaccagcagaacggccagcgctacaaccgctgcggcatcgccaagtactggtgcatcaccacgcccggccgcctgatcaacagcaccatgcccggcggcggctacgccaacaagtccggtacttcgatggccgcgccccacgccaccggcgcgctggccctggtcatgcagcgctatccgtacctgaacaacgagcaggcgctgcaggttctgctgaccaccgccacccagctcgacggcacgccgaccggcgcccccaccgacaccgtcggctggggcgtgccggatctcggtcgggcgatgcatgggcctggacaattgctcggccgcttcgaggccaacctcccggccggcctgcgcgacgaatggagcaacccgatttccgatagcgccctgctccagcgccaggccgaggacgccgccgagcacgcggcctggcagcggacgctgaaggacaagggctgggaaaacggcttgccggccggtgccagccagcaggaacgcaccgactatgccatcggcatggcccgcgaccaggccgccgcccagcgccagtaccagggcagcctggtcaaggccggtgccggcagcctggtcctgagcggcgacagcacctatcgcgggccgaccttggtcgatggcgggctgctcagcgtcgacggttcgctgctgtccgccgtcgaagtcaatgccggcggcaccctcggcggcagcggcaggatcggcggcctgctggcgcgctccggcggcacggtggccgcgggcaactccatcggcaccctggaggtcgccggggacctgcgcttcgaatccggctcgacctacgcggtggagctttcggaaagcgccagcgaccggatcgtcgccagcggcaaggcgagcatcgcgggcggcaacgtcaccctggccatggaaaacagccccgacctgctcagccagtcccaggtcgagagcctggtcggccgccgctacgacatcctcgacgccgccggcggcatcaacgggcgcttcgacgcggtattgccgaactacctgttcctcggcggcaccctggactacgcggccaacgccatccgcctggatatcggacgcaacggcacgaccctcgccagcgtcgcgcagacgcccaaccaggcggcggtcgctggggccgtggaaacgctcggcgccggcaacccggtctacgaaagcctgctcctgtcggaaaacgccgcaaccgcccaacgggccttccagcaattgtccggggaaatctacccggcgctcgccggcctgttgctcaacgacagccgctatccgcgcgacagcgtcggcgaacgcctgcgccagaccagcgacggcgaggccggcggggaggctcccgaaggctggttcaaggcgctcggctcctggggcaagagcgccgatggcagccacggtagcgaaggctaccggcattcggtcggcggcttcctgctcggcgtcgacagccaggtcgccagcgacacgcgcctcggcctggtggccggctacagcaacagctcgctgaacatggacagcagcctgcaatcctccgccagcatcgacagctaccacctcggcgcctacctcggccggcaattgcagcaatggcgcctgagcctcggcgcagcgcacgcctggcaccgcgccgaggtcaagcgcgacctgcaatacggcgccgtggccggcaagcagaaggccaagctcgacgcacagagcagccagttgttcgccgaggccgcctacgcgctgggttggcgcagcctggagctggaacccttcgccgggctggcctacgtgcacgtcgccagcgatgacttccgcgaacgcggtagcgccgcggccctggagggtggcgacgacaacctggacgccgccttcaccaccctgggcctgcgcgcgaaacggcatttcgagctggatgccggacgccgcctggcgctctccggcaccctcggctggcgccacaacctgagcgacaccaccccgcaacgccacctggcgttcgccagcggcagccagccattcagcgtggaaagcgtggccctgtcccgcgacgccgcgctgctcggcgtcgacgccagcctcgcggtgaatcgcgaagtgagcgtgcggctgggctacaacggcctgctgggcagccgcgagaaggaccatggcgtcggactggccgtcgactggcgtttctga

SEQ ID NO: 335918 - DNA, 3663 bp, Pseudomonas aeruginosa
gtgcaggcactgccttcggccgttagggctcagggcagcctgcctcgcctcgaagagcggagcgccgttcttgccgagcctccggttgggcagccagcgttgcaaaccctgccgtcggttgcgcgcgttgagggcgtgcccagcaatgccacaccgagcaacagccacaagtatctgatcgagaccaacccggcgctcaccgagctgaagcagttcctcaactcggactacctgctcggtggcctgggtatcaatccggatgacagcaagaagcgcctgggcgacggtctatacgagcagcgcctggtacgcgaagcgatcgtccagcgtacggggcagcgcttcatcgccggattgaacagcgacgaagcgatgttccgctatctgatggacaacgccatcgccagcaaggacgtattgggactgacccctggcgtcaccctcagcgccgcccaggtggccgcgctgacccacgacatcgtttggctggaagaagtcgaggtgaatggcgagaaggtcctcgcccccgtggtctacctggcccaggccgaggggcggttgggcccgaacggcgcgctgatccaggggcgcgacgtgaacctgatcaccggcggggacctgaggaacgccggtaccctgcgcgcgcagaacgacctcagcgcgacagccggcaacatcgacaacagcggcctgatcgaggccggcaaccgcctcgacctgctggccagcggctccatccgcaatgaccagggcggcatcattgccgggcgcgaggtaagcctctccgcccttaccggagacgtcatcaatgaacggacggtgacccagcaccagtcctcctacaggggaaccggtaccactgaggcatttgccgatagcgccgcgcgtatcgaggctgcgcagaagctgaccgtttcggcaggtcgcgatgtagccaatattggcggtgtcatcgacagcaagggcgacctcgccttgcaaggcggcagggatgtcctggtttcggctgcggtagcggagcggggctggacggcaggaagccaggcataccagacccagacgacccagatgggcgccgaagtcgtggcggggcgcgatatcagcgtcagcgccggacgcgatatcagcgtcgtgggcagccgcatcgacgctcgtcgcgacgtgacattcgaggcgggtcgcgatgtgggcctggtcgcggctgccaacgaagagcatgcctatggcaagaccaagaaggtcactttccaggacgacaagatcacccagcaggccactcgcgtggacgctggcggcgacctggcgatcaatgccggacaggacctgcggctggtcgcgagccaggccagcgccggcgacgaagcctacctggtggccggcgacaagctggagctgctggccgccaacgacagcagttactacctctacgacaagaagagcaaaggcagcttcggtagcaagaagacccggcgcgacgaaatcaccgatgtgacggcagtgggcagccaaatatccagcggcggcgacctcaccctgctcagtggcggcgaccagacttaccagggcgcgaagctggaatcgggcaacgacctggccatcgtcagcggcggcgcggtgaccttcgacgcggtgaaggacctgcaccaggagagccacgagaagagcaagggcgacctggcgtggcagtcgtcgaagggcaagggccagaccgacgaaaccgtacgccagagccagctcgtcgcccagggcaacctggcgatcaaggccgtggaaggcctgaagatcgacctcaagcacatcgaccagaagaccgtgagccagaccatcgatgtcatggtcaaggccgatccgagcctcgcctggttgcgggaggccgaaaaacagggcgacgtcgactggcgcaaagtccgggaagtacatgacagcttcaagtacagccattcggggttgggagtcggagcgcaactggccgttgccatcgtcgtgacttatctcactgccggtgctgctagtgcggcgattggtagtgctgctggtgccaccgctggatcagggaccgcgatggctgctggtacggccgccacagctacgactgcggccacctcagcaggctgggcgaacattgccctcactgccgcggcgacatccgccgcctcccaaaccgccatcagcaccatcaacaaccgaggtgatttgggagcggttgccaaagacgtgacctccagtgatgccctgaaaaactacgctgccgcaggggtcagtgcgggctactctccgcaaaacattggtttgcagctgtccgtcaatgccgcactgaagaccgtcacccggggtggcagtttcaaggacaacctcggacaagccgctatcgacatgattgcggatgctgtttccggggctatctacaacgaggtgggtgatgccctgacgggtaccggtataccgactaaggtggcggtccacgccttggtcggtggtctgatggccgaagcggcaggtggagacttccgtactggagccttggcggcgggtgccaacgaagcggtggtagcggctttcggggagaaaattttccctggtgagcagcacgaaaaactgttgggcatgacctcgaacctgattggcatgacggtcgcggcagctgctggcggagacgaaaaggcacaggagaaggctggctgggtggcgcagcaggcgacccttaacaactatctcttccatgaagaaatggaggagatggccaataagatcaaggcgtgcggaggtgatcagaactgcgagcagccgatccgtgaacactatgccgacttggatgaacaacgaaacaaggcattcccagagctctgccgggccaacctaacgtcttgtgtccagatcgccaaccgcttgagcgcggaagaacagctcaatgtcgatctgatggaaagtttgcggaacgctcagtacaacggtatagccggtgctatcggcattgcgttcatccccagtaaccgtgtatctgccgatcaagctaccctagagtatgtccgtcagaccggaggcacagcagaggaattcaaagcggtcctggctatgctgggtgctggggtggctggagtcggtcccaaaacggttgaaaaagctaccaatgcattggatcgtttgaaggcacttcaagcggcgaagggaacagtaccggcagaagtaccggctacttctgtaatagctaaagaaggtttatacaatgaattacgtgctgctcaggcgagggatgctttaatcggaactactttgccaggtgcgaaggctccagttacggttacagcggagggaagcgttggaggaaaagtgttggttgatactaatcagacggcacgccctgcaatggttgccgaaaataagccaactcttattgcggatttgcttccacttggcagtcctaactcttctatggcaaacgctcatgctgaaatcgcggttattcaacgggcattcgatgcaggcataacaaaggggcaggatatggcaataattgtacgcggagagcgagtgtgttcgttctgtcgatcttctaataatattttagccgcagctgatcgttcgggattgaatagtttgaagcttgttgaagcagaaagtggcaaaatttttacttggactcgcggaatagaagggtggaaataa

SEQ ID NO: 335919 - DNA, 858 bp, Pseudomonas aeruginosa
atgaccgttggcgaaggcgaagcgggacaggccgaagtactggtaggcacgccattccggccaggcccgggcgaggaacggcgcgccgctgtagatcaccgccgcctcgtgatagaagcccatgtggaacggcgcctgggagctgaactcgaagcgcgggtcgccgaatggctgggtgccgaagccgtagcgctggccggcttcgccggggttgtcgctgaacaggttgatgtcgtggccgtagtccggttcgtcggcggcggtggccagcactgccaggggcgcgactcgctcgccgggctccaggcggatgaaacgccaggcggtccacggcgagaggttctggaacaccagcacctcctgtggcttgaggtgcgggcgctgcggctggtcctgcccgggaagcggctggagcgccagcgccaggcggatctccgggttgacccgcagcgccgcgaggaacgcctgacgcaagtcgccggcctcgccctcggcagcgaagcgcagggcgtccggacgcgccgggtagttgccgatatgcgctcgggcgtaggcttcctgctcgtccagcagggcggccagtccgccgcgctcggcggcgaggaacgcctccagcggctccacctcgacttccggcgcctcgcggatggccgccagctcgcgcaatgccaggtagctgcctaccgtatggttggaccaggcccacaggctcggcgagacgacccacgcccccagcagcaggcaacgcaacagcaacttcatcggcttttcgctcttgtctcgactcggtgccggcaagcctaccaatgcgggacacccagggcactgtcctgcctggacatcagaactctccgatag

SEQ ID NO: 335920 - DNA, 1716 bp, Pseudomonas aeruginosa
atgctccagtccgtttcgcccaagcacgacctgcccctcaaacccgaaggccaagcggccaagccagaacgcaccggcacctgggcgccgttctcgatccaggccttccgcatcatctggatctgcaacctgttcgccaacctcggcacctgggcccagtcggtggccgccgcctgggtggtcaccgacgcccacgccagcccgctgatggtggcgatgatccaggtcgccgcggcactgccgctggtgctgctgtcgatcctctccggggtcatcgccgacaaccacgaccggcgcaagatcatgctctgggggctcagcttcgagatgaccggagcgatgttcgccaccctgctggccttcctcggctacctagacccggtgctgctgatcatctccatcctctggatctccctcggcggctcggtgaccatcccggcctggcaggcggcggtcaacgagcaggtgccggcgcgcatggtcagcgacgcggtgctgctcaacagcgtcaactacaacgtcgcccgcgccgccggcccggccctcggcggcctgctgctgagcgcggtgggaccggcctgggtgttcctgttcaacagcttctgctacatggccctgatctgggcgatctggcagtggcggcgcgaggtgcccaagcgcagcctgccgccggaaggcatcctcgaaggcgtcaccgcggcgctgcgcttcacccagtactcaaccgtcacccgcctggtgatgatgcgctccttcgccttcggcctctccgccagcgcggtctgggctctgctgccgctgctggcgcaccgcaacccggacggcgacgcggcgatctacggctacatgctcggcgccctcggcctcggcgcgatcctcggcagcacccaggtctcgcgcctgcgccagcggatcggcagcagccggctgatcagcctggccggcttcaccctggcgctgatcctgctgaccctcggcctggtggacaacctctgggttctgttcccggtgctgatcctcggtggcggctgctggatcggcgccctcgccacctacaactcggcggtgcagatcctcgtccccgactggatcaaggcgcgcgccctggcgctgtaccagaccgcgctgtacggtggcctggcgctgggttcgttcctctggggccatctcgccgagaccatgaccgtgcacggcgcgctgctggccgccggctgcctgctgctggcctcggtgatcctcctgtacaactcgcgcctgccggaaatggacgccgccagtatttcccgcgcgccggcgagcatgcccgggcagccgagcttcgtcttcaacacgcggcggggcatggtgctggtctccatcgaataccggattcccgccgagcgcacccgcgacttcgttcgcgccgcccagccgctgcgccgcctgcgcctgcgcaacggcgcggagcgctggtcgctgttccgcgacgtgagcaacccggaggtctggcaggaactgttcctggtggacaactggatccagcacctgcgcatgctcgaccgcatgaccctggccgacaagatcgtcatcgacaacgtcaccgccctgcatgccggcgacggtccgccgcagatccgccattgcgtgagctacgaggccagcagctacgatacgccgctggtgaagagtgccacgccgccggccaacgacgaggcgggcgcgacggcggggagctga

SEQ ID NO: 335921 - DNA, 1341 bp, Pseudomonas aeruginosa
atgccgaggtctcccttgttcagccaatttcccctccacgaacgcctgctgaaggcactggaaagcctgtccttcagcgagccgacgccggtccaggccgcggccattcccaaggcgctggaggggcacgacctgcgggtcacggcgcagaccggcagcggcaagaccgcggccttcctgctgccgctgctgcaccgcctgctggccgaggacaagccgcgctccctggcgcgcgcgctgatcctcctgccgacccgcgagctggcccagcagaccctcaaggaagtcgagcgcttcgcccagttcaccttcatcaaggcctgcctgatcactggcggcgaggacttcaaggtgcagggcgcgcgcctgcgcaagaacccggagatcatcatcggcacccccggccgcctgctcgagcagcgcaacgccggcaacctgccgttgcaggacatcgaggtgctggtgctggacgaggccgaccgcatgctcgacatgggcttcgccgacgacgtgctggccctggccaatgcctgcccggccgagcgccagaccctgctgttctccgccacccacagcggcgccggattgaacaaggtgatcgccgaggtgctgcgcgagccgcaagtgctgcgcctgaaccaggtcggcgagctgaacgagaacgtccgccagcaggtcatcaccgccgacgacgtggcgcacaaggaacagttgctgcaatggctgctgagcaacgagacctacaccaaggccatcgtcttcaccaatacccgggtctccgccgatcgcctgaccgggcggctgatcgccaaccagcacaaggtcttcgtcctgcatggcgagaaggaccagaaggaccgcaagctggccatcgaacgcctgaagcagggcgcggtgaagatcctcgtcgccaccgacgtcgccgcacgcggcctggacgtcgaaggcctggacctggtgatcaacttcgacatgccgcgcagcggcgacgagtacgtgcaccgcatcggccggaccggtcgcgccggcgccgagggcctggcgatctcgctgatctgccatggcgactggaacctgatgtcgagcgtcgaacgctacctcaagcagaacttcgaacgacgcaacatcaaggaactgaaggccgcctaccaggggccgaagaaactcaaggcgtcgggcaaggccgccggcagcaagaagaaaaagcaggacaggaagggcgccgccgccaagcccgcggccaagcgcaagcccgccgcgcggccgaaggccgggccgtcggcggtggtcagcgccgacggcatggcgccgctcaagcgcaagaagccgacggcggagtga

SEQ ID NO: 335922 - DNA, 1362 bp, Pseudomonas aeruginosa
atgcccgacgcgcccgccgccgaacgcctcgaacggctgccgctgagtccgtatcaccgactggtcttcgtgatcatcgcgctggcgttcttcttcgactcgatggacctggcgatgatgaccttcctgctcggctcgatcaaagccgagttcgggctcgactcggcgcaggccgggctgctggccagctcgagcttcttcggcatggtgatcggcgcggccctgtcgggcatgctcgccgaccgcttcgggcgcaagccggtattccaggccagcatcgtgctctggggcctggccagctacctgtgctccaccgccggcgacctcgacagcctgaccttctaccgggtattgctggggatcggcatggggatggagtttcccatcgcccagtcgctgctgtcggagatgatcccggccagccgccgcggcaagtacattgcgctgatggacggcttctggccgctgggcttcgtcgctgccggctgcctgtcctacttcctgctgccgctgaccggctggcgcagcattttcctggtgctggcgctgccggcggtgttcgtcctcgccatccgcttcctgattcccgagtcgccgcgctggctggagcaggccggccggcgcgaacaggcggaccgggtattgcgcgacatagaagcacgggtgatgcgttcgctgggcctgaccgaactgccgccgccgctgcgccagccgcagcgggaacgcagccgtccgggcttcttcagcgccttcgccgagctctggtcgccagcctaccggcgccgcaccctgaccgtctggggcctgtggttcttcgccctgctcggtttctacggcctgacctcctggctcagcgcgctgctccagcaatccggcttcgccgtcacccagtcggtgtactacacggtgctgatttcgctggccgggatacccggcttcctctgcgcggcctggctggtggaaagctggggccgcaagccgagctgcgtgctgatgctcctcggcggcggcgcgatggcctacgcctacggccagaccgcggtgttcggcggcagcctggcactgctgatcggcttcggcctggccatgcagttcttcctgttcggcatgtgggcggtgctctacacctataccccggaactctatccgacctccgcgcgcgccaccggctcgggcttcgcctcggcggtcgggcggatcggctcgctgctcggcccgctggtcaccgggctggtcctgccgctcaccggccagggcggggtgttcaccctcggcgccctctgtttcggcgtcgccgccctggtggtctgggccttcggcatcgagacccgcgggcgcaccctggaggagcttgccggctga

SEQ ID NO: 335923 - DNA, 1227 bp, Pseudomonas aeruginosa
atgaaccgtagggaagtgagggattacctttttagcgacggtgatggctcgcactcaatctcagcccagataaacgccgcatgcactgaggttagccagctgccggaacgcaggctcttggagactgatgtcgaggctttagtccagtattttgtggaaaaatacgacgttgaaattcccactctccttcgagatgagatcgttgcatcccagcatgagcggcaggtggaggtctgggatcactgggacaggcagatgagatctgttcctggtgaagcgtacgacttcgaagtcccttttcaaggggaagcagatatctttaagctgcgtcccagctcgttcgatttcaatcctccacgcgcccaggtgcgcaagcaacatttggccttcaccatagccgatcgctcgctcacccctgagaccatcaaggcacagctcgattcgacgcttgcgtccattgaaaaatacttagaatcgcatcgccgccagtggtctggattcaagcagcaaatcgagaatgccgtaagagcagagatagacgcccgccgcactaagctactcgcgcaaaaggaaaatgcttcaaagctctctgggctgggcattcgtttgaaagaaaaggctggggatgcacgcagctatatcccgccaacggtcaagcaaaaagtcatgccccagctaccgccaatgactccagcgattccccccgaaccaacgcttgatatcaagcagtatgaaactattcttggcctggttcgtggagctggtcggagcattgagcaaagctcatcacgcacgaggaagcttgacgaagaatcgctcagggacctattcctggtaccgcttaatgcccatttcggcacagcgacaggggaggctttcaactatcaaggtaaaacggacgttcttatacgccatgaagagggcaacctctttgtagctgagttcaagatatggggtggagataaacgctttttagccaccatcgaccaattactcagctacttaacctggcgtgataccaagacggcaatcgtcatgtttaaccgaaatgccgacttcacagcagtggtccagaaaatgcgggacctagtgaaaagtcatccccgctatctcagcggcccggtcagcctggatgaaacgagcgaccgttatgtattttccctcccccaggacagtggacgtaaagtgactgtctccttgctcgcctttgacttgggtagagactga

SEQ ID NO: 335924 - DNA, 276 bp, Pseudomonas aeruginosa
gtgtggtcgctgaaatgcttcccggattgggagtggtacaacatcaaggtcttcgagaccgacgatcccaaccacttctgggtcgagtgcgacggccacggcaagatcctcttccccggctatcccgagggctactacgagaaccacttcctgcattccttcgagctggacgacggcaagatcaagcgcaaccgcgaattcatgaacgtcttccagcaattgcgcgccttgagcattccggtcccggaaataaaacgcgaaggcattcccacttga

SEQ ID NO: 335925 - DNA, 624 bp, Pseudomonas aeruginosa
atgagcggcattcccgaaatcaccgcctatcccttgccgaccgcccagcagttgccggccaacctggcgcgctggagcctggagccgcggcgcgcggtgctgctggtgcacgacatgcagcgctacttcctgcgcccgctgcccgagagcctgcgcgccggactggtggccaacgccgcgcggctgcgccgctggtgcgtcgagcagggcgtgcagatcgcctacaccgcccagccgggcagcatgaccgaggagcagcgcggcctgctcaaggacttctgggggccgggcatgcgcgccagtccggccgaccgcgaggtggtcgaggagctggcgccggggccggacgactggctgctgaccaagtggcgctacagcgccttcttccactccgacctgctccagcggatgcgcgccgccggccgcgaccagttggtgctgtgcggcgtatacgcccacgtcggggtgctgatctccacggtcgacgcctactccaacgacatccagccgttcctggtggccgacgccatcgccgacttcagcgaggcgcaccaccgcatggccctggaatacgccgccagccgctgcgcgatggtggtcaccaccgacgaggtgctggaatga

SEQ ID NO: 335926 - DNA, 126 bp, Pseudomonas aeruginosa; identical to SEQ ID NO: 329847

SEQ ID NO: 335927 - DNA, 561 bp, Pseudomonas aeruginosa
gtgaaacagctccagcaggagcgcgacggcgtgaccccgaagagcaaggcgctcgccccagaacagcagaagatccaggagctggaggctcggatcaaccggctggagcgggagaaagcgatcctaaaaaaggctaccgctctcttgatgtcggacaaactcgatagtcggtggaagtggtctgttcagctttcgatgtggcgcggtcttgctactacgtccaccgtcttcgacgtcgtcgggtcgatgcgcgccgcgttgatgcgtgagctgggcctggtcagcaagcaaccgggctcgcacgcctatagacaggccatggttgagcggccggatatcccgaatcggctgaaccgcgagttcgcggtccagcgtcccaatcaggtgtggtgtggcgacatcatgtacatctgggcgcaaggccgctggcattacttggcggcggtgctgaatctgcaggcacggcgggtgatcggctgggcgttctcggccaagccggatgccgagctggtgatcaaggccctggacatggcctacgaacagcgcggcaagccacaatag

SEQ ID NO: 335928 - DNA, 450 bp, Pseudomonas aeruginosa
atgcctaggcagaggcgagtggttttactgaactatccgcttcacgtggtccagcggggacacaatcggcaagtggtattcgccgaggacgaggactaccagcgttacctctccgatctacgggacctcaaggatgcctttggtatcaaggtctacgcattttgcctgatgaccaaccatgtccatctgctcttggcgcctggtgattcgctgtctggcttggcgcaactgatgaaaacgctggcggcgcgcacgacacgatatcggaatcgcttggagggccgttccggaacgttgtgggaaagtcgctataaatcgagtgtcgtacagagcgatgcctacctgctggcgtgttgccggtacatcgaactgaaccctgttcgggcgcggatggtggacgatgtggcggcctatccctggtcaagttatgggcgcgggcggattggttga

SEQ ID NO: 335929 - DNA, 1572 bp, Pseudomonas aeruginosa
gtgtaccgctacgacgagcgcggcaacctggtcgagcaggtacgcagcatccgcctcgaccagcagaccctgctcgaccgcgtgacctaccgctacgacgcggccaaccaactgctggagatcggctacccctccggcctcgccatcggctacccgcgcaatgccggcggccaggtcgccagcgtgaccctggcagtgggcgacaaggcaccgagcaccctggtcgggcagatcgcctacctgcccttcggcccgctgcagcgcctgacctggggcaacggcatcactctcagccgcgagtacgaccaggactaccaactgctgcggcagaaggtcggcccctggcagagcgactatcagcacgatgccaatggcaatatccagcagcaccgccacagcctctggggcaccctggactaccagtacgacccgctggaccgcctgaccgaggaacgcggcgtccagggcgggcgcagctatgcctacgacgcggtcggcaaccgcacccaacgcagcgacaaccccgcctcaggcggcaccgccagcagccaggactaccagtacgcgcccgacagcaaccgattgaccgccatcggcacgcaagtggtgaccagcgacgccgccggcaacctcacccaggaccgctccgcgcgcaaactggcctacgacgcccagggccgcctgcaaagcgtcagcctcgacggccagcaggtcgccgaataccgctacaacgccctcggccagcgcatcgtcaagctcacccccgaaagcatcaccacctacctctacggtcccgacggccagttgctcggcgaagccgaacacgacggcagcggccggaaactgcgagcccagtactacctgtggctggacagcctgccgctggccaccatcgacgccgactacgacgcccagggcaaggtcggcaacccgaccctgctctacctccatggcgaccacctcgacaccccgcgcctggccaccgatgccagcggccagatcgcctggcagtggcagtccgacgccttcggccgcggcgaagcgctgagccagggcagcacccaggtcaacctgcgcttccccgggcagtactacgatgcggagagcgggctgcactacaactacttccgcgactatgatccggagactgggcggtatgtggagagtgatccgattgggttggccggcggcttgaatacgcttggatatgctggccaaaatcctgtaatgcaccaagatcctgatggcttggcatttatgcttttagctctcccctttgcaggtggaaccagcctaggctctgcgctcacatcagctacagcattaggaataggggcttgggggctaaccacccttggtgactcccccgtgcaaatggctgctccagggaacgtagctgattcgcaaattgttcgagattacggcgaagacgcatctcaagcacgccagtgtggaggtaaagcccctgatcgatgtgaatggcttgagcaaaacaaaaataactatcgccctgaccaggttaaggcaacccaaaaagcatggggatgtcgtagaagtaggcatggtcgttaa

SEQ ID NO: 335930 - DNA, 1062 bp, Pseudomonas aeruginosa
atgccccgcctttccgccctgctgttcctcgccctcgcaccctggctggcccaggccgaggagaccctgcgcgtctacaactggaacgactacatcgacccacaggtgctcgagtccttccagaaggacaccggcatccgcgtcgagtaccacaccttcgccaccgccgaggaactggacaaggcgctgcgcagtggcgaggcgatcgacgtcgccgtcccctcccacgacaccctgccggccctgctgaaggacaacctgctgcggccgctggacttcacccagctgcccaaccgcagccatctcgaccgtcaattgctgagcaaactggccgcggtcgatcctgacaatcgccacgccgtcccctatctatggggtgccgtaggcctggccatcaataccccgcaggccgaagccgcctatggcgggccgctgcccaacagctggagcctgctgttcgacgccagccagagccagcgcctgaaaagctgcggcatcagcctgctggacgcgccggacgaaaccctggcgatcctcctcaactaccagggccgcaacctcggtcgtactgcgccgagccaggtacgccgcgccgccgaggcgctgcacggactgcgaccgaacctgcgctacgtcgacagcgagcgctacatcgccgacctcgaaggcggtcgcctctgcctggccatggcctgggtcggcgacgccctgcgcgcggccaaggcgggccagccggtaagtttcgaggtaccgcaggaaggctcggtgctgttcatcgacaacctggtgatcccggccggcgcccagcatccacgcgaggcgcaccgtttcatcgactacctgatgcaaccgaagatcgccgcacagatcaccgccgccaccctctaccccagcggcaacgccgacgccgccggcttcctcgatcccgccctgcgccagcaacccggcctgtatccggaccgcgacaccagccgccgcctgttcgccctggaaacgccgccggaaaaactccggccggtggtcgacgagatctggaaggccttccgcggcgccagccactga

SEQ ID NO: 335931 - DNA, 264 bp, Pseudomonas aeruginosa
gtgaaaaagcgttttatcgaagagcagattctcgacttcctcaagcaggcggaggccggtgtgccggtgaaggaactgtgtcgccgacacggcttcagtgatgcctcgttctacacctggcgggccaagtttggcggtatgaccgtggcggacgccaaacggttgaaggatcttgaactggaaaacagccgattgaagaaattgctcgccgaggcccacctcgacatcgagtcgctgaaagtggtcgcccggggaaaagggtaa

SEQ ID NO: 335932 - DNA, 507 bp, Pseudomonas aeruginosa
gtggacggggtgaagctccagttgccgctgccgtcggcagtgacctgcccgatcggattgccgctgccatcggtcagggtcaccgtggcgcccggttcggcggtgccgctgatctccgcgccgttgctcggattgaccaccggcgcggccggcgccaccgagtccacggtggtgctggccggagcgctggtattgccggtcgggtcgctggccgtggcgttgaccacggtgccgttggccagcggcgtgcccggtgtgaagctccagttgccgctgccgtcggcggtgacctggccaatcgggttgccgttgccgtcggtcagggtcacggtagcgcccggctcggcggtgccgctgagcgtagtgccgttgctcgggttgaccaccggagccgccggggcctgcgagtccacggtgacgctggcgcccgggctgctattgccggcggcgtcctgggccaccacgttgaccacggtgccgttggcgatcggcgtggacggggtgtag

SEQ ID NO: 335933 - DNA, 447 bp, Pseudomonas aeruginosa
atgaccccttcgaatggcattgtggagattagaacgctcgccgagttgttgtccctttacgagatcgcctcggacagcaccctgacgaaggatcagtaccgaaacccgctgcggccctaccggctgattcagccagaggccagctgtcagtaccagaagaacgggaagcgctgttctcaaatgcatcagcacggcttcgtcgttgagcggcacgacgattcgaaggtgctgatagggaattgctgcgccctgaaccacctgggcctagatgacgagcaggtcagaggggaactcaagaacccattctcggacggcagaccaagcgatgcgaacgggcagccaggcaagtcgggctttgtgtcgattacgtccgccacctggtgcagccaccgtaaacctgatccgatctggcgtagcaggaaccagattacagagatcagcctgtag

SEQ ID NO: 335934 - DNA, 2235 bp, Pseudomonas aeruginosa
atggtgacgctgcgggctcatctgacgcagaactggttcggctacagcgatccggcgataaaggaggcgctgtacgagaccaccatcctgcgccagtttgccggcttgagcctggagcgcattcccgacgaaaccaccatcttcaacttccgtcacccgctacagaagctagagttggggcctgggattctggccaatggcgacttgctgttcagttcctcgcgagcgccgctggaaggcaaggaggatgacgccgactccgcgctctggcacctgccggccgccggcggcgaggcgcagcaatggttgcgccgccagggcgggttgttcggcctgcgcgtcgcgcgccagagcggcaccctggtgctgatggcggaggcgctgccgtcggcgaaggaccctgaggacgaaaaacgcctgcgcgcgttgcgcaaggacggcaaggtcgacgccatcctccacgagcgttacccggtgcgcttctgggacaccgacttgggcccggaacagccgcgcctgtaccgggccgagccgatcgtcgacagcgacggcgccggcacgccgccggcccggctcgaactccacgggctgaccgacgacgccggcgaggcgctgcgcaacgcccgcttcgaattgagcgctgacggccgcctgctggtgagcgactggctgtccgccagggccggtggcaatcagcaaagccagctggtggtcatcgataccctgagcggcgcgcgccggatgctgctcgacctgcccggatggcactacccactcttttgtctggacccgcagggcgcggctctggcggtcgtggcggagagcgagggtacgccgagcgaggcgccgcgctggcaattgctcagcgtaccgctggacggaagcgaaccccgctgtattgctccggattgggacggttgtcccgcatccctcgcttggagccccgatggccagcatctgtacgccagcgccgatcatcagggccgcgcgccggtgttcgccatcgatcccgcccgccgcagcgtgacgcggctgacgctggacgacgcggcctacgccgacctttgcgtcagcccctgcggccgccacctgtatgccctgcgccatgccatcgacagcccgccgctgccggtgcgcctcgacctggacgccgaggttgccacactggtttcgctgcgcgggccgtgccagcagccggccctgcccgggcgcctgaccgaagtggacgccacgggcgccgacggcgcgcgcgtgcgtgcctggctggcgctgcctgccggcgcctcggccgccgcgccggccgcgctgctgctatgggtgcacggcggcccgctcggctcctggaacggctggtcctggcgttggaatccctggctggcggtcgcccgcgggtatgccgtgctgatgccggacccggcgctatccaccggctatggccgcggcttcatccagcgcggctggggcgcctggggcgacgcgccctatcaggacctgctggcgatcagcgacgccgcgcaggcccgcgacgacatcgacggccagcgcagcgctgccatgggcggctcgttcggcggctacatggccaactggatcgccgggcacaccgaccgcttccgggccatcgtcagccatgccagcctctggaccctgagccagttcggtccgaccaccgacgcctaccactactggcggcaggaaatcggcgcgcagatgctgcagcaccattcgccgcaccgcttcgtgcgggatatccgcacgcccatgctgatcatccacggcgacaaggattaccccgtgccaattggcgaggccctgagcctgtgggcgcagctcgccgagcaattcgccgacgagcagggccgcatgccgcacaaattcctctattaccccggcgagaaccactggattctcgcccgcagaacgccaaggtctggtaccagacggtgttcgccttcctcgccgaacacgtccatggccaagcctggcaacgccccgaggcgctgggatgaagccgctgccggaacggctggaaagcgaccggctgtcgatccgctgcgccgcgcccggcgacgctcgcgcgctgtacgacggcgtgctggagaccctcgccgagctgcgcgcctggggatcgtcgctgccgtgggcactggccgagccgtctgtgcaggggggtatgccgagataaggcaaaaattaggacattcgttctgtaacttactgtatttgaaagattaa

SEQ ID NO: 335935 - DNA, 3117 bp, Pseudomonas aeruginosa
atgtccgctttcttcatcgaccgcccggtattcgcctgggtcgtggccattctcatcctgctcggtggcggcgtcgccacccgctacctggcggtggagcaataccccaacgtcgcccccccgcgggtcggcatcaacgccagctacccgggcgcctcgccggaggtcgccgagcgcaccgtcaccgcggtgatcgagcgcgaactcgccggcattcccggcctgctctacttcacttccagcagcgccgagggacaagtcgagatcggcctggccttcgacaccggcaccgacacccggctggccacggtggaggtgcagaaccgcatcaagcgggtcgaggagcgcctgccggaaagcctgcgtcgtcagggcatctcggtggagcagagcgacgagagcgagctgatgttcatcaccctcgacgccgacaacccgacggtggacgacgtccagctcggggacttcgccaccacccaggtgcgtccggcgttactgcggatccccggggtcggcgaagcggaggtgtacagcccggaatacgccatgcgcatctggcctgatgtggaaaaactcaccgccatgggcatcaccaccggcgaactggcggatgccatcgcggtgcagaatcagcgcattaccctcggtgccatcggcaccctgccggcgcccgcgggcaccgcgctcaccgctccgctgatggtcggcgaggaccttgatacgccgcaggccttcggcgcgatcgccctgcgcgtcaaccccgacggttcggcgctgcgcgtggccgacgtggcgcgggtggaactgggcggcaacaactacgactatccgtcgttcgtcgacggccgctattcggcggcgatctcggtgaaactggcgccgggcgccaatgcgctgcagaccgccgaggcgatcaaggcgcgcatggccgagctggccgcgcagttccccgcgggcatccattaccgcaccgcgttcgacacctcggacttcgtcaggctgtccatcgtcaaggttggctacaccctgctcgaagccatggccctggtgttcctggtcatgctggcgttcctgcgcagctggcgcgccaccctgatccccagcctggtggtgcccatcgccctggccgggacctgcggcgcgatgctggtgctgggcttctcgatcaatgtgctgaccctgttcggcatggtgctggccatcggtatcctggtggacgacgccatcgtggtggtggagaacgtcgagcgcatcatggccgaggaaggcctggcgccgcgcgaggcgacgctcaaggcgatgcgccagatcagcggcgcaatcgtcgccatcaccctggtgctgaccgcggtgttcttcccgatggcgctgttccagggcgcggtgggggagatctaccggcagttctcggtggcgctggcggtccccatggcgctttccgcgttcctcgcccttacccttaccccggcgttgtgcgccaccctgctcaaaccgccgccgcgacaggcggacggaaagcgcccggcgccgacacggctggcccgtggctacctgcgccggctcgacgcgctgctgcgccggccgctgcgctggctgctgctgtacgcggcgctgctgggcgccgtcgggctgctgttcatgcgtctgccgggggggttcctgcccaccgaggacagcggcaacttcgccgtcgtggtgctgctgcccaccggctcgacccaggcagacacgcgcgaggtgatcgacgaggtgcaggcctggctgcgccaggacccggtcgtcgaccagctgttcgcgatgcaggggttcagctatttcggcggcgggcagaacgccgggatgatctggccgacgctgatcgactggtcgcagcgaaaggccagcgaacagcagatagaggccatactcgcgcgcctcaacgcgcatttcgccagcggcacccgcgaccatccgcaggcgctggtgaagggcctcaacaccccgccgttgccctcgatggggcgcagcgccggcatcgacatgcgcctgcaggatcgcgccggccttggccacgaggccctggtggcggcgaagaaccgtttgctggcgttggccgcccagaccccggcactggccgacgtgagcttctccgggcaggacgacgcgccgcaactgcgggtctccatcgaccgactcaaggcgcagagcatgggcgtcccggtgcagcagatcaatgacaccctggcgacgctctatggctcggagtacctgggcgacttcatccaccagaaccaggtgcggcgcatcctcgtgcaggccgacggcaagtaccggcagagcccggacgggctgctgcaggcacgggtgcgcaatggcgaaggcgacatggtgccgctgagcgccttcgtgcagatgcgctggaccctcggcgctctggagatccaacacttcaacggctttcccgcgctgcccatcagcggcgcgccggcgcccggctacagcaccacccaggcgatggaggcgctggccggcctggtggcgcagctgcccgacggcatcggctatgaatgggccgggcagtcctaccaggaacgcatttccggcaaccagatgccgttgctgttcggcctttcgatcctggtgatcttcctctgcctggcggcgctctacgaaagctggtcggtgcccttcgcggtgatcctggcgatcccactgggggtgatcggcgcactgctcgccaccagcctgcgcggcctgcccgacgacctctatttcaaggtcggcctgattaccatcatgggcctctcggcgaagaacgcgatcctcatcatcgaggtggccaggaccctgcaccagcagggcgtcgccgtgcgccaggcgatcctcgacgccgcgcgcatgcgcctgcggcccatcgtcatgacttccctggccttcatgttcggcgtgctgccgctgatgctcgccagcggccccggctcggccagccagcgcgccatcggcaccagcgtgttcggcgggatgctctcggccaccctgctgacgctgttcttcgtgccgctgctgtacctgctggtgatgcgtctgcgcggcgaaaccagcgccggtccttccatcgccgaggcccgcgacccatga

SEQ ID NO: 335936 - DNA, 1239 bp, Pseudomonas aeruginosa
atggggatggacgtcgacatgatggattcgcgcttgctagccctgaaggaaagccacatgcactcccgcaccggcggacattcgcaccgacacgccgcgccccggctcggagcgcgccacgctgcgatcctgctcgcgggtctgctgcttggcgcctgcaaacccgagccgacggcacaaaccgtcggcgacacgcccatcgccgtggacatcgccatcgccacgccctcgacccaggcgcgcagcgtgcagttgaccggacgcctggaggcctaccgcaccgccgagatccgcgcgcgggtcgagggcatcgtcgagcagcgcagctatgtcgaagggcaggaggtgcaggctggcgacctgctgttccgcattgctccggaaccgctgcaggccgagctgtccgccgccgaggcggagcaagcacaggcgcatgccgcccgcgaggccgcggcggacgtggcaaggcgctcgcggcaattgatggaggatgactccatcagtgcgcagcagtaccgcaaggatctgttcgccgaacagcaggcacgcgccgcggaacaatccgccgaggccaaggtgcgcagcgcgcgcctgcgcctggcctatgccagcgtcaccacgccgatcgccggccgcgcccgccgcgcgctggtcagtgagggcgcgctggtcggccaggacgagggaacgccgctgaccacggtggaacagatcgatccgatctacgtgaatttcgcccagccggcgggcgattatctggcgctgcgccgcagcctcgccggcagcggcaagggcccggcggcggcccgggtcagcctgcgcctgggcgacggcagcgcctacgcgctcaccggcacgctgctgttcgccgactccgcggtcgatccgaaaaccgataccgtggccatgcgcgcactcttcgacaaccccgaccacctgctgctgccgggcatgtacgtgcaggtcgagctcgccctgcccgacgccggccgggcggtgctgattccgctgcgggcgctgacgcggacccgcgagggcgcctatgtgatgctcgacgacaacggccatgcgcgccagcaggaagtccgcgcggacagcctggaagggcgccagtggcgggtcaccgacgggctggtgggcggtgagcgggtgatcctcgaaggcggggcgctggcgcagggccaggccgtcgaagccaaacccacgcctgccgacgccagcgtcggcggctcggactga

SEQ ID NO: 335937 - DNA, 1596 bp, Pseudomonas aeruginosa
atgcaggaaaacctgatcgaaatccgcgatctgcgcgtcgccttcgccggcgaagaagtggtgcatggcatcgacctggacattccgcgtggccaatgcctggccctggtcggcgagtccggctccggcaagtcggtcaccgcacactccatcctgcgcctgctgccggcagccatcaccggcacctccggacagatccgttatgccggcgaagatctggtcgcggccagcgaaggacgtttgcgcgaactgcgcggcgaccgcattgcgatgatcttccaggagccgatgacctcgctgaacccgctgcacacggtggaacggcagatcggcgaggtgctcaccctgcacaagggcctgcgcggcaaggcgatgcgcgcgcgggtgctggaattgctggaactggtcggcatccaggagccggccaggcggctgcaggcctacccgcatcaactctccggcgggcagcggcaacgggtgatgatcgccatggcgctggccaacgaaccggagctgctgatcgccgacgaacccaccacggcgctggacgtcaccgtgcaacagaagattctgctgttgctcaaggacctgcagcagcgcctgggcatgtcgctgctgctgatcagccatgacctcaacctggtacggcgcatcgcccagcgcgtctgcgtgatgcgccatggcacgatcgtcgagcagaacggcgccgagcagttgttcgcctcgccgcagcatccctataccaggatgctcatcgaggccgaaccggatggcgagccgatgctcgcggccagcgagcaggttctgctgcaggccgacgacctccgcgtctggttcccgttgcccaagtcgctgttcagccgccggcgcgactatgtcaaggcggtggacggcatcagcttcgaactccggcgggggcgtaccctgggcatcgtcggcgagtccggttcgggcaagtcgaccctgggccaggcgatgctgcggctggtcggctcccaaggcggcatccatttcaacgggcagcgcctggacggcctcgacgccaatggaatgcgccccttgcggcgccatatgcaggtggtgttccaggacccgttcggcagcctcagcccgcgcatgtcggtggagcagatcatccgcgagggcctggacatccaccgggtcggcaccgcggacgaacgcgaggcggcggtgatccgcgttctcgaggaggtcggcctggacccgcagacccgccatcgctatccccacgagttttccggcggccagcgccagcgcatctccatcgcccgcgcgctggtgctggaaccggaactcatcctgctcgacgagccgacctcggcgctcgaccgcaccgtgcagaaacaggtggtcgacctgctgcgcaacctgcaggccgtgcacggcctgacctatctgttcatcagccacgacctcgcggtggtgcgggcgctggcccacgacctgatcgtggtcaaggacggcaaggtggtggaacagggcgaagcccggcagatcttcgcggcgccgcagcatccctatacccgcgaactgctggtggcttcggtggggcctctggtttcgctgtcggggtag

SEQ ID NO: 335938 - DNA, 1026 bp, Pseudomonas aeruginosa
atgtcccgactttccccgatcaaccgccggcgcttcgaccgcttcaaggccaaccgccgcggctggtggtcgctgtggctgttcagcgggctgctggcgctgtgcctgtgcgccgaactgatcgccaacgacaagccgctgctgatcagctatgagggtgagctgtactttccggtgttcaggcattactcggaaacccgcttcggcggagagctccccttccagccggactaccgcagcgaatacgtgcgcgggctcatcgaaggccacggcggctggatgctgttcccgcccatcgctttcagctacgacacggtgaattacgacctcgaggtgccttcgccaagcgccccttcgtcgagcaactggctgggtaccgatgaccaggcgcgcgacgtcgccgcgcgggtgctgttcggtgcccgtgtgtcgatcctcttcgccctggtgctgaccgccatcagcgtggtcatcggcgttgccgccggtgccgtgcaggggtactacggcggcaaggtggacctgatcgggcagcgcctgctggaagtctggtcgggattgccggtgctctacctgctgatcatcctctccggtttcgtcgagccgaacttctggtggctgctcggaatcatggcgctgttcagctggatgccgctggtggacgtggtacgcgccgagttcctgcgtggccgcacgctggaatacgtcaaggcggccaaggcgctcggcctgtccgaccgcaaggtgatgtggcggcacatcctgcctaacgccatgacctccaccatgacctacgtgccgttcattctcaccggggcgatcaccacgcttaccgccctggattttcttggtttcggcatgccggccggcaccgcctcgctgggcgaactggcctggcaggccaagcagaacctgcaggcgccctggctgggcatcacggcgttcctgacccttgcgctgatcctcagcctgttggtgttcatcggcgaagccgtgcgcgatgcattcgacccgagggccgcctga

SEQ ID NO: 335939 - DNA, 1071 bp, Pseudomonas aeruginosa
atgccgggctatatccttcgccgcctgttactggtcattccgaccctgctgtgcatcctggtgatcaacttcgccatcgtccaggccgctcccggtgggccggtggaccaggccatcgcccgcctgcagggcttcggtagccacggcaccggcaacgccgcgcatgaatccacgtccgcatcggccagcggctcgcgcggcagccgcggcctggatccggcgatgatcgccgagatcgagcgtcagtacggtttcgacaagccgccgctcgaacgcctctggctgatgctgaagaactatgcacagctggatttcggcaccagcttcttccgcggcgccacggtcaccgatctgatcctggagaaaatgccggtgtcgctgtcgctgggtttctgggcgaccctggtgacctacctggtgtcgatccccttgggtatccgcaaggcagtgcgcaacggcagcgccttcgacgtctggaccagcagcgcgatcatcgtcggctacgctctgccggccttcctcttcgccatggtgttgctggtggtgttcgccggcggcagctacctgagctggttccccgccgtcggcctgacttcggaaaacttcgatcagctcagcccgctgggcaagatcggcgactacttttggcacctggcgctgccggtgacggcgctggtgatcggcggcttcgccaccctcacgatcctgaccaagaacagcttcctcaacgaaatcagccgacagtacgtggtcaccgcccgcgccaagggtctgaccgagcgcagcgtgctgtaccgccacgtgctgcgcaacgccatgctgctggtgatcgccgggattccccaggcgttgatcgaggtgttcttcgccggctcgttgctgatcgaggtgatcttctccctcgacggcctcggccggatgggctacgaggcggcgctgtcgcgcgattaccccgtggtgttcggttcgctgttcatcttcaccctgttcggcttgctggtgaaaatcctcggcgacctctgctacacgctgctcgacccgcgtatcgatttttcggcgaggaacgcctga

SEQ ID NO: 335940 - DNA, 1926 bp, Pseudomonas aeruginosa
atgtcccgaagcccaacatcgaacgctcgctactgcctgcggcgacgcctgtctaccgccttcgcacggcgcgcactgccactgttgttggccggcgcattgccattcttcgcgggcggcgccctgtgcgccgaactgcaatcgtccatgaccgtatatggcgaaccggccaaatacccggccgatttcaaacatttcgactacgtcaatcctgacgcgcccaagggcggttcgctgcgccgctcgtcccaggaaaccgaccgcttcacctacctgctgccctacgtggacaaggccacctgggtgtcgcaggtcgatacctgggtctacgagccgctggcctatcgctcgctggacgaaccctacagcgtctatggattggtcgccgagaagatggagcgcgacccggacaaccgctgggtgcgcttcttcatcaaccccaaggcgcgcttccacgatggccagccgatcagcgccgaagatgtcaggttcaccttcgagaccctgatgaccaaggccagcctgagctatcggcagctctacggcgacgtcgctaaggtcagcgtggaaggcccgctgcaggtccgcttcgacttcaagaccaatgacaaccgcagcctgccgctggatctggcgagcatgcggattcttcccgagcactggtggaagacccgcgacttcgccagcggcaacggttacgagccgccgctgggcagcggcccctaccgtgtcagccatgtcgagccggggcgcagcgtgaccttcgaacgggtcaaggattggtgggcgaaggacctgccggtcagccgcgggctctataacttcgacacgctcaaagtcgagttcttcgccgacatcgaggtagcccgccaattgctgctggccggcgcctacgactacaaccgcgaatactcggccaccggcttcgccgtgcgctacgaaagccccgccttgcgcgagggccggctgcagaaggccatattggccaaagccatgccgttcgccgcccagggtttcgccttcaacctcgacaagccggtgttcaaggaccgccgcgtgcgccaggcgatctccatgctgtgggatttcgagtggaccaaccggcagatgatgcgcaacttctacatgcgccagcagagctacttcccgaagaccgagatggccgccaccgaactgcccgacgccgaggaactggcgattctcgaacccttgcgcggccaggtgcccgaggaagtcttcagccaggtctaccagccgccgaagaccgacggcagcggcttcatccgcgacaagcagttgcaggcgctggagctcctcgccgaggccggctggcacccggacgaaaaaggcgaacacctggtcaacgcggcgggcgagccgctgagcttcctgttcctcgacggccagggcttcgaccgcatgctgctgccgtggaagcgcaccctggcgcagatcggcatcaccctggaattgcgccgggtcgacaccgcgcagtacgtcaaccggaccaatgcccgcgactacgacatgatcgtcaccggctttccgcgcagcggcgtacccaacccctcgccgggccgcgatctctacgaaatctacggctcgaagagcgccacccaggtcggtagctccaacgccatggtgctgcgcgatccggcggtggacaaactgatcgacgggctggtcaacgccgacagccgcgaacgcatggtgcattacgcccgcgcgctggaccgggtgctgcaatggaactactacagcatccccaactattactccgagggcacgccaacggtgttctggaaccgcttcggtcggccgaaggtcgagccggcctacgacgtcggcctggaaacctggtgggaaatcagccccaccgccctgaccgacgaacagatggccgcacgcctgaaggagcgaaactga

SEQ ID NO: 335941 - DNA, 2694 bp, Pseudomonas aeruginosa
atgaaagccaacattcagaagttcgcacctcaccgcctggccaccgcgatccagcgctgtcgtctggttcccctgtgcctgctggccttcggtgccccgtcactggcacacgcccaggcggtgagcgccgaagaggaaacctcggcggcggccgtggctgcgcccaccacccagttggaccgcgtggaagtcaccggctcggcgatccgccgggcggatgccgaaaccgcggtgccggtgaccatcctgcgcaccgacgaactgcgccagcagggcgtgaccaccacggccgagatcatccagcgcatcaccggtagccagtcgatcaccaactccgccggctcggtgggctcggccacgggcggcgcgaccttcgccgacatgcgcggcatcggctcgaacaagacgctgatcctgctcaacggccggcgcctggcgaacaacgccatcgacggcaccgcggtggacctcaacaccattcccttcgccgccatcgaccgcgtcgagatcctccgcgacggcgcctcggcgctgtacggtaccgacgccatcggcggggtaatcaacttcatcaccaagaagagcatgaccgacggcacgctttccgtcggcggcgagatgcccgacgccagtggcggcggcagcagtcatgacttcagcggcagctggggcttcggtgacctggaagaggaccgcttcaacgtccttggtgtattcaactaccagaaacagggcaacctcgacgccaacgaccggaccttcacccgggacgcccctggacgtggtctggagtccacctccggtaccggtttcccggccaactacagccagaatggcaacaacaccaatccgctggcggacagcaactgcagcggtcccaaccaggtggccagcggcgacgtctgccgtttcagcactcgcaacttcatcgacctgctgccggaaaccgagaaaacctcgttcttcggcaaggccaccggcaagctggccgatgaccacaacgtcaacctcgaatatttctgggcgcgcaacaacaacgccgtggcgatcgccccggctccgctcaccgggctgaccctggactccagctcgccctacttccccggcaacggcattaccccgctgccaacctcattcgttctcgatcccagccagcctatcgacctcaactggcgcgagaccgccgccggtgcccgagagtcgaaagaccagaacaccagccagcgggtattgctgagcttcgacggcaacgtctccggatgggattacaaccttggtgccacctacaaccagaaccaggtgaacagtgcggtgaccggcggctacgtcagcgaccaggcaatgatcgatggcctggcgagcggcctgctcaaccccttcggcccgcagaccccggaaggccaggcctacatcgatgcggcccgctaccacggtgactacatgacggcggtcggccgggtcagcggcctcgatggccgcatcagccgcgagatcggcgattggttcggcgccggtcctgccggcctggcgctggggggcgaataccgcaaggagaagttccatcaggacttcgagcagtgggcgggcgatctttccagcctgggcgtagaccccaacgccagcgtctccggcgaccgcagcgtgcgcgcccagtacgccgagctgagcgtgccggtactggacagcctcgaactgggcgcggcgatccggcatgacaagtacagcgacttcggcagcaccaccaacccgaagtattcattccgcttccagccgctcaaggagctggtggtgcgcggcgcttacagcgaaggcttccgcgcgccctcgctgtatgagctgtacagcgccaactacaccacgttcacccagggctattacaacgaccccgtactctgcaccggcggcaccccgcagcccggcggcaacccgggacgcgactgcgatcagcagttgctcaataccaccggcggcaaccagaacctggacccggagaccgcgcgcaacgtcaccctgggcttcgtctatcagccgctgcgcgacctgtccgtcgggctggacttctggtggatcaaaatctccaaccagatcgccgagttcccggagtccgcggtgctggctaaccctgatctctacgccgaccgcatcatccgcgccgccgacgggtccatcgaccacatcgtcaccggcctggccaacctcggcaaggtcaagaccaacggcgtcgacgtgtccatcgactaccgcttcccgatgacctccttcggtgccttcggcctcggcctgcagggcacctacgtggatcgctacgattaccaggagtccatcggcggcgagtacatcgacaacgtgggcgacttccagggcaccggtatgatcgcccgctggaagcacaccctcactggcacctggaactacggcgcctggcgcgcttcgctggtcaatcgctataccagcagctaccgcgaccaattccctgacgatggcaacgagcgcgtggcgtcctacgtggtttgggacatgtcggcgggctataccttcgacaaggccctggacatcgacgtcggtctgaagaacatgttcgaccgcaaccctccgttcagcaatcaggcgtacaacttccagaccggttatgacccgcgctacaccgatccgttgggccgagtcctgttcggtcgcatgacctaccacttctga

SEQ ID NO: 335942 - DNA, 402 bp, Pseudomonas aeruginosa
atgtccttctcgacccaagatagcgacgaagtcctcagcgagatgaatgtcacgcctctggtagacgtgatgctggtgttgctggtggtgttcatcgtcaccacaccgctgatgaccaatgcgatcaagatcaacctgccgaagaccgacgccgtggccccggccgaacagaaagacccggtggtggtaagcgtcgaccaggatggcaagttctacctggacaagtcgcaggtggaggtagacctgctggagaagagcctgggggacgtcaagctcaaggacccggaggtccgcgttcaactgcaagccgatgagggggtcaattatggtcaggtggccaaggccatggcctccatcgagcgttccggaatcaccaagatttccgtgatgacctctcgctag

SEQ ID NO: 335943 - DNA, 708 bp, Pseudomonas aeruginosa
atgaacgaaacactcacatcccttatcgtccccggcgtgctctgggcgctgattgtcttctccgtcatcagttgggcgctgttgctgatcaagggcgcccagtcggtacagcagaagtcgcagaacaagcagttccagaaggccttctggaacgctcccgacctgcttactgccgccgaacatgccgcgcaataccccggtgcgctggcacgcatcgccaactccgggttcgaggccatgaccgtagccggcgaaccgccgcgcaatacccagcaactggcgcagaccatcaatcgcgcggatcgcctggagcgcaacctgcgccagcagatccagaaggagcgccgttcgctggaagccggcctggcgatccttgccagtattggcagcacttcgcccttcatcggcctgttcggtaccgtgtgggggatcatggaggcgctgcaatcgatcggcgccagcggcaatgccagcctcgacacggtcgccggccccatcggccatgcgctgatcgctaccggcgtgggtatcgccgtcgcggtgcccgcggtgctgatctacaacttcttcctgcgccgtctgaagctcgccaccgcgtatatggacgacttcgcccacgacttcgaaagtctcgcccagcgcagttccttcatgctgagccggcagccgatttcccagtccacccaagccatgcgcgaggccagctga

SEQ ID NO: 335944 - DNA, 804 bp, Pseudomonas aeruginosa
atgggcaatgcggcaccccacaagctactggacgatgtttcagaacctggcggcaaggcggccaccccggcctttttccaagcaaacgcctcggcgcccgcgctttcgaaacggcaactgatactgctcgccagcctctccgtggtgttccatggcgggctctggtggctgatcaacgccacgccggcaccggtcgagatcccgccgaaggttccggaaatggtcatcgagttcgccagtcccgcaccccccgcaccgccgaccccggagccgccaccgccaccgccgcctccggagccaccgccgccggaacccgcgccggaacctgaaccaccggttcaggaggaggcgcccaagcctgcacccaagccggtggagaaacccaagccgaaacccaagcccgtgccgaaaccggcgccgccgaaacctgcgccaccggcaccaccggctccggcaccgacgccagcaccgcctgcgccgacaccgcccgcagcgcctgcgcccgccgcgccggtgaaggaaagcgcggcgatatccggtctggcgagccttggcaatccgccgccggagtacccgtcgctggcgctgcgccgtggctgggaaggccgcgtggtgttgcgcatccgcgtgctgcccaacggtcgcgccggcagtgtcgaggtgacccgctccagtggcaggaagcagctggacgatgccgcggtggaagcagtgaaggggtggaagttcgtcccggccaagcggggtgacacgcccatcgagggcttcgctgaccagaccatcgatttcaaagtgccgaattga

SEQ ID NO: 335945 - DNA, 1827 bp, Pseudomonas aeruginosa
atgagcacccacacccacatcactcccgccgaagccatgccgaccacctcgcgagggttcgtctggcactacacgcggctgtttctcggctggagcctgctgatgatcggcctggagttcggcgccgcgctgtgcaccacgctgattccctatgccatcggcaagatcaccggcgcggtgagcgaaggcctgtggaaggatgccgacattctttccgccagcatgccggcgctgctgttgatggcgtccctcgccgcgggcgagatgctgctttcacgtagcatgagcctgtgcatgatcttcgtccggccacggcagaaacaacgcatcactgccgatctgttcgcctatctgcagaaacattcgcaccgctatttcagcgaacatttcgccggtagcctggctcagcgcatcagcgaggcggccgtcggtgtcctggaagtcagctggatgctgatggtcgagtttctgccgatcctggtcaccctggtcggcgggctgatcctgatgagcctcgcctcgctttggctgggcatgagcctgttggcctggacgctggtctacgtcggtctctcctatgtgctggcgcggcgcgcccaggaattcgcccggctgcatgccgaggcgcgtagccttacatccggcaagatcgtcgacgcggtcaccaatctcaacaacatccgctatttcgcccgcggcgattatgagcagcaatacctcgatcgcttcatgagcagcgaacgtcaggctgcgcgtcgctcgttccttttcatggagcgaatccgctggctgcaggacggcatggcgctgctgctgcgcatcggactggtggtcatcgcgttgctgctatggcagcgcggaaccatcgacgtggcggccttcgtcatgaccgcgagcctcgggctattgattgtttccaacgccaagtccctgagctatcagttcctgcatttcttcgagtccagcggcaatatcgagaacagcgtgcgtacgctgatacgtccgcacgaactgccggaccgcgcggacgcgcgcgacgacctccggttttcacggggcgaaatagagttccgcgacctcaccttcggctaccaggccgcaagaccggtgttcgccggcctcaacctgaagatcgccgccgggcagcgggtcggcgtcgtcggcttctccggatcgggaaagtccactctgctcaacctgctgctcaggctgtatgacccgcaaggcggcgccgttctcatcgacggccgggatattcgcgagctgacccaggcgtcgctgcaccggcagatcggcctcattccccaggagcccggattattccatcgcaccctgcgggagaacatcggctacggtgcgccggaggctgccgacgaacatatcgtgcgcgccgcgagacgtgcccacgcgcacgagttcatcgaacgcatggagcacggctacgagtcgctggtcggtgagcgcggggtaaagctctccggcggccagcgccaacgtatcgccatcgcccgggtcctgctgaagaacgcgccaatattagtcatggacgaagccacttccagcctggactcggaaaccgaacgactgatccaggaaagtctcgacgagatcatgggcgagaaaaccgtactggtggttgcccatcgactgtccaccgtcgctcacctcgatcggatcctggtgttcgaccagggccgcctcgtggaggacgggactcatcagtcattgctggagcgcggtggcatctaccacagtctatggacgcatcaggtcgatggacacttcaacgaagaagtgcgggatatcgaagcctccagcgaggcgtga

SEQ ID NO: 335946 - DNA, 1344 bp, Pseudomonas aeruginosa
atgagcctgtcgaatccgggcgttgccgccgagcatttcgagtccctcagccgatggttgcgcagcacacggctcgccggcgaggaatttaccctgtgctacagcgccgaagcctccgacttcgtccgtttcaatcgcgcccgggtgcgccaggccggccatgcgcaacaggccagtgcgaccctggagctgttccgcgcagagcgtcacgccagctatacggtgaccctctgcggcgagcgcgaggaggaccgccgtcgcctggcggacgcacggcagcaactgcgcgacctgctggagcacctgccggcagatccctacctgctgttcaatgccgaggattggcgcagcgagtcttcttccattgcgctccccccggacgccgaagaggtcatcgctcagataaccgcgggcgcggacggtagcgacctggtcggtatctacgccaatggcccgctgttccgcggattcagcaattcctgcggggccttcggctggcatgcggcgagcagctgcaatttcgactggagcctgttcgacgcgtccggccgggcggtcaagtcgatgctcgccgggccgacctggaatgccgaggcgttcctccagcgcatggactcggctcgcctgcaattgcagcacctgagccgcccggcgcgccaactgagtcccggggcgtaccgtacctatctcgcgccggcggcgctggaagaactgcttgcctatgtcagttacgacgggttctccgcccgcggcatccataccaagaaaagtgtgctgcagcaattggccagcggccaggcggcactgagtccgctgatcgatcttgatgagcgtatcagcggctcgccgagcccggccttcaccgacgagggcgcgcaacgcgagaacatcaaactgatcgagcgcggacgcctggtggggcagctcaccggtttccgcagtgcccgcgaatacggcctgcgcagcaatggcagcacctcttcggaaaccccggaagccttgctcatgggcgccggaacgctgccctccatcgaggtcctcgagacgctggggagcggcctctacatcggtaacctctggtacgtgaatcagtccgacgtagccgccgcgcgcctgaccggattgacccgcttcgccaccttctgggtggaaaacggggaaatccaggcgccggtagccagcatgcgcttcgatgacagcctttacgattttctcggcgaacacctgttggcactgaccaaagagcgcgagctgatcgtctcggcgagtacctatggcgagcgccggaccgcgtcgatgcggctgcctggcgcactcaccaatcgcttcaccctcaccttgtag

SEQ ID NO: 335947 - DNA, 1440 bp, Pseudomonas aeruginosa
atgttcgatattttccccctgctccagcagcgtttcgaagcgcttcgcagtaccgccgacttctggtccctgcgccacgtcaggcaagcgtcgcagaagttcgaggtggtcaggaacattccttcacccccgcgcctgacgctcgaccagggggtcatgctgagcgtgcgtttggcgggtatcgaggcctatgcggccacttccgatctgagccagagcggcttgcagcaggcgctcgagcgcgccgagcgactcgcccgcggcagtgcatgccggccactgctcaaacagttgcctgcgctttccagcgcacgacgcgattacctgtctccggcttaccaggaggcacctgtgccgctgcgcgaatgcctcgagctattgcgcggcgagtccgccgcggtgccggacgacgaacgcatcgtccattggatggcgtcgctggcgatcgaggaggtggagcagatctacctcaacagtgtcggcgcgcaactgcgcagcgcccagcgcttcgtttatccgggaatgtccgtcactgcctacgacggcgatgacagccagacccgcacgctgcacggcggtgcctatgcacagcagggcggtttggacgtggttgcccgcagcggcttcagcgggtgcgcgacgaagatcgccgacgaggccctgcaactgttactggcgccgaacacgcccagtggtgcccgtgatctgctgttactgccggaccagatggtcctgcagatccacgagtccatcggtcacccgctggaaatggaccgtatccttggcgacgaacgcaactatgccggcaccagcttcatcaaggcggaagatttcggccaccgggtctatggatcgcccctgctcaacgtcagcttcgatccgcagcttcccgagcaactggccagctacgccttcgacgacgatggcacgccggccgagaaggtcctgatcatcgagcagggcatcctcaagcacccgctggggggcgccctttcccagcggcgcagcgggctcgccggcgctgccagcagccgcgcctgcagctggaatcggccgcccatcgaccgcatggctaacctcaacgtcgaacccggcgagcaaaccctggagcagctgatcggcggtatcgagcgcggcgtactgatggccaccaaccgctcctggtcgatcgacgatgcccgcaacaaattccagttcggttgcgaatgggggcaattgatcgagggtggcgagctgggggccgtggtgaagaacccgaactatcgcggtatctcggcacagttctggcgcagccttagtgccgtcggcgactcctccacccatcaggtactcggcacggccaactgcggcaagggcgaacctaatcaagcggtgcgggtggggcatgcgtctccggcctgcgtattctccgacgtcgcggtgttcgggggtgtgcaatga

SEQ ID NO: 335948 - DNA, 1683 bp, Pseudomonas aeruginosa
atgacctcgtccgttgataaccctgcatcgacgagcgcgtcccagcgtctgctcggcggcttgctgcgcggcaccctgcgcctgctgtttcgcgggctgatccgcccacccatgcctattgccgggcagcgcctggtgcttcgcgcgctcgccgcggcgacgctgacgccgcgcggcgtgcgtcgccagcgcggcaccctcggcggcgtgccatgcgaatggtcgcgcgtgccgcagggcggtggtcaggtgctgctttacctgcacggcggcgcctacgtcatcggctcgccggccacccatcgctcgatcaccgcgaacctggccaggcgctgcggcgcggacgtctgcgcgctggactaccggctggcgcccgaacatccgtatccggcggcgctagaggatgcgctggcggcttacgcggcgctgctggagcagggcacgccggcgtcgcggatcgtcttcgccggggattccgccggcggccacctggctttgatcgccgcgctcgcgctgaaggcgcgcggtttacccttgcccgcggcgctggtgctgttctcgccgctgaccgacgccggcggcagcgaacggcacgccccggcggccggcgacccgctgctctcgccggcatggatcgaacaggcggcgcgtgcgttcttcccgccgcacatcccgcgcgaggcgcccgagctgtcgccgctgaatgccgacctgtccggtctgccgccgctgctgatccaggtcggcgaggacgaaatcctgcgcaatgacagcctgcgcctggccgagcgcgcgcgtgcggcgggcgtaagcgtgcgcctgcagcgctacctcggttgctggcacgtgttccaggcgcatgccgacgtgctggcggtggccgaccgggcgctggacgaggtggcgcgtttcgtcgcgccaggggcgaacagtatcctcattaccggcgccgcctccggtatcggcgccgccacggcgcgactgttccacgcccgcggctggcgcgtcggcttgctcgatcgcgatggcgcggcgctggccgctctggccggggagctggaggacgcatggcacgccgaactggatgtgctggaccggccggcggtgaacgcggcgctggacgcgttcgccgaagcctgtggcggccacctgcgcatgttgttcaactgcgccgggattctgcgtttcggcgccttcgccgagatcaccgccgaggagcacgggcgcatcgtcgcgatcaacgtggaggggctgatcaactgttgccatgcggcgtttccccacttgcggcgaacgccgggggcgcaggtgttgaacatgggctccgcgtccgggctctacggcgtgccccagatggccagctattcggcgtcgaaattcgccgtgcgcgggttgaccgaggcgctggagctggagtggcggccacacggcattcgtgtcgctgacctgatgccacccttcgtgcgcacgccgatggtcacccggcagaccttcgagccgcaggtgctgcgtcggctgggattgcgcatgggcccggagacgatcgccgaggcggcctggcggcacaccacctgcgatgccgtgcaccggccgataggcgggcagttcaaggcgctctactgggccgggcagctgtcgccgccgtggatgaaccggctggtgatgcgctggctgagccgttaa

SEQ ID NO: 335949 - DNA, 1470 bp, Pseudomonas aeruginosa
atgaacaataatccccaccccacggcgcccctgcgcgtactgatcatcggtgccggtttcgctgggctgggtctggcgatcaagctgcgccaggccggcatcgaggatttcctgattctcgagaaggccggcgacatcggtggctgctggcgcgagaatcactacccgggcgccgcctgcgacgtgccctcgcacctgtattcctactccttcgaggcgaaggccgactggtcgcgcaagttcgccccacaggcagagatcctcgcctaccagcaacagtgcgtggcgaagtatcggctgcgaccgttcatccgcttcggctgcgaggtcgccgaggcgcgcttcgacgcacaggccggcgtctggaatgtgctcgacggcactggtcggagctacgccgcgcgggcgctggtcagcgccaccggccagctcagcaggccgctgtatccgtcgctgccggggcttgagcgcttcgccggggcaagctttcattcggcgcactggcagcatgatctggacctgcgcggcaaacgggtggcggtgatcggcaccggcgccagtgcgatccagttcgtcccggcaatcgccggcgaggtcgcacggttgcatctgttccagcgcagcgccgcctacgtgatcgccaagccggatcgcgcctacgcgccctgggagcgccgcctgaaggcgcgcctgccgtggctgcagcgcctcgaccgcggcctcaagtacgtgcagcacgaggcgcgggtgctggccttctcggtgtttccgccgctgatgaaggtgatgcgcctgcgctttctctggcacctgcgccgcagcatcgccgatccggtactgcgccgacggctgctgccggactatccactaggttgcaagcgcatcctgatcagcaacgacttctacccggcgctggcgcgcagcaacgtggaactggtggatacggcgatccgcgaggtagtcccgagcggcgtggtcactgccgacggtcgcttgcgcgaggtcgacgcgatcatctacggcaccggcttcgccgccaccgaattcctcgcgcccatgcggttgttcggcctcgacggacgcgagctcagcgccgcctggaaggatggcgccgaggcctacaagggcatcagcgtcgccggcttccccaacctgttcatcctctacggaccgaacaccaacctcggccacaactcgatcctctacatgctcgagagccagtttccctatgtgctggcctgcctgcgccgcctcgacgggttacgttacctcgacctcaagccgcaggtgcaggccgcgttcaaccagcgccttcaggaggaggtgcggcacaccgtgtgggagcgcggctgccacagctggtacaagaccgccgccggcaagaacaccaacaactggccgggcttcaccttccgttaccgccagcagacccgcctgccggagttcaccgactatgacctcgtccgttga

SEQ ID NO: 335950 - DNA, 993 bp, Pseudomonas aeruginosa
atgcctgacgcccccttccagcctgcctggtggctgcccggcccgcacctgcagacgctgtggtcgccgttctgccgcaggccgcagccgctggagcgccagcgcgaacggctgtggctggaggatggcgacttcatcgaccttgactggcacggcccgcacgacacccaggcgccgctggtgctggtgctgcacggtctcaccggctcctccgcctcgcactatgtgataggcctgcaggggcgcctgggcgagaacggctgggccagcgtggcgatcaactggcgcggctgctcgggcgagccgaacctgctgccgcgcgcctaccattccggcgccagcgacgacctcggcgcggtcatcgaacacctgcagcgcaggcgtccgctggcgccgctgcacgcggtgggctattcgctgggcggcaacgtgctgctgaaatacctcggcgagcgggcggtcgactgtccactgcgcggcgccgtagcggtatcggtgccctttcggctggaccagtgcgccgaccgcatcggtctgggcttctcgcgcgtctaccaggcgcatttcatgcgcgccatgctcgcctacgtgaaagacaagcaacgcctgttcgcccaccagggcatggccgaccggctgtcggtgatggagaagctcggcccgctggacgatgtgcgcaccttctgggatttcgacggacgcatcaccgcgccactgcatgggttcgtcgatgcccaggattattaccggcgctcgtcgagccgctatttcctcggcgacatccgcgtgccgacgctgatcatccaggccaccgatgatccgttcgtcttcacccacagcgtgccaacggcggacgagctgtccgccagcaccacgctggagttgcaggacaaaggggggcacgtcggcttcgtcgaaggctcgccgcggcatccggtgtactacctggagcggcgtatcccgcagtggctggggcagctcgcgaagcgctag

SEQ ID NO: 335951 - DNA, 666 bp, Pseudomonas aeruginosa
atgccgccagcaccgaagacccgcgagcgcatcgtccaggccagcctgcaactgttcaacgtgcagggcgaacgcagcgtgaccaccaaccacatcgccgcacacctgcagatttccccgggcaacctgtactaccacttccgcaacaagcaggcgatcatcgccgtgctgttcgccgagtacgaaagccgcgtggatgccttcctgcgccgcccggagcggacgctgacggtggacgacaagaccttctacctggaagcgctgctcgccgcgatgtggcactaccgcttcctccaccgcgacctcgaacacctgctggagactgacgccgcgctggccgagcgctaccggcagttcgcccagcgctgcctgacccacgcgcaggccatctacgccggtttcgtcgaggccggcatcctgtgcatgacaccggcgcaggtggaggcgctgagcctgaatgcctggatcatgatgacctcgtgggtgcgctttctctgcaccgtgcgcggcgcctccgcggaactcgacgagaacctgatgcgacgcggcatctaccaggtgctggcactggagggcggctacgtcagccccgccgcgcagggcgccgtggagcggctctacgagcggctgttcgtgccgctggagcgggtgctcgggcgggaatag

SEQ ID NO: 335952 - DNA, 1443 bp, Pseudomonas aeruginosa
atgcccgccgatctcgccctgatcatgccgcgcccgtccgccgaaccccagaacgccggaccactggaagcgcttctctcccggcaacgcgccgcctttcgtgccgacccgatgccctccgccgaggcgcgcatccgccgcctaggcgatctgcaccagttgctgctggacgaacagcaggcgatcgtcgccgccataagcgcggacttcggcaaccgttcggccgatgaaaccctgctcgccgaaatcatgccctgcctgcacggcatcgcttatgcccgcaagcgcctgcgcaaatggatgaagccgtcgcggcgcgccgtggggctgcagttccagccggccagcgcccaggtggtctaccaaccgctgggggtgatcggcgtgatcgtgccatggaactacccgctgttcctcgccctcggcccggcgatcggcgcgttgtccgccggcaaccgggtgatgatcaagatgagcgaatcgacacctgccacctcgcgcctgctcaaaaccttgctggcgaagatctatcccgaagatctggtggcggtggtcgagggcgacgtcgaggtgggcatcgccttttcacgcctgcccttcgaccacctgctgttcaccggagccacgggcatcggccgccaggtgatgcgcgcggcggcggaaaacctggtgccggttaccctcgagctgggcggcaagtcgccggcgatcatcagcgccgaggcaccgatggagcaggccgccgagcgcatcgcctggggcaagacgctgaacgccggtcagacctgcatcgccccggactacgtgctggtgccgcaggcgcgcctgcaggcgttcgtagacgcctaccgcgaggcggtgcagcgtttctacccgaccctggagaacaacccggactacacggccgtcatcaacccacgccaactggcccggctcaacgactacctgagtgacgccgaagcccgcggcgcgaccctgctgccgctgtttccgcagagccagggcacgcgcctggcgcacaccttgctgctggaggtgaacgacgagatgcgcgtgatgcaggacgagatcttcggtccgctgctgccggtgattccctacgggtctctcgacgaggcgctggactacgtcaacgcacggccacgcccgctggcgctgtacttcttcggctacgacaaggacgagcagcaccgcgtgctggcgcagacccattcgggcggcgtctgtctcaacgacaccttgctgcacgtggcgcaggacgacctgcccttcggcggtatcggtgcctcgggcatgggccactaccacggctacgagggcttcctcaccttcagcaaagccaaggccgtgttcagcaagccgcgcttcaacgccgcgcggatgatctatccgccctatggcaaggcgatccagaagctcgtctacaagctgttcatccgctga

SEQ ID NO: 335953 - DNA, 546 bp, Pseudomonas aeruginosa
atgacaaacaccaccttttccaccccggtcctcagccgccggggcctgctcagggtcgggctggtcggttcggcgttcctcgccaccgccggcctgggtgccacgctcagcggttgctcggcgagcgcgccggccagcggctatgcggtgctgcgggagaccgacctgccctttctccgcgcattgatcccggtaatgctcgacggtgccgtgccggtcgcgcagatgcccggggcgatcgacggcaccctgcagagcctcgactacagcctcgaccacctctccccggaattgctcaagctgacccagcagctgttcgacgtgctcgccctgccgatcacccgcggaccgctgaccggcgtctggggcagttgggacaaggccagtgccgacgacgtccgccagttcctcgcccgctggcaggacagctccatcgccctgctgcgcatgggccacgagtccctgctcaagctggtgatgatggcctggtacagccgccaggaagcctgggcgcattgcggctatcccggcccgccgacgatctga

SEQ ID NO: 335954 - DNA, 1593 bp, Pseudomonas aeruginosa
atgcccgtacccgatccgttccgcgaaggcctggcccgcggctggaagacccacgacggctcgcgcctggaaaacgacctgacccttgaatgcgacgtagccatcgtcggcaccggcgcaggcggcggcaccacggcagaaatcctcagcgccgccggctacaaggtgctgctgatcgaggaaggtccgctgaagaccagcagcgacttcaggatgcaggaggccgaggcgtacccgagcctctatcaggaaggcatcggccggatgagcaaggatggcgccatcgttatcctccagggccgcgcggtcggtggcaccacgctggtcaactggacgtccagcttccgcaccccggagccgaccctcgaacactgggcacgcgaatacgacgtcaggggccacagcgccgccgagatggcgccctggttcgcgcgcatggaggagcgcctcggcgtgacgccctgggcagtgccgccgaacggcaacaacgacgtgctgcgcatgggctgcgagaagctcggctatcactggaaagtcatcccgcgcaacgtgcgcggctgctggaacattggctactgcggcatgggctgcccgaccaacgccaagcaatcgatgctggtgacgaccattccggcgaccctcgacaagggcggcgagctgctctacctggcccgcgccgacaagctgctgctcgacggcgaccgggtcaccgggctgagctgccaggcactggacgcacgctgcgtggcgccgaccgggcgacgcatcacggtcaaagcgcggcattacgtgctcgccggcggcggcatcaataccccggccatccttctgcgttccgatgcgccggacccgcacgggcgcaccggcaagcgcaccttcctgcacctggtgaacttctctgccgcgcagttcgagcaggtcatcaatcccttctatggcgcgccgcagtcgatctattcggaccatttccagtgggacgacggccccaccggacggatgtccttcaaactcgaggtgccgccgctgcaaccggcgctgtccaccaccctgctcggccgcttcggcgaggaaaacgccctgcgcatggagcagctgccgcacaccaacgtgatgctcgccctgctgcgcgacggcttccatccgcagagcacgggcggcagcgtggaactacgcggcgatggctcgccggtgctcgactacgcggtcagcgactatgcctgggacggcctgcgccgctccttccagaccatggcggaaatccagttcgccgccggcgccaaggcggtcctgccgctgcacgccgatgccggctacgtgaccacgccgcaggcggcgcgcgagctgatcgacggcctgcgcctggaactgttccgcacgcgcctgggcagcgcccacgtgatgggcggctgcgccatgggcgaggaccccaaacgggcggtggccgacagcctgggccggcatcaccagttgcagaacctgtcgatccacgacggctcgctgttccccaccagcatcggcgccaacccgcagctgtcggtctacgggctcaccgcccagctggccacgcaactggccgaacggctgaaagcgtga

SEQ ID NO: 335955 - DNA, 480 bp, Pseudomonas aeruginosa
atgaaccgagtgctgtacccgggtacgttcgaccccatcacccaggggcacggcgatctcatcgagcgcgcatcgaaactgttcgacagcgtggtcatcgccgtcgctgccaatccgaagaagaacccgctgttcccgctggagcaacgcgtcgaactggcccgcgaagtgacccggcacctgcccaacgtcgaggtggtcggcttctccacgctgctggcgcatttcgtcaaggaacagcaggccaacatcatcctgcgcggcctgcgcgcggtgtccgacttcgagtacgaattccagctggcgaacatgaaccgtcaactggcgccggacgtggagagtctgttcctcacgccgtcggagcacttctcctacatctcctcgaccctggtccgcgagattgccaacctcggcggcgacatcaccaagttcgttcatcccgcggtcgcccgggccctcgcccaacgcttcaagcgctga

SEQ ID NO: 335956 - DNA, 252 bp, Pseudomonas aeruginosa
atgtccctgaaaatcaccgacgattgcatcaactgcgacgtctgcgaacccgagtgcccgaacggggcgatttcccaaggcgaggagatctacgtcatcgatcccaacctgtgcaccgagtgcgtcggccactacgacgaaccgcagtgccagcaggtgtgcccggtggactgcatccccctcgacgaggcgcgcgtggaaaccagggagcagttgatgagcaagtacctgatcatcacgggcaaggcctga

SEQ ID NO: 335957 - DNA, 1698 bp, Pseudomonas aeruginosa
atgcgccggttgcagcgggcgttcctcggcttcgccgccctcctcctcgtctgcaccgcccaggcccagagcaccggcgaggccgccgtcgccagcgcgcacccgcaggccaccgccgccggccgggaaatcctcgatgacggcggcaacgccttcgacgccgcggtcgccgtagccgccgcgctggcggtggtcgaaccctatggctcgggactcggcggaggcggcttcttcctgctgcgccgtccgggcgatccactgcgctacaacttcctcgacgcccgcgagcgcgctccgcaagccgccgatgccgatctctaccggcgcgacggcgtcgtgcagccccggctgtccctcgacggcgccctggccgcggcgattcccggcctgccggcggcactggtcgacctctccgcacgctacggcaagctgccgctgaaacgcgccctggcgccggcgatccggctcgcccgcgagggtttcgcggtcgacgccgtctatcgcgagcgcgccgcctggcgcctggccgcgctgcgcgacgatgcggaaagcgcgcggctgttcctggtggacggcgaaatcccggccgaaggccacgtgctgcgccagccggaactggccgccaccctggaagcgctggccgaacagggccgcgacgggttctacaagggcgccgtggcgcagcggctggtcgacggcgtgcgcgccgccggaggcatctggaccctggaagacctggacaagtaccgcgtggtcgaacgcacgccgctgcgcttcgccctcgccggcgggcgtgagctgatcggagcgccgccgccctcggccggcggcgtggccctggcgcagagcctcgccatgctgcagcaactgccgctgagcgaggccgacaagctgcagcgtgcgcactacgtcaccgaggtactgcgccgcgtctaccgcgaccgtggcgcgctcggcgacccggatttcgtccccgcgccgctggccaggctgctgcgcgccgattacctgaagggcctcgccgccggcatcgacccggaaaaagccacgccgagcgccgaactgccgccctccccggcctggcgcgaaggcgacaacaccacgcacttcgccgtgctcgacgccgatggacgcgcggtcgccgccaccctgtcgatcaacctgcccttcggcggtgctttcagcccggccggcagcggcgtggtgctcaacgacgagatggacgacttcgccgccgatccccagggctccaatacctacgcgctggccggcagtcaggccaacgccgtcgccccgggcaaacgcccgctgtcgagcatgagccccaccttcatcgagagccgcgacgacttcgccgcgttcggtacgcccggcggcagccgcatcccgagcatggtgctgctcgccgtgctggattacctcgacggcaagccagtggccgaatggccgaagaccccgcgcttccaccaccaatacctgccggacgtgctggagtacgaggcggatgccttcagccccgcggaagtcgccgacctgcaggcgcgcggctatacgctcaagcaggtcgatcggcgctacggcaacctccaggtgctgcgctggcacaagccgtccaaccgcgtcgaagccgccagcgacccccgcggtatcggcacctccgcggtgtttccgagggccatgaaaaagccggtcgattga

SEQ ID NO: 335958 - DNA, 342 bp, Pseudomonas aeruginosa
atgaacctgtttcgttgcactgctcttgtcttggcgctgaccaccgtctcgctggctttgcccgctcaggccgggcaggtggaggagaactcgtccggcgatccgatgtacaccgtcgaggcgccacctgcctacgccatgatcggcgatctggttatcgcgcggcccctgctgatcgcggcgaccgtgattggcgcggcggcgttcgttgtggcactgccgttcaccgctactggcggcggcatcggtgctaccggcaaggcgctggtggtcgatcccggcaaggcggcattcgtgcgttgcctgggctgcaccagcaccggttacaacaaccgcgactga

SEQ ID NO: 335959 - DNA, 813 bp, Pseudomonas aeruginosa
atgcccgaattacccgaagtcgaaaccacccgccgcggcatcgctccccacgtcgagggccagctcgtggagcgggtgatcgtgcgcgagcggcgcctgcgctggccgattcccgaagacctcgacgtgcgcctgtccggtcaagttatccagcgcgtcgagcgccgcgccaaatacctgctgttgcaggcgcagagcggcacgctgatcgcccacctgggcatgtccggcagcctgcgcctggtgcccagcggccagccggcgctgaagcacgagcacgtggatttcgagttggcgtcggggatgtcgctgcgctacaccgatccgcgccgcttcggcgcgctgctctggagcgcggacccgctggcccacgaactgctgcgcaacctcgggccggagccgctgaccgacgcctttgattgcgagcgcctgttcgcgctgtcgcgcgggcgttcgatggcggtgaagccgttcatcatggacaacgcagtggtggtcggggtgggcaacatctacgccagcgaagcgctgttcgccgccggcatcgacccgcggcgcgcggcgggggcgatctccagggcgcgttaccagcgcctggcgcaggagatcaagcgcatcctcgcgcatgccatcgcgcgcggcggcacgaccctgcgcgacttcgttggcggcgacgggctgcccggctatttccagcaggagctgttcgtctacggccgaggcggcgagttctgcaaggtctgcggcagcaccctgcgcgaggttcgtttgggtcagcgcgccagcgtgtattgcggccgctgccagcgctga

SEQ ID NO: 335960 - DNA, 867 bp, Pseudomonas aeruginosa
atgtcccaggaactctccaccgaacagatccgcaaggctctgcaaggcatcagcgtgccgccccaaccgcagatcatggtcgacctgcagatggagcagttgatgccccacccggacctcaaggccatcgccaagctgatcagccaggaccccggtttgtccggcgcgctgctgaaaatcgtcaactcgccgtacttcggcctggccaacaaggtcagctcgattcagcgcgcggtgaacctgctgggctgcaacagcgtgatcaacatcatcaacgcgcagtcgatccggggcgagatgagcgacgagaccatcgtcaccctgaaccgcttctgggacaccgcgcaggacgtggcgatgacctgcctgacgctggccaagcgcgtcggcatccaggcggtggacgaggcctacgcgctggggctgttccacaactgcggcatcccgctgatgctcaagcgcttcccgcactacatgagcgtgctggaagaggcctacgccagcgccaccgccgagcgccgcgtggtggatacggaaaaccgcctgctcaataccaaccacgcggtggttggctactacacggcgcgttcgtggaacctcaatccgcatctctgcgaggcgatcgccaaccatcacaacgcgttggcgatcttcagcgaggactccggtcgcgacagccagctgaagaacctgctggcgatcctcaagatggccgagcacatctgcggctgctaccgggtgctcggcggccagaccgaggaccatgagtggcacgtcgtgcgcccttacgtgctggattacatcgggctctccgaatacgactacgaaaccctcaaggaaagcatccgggagctcgggctgggctag

SEQ ID NO: 335961 - DNA, 540 bp, Pseudomonas aeruginosa
atgaacgcatcgctgaatggcaagaaagtcgccatcctggtcaccgacggtttcgagcaggtcgagctgaccggccccaaggacgcccttgagaaggccggcgcgacggcccatatcatttctgccaagaccggcaaggtcaccggctggaaccacaccacgccggccgacaccttcgaggtcgacaagacgttcgagagcgccaatatcgacgactatgacgccgtgctcctgcccggcggcgtggtcaacggcgacaccatccgcaccgacgaaaaggcccaggctctggtcaagggcgcggcgagcgcgaacaagccgatcgcggtgatctgccacggcggctggattctcgccagcagcgacctggtcaagggcaagaccatgaccagctggccgtcgctgaccgacgacctgaagaacgccggcgccaactggatcgaccagcaggtggtggtggacggcacgttgatcagcagccgcaagccggacgacatcccggcgttcagccagaagctgatcgacgcgctggcggcctga

SEQ ID NO: 335962 - DNA, 1518 bp, Pseudomonas aeruginosa
atgcattccgaacgtgtgcgtctgccctccctgctcgacaaactgatgagtgcggagcaagccgccgcgctgatcgaagacggcatgaccgtcggcatgagcggtttcacccgtgccggcgaagccaaggcggtgccgcgcgcgctggccgagcgggcgaagaagcatcccatgcagatcagcctgatgaccggcgccagcctcggcaacgatctggacaagcagctcaccgaggccggcgtgctggcccggcgcatgccgttccaggtcgacagcacgctgcgccgagcgatcaacgccggcgaggtgatgttcatcgaccagcacctctcggaaaccgttgagcaactgcgcaaccaccagctcaagctcccggacatcgcggtgatcgaggcggtggcgatcaccgaggacggccacatcgtgccgaccacctcggtgggcaactcggccagcttcgcgatcttcgccaagcaggtgatcgtcgagatcaacctggcgcacaaccccaatctggaaggcctgcacgacatctacatccccacctatcggcccacccgcacgccgatcccgctgacccgcgtggatgaccgcatcggcagcggggcgattccgatcccgccggagaagatcgtcgccatcgtcgtcagcaaccaggcggattcgccgtccaccgtgctgccgccggacgccgagacccaggccatcgccgaccacctgatcgacttcttcaagggcgaagtggccgccgggcgcatgagcgacagcctcggcccactgcaggccggaatcggcagcattgccaacgcggtgatgtgcgggctgatcgagtcgcccttcgagaacctcagcatgtattccgaggtgctgcaggactctacctttgacctgatcgacgccggcaagctgcgcttcgcctcgggcagctcaatcaccctctcgacgcggcgcaatgtcgaggtgttcggcaacctggagaagtacaaggacaagctggtgctgcgcccgcaggaaatctccaatcatccggaagtggtgcgccgcctcggcatcatcggcatcaacacggccctggagttcgacctctacggcaacgtcaactcgacccatgtcggcggcacgaaaatgatgaacggcatcggtggcagcggcgatttcgcccgcaatgcgcacctggcgatcttcgtcaccaagtccatcgccaagggcggcgcgatctccagcgtggtgccgatggtcagccatgtcgaccacaccgagcatgacgtcgacatcctggtcacagagcagggcctggccgacctgcgcggtctggcaccgcgcgaacgcgcgctggcggtgatcgaccattgcgtgcaccccagctaccgggcggcgctgaacgattacttcgagcgcgcctgcgccaagggcgggcacaccccgcacctgctgcgcgaggcgatgcagtggcacatcgacctggaggaaaccggcagcatgatcggcggcgcgctgggggtggcggccagcgcctga

SEQ ID NO: 335963 - DNA, 681 bp, Pseudomonas aeruginosa
atgccctcctccgccctcgacctgctcgccgcccaccggttcttccatgacctgccgccgacccagctggaaacgctttccgccagcctgcaaagctgccgctttcccgccggcgacctgccgtttcgcagcggcgagcaggcccggcgctgcctgctgctcggcgacggcgaggtgcaggtgctgcgcttcggccaggatggcgaggagcgcgtgctcggccagttcggccgcggcgagctgatcgcggtggcggcgctgttcatggccgacggccgctacccggccagtgcccgcgcacagaccgcggtgtccggctggtggctgccgcgcgaggcgctgcatcggctttgcgcggcgcacccggcgctgtccttgcgcctgctgcagagcgtcagcggcagcctgctgcgcagcgtggacctgggcgagcggctggcggcggactcctgcgcccagcgactcgccggctacctgctggaacaacgcgacgtccagggcagcgacgccctgaggttgccgctgcgcctcggccagctcgccgcgagcctgggcatgcggagcgaaaccctcagccggcaactcgccgactggcgccgccagggtctgatcgccggacgcggcaccgccgtcaccctgcttgacgccgacgccctgcaacgcctgcgctcagcccgatag

SEQ ID NO: 335964 - DNA, 1182 bp, Pseudomonas aeruginosa
atgcttcagatttcccgacccgcgctgggctttccgctctggcgcctgggctttcggccgttcttcctcggctgcgccgcctatgcctgcgtggcgctggggctgtggctcctggcgctcgccggcgcgccggtctggcagccgaccggcggttggatggcctggcacctgcacgagatgccgttcggcttcggcgtggccgcggtggccggtttcctgctcaccgcggtgccgaactggaccggcgcccaggcgttgtcggggccgccactggccgcgctgttcctgctctggctggccgcgcgcctggcctggctcggcggcgcgccgctggcgttctgcgcggcgctggagctggccttcctgccgctgcttgccttcgcactgggccgcagcctgtggcgcgcacggcagcgcaacaactatccgctggtcggcgtgctgctgctgttcgccctcgccgatggcctggcggtggccgggcaactgctcgaccgcgccgactggcagcgccagggcgggcacgccgcgctctggctgctggcggcgctgagcggaatcatcggcggacgggtgattccgttcttcacccagcgcggcctcggccgggcgcaggcggtgccggcgttgaggtggctggagcgtccggcgctggccgggctggccgtgctcgcggtactggcggcgatgggcttcgatctgcagccgcgggcctggatggcgctgccgttcggcctgctcggcgtgctgcacggcattcgcctgtcgcgctggtacgacaagggcctgtggcgcgtgccgctgctctggtcgctgcacctggcctacgcctggctggtgctggcgctgctgggcatggctgcctggcacctcgggctgatcgacaacggcagcgccgcgctgcacgcactcacggtcggcgggctggccgggctgatcctggcgatgatggcgcgggtgtcgctgggccacagcggccgaccgctgtcgccgccggcgggcatgcgctgggccttcgccgcgctgaatgcgtcggcgttcgtccgcgtgctgttgccggcctggctgccgcaaggcgcattgctgctcgccggcgtgctctggctgctggcgttcggggcgttcctggcgcgttatgcgggctggctgtgccagccacgagtggacgggctatcgggctga

SEQ ID NO: 335965 - DNA, 1197 bp, Pseudomonas aeruginosa
atgtccttacccagcctgcgcctcaaagccaacgccgatcgccgcctgcgtgccggtcacctgtgggtgtacagcaacgagatcgacgtggccgcctcgccgctcgctggcttcgccgccggcgaccaggcgatcctcgaggctgcaggaggcaagccactgggcatcgtcgccctctcgccgaacaacctgatctgcgcccgcctgatgtcccgcgacaccaagcacgtcctagacaagtcgctgctggtccaccgcatcaaggtcgccctgtcgctgcgcgagcggctgttcgagaagcctttctaccgcctggtgttcggcgactccgacctgctccccggcctggtggtcgaccgcttcggcgacatcctggtggcccagctcgcctcggcgaccatggaacgctacaaggacgacgtgctcgccgcgctggtccaggtgctcaagcccagcggcatcctctggaagaacgactccgccgcgcgcgacgcggaaggcctggagcgctacgtcagcgtcgcccatggcgaagtgccggagtgggtcgggctggaggagaacggcgtgaagttcgaggcgccggtgatggaaggccagaagaccggctggttctacgaccaccgcatgaaccgcgcgcgcctggcgccctacgtcaagggcatgcgcgtgctcgacctgttcagctacatcggcggctggggcgtgcaggccgcggccttcggcgccagcgaagtgatgtgcgtcgacgcctcggccttcgccctcgacggcgtgcagcgcaacgccgcgctgaacggcctgaccgaccaggtgatcagcgtggaaggcgacgtcttcgaggcgctcaaggaactcaaggccgccgaggagcgtttcgacgtggtggtcgccgatccgccggccttcatcaagcgcaagaaagacttcaagaacggcgaggccgcctaccgccgcctcaacgagcaggccatgcgcctgctgaacaaggacggcatcctggtcagcgcatcctgctcgatgcacctgccggaggacgacctgcagaacatcctgctcggcagcgcccgccacctcgaccgccacatgcagctgctcgaacgcggcgcccagggtccggatcatccggtacacccggccatcgccgaaacgcgctacatcaagagcctgacctgccgtctgctgccgagcgcttga

SEQ ID NO: 335966 - DNA, 1839 bp, Pseudomonas aeruginosa
atgcccgattaccgttcgaaaacctccacccacggccgcaacatggccggcgcccgcgccctctggcgcgccaccgggatgaaggacgaagacttcaagaagccgatcatcgccatcgccaactccttcacccagttcgtgcccggccacgtgcacctgaaggacctcggccagctggtcgcccgggagatcgagaagcacggcggcgtggccaaggaattcaacaccatcgccgtggacgacggcatcgccatgggccacgacggcatgctctattcgctgcccagccgcgagatcatcgccgactccgtggaatacatggtcaacgcgcattgcgccgacgccatcgtctgcatctccaactgcgacaagatcacccccggcatgctgatggccgcgctgcgcctgaacattccggtggtgttcgtgtccggcgggccgatggaagccggcaagaccaagctggccagccacgggctggacctggtcgacgccatggtcatcgccgccgactccagtgcctccgacgagaaggtcgccgagtacgagcgcagcgcctgcccgacctgcggcagctgctccggcatgttcaccgcaaactcgatgaactgcctgaccgaagccctcggcctggcactgccgggcaacggttcgctgctggccacccacgccgaccgcgaacagctgttcctccaggccgggcgcaccgccgtcgagctgtgccgccgttactacggcgaaggcgacgactcggtgctgccgcgcaacatcgccaaccgcgcggccttcgagaacgccatgaccctggatatcgccatgggcggctcgaccaacaccatcctgcacctgctggccgccgcccaggaggccgagctggacttcgacctgcgcgccatcgacgacctctcgcgcaaggtgccgcagctatgcaaggtggcgccgaacacgccgaagtaccacatggaagacgtgcaccgtgccggcggcatcatcggcatcctcggcgagctggcccgcggcggcctgatcaataccgacctgccgaccgtgcatagccgcaccctgggcgaaggcatcgagaaatgggacatcaccatcacccaggacgagtcggtgaagaccttctacaaggccggccccgccggcatcccgacgcagaccgcgttcagccaggcgacccgctgggaaaccctggatgacgaccgcgccgaaggctgcatccgcagcgtcgagcacgccttctccagggaaggcgggctggcggtgctctacggcaacatcgccctcgacggctgcgtggtgaagaccgccggcgtcgacgagtcgatccacgtcttcgagggccgcgccaaggtcttcgagagccaggacggggcggtgaaaggcatcctcaacgacgaagtgcaggctggcgacatcgtgatcatccgctacgaaggcccgaaaggcggtccgggcatgcaggaaatgctctatccgacctcgtacctgaagtccaagggcctaggcaaacaatgcgcgctgctcaccgacgggcgcttctccggcggcacctcgggcctgtccatcggccacgcctcgccggaagccgccgcgggcggcgctattggtctggtgcgggacggcgacaaggtgctgatcgacattccgcagcgctcgatcaacctgctggtgagcgacgaggaactcgcccaccgccgcatcgagcaggacaagcaaggctggaaacccgccgctccgcgtgcgcgcaaggtgaccaccgcactgaaggcctacgccctgctcgccaccagcgccgacaagggcgcggtacgcaacaaggcgctgctcgacggctga

SEQ ID NO: 335967 - DNA, 360 bp, Pseudomonas aeruginosa
atgaacacgctcgttcgcctctgtgtcctgtcttcgctgctgctggccgctggccctctgctggcggcgcagagctgcgccgacgaggagcaggagattcagcagcaactcgacgaggcccgccagcagaacaaccgcacgcggatcgacgggctttcaacggtgctcgatcaggtgcgcgcccgttgcaccgaagagcgtctggctgccgaccgcaaggatcgcatcgccgccaagcaggccgaggtgtcgaagcgcgaggccgacctgcgcgaggcccagcgtgacggcgacccgaagaagatcgccaagcgcgagcgcaagttgcgtgaggcccgagaggagttgatgcgcgagtga

SEQ ID NO: 335968 - DNA, 462 bp, Pseudomonas aeruginosa
atgaagatcggactgatttcggacacccatgggctgttgcgcgacgaggcgctggaggctctgaagcagtgcgatcatctgatccacgcgggggacatcggcgctcccggggttctcgtcgagctggagaggatagcgcctctctcggcgatccgtggcaacaacgacgaagaccaggaatgggccgcggacattcccgagcgcctgctgatccgcttcgggcgcgtctgcgtctacgtcctgcatgacctcaaggcactcgacctcgacccggtcgcggaaggcatcgacgtggtggtcagcggacattcccacgtgccgcggcaggaactgcgcgacggtgttctctacgtgaacccgggcagcgctgggcgcaggcgcttcaagctgccggtcgctgtcggctttctgcagatcgacggttcggcggtcagcgccgagttgaagacgctattgccctga

SEQ ID NO: 335969 - DNA, 516 bp, Pseudomonas aeruginosa
atgaatacgacccggctacccctcgccctgatcgccgcccttgcgcagaaccgcgtgatcggcctcgacaacaagatgccctggcacctgccggcggacctcaggcacttcaaggccatgaccctcggcaaaccggtgatcatgggccgcaagacctgggattccctcggccggccgctgccggggcgcctcaacctggtggtcagccgccagcccaacctgatgctggacggcgccgaggtctttccgaccctggagcaggcgctgctgcgcgccgagcagtgggcgcgcgagcagggtgccgaagagctgatgctgatcggcggcgcgcagctctatgcccaggcgctggaccaggccgagcggctgtacctcacgcgcatcgccaccagccccgcgggcgatgccttcttcccggcgttcgatgagtcgcagtgggagtgcatctccaacgtcgaatacccggccgagggcgaggcgccgggttacgcgttcgagggttggctcaggcgctga

SEQ ID NO: 335970 - DNA, 1389 bp, Pseudomonas aeruginosa
gtgcccgataccgccctgcccccgatctcttccctcgactgcctctggctgagcgaagccgtgcgcctgcgcgaagaacacggcggcccgctggaagacgccgaagccaaccgccgggcgaacgccgccggcggcgacctgggcgcgcgcatcgaggcccgtgcgctgctgctggccgaacgcgacggccagcgcgccgccctgctgcactggcgacagggcgcgcggctggcgctgttgctgctggccctactggcgctgctcagcggcgccagcctcgccgtcgccgcgctgggtgacggcctgcgtccggtcaacgtgttctgggcgctgggcagcctgctcggcctgcacctgatcaccctgctcggctgggcgctggcgtcggcgttcggcaacggcggtggcgcgctcggacggctctggctgtggctcagcgaaaaactcgcccgcgacgcccaggctgcgcacctgctaccggcgctgctgatcctgctgcgccgccagcgcctgagccgctggggcctcggcctgctggtacacgggctgtggacgctgctgctggctactgccgccgtgaccctgctgatgctgttcgccacccgccgctacggcttcgtctgggagaccaccatcctcggcggcgacaccttcgtcgccctgacccaggtcctcggcgccctgcccgcgctgctcggtctcagcgtaccggacgccgcggcgatccgcgccagcggcgcccaggcgctggtcgacgaaggcgcgcggcaggcctgggccggctggctgctcggcgtgctgctggtctacggcctgctgccgcgactgctgctggcgctgttctgtctgtggcgctggaaggccggcacgcgacgcctggcgctggatctctcgctgccgggttaccaggtgctgcgcgagcgcctgcagccgaccagcgaacgcctcggcgtggccgacgcggcgccggcgtcgctgcccgagcacagggccggcgcgctgatcggcgacggccagggcgcgctgctggtgggcatcgagctggacgaccgccgcccttggccgccggcgctgcccgcgggcgtcgccgacgccggcatcctcgacagccgcgaacagcgcaatcgcctgctcgatcagctcgcccgcttcgcgccggcgcgcctggccatcgcctgcgacccgcgccgctcgcccgaccgcggcaccctggcgctgatcggcgaactgtcgcgttgcgccgcggccacgcgtatctggctgctcgcgccgccgcccggcgaagcgctggacagcgcgcgcctggccgactggcaccaggcgctggatgcgctcggcctgaagcacggcgatgcgccgctgggctggctggagacaggccatgactga

SEQ ID NO: 335971 - DNA, 1371 bp, Pseudomonas aeruginosa
atgagcgtcccgctgaaactcgccgtggtcggccacaccaacgtcggcaagacctcgctgctgcgcaccctgacccgcgacatcggcttcggcgaggtctcgcaccgaccgagcaccacccgccacgtcgagggcgcgcggctgtcggtggacggcgacgcgctgctcgagctgtacgacacgcccggcctggaagacgccatcgccctgctcgatcacctcgaacgaagcgagcgtcccggcgagcgtctcgacggcccggcgcgactggcgcgcttcctcgacggcagcgaggcgcgccagcgtttcgagcaggaagccaaggtgctgcgtcaactgctcgcctcggacgccggcctctacgtgatcgacgcccgcgagccggtgctggccaagtaccgcgacgaactggcggtgcttgccggctgcggcaagccgctgttgccggtactcaacttcatcgccagcccggcgacccgcgaagacgactggcgcgaggcgctggcgcggctcggcctgcatgcgctggtgcgtttcgacacggtggcgccgccgctggatggcgagcgacgcctgtacgaaagcctggcgttgctgctggagcgttcgcgtccgcagctggagcgcctgatcgccgatcacgaggcgcaggccgtcgcccgccagcgcagcggcacgcggctgatcgccgaactgctggtggacgtcgccgcctgtcgccgcagcgtcactgcgcagccgacgctggagcagcgcgccatcgacgaactgcaccgccaggtgcgccagcgcgaacagcgctgcgtcgaagcgctgctgcgactctacgcatttcgccacgacgatgcccgggcgagcgatctgccgctggccggcgggcgctggggcgacgacctgttcaacccggagaccctccgccagctcggcgtgaaacttggcgggggcatggccgcgggggctgcggccggggccggcgtcgacctgctggtcggcggcgtcaccctgggggccgcggcgctgctcggcgcgctggtcggcggcggcgcacagaccgcgcgccactacggcaatcgcctgctgggcaagctcaagggccagcgcgagctgaccgtcgacgacgccgtgctgcgcctgctcgcgctgcgccagcgccagttgctgcaggccctggccgctcgtggccacgcggcgaccgaggcgatccgcctggacgccgcgcaggacgaaagctggcgccagggcaagctccccgacgcgctgggcaaggcccgcgcccaccccgaatggtcctcgctcaacccgggcgcgcgcctggagcaggccgagcgccaggaacagatcgacgcgctgtcggacggtctgctgaactga

SEQ ID NO: 335972 - DNA, 651 bp, Pseudomonas aeruginosa
atgcccaccaccgacctcaagcccctcgccgccagctcccgcagtgcgctgctggtgatcgacgtgcagaacgacttcattccgggcggtgcgctggcggtggccgacggcgatgccgtggtgccgctgatcaaccggttgggtggcgccttcgccactgtcgtcgtgacccaggactggcatccgcccgagcacgcgtccttcgccggcaaccatcccggccgccagccgttcgagcgcatcgagctggcctacggggagcagacgctgtggccggcgcattgcgtgcagggcagcgtcggtgcgcagctgcatcccgacctcaccctggcgcatgcgcggctgatcctgcgcaagggctgcaacccgcagatcgacagctattcggcgtttctcgaaggcgaccggcagacgcccaccgggctcgccagctacctgcgcgaacgcggcatcgatacggtcttcctctgcgggctggcgctggacttctgcgtcgcctggtcggcgctggatgcgcgggcggcgggcttcgacgcctatctgatcgaggatgcctgccgggcgatcgacctggacggctcgctggaggccgcccggcggcagatggagaaggccggtgtgcggcgcatcgaggccacacgcctgctctga

SEQ ID NO: 335973 - DNA, 795 bp, Pseudomonas aeruginosa
atgaaacagtacctcgacctgatgcgccacgtgcgcgaccacggcaccttcaagagcgatcgcaccggcaccggcacctacagcgtgttcggctatcagatgcgctttgacctgggcgccggcttcccgctggtgaccaccaagaagtgccacctgaagtcgatcatccacgagctgctgtggttcctgcagggcgacaccaacatccgttacctgaaggaaaacggtgtgcgcatctgggacgagtgggccgacgaaaacggcgatctcggcccggtctacggctaccagtggcgcaactggccggcgcccaacggcgaggcgatcgaccagatcgccaagctggtggcgatgatcaggagcaacccggattcccgccggctgatcgtctccgcctggaatccggcgctggtcgaccagatggcactgccgccgtgccacgcgctgtttcagttctacgtcgccgacggcaagctcagctgccagctctaccagcgctcggccgacatcttcctcggcgtgcccttcaacatcgccagctacgcgctgctgacgctgatgctggcgcaggtcgccggcctggagccgggcgatttcgtctggaccggcggcgactgccacctctacgccaaccacctcgaacaggccgacctgcagctcacccgcgagccgctggcgctgccgacgatgaaactcaatcccgaggtgaaggacctgttcgccttccgcttcgaggacttcgagctgcagaactatgaggcgtatccccacatcaaggcgcccgtcgcggtctga

SEQ ID NO: 335974 - DNA, 795 bp, Pseudomonas aeruginosa
atgctgccttacccgcaaatcgatccggtggcgctggccatcggtccgctgaaaatccactggtacggcctgatgtacctgatcggcatcggcagcgcctggtggctggcgtcgcgccggctgagccgcttcgagccgacctggaacaacgagaaactctccgacctggtgttctggacggccatgggggtgatcctcggcgggcgcctcggctacgtgctgttctacgacctggccgcctacgtggccaacccgctgctgatcttcgaagtgtggaagggcggcatgtcgttccacggcggcctgctcggcgtgatgctggcggcctggtggttcggcaagcgcaacggcaagagcttcttcgagctgatggacttcatcgcgcccttcgtgccgatcggcctgggcgccgggcgcatcggcaacttcatcaacgccgagctgtggggcaaggccagcgacgtgccctgggcgatgatcttccctaccgacccggcgcaactgccgcggcacccctcgcagctctaccagttcgccctcgagggcgtggcgctgttcctgatcctctgggtctattctcgcaagccgcggccgaccatggcggtgtccgggctgttcgcgctgtgctacgggatcttccgcttcatcgtcgagttcgttcgcgtaccggacgcccagctcggctacctggccttcggctggctgaccatgggccaggtgctgtgcatgccgatgatcctcggcggtctcggcctgatgatctgggcctatcgccggcagccgcagccggcctga

SEQ ID NO: 335975 - DNA, 1074 bp, Pseudomonas aeruginosa
atgcccatgcgtaacaagctcaccccagtggccgtatcggtcagccacttcgtccgcagcaacacccggttcgccctcggcatcgccgtgggcgtgtcggtgatgttcgccgggtacgccgtgtcggcggtcagctccggcagcggcagcatcctcggcaacgcgagcagccagttgctctctcaacagacctcggtggtcgcggacagcatcaaggccgacgccgaagcctgcgcgactggtactcaagacggcagcatcggccactcgatccagcaggccatgcagattcaccagacgattgccgccgctccggtgaacgtcgaatcgctgttcgatgtgaacagcgactgcttctctggcctcaaccagatttacgacctctccttctcgatcccgagtcttgcaagcatcgtcggcgctgccagcgatgccgtcacgaagtacgcccagaagaaggtctgcacggcggtcaatcaggtgtccggcctcgtcacctcgccgatcaatcaagccatcgacaagatcaacggcatgggcgcgttcggcgacctcaacgggctgaccaatggccttgtgcagcagggaatggcccacatcgaccccaatatcgcagccggttacagcaacaaccagagcggcggcacctacaccgtgggcaccaacccgttcggcagctcgcaggtcgatttcggcggctccaccggcacgaatggggacatgggcagcaccaacgcccaaatcaactcgctcaaccagcagatcgccaacgtgcaggctcaagtcggcccggcgcagtaccagctccagcaggcccagcagcagctctcgaactgtcaggcgtaccagtacaacaactgcacctcgtatcagcagcaggtcgccaacgcccaaaaccacctcaacaccctgaacgggcagctcgcgaccctgcaaacccagttgggcaacacctcgccgagtatctatgccacccagactgccagcgcgaggagcgccccagccgccgcgccgaagccagcggcatcggacagcagcagcttcatccagtccatcggcaacctgtttaactga

SEQ ID NO: 335976 - DNA, 189 bp, Pseudomonas aeruginosa
atgaaaaccgctgacagctatctcgtactgcgcgtctcgtggctgcgcgagcacgatcaggtcatcgccgagctggttgagctgtggctcgaccggcaggccaagcagcagcccgaacccaagcccatacgcatcagggcacagcacaacgccaacatcaggatcaggagtcaccatgcccatgcgtaa

SEQ ID NO: 335977 - DNA, 240 bp, Pseudomonas aeruginosa
atgacctcgatcctgcgcactgtcttgcaacgccttagccgcgagcgaatcaccgcgatctgctgcgcactcggcacctgcctcgcgctctgggtggaaagggacgtgctgattaacgggcgccccgccgaccagctcggaaccatcgccctcgccatcgttgtcccaatcctatacctgacgccgctggtctggctcgtttaccgctacctcgtgaggcccgcccatgaaaaccgctga

SEQ ID NO: 335978 - DNA, 606 bp, Pseudomonas aeruginosa
atgaagttcatcagtggcgcgaagcgcgcggccaaattcaccttggtggacatgccgctatcaatccttggctggcgtcagctcaaggcgaaccacggattcatcagtgatctatggcacaccctgcgcaatccacgctgtcccgaatgcagccgcggcgtcatgcacctgcccgccgacgcccagtccgatgacaaggcgctttatggctgggagtgttccgccaagtgcggctttggcgtgttcgccccgaacgaccagaccgagattcgccgcatcgtcgaggcccgcatagccgagcgaggaaaacagcgccttgccttcctcggtgaccccgagcggaacaagctcatcagcagccacctatggaagtctcgcgcatactgggcagtcgtcttgcttgcgttcctgatggccgcttggctactcgcaatgggcgctcccatggtggtcgtcctgagcgtgctatcgctcacgttggcagcctccagcaatgcgatccgctggagctatcgagcatggcagatgcgtactggcacgctgtttgtccccggcgcattcagccgctatgtgcgcgacatgctatggattcggagggtgcagtaa

SEQ ID NO: 335979 - DNA, 447 bp, Pseudomonas aeruginosa
atgtacaaaaccgacgaggcattcaccgccgaaagccatggattggtcgtaggtaaggcttacggcctccgccaaggctacgacgagggctggaatgccgctatcgctcatgtgcagcctcagtacgacgccgcgctccgcgagcaacgcgagctggcctatgcgctaaacgcattgtcggtcatcgcctattccgcgctggctgccctgaaggcagccccagagcagcatcgtctcgcggtcaccgacatctacgccaaagaagtgaatcggttgatgaaggctggccagaacgcccccggcgcgatccgtgccgtgccgcacaccgaccccgccttgctcgctcgggaacacgacatcgccaacctggtgcggcaatggtttgagcaatcactggctctggcgaagcagcagcaacgctccaacgacaactcccccagcccatga

SEQ ID NO: 335980 - DNA, 2883 bp, Pseudomonas aeruginosa
atggccgccgccatgcctttctcaccgtgcgacgatgccacgtcttgcacagatcactccgtggatatgctgcggtcgatcttcggcccggtcattgatgcgctggtaactggtgcggacccggatagcgtcagcgccgcgagcaacgtgatagcgacgatgatgtcgtttttcaactccggcatcctgatcgttggcacgctcattgtcagctacgtcgcggcaatgggcacgatcaacacggccaacgatggcgaggcaatggggcgcaactggtcgtcgctctggacgcccgtgcggatcgtggccggtggtgcggttctgctgccgacagctagcggctatagcttcatccagctcgtggtgttgatgttcgcgctgtggggcgtcgggttcgccaatggcacctacaagactggcatggcgattggcgtcctaagcccagatggtgtcgttcaaggcgtgaatgaccccggctcgttctacgggctgcgcgacttcggaaagcagtacctcgccgcttcctattgtgcccgcgctgcaaaccagatttatccgggggcacaggtcagtgcggcacccagcgccgataagaccaccacgaatggcgggcgtaccgaatatctcttccagatcaaggatcggaacgccacgacgaatttgggtggcggagaaccgctgtgcggcaccgtcagcatcagccagtacaccgcacagcccgcaaaagacgcaaccggcattgaggcagcgctggagcaactccgcgcagcagcgcagaacgccaagattcaggccgcaaccaacctcatgaccgatctggaagcatgggtgaatacctggccggatgacatctcgggcgattggtcgaacgtggattcagccaagttcaacgaactggtgaatagcgcggaaacccaagtcgcggcagccctcatggctgcgctgagcgacacaacggccgtgaaatccgggttccagtcgctggccacttccctgaccagtgagggctgggcgatgagtggcggctggtatcagcgcgtgggcgaggtgcggggacgcattgctgcaattacgtccgaatcggttggctccgtcagcgccccatcgctgtccgcgctgcccgccgatgcagcggccagcctccttattggcagcgtgacgacggtcaccgaggcgatcagcaaaaaatccgagatcaaggggaactacaaggcaccgaccagcggccccggcgacctcaccagcgtcatcccgaaggacgcgcagagcgacatcaacatcggcagcatcaatgccgacttcgacgccaaagtcagcctctggatcaactccatgatggagtcgatggttgagatggcaaccggcgcgaacacctccggcaccacgcctctctgcggcaccgcaggccagatgggcggttcgctcaaccggatgaagtgcatcggtgactacctaacggtcgcccgcgctggaatcggtgcagcagacgtggcgatcaaaacaggagccaccgcgctgcgcgtagtcgctggcacgttgtcctcggtcaagggtgtcggcaccggcctcgatctcgacaaggtggtaacgccaatctgggattgggtgatcgaagtgccggtcaagcagcttgccatgatggctacgtacatcgagccgatggccttctactttggcgtcttcctgccaagcctgccctacgtgatcttcatgaccgtggtggtcggctggattctggcggtgctccagtcgctgattgccgcgccgctgtgggcggtcatgcacatgacgcctgaccgcaccttcgtcggcagccaatcgcaaggctacctgctgctgttgtcgctgttcgcccgcccggcgctggcagtggtcggcctgtttgcggccatgctcgtgtccgacccgatcatcgacttcatcgccaagggcttcttcgcaatgcgcggtgccgtggtcacatcaaccggcacggtcggcgcaatcagctcgttcctctcgtttgcatggtggttcatggtcttcggcctgacgctcctgccggtgctctacatgaccttcggcctgccgcaaatcctgccggatcatgtgctgcgctggatcggtgctggcgtcagcgacctcggcgagacgcaagcagtcgggcagatgcgcagcggcatggcacacgccgcgtcaagtggtgcgctgcccagtggcggcagcagcccatcccggcgaatcgggggtgacggcggattgctccccggtggcggcaatggcggcacaccacccaccggcaatggcggtggcactcgcggcactgcgacgcctaagcgggcgttgctgagtgcaggcgaccaaggtgtcgctccatccgctcccgactcacccgctccggcccatcagtccgacaaccgttctgggcggcaaaaggtcagcgatgccgcaggcgtcggactgggccgagctgctaccggtgcagcgggagctaccgcccgcagcgcaggccgtgttgctgatgcagcgatctcgactggcagcgccggagttgctgcgtaccgagacgccagcgaaagtggtgcaagcctcggtcagcgcattcgggctgggctgactggctccggtgcagccgccgtcactggctttggcggtgcagcttccgcatccgccaatgattacgccgcatctggtcgcacagctcttgccgaaggcaaggccgcctactccgagggggccgacgcccgcattgcggcctacaaggagtcgctgcgcgggaaacccgttagcaccggcagcgaagtcgttaccgactcggacggcatcgaccagtcctatgacagccgctactccccgccaccgaccgataccgataacggcgaaacctcgccggacaaggagtga

SEQ ID NO: 335981 - DNA, 474 bp, Pseudomonas aeruginosa
gtgcagcaagcagaggaacagaagcgcggcaggggaaggcgtccggcaagcgagctgacagagaagcgcgaacgcgaaatcgccgcattggcagcggcagtggcgaaacagcagcagcggcttgaagaactgaaagaggctcagcggaaggcccagaaggccgcgcggcgcacctacctgaatcagcgcaagttcgcggtcggtggtctcgcccagatcgccgggttgctggaggcagatgcgggcttcgtgcttggcgcaatgctcgtcattgccgatcagcgtgaacgcgatgggacatggcctagctcagtcttccttgaatacaaggcgcgtggtgatgaggtactggccgcccgtgccgccgcccgcaagggccgcaagcagaccgatgacgacgatgaagacgacaccgaggtcgaggccgctgccgcgctctctcaggaatcacgctatcaggaaggagcatcctaa

SEQ ID NO: 335982 - DNA, 396 bp, Pseudomonas aeruginosa
atgagaatctgggcgtttgacgagaaccgggccgactttgtagaggcgtcgccggagcggatgagcgctgatccgaccgggtgctacatcatccggcgcggtgatgatgtgcgcgtctgcgagcacggccaggaacggcccatgcctgaacggctgaccgtggctggggtgccattcgaccgggagcagttcgaggaactgcataccctgcctttgcgggcagagatggaacaagacgggcagtgggcgcgggcgcagttgcaggcccgagaccgtggcgaagtcagcctgccgctggagctgccgatctgggtgacgaaggggctgcaagatgaaccttccacacagaaacctacagcactggtcgaacggctgaaacgatggatacagcaatga

SEQ ID NO: 335983 - DNA, 1257 bp, Pseudomonas aeruginosa
atgaacgacctacagcgagcagccgccagagcacgcccggcgcttgctgtactgactgccgagcttggcgagccgtcgccggatgcggcacgggcgctggtagtcctcgggcagatgctggacgacatcgaggccgggcggcatccactcgaccgccccgacgactggccccagcgcgaccgctggccggatcgtcctcactgggacaggtggcgatgggcgatcaagacgctggccgttgccagcggtacgaccgcccattgcagtcccaagtaccaccatatgagagtcgataccagacaggcacggtctgatgctctgaccgaagcattgcttgacgttgcagacgtgatcgagctggcgagcgacagagagcgtgacgccatgacggttgccgacctcatcgagcagctacgcgagttaccgcctgacctgcccgtgatgctgccctgcgaggctggaattgactacgcccgcgccgtgcgcgtggcagatgtagcccggcatcaccgcgactggacgtggacgcccgttgggcagtaccgcgagactccccatgaggacaccgtggggccgccgatccgggcggcgatcatcgaccttgagcctaccggcaccatcgacggccttatcggcctgttcgcaggcagagctactccggccttaaccatcgatgacatgaacgagatagcggcggcaggctgggcaggtgagttggagtcagtccgactttccggcgatccgctggggtcactcgcaggcattgacgagatcatcaatcgtggcgaccgcgaggcatttaccgggctgctgcacgccatcatcgaacagccgggcggccccgtcgcggatcgggtgcgcacactctatgagcgcgcccaccatcgtgcaggcgacccagaatttgtagcatggccccagtatcaggcggcccactggctgaccttggcaatgggccagtttcggcctgccgaaccgaaaagccaacgattcgccaacgtctgggatgccatcgaggacggccccgccgaggcggagaagatgaaacggttgtcagcgttgcgtgcagccgttccggtgcatgagcgtgatggcagaccgctttacgtcattctcgatgatattccccagccgtggcgggatcagttttgggcgtcgctgcgcggctcccaatgcccaaaggttgagggcgtcgagcgggcagcctacgtgtgggattggcaaagctgggtgcgcgaccttgaggacaaggcgtga

SEQ ID NO: 335984 - DNA, 498 bp, Pseudomonas aeruginosa
gtgatcctgttcctcgacttcgacggcgtgctgcatccagcacgcgcctacatgggcagggatggcccagcgctgcgtggggatggctcgctgttcatgtgggctgacaacttgaccccagtgctggcagcgcatccgcacgtccagctcgtcctctccactagttgggtgcggcatctgccctttgagcaggtgcgcgacttcctgccagtgtcgctgcgccgccgtgtcgtcggttcgacgtggcacagcatccagaccgacccaaacttctcccaaggtttgcagttttcctactggcaggacgcaagccgctatcagcaagtgacgcgctgggccaacgtccaccgccttcggcgctgggttgccatcgacgacgacgccgaaggctggggcgataccgaccgcgcccggctcatccagaccgatcccgagcgcgggctgggcgatcctgcggcagtggcccggctgcgagcatttgtttgtgtttcatcgtaa

SEQ ID NO: 335985 - DNA, 585 bp, Pseudomonas aeruginosa
atgaatcaacgcatcggctacgcgcgagtttcgactggagatcagaaccctgacctgcaacgggatgcgctcaagcaggctgggtgcgatgacatctatgaagaaaccgccagcggcaagagcaccgaccggccccagcttaccgagtgccttcggcgcctgcggcgtggtgacacgctggtgatctggaagctggatcgcttgggccggtccctcgccgacttggtgcggatcgctgacgacttgcgcacacgaggcgtctttatagagctgctactgccccgcgtagtgttcgatgactcgacgttgggcaaggccatgtacgcaatgttcggcatgtttgccgagatggagcgcgacctgatccgggagcgcacgcatgcaggcttgaccgcagcacgcgcccgtgggcgggctggtggtcgcaagccgaagctcgacgaaaagcaggtgcgggaaatcaaggcgctgatgcgtgacccgaccattccggtcagcacgatcgcgaagagatacaaggtttcgcgaacgacaatttacaaggtggcccccgtcaggcaagccgcgtcggcgcgaagaaactga

SEQ ID NO: 335986 - DNA, 3267 bp, Pseudomonas aeruginosa
atggacaccaatacgaagaagggctatgaccttatcaaccgacgccggaagcaatgggcgaacgaggaagaggtacgccacgcatggatgaaggggctggaagaggccttgcagattgatctcgatgcggagcgagccaagcgcgattccagctacaacaatgttgtcatcgaattcaaggggcctggactgttcaagggcagcgagacgagccccaagttcacggaggccaccgagggccgcttgctcaagtacatccagcggctagcggctgagcaaggcctcgacgagaaggactacatcggcattgccatcgacggcgaccatgttggcttcgcacaggtgcagggtggcaaaatcattcaccagcccttgatgcccttctcgaccatcaccttccagatggtcgtcgatgcgttgcgggccaactttcggcgggccatcacgtccgagaatctggccgaggactttggccacctgtccactaccggccgagagttcatgcaggagttgtcgaatgcactggccgacgctctcggtcatcccggcaaccgcaagatcaagatgcttttcgaggagtgggcgaccttgtacgggcaggccgccgacctcagcattcagcagcgcaagaagatcaacggctcgctgggtttcgacttcaatggcccagcgcacatcgacctgcctgcaaagctgttcgttactcacaccttccactcactgctgatgaagctgatcgcggccgagatcgtggcagcgcatggtatggcatccagcacctcgctcatccatgaactgctggccatcgacaaggacgaggcgttggttgctgcgctgcgcgctgacgtggagaacggtggattctttaacgcagtaggtctgcacggtttcgtcgaagaagcgatcttcagttggtatctggacgcgaccagcaagaagacgatccgcacgtcgctgtgtctggcaatccgcaccctgttggcccaactgtcggtctaccgcttcgacacgatcaagaagaccggccgttcgcgagatgtgctgcgtgacttctatcaagacctcgtgccggaagagctgcgcaagagccttggcgagttctatacgccggactggctggtggagcactccgtggccaagctcggctacaacgacgccaagtggcttgtcgctcgcctgctagacccgacctgcggttcaggatcgtttctgcttgaagccatcgagcagaagcgtcgtgcagcacttgccgccggctggaacgcgagccgcactgtagacatgctcacgacaacggtctggggcttcgacctcaacccactggctgtccagtcttctcgcgtcaatttcctgatcgccattgctgacctgttgcagcagtgcaaaggcaaggacgttgagattccggtgttgctggcggatgccgtgtattcccctgcaccacaccctgacggcgaccagaaggtgatcgagtacagcatcggtagcgaacaagccaacctgcaagttgtgctgcccgccgagctcgcgcgtgatcgtgctttgctcgatcaggtgttccagctcatgggcacagaggtcgagaacgacaccgaatacccggccgtagccaaggccatgatgaaatccggtgtgctcacaaaggcgcaggccgacgagtggcaggattatctcaaagaaacttacgaccaagtactcgcgttgcaccggcagaactggaacggcatctggttcaggatcgttcgcaatttcttctggtcggccacagcgggccagttcgacgccatcgtgggcaatccgccgtgggtgcgttggtcgaacctaccagaggcctatcgcaaccgcgccaagccgacgtgcgagaagtacgcgatcttctccgacaccaaattccatgggggcaacgagctagacatctcggccattatcacctacacgactgctgacaagtggctggtcgaagagggaaggctggtgtttgttatcactcagaccgtcttccagtcgccatcatcgcagggcttccgccgtttccgcatcaacgcgacggatcgccttgtgccgctgtcgatcgatgatatgaaggaactgaaacccttcccggatgcagcgaacaagacggcagtcgcgatgttcaccaagaagattcagggcgtgaccacgtacccgctcgactaccgcgtttggctcggaaaaccgaagagcgacaacgctggcaaccccaagaaggggcgcggggggcggcctcagcgattgaaggccatcgaccctcgcttgcatcgaccggacgtgctagggctggtcgacgtgatccagatggaggccaatccggtatcggacacgatggagggcgcaccgtgggccgtgatgaagcccggccactttgcggcgtgcaagccacttttcggggcttcgacgtgggtcaatggccgcaaaggcatcaccaccgatttgaacggcgtctatttcgtcgatgtgatcgactcgaacgcagcagacaagaccgtcaaggttcgtacccggccacaagagggtaagactgacctcgggaagccacgcgacttctgggtggaagccaagagcctgtatccgctcgccaaaggtgcaggcgacctgcacccgtgctacttcctgcctgaaaataacctgtacgccttcgttccaaacaaaggcatcgaccgggcatcgctcgacacggcggcagcgagctacagcacgaacaccaatcccaagaccttcaagtttttcaaagcctacaaggatttcttggagtcgcgctcgaccttcaagacccgcatgaaaggagcgcccttcttctcgatctacaacgtcggcgactacacctttgccccatacaaggtgatctgggccgaaatgacgggcgattttgccgccgccgtcgtggcttcgggcacggtgccgggatacggctcgcgcgtgtacgtccccgaccacaaactctattttgccgacttcaaagaaccagagcccgcttacttcctatgtgggcttctgcattcagagatcgtcaaggaaatgatcgaggcccataacgtcgccaccaacatgggggacatcttcaagcatgtcagcttgccccagtttgatcctttgaactcggaccataccgcgctcgcgaacttggtgaaacaagcacatggtgagcacgattcaacgacacgggctcgcacggttgccaaggtgcggaatgaagcagccacattgatcgaagcggaaatcaggcaacggagccagtccgtctgctga

SEQ ID NO: 335987 - DNA, 2655 bp, Pseudomonas aeruginosa
atgagcgatcaatacacttacgcgagattttggcgatgcgcgctacaggtcaatcctgttggctacaacggtgcctacaggggagccgatcacggtctggatgagggcggctacaatcaggccctgcttcaaaagtgccttgagctgggtatcaaggttgttggtttggccgaccacggcagcgtggccagtgttgatgctttgcgtcaggtgctacagccgcatgggatcgtggtgtttcccggcttcgagatcgcctcgaacgacaagacccattacgtctgcctgttttccgaggaaaccacgggacagcagctcgaacgctaccttggaaatctcgaccttcttgacccaacagacggtgttcgcccatctcgattgagttccgagcagttgatcgagaaggtcgatcaactcggaggcttcatctacgctgcgcactgtacgtcggacagtggccttctaaaaaaccggctcaaccatgtgtggaagctccacaagctccgcgcagcccagattccggggccgatagatgacttggcgggggtggaaagtgacttctaccgcagggtgctgctgaacaaggatgatgcctaccggcgcgagaggcccgtagctgtcatcaatgccaaggatgttgcaaagccggaggacttggaacaacccggtgccacttgccttatcaagatgacgcggcccaacttcgcggcgtttaaggttgccttcctcgatccgggatcgcgaatccgccttaactctcagcaggcccaaagcccgattggcaaggtggtacgcatgacggtggccggtggctaccttgatggcgtccgggtggatttttccgaccatctcaatacggtgatcggcggtcgtggaacgggtaagtcaaccttgctcgaatgcctgcgcttcgccttggacttgccacccaaaggcaaacaggcacagaagctccaccaagagatcatcaaggagaaccttggtcgctcggccggtcgggtcgagctgacagtagtgtcctctgcccagaacggcaagcagtacaccatctcgcgccgtcatggcgagccgccgatggtgcgtgacaaggatggcaatgtctccactctgctcccgcgcgacttgctgccgggcatcgacatttatgggcagaacgagatttacgagctggcccaagatgaaaccagccgggtgcagttgctggatcgctttcttcctcaagacggggagtacgaggcgaagagcgccgacgtgcataggcgcttgaaggacaaccagcagaagctcacgaagtccctggccgatcttgatgatctgaatgcgcaggttgagcgcttgcccaagctggaagagcagcttcgcggttttgatgagctggggatcaaggagaagctggccaagacctcattgctcgcacgcgagcgagagatagccaagaccgctgctgatggcgtgcagagctttcgcgacatgcttgcagacctgcgcgatggcttgcccgatctcgccttcatcaacgatgaggcccttgaaggattgcctgacgctgcccagttgcttgctatccgcacgacgctggatggactcaagcagggcttcaccggccatctgaccgccatgcaggccttgctcgatgaaggggcaggacagttcaccacccagcatggcgcatggcagcaggcgattcaggagcatgaggccgagttggagaaggcgctgcggacgctgcccgccactgctggaaaaagcgggcaggaggtcggcgttgcctatcagaagttgatgggggagatcgagcgtatcaagccgatgaaatcgcggttgaccacctatgagtcccagcgcgataccttgcgtcaggagcgacgcaacttattgggcgagttgtccgatttacgtgggcagcgcatacaagcgttgcagaaggccgcgaagaagctgaacaggcggcttgaaggcaagctcaaggtggaaatcgtgccggaggctgaccgcacgccattggtgacgttcctgcttggttgcaagctggacggtgttggtgaaaagcggcttgcgttcattgaggatgctgagacgatcagcccgctgtcgctggcccagtcgattcagaaaggggctgccgacgtgcaactcgattggggcgtcacgcagatggtggccgacgcactcaccaagctccagtcgtctcagctcatggagttggaggctttggagctggagcatcgcgtggacatctttttgaatgtcgctcacggccaagccgatccggttttccgtccgctcaacaagctctctacgggccagcagtgcacggcaatcctgcacatgctgctgcttgagaacgttgatccccttctgatggatcagccggaggacaaccttgacaacgccttcatcgcagatcggatcgtcgccgagttgagggaggcaaagaccagtcggcagttcttgttcgcgacacacaacgcgaacatcccggtgttcggtgatgccgagtggattggcgtgttcacggccgctgagaaccaagggtgtctcgggctggaagcacaaggctcgattgacgttcctgtaattcgagatcaggtggccagcatcttggaaggcggacgtgacgcctttatccaaagaaaggagaagtacgagttctag

SEQ ID NO: 335988 - DNA, 1350 bp, Pseudomonas aeruginosa
ttgagcgagaaaaatgagcttccccctggtgctgaaaaagccgacacaaagacagctcctcagcgctgctccagcagtccatctgccctttcaaactcggggaaattcactgagattgaatccactgcccgggcagcaacgactgacacactcagttctttggatcgaatagatgcctcgattgcgaagattctcgatcctttggacctggagggaacatcgacagctcttaggttagtggatcgctcgggaacgctcgcggcagaggcgctcacatcccgccatctgccccccgacatttcggcagcatccgcagctctcaaagccttcgatatgaactccggcatggctacagcatccgcagctctcaaagccttcgatatgaactccgacatggctacagcatccgcagctctcaaagctttcgatatgggctccagcctgcttacaacatccgcagctcttagagccctcgatatgagttccagcatgtcggcagcggccgcggctctcagacccctagatttgaattccggtatctcggcagcatccgcagctctcagatctctagatctgaattccggtatctcggcagcggccgcagctcttaaatccctggatctgagctccggtatgtcggcagcagtcgcagctctcagatccctggacctgaactccggtatgttggcagcaaccgcggctctcagatctctggatctgaatccccggatatcttcagcagcagcggcagcgctagcattcgaaaaatggggtctcaatgaggcccccacagtcgatgcggttctcgacgagctagcaaccagatctgccgagcccgcaaaacaacccgcgaaagagtcgcagctacttttcgaaagcggcgagactcagagctcattgggattgggcgacgagtatcagggtaaggttgtttcaagcaccacccccaaaaactcactaacagaaataccaacatgggcacttttagtttggctatacattctcataccgatggcatcggtgattgttcattgggaggacctacggcagggcttggttgacttgaatgctcgatttcctcaaaccgaatcctttgcggaagttcgaaatttcatccgcactgagcttgcaggaaaaccaggcgacatacgcttagttaaaggtagtgacgttcgactgcgcctggagccgagcatgaagtctgaagtaattctgctcctgccttccgatgcaccggtcattgtattggacaaagaaaataggacttggcttttcgtatcgtacgaacatcaggggtatattgttgacggatacgtctcaaccaaattccttaagaaagtccgtagataa

SEQ ID NO: 335989 - DNA, 231 bp, Pseudomonas aeruginosa
atggttgatgcgcaattgcactggctgaccttcctcctgaccttcggtgacgacggccgcatgtccctcaaggagctcgagcccaaaggcatctacgtccacgtcgacgaactcgcctcccacatagacagcaagatcacccgcgcaggcacaaaaatgcccggcaggttaccgagcttttttattgctccccccctaacgctagctgttgacggaccttcgggaggctag

SEQ ID NO: 335990 - DNA, 222 bp, Pseudomonas aeruginosa
atggtgttcgtccagtacgggcagatcgacgtgcgggacggcgccttcgttgtcatcgaccagaccggcgtgcgtatgcacattccggtgggctcggttgcctgcatcatgctcgaacccggtacccgggtgtcccatgccgccgtacacctggcctcgactgtcggcaccttgctggtgtgggtcggtgaggccggcgtgcgtctgtacgccagtggctag

SEQ ID NO: 335991 - DNA, 309 bp, Pseudomonas aeruginosa
atggacgaggaactgaaccgggcggcgagcctggccatcgagctggcggacgtggacagcgccgcgcgcttgcacgaggggaaaccgcagaattcggaaaaatcctacgctaaggtttctgtgagcctgagaatatgctcttcaatgagtcagcctggggcgcaagccgaaaccgccgaaaactctgcaagccaattaaatggactcgtcagggctagagtcagtagcgtccagaaaaataaggaaagtctctcaaaaaacaagccccgtcggaacggggcttgttggtggctaattagccagccttga

SEQ ID NO: 335992 - DNA, 930 bp, Pseudomonas aeruginosa
atggcggtcagttccttctggccgaaactgaacaatggtgaacggcaggcctcctttgccattccggttgcggaactgtctccgcccctggcggttgactggcaagccattgccgccgccaaaggaacggtggacctaccttaccggctgaaaaccctcaatgtcgatgggtcgattcaaatcatcgccgtacccaccgagccgggtagtgcggcggtccccgtcagggcgctgactctggactccgcctcggggacctacaaatacacgactaccggccctggcggcggcaccatcctagtcaccccggatactccacctggccagatcgatccgtcgtcttcgacacccgcagtgccccatggcccgctgatcatgcccggcacactgctgattccgaaggaaccgcagatcgagtcctatccagaactcgaacaacgggagttcaacgacgggatctacgtctacccggaagacagcggtattccgccactctatattgtttatcgggatccgcgggatgagcccggcgttgctaccggtaatggccagccggtcactgggaactggctggccggcgcctcacagggtaacggagtaccgattccgagccaaatcgccgatcagttgcgcggcaaggaattcaagagttggcgagactttcgggagcagttttggatggccgttagcaaagacccatcagttctcgaaaacctctcccccagtaataggtactttgtcagtcagggccttgctccttttgctgtgccagaggagcatctgggtagcaaagaaaagtttgagattcaccatgtagtccctctggaaagcggcggcgctctttacaatacagacaatcttgttatcgtcactccgaaacgccacagcgaaattcataaagaactgaaatttaaacgtaaggagaaataa

SEQ ID NO: 335993 - DNA, 492 bp, Pseudomonas aeruginosa
atgctttatgtcgtcatgttaggtggccgtcacccacgggctaagatcgaggtccacgatgtcgtattcgtcgtagccgattcactcgaaaccgcctatccacaacttcgagatgcctggttcggcaaccacgaagggctgcacattgactcctggctcgaagtcggcggtatcgacaaccaccgcatcgagttcagtttccaggccccggcacctggggacctgcggctctacttcatcaatctgggagcctacgaggaacaaatcttcggcgaagcccatcgctatctactggtctccgcccgtgacaagaccgaagccaagaccctgggcaaacagcggatgcaggctggctggatgaagccccatatcgatgctctgcttgatgtggacgactgcctccccatcgatcaggtgaacggtcactatctgcggctggtggagggcccccaccgcggaatagtgcagcgcaacgactacatactgctctga

SEQ ID NO: 335994 - DNA, 666 bp, Pseudomonas aeruginosa
atgtcgtcggccatccaggcaaaggaagcggtaggagatcgctatcagttagacctcatgaagtacgcgcagcagatgacctggcaggcggtcgagcagatcgccaaggtcatccgccccggcatgagtgaatcgaaggcgaaagaagtcggcatgcaggtgcttaccgaactcgacatgcaacggatctggcatcccctactgattcgcttcggcaccaataccttgaagaccttcaaacagcgctccgatggcgatcccgtactcggtgcagacgacattttctttatcgacatgggagtggtctgggaaggccatgaaggggacgccggcgccacgttcgtcaccggcactaatccggagatggccgcctgcgccaacgctgccaaggagttgttcaaccgcgtcgaggctcactggcggaataagggggtgactggtgtcgagctctaccgctttgccgccgagcaggccagggccatgggctggcagttgaacatggatattaaggggcatcgtgtgagtgattttccccatgcgatctatcgcgccggcgatctgggagacttcgaaggtcgccccaacgacggcctgtggatcttggaaatccaactcgcccatcccagcgggcgctacggtgcattctacgaagacctgctggcttga

SEQ ID NO: 335995 - DNA, 291 bp, Pseudomonas aeruginosa
ttgaacctggagcccttccatgacccaacgcccctccgctgccgtttctcctacggcaccctacaggacaaatccgtgcaactgtccagcttcggacgagaacagcacggtcgcccagacgcactggtcagctatgtacagagctgggtggagatcactgactcggcggtcctggcgaccaatggcaaagcccaccaccccattgttcagcccagtgcgaacagcgcggacgaggtccccgacacggccttcgcgatcacggaggtggaactacaggccgcagatgcctaa

SEQ ID NO: 335996 - DNA, 588 bp, Pseudomonas aeruginosa
atgacgccggcctgtgtatccctgcgcattgaaaaaggggcgacgttccgcgacacgatgcggatcatgcaaccgagcctggtctaccggccgatcacccagatcgcgtcgaccgctcccgtccggctgaccatccccggccacgggttgcccgacacctggttagcatggatcgatggcgtccagggcatgcccgagctgaaccgcgctcggcttcggcaattgcctcaccgggtaaagtccattgacgacgacacgatcgagatcaacctgctgtcagccgttgggctggcgcctgtgggcgggcaactgatctaccagccaccggttgacctggctggcgccgaggtacggatgcagatccgcgatgcgccaggtgggactgtgctgatgacgctggcgctcggctctggtctggaactcgccggcgccggaacgatctcgcgcgagatatcggcatcggctaccgcggcgctggaatggtcggcggcggtctacgacgtggacgtgacctactcggatggaacggtccatcgctactacagcgggccgatcactgtgagccgtgggggagggtgcgatggatga

SEQ ID NO: 335997 - DNA, 333 bp, Pseudomonas aeruginosa
atgaaaatgccagaacgccctgagacctgggctgcgctgcttgcgtggctgtctgcgcactatccgcagctgtacgccgccggcctatcatttgtggtcgcgctgacccgggtgatctacggcggtggaacgcggcgccaggcgctgctcgaggcaacgctctgcactctgatcaccttgggcctaatccccgtccttgagtggtttggccttccgcagaacatggctactgctgccggggtgttcaccggtttcctgggtgtgaagaagatcgccgagttcgccgatcggatcgccgactggaagtttccgcgccgggggtctggcgaatga

SEQ ID NO: 335998 - DNA, 375 bp, Pseudomonas aeruginosa
atgcaaaatttctttcgtatgacctttggggggctgtcggcgaaatactacttcagacagttgttctttggatcgctatttctagtggctatggtctttttaagtatctctagccagaaagggataaaggttgatcttttggtgctctcgctggtttgtacatggctctacccctactctcggtttgtctatgagagtttcatggggtttctgctcggtgataatgtcttctatgtgcccgctatctttctactgttcgctaagctaatgacgatggcaatatgctggtcttttgctgttttcatagcgccagtcgggctcctatatctctatttccatcatcggcgtgccgcgaactcgcaagacgaagcttga

SEQ ID NO: 335999 - DNA, 285 bp, Pseudomonas aeruginosa
atgagtaacgtacaacctatggcaccccgcaaggtcatgaccaggctggagcgggagtttctcaaggtggccggccaggagctggcgcaggtcaaggtgggtggtgctgcggcactgtccgccctcttgcagatggtcgccaactggcacggcgaccgcggcacgctgggcttccacgattacggtcggctctggctgcaggacggcaacgcaaagggcgcagcggtggaaacgctgctgcgtgatctgttcggcctgaacggcacgccgaagggggctgcatga

SEQ ID NO: 336000 - DNA, 309 bp, Pseudomonas aeruginosa
atgatcaagttgcccgacgagcagcagcaactcatccagatcgccgaggcggcggttgagtatcaactggcagagaccaagcggaacgcgctgcgccgcgagctgaatacgttgtacaccacgtacttcgctgcctatggccgtccgtatgccgaccaccgccgaatcgatccctacgacgagaggttcgagccagtgctggagttcaccggccccgcctacaggcgctggaaggatcagcgcgatctgaccacccgcctcaagcgcaagctgcggacgctggtgcagcgcctggagcgtgcgcaatga

SEQ ID NO: 336001 - DNA, 795 bp, Pseudomonas aeruginosa
atgactggcctgacctcaattggcggccaggccgccaccatgaccagcctggaactggtcgaattcatcaaccagcaccgccggcagcaggcagaggaggccgggcagtcgttcccctcggatgacttcccggagctgctgcacaagaacttcctggcaaaggtgcctgaggtcctgggcgaaagatcggctgatttttcagccgatctccccgacagctatggccggcctcgccgcggctatcgcttcccgaagcgcgaagcgtgcctgatggctatgtcgtacagctacgacctacaggctgccgtcttcgatcacatgacggcgctcgaggagagattgaaagcccttccggacgtgtcgagccatgagggcgccttgctggcgctccaaggggcagtcgaacgtcaactggtgctgatcggcgagaacaagcaactcgccgccgaacgtgaccatgccgtcaagaccaaggcgcaaatcggcagccgccgcgaagcgcaggccatggccgctgcatccgtcgccatccgccaggtcaagcgcctgaacgacgagttgggacacggcacccgctacgccacggtcaccgccgtcgagaacgccaccggcaccaagtacccgttcaacgcctatgtccacctgcgcaagtggtgcaaggccaatggcgttcagcccgagatcgtccccgaccgccgttttggcgaagtcaaggcgtggcctgcgggagcttgggcagccgtttatcaaatcgatctggcgaccttgttcggcgcctctggagcaaaagcatga

SEQ ID NO: 336002 - DNA, 324 bp, Pseudomonas aeruginosa
atgaacctcgcaaacctgatcaataagcagtgttcccgcgacccctctgaggtgctcacggaagagcaggcgatgtctctttggggggagcgtgaagtagcccggcaggctgctcagaacatggcgcttggtgtcgccgctgtcgggaacctgctggcgaacgttggcgctgaaggcgaagtaggccaggaaacctcagagcgtctcggctggtttctggaggagattgggggggccatcttcatgttggttgagctcgagcaggtctgcacggagcgcatcaaccggcagaaggagcggaagcaaggggaggttccggcatga

SEQ ID NO: 336003 - DNA, 351 bp, Pseudomonas aeruginosa
atgcaacagaaaactcaacgcgcgcaagtcccctgcgccgttaccaccgaccaccaggtttgcttcgatcctctcaacggggatgagttcttgttctccattgttgccgaccggccggttgacgcggatctggccgccgccgaggacatcagcgaggcggttcacctgattcttttgagaatgacccgggcgatggacgatgccggcgagccgctactctctcaggaactcaatactctcgccctgctgggggccatgtctggcgcattgctcagagcttgccgggccggtgtcgcgacccaatccggaaatcctgaaagcgtgtcgcgacacgcaggcggtgcagcatga

SEQ ID NO: 336004 - DNA, 753 bp, Pseudomonas aeruginosa
atgacccatgccctgtttaaacagatcgacctgaccgccaagctcggccaggacggtagctcgctccaagccatgaacgcgctgcgcgtcatccgggaaacggtagcgaaacacctggccggcaccgagggtacaggagagattccgctcgagcgcgccctcctggcgctccgcaccatcgccgagttcccctgccccgagcaggacgacctcccggcggcgaacatgcgacagatcgcgctggcggcgttgagtggcgctggagcgagttcagagccgggcaaccctggcggcgaacctctgtccggaccgggtagtgccggcgagcgaccctaccccgcgccgggattggcccgcgagcgcgacccgctcggccttgctcggcacgctcagacgttcaacgaagcgccagcacaggggctgaagccttctgccttcgaccccatcaccggcaccaccgaccagccccaggaagctgctcaggacctgcctccgctggaggaacacctggcccaggtcgagcaagaggcagccgctctgcgcaaggaccagaggaagtgcgaccagaacgggtgggtcgcgatcgatgatcgactcccagcggaagataagtgcgtactcgtgtgggtagatggaggggtcgagttcgccactcagcacaacggcttcttcatggatcagttccaagaacttttggacgttacccattggatgcaactaccagcagcgccagcgcctggaggtgagcgatga

SEQ ID NO: 336005 - DNA, 648 bp, Pseudomonas aeruginosa
atggttcgactgactcagcttgatccggatgagttcagatatttggattctgacgatcggtgctactgtcttggggagtacaccgctcgtggcaggtacggggctagcgaaacgaaccagcagatcttcaatctgaagcatcgaccgaattctgccgagaacttgctctattggaagcgcagagcagtgggctattgggggcggatgctcgcagagaccaatctccgatgggactactgcttggagaatgccacgttcgtaccgatcccttgctcaaaaccggtggggcacccagagtatgatgatcggatggttcgagtgttgctctgcatggcccaggagcatccagggcttgatatacggcaggtcctcttgcagacaaccgtgcgcgaatcacagcacagcggagaccggttaaccccagcggagattctgcaaactctatcaatcgatcctgcgggggttgctcagcccctaaagcggatagtgattgtggtagacgacgtgattactcgtggggcaagcttcgccgctgccaaaagtctgctgacggggctggatgacgtagagaaggttgttggtcttttcctcgcgaagacgatccacccacccgtagagttcgatcttgatgaggcctttgagttctaa

SEQ ID NO: 336006 - DNA, 936 bp, Pseudomonas aeruginosa
atgcttaacgatctcttctccccgagccctatgaccagtgccgctctagccagattcttctccacatcgccagttgtgccattggacgagatgtgtgcatacgagtcgctttggctcggccaaggcgcatggtttgccaatctcgccaacttattccgtgagaacccaggggcattgccgtccgaattggtgcccaaggctgaaatcgatgcaacccgtgaaaagctgattgtattgctgggcgaggagaagctgcgacaggtgggcatccgggtcaatggtgctggggagtacccgaaaaagctccgtgatgccgatcacccggtcgaggtgctttactaccgcggggactgggaattggtcgagactccctgtgtggcaattgtgggtacccgtagcccaagcgttgagggggtacagaacgcccaacgtatcgcgcaggcgctggtccgcgaaaagttcactgtcgtgtctggcttggccaagggtatcgatactgccgcccacaccgccgctatctcagccggtggaaagactattgctgtggcggggaccccgttgttcgagttctacccgcgtgagaatcaggaacttcaggagtcgatcgcctcgaagttcttgctcatctctcaggtcccgttcctgcgctacaagcagcagacctacaagttcaacaagcttttcttccctgctcgcaacgtcaccatgtctgcactcacgcaggcgacaatcatcgtcgaggccggcaacacgtccgggacgttagtgcaagcgagagcggcgctcgctcaggggcggaagctcttcattttggagagttgcttccgcaacccggagctcacttggccggcaaagtacgaacgccaaggtgccattcgtgtcaaaaacatcactcagatcatggatgcgctgaatggttcgactgactcagcttga

SEQ ID NO: 336007 - DNA, 237 bp, Pseudomonas aeruginosa
atgccgaactggatcagcaggtgcgcgctgatggcgctgcggcggggagaccagggcggagtgggcatggtggcgtccgaggttgaccgaaaatcacaactttatgtccggcccggccataacgccagtcgccccggcgaactaggatgccgccatccgccgctgggcggaatcgcgccggacggcgtggcaagcaacaaacgggagcacaacaatgcacaacgagtcccgccctga

SEQ ID NO: 336008 - DNA, 891 bp, Pseudomonas aeruginosa; identical to SEQ ID NO: 324832

SEQ ID NO: 336009 - DNA, 984 bp, Pseudomonas aeruginosa
atgactctctcgactcccgccgaacatccgttcgcccagttcgtccgcatcctcggcaaaggcaagcgcggagcgcgcagcctgacccgggaggaagcccgcgaggccctcggcatgatcctcgacggcagggtcgaggatgcccagctgggcgccttcctcatgctcctgcggcacaaggaggaaagcagcgaggaactggccggtttcaccgaggcggtgcgcgaacgcctgcaagtcccgtccttgcgcgtcgacctcgactggcccagttacgccggcaagaagcgccacctgccctggtacctgctggccgccaaatgcctggccggccatggcgtgcgcatcctcatgcacggcggcggcgcgcataccgccggacgcctgtacagcgaacagttgctggcggcgctggagatcccgctctgccacgactggctgcaggtagaacagaccctggagcgcggccacctggcgttcattccgctcggcgcctggatgccggtgctgcaacgcatgatcgatctgcgcaataccctcggcctgcgctcgccgatccattcgctggttcgcctgctcaaccccctgaatgcggattgcatcctgcagagcatcttccaccccggttaccaggaaacccaccgcgaggccagccgcctgctcggcgaccgggccatcgtcatcaagggcgaaggcggcgagatcgaagtcaacccggacgtcgtcgcccacctgtatggttgcgaccagggcgaagcctgggacgaggaatggccggcattgtcgacgcaccggcacatgaagccggaacagctcgacccgggtttccttcgggccgtctgggacggccgcgaaggcgacgcctatggccacctggcggtgctctccagcatggccctggcgctacgggcccttggcaagaatcgcgaagaagccttcaaggaagccgcacactactgggcgacccgaaacgaatcgatctga

SEQ ID NO: 336010 - DNA, 381 bp, Pseudomonas aeruginosa
atgacgcgcgccataaagcttgtggaggaactactcaacctggtcaatacaggcacagtgcaaaaggatgcccgctccaacgacaccaagccggcttcgccgcgtctatggaccaccggcatcgagcagatgatcaccggccgcgagcgcctgcaactgccgcttgagaaccacaactacctgcgcgcggtggtgtggggcctggccagtgatccagcgcaggctctggccgcttcctcaaagcggccgcaggccggtggacccagcacccagcaattgctccaagaccaagtcggtcgaattcagtccgatatcgtgttggggttgattactaaagaggatggagagcgccagatcgcggcgctgaaggggggagcatga

SEQ ID NO: 336011 - DNA, 567 bp, Pseudomonas aeruginosa
atggcactcgctagggggctgctcagcaagatccacatcgctcgtcagcagctcggcctgcaggacgatgtctatcggcagaaactgcaggtgatgttcggcaagggatcggcgcgggatctcaacctgcgccaggccgagcagttgctgacggagttcaagcgcctgggctggcaaccacagcccagcaagcgagcagccggcaagccgcacaattggcggcaactgccagcggaggtcgaggtgatcgaggctcaactcaccaacatggggctgccttggagctacgccgatgcgatcgccaaacgccagtttggcgtagccaaagtggcctggctgaagaagcctgaacagctcaaagcagtgttggctgccctgcatgttgagcaggagaagcgcgggcttttgggtaacgtggaggaactgctcaagctgctcggcgagcatgatccaaactggagggcggatctggaacacctgcccaaaggctgggagcggcgacgtccaattctcaagagcctggtcgaaacactgcgtgcagcagcgtctgctcgggggctcttgtaa

SEQ ID NO: 336012 - DNA, 612 bp, Pseudomonas aeruginosa; identical to SEQ ID NO: 326467

SEQ ID NO: 336013 - DNA, 1785 bp, Pseudomonas aeruginosa
atgagcgccgtcattactcaagccctggtcgatctggagcgcgcccttcgcgccgccccacgcgggcagcgcgtagagattgcccagtcgacggcccagcggctcgacatgtcactcgccacgctttaccgcaagctgagggaggtcaccgcagacagcaagccccgcaaacgccggagtgacgccggcaccagtgccctgagccgggaagatgccctgaccatcagtagcgcgctgatggagagtgcgcgccgcaacgaaaagcgcctgtatagcctggaggatgcggtggaagcgctacgggccagcaagatgatccgggcggacgtcgttgacgaggacacgggcgagattcggccgctgtccatcagtgcgatatccagggctctctacagcttcggggttcatccccagcaattgctgcagcctgctccggtaacggagctgggcagttgccaccccaaccacgtttggcagatcgatgcctcgctgtgtgttctttattacctcaagcccggcgccgatgagcacggtaacggcctgcgcgtcatggagcatgaccagttctacaagaacaagccgaagaacgtggcccgcatcgcctccaaccgggtctggtcgtacgagatcaccgagcacgccagtggctggatttacctgaagtacgtcatgggagccgagagcggcgagaacctgtgtgatgtgctgatcgacgccatgcaggagcgcggtggcaacgacattctgcacggcgtgccgaagattctgatgatggacccaggttctgccaacacctcggccatggccaggaacctttgccgtgcgctgcgcatccgcgtcatcgttcacaagcccggtgccgcgcgggtgactggccaggtggagaacgcccggaaccttatcgagcgcaagttcgaggcgggactgcgcttccagcctgtcgccgatctggacgaactgaacgctgccgccaagacctggcgcgcgtggttcaacgccgcgaagaagcactcccgccatgggatgacccgctcggaggcctggatgcgcatccgtgagcaccagttggtgaaagcgcccagcgtcgaagtatgccgccagttggcaatcgccgagccggagagccgcaaggtcaccagcaagctgcgcgtcagcttccagggaactgaatacgacgtctcggtcgtacctggcgtgatgatcggcgagaagctgatgatcacccgcaacccctggcaaagcgatgccgcccaggcgatcactttcgaccaggacggccatgaagtcttccacgtcattccgaggatcgaggaagacgagttcggcttcgacgtgcgggcacccatgattggcgaggacttccggcagcatgcggagacgcctgcgcagaaagcccgcaaggaagcggcccggctggccatgggcgtcgataccgatgccgaagagcaggccgcacgcaaggccaaggccattccgttcggcgggaggctgaagccctaccagcatatcgaagacgctcagttgccgaccttcatgccacgcaagggcagcgagctgcagctcgacgtgacactgcccaccgtcgagagcacgccactgagtcacccggcagccgccaagatcctccgggcacgcctggatggcgtctggagtcccgagtcgatgctctggctcaagtccaactaccccgacggggtgctggaggaccagctcgacagcatcgtcgagcagttgcaggcggcgcccagccggcccgcgctgcgcgttgtgggaggtaactcgtaa

SEQ ID NO: 336014 - DNA, 2211 bp, Pseudomonas aeruginosa
atgggcggccgtagcaaagcgcaaacgatgggctggcgttactacatgggtattctcatggggtttgcgagaggcccgcttgacgagatggtcgagatcaaggccggcgaccgtaccgcttggaaggggtcggtcaagagcaaccagaccatccagatccaggccggtgagttgttcggtggggacaaggcggagggtggcatcgccgggccgctagacgtcatgttcggcgccccggaccaatccgtgaatcctcgcttggcggcgatggtaggtggcctggtgcccgcgttccgtggcgtcaccactgctttcttcgacgggcaactctgcgcgatgaacaagtacccgaaagcctggatgagccggtggcggcgcgcgctgaacggatgggacggtggagtttggtatcccgagaaggccgtgatcagccttgccggcggcgaggtcaaggcgatgaaccccgcccacatcttgttcgaatgccagaccaaccgcgactggggccgcggcaaagatcgcggcctgctggaccaggcctcgtatcgcacggccgcagatacgttgttcgccgagggctttggtctgtgcctcaagtttcgcgtggcagacgagttggacaacttcgagcagaccgtcctcgatcacattggcgccactcagttcctttcccgctcgaccggactctggacgctgcggctgatccgtgacgactacgacgtcgcgacgctgcccgtattcgatgaggacagcgggctgctcgggatcgacgaagacagcatcacatcgctcgacggcacggcgaaccagttcgtcgtcgtgtggcacgacccgatcaccaacaccgaccggcgtgcccgtgcgaagaatgccggcgcgatccgcgcggccggcggcgtgatcactacgacgaaggagtatccgggcctaccgaccggcgagttggccggcagggtggcggcgcgcgactgcaacgtgtcgacgtcggctatccgcaagctccagttgcggctcgatcggcgcgcctatgcgctgaaccccggcgacgtgttctgcgttcgcagccggaagcgcgggatcgaactgatcgtcctacgcgccggaaagatcgactatggcaccctcacgaggggcaccatcgccatcaccgcgctggaagacgtgttcggactgccggcagccgggacgtccgcagtccagccgccgaactggaccccgcccgaccgcaccccgcgggtcattgcgacccgcaggctcatcgaggcgccgtaccgtgatctcgcggcggcactgagcgatgcagatctggcgcaactgcagccagagacaggcatcctcgcggcgctgggcatgcggccgtccggcctgcagatgaactacgcgctgctcagccgcgtgggatctgcatcgttcgaagagcggacgtccggcgacttctgcccggtcgcgacgatctcagcagatatcggccggggcctgaccagcgtcagcgtcacgcttgtccaaggggttgaccttgacctcgtcgaggtgggctcggccgcgatgatcgatgacgagatcttccgcgtcgacgcgatcaacgccgcggccggcaccgcggtgctcgcgcggggatgcgtcgatacggtgccagcgccgcatgaggccggcgcgctgatctggttctacgaggattgggcaacagaggacacgcgtgagtacgtgaccggcgagacagtgaacgtgaagctgctgagccgcaccagctcggcgacgctcgcagagagcctcgcgccggtcgactcgctgcgaatgaaccagcgccaggcgcggccttatgcgcctggccgggtgctggtgtgtggtgtggcgtatccgacgaagacctacggtgtgctgaccgtgtcgtgggcgcaccgcaaccggctgctgcaggccgatcaactggttgactcgtctgcgagcagcatatcgctggaagctggcacgacatacacgctgagcatctacagcggttccagcctgaagaagtcgtacaccggcttgaccggcacgacctggacctacccgctggaggacgacatagcgcatgggctgctgccggtgctgcgcatcgtgctgttcagcgttcgcgacggtctgcagagctggcagcaacacgatatcacaatcgaacgacacggccttggcttccgcctcggcgaggaacttggaggcttagcacaatga

SEQ ID NO: 336015 - DNA, 675 bp, Pseudomonas aeruginosa
atgaacgtgtcgagccgcttcgcaagttcgacgagttcacctttacctcggctccgcactcgcaccggcagagccagacagatcctccgttttcccgggagagtcgtaggcgaccaccaaaaggcgcccatagcgaagcccggagatatcgatccgtttcatttcattcacctattgagagagggaccgccgatggcagtcgtttccgagaaaaccgctggagggaggaacgttcttgcgttcctggacatgcttgcgtggtctgaagggaccagcacgatcagaggtagcgacaacggctacaacgttgttgtcggtggaggactgttcaatgggtacgctgatcacccgcgcctgaaggtctatcttcctcggtacaaggtttattcaactgcggcaggcaggtatcagcttctttcgaggtactgggatgcctaccgcgaaagcctggcgctgaaaggcggcttcaccccggctaaccaggatctggtggcgttgcagcagattaaggagcgccgcgcgctggcagatatacaggccggtcgcttggcggatgccgtgcagaagtgctccaacatttgggccagcctgccgggggctggttacggccagcgtgagcattctctcgatgacctggcagcgcactatcttgcagcgggcggggtgctgtcgtga

SEQ ID NO: 336016 - DNA, 1890 bp, Pseudomonas aeruginosa
atgactacgtatgccaccggcaatccgcttggctccaaagacccgcgtgatctgtacgacaacgcagagaactttgataacgccctgaataatgttgagtcagaccattggtctgaccggttttccaggtctcgtcgcacattccagggcatggaaaattcgtttcaatccgatcaggatagtcgagagcagcgcttccaagacttcttggaacgttctgcttggatttctttaggtgaatatggacctggcatcacattcactgatcgcaatcagtatgtgatgaaagacggcgttgcctataggccaagcccaagcaccgttactttgccatacactactacgggggattggaattcagagtcgtccctcttcatccctcttggtgacgatgttctcgcacagaatcttgcaaacgactcagaccccgagaagggcggggagctagtaggatggagccgtaatgagctatccgatgaaatctcaacagttagttctgcactaaatggtaatagcataaatgtatgggaatttgcctctctagtcactacgaagccggtggaatcagaccctgctacgtgggactgggctcctgccgtccaagcggcagttaactactgcaattctgaattccctgccaaggaacttgttgttccaacgatgattcgcctagctagccctatatctattgaccggcctgtcgatggtgtatctactagggatacattttctataagaggcataaatggtggtggtttttatgttgactcagaaatagcaatgttcaccacaacaatttctcaaaatattgacccgactggcatgagaatgccgtcttctcagaacgtaaagtttgagaatctaaagtttacatgttctaatgctgcactcaatgcatatatactagatgataataaattcctcagaatttattttgattcgtgctctattagctatttgaagttgcttaaaactctaagttatattcaatcaatatatataggcccaaacaacaatattagatattggtctggtacttttattgaatcaaatggcggcgcttttgatatccgggcaactggctctcagattgagcatggtggaaatttctggagcactattgataacaccggtaacaaatcggttagtggttgttatatagacaattgcttaattgaaggtctttccggttttggaattctttactctcatgttagaggaatagccgttacatcttgctatttcgagggtaatggcggccctgatattattggcgatagcttcccctccacggcaaaccttggcgtgtaccatgctggtaatatgcacgctaatagcgcagctaataatgaggaccctgcattctatgcggttaggtggggatacacgttcggcggaacgagtcttggtaatttctgctctggtaggctgaactatgttcgctctgatactcagatcactatgaacgatgccgccattcttgggatgtctaatacccaagataggctaatcctgaatgatattgagttgggtaatgtaaggcctagtgatgacccatctgcatatgggaatagggcatggcgagctggatctgttgttattaacaaggaccattcttctaaaggatatgctggatgggtttgtgttatccctggaacacctggagtttggtatccatttggaaatacctgcgatggtgaaagctggaactttacaaatgtcgatggatcggcaactatggcaaaaataggaataaatgagccatcatcagggcaaactgtgctgtctcttcgatatagcaacggcactacagtacaattaggtagagtcctagtgggagcagccgactctgctggccctggatacagaatgctcaggatcgcaaactga

SEQ ID NO: 336017 - DNA, 264 bp, Pseudomonas aeruginosa
atgagcaagttcaaggcgggcgatctcgctcttaatctgcaagacatccccaactgcatcagtgcgggagtggtagtcgagttgatgtctcgacttgcccccggtgatctttttgccgaagacggccagacctttcaggtgaatcggccagcttggtgggtgctccatgaaggagaccggctctacatacctgaacggtatctcatgcccctgcgcggagacttccagtccgagcagcagaaggcgaaggaggagatcgcatga

SEQ ID NO: 336018 - DNA, 231 bp, Pseudomonas aeruginosa
atgactgacaagaagatcgacaagttctggacttacatgctggcggcaatcatcggaatgagcttcgccgcgctggctatccatctctatgaccgattctccgggaatggaacagcctggaacttctacagccccaacacggacatgacctgccttgtcgctcgtagtcatgggcaggaagttatggcttgccttcccggtgatcgccggcaggaggctggccgtggctaa

SEQ ID NO: 336019 - DNA, 276 bp, Pseudomonas aeruginosa
gtgactgacttcttcgaactcctcgacgagcctggcgcccaggttgcggacggtccgctcccgggaaagaaagggtggggcaaggcaccgttctgcggaaacaaggcccaccacttcgagcttgtttttgccgacaccatcggtccgcatgggcgcgaaaagtactgggtcgctctctgtggtgcggatgcggttactaccgacaaggcgtcgatgttctcggctggtagctggcaacggtgcaagaactgtgagcggagggcgagccatgactga

SEQ ID NO: 336020 - DNA, 252 bp, Pseudomonas aeruginosa
atgcggaactatcgcaagccagaaatgtactcggacgccgattgggaaatggtccagggctatatggccggcaaggatggcctgcgcgccgaacggtccacggcagcctacatgcatggttatcgcaatggggtttcggacaggactggtgttcctcacgaacgcgccgaggttcttcgtcgccgtgcggagatgatccccggtatcactccccatagggcctggttccaggggagggcgccccgtgactga

SEQ ID NO: 336021 - DNA, 198 bp, Pseudomonas aeruginosa
atggatgggaaaacgcactattgctcgttctgcggagagtccgagcacgacctaaaggcgctcatcaaaggcccgtcggcgcttatctgtgatgcatgtgttgctctgtgtgtggaactgctcgaggacaagggccattggccgccagttccttgtggttctggagtttccgaatccaatccggaggaggtcgagtga

SEQ ID NO: 336022 - DNA, 210 bp, Pseudomonas aeruginosa
atggatatcgtagatatcgccaatgactacgccgagcgtgaacttgctgaacggcttaatgcccgagtccagtacatccattacttgggggagggcctggccgactgcgaggactgcggagaagagattcctgtagcgcggcgggcactcgttcctggggttcgtaagtgccgggactgcgcggaactggctgagcggagggctgtgtga

SEQ ID NO: 336023 - DNA, 483 bp, Pseudomonas aeruginosa
atgcagggacagaccggcatcgcgaagaaggtctacgagtgcgtaccgatctctgagtcctggcgttcgttccaagtgctcactgcgctccgcaacatgaccggaagcacgccggacgttcggattgtccagggctgtctgcgcgatctggtcgattccggactgatccgccgcactggtactgaccactaccaacgaatccaagtcgagaaaaagaccaagcctcaggagccgaagatgggcgagcccgcgaagaagatcgaaacccagtccgagccgaagcgctccgcctccccgctggagatgttgggcgaactggcaaacgagctcgccggcatggccgaacacatgaagcgcctgtctgatcgcatcgaggacgtcgctctggcagttgagcaggaacgcgaatcgaacgccaagtcgatggaaagctatcgccagctcaaggcactactgaagagcctgcaaggggagggtgagtga

SEQ ID NO: 336024 - DNA, 918 bp, Pseudomonas aeruginosa
atgaacttctatccgttccatcctggcgactacatgctccgcactgcccacttggagcctttggaggacctggcgtatcgccgcctgttggacctgtactacgtcggcgaaaaggccattgaaggcaccgctgaatcaatcgcgcgcgtcatccgcatgcgctcaagcgttgctgaagtggctgctgtgctcggcgaattcttcgtggaaaagggtggttgctggagccacaagcattgcgatgaggttatcgccaagtaccgcgaaaaggcgaccatagctgctgaaaacggcaggaaaggcgggcgtccgcgcaagcgggaagaaagccaacaggaacccgaaaataacccagggaaaacccagccggttatttctgggttgcaagaagaaagcggatcgaaaactaaccaagaaccaaaaccaaataaccaagaaccaaaagataacccccccaacccccctgccgggggcggcgaggattcgagcggttatccgcaggaattcgaagcatgctgggcgaagtacccgaagcgtgctggcggtaattccaagaaggccgcccacaaggcctgggcagcgcgaatccgggaaggtgtgacagccgaggcactggataccgccgtgcaggcctatgccgccgagatgatcgccaagggcaagatcggcaccgagtacgtcaagcaggctgcgacgttcttcggcccgaacgagcactggcaggaagccatgcagccggcgaacgtccatccgatccgcaaagggctcggcccggacggcaagttgctgccgggttacttctggcacgaagccgatatcgatctcccagtcgagaaacgtcgcatcctgagcgacgaaacgcacgaccgcgcctctgggtatcgctgggactacctgcgctccagggggctggcatga

SEQ ID NO: 336025 - DNA, 642 bp, Pseudomonas aeruginosa
ttgacagcgcttcactcatccgccccaccctcaagtccttttatcattctggccagggtttcagaaaggcgtttggctgttgcgagcggcattgagatagctgctacgtcaagcctgacgacttcaagtcggcctgagtcatcctgttcaggagcgtcatcgaagtggacaagcctggtggtcccaaggcgcagtgaatctcgtccaaaagtaagatggacagctgcctcgccattccactggatgctgtatgccgagtacttatcgacatgctcgtcaataaacgagccaagtcgttcatgtggaatttcggtaatcctagttggctcgctcattccatcttccttagttgattgctggtatgcctctcgcagcccatcacaaatccccacccctccagatgaccttgcctatgatgcggtgctcgtgagcctgcggcccatatgcgatgacgcctcgcctcacctagaccaggttgaacatcgaggcttgccagtgcttctcgctgatgatcgcgatgggatggccttcctcacgcaactcgacagctcgcttgatcttggttccgtaggtgctgtgaagccactgctcgttgcctatctcgccgacaaccaggtaatgcacctttttgctgatgcctga

SEQ ID NO: 336026 - DNA, 189 bp, Pseudomonas aeruginosa
atgacaatcattcacgaatgcgaccggtgcaacgcgcccggtcgcgtgatcgagacgtccgacggattccgctgcgagggttgctacgaggatgcgcaggagcaggtgcgcagcgatgcgagctgccccgagtgtgggcgccagggggtgacggctacaggaatttgttacgcctgcgagaacacttga

SEQ ID NO: 336027 - DNA, 315 bp, Pseudomonas aeruginosa
atgaacgaccgcacgctactcgaactggcggcgcgggcggcggggattgatccagtcttggctgaaccgatcaatttcagtactggggttgaatattactggaacccacgtgatgacgacggcgacgcgctgagactggcggtgaagcttcgctttgatatttcggttgaacgtgaaatacaggtttcttggtggcaaggcgaatccctagagaccgtcacctggccgcttggagatgacccatgcgcggctgcgcgttacgccatcgtccgcgccgccgccgagatcggcaagtctatgggaggtggggagtga

SEQ ID NO: 336028 - DNA, 633 bp, Pseudomonas aeruginosa
atggctgataagaactgctccatgtgcggcggcaagggctattactgcgagcacagcaccgtagaaacctgctggtgcgtgaagccgactgctgaagatgacgttattgagatcaaggctgaagcggagaggacgaaggatcttgctcgtatcgccaacatgcttcgcgaggatgctgaggtcttttccagttgcgattacgaagtggagcattacgacaaggcggcggatggcatcgaatggctgattgccgaggtggagcggctgcgcggtcaggcggccacctacaccgatctgcggttggaggtgagccggctcaaggcggagaactgcgcccacagggacacgcagaaacactgcgagtggttggtgcagggcttgaaggagtgcgcaagcgccctgcctggcacctactacatggaccctccagacgggggcaatgtcagcattccagagcagattcggcgcatggcgaaggatgccgctcgctaccggtggctgcgggatagctgcactcgccaatgggacgtcatgtgtagagacattgagatagttatcaacggggatggagccgaagactgtgaagacctggacggcatcatcgacgcagctctagaaggagcaacgcaatga

SEQ ID NO: 336029 - DNA, 225 bp, Pseudomonas aeruginosa
atgcgtgacttcatcaggtttctgaccagtaggccgcagagtttttccgatgctgtcgcccaaggttggttctgggggctagttgtgggcgtcgttcttatcgccagcgtagtttttttcggcggaacgttcggccagcgctgcgccaaggtttacgagaaggacagtcctgagtggaagtcctgcgtctaccgactgaaatatggagggaatgttcatggctga

SEQ ID NO: 336030 - DNA, 537 bp, Pseudomonas aeruginosa
atggatgagccacttttcaacgaactgctggaaagcgtgaagcaggcggaccagatcatgaccgaccacgcagagctgcggaggctggctaaggcggcaacgccggggccgtgggttactgacgcccaacagaacggcgcaatcttcaatatcgaaagcgaatccggcgacatgtgtattgccatgtcacaggagaacccggcgccaacacggctggaaatcaacgaacaacgcagggcgaacgccgagttcatcgcagccgccaaccccaagaccatcctcgccctgctggacgagatcgacaggctgagcgacgaactatccgcatgcaccgagcatccgggcggatgtgggtattggcgcgaggcagccaagcgtagaactgaagaacgcgatcagttcaaggaggagaacgaagccctgcgcgagagcctgcaagcgctgattcacatttccaacgccacggcctgggaagagcactcatgcggagagatcgcaaaggcccgcaaagcgctagaggtaacccaccatgcgtga

SEQ ID NO: 336031 - DNA, 267 bp, Pseudomonas aeruginosa
atgaaaggctacgcactagttcaaggtccgcgacgcaaggtgctctatatctccgattcctgttatttgctctgggaatttggagggtcgcatttcaaaccggaacttggctgggaattcaggaccctccggcagaacagagccatctgcaaggaaaacaatgcctacatcgttcgcctcgacttcaagctgggcgatccgatcagcacgccaaaaaggaagaagctgccgcgcgaagccggcaccgaggtgaagaaaaatggatga

SEQ ID NO: 336032 - DNA, 186 bp, Pseudomonas aeruginosa
atggctaagcgcaaggtccactacgagaactggaacggcggcaccgagtcggatcctgatcgcccgtctgagactttctgcggaatggatgtcactgatccactgaccgccacgcgggttcaggccgtcacctgcaaatactgcctgaagcttctggaattcttcggacataaggtgaagcaatga

SEQ ID NO: 336033 - DNA, 339 bp, Pseudomonas aeruginosa
atgagccaggacttgcatcgagacgaaatagccagccaggtagatgcgttcctagccagcggcggaaagatcgcatccatcccaatcggcatgtcgggagacaaggacgtccagtggaacggtaggtcggcacgaaaagctaagccagggcagaccgacgccgcgcacgctgcgttcgaaagcaaccgccgagagaatcgcaggctgctatcgcaaacagtccgttactgcgcagacaaggggatgactatctccgccaccgcagacgcaatggacattgaccgcgctactgtccgcaagatcgccgccgagcacggcatcaggttcgggcatcgttag

SEQ ID NO: 336034 - DNA, 753 bp, Pseudomonas aeruginosa
atgagcaattccattgcccagcggcaggagtcatccgctatcgttcatgcgggagagtctgccaccatattgcaggttatccagcgtgccgcagccgatccggcgtgtgacatcgagaaaatggagcgcctgatggccatgcacgaacggatgcagtcccgcagcgcagaggctgagttcaacgcatccatggccgccatgcaaagcgaattgccgagcattgccgaacgtggcgctatcaccgtcaacggccaaaagcgcagcaactacgcgaccttcgaagacatcaacgacatcgtgaagccgatcatgcagcggttcggtttcgcagtgagcttccgcgtcgagactgttcagactggcgtttcggttactggaattctgatgcactgcgccggacaccgagagcagacgacgatgctcgttccgctagacacgagtggcagcaagaacgccgttcagtctcttggatcatcggtcagctacggcaagcgttatgtgctgtccgcactgctgaacatcaccactcgcggcgaggacgacgatggcaacgcggctgtgccgccaaagaagctcattacccaagctcaggcgcagcaactgaaagcccttctctcccagtgccttcaggacacgcaagaagccttcgacgctatgtacggctcagctgagagtgtcccatccgccgacttcgatgcggcattggcacggctcgccaaggctcgcgagcgcgccaagcgctcccaggagtga

SEQ ID NO: 336035 - DNA, 489 bp, Pseudomonas aeruginosa
atgagcaccacaatccctgattcgattaacccgagtgagcttcctgaaatcggccagcccctggctgatggaaccttctttgcccgccactggctcaatggcaaggaatacgcctacatcgatcttggcaagagcgcagagttcactggcgaatggggcgaatacggccaggacgtgggcggcgccgtcagctaccgagacggagcttcgaatacggtcgccatggctgaagctggcagcccgattgccaagcaggctttggagatcggagccggcgtattcattccctctgctctggagctttctcttctgttcttcgccaaacaagcaggcgagctgcccggtttttcggatcgctggtactggtcgagcacgcagcgctccgcctactacgccttctacatgaacttcagcgttggctaccagagcgacaacggcaagaacgacgagcttcgcgtccgccccgtccgcagcgaaatcattcagtaa

SEQ ID NO: 336036 - DNA, 3582 bp, Pseudomonas aeruginosa
atggccaactcgtctgccgctgacaagcatcccaaggcgcgcctgctgaatccctgggccctgctgccggtcgctctcggggtggcgctggtgctgtggctgaccttcaacagcgaagaggtattcatgcccagcggcgatggcgagcccgacgcggtctcggtgaactacgccgaactgctgttgcaggcgcacccggagaacgacgcgctgcgcctgaccctgatcgacctgctggtcaagctcggcgacttcgagcaggcgcgtcatcacctcgcccgtctgcgcggcaaggaccgcctggcaacgccgttctacgaggtggaactggacatccttggcgccctggccaggcccgagggcatggatgaggagcagacgcgccgattgctggagcgcctgcgcaagatcgagcatgtttcgttgaacgacgccatgctcgaacgacttgcccgtcatgccctggccctggacgcgccggacctggcggcgcggacctttgccgaactggccggccgcgacccgcagggccggcagcgctggctggacgaggcggcgcgctggtacctggcttccggcgagccgctgccggcggcggacatccagcggcaactggccgaagcgcaaaccgagccggcgaagcgcctggcctatctgcgccaggccttcgccagcctgctcgctggcgagcgcggcgaacaggcggcgttgttgctggacgagcggctggacgccttgccggaggatgaatcgaccctggcctggctcgccgagggcgtacgcgccgccgaaggcagccagcgctacgacctggccgaacgcttcatccggcgctggcgcgaattgcgccccgaggaccatgaggcgctggccgccgacctgcgcctgaacatggccgccgggcgggtcgagcgggcctgggaggtcggccgggagctgctggccctgcgcccggaggacaggacgctgctggccgatctcgcgcgccttggcgaatggaccggcaacggcccgcaggccctgggcctgtggaagcaactgctggccggcgccgatgacccggccctgcgcgagcatgcctggcgcctgtcgctgcagatgttcgatttcgacagcgccatcgagctgctggcgcccatcggtgcgcagcgacagatgaccgacgaggaactcgatgcgctggtctacagccatgaaacccgcggcacgccggaagagggcgaggcatggctgcgcggctacgtgcagcgttatccgaaacagcgcctggcctggcagcgcttgcaacagatcctcgaacacacccagcagttgcaggaagagaccggggtctgggcgcggatggcccggcatttcccgctgagtgtcaaggaacgcatgcagtgggcggaaacccactggaacctgttcgatccgcgccaggcctggaaggtcctcgccggcgtggatacccgcgcgatccgcgagccggagttctggcgcctgcgcgcggcgctggcctgggccctggagcaggacgacgatgcccgcgccgcctacgagcgcatgctggccctggacatccgcctgaacagcagcgacgaggaccagttgatcgccctgtaccgggacagcaatccgaagcaggccttgcaggtgcttatcggcagttggcagcgcagccgcgatccgcggcgcctggccagcgccctgcaactggcggagaacctccacgactggccggccctgaagagcctgctggccgaggccgaaggcctgccggaagcgcagggcagcccctattactgggtggccagggcgcggctggcggaacaggaaggccatggcgacgtcgccgagcgtctgtaccgggaagccctggtgcgtttccccggcgagaacctggtgcgcgaacgcctgctctggttctacatcgaccgtggccgtcgcgacagcctggcgcccctgttggcgcagtggcatggcctggcgctgcgggacagcacgctgtggctgccgttcgccagcgccagcctgctgctcgagcgtaacgaccaggcgctggcctggttccgcctgtacctcaagtccaatcccaacgactggctggtgcaggccgcctacgccgacgcactggatgccagcggctaccaggacaaggcactgcgcctgcgccgactactgctccggcggctcgaccgcgaggcggtcagggccaccccggacagcttcgccgcctacctgcgcctgctcgccgtggcccaggggccgctgctcgcccagggcgaggcgcggcgggcctggaatggtgagccggcgatgctgcagctgtggttcgagcagttcctcgaccagctcgccgccaccaaccaggagccgctgaaggatgactggctggcctgggcgcgcggccggggcctgaagatcgggcgcaacgaagagatccaggccgccctgcgcagccagaatcgcgccgccctgcaacgcctgctggagcgcggcgagctggatccggcgcagcgggtcgaggcgctggtgcgtctcggccatggcggcgaagcgctgggcgaggccctgggcgcactgggcgacggccactcgcgcgacaaccgcgagcagctgcggcggcaggcggcggaaatcctcgaacgcactccccagggcctgcaactgggttggaacaagcgcgacttcggcggtctcgacttcaaggggccgacgctgcgcgcggcgcgccacctcggcgacgactggtacgccgatctcgaactgggcagtggccgctatcacggcgatgcgctggatagctcgctcctcggtagcgaacgcaactccaggctgacgttgcggcgcgaactggccgatggcttcgccgcggcgacgctcgatggcagctggcgcgacgacgaggaccgccacggtctggggttgctgcgcaattggcggctgagctcgcgcgacgaactggaagcgggcctcgattggcaccgcgagaccgacgagaccggcctgatgcgagccctcggcatgcgcgacagcctacggctcggcggccgccacaccctcagcgggcgcgaccagttgagctggtcgctggcgcacaaccgcttctccacccgccagggcgacgacctcggcaacggcgaggcgctgtccctggaatgggcccacacactgttcttcgacggcccggcctggcaactgcgcggcggcatcgactaccagcgcaatcgcctggagaaccgcgtgccggacgacctgctggcggcccatggcggtgcgctggcgctcgatggcgcgcgcagccaggacctgctgcaggaccgctatggccaggtctacctcggcagcacctggcgccgtggcttccctggcgcgctgaaccgcagccgtccgcaatacacctggatcgtcgacaccctggccggctggcagtggacagagaaggagttcaactacggcatcgatctcggcatcggcatggagctgctgggcgacgacgaactggcgttcaccttcggctaccagtcggctccccagggcggcggcggcgatgccggcggcacgctcggggtgacctacagcacgcgcttcggccgctga

SEQ ID NO: 336037 - DNA, 1371 bp, Pseudomonas aeruginosa
atggccggcatcggcttcgaactgcggaagatcctttcccgcgattcctatacggcgaccctgcgcgcctatctctacgccgggctgatcagctccggtccctgggtgctgtcgatcgtcagcgtgatgctgatcggcgtgctgagcctcggcgtggtggtgccggacgtgctggtccggcagttcctgatcacggtgacctacctgatggcgctgtcgctgatcttcaccgggggactgcaactgttcttcacccgcttcatttccgatcgcctgttcgagcgcaagcacgaggcgatcctgcccaacctggtgggcgtgctgttgctggtgacgttggcggcgggcctgctctcggcgatattgctggcgaccctgttcgatgagccgttcgcctaccgcctgctggtgatggccaacttcgtggtgctctgcaacctgtggctggtgatcatcttcctgtcgggaatgaaggcctacaaacgcatcctgctggtgatgttcatcggctacgcgctgatggtcgcctgtgcctacctgctgcgtttcatgcagatggacggcctgctgctggcattgctgatcggccacgccagcctgctgttcgtcttcctctacgacatcctccgcgagtacccggccaggcgcatggtggccttcgacttcctcgaccgccggcaggtcttcgtcagcctgctgctgaccggcctctgctacaacctggggatctggatcgacaagttcatcttctggttcaacccctccacctcggacctggtgatcggcccgctgcgcgcctcgatcctctacgacctgccgatcttcctcgcctacctgtcgatcattcccggcatggcggtgttcctggtgcgcatcgagaccgacttcgccgagtggtacgagcgggtctacgaggcgatccgcggcggagagaccctgcagcatatcggcctgctcaaggagcagatgatcctcgccatccgccagggcctgctggaaatctgcaaggtgcaggggctggcggtggtcctgctgttcctgctggcgccgcaactgctcggctggctgggaatttcccgctactacctgccgctgttctacatcgacctgatcggggtgagcatccaggtagtgttcatggccttgctcaacgtcttcttctacctggacaagcgccgcatcgtcctcgaactctgcgtgctgttcgtgatcgtcaacggcgccctgaccttcgtcagcctgctgctcgggccgagcttcttcggctacggcttcaccctgtcgctgctggtctgcgtgctggtcgggctgtaccgcctgaccaccgcgctggacgacctggagtacgagaccttcatgctcaatcgctga

SEQ ID NO: 336038 - DNA, 993 bp, Pseudomonas aeruginosa; identical to SEQ ID NO: 247975

SEQ ID NO: 336039 - DNA, 2226 bp, Pseudomonas aeruginosa
atgaagttccagaaacgcagtgcgtgcatgctcggcctgcttctcatattcgcctgcatggcgggatatgccgttccggcgagggcgacggctggcgaatattcttccatgctccggattcccgctccggatcgtccgggggacgccgatgtggtcgacgaagcgccgctacgccaggctgccgacgggctgcgctcgccatccccttccagcctggtgctcggcctgctggtggcctgcctggtctgcgtcggatgcctgggctggaataccgtcctgcagctcaggctcaggcgttggcaacgtaccgaagccgacctgagcggccgcctggcattgaagcaggcgctggtcgacgggattccctacccggtgagcatccgcacgctcgacggtcgcctgctggcctgcaaccgcaattacctggaaagcctgcggatgacccgtgagcaggcgcgcggcaccctgttgaccgattccgactgggtcgagggcagcaaggcacggctcatgcaccagcagtgcctggcggtggctcggggaggaacggcgagcttcaccgacatggcggtgcgcatcggcgggcaattgctggagatccaccattgggtcacgccctacagggatcgccagggccgggtgctcggcctgatgaacggctggatcgacatcaccgaacgggagcgcctggcccgccagttgcgcgaggcgatgcgccaggcggacgaggcgaatcgggcgaagagcgtcttcctggcgaccatgagccacgagatccgtacgccgatgaatgcggtcatcggcatcctcgaactggtcctgcagcgcctggcgccggagcagcgcgaacgcgcctcgctggaggtcgcctacgaggcagcggggtcgctgcaactgctcatcggcgacatcctcgacgtcgccaagatcgagtccggtcacctgaccctcacgcccgagcgggttcgcctgcgccatgtcgtggagtcggtgcgccgcatgttcgaaggcctggcccggcagaaaggcctgaggctcgttgtggagctggacgatgccccgggacgggacgtgctgatcgatcccctgcgcttcaagcaggtgctctccaacctggtgagcaatgcgatcaagttcaccgagcggggacaggtgacgatccgtctccaggaaaggagcctggacgaggggagggcgatcgtccgggtggacgtggaggattccggtatcggtatcgctccggcggaccaggcgcgcctgttccagcctttcatccaggtggccaagggacgcacggtgcagggcgggaccggccttgggctggcgatctgtcggaagttggtggacctcatgggcggcgatgtcgagatgcacagcgagccgggcaaaggcacccgggtgtcgctcgacctgctcttgcgccagtgcgggccgaaaatgcctgaatccggccaggacccgctggcagcatccatggagccgtctcgccgcctgcatatcctcatcgccgacgactatccgcccaaccgggtactgctgcgccagcaactggaatttctcggccaccgggtggcggaagcggaggatggccaggtggcgctggaactctgggccgacgagcgcttcgaggtgctgatcagcgactgcaacatgccgcgcctgaacggctatcagctggcacgcaggatacgcatccaggaacggtgcgagcggcgcgcgccgatcctgatcctcggctataccgccgacgccgagccggacgaggtacagcgctgtcgcgacgcgggcatggatgattgcctgttcaagccgctcggcctggagaccctgcgcaactacctcgcgacctctttcggccgcgacgccgcgcagccccgggggctctatgacgcggacgctctcagcagcctcggcggcggccgcccggaacggctgcgcgaactgctggagaccctgctaggcagcaaccgtcaggacctccagcgccttgccatcctcctgcgcgagggcgacagggccaggctcgccgagcatgcccaccgcatcaagggcgccgcgcggatgatcggggcgcgtaccctgctggaggcctgcgaggccctggaggacgcctgccggcgaagtggcgacggggagtgcctgcaggcgcctggcgaaagactccggctggccctggaggcgttgcaggaggaactccaggagcagttggcggccgctgcggtatga

SEQ ID NO: 336040 - DNA, 1467 bp, Pseudomonas aeruginosa
atgcatatagtttttgttcacacaccaatggcaacagtgagcattcctgagagggaggtattctggcggaattttgatatccgctatcatgcaacccatcctggtctgcgccaaatgaaaaacgtcctctgggaactaccccattggatgacttggttggctggagtattagtcaatgcaggtttcacgtcactggaagccatggatctatatgcatcagaatgtaccatgacggggatagacagttataaaattgagcaagcgatacaaaaatgtccaggagatatctatttactctccccaatgaccccaaaccttccttttgcatatgaaattgcagatgcaataaaaagggtttcaccagagagcaaagtgatatttggcggtgtagttgcaactcccatgcataaagaaattgcggctcatccgtcaatcgactatgtagtgtttggcagaggggaaatttctctacctgctttgctcaaaacattagacaagaaagagggcccagagtttctcggtaatctatcattcaagcttcctggcggtcgcattcacacatcacattttgagtacccatgggtaccagtgaacgagatcccatcaccaaagattgatctcttcgagcgatcggtcggggaggacattaggtatttacgacaggtctatgctttaggctgcccatataagtgctcattctgcaccatacagacaatagggcgaaaagctgactatttcgccctggaccgcgtaattgaagagatatccatctatcgtgaatactatggcagccaccacaacgtttattttggtgacgaaacatttacagtaaacaaagaccgaactcttgacatttgtgctgctttaaaaaatgacggaacaattcgctatgatatacaaaccaggctcaattgcttgaatgactctgcaatgctaagagcacttaaagaaagtggttgcagttgggtagagattgggattgaatctgtcaatcaagacacacaaaatctgcacaagcaaaaagtaaagcttaaagagcttgagcacatcctagccaaggtccaagatcatgggctggcaacatgctcatttctagtaaatggattccctgatcaaaccgtggacgacatgtatcgctcaattgattatgcgtgcgatttgatagacaaaggacttttgcaagcatcatatttatttggcttggtgccgtatcctggaagtgaactgtttgccgaaccagctcgatttgggatggatttattacataaagatttccgttactatcatgaagaactccctccagtatattcaacaaaatatgccgagccagaggagatttataaggtatttctttacggggtcaaatcgataggggaggtgatgggtaaaaaatcgaaattcctggactactcgttctactcagagaaagctaactatggaaagttctggtcagaagcccatgtttaa

SEQ ID NO: 336041 - DNA, 810 bp, Pseudomonas aeruginosa
atgatcaaagcgactccttacctcaacgtcgagttcagtgtgcttgccatattggaaaaagaaagtccctattgcgagcttaccaaggatttggaaaaacttataagtgagcagtatggttcgttgcatgtgtggcgcaacccagtagtaactaatcttgaatgcatgagcattaacgatatagagttcatacttcaagagtactcaggattttccaatgattccatccacctcttccacgattcactaatcaggctacagtggagcgaagtaaaagcagaggtagagcgtaatctatcagaagaaatgggtatccttactcgtgggataccgcatttggagctgatgcgccaaggatacaagcaagatttaggtgtggaaacagaaaatattacctacactcaatgcacagagatgttgctttcgaaaatgcgcaagattttccgcacctcagacaatgcctatctatgcggcgcattactagctctagaggcaacggctacagatgagtttaagggggttgaaatcatccttagaactttaaaaaggaagattgatggaggggtaatctcctctgactctctcacaggtgaatatatcctaggtcatgtctctgagaacccagacggctccaatccagaagatgaccattacgcaggcatgcgtgattctataggaaaatacatcaatcaggctaatagtgcttcctttgttagggggtttgtagccacttgcacagccttgaacacatggtgggaatctatcgccattcaagtattctgcaggcgacttgacagacttgcagcctaa

SEQ ID NO: 336042 - DNA, 1137 bp, Pseudomonas aeruginosa
atggatagcttttcaagtatttccgaatttattaccactaaaaaaccagaagccccctgcttctgtttgtcgcttcaagagattcacgccaacacttttaagctcacatcattgttcccgggggaagttgcttatgccgtaaaaagtaatcctcggatagaggtcctcgagcaaataattagcagcggcggccaggcatgggatgtcgcatcaattccagaaatacgcttaattaacacgctctccaagaaactgccagcgtattacatgaacccgataaagagcgagttggacatcaaagaagcctactcgaagtatggggttattgacttcgcagtagaccaagaagaagaaatactaaaattcaccaatctgaacataacagataaagcactaaccctttttgtacgcttggcagtagcgccagagggggctattgttaatatgagtggcaagtttggggtggatgtaacagaagctgctaggctcctaggtgttattgatgatcatggatataaggctggattgacttttcatgtaggctcccagtgcctctcaacacagccatatcaagattgtattaaccaagcaatacaggccgcgcagctatcaaatgtcaatatccactccttagatattggcggtggattcccagcaagatatgaggggattgaactaggcttcgatgaatatgtcgagaccatcaagcatagcatcgccggtactattctagatagtataagccttcgctgcgaacctggccgtgcagtatctgcaagcgctgtagcggctgtttctaaagttattgctgtgaaacatgatgctggattaattcatttaaatgatggtatttatggtgggctctcagaaataaacttccttaactgccagtttcctgttatagcatttgataatacggggaggcctattgtcgcttcatctaaagaatggcgtataactgggccaacctgtgacagttccgacatgattaagcgtaagtaccgccttccggaaactattaaggctggtgattacgtggctttcggtatgcttggagcgtactctcctttcatcaccacacaattcaatggttttggcattgaggattgggtgcttgtcaataaattcgaattctaa

SEQ ID NO: 336043 - DNA, 426 bp, Pseudomonas aeruginosa
atgactgcggcaacttgcggatgggtcaccatgagcatgcgggagctggatcgcctcaaggtcatcgaggcaatcatcgagggtcggttgaaacctgccgctgcggcgcagcgtcaggtgcaccggctggttctgcgttatcgcgaggacggcccagccggcctaacatctcgtcgacgtggtcagccgagtaaccggcagttgtcgccaggtctggagaatcccgccattagcttgattcgacggaactatagcgactttggtccaactctggcccaggaaaaactggtcgagtgccacggccttaagctggccaaagaaacggtacgacggatcatggttgatgccggcatgtgggtaccgcgcaagcaacggccgcccaaggcctatcagccacgcaacaggccgcctgttgcggcgaactga

SEQ ID NO: 336044 - DNA, 228 bp, Pseudomonas aeruginosa
atgaggaccgacttcgtcctggatgcgctggagcaagcattgtacgcccgtcagccgcatcgcaccggtggcctgatccatcacagcgacagaggcagtcaatacgtctcgatccgctacaccgagcgactggccgaagccggtatcgagcccccggtcggcagcaaaggtgatagctatgacaacgccctgaccgaaaccattaacgggctgtacaaggctgagtga

SEQ ID NO: 336045 - DNA, 1191 bp, Pseudomonas aeruginosa
atgtctttgatgccgatagaatatcagggcagagaacaggcatacgtcaagcacaccattctgagaacttacttgcagcggctgatcatgatcatcggccgcagtgagaaggtgatcaattacgtcgactgcttcgccggcccctggtcggaagagtctgatgacttgcgggacacctccattggtatctcgttgagcctgatgaaggattgcgcgaagacgcttgaagagcagcatggcgcaaaggtgagattccgcgccctgtatatcgaaaaaaacgacaatgcttttgcgaagctgcagagattcctttccaacgatacgggcagtgtcgtagacgccagctgcatgcacggcgactacacgacgaaaatcgaagatatcgcaagctgggccaaacttggcttcaccttcttcttcattgatcccaagggctggcgaaaggttatcaacgcaccggtactggcgccgctattggcgttgaacagagccgagtttctcatcaacctgatgtacgacttcctcaaccgagcaatgtcgatgacggcccagcaagcgaacgttgaagagttgctcggtaaggcaatcacgttttcaggcaaagagtcggcaaccgagcggcgacaaattattgtttcccaataccgccaggcggtaggagatatctacaacggcaagactgcgtacgttaccgttgagcggccgggcatggaccgcgtcctgtacttcctgatctatctcacgcgacattctaaagggctaattgtcttcaaagaggccgccgagcagatggatatggttcagcgtgtcagtcagttcgagaccaagctcaggcggcaatcgagcaagaggcttcctgttaatgacctcttctcctcacctgaggatcagcccgagccagtcaatgttcgggacaacaggatgctcgccaaaaagtatttgctgacacgcctatccgccacaccattgctcgtggacaatgattgctgggcaagcttccttgaggaaaccgacctctatccgacggatctgcaactcgcattcaaagatctagctaaagaagggaaaatcataaatctggatgcggatgttcgaaagcggacaaagaatccagtaaggcctcattggccgaggaaaagtgagcgctgggtgctctgcgcagaatcattttcgccaaaagagattttttag

SEQ ID NO: 336046 - DNA, 744 bp, Pseudomonas aeruginosa
atgagtacccagacgagcatagaatggacagaaatgacctggaaccccattgtggggtgcaccaaggtatcgccgggctgcaaacattgttatgccgagaacatggcgcaccgactgcaggccatgggcactccaggttatgaaaatggtttcaagcttagcctgcgtccagagaaacttcgcgaaccgcttcagcgcaagaagtcgactatctattttgtaaactccatgtcggatctgtttcacgagaaagtccctgaccattacatcgatcagatttttgacgtcattcgtgaggcgacgcaacatacctttcaaatcctgacaaagcgcgcggaacgattggctgactacttcagcaagcgcgttccacctaccaacgcctggcttggagtatcggtcgaagacaaggcctatggcgttcctcgtatcgactgcttgcgccgtgtgaatgccacaatccgcttcctctcggcggagccccttctggaagatctcggtgaaatagacttgaccgatatccactgggtgatcgttggaggcgagtcaggcgcgaaagcgcgtcccatgcagcaagaatgggtcgacaacattcatcgtcagtgcgatatctccggttccgcgttctttttcaagcagtggggcggatggggggcggatggagtcaagcgctctaaaaaagcaaacgggcggctgctaaacggccagacctgggatgaaatacctcttttgaatttagcctga

SEQ ID NO: 336047 - DNA, 1335 bp, Pseudomonas aeruginosa
atggccaaggatgaaaagtacaagtggaatatttccaccgggacatatcctcagattgatccccacagcaagatcaaacacaagataattcaggactatattcgctcctacataacggtcgtgatgagcaaccagatgatccctcgaataggaatcagcatcatcgatgggttctgtggagggggtatttacaaagacgatgatggtataggcatccactatggatcgccgatcatcgcgttggagaccgttcgccagacagttgcggaaattaacaccctgagaaaacaagaccgcgaagtaattgccaagtactattttgtagacatcaaaaaggacaacatagattatctgaacgcagtacttaacgcgaaaggatattcgcacttaatagacaaggacgtattcccgataaagtcacgcttcaccaacgctctccctgcgctaataaatcagatcaagaaattaaaattctctcaacgcgcaattttcttgttggatcagtacgcttacaaagatgttccattctccagcatccgcgccatctttcaggaagtgagaaacgctgaggtgttgctgacgttcaacgttgacagcctgattgactacctttctgagcgggaggaaaaccgtaaggcgctccagaatattgaccttgagaaatacattccgtgggctaaactcccttccttcaaggccacgatgcgtcatgaatggcagcacctcattcaacgcttcctggcagagggcatactgaaagaaagcggcgcagagttcatgacggtattcttcataacgccgtttggcgctaaccctcgcacctactggttcattcatctcgccaagagctatcgcgccaacgctgtgatgaaggaaatccactggaagtacggcaaccacttttcgcacgcaatgacgcccgcgctattcgtggggtacgacactaagcgcgatatacaggttaccgatcagcaaaaccttggcttcggtgaagagcatttcttcgataacgtcaccggaaaacgcatcgagagagagctttccgagctgctgcccaggcagatctaccaacagcctgtacagacgttcgaggacatgatgaagagcatggccaacagcacgatggccaacgaaagcatcgttcgcgaggccctccacatgccaattctgtgcaaagacatcgaggtttacgacaaggacagtggcaccaagcggcgaaagggcagcagcatcaagtcctcagatatcctgatgccggcggcgcagcggacaatgttttttatacctcccatctcaatggtccagaagggaaaggcggagttcgaagacgagtga

SEQ ID NO: 336048 - DNA, 1299 bp, Pseudomonas aeruginosa
atgatttgtattgaatgcgtcactccggaacctctcaagaagctgttcgatgcgcacgggcaggaagctggctgcaagtattgccagcgccgtgggaaggcaattgagccccagattctatttgaatacatctatgcccgggttggcgagaatattgcccgtaaggagaatctctcggactacgagctcagcatgttgtatggggccaggattgagcttttccccattgcagaaatagatattgttctctcggaatggtttgatctcggcaacgaaccatatttcgacgacttgtgtagcggtgttccagatgaattcaatctagatgatgccggcgacactacgcacttttatggcgaagacgacgcgatggaagtaaacctctacgaaggtccttggaaccagttcgttgagggtgtgcagtacacgcaccgcttcttcaacgcgaatgccggaaaatttctcgactcgattttctccttgctgatcgccgataacgaaggccttaagtctgaagctatccggaccatggccaatggcgacttgatgtaccgtgcgcgtcttgctaaaggtttcagcgatgcggagaagataattaatgatcccgctggccaattcggccctactccgagattcctagcaagcagtcaaaggatgacgccgaacggtatctctgctctgtactgcgcgctggagcgagagacctgtctgagcgaaatccgctccatcaccggggatcatgtggtgagtacggcgctgactccagtcgccgaactgaagcttcttgacctcacggctctggaccagcttgaacctccggatctgtcgctcctggacgtagggtttcgtgaggcgctacaccgcaaggtattcctgggctcacttgtcaaaaagatgtccaggccaaaggctcgtaatgatgagctgagctatctgtcgactcaggtagtgttcgagtacctacggctgcgctttggcaagcaggtcgacggtctggtcttcccatccgtgcagacgggcgaggcgggtaccaacgtagtcttattccccgaggccagccgccttgcctatgtacccccgccggaagccgacgctgaaagacttggcgacgaaaagccccccgttgtggtcgaggtcgaattggacaatccgtttaagccgccaaccaaggtaattgttgtgcacggctcaattcggtatcacaaggtcacggcgattgagacccaggcccgcgagtatcgccatatctacgatattttcatgagcgacgagacacgcaagcggctgaacttggactag

SEQ ID NO: 336049 - DNA, 267 bp, Pseudomonas aeruginosa
gtgcaattacgcagccagatgagtttttccgatgccgagtacgccggcaaacgcaaacagacccgtcgtgaacgcttcctggcggagatggaacaggtagtgccgtgggcagggttactggtgctgatcgaaccgttctactccaaggccggcaatggccgtccgccgtatccgctggaaaccatgctgcgcattcacctgctgcaaaactggtttgccctcagcgatccgtcgatggaagaagcgctgtacacccgtttcgggtga

SEQ ID NO: 336050 - DNA, 1425 bp, Pseudomonas aeruginosa
atgccgctcggcgttcggatcttcctggtctacttcctgttcgtcggtctcaccggctacttcgtgctgagcacggtgatggacgaagtgcggcccggcgtgcgccagtccaccgaggaaaccctggtggacaccgccaacctgctcgccgagatcctccgccaggacgtgaagaacggcaccctggcacagagcgacctgccggagatgctcgaggactacggcaagcgcgtgccgcaggcggatatctggggcttgcgcaaggaggctgtgaaccaccgcatctacgtcaccgacgccagcggcaaggtgctgctggactccgccggggtggctgtcggccaggactattcgcgctggaacgacgtctacctgactctccggggccagtacggcgcgcgctccagccgcgaagacccggacgacccggattcctcggtgatgtacgtggcggcgccgatcaaggatggtgggaagatcatcggggtggtttcggtggccaagccgaacagcagcctgcaaccctacatcgaccgctcgcagcggcgcctggcctggctcggtgccgggctgatcgccctcgggctgctggtcggcggcctgctctcctggtggctcagcggcgcgctgcggcgcctcacccagtacgcacaggcggtcagcgaggggcgccgcgccgagctgccgcgctatcgcggcggcgagatggcgcaactggctgacgcggtggaacgcatgcgcacgcaactggaaggcaaggactacgtcgagcgctacgtgcataccctgacccacgaactgaagagcccattggcggcgatccgtggcgccgccgagttgctcgacggcgagatgccggccgagcagcgggcgcgcttcgtcggcaacatcgccggcgagagcgagcgcctgcaacaactgatcgagcgcctgctgagcctggcccaggtggagcagcggcaaggcctggaggaggtcggcaaggtcgacctgcgggagatcgccgcgtccctgctggaaggccaggcggcgcgtatccagcgccatcgattgcgggtggagaaccgcctggaaggtccctgcgaggttcgcggcgagcagttcctgctgcgccaggcgctggccaacctgctcgacaacgccctcgacttcaccccgcccggcggcatccttcgcctgctcgccgaggtcgacggcgagggtatcgccttgcgcctgttcaaccaggggccggcgattcccgactacgccctggcgcgcctcaccgaacgcttctactcgctgccgcgcccggccagcgggcgcaagagcaccgggctgggactgaacttcgtcgccgaggtggcgcaactgcatggcggccggttgcaggtcggcaaccgcgacgacggcgtcgaggcgctgctctggctgccgcgcggctga

SEQ ID NO: 336051 - DNA, 690 bp, Pseudomonas aeruginosa
atgccgcatatcctgatcgtcgaagatgaagccgcgattgccgacaccctgctctacgccctgcaggccgaaggcttcgccaccacctgggtgaccctcgccggcgaggcgctggcgttacaggagcgccagccggcggatctgctgatcctcgacgtcggtctgccggacatcagcggtttcgaggcctgcaagcgcctgcggcggttctccgaggtgccggtgatcttcctcaccgcgcgcgatgccgagatcgaccgtgtggtcggcctggagatcggcgccgacgactacgtggtcaagccgttcagcccgcgcgaggtggcggctcgggtcaaggccatcctcaagcgcatggcgccgcgcccggcggcgctggaagaggccgcgccgagcgggccgttccaggtcgacgaggagcgcgtgcggatccactaccgcgacaccccgctcaacctcacccgccacgagttccgcctgctgcagacgctgctcgggcagcccgagcgggtattcagccgcgagcagttgctcgacgccctcggcgtcgccagcgaggccggctacgagcgcaacatcgacagccacatcaagagcctgcgcgccaagctgcgccaggtgaacgaacgcggcgaagcgatccagacccatcgcggcctgggctacagctacagcccggaccacgcctga

SEQ ID NO: 336052 - DNA, 675 bp, Pseudomonas aeruginosa
atgccggggattcctcaggctcaccagcaggtgcaggccgttctcgccaagcgggatgggcagtacctccagcttgtcgcgcaaatcggccagttcgcccttgaaggcgacccccagcgccagctcgtcctccaccgccaggtcgacccgccccgcctcgagcatccgcgcggcgttggcgaagctggtcacgttgaccttctgcagacggctgtcacggtcgaattcgggcgcgtaggcatagtcgcgcacgaccgcgatgcggtagggacgcaggtcgctcaggcgggaaaactcgataccccgccccttgcgttgcagcaggcggatgcggttgctcaggtaggcgcgggaaaactgcccgtagaggctgcgggcgggctcgtaccaggcgctcagggcgatgtcgtagtcgccgctgcgcacgccgtacagggcacgcgaccagggtacctgctggaaactcgagtcgaagccggcgcgcttgagcgcggtggtcaccagttccaccgccaggccgttgccaggcaggcgcgaatcgacgaaaggcggccaggagtcgccgaccaggcgcaggttggcggcaggcagcgcgcaagggaggagcaatgtcagcagcaggagtgcgcatcgcagcatgaaggagcgtcccgggagtggatcgccacagcatag

SEQ ID NO: 336053 - DNA, 2142 bp, Pseudomonas aeruginosa
gtgtgtcagcgcagcctggatgccgacctggccctggcgctgactctcaatggccgcgaactgttgcgcgacgagccgccgctgaaagtgctggtgatgtcggcgaccctggagggcgagcgtcttgcggcgctgctcggcgaagcgccggtggtgcgcagcgagggccgcatgttcccggtggatatccgctggggacgggcggcgcaacccggcgagttcatcgagccgcgggtgcagcaggcggtgctccaggcgctggcggaggaaagcggcagcgtgctggtctttcttcccggccaggccgagatccgccgcgttcacgaaggcttgcgcgaggcccttggcggtcgccccgaggtgctgctctgcccgctgcatggcgagctcgacctcgccgcccagcgcgccgccatcgagccggcgtcgcggggcacgcgcaaggtggtgctggcgaccaacatcgccgagaccagcctgaccatcgacggcgtacgggtggtgatcgacgccggcctggcgcgggtgccgcgcttcgatccgggtagcggcatgacccgcctggagacccagcgcatctcccgcgcctccgctacccagcgtgccggccgcgcagggcgcctggagccgggcgtatgctaccgcttgtggtcggagagccagcatgagcagttgcctgcctacggcacggcggaaatcctccaggccgatctggccgggctggccctgcaactggcgcgctggggcgtggcgccggaggagctggcctggctcgacgcgccgcccgcggcggcctacgcccaggcccgcgagctgctcgggcggctgggggcgctgtacgccagcggcgcgttgagtgcccatggccaggcgatggccgaattgccgacccatccgcgcattgcccacctgctgctgcgcggccaggccctcggccttggcgaactggcttgcgacgtagcggcgctgctcggcgaacgtgacatacagcgtggcggcggcgccgacctgcacagccgtctcgccctgctcgccggcgaggcccgcactggcgcctcgcgcggcgcggtacagcgcgcccggcaactggcccggcagttccgcggttacctgcgcggcgccgccagcgaggcggtcgtcgatcccggtcatccgcgttggctgggttgcctgctggccttcgcctatcccgaccgcatcgctcgccagcgccgcgccggtggcggcgactaccggctggccaatggacgcgctgcgcagttcggcgaaccggacagcctgatgaagcagccctggctggtgatcgccgatctgggcagccgccagggccagcgcgaagagcggatctacctggccgccgaactcgatccgaggttgttcgatacggtcctggcggagcaggtcagccagcgcgacgagctgcagtgggacgagcgcgaaggcgtgctgcgcgccgagcgccagcgccgggtcggcgaactggtgctgtccagcgaggcgctacccggcctcgacgaagcggcgcgcagccaggcgctgctcggcctggtccggcgcaagggcctggagttgttgccctggaccccggaactgcgccagtggcaggcgcgcatcggcttgctgcgccggctggacctggaagacaagggcgagagcgagtggccggacgtcagcgacgccgcgttgctggaacggttggaggaatggttgccggcctatctcggcaaggtcacccgcctggctcacttcgccaacctcgacctggcttcgatcctcgccgggctgttgccctggccattaccgcagcgtctcgacgagtgggcaccgaaaaccctggaagtcccctccggctcgcgcatccgcctggactacagcgaaaccccgccgatcctcgcggtgcgcctgcaggaactgttcggcctcggcgacactccgcgcatcgcccagggccgcctggcagtgaagctgcacttgctgtctcccgcgcatcgcccggtgcaggtgacccaggacctggcgaacttctggcgcagcacctatgcggaagtcaggaaggacctgaagggacgctatccgaagcattattggccggacgacccgctggtggccgaggccactgcccgggccaagccacgcaagtag

SEQ ID NO: 336054 - DNA, 1470 bp, Pseudomonas aeruginosa
atgacgagcagtaccagcgaagacaagaagagtcgacgtatcaatttttcacctgataccaagctggaactggcaaagcgtgctggctttcattgcagctatcccacgtgcctggtcccgaccacaggcccaaccgttgatgatgagggtaatgattccgccgctggtattgcgatcgctgcccacatctatcctgcctcaaagaatgggcctcggaaaagggatgggctgacgcctgagcagatccggaacatttcgaatggcatttggctttgtcgcactcacggcaccctgattgacgacttccaggatgaattcccggctgagaaagtcattgagatgaagaaggtgcgcgagttcgcccagtggctttctctcaagttgccggatgtggccttcttcgttggcttcattggggttaagcgcctcgatgcaatcgtctggaagcactggcccaaacctgatgaagagaagatcagggtcgacgtcatttccgaaggtatcaaatgcacgccagtctctgacgatcccatctggacccagatgcccgtcccgcctgctgagtttgatctcaagccgataccccgagcggccagcccccggtccctgcatattgctgctctaccttcgccgactcggcgtgaatcgttccctgcagaacgccgccgcgcaatcgacattgtctcctcctggggagagcatgcgaagcgctggggttgggatgggaaagggcttcttatcaacgattgctatgtaaaaatcaccgctcgtgaccctgagtcgggcgatattgccgagccgttcctatgggttcggagccgtagtgcacacgtctacgactacaacttcatcgatggtgaatccctctttcttgacgtcgaccacaccgcctaccgcgtctccaacctcaactggcacctgaacgtaaccatcaaggatggcgagtgccgcactacgagtacgctgcgcatgctgcgccccatcaggttgcctaacccctacgaaaggcatgaacacgcggagtttgaggcatacgcccaagtattggagaaattggcatgtggctgggaaccggttggctacgttggccttgaacctggtgaatggtctgagcccgaaaaagtgctccccgagggttttccgatccggagcgaaatcaccgaagcgcagtttgctcgggctcttcagcgctgcgcgagagtgaagcttggttacgagctggcagaggtttggggcatatgcttccgcttcagcgatgccttcttcagtgatgccctcgacgagaccatcattcgggaggcttctgaagctttacttgcagaggttgggccggccccttacccgatctctgcccatggcaaggaattggtctcgcttaacgatcggcatggcatcaggctgaccaccaaacatggcgagctgttcttcgaggtcgctcagaccatcgcgggtatccggcgtactttttag

SEQ ID NO: 336055 - DNA, 1812 bp, Pseudomonas aeruginosa
gtgcgcattatcaatctgaagattgagaattttcggggtgtgaagtcagcggatcttacgtttgacggacataccctactggtagggggcaacaacgtcgggaagagcacgatttgcgaggctttggaccttgtgctcagtccagataggctttctcgctttcccccggttcaggagtttgatttttacaatgcctcgtacctcgatgctgacgggaccacctccgtaaagatcaagatcgaagtcatgctggtggatctcagtggtgaggttgagcgcacctgcgccgctcacaccgagctgtggcacgtcaaagagcaacgtctgttggaggctggtgaggcagatgccgccgtccctcccgatgttattcgatgtctgcgtattgaaacccaagccttttacaacccagaagaagatgagttcgaggcggacacgttcttctcatacagccctagccttgaaggtggcgagcttcagcgtgtaaagaaaactgtgaagcggctgtttgggttcctctaccttcgaaccctgcgcacaggctcacgtgccctcagtcttgaacgaggttctctgctcgatctcatccttcggttgcaaggggttcgaaccgggctttgggaaaagtctatcaagcgactaagagagctggatcctccaattgattcggatgctgctgaccttcggccggtattggattccattgaagagaggcttgcccagtacatttccgtgggtggtgctggcaaggcgacccagctattcgtttcgcagctcacgagagagcacctgcgcaagacgatgtcgttctttctctccatcacagaggaccaaaagccagtccccttccagcatgtcggaacgggcacgctgaacaccctcgtattggccctgctgtcattcatcgctgaggtgaagaaagacaatgtgattttcgcgatggaggagcccgagatagcacttccaccgcatacgcagcgccgtattgcgaagtaccttttggaagagacaacgcagtgcttcgttacctcgcattcgccgtatgtcatcgagcgattcgacccatctcagatcatcattctcagacgcagcgctgaggcagcggtcgagtcgaccaccgttgcctcaggcacgaccttgaaaggcaagatgtacaagcggcatgcacgaagaggccttgcagaagcaatgctcggtcctggggtgattgttgctgaggggatcaccgagcacagtgccttgaccactgtcgctgcgaagatggagcaggccgacccagatctgtttgccttggacttggcaggcatcacgatcttccctgtcgatggcgacggttcattgccgaatttcggtgcttttttcaaagccctcggcctacgaacctatgccttctatgactacaagccgcgcaaggcagaagagaatcagaagtttgtggaagccttcgatatcccgaacgagattccttacccaaacattgaggaactcctggtcacccagacgccggtagagcaccaatggacattccttagtgctcttcgtgattccggggatcaaggaaacattggcatccctgccgagcgcccagatgacaacggtgtgagagccaacatgcgcaaagcactcaagagcaacaagggcaacggatatgcagcccgattgctagacctttgtgcagtgcacgaattgccagtgggtatcacagatttcctgacacgcgtttacgaggactttccaaaacctactcctgcttctcagcccgacgatgaaccggctgacgaagaggatggagaggatctggtaggcggctga

SEQ ID NO: 336056 - DNA, 1764 bp, Pseudomonas aeruginosa
atgattatctgcgatcggcgtcaaacgattctggacgaggatggccacctcctgattgtcggagggcctggcagcgggaagaccacaatcgcccttcagaaggctacgaaaattatcgctgctgggttgcagccggggcagtcgatactcttccttagcttctctcgggcagccgtggcaagggtcgcagaggcgtcgagtctgctagtcgataagaccgtacgttcgcagcttagcctccagacctttcattccttctgctggtcattgctcaaaagccatggctacctgctcggctctccgaaaggaaagctcaagatcctgctacctcaagatgaaaaggctttgtccggtggagtaaaagcaccaaagaagggtgagaaggcaacagccaagtggctcgagtggcaggtcgagagggagcgacttttcgcggaagagggccaaatctgtttcgacctgtttgctcctaaatccagtgagctactgggaaggtgtcagatgctccgggagctggtcgcagacactcatcctgtagtcattgttgatgaagcccaagatactggggatgcggcttggagctgtattgagaagctggcaggcctctgccagatcatctgcttggctgatcttgatcagcagatttttgaccacctggagggcgttggtccggagcgaatcgagcatatcaaagatgccttagatcccgtttttgtagacctgggctccgacaataaccgcagcccaggcactgaaatcgctgttttcggcaatgacatcttggagaaaacaccgagaagagccccatatgccggagttggtcgcattttgtatgactccagacaggagccggtccagtggatgcgtatggcgcttggtcgatttttcgttagtgctaaagctaacggtctggaattggaaaacatcgcgatccttgcaaccactggccgcggtgtcgccaaaatctctgccgctttgaacggtggggcgaagcctattcctcataaggtgttgttcgacgaggccggagttctgctttcggctcgattggcagcattcctactggaacccaagcttccagaacgacgtgcagctgatatcgcaacctgtcttgaattacttgcctcgataaggcgtgcgtccggtagcgcgacagcgatcaaggatgcagcaacctatctgacatggagtgccagtatcgctgctggtaagcccccgaagaccaaattagcgagaagtgctgaagcactcattaatggcgctgcggatctggtgcttaccggggaccctggcagggattggattcagatcaaaacgctgctctatcggaccggtgtaactgagttcaagcaggtcgcggaggccctcgactatctgattgctttcaatcgtggcaagcggatcagcgcgaatttgtcggaaatgtggatgacaacaggtgcatataccagcgcgcgtcaggggcttgataacgcactggttcaggatcaactgctcgctgacggaaacgacacccaaggcatacacgtcatgacaatccacaaatccaaggggaagcagttcgatgccgtgatccttgttcgggaaagcattaggctgggagcgaacgtgtttcgctcctcctttgtctggcgtggggatgaagcgccctatgatcgcagtcggaaaattcttcgcgttggaatcactcgcgcgcggcgctacgttctgatgctcgaaccgacatttccggcatgccccatcatgtcggaacacagattgtga

SEQ ID NO: 336057 - DNA, 1446 bp, Pseudomonas aeruginosa
atgcttgaaatgctcaacgatttcctttccggaaaactcctcatcgtcctgatcgtcggcctgggtgcctacttcacgatccgttcgcgtttcgtccagttccgccacttcggccacatgttcggcgtattcagggaatcgctgcgcggccaggccggccagctcagttccttccaggccctgatgctgagcctcgccggccgggtcggcgccggcaacatcgccggggtcggcatcgccgtgaccctcggcggtccgggggcggtgttctggatgtgggtcaccgcgctggttggcatgtccagcagcttcttcgaatgcaccctggcccaggtctacaagcgcagcgacggcgacggcctgtatcgcggcggcccgtcctactacatccagcacggcctgaagctgcgctcgatggcggtggtcttcgcggtactcctgctggtgacctacggcttcgccttcaacggcctgcagtcctacaccgtcacccattcgctgcagaacgccttcggcttcgccccgcagcacaccgggatcgccctggcggtgctgctcggcgtggtcttcatcggcggcatcaagcgcatcgccgcggtctccgacctgctggtgccgatcaagaccctggcctacatcggcgtcaccctgtacgtcatcgccagccagatcgagcacgtcccggcaatgctggaaaccatcgtcaagagcgccttcggcctagacccggcgttcggcggcctgctcggcagcgccatcgtgatgggcgtcaagcgtggcgtcttcgccaacgaggccggcctgggcagcgcgccgaacgtcgccgcggtcgccgccgtgcgccatccggcggcacagggcgtggtccaggccttcagcgtgttcctcgacaccttcgtgatctgcacctgcaccgccctgctgatcctgctctcgggcttctacaccccgggcttcgaaggcgacggcatcgtcctcacccagaactccctggccgcggtggtcggcgactggggccgggtgttcgtcagcgtggccctgtcgctgttcgtcttcacctgcatcctctacaacttctacctgggcgagaacagcctacagttcctcagccgcaaccgcctggtgctgatcggctaccgcgcgctggtgctggccctggtggtctggggctcggtgcaggacctgtccaccgtgttcgccttcgctgacatcaccatgacctgcctggccttcgtcaacctgatggccctggccctgctgttcaaggtcggcctgcgggtgatgcgcgactatgacgtgcagcgccgcgccgggatcaagcaaccggtgttcgactcggcgcagttcgccgacctcgacctggaccgcgaagcctggcccgccggccagcgcgccgagcccccggcgcaggcggacgccgagccgctgccgagcggcaatcgctga

SEQ ID NO: 336058 - DNA, 444 bp, Pseudomonas aeruginosa
  misc_feature (357)..(366): n is a, c, g, or t
atgagcgcagcgccaccggatatccccgccctgcccgccggcctctgctacgtcgacgaccgccagccgggcatccgtcgacgccggcagggcaagcgcttcgtctatttcgatgccgacggccagcgcatcggcgacgccgaggagatccgccggctggacaagctggccattccgccggcctatcgcgaggtctggatctgtcccgaccccaacggccatctccaggccaccggccgcgacgcccgtgggcgcaagcagtaccgctaccacccgcgctggcgcgaggtacgcgatgccgacaagtacgagcgcctgctgcgcttcggccaggcgctgccggggctgcgccggcannnnnnnnnnacgcccagttgcgcctgcccggcctcggtcgcgacaaggtggtggccctggcggttgcgctgctcgacgccaccctga

SEQ ID NO: 336059 - DNA, 1068 bp, Pseudomonas aeruginosa
gtgaaaaaacgctggattcagatggatgtgacccgcggcgtgggcatcctgatcatcgtcttcgggcacagctggttcgtcgccagttcgccgaccgtgctctatccgttgctctctccgttcatcctgccactgttcttcttcatttccggggtgttcttcaggaccgagcaacccttcggcgagatggccctgcgcaaggccgacgccctcctcaagccgttcttcgtgaccatgctcggctacgtcatcctccgcgacctgctgcgcggccagccgctgctgccggacatcggcggagtgctgtacgcctcggtcgacaccctgccctggcaggcgctctggtacctgccgcacttctgggtagcgaccctgttcgcctggttcatgctgcgcgtcatccagcgtctcggcctgtccctcgccgccagttgcgtgctgctggccgtgcaactgggcctgggcatcctgttcctcaagacgttctggcagatcccggtggagttcggcggcgaacagtacctgctgccgggcctgccgttcagcctggacatcaccctgatcagcagcgcccacttcatgttcggctatgtcctgcgcgacgtcctgcgtcgccaccagagttcgttgctgaccctgtgcatcgcccttgccgtgaccaccgccagcttcctctactacccgacggtggtggacatggcgcagcgccgctacgaccactggttctgggccaccgtccaggcagtgagcggcgtctacctgtgctgggcgctgtccgggctgatgatgaagatcgactggctgggcaaggcgatgacctacatcggccagtcgaccctgatcctgctgatcttccacggcgagatccagcacaagaccttcaacctgctggcccacctgggcctgtcggaaccggccgctgccagcgtcgccctggtgatctcggtgatcgtctcgctgctgatcggcgaagtgatcaagcgcgtcgcgctgctgcgcgccctctacttccccttcccggtgcgcaagaaggccgccgcggtccagggcggcggcgaagcgcgctga

SEQ ID NO: 336060 - DNA, 198 bp, Pseudomonas aeruginosa
atgggcgtaggggatcagcacttcctcgaccgccacttcctcgtcgcggcgcgcgccggagcagtccaccacgcgcaggttgggttctccgcgctgggcattcacgcatggcagggactcgctttcgtctccctgggcgggagcggtggggtggtcttcggcgagcgcggccagcgaaaaacggtcaggcgaccgtga

SEQ ID NO: 336061 - DNA, 411 bp, Pseudomonas aeruginosa
gtgctcggctcgggttccggcttgggtttgggttccggcttcggcttggccttgggaatggcgttttccaccggtttgggcttgggtttcggcttgggcttgggtttttccaccggcttcggcttcggcggctccggcttgggttcctcgatcttcggcggcgtcggctccggcgcggcagccggcggctgcggggtcggctcggccttcttctcgagctggacgaaattcacctgcatggtcttcggcagttcgccgtggccaaggttgagttcggccggggtcggcatcacccacaccagcgcaccgatgatcgccacatgcatcgccaccgccgcgccggaggacaaccaccagcgcgacttgggcggctcgccggggacgtcttcgggatcgctgccatgggcgtag

SEQ ID NO: 336062 - DNA, 279 bp, Pseudomonas aeruginosa
atgagtcgtcagcgttaccctgaagaattcaagatcgaagcggtcaaacaagtgaccgagaaaggcaagcctgtcgccgatgttgcccagcgtttgggcatgtccgttcacagtctctacgcctggatcaagctctacagcaaaccccaagatcagcgtcagcaagacgatgaccagcaagccgaactgcgcaagctgcgtgctgaactcaagcgcgtgacggaagagcgagacatcttaaagaaggccgccgcgtactttgccaaggagtgcggctga

SEQ ID NO: 336063 - DNA, 1242 bp, Pseudomonas aeruginosa
atgaccaaaccgtttaacattcccaaggcgttaatctgggaggcattcaagtgtgtcaaggcgaacggcggcgccgcaggcgttgaccgtgaatccattgagcagttcgagagtcacttgggcgacaacctgtacaggctatggaatcgactctgttccggcagctattttccgccgccggtcaaaggggtaccgattccaaagaagtcaggaggtgtgcgtgtgctgggtgtgcccacggttgccgatcgggtggcgcagacggcagtcaagctcctgctggagccgcagatcgacccgatgttccatccaaactcctatggctatcgaccggggcgctctgcccatgacgcgattgccatggtgaggcggcgaagctgggaatacgactgggttgtggaattcgatatcaagggtctctttgacaatatcgaccatgatctgctcatgcgcgcgctcaagaagcactgccagaccccatgggttctcctgtacgtggaacgctggctgaaagcgacaatgcagactgcagacggggtacttctggagcggacgcgcggcacgccgcaaggcggcgtcgtgagcccgttgctggccaacctgttcctgcactacgcctttgatgtatgggtcgctcgcaatctcagaagcgtgcggttctgccgctacgccgacgacggggtggtccactgcaagagcttggctcaggccaagctggcgttagacaggatcggcgaacggttccgcgagtgcgggctcgaattgcatccgggcaagacaaagatcgtctactgccaggacgtcaaccgacggaaggcacatcctgatgtccagttcaccttcctgggatacaccttccggccacgcaaagcggtggacaggtatcagcgggtctacgtgaatttcgctccggcggtcagccgtgatgccctcaaggcgatgcggcaaaccattcggggatggcatctgcaactgatgtgcgaccgcgaattgggcgatctggcggcgatgttcaatccgatcctgcgaggctggcagcagtattacggccgcttccacggctcggcgatgtcggtgatctggaaacacatgaatgactatctggtgcgctggatgatgcgcaagtacaagactctcgctcgccataaaacgcgggcgagacacgctctcgggcggcttgcgcgtcgattcccgacagccttcgtgcactggggcatgggatgtcttcctgcggttggatga

SEQ ID NO: 336064 - DNA, 738 bp, Pseudomonas aeruginosa
atgaaacggactgcgatcttgtttgacggtggcttttttgtcaaacgaatagaatactttctccgaaaatactttaataacactgaactctctgccgataacctctgtaaggccctgaatcacatcgctaggcagcatgttcacgatctaacaacggcaagaggagcacaacctcatactctatatcgtatatatttctacgactgtcctcctctaaataagcaggttcgatatccgctacctgactcgggaaataagactcctagtacttggaataccatcaagcacccgccttatctactccgaacagaactgcacaaacttctcaagaaaaacaggaagacggcgcttaggctgggcgtgctttctaatcagggtaattggcagttgaccgcaggtgctttaggagaattggtttctggagtacggaggtgggatgatattactaaggatgatttttattacgaagtaaaacaaaaaatggtggacactaagctaggggtggatattaccgcactagctatagagaagctagttgacaccatcgtcctggtcgctggtgacagcgatttcattcctgctgcaaagcttgctcgtcagaagggaattgactttttgcttgatcctatgtggtcgaaaactaccccagggctcacagtgaatcgcccctgctttcctagacactctccaagctcagaaaatagcgtttctcatactctactggcgacagctgcatag

SEQ ID NO: 336065 - DNA, 198 bp, Pseudomonas aeruginosa
atgtccaatgcattcgacttctatgcaccgctttctttgccagatggccgtgtaattttcggagccgcagcagccaatgtgcgcgtagcgcaagcgggaggtttcaacgtgctttccgctgagctggtgaatatgggaatcaggatgggatatcaaaaggcggtctcggatttccgcaacacccagccccggcgttga

SEQ ID NO: 336066 - DNA, 1278 bp, Pseudomonas aeruginosa
atgaaggagtcgcgaggtcaagggagcgatctgctaaatgagaaacgtgtattgcaagagctcaggtcgttgcttcctagttatctggagcaccttaagactgaaggtgagccaggctatttaggttcattctacatatttgaggaaagtgagaggctgtatgatgcattgttctcaactgaatatgccaggaggcacttagactgggattttttccagtgcacgctctatgccgttatctatcatgaagaaattcatgatgctgctgagatcgttagtcgaatggtggctattcttgaagcctctaaagagtcgcgggactggatagtgattaatcccataaaaacaaatccagtttttacaatgttccggaagcagccatggacgggagtaaagaaattcggaagatttcatctgatcccatctacaaccacccctaaggagctagagtcaaggctaaaaaaggtatatggggttaacgatgtgtgcccgagaagcttcgcatatcaaagcgatgacgggaaaagtgattcggcgttgaagaaactaccgatgttgacatttgaggtgcacggatctgaagacgctcggaatgaaaacgctgagtcaaaacaaagctatttcttcagcttgcttgagttatatgggattctgagcggtgggcggcgtaatccctggcctcacggaccaagaccagttgatcatgcatttttcattgggaaaaatggcggcgagatagatcgagcaacattggattttcgctgcctcctaagtgctgatctttctgatgatttctttaaatatctcaaaagtcatcattttgaagatttttccaatcatgtatttttccggagcgacaaggtcttctcgagaataaaaagcgcgctatattttttcatgaaaggtatgaacgctggtgataaggtactagagtttgttagctatgtgattgctcttgaagccttgttctcaagagacaaaaatacgccaataaaaattacgctggcagagtatacagctctgctatgctatccgaagtccaggcgtttagcgatgcacgacaaaataaaggatatatatgatgtccgctcaaaactagttcacactggaaaatttaggctggagcactcaatgatagatgaaagtagagagattgctgcaacagccatttaccattacttcaagatttataaaaagctattagatgcccagcgacccatcgatatcgagaagcaattgtttgatcacttgagggatttgcgtctaggcattgcctga

SEQ ID NO: 336067 - DNA, 546 bp, Pseudomonas aeruginosa
ttgcgtggcgtgaagctggtcatatctgacgctcacgaagggctcaaggccgctgtattcaaggtcttcaacgcgacctggcagcgctgccgcgtgcatttcatgcgtaacgccatggcccatgtcggcaagggccagcgcaccatggtggcggcacttctgcgcacggttttcgcccaggacagccgcgccgaatgtcatcagcagtggcgtttggtcgctgatcaactgcgcgaaaagtaccccaagatcgcaacgctcatggacggctgcgaggatgaagtgctggcgcacatggcgtttcccaaggcgcatcgacagcagttacacagcaccaatccgcttgagcggctcaacgccgagatcaagcgccgcaccgatgtcgtgggtattttccccaacgatccggccatcacgcggttggtgggcgccatgttattggagcagaacgacgagtggtgcctgcaacgacgttacatgcagttggaggcctttgaagcagtcagcgataatccacaagccaagctgtcggccgtgatcaactaa

SEQ ID NO: 336068 - DNA, 681 bp, Pseudomonas aeruginosa
atgaccaagcccactatcgcattgaccgagctggttgagaaaggggcagacgccgatctgctcaagcaaatgatccagttcgttgcccagcgcatgatggagttcgatgtcgaaagcctgtgcggtgccggcttcgacgttaaaagcgctgaccggataaacagccgcaacggctaccgtgaccgcctctggcaaacccgcgctggcgatgtcgatctaaagattccgaaactgcgtcagggcagctattttcccggctttcttgagccccgccgtactgccgagaaggccatggcagcggtgatccaggaagcctacatccaaggcgtgtcaacgcgttcggtggacgagctggtcaaggccatgggcatgaccggcatttccaagagtcaggtgtcacggctggccggcgagatcgatgaacgcgtccaggccttccttgatcgccctctggaaggcgactggccttacctgtggatcgacgccacctacgtcaaggtgcgggaggccgggcgcatcgtctcggtcgccgtaataatcgccgtggccgtgaacaccgatggtggccgtgaagtcctgggtatgcgggttgggccatcggaggccgagccgttctggacggacttcctgcgaagcctaatgcggtggggccttgcgtggcgtgaagctggtcatatctga

SEQ ID NO: 336069 - DNA, 1239 bp, Pseudomonas aeruginosa
atgaagggaacaacttctctttcttcagatgatgcaaggcgtctggctttaacggctcaatgctttgagcctcgggcacaaaaaccaaataaaagtaggataagggccataatgcagagattgggagctctgcagttagatgcagttaacgccctgattcgctcacactatcttcctctatactcgcgtttaggacactacgaacgagaagacttagatttattagcctggggtgagctttccgaaagaggcttgtttgaatactggggacatgaagcatcgttgatgcctcttgagttgtatcctttcttccgttggcgaatgctaagggcggtagaagggcgtggaatccatcgagagctggttgaatttgggcgcgataatagacgattaattcgagaaattttgagcttggtaaaagagcgtgggcctactggaacaagcgatgtaactcgcagggagactccagcaggtacatggtgggactggagcatggagaagcttgcacttgaatggttattcgcaacaggcgaattgacagtagcatgccgccgaggatttgaaagattgtacgatcttcccgagcgggttttcccagcacatatattacgcacccctgaggtctcagagccagaagcccatcgctatctattagcgcatgcggcgcaggcgctgggcgtcgcgactgagtcagattttcgagattattttcgtttaggtctacaggatgtacgtgtgcgactatcagagcttgtcgaggacggtaatcttatcaaagttgatgttgagggatggacgaagccagcgtggataggaagtagattttcgcacgcgggacctgaagggagtagttccctactatcaccatttgactctttaatttggagtagagagcgcacggagcgcctatttaatttttactatcggctggagttttatgttccagcgaacaagagggtttatggatattatgttatgccatttctgtatcgtggctacttggtggggcgggttgacctacgcgctgaacgcacgctgaaatgcctagcgatatggggtgttcatgaagaagtaagtgggttgactgaggatgcattgattgaactgtcaatccaactagaggctatttcaatatggcttggctttgaaagcataaggatttattgtgaaagccctgttgctaaccggctgcgtacggcctgtcaaaatgtattacgcaatattaatttggagcgctaa

SEQ ID NO: 336070 - DNA, 1707 bp, Pseudomonas aeruginosa
atgggcatggccagcaatggagcgatcagcaccatcaacaaccggggaaacctgggggatgtcgtcaaggacgtgacctccagcgatgcgctgaggggctatgtagtcgctggcacgactgcggggctgactgccggcgtctacgacaaatggacctcgacccagaccggcacctcgaccgctctaccgaacaccggggccgtggcgcccgccgcagggttgggcacctggcaaggcgtgggccagttcacctcgaaccagttgctgcagaatggtacttcggtgctgttggaccgggcgctgggcggcaagggcagcctgggcgatgcgttgcaaaacagcctggcaaatgcctttgcggcctacggcttcaagctgattggcgacaccacccatggcgtgctggacgacggcagcctcggcaagatcggcttgcacgccctgatgggaggtctggccgccgaagcggtcggtggcgatttccgtaccggagccctggctgcgggagtcaacgaggcgctggtggatagcctcgccaagcaatacgccagcctgcccatcgatgacaagaagggcctgctgatcatgagttcgcagttgatcggcgtgctggcggcttcgacgcagggcgatgcggacgccaagagcttgcagacgggggcctgggtggcggggaatgccacccaacacaactacctcagtcattggcaggaggagaagaagcggcaggaggtcgatggctgcaaggacaaacagctctgcaaaaccggaatagaagccaaatgggcaattatttcggcccagcaggatgtcggtatcgtcgtaggtgttggaggaggcatcggtctttcgacagctgaaaccgcagtgggtgtttatgagctggtcaagaactggagggaaacctacgcagctctggagcagttggccacttcgccagagttccggcagcagtttggcgataactacctgaaggggctggaggagcgcgccgcattcttgacccaggcttacgaggatgccggttggcaaggttcggtcacagctggtgtcgagggcggtaggttcgctgcggaacttgttggcgttctgacggcagtaaaaggtggcgcgcagataaccgccaagctgccaacagcagccaagaacctggtcaacgcgattgcggagtcacctgtttccggtagtatgagttcgcagctcggggcagtgggggacttgggtaggctgggtgggggtgcaaaagcgactgcgacggtgatcgataccgctccgatggcccagcgggtcatggatgttcgagctggattgccgtctaatttaaggcgcagtggtaatgtagctatcgcagaaatagatattcccggaatacctaggcagatggctgcgcacagccaagtctctgatgccggtaaagggcttattggctctggaagtggaaattttgtggctcaatctgtacccaacaaggccggagatatggtttatcggggaatagatacggaatacaaaatactagacaatattgctgatcaattaggaagcaacacctccgcaagagggactgtaaatattctaacggagaaagcagcttgcgcaagttgtctaaacgtggctgagcagtttaaggcgaagtatcccaatatcacagttaatattcttgataatcagggcgttatgctccgtccgccgaggaagacgccgtaa

SEQ ID NO: 336071 - DNA, 207 bp, Pseudomonas aeruginosa
gtgacctacgcccacgccagccactgccgggcgctgaccctgacgaccttctgcgacgtgccctggaacgcgccgttctacgcgctcgccggcttcctgccaggtcagccgctggaagccggcgagcgcttgcgcgcgatcctcggccacgagcaggagatcggcttcgccgccgacagccgctgcgcgatgcgcctggtgctctag

SEQ ID NO: 336072 - DNA, 249 bp, Pseudomonas aeruginosa
atgccgacacatgcccctaagaagtacctgatcagccacgcctcgctgcagcattgctttgacaaaagccgctctggcctcgagaagctgcgcgaaagcgaccccagcttccctcgccccatcaagtttggcccgagcaaacaggctggcgtttacttcgtcgttgcagaagtggaagcctggctggaaagcaagatcagcgagcgtgatggaatcactcgggctctctctgagagagatgagcaataa

SEQ ID NO: 336073 - DNA, 639 bp, Pseudomonas aeruginosa
gtgagctgctcgacatcgagcgcaaggctgctaagagcaaggccacgaaacttgtggcgtctggtcgatcgctggccaaaccaagctgccgctgagcaagtgaaacaggttattgactacctcgatcagctaccatccgagcctcgtactacgctcaggttcagcccagaagcacaggaaatctttaacgcctggtatacgcgtcatatgcaacaaagccggagcgaagaatttcacccagcattgcaatcccattatctaaaaatgccacagaccattgcggggttagccctactgttcgaactggtcgaaggtggacagagagccgtgggcacagagtccacgtcccgcgccattaactgggcgatctacctgatgagtcatgccctgcgactctacggcgctgctatcaacgccccactactcggtgccaggctgatcctggagcgtcagcagaaattacccgaaccgtttaccgcacgtgaggtgcgtcagaaggactggatgggattgggctcgcaagacgctgtgaacaacgcactcgcagttctggctgcacacgacttaatcattggctacgaggtggccggagaaaaaggtggccgcccatcaacacgctacatctggcgaaaaacgtag

SEQ ID NO: 336074 - DNA, 1254 bp, Pseudomonas aeruginosa
atgtcgttgggaaacctcgtcgctgtcgtcttcggcctggccttcggcggagcgctgctgatgctcagcccggccaaggccggcgccgccatggtcggcctggcggccgcggtcaccatcctgcgcttcccgttctgggggctgctgctgttcgccctggtggcgaccttcatgccctactccacggtcaacgtggggatccgttcgacggtcagcgaagcgatcctcgccctgacctggggcgcggtgctctggcacatcttcctctcgcgcctgccgccggcgccggcgctgcgctaccgctccaccgagcgcatgctgctgtggctgatgctgttcaccgtgctgccgttcatggtcggccaggtcagcatcaaggccgaggccagcggcctgtcgaactggctgcgctggttgctcaacctgtccatcgtgttcctcgccggacgcctgctggtggagcgcaagaaccgcgagaccctggtcatcgccctgctgctgggcaccctggcgatgctgctgatgtccagctacggggtcgccaaccagggctggcggcgcggcctgggcctcgccgtggcggtcctcggcgccgccgcgatcctcctcgccagttcccgcggggcgatgctcagcctggcggtggtgctgttctggatgtccctgcgcaaggtgccctacaccggccgcctgctgttgctcggggtcggcctggtggtggtcctggtgctcagctacccgccgttgcaggaacgcctggcgaccatcttctcgccgcagaacgccagtaccgaggtgcgcttcgacgaataccggatgttccccaaggccgtcgcccgctatccgctgggaatcggcttcaaggtcgacccgccggtgccgggtaccgacctcctgggcatctccaacctgtggctgaacttcatgtacaaggtcggcctcggcggcatgctgctgttcatcgcggtgacctggcgctggtggcgcgaagcccgtccggagaaaggcccgatccgcctgacccgcgacaacgcgatctggctgggcagtacgggcggcatcctggcggcgctggtcagcggcctgttcgaccactacttcagcttcgccgtggtgatgatcggcctgttctggctgctggtcgggatcaacctgctggaagcccgccggctgttcccggaacgccagccgcaaccgcgggcggtgggttatcgcaagctcaagcgacagctcgagcgcggggccgaggcctga

SEQ ID NO: 336075 - DNA, 693 bp, Pseudomonas aeruginosa
atgcctaggcaagggcgagtggttttaccgaattatccgcttcacgtggtccagcggggacacaatcggcaagtggtattcgccgaggacgaggactaccagcgttacctctccgatctacgggacctcaaggatgcctttggtatcaaggtctacgcattttgcctgatgaccaaccatgtccatctgctcttggcgcctggtgattcgctgtctggcttggcgcaactgatgaaaacgctggcggcgcgcacgacacgatatcggaatcgcttggagggccgttccggaacgttgtgggaaagtcgctataaatcgagtgtcgtacagagcgatgcctacctgctggcgtgttgccggtacatcgaactgaaccctgttcgggcgcggatggtggacgatgtggcggcctatccctggtcaagttatgggctgcgggcggattggttgaaggagccaaactggttggatatggatccctgcttcattgagctaggtcagacggccgaagagcgatatcggcgatacgtaacgttcgtgaaagaggcgataccggccgaggaattgaggctaattcgcgaggcggttcagcgtggacaactgacgggaaatcaacggttcgtggacgagatcgaacgggtagccggggtgagaatagagcggcgtgggcaagggcggccgagattagagtag

SEQ ID NO: 336076 - DNA, 693 bp, Pseudomonas aeruginosa
atgcctaggcaagggcgagtggttttaccgaattatccgcttcacgtggtccagcggggacacaatcggcaagtggtattcgccgaggacgaggactaccagcgttacctctccgatctacgggacctcaaggatgcctttggtatcaaggtctacgcattttgcctgatgaccaaccatgtccatctgctcttggcgcctggtgattcgctgtctggcttggcgcaactgatgaaaacgctggcggcgcgcacgacacgatatcggaatcgcttggagggccgttccggaacgttgtgggaaagtcgctataaatcgagtgtcgtacagagcgatgcctacctgctggcgtgttgccggtacatcgaactgaaccctgttcgggcgcggatggtggacgatgtggcggcctatccctggtcaagttatgggctgcgggcggattggttgaaggagccaaactggttggatatggatccctgcttcattgagctaggtcagacggccgaagagagatatcggcgatacgtaacgttcatgaaagaggcgataccggccgaggaattgaggctgattcgcgaggcggttcagcgtggacaactgacgggcaatcaacggttcgtggacgagatcgagcgggtagccggggtgagaatagagcggcgtgggcaagggcggccgagattagagtag

SEQ ID NO: 336077 - DNA, 840 bp, Pseudomonas aeruginosa
  misc_feature (300)..(309): n is a, c, g, or t
atggctgacttcgagatcctctgcttcggcgagaccatggccatgttcgtcgccgaacagcccggcgaactggaccgggtcgagcagttcggcaagcgcatcgccggcgccgacagcaacgtcgccatcggcctcgcccgcctcggcttcgcggtggcctggctgagccgggtcggcgacgactcgctcggccgcttcgtactcgacagcctgacccgcgagggcctcgactgccgcttcgtcgaggtcgacgcgcaagcgcccaccgggttccagatgaagtcccgcgaggtcgatggnnnnnnnnnnctctcggcgagtgcctgcgaactgtcccacgaactgatgcggcgcatgcgcggcaagggcgccagcctgtccttcgaccccaacctgcggccctcgctgtggcccagcgagcgccgcatgatcgccgagatcaacgccctcgccgcgcatgcccactgggtcctgccgggcctggaggaaggccgcctgctcagcggctggcaggaacccgcggatatcgccgcgttctacctggacatgggcgtcgacgcggtggcgatcaagctcggcccgagcggcgcctactatcgcgatgcccacggcgaagggctggtccccggcgtgccggtggcgaccgtggtggacaccgtgggcgccggcgacggcttcgcggtcggggtggtcagcgcgctgctggaaggcctgccgctgcccgacgcggtggcgcgcggcaactggatcggcagccgcgcggtacaggtccgcggcgacatggaggggctgccgaaacgcagccaactgctcgaccgcgagcgccgcaggagcgcctga

SEQ ID NO: 336078 - DNA, 1368 bp, Pseudomonas aeruginosa
  misc_feature (1121)..(1130): n is a, c, g, or t
gtggaactggaaggcgctgatgatcaccagcttcgccggctgcacgatctcgcgcccctgggcgtcgacgtaggtcacgccggtggcctgcctgccgtcgctgtcgaggttgaccttgagcacgttgcagttggcgcgcagttcgaacagcggggtctggcgcagcgccggcaggatgttcaggttcggcgaggccttggaatacatgtagcaggcgtagccgctgcagaagccgcagaagttgcacggccccatctgcaccccgtaggggttggtccagggccccgaagcgttggccgccggcaggtcgtaggggtgcaggccgagttcctcggcggccttgcggaacagttgcgcggagtacacctggcgcagcgccggcagcgggaagtcgtccgagcggtcggcggcgaacggattgcccttgccgaccacctggcccttgaccgtatgcgcggtgccggaggtgccgaagaccttctcggcgaaatcgaagtgcggctccagctcttcgtagctgaccccgtagtcctggatggtcatgccttcggggatgaatttcttgccgtagcgttcctcgtaatggctgcgcaggcgcagttcctcgggcatgatccggaaatgcacgccggaccagtgcaggccggcgccaccgacgccgtcgccgggaaggaaggcggagagctgacggtagggcagcgcggtgtcgttgatcccgtggcggatgctcacggtgctcttggagagattctggaacagcttgccgcgtgtgttgtaggtcagctcgtcgagggtgttcgggtaggcgccgtcgggataggtatcgcggttctcgccgcgctccagcgccaccacgttgagcccggcctcggtcagctccttggccaggatcgctccggtccagccgaagccgaccaccaccgcgtccaccggtttgagtgtcgtcgccatgttcaacccctctcgccggaaatcgccaccggcgggaagggatacttctcgccgcggtcggcccagtccatgaagtcggcgcgggcgccggggaaaccgaccagcttccagcccaccaggccgcgattgccgccgtgctgcggatcggagaagaagccttcgtgggcgtnnnnnnnnnngccttcgtgggtgttttgcagcaactggccgaagagcagcttggccggcaggtcctgcaggtcgatctggccggcttccaggcgttgcaggatgtcgtcctgcgccgacggctccagctcggcgaacggcttgccctggttggccttgctcagcgttccagggcggcgatgccgacccggtagatgtcgcgtggcaccagcttcaactgatggccgaactccggcgcggcgtcggtga

SEQ ID NO: 336079 - DNA, 348 bp, Pseudomonas aeruginosa
  misc_feature (125)..(134): n is a, c, g, or t
gtgctggatgcgctcggccacccgcaggttcggccacaggccctggccgtggtcgtaggcccgcaccgcggcgtcgagcgcggcgagcgccgcgtcggcgtcgagcagcggggtgctgccgaggnnnnnnnnnncgtcaacgcccagtgccagcgcggcccggacagctacccgttcaacggccggaagaattcggcggaaggcaccctgtcggtccatgacgcgctgcgggtgttctccatccgcaccctggtggcgacccgcgacaccgaggcgaacaagaccctggtcagcgagatcatccgcaaccgcgcgtcgaacttcctcaccaccgactacatcttctga

SEQ ID NO: 336080 - DNA, 1074 bp, Pseudomonas aeruginosa
gtgcgaggcggcggtgcgcgcattgcgccagtggcggtcgagctgcttgccgcggccgacggcggaagcgccgctggcgtcgaacagctcgctggtggcctgcaacaccagttcggcgacgatcgcctgggccttggccgattcgatctcggcggcgatattggcctccttctccgcctgcgggtcgcctacgaagcgcgccaggtaggcgcgctgggccgcttcggcggcgcgcagggtggccgcctcggcggcgtagacgcgcgcggcgatgcgcccgaccacctgctgcacctggggatcctggctgactcgcggggcattgccgtggctgtagatacgggtccgcccgcgcacctcggcggcgacgtcgcgcaaggcggcgcggccggtgccggccagcaccgcgagcaggaccaactggtagaacgcggtctggtacttgaagcggctggcgaagtcgatgaggttctcttcctccacctcggcatcctcgaacagcgacgtgccgctgccggtggtgcgctggccgaagccgtcccagtcgtcgctctggcgcacgccgggctggtcggtgcggatcgccgcgatcacgtcggcgccggtgtcgtcgcgctgggcatacagatcgatccagtcggagaagaggctgccggtgctgtagtacttgctgccgttcaccacccagcgaccgtcgtccttgcgcgagacgcgggtgagcacttcgcccagccgtaccgaaccgacctcggtccaggcgcagccgaccaggtcgccctcgacgaagcgccgcagccaacggtcgcggccagggccgggctcggcattgagacggtcctcgacgaaggcgaagtggccgcgcagggcctgggtgatgttggagtcggcctcggccagttcgatcagcaactgaaccaactgcggcagcgaggcgccggcgccgccgtgctcgcgcggcacgcgcacggcgccgaagccggcctgcttgagccaggcgatcgcctcgtggggcagttcgcgttgccgttcgcgctcgacggcgccttcggcgatgcgcgcgaagatcggtcgtaa

SEQ ID NO: 336081 - DNA, 633 bp, Pseudomonas aeruginosa
atgaacctgcccgccagcgatggcgttgcccacctggaactggccgccggcgtgcataccgaacccgatgatctgattggccagcgcgtcgcccacaacctgctgcgcctgcgcggcaagcgcaatctctcgctggacgccctggcgcggatttccggtgtcagccgggcgatgctggcgcagatcgagtccgggcgcagcgtgccgtcgatcaaggtgctgtgcaagatcgcccagggtctcaaggtgtcggtggcagccttcctcgacgatcgcgccttcgccggtgtcgccgtgctgccggcgcaacagagcaagcgcctggtcagcgccgacggcgccttcaccagccgcgcgctgttccccttcgatgtggcgcgccaggtggagttctacgaactgcgcctgcgcggcctcggccaggaagacgccgaagcccacgcccccggcacccaggagaacctggtggtggcgcagggggtactggaagtgcgggtcaacgaggagcgcttcctgctcgccaccggcgactcgatcctgttctacgccgaccagccgcacagctaccgcaaccccgccgatagcgaagccctggcgtacctggtgatgacctacccggagcgcctggactga

SEQ ID NO: 336082 - DNA, 486 bp, Pseudomonas aeruginosa
gtgttgcctgtttccgactcgccccacaaggaccaactgcacctgcaactgggtgtgggcctgagcgcggagcagatggcggcgctgacccacgacatcgtgtggctggaagaggtcgaggtgaacggcgagaaggtcctcgcgccggtggtctacctggcccaggcggagggtcggttggcacccaacggtgcgctgatccagggccgcgacgtgaagctggtgagcggcggcgacctgcataacgtcggcaccctgcgcgcgcggaacgacctctcggcgacggccgacaacctcgacaacagcggcctgatcgaggccggcaagcgcctcgatctgctcgccggcgactcgatccgcaaccgccagggcggggtcatcgccgggcgtgacgtgagcctcaccgcgctgaccggcgacgtgatcaacgaacgcagcgtgacccataaaggggacagatttattttccctactctaattttctaa

SEQ ID NO: 336083 - DNA, 1212 bp, Pseudomonas aeruginosa
atgataaataagagaaatgctatttttctctcaatgattctcatcttttttagcatcgcctgcattggtagtgcaggtgtgagagtgtggaatttttacactttgtttgactcggggaaaattgctgaaaattttcgagcaatgccgagactgtttaactcggtcccaataaagaagagcggagcgactcatttttttgaaaaaaacctcagggatatgcctggctcatttagctttcaaggtcacgagattggctttaaagactggttggcgagcagcaataccaccggccttatagttctcagtgacgatcgcattgcctttgaggaatactacctgggcaatagtgcgaaaagccttgctattggctggtcgctaagcaaatcactaatgtccctcttgattggaatggcagttgatgaaggatcaatacacagtctgctagatcctgtgaacctgtacgccccacagctttctgctggcggatatgcgggtgtttctttgagagatgtgcttgagatgtcatcaggaatagctttcagtgaggactacgggaattcggactccgatatcaaccagctaggtaggactatagcgcttggcggatcagtaaatgaaaaagtgagttcattgagaagagaagatgccccggggagagtgcaccactacgttagcgtagatacccaggtgcttggtatggtcttattgggcgcgactggtatgggcccctcacagtttatgaatcaaagactttggccccaactgggtgccgaatgtgaaggtgcttggttaacagacgatcggggcacagagctagcattcggtggggtgaacctttgcctaagagactttgcacgcattggtctattatttcttcatggcggtcgcagcctgactggaagtcaaattgtaagtgctgagtgggtcaaggcatcaaccaaacctcggagtgctcacttgcgtcctggacgttacatagaggatggtgagccaaatcttgggtatggttaccagtggtggattccagaaggcaaagaaggggagttcttggctatcggagtgtacgggcagtttatttatgtaaatccacttaggcgtgtggtgattgcaaagacctccgcgtatgtcgactacaacgttgacggcatccgtatggagcatgaggcacttgcagcgttcagggctatatcaagaacagtaggggtgaggtga

SEQ ID NO: 336084 - DNA, 2412 bp, Pseudomonas aeruginosa
atgagcgaaggtaaccgcagtcgatcgcgcctgctgccgagcctgctcggcctgttgatcctgctgtccggcctggcgctgctggccggcggcatcaagctggcgagcctgggcggctcgctgtactacctgctggccggcatcggcctggccctgagcggactgttgctgctgctgggcaagcgtgcggcgctaggcctgtacgctctggtgctgttcgccagcaccgtctgggctctgtgggaagtcggcctggactggtggcaactggtgccgcgcctggctctgtggttcgtcttcggcctgctgctctggctaccctggttccgccgcccgctgctggccgacggtccggcgccgctgggcaccgcggcgctgggcgtggcggtggtcctggccggcgccgctgcggtgggcagccagttcaccaatccggggcagatcgtcggtcgcatcgaccgcgacagcggcatgaccagcaccgccccggcgatgccggacggcgactggcaggcctacgggcgcaccgagttcggcgaccgctactcgccgttgaagcagatcaccccggccaacgtcggccagctcgaggaagcctggcgcatccgtaccggcgacctgccgaccgccgacgatccgctcgaactgaccaacgagaacaccccgctgaaggtcaacggcatgctctacgcctgcaccgcgcacagcaaggtgctggccctcgacccggacaccggcgcggaaatctggcgcttcgatccgcagatccagagcccggtaggcttcaagggcttcgcccacatgacttgccgtggcgtctcctactacgacgaagagcagtacgccaggagcgacgtcggcgcgccgccggccgcgctctccgaggccggcaaggcggtcgccgccagttgtccgcggcgcctgttcctgcccaccgccgacgcccgcctgatcgcgatcaacgccgacaacggcaaggtctgcgaggacttcggggtcaagggcgcggtcgacctgacggccggcatcggtccgttcaccccgggcggctactactccacctcgccggcggcggtcacccgcaatctggtgatcatcggcggccacgtcaccgacaacgagtcgaccaacgagccgtccggggtgatccgcgccttcgacgtgcacgacggcaagctggtgtggaactgggacagcggcaacccggacgagaccgagcccctggctcccggcaagttctatacccgcaactcgccgaacatgtggtcgctggccagcgtcgacgagaagctcggccaggtctacctgccgctgggcaaccagatgcccgaccagtggggcggcaaccgcacccctggcgccgagaagttcagcgccggcctggtggccctcgacctgaacaccggcaagctgcgctggaactaccagttcacccaccacgacctgtgggacatggacgtcggcagccagccgaccctgctcgacctgaagaccgccgatggcgtcaagccggcgctgatcgcgccgaccaagcagggcagcctgtacgtgctggaccgccgcgacggcacgccgatcgtgccgatccgcgaagtgccggcgccgcagggcgcggtggagggcgaccataccgcgccgacccaggcgcgttccgacctcaacctgctgcgcccgccgctgaccgagcgcgacatgtggggcagcagcccgttcgaccagatgctctgccgcatccagttccgctcgctgcgctacgagggccagtacaccccgccgtcggagcagggcagcctgatctatccgggcaacgtcggagtgttcaactggggcggggtgtcggtcgacccggtgcgccagatcctcttcaccagccccaactacatggccttcgtctcgcagatggtgccgcgcgacaaggtgcccagcggaagcaagcgcgagggcgagaccagcggcgtgcagccgaacaccggcgcgccctacgcggtgatcatgcatccgttcatgtcgcccatcggcctgccgtgccaggcgccgtcctggggtgacgtggcgggtatcgacctgaccaccgccaaggtcgtctggcagcacaagaacggcaccagccgcgacaacaccccggtgccgatcggcctcaccgtcggcgtaccgagcatgggcggctcgatcaccaccgccggcggcgtggccttcctcagcggcacgctcgaccagtacctgcgcgcctacgacgtgaaggacggcaagcagctctggcaggcgcgcctgccggccggcggccaggccacgccgatgagctacaccggcaaggacggtcgccagtacgtgctgatcgtcgctggcggacacggctccttcggtacccgcatgggcgactacatcatcgcctacgccctgcccaggcaatga

SEQ ID NO: 336085 - DNA, 903 bp, Pseudomonas aeruginosa
atggcagcggcgcaccacttcgcgggcatccggatcgccctgcaacagccccaggctcagttgcctgccggtcagccggcgcaattcggcgatcgcctgcacgcccagcagcgaatgcccgccggcgctggcgaagccctggtcggccgccagcggccggccgagcacccgggacaacaccttgagcacccgccgcagctccacgctgtcctcggcctgggccgccgcgggcggcaacgccggcactttccgtggttgggacgcgcgcctgccggcggacgtggagctgctggcgatccagtatccggggcgccaggaacgccaggacgagccattcgtcaccgatgtagaggccatgctctgtgccatcgacgacgcgctcctgccattgctcgaccgtccgttcgccctgatcggcgccagcctcggcggcatgctcgcctacgaactggcggcacgcctggaaagcctgcacggcctgcgcgccaggcagttgttcgtgatcagcagccgcgctccggggccggacctggaatacccgcgcttccatgcgatgggcgacgccgagttgctgcgaaccctgcgcgagtacgacgtgctgccgctggaagtgctcgacgacccggagctgcgcgagatcagcctggccaccctgcgcgccgattcgcgcctggccgccgactatcgctaccgcccgcgcgagccgctggccataccgatcaccgcgatcctcggcgagcaggacccgggcgtctccagggtggccatcgacggctggcggcggcacgccagccgctacgagctggagaccctggccggcggccacggcctggtggtgacggcggcggaggaggtctgcgcgatcctgcggcacgtcgtcctggtggaagtcgacgaagttga

SEQ ID NO: 336086 - DNA, 390 bp, Pseudomonas aeruginosa
ttgcaaaaggccggctgctacgacccggggctggaaatccttacgccgcggccgtcctcggtggccctcggcggcgaactcttcgtgcagttgctggccagccagccgcaggtcgacggggtgttcttctgcaacgacgacctggcccagggcgcgctgctggaggccctgcgccgtggggtcaaggtgccggaacagatcgccgtgctcggtttcaacgacctgccgggttcggactgcacggtcccgcgcctgagcagcatccgcaccccgcgcgaagccatcggccggcgcgcggcggagcagttgctggcgctgatcgccggcaaggaggtgcgcgatagcgcgctggacatggggttcgagctgatggcgcgggagagcacctga

SEQ ID NO: 336087 - DNA, 201 bp, Pseudomonas aeruginosa
atgagcctcgccagggaagatcttttcaccgacgaggcttaccaatgcctcgttggcgccagcagccagggctgcggtacggaaatcgccgccggcagcctcgccgatcaacccgccgacaatcgcatggaccgctaccttcttgggaaggccgctgccgaccaacgcatctccgaccttgtcgaagatcgcgccgcttag

SEQ ID NO: 336088 - DNA, 978 bp, Pseudomonas aeruginosa
atgcgagctgaagtgatgcagcactacgggctgagcacccccttgaatcaggcgggctatttcgaaaccgcccatcatcagcagttgatgagggacatccgcggcgccatcttcgaaggccgcctgatcgccctgtgtggcgtaatcggcagcggcaagacggtgatgctgcgccgcttgcagcaactgctggaggaggaaaagaaagtcacggtgtccagatcgatggccatcgagaagcacaacatcaagctggccaccttcatcgccgcgctcttctatgacctttccacccagaaacaggtacgcattcccacccagatcgaaaaacgggatcgcgaactgtacgagctggtgaagaagagcaagcgccccgtggccctgttcgttgatgaagcccatgacctcaatggccataccctgaccggtctgaagcgactgctcgaactggtcgaagacgacagtggccggcgacgtttgtccattgttctggccggccatcccaagctgcgtaacgatctacgtcgtcccacgatggaagagattggctaccgcaccgacattttctcgctcgacggcattgccgggagtcagcgtgagtatcttcattggttgttggacacctgcacagaaggacgtgccagggctgaagaaatcgtaaccgaagaagccctcgacctactggccagccggttgcgcacgcccctgcagatccagttacatcttggactggctctggaggccggttaccagaccggcgaaaagcctatttcggcagagctcgtccagtccgtactctctcggcaactggatgacttggaacccacgctcacacgccacggctacaacgcgaaaagcctggcagagcagttcgatgccaaacctgccgaggttcgtgcgttgttcagcaatacgttagatccggcacgagcggctgagcttcgggagaagatgcaatcggccgggcttcccgtgtga

SEQ ID NO: 336089 - DNA, 486 bp, Pseudomonas aeruginosa
atggccggcgactacgtcgtgctgctctgggggctgttcgacgatgagcttcatgccgagttcgatggcgagcggttcggtccttactacccggtgtccggacccattccattgcaccgctaccgggctttcaagcgcagcaaggcagacgagcgctcggctcgtatccgatctctcgcggaccagctggggctgccgatcgcggcgctttccggggaggatgtacgactagagcccagttctgccacctcgacgctccccatccggcccttcgatttcgagccccaggaatcccgattccccagcagcattgcggccaagctggctatcgccgaggaactggcaatgccgctggccaagctttcaatggatgaccgcgcctacatcgaccaggtgctgagcgagaccctggcgcggcgggtggtactggagcgcgtacgggactatttccgtcaccggaaaccaggagaagagcatgcgagctga

SEQ ID NO: 336090 - DNA, 258 bp, Pseudomonas aeruginosa
atggaaagcaaaaaaatatcagattatacagaggctgagtttttttcactaatcagcgagctattcaataggagtttcagcagtgaaaaggagcgtgatgtggtggtttacgctatcgttaatgcggcgcaacaccccgatgggacagatattatcttttacccaaaagaagatgaagaagatagccctgaaggcgtattaaaaagaatcaaggagtggcgtgccgctaacggccttcctggcttcaaggctggctaa

SEQ ID NO: 336091 - DNA, 972 bp, Pseudomonas aeruginosa
gtggcccgcaagacccctggtgcaatgttggggcaggtagccgctgtcgtcgccaccatggccgtcagttccttctggccgaagctgaacaacggtgaacggcaagcatccttcgccattccggtctcggaactcgcaccgcccctggcggttgactggcaagccattgccgccgccaaaggaacggtggacctgccttaccggctgaaaaccctcaatgtcgatgggtcgattcaaatcatcgccgtaccgaccgagccgggtagtgcggccgtccccgtcagggcactgaccctggactccgcctcggggacctacaaatacacggctaccggccctggcggcggtaccatcctggttaccccggatactccacctggccagatcgatccgtcgtcttcgacgccggcagtgccccgtggtccgctgatcatgtccggtaccctgctgattcccaaggaaccgcagatcgagtcctatccagaacttgaccaacgcgagttcaacgacggtatctacgtctacccagaagacaccggtattccgccgctctatattgtttatcgagatccgcgcgacgaaccgggcgttgctaccggtaatggccagccggtcactgggaactggctggccggtgcctcgcaaggtgacggagtgccgattccgagccaaatcgccgatcagttgcgcggcaaggaattcaagagttggcgggattttcgggagcagttttgggtggctgtggctaatgatcctgagcttgttaaatacttcagaaaaaccaatgcaaagggtatgcgtgatgggctttctccatttacccctaaagctgagcaagcgggaggccgggataaatatgaaatacaccatgtcgtccaaataagtcagggtggagctgtttatgatattgacaatctccgcgtaatgactccaaagatgcatattcaagttcattcgaacaaaggaaaatag

SEQ ID NO: 336092 - DNA, 1029 bp, Pseudomonas aeruginosa; identical to SEQ ID NO: 328357

SEQ ID NO: 336093 - DNA, 675 bp, Pseudomonas aeruginosa
gtggcttcgctgggcaacttcccctactacctgctgagcaacgacccgcgggtcaggagcatcgccgacttcggcgccggggatcgcatcgccgtgccggcggtgggggtttcggtgcagtcgcgcttcctccagtacgccgcggctaagcagtggggcgacaagcagttcgaccgcctcgacaagtacaccgtggcgctgccgcatccggacgccaccgccgcgctggtggccggcggcaccgagctgaccgggcatttctccaacccgccgttccaggaccaggcgctggccaacccgaaggtccacgtggtgctcgacagctacgagctgctggggccgaattcgccgaccgtgctgttcgccacggagaagttccgccaggacaacccgaagacctaccgggccttcgtcgaggcgctgaaggaagcggcggccttcgcccagaacgacaaggcggccgccgccgatacctatatccgggtgaccggggcgaagatcgaccgagccgcgctgctgaagatcatcgccaatccgcaggtggagttcagcgtcacgccgaagaacacctatccgctggcggagtttctctaccgggtcggtgcgatccgcaacaagccggcctcctggcaggactatttcttccaggacggcgcgccgttgcaggggagttga

SEQ ID NO: 336094 - DNA, 372 bp, Pseudomonas aeruginosa
atgagtacatctagcatccaggcactggccagcacctgggcacaactcgccaaagatgtgggattcccagccaactacgacggcacgtcaacgccagaaacacatcgggcctgcggagtaatccaagagtggattcgagaacacatcgtcgccaccaacgacatgcgtctgttcggcctgctgcacctactggggcaggcgtctctgcgcatggagcaagtcctgtggccggaagactatgagcgaatgacccgcgaggtcgaggaagctctccgtgaggcccacgcccccaaccccaagtcctacacccacgaagaagttatgcaggcgatgcaggaacgcatcgaccagacacgagacaaaccatattga

SEQ ID NO: 336095 - DNA, 327 bp, Pseudomonas aeruginosa
atgagtcgcagccgccgcaaaacgcccatcgtcgggcacacgacctgccgtagcgagcgcgaggacaagaagctctggcatcagcgctggcgaaccggcgagcgcaccgcgctggccagctcgtcgccggacgcactgagcgctcatctgccgctgctggagaatcaggtcagcaacgttggatcaatgggcaaggatggtcgctcctactggcccatcaaacgccaggacgctacggcggatcgcatcgccaacttcaagggacggagcccgcaagagcgggccgccctgaaaaagcgactgctgcgcaagtggatgagcaaatga

SEQ ID NO: 336096 - DNA, 318 bp, Pseudomonas aeruginosa
atgccctgctggaagctcaacgaccgcttcgaggtcgccgggatgtccctgagggtgcaggagtccgggcgcaccggctggtactaccgggtgctggaggaaggcgtggtggcggctggcgatatcctgcaactggtcgaacggcgccatccggactggtcgttgttgcgcctgtccgaggtgctgttcgacaggcgggccgacgccgagctgctgcgccagtgcctggcgctgccgctgacgccatcctggcggcgcaccctggagcggcgcctggaaaaaggccaggtcgaggacgagacgcccaggccgacctga

SEQ ID NO: 336097 - DNA, 312 bp, Pseudomonas aeruginosa
atgggtgagtgcgtcatcgacccgagagccggcatcgactgcgggaggtgtagtgacggtggggttgctgattttgtcctgttcttccagacgcttgtagatttcctcgatgcgcttggcctcactttccgatacgacaatggcctgaagccgcgcattgatttcgtcttgacgctttttctccgcctctgcgactcgcttggcctctgcttcggccaagcgttgcagttcggcttttcgctgagcctcggcctggcgacgagcctcttcggcctgccgtcgggcttcagcttgacgttgctcttgcgctaa

SEQ ID NO: 336098 - DNA, 264 bp, Pseudomonas aeruginosa
gtgcgccattacgcttcgccggagtcggccctggccgatcttgccgagctgaaggcgcagggcaaggcgattcgtgcgatctacgcccaggatcgtgacagcgggatcaagctgctggccaaccaggcgtggttcgtccgcgacggcgagggtcgcctcaacgccttcctgctccgcgagcaggcccaggactatgcccgccgccatggcggcgaggtacgcgactttgccgccgccagccagcaggcgctggcgctccgctga

SEQ ID NO: 336099 - DNA, 273 bp, Pseudomonas aeruginosa
atggatattaaaaacaacctgagcgattatactgaaagtgagtttctagagattattgaagagttcttcaagaacaagtcaggactaaagggtagtgagctagagaagcgaatggataaactggttaagcacttcgaggaaattacttctcacccacgaaagagtggggtaattttccatccgaaacctggatttgaaacgcccgaaggcatagtaaaagaagtcaaagagtggcgtgctgcgaacggcctccctggcttcaaggctggctaa

SEQ ID NO: 336100 - DNA, 342 bp, Pseudomonas aeruginosa
gtgcccctcgaatgcgtgacccaggccctgcgccagcgcggcgccagcggcctgccgatccgcatcgcctgcggcgcgcacaacggtcgggcggccccggcggtggatgccggggtgcgcgtcgaagccgacttcatcccggtgcctggcgcgcgcctggacctgacgctgtggctggaagaccagccgcagggttggctggccgtctggaccggggccagcgcgatcttcgacctgcaccgcatcgagcgcctgcaccaggcctgggagcggcgcctgctggcgaatgccggcgaatctacctcgaaacgcatgtcgccggagggctgcaacgcttcctga

SEQ ID NO: 336101 - DNA, 126 bp, Pseudomonas aeruginosa
atgtcggccggcctgcagagcgatggcaagaagctggactgcgacgacatggcggcgatcctcgacgcctacatccaggccgcccacgcccagcgctacctgcaacaactgcgcagccagggctga

SEQ ID NO: 336102 - DNA, 189 bp, Pseudomonas aeruginosa
atggccgacctggcgcaggcgccactccacggactgctccggacgcaggccgaccgccagcggcaggaggttgacgaagcagccgaccagcccctgcatttccaggcgcgaacgcccggccagggccacgccgacgagcaggtcgtcgacgcccagttcggcgccgagcacttcggcgaaggcctgtag

SEQ ID NO: 336103 - DNA, 1632 bp, Pseudomonas aeruginosa
gtgcaagttgaaacatgttttggggggctgtgtttttatcccttggatcctaatggtcctaaattttttggattttctgagtatctggccggtcttgcccttatggttttagcttggaccacggccgatgtcagatataagttcagaattcaagttgctcccgtaccgctgcaaactataactttttatgctgtagctgttgttggtctgttgacgctattaacggacctatggcgtgcaaatggatggctgatccccaaaggacaattttttaccctggcttcctggcaagcttttttaggaggagtatttcttacaacgtttcttctctggtcattttttgcattcattcgtcccccaaagttcagctggtacaacggtacgcgctttgctaatagtttattgaattttgtggccagaggggctccagccgagttaagtatcatttccgatgaaatttcccgttcaataaagcctatcatagaatatgctgtcggtaatggtagtaacttacgaagtgcaaaaattgctgcacaggacatcctatctatcatcgctgataagcgtatgtgtcaagctattgtagagtcatctcctataactgcatgggctttgtataacgagattcgcatttcgagaaaatatcaaacgccagcaagagtgttttcaagaaatataacaacccaagcaattagctttaaggagtcattcatatatcatgagagtaatgagtatgattccggatttattggtcttcataaaccaattagtcaaactatgtttggcgactatcaaatggcagaatgcctagggctttatactcgagtgtataggccttcctgggatagtgaacaatggagtgcatataccagaattttgctgataacgctaagagactatatagggaaccattcgggtgaggtttcacttgttttaattaatgctctggataatatctctgattcattaaatgaaatccataagattaatggtagtgagtctttctttgatgccccatcatttaagaatctcatggtagtggtgaagtttataaaagaagttgcaaggcttttatctaaagcctcccccgaatcatactttcttcagaaatatgctgcgcataattttttagatgaatttgctaagtttatttataatattatttgtcgtgtatcttatataagaggaccttcgagaacttgctggacgatacagtttagtgtgctatggggagatatgtttggttttggagacttcaactccgctgctggtaagattgttcggtttaaagttcatatgttggtgtatcgtgaagtaagtcgattgactcagtttccaaattttacaggtgcgcgcctgcttgggctttgtttgaatgttttaagcatggataagaatggagtcgggttagataaggaagataaaggattgcagcaagcgattttgaactggacaaagagcaactatgctaggctttatagagagaacagagaattggccgaagcttgtttaatagatggcattgtttatgaaaaagaagaaaatagattgacgaaggagtaccacggctcacctctaagaaaagaaaagaagtttttacacctttctctagattcagtagtagaggattag

SEQ ID NO: 336104 - DNA, 525 bp, Pseudomonas aeruginosa
atgctgtcaggcaaccccatccatgcgctgctgaccttcttggaaggttatctgctgcaaacggcacagcaccctagcgaacccttcgaccgcgccctgatgctgatcgatggcctcatggacgccggctacctctcccagccggaagaatcctatctgaccgacctgcgggttgaagctctcgcctggggccgtgctcgccaagataaggaggaagctgaccatgtcgtctccgaattacttgcgccaaacccacgcctcggactgcgcctgctctgtgtgctggtccgcaaggcaggccatcccattgcacaacccgtcgccgtgtccggactgccggccccctgggctgccctatctggaagatggccgctggctctgccgtccccgttccttctgcgcgaaacacgacccgtcccggcgtccgccgaagtactggcacgttgtgtacgacagcgggaaacccacgcccttcgtgcccgtgcgcgaagcattccaattggagggctgacccatgctcgctga

SEQ ID NO: 336105 - DNA, 198 bp, Pseudomonas aeruginosa
atggagttcattcgaatggcctacaacgttccctgcaagcgaggcggaaaggtcatctaccgaggtcgcggcaccgaggagcacgggacgataacaagcgcaaagggcgcccacctcatgatcaagctagacggcgaaagcaggccaaggaggttccacccgacctgggcgcttcagtaccttccggagcaggcatag

SEQ ID NO: 336106 - DNA, 1092 bp, Pseudomonas aeruginosa
atgcaaattgaaagagagggtcgcgtgtccttcggcgacgcccgcatctatatcaccgaggaaggcatccctcgcgactggaatgcggccaaggcgtgggagcacgactacaagaagcaggtcttcaagcgcgtgctccaaaccctgaaccgtttgggctggacgtgcacggtgccggccgtgaacccggaagaccgaaagcgctacggcttcggcatcgcagacgagtcggcccgccgccaccggctctgccacaagggcgacctcaaaggcgagttggaaatctccgggcactgcataaaattcgagatgttccagaacgtgaacgcgccggatcggcccgaccacgacgggcgttaccagtcagacaaggaattccacatgccgtacctgatgcggctggaaatggagcgcacccgccggcgcattcgggactacctctgcaacgtgttcaccggctaccggttcgagcaggagaacagtgggcgcggtagcaagtgtggcgtgaatggtctgaccgcactggagttcgtccaagcctgctacgacgattcgtgccacttcaagggcgacctgaccaagtacgagatctccgactacaacaacaagtcggcggacaagctacgggtcacccacggcgcacgcgtctggaccaccgactaccggggccggatcatcaccggaaccgccatgtacaacatcaacaacatgtggtgggtcgtgtgcgggaagtatgcagtcttcaacaaggccagttccgaaatttgggtgaagaatcccggcgaacttcgccgcaagcggaacgagctgacccgccgtaagcgcctggaggccgagctagccagggccacgaagcagatgaacttccggcgcgccgaggtgctgcgagacattctctggccgaaggatgaggcgctgtacctgctctggcacaaggagcataaggcctatcaccgctcaggcttctccggctactcctcgaataccgtcgacgccgggcgcttcacccgctccgagttgaatggctgggtgaagggcggcgcgatggaagacgaccgccaccgcctcgtccccattgaggccgccgcatga

SEQ ID NO: 336107 - DNA, 1680 bp, Pseudomonas aeruginosa
atgaaccatcaccaggaactcgacttctgcaccatgtgcagcggcatcgaggcgcccagcgttgccctggagccaatcgggttccgagcacgctggttcgccgagatcgaaccattcccatctgccgtgctggctcaccactacccaagcgttccaaaccatggggacatgacaaagctcatccgacgcatcctcacaggggcgatcgaggctcccccattggctattgccgggactccatgccaagccttcagcgtcgcaggttggcgcgaaggcctgaccgacccgcgcggcgccctgaccatcaagttcgtggagaccatcgatgcaattgaccttgttagaacccgccgcagtgagcccgagtgcatcgcatggtgggagaacgttccaggcgtcctctcggacaaggaaaacgccttcggctgcttcctcggcgccctggtgggcgaatccgaagaactccagccgccagggggcaaatggaaggacgctggttgtgtgtatggacccaagcgaacagccgcgtggaggattctggatgcccaatatttcggcctggcccaacgacgccgtcgtgtgttcgttatcgcaagtgctcgagcaggattcgatccatgcgaagtacttcttgagcgcgaaggcctgcgcagggatcatccgccgcgccgaggcgaggggcaagaccttgccggacgcgctcctttcggccctgcgctccagtgcggctgcgggtacctcttcgacctgagccttggtcagtggggatgtccgaactgcgagggcgacgaagggcctgccgtcgaagtaatggccggcgtccccgccttcggtggggagaaccagagccggtctctattccaggccggcgcactgaccgcgcattgcgttcggaacgacttcgcatccgagacgttctgcgtggcgccggccgtggccggcacccttcgcagcagcgacggcggatcggatgtagatcatgccgcagccaaccacctggtcgccggcaccctccaggcgaacgggaaggcagccggcagcgcgacacaacaggacgcagagtcgggcctgctggtcgtacacggaacacaggaccctgacgtactcgccaatatcgcgcacccccttggccggaaccacgggcaggagaacgcggtgtttgcctttgccgagaacagcaggtctgaggtgaggctggagggtggggatgggcagatcgttggaaccctgtctgccggcggtggaaagccaggacagggccagccctgtatagcgttcagctgcaaggaccacggcgcagacgcgggagagatatcgcctacgctccgcgcaatgggccacggcgccagccatgcaaacgctggcgaccaggtcgcggtctgcatcaccggcgagatcacccacaccctgaaggccgaaggcttcgacgccagcgaggatggaacggggcgcggccaaccgataacacctgaagctgctggcgtccgtcgcctcaccccccgggaatgcgagcggctgcagggattccccgacgactacacgctgatcccttggcgtgggacgcccgctactgaatgccctgacggcccgcgatacaaggcgatcggaaactcgaaggctgtccctgtcgtgcgctggatcgggcgccgccttaaagctcatctggagaaactctcatga

SEQ ID NO: 336108 - DNA, 960 bp, Pseudomonas aeruginosa
atggcggccaaatcgttcaagcaaatggtttcaacgaaggagatccggcgcgcggatgcatacaaggtccgcctcgaagacctccacgaagagccaggcctcaactggaggcgttacaccgatgcgttccacaagtctgttgaggagctcgcggaactcatcgccggcgggatggaggtagatcccctcgaggtgcgccctcgcgaagagggaggcgtctggatcgttacaggtcatcgccgtacaagagcttggcgcctgctcgatctctccgggcgcctccagcgtgatccgaagaccggcgagttcctcgtcagcgtagttccttcgaaggcaaaggaccggcgccagcgcctggcgcgcgtaagcaccagccaggaccagttcgagctcacccctctcgactatgccgaaggctgtcgccgaatgcatgaagaggaaggcatgacacccgcggagatcgcagcggaaatcaaaaagacgcgccagcgagtcgagcagttcttgaagctcgcgacagcgagcgagggggtgaaggctctcatcgacgcggggaaagtatcggcgtcgacggtgaccagattggtccgcaagcacggcccagatgttgaggggatcattttggagaaactggaggcggcgaaggcgcgcggcaagaagaaggtgactccggcggccatggctgacgctacggcttcggaagctgcggccgtaccgcatagctccgctctggcagcgccagcctctgctccagctcaagctcaagctcaagctcaagctcaaggtccacacgatgaactgatgaaggtagttcgcgagatcgtccgatccttccctacagaggttcgcgcaggtctcgccgagggcgccgaagcgatcaccctcaccaccagggcatcccacatcgagcgactgattgaactggtcgcgagtgctgaggaatccctcggcgaacagtag

SEQ ID NO: 336109 - DNA, 159 bp, Pseudomonas aeruginosa
atgagcacctacacgcagaacatgaacgcagccattcgtggcgagctgagccgcgccttcggcaaccgtagcagcaagcctcgcaagggtatgacgctgaccaggcatcgactgatgaagatggcccgctacctgtcgcgctccattcacggcaagtag

SEQ ID NO: 336110 - DNA, 189 bp, Pseudomonas aeruginosa
atgacaatcattcacgaatgcgaccggtgcaacgcgcccggtcgcgtgatcgagacgtccgacggattccgctgcgagggttgctacgaggaggcgcaggagcaggtgcgcagcgaggcgagctgccccgagtgtgggcgcctgggggtgacagctacaggaatttgttacgcctgcgagaacacttga

SEQ ID NO: 336111 - DNA, 705 bp, Pseudomonas aeruginosa
atgtcacaagttgcagtcatccaacaaggcccggtcctgacgatgagcagtcgcgagattgcggatttgaccggcaagaagcacaagaacgtcttgagggacattcgggagatgctggaggcgttgaggaaggatggctcagatttgagccacgtccgggaagacctcgactcccgcgggtacaccgagaatttccacctcgaccgagacctgaccgagaccctcatctctggatacagcgttcccctccggtaccgggtgattcggcgactccacgaactggagtccagccaggttccgagtatcccaacaaccttgccagaggcactcaggctcgccgccgatcaggccgagcagaaccatgcgttgcggctggtcatcagcgagcaggcgcccaaggtccaggccctggagcgactcagcggtgcagcaggaacgatgtgcatcaccgacgctgcgaagcacctcaagatcaaccccgcccggctcttcgactggctccagcagaaccgatggatctaccgccggagcggctcagcccgctggatcggctatcagccgcgaatccaagacggctgggtcatgcacaaggtgacggttctcggccgggacgaccagggcgacgagcgtgcggcgagccaggtacgcatcactgccaaggggctgtcggtgctggcgcggaagatcgaggagggcaagctgtga

SEQ ID NO: 336112 - DNA, 768 bp, Pseudomonas aeruginosa
atgagcacgatcatcatgtctgcctgctggccgctgcagggtctgacgccggcgcagaaggctgtgctgatcagcctggcggacaacgcgaacgacgagggcgtgtgctggccttcggtggcgaagatcgccgagcgcacctgcctgtccgaacgtgccgtgcagcaggctatcaaggtgctgaacgagtgcaaggcgctgagcattgaagcgcgccaggggcgctcgacgatgttcaccgtaacccccgcagcatttgcacccccgcagaaggttcacccccgcaggaaatgcacccccgcagcatctgcacccagaaccgtaatagaacctacaagggaaccatcagggaaccttttgccggccgattccggccagcccgatgcggagcgtgatcggcaacaggcatgccgagcgatctggtcggcgtatgcggcagcgtaccagctccggtacggaacccatccggtgcgaaactcgaaggtcaacggtcaggttcgcgacctgctgaagcgcctgggcgctgaggaggctccggcggtggccgcgtacttcgtcggcatcaacgacgcctatctgatccgcaactgtcacgacctgggctcgctgctggccagggcggagtcgtatcgcacccagtgggcgactgaccggcagatgaacggggccacggctcggcaactggagcgcactcaggcgaacctgaacgccgccaaggaggctgcggagagcatccgagaggaggggcgcgccaatgctttcctgtga

SEQ ID NO: 336113 - DNA, 798 bp, Pseudomonas aeruginosa
atgctttcctgtgacgaacaggccgacctggccgccgcgctggtggcgactgctgaaacgcttggccaggagatgagtgccaatgccgcgaagctgatggccaaggatctcgcagagtatccgggggaggcgatccgcagcgctctgcaggcgtgccgccgtgaattgaccggaaaactcaccctcgcagccatcctgcagcgtgtgcaggcagtcgatggccggcctgaaccgaatgaggcctgggcgctggcgctggaagcatcggacgagcgcgcaacggtggtcctcaccccggagattcaggaggcgctcaccatcgcggcgccgatcctggaggcgagagacaaggtgggtgcccgcatggcgttcatatcggcctatgagcgcgcagtgtctcgctcccggcgcgaggcgcttcctgtcgagtggcgtgtgtcccttggtcacgacgaggcaggccgtcaggcgggtatccagaaagccgccgcgctaaaccgcctgccagccgcagaggtggcgcgcctggagggggtggtggttcttcaactgccggccccgacagatgccggccaagcgatcgccgggctgctcactggcaatgcccctgccgaggtcacgaaggcaccgaaggggttcgcggaaaacatggcgaagctcaaggcaagcctggccgcacaccgcgctcagcgcgagcagaaagagaaggacgaagccgccaggcggcgcgccgatctcaacgaacgaatcaaccggcacaacgaggccatacaacagctacaggagtcccgttcatga

SEQ ID NO: 336114 - DNA, 207 bp, Pseudomonas aeruginosa
atgaagtggaaggcgctcaacgattatctggcggttagcgacagctccccgccctacaaggtttgcaagctcttggtcgccggcaaggctcactaccgggcgagcgttcaaggcgaattcatttgcgcccccgttgcgtcgtcgaaagaggctcaggctatttgcgagcgtcaccagcagatcatgtatccgcgggaggtggcatga

SEQ ID NO: 336115 - DNA, 675 bp, Pseudomonas aeruginosa
atgatttacgaaagcgtttcaagtgcagtcgtttcggcgctggcagcggactgcatcgacaacacaagcaagcaggcttggcaaaagctctatcaggccggcgagtctggtcgtcgtggtggggtaatggtatccgctgatctcaggcagcaaatcgattgctgggtgcatgctcgtttgcatgatcagctcattccgcgtcactgggccgctctggtggcgaagtacagcacccatcaggcaaagaaagtccaggcgatctcgcttttgcggtcggtggtcgcaacgccggcgcctgctcttttcctctacaaagctataacgacctgggcgattccgaagctgaagggggttcagccggcgttgcggaaaaccgtatctgtcgaaatcccggtggatggatcaccagaaaagcaggcgcgggcagtacgcgccgcattggaggcggagcgggtcaagcggaagcgtcttatggctcgatcgtctggaatgatcgtcctgccggatgagttctacgacatgaacacctgggatctcgatggaaagccagaatcgactcggcgtgaatggcgcaggaagatccatcgtgttctcgacgaaatggtcgacgaggcgctggtggcggcggagcagattcttaacgcggagggcttgctggccaaggatgcggcatag

SEQ ID NO: 336116 - DNA, 618 bp, Pseudomonas aeruginosa
atgaagatcactgccgatcaactcgaccgcgctactggctgcggtgccgctactgcctcgacttgggtcgagcacatcaacggcgccatggcccggttcgagatcaacacggctgagcgggtggcgatgttcctggctcaggtcggacacgaaagccagagcctcaagcgtctgatcgagaacctgaactactccgccgaattgttgctccgtacttggccgaagcggttcacgccggccgaggcgaagcagtacgcccaccagcccgagcgtattgcgaaccgcgtctatgccaacaggatgggcaacggattgccggatacgggcgatgggtatcgataccgtggccgtggcctgatcatgatcaccggacacgacaactacgccgaagccgcccgcgccctggcgctgccactggtggcgcaaccagagttgctggagcaacggacctgggcagcaatcgctgcagggtggtggtggaattcgcgtggtttaaatgatctggctgaccaagcccgcttcgagcggatcacgctgaagatcaatggcggctacaacggtgcagatgaccgtgcggctcgcctcgaatgggcgcgcgacgccctggctggtgcgtga

SEQ ID NO: 336117 - DNA, 363 bp, Pseudomonas aeruginosa
atggtcggtgacggccttgagcaacgcattgagctggccgacgcccaggcagcgcccttggtagggcgccagcaactggcgacgcgcgctttcgtcgaggtgcccggcgccttccagctcgatgcggcggatctcgaagcagcgctcgtcgtcgccggaggcatccgcagcggcgggcgctcccttgccgggcagttgctggagttcctccaggcgcttgcgctgttcgtccagcaggcgctgctggcggtcgcggatcaggtcgcggtcgccgggggaggtgaagggggcggcgctggccatgagcggcaggcacaggaagataaaggccaggcgatggagagccacgagttcattccttga

SEQ ID NO: 336118 - DNA, 1068 bp, Pseudomonas aeruginosa
atgatcgatgccgttgaccttttctgtggcgctgggggcctgacggctggcatgcgtgcggctggcatcgccgtgcgcgctggctacgatattgagcgccagtgcgagttcgcctacaccaagaacaacggtgctgcattcgtcgccaaggacgttacgagcctcggcgcgggtgagctacaggcctggtatcgcccgggccgctacaggttgctcgccggttgcgccccttgccagccgttctccacctacaaccagggcaaggacacccgtaacgaccgcaaatggccgctgctttatgccttccgccggttgatcgaagaaacgcagcctcatctggtcacgatggagaacgtaccggacgtgaccaagcatgaggtctatcacgacttcgtcactggcttgcgagcgcaaggctacgagatctgggagggccgtgttcactgcgtcgactatggtctgccgcagcagcgtcgtaggcacgtcctgctggcgtcgaagctgggacccattgcgctcatagagccgactcacaaaggtcagccggtcagcgtggaggaggcgataggtaaactccctgctatcgccgctggtgaatgtcacccggatgatcccctacatagagctgcagcgctgtcgtacctcaacctaaagagaatcgttcactccaagcctggtggcacctggaaagattggccgccgcacttggttgccgattgccaccgcaaggctagcggcaaaacctacccaagcgtatatggccgtatgaaggccgaagaccccagcccgacaatgactactctttgctacggcttcggcaatggccgtttcgggcatccgactcagaacagggcaatctccctacgcgaggcggcgattctgcaatcgttcccgaaggactacgtctttctcccacccgagaagatcaacttcaaatccgttggcaggatgatcgggaatgccgtgccggtgcgcctgggcgaagtgatcggcgaaagcctagtacgtcacatcaatgagttgggtttgggtcagcgaccggatcaggaaggccgaattcgtggctga

SEQ ID NO: 336119 - DNA, 423 bp, Pseudomonas aeruginosa
atgtcacgcagcgacatcatgagggcggtgaagcgtgcgcataccgcaccagaaatcatcgtacgccagatgctgcatgcactagggctcaggttcagactccagcgccgcgatctaccgggctctccggacatcgtcatgccacgattccataccgctatcttcgtccatggctgtttctggcaccgccatcctggctgccgctatgcgacgacgcccaagacccgtcaggaatactggctgcccaagttcaaggcaaatgtcgaacgggacgctagaaaagaatcccagctgcgggagctgggctggaaggtgttgatcatttgggagtgcgaaacacgcgatcacggagagctgatgactcgcctcagccacgaattcggccttcctgatccggtcgctgacccaaacccaactcattga

SEQ ID NO: 336120 - DNA, 765 bp, Pseudomonas aeruginosa
atgcagcaactgctgaaggcgatctctgcgctggtatcgatcgtctcctctgaccgggtcgctgcgctggcggctcggattagcaacctcgacgcttcgaaaggtggaagcctgagtgccaacgtccagtctgcgcaggcgagcggttcgctcaagatgctgatcgaagcttggaaagtatctaccatcgatggtcgaacgctggcggccatgctcctagctgccagcgacgcctatcgtctggccgagagcaaccagcaggtcgagctggtatggacaggtccgaccaccgagctggttcctgcaagaaggaccgagcaggcgctgatccaggtgatcgatgcggcgcggcaacggctgttcatcaccagctacgtcgcctacgacatcgaatccgtcgccagggcactgagatcggcggccgagcgggatgtccgaatcgatttcctggtggagatgtcgagcgcacaaggagggaaagtcagtacggacccaatcgccaacctgcgcaagatcgttcccaatgcgagcttctacgtctggaagaacaaagccgcggctttcgtgaatggcagcgtgcatgcgaaggtcgccgtcgctgatcgggcgctttgcttcatcaccagcgccaacctaaccggctatgccatggatcagaatatggaagcgggggttctcatttcaggaaagcagctgcctgaccaattgcatcggcacctggaggcgcttgtagtcacgggagtgatcgcaccagccggggtctga

SEQ ID NO: 336121 - DNA, 1863 bp, Pseudomonas aeruginosa
atggcgaacgaaaagaccgtcgtcggctcggtacgacccagccagttgttgtggacctatgggcctggcgccctcgtcgatctgccgaacctatcggtgatcacctcggggaccgatatctggcaaaaggagcgttgtgcggtcatcaccgaagcccgcctgctggctgcggtgcagcagcggctgggggcgcaggtcgaatcgctacgcatggcaccgttcagcaagagcgaaacctccgaccggctctccgccgaagccagggtcggcgtaccagttcgtcccttcccgcgctggctgcgctgcgtgaagtgcgggttgctggcgccttacgacaatggcctgttcgagctgaaagagaacccctatcgcccagagtcgactcgtttcgtacatgctggttgccgggggtcggacggtaaactcccacccaaagatgctgacgccgtccctgctcgtatgctgctggcctgccggaacggacatctggacgacttcccctggcactggttcgtgcatagcggtcccagtacttgccggggaaccctgcgcttcttcgaaagcggcgcttccctccagacggaaaatctgtgggtcaggtgcgacaaatgcgaagcagcaaagagcctggcacaggccttcggcaaggcgggtaaggaaaatctgcctggttgccggggcagacacccgcatctcgatcgcttcgaccatgagtgcgacgaggatgcacgagccgttctgctgggcgcgacgaacagctggttcccggtatccatatccgctctcgccataccacgaccgaatgcatcaccattgcagcagatcatcatcgaccactgggatgacttcgccgatgtcgaggatgtcggtgagctgaaggggaccatcaaggccctcacgaagcgcggcgaggccgccggcctcgacgctcacaccccagaggccgtctgggctgcgatcgaagctcatcgctcagggactgacgttgaagacgaggacgaaccggatatcaaggggccggagtggcgggtgctgaccgatccgaccccggtgagcgactaccccaactttctttccgaagaaacgccccctcccgcgtcctttcagtctgtcatcgctcgtgtgctgctcctgaaacgccttcgtgaagtgaacgcactgctgggcttcacgcgcgtggagtctcccgacgagatcggcgctgctggctcgggttcggtttgggcccctctgtcgtcgtcgagaccggactgggtgcctgccaatcaggttcatggcgaaggcatcttcatccagttcgacgaggctgcgatcgccgcctgggagcagaacccagccgtgcaacaggccgacgctcgcttgcgaggcgggcacaagggatggcggaacaggcgtaatctcagccctgccgaagctggctatccaggggctcgctatgtgctgctgcacaccttggcgcacctactgatccgcgagctggccctcgagtgcgggtacaacgcagcgagcatccgcgagcggatctatgcgagcgtgagcgaggacggcaaccaggccggtttcatcatctacaccgccgcagccgactccgatggcaccttgggggggctggtagagctgggtaaacctgagaatctggagcgactgttcacgcaggcactgcgccgggcacgaatctgctcctccgatccactctgcgccgagcacgatccacagaaggatcagagcctgcacgcagcagcctgccatgcctgttctttcgtcgcggaaacctcatgcgagtccagcaaccgatacctcgatcgagcgatggtcgtacccacggtacagaacgcggcgacagccttcttccaggacgcttga

SEQ ID NO: 336122 - DNA, 4002 bp, Pseudomonas aeruginosa
atggaagaaaagaagcacactgaggagcgcaaggcatgggtcgtcgtcgatcgtggactggagcgtgatgcacgcctgaaggacaaaggcgtccgcctgaagggccgacatcccgctctgcgcgaaggtgcctgggtattggtgctggctacggacgggcgtatccagcgcattggtcaggtgctgcgcatccgcatcgacgtggacagcactgcgctctacttcgacaaggcgcgaactatcgaacagcaagtatccatcggcgcgacaggcctggtgccgccgagtacaggcagtatcgtgcctgcgccctggaccgagttcgccgaagccattccgcgtgccctgggcatcacgctggcggatgtgcccacgatcgaggacgaggcctacatccgggagctgttgcagctggcgatcatggacgacctgctcggcccggccggcggccccgaggagctcatcgtcgacatgagcgtccgcgaccgttacctggtgggcaagctggcaccgatggaaaacgccgagcgtggcgaggatctcccaccggccgagcgcaaggacgaagaacagcccgatgacctcgtaccgaaagggctgaagcccggccttgagccggaaaaggtttccgacggtgccgaaagcgagtctggcgaggagctggatctcacctccaaccaatcgctggtgccctccagcatgggcttcaccttctgcgtcgatggtcaggctgagactctggatgtcgccgtcgcctgggggtgttacgagcggatcgagtcggacgacccggcccactcccgcattcacaagaagaccggcaaggtgatcaaggccaaggtctggaagcggattccctccttcaagcgcgtgtcgctggcgctgaccgatggcgtcatcacgccggtcgagctggacgacacgcatcccgagattcgcttgcagggcgcggtgcgaccgctcaacgaaaaaggcgaacgcctgatcaccctgttcatcgtcaacggccagaaggaaccgaaggagaaccgcgatgcggcctgggtgttccagccggagatcgtcgttcaggcgagcgaaggaagtccatccaaggcgatcttctgccgccgcccggcattcgaggcggagggcagcgatctggacgatccggacctacgcgaacgcctcgcactggaaatgatctaccgcgagcgggtcgagttcgccgtggggcatggcgtatccgtgcatgccgtcacggaagatgacgctacccgtgcgaccgaactgcgtaccgtggtgatgccgcaatacgaggtgcccttcaccgagactcctggcggcgaagccgaggaccgcccggcgatgcgcaagatgcttaccgacggctcgctggacatgctgcgtctggcgaagatgtcccaagaggagctggtcgccacgctcagcgtactgaccgacgactatgcggcctggatcgaagagcagcgcgcacgcatcggaaccgaagtcgcggagtatgccccgcaggcggaagaagcgatggatcggtgcgaagcgatcatgctgcggctgctagagggtgttcgcctgctggccgagagcaccgaagcactggccgccttccagttcgcaaaccaggccatgggactccagcgcatccacagcagatacgctctggagcgccggcgcggcaagcgcatcgaggtcgcggagctcgcaaaggaccccaggaactactcgtggcgcccattccagctggccttcctgctcctttccattcccggactcaccgatccccggcatgccgatcggatcaagccactccaagcgcacgccgacctgctgtggttcccgaccggtggcggcaagaccgaggcctatctcggtgtcgcggccttcacaatggccatccgtcgcatgcagggaaatctgggcggttacgacgcatcacgcggtctggcggtgatcatgcgctacaccctgcgcctgctcaccttgcagcagttccagcgcgccacagcgctgatctgcgcgatggagcacatccgtcggaccgcactcgccaagggcgacaagtctctgggcgaggtgcctttcaccatcgggctctgggtcggcaacaaggtggcaccaggtaagaccgatgacagccatgcgttcgtggaagccattcgtgccgagagatacaccgccggaatgacttcaccggcgcaactgacgagctgtccatggtgcggctccgaaatcgcgcccggccgtgatatcgacgtcgacagggtggtcaagcgcacggcgatctactgcggagacaagcaaggcaagtgcgacttctcgcgtggacgctcgagcaagctggcgcatccaggtctgccagtcatggtggtcgatgaggagatgtaccatcgcccaccgtcgatgatgatcgccaccgtggacaagttcgcgatgatggcctggcgtgaggaggtgcggaacctgttcggtcatgtatccagggagtgttcacgtcacggcctgctgtggcctggtgccgaatgcaataccggccacacggccgcgaaggggcatcctgccgcgaaggtcacgatggtttcgccggtacggcctccggatctgatcatccaggacgaattccacctgatcagcggcccgctcggcaccatggtcggcctttacgaaagcgcggtcgatgagctgtgcagctggacgctggacgggcagcccatccggccgaaggtggtcgcttcgacggcgaccgtgcgcagagcccaccagcaggtgagtaacgtgttcatgcgccaggtcgcggtcttcccaccccatggcctggatgtggaggacaacttcttctcggttcagcgcccgatcgagaagcgctcgggtcgccgctatctggggatatgcgcccccggcagctctcgccctgccatgctgattcgcgtctacaccgcagcgatgaccgccgctcaggcgctgttcgagcgcttcggcagtctggccgacccttacatgacgatggtcggctacttcaattcgttgcgcgagctcggcggcatgaagcgcctggccgaggacgacgtgcagactcgtgcataccgtgtgcagatgagcctggtcgagcggccggggctggcgcagcgcagcatcatgaacatccgtgagctgacttcacgcgtttccaaccaggatattcccaagtatctcgatcagctcgaggtgaagttcgagcccgagtgggatgcgagccagggcaaatacctgtgccgctgggacgaaaaagacaggggcaagccacgccccatcgacatcgtgttggccaccaacatgctctctgtcggtgtcgacgtgaatcgactcggtatcatggccgtcaatggccagccgaagggcaccgcggagtacatccaggcgaccagtcgtgtcggccgccagtctccaggcctggtctgcaccgtgctgacctgggccaagccgcgcgatctctcccattacgagacgttcgagcattaccacgcgaccttctacaagcacgtcgaagcccagtcggtcacgccgttctcgcccagagcgttggacagaggcctcactggaacgatgctgtcgttgatgcgcggcaagtacgacgatttcgctccgaacgttggcgccgagaacctgcaaaaggccgatcagctggaaatacagcaggttcagcaggtactgaaaatgcgtggcggcaacgtggcggattcgaaatcggaacagctgatcggaagcatgctgaagcaacgtgccgatgagtgggtgaaagccgtgatgcaaggcaatcgactgctcgcttacgagaaacgaggccagggcatggatctcatggccccgttgatcaagacccctggcgtgaagccttgggacaattggacggtgccgatgtcgatgcgagaggtggagccaggcgtcaacctggtgatgaactcttcgaaattccaggatgaaccggcgtggaaagctcggcccgccgtgagcgataaggacgaatga

SEQ ID NO: 336123 - DNA, 4344 bp, Pseudomonas aeruginosa
atgaaaccccgtgatatccacgacgaatggctgtcgctgatcgaggtctccggccccttcctcgccacgcccgtgctcgagcgagcgttctccaccggcctaccggcggtcgagcagcgcattcgccagtacctgcgccaagcgcatgacgaatggtgcgaggcacgcgacaacgaggatccgcgcttcgccgagctgcatcgagcctggatccacgaagtgctcgcacggggcctggaatacgacgaggacgatagcggcgaactgctgcggcgaggcgaacgactgcccgactccgtgcgcgtcaccctgtccgagcatggcgtcacgctggtgcccgactacgcgctggtatccaacgacaagccgctgctgctggtgcagagctacccggccggaaccgatctcaccgcgaccatgaagatcgatggctggatcgccagccccgccgagcgcatggagcgcctgtgtcgggccagcggctgccgcctcggactgatcaccgacggcgagcgctggatgctggtcgatgcgcccgtaggcgcggtggtgacctacgccagttggtacgcccgcctgtggagccaggaacgccagaccctgcaagccttcatcgcgctgctgggtatcgcccgcttcttcggcgccgaggacgaaacgctgccggcgctgctcgacgaatccctgcaacaccaggaagcggtgaccgacgccctgggcgagcaggtgcgccgggcagtggaagtgctgatccaggcactggacaaggaagatcgcgaccgctcccgcaccttgctgcaaggcgtcgagccggccgaactctacgaggcgggcctgacgatcatgatgcgtctggtgttcatgctctcagccgaggagcgcggtctgctgctgatgggcgatgagatctacgagagcgactacgccatctccaccctgcgcacgcagttgcgtcaggaaaccgaggaggtgttggaacaccggcacgatgcttgggcgcgcctgctggccactttccgcgcggtctacggcggtattgagcatgagactctgcgtctgcctgcactgggtggttcgttgttcgacccggatcgtttcccattcctggaggggcgtgccaagggttcagactggaaggtcgatgtcgcgcgaccgctgcccatcgacaaccgcactgtgatgctcctgctggaagccatccagcagtaccaaggccgtaccctgtcttaccgtgcgctggacgtggagcagatcggctacgtctacgagggcctgctggagcgcaccgtcgctcgcaccacacgggtgacggtggagcttagcgccggcaagggcgcgaagaagaccctgtatggcctggacgagctcgaagcgttgcactgccgcggtgacgataccctggccgatgagctctccggccccgatgccaccaagcggagcgccagcgctattcgccgggaccttgggcgtgccgtcgatgccgcggaagccaatcgcctgctgaccgcctgcggtggggacgaagatctccgcgagcgcacgctgcctttcttccatctgctgcgcaccgatccctggggctatccgctgatctatcccgagggcgcctttatcgtgaccacgggcagcgaccgccgtgagacgggaacccactacacgccgaaatcgctcaccgaaaccatcgtcaccgagacgctcacaccggtcgtctacgtcggccccgctcaggggctgccgcgtgcggagtggacgctcaagtcgcccaccgaactgctcgacctgaagatctgcgatccggccatgggctcgggtgccttcctcgtgcaagcctgccgttggctggccgagcgactggtggaagcatgggcactgaccgagcatcgaggcgagacgatcgacgccgaaggccgtgtgaccgacgctgccgcctgccaggaaccgatgcctagcgatatcgagacacgcaccaccatcgctcgccgcctgatcgccgagcgctgcctctacggcgtcgacctgaacccactggcggtcgaactggccaaactctctatctggctggtgacgttggccaaggagcgtcccttcggcttcctcgaccacaacctgcgctgtggcgacagcctgctcggcatccatcgtctggatcagctcaccgaactctcaatgacggcgacgggtaaggggcagcaacgcctgttcgggcagaacatccagcgcgccgtccaagaggcgattgagctgcggcggcggctgcgcgcgatgccgatccgtgacatccatgacgtcgaagccatggcacgactggatgctgatgcacgccagaagcttgaggtgtcggaactgatcgcggatgcactcatcggggaagcacttgcgtctagcggtaacgctaactcattgcatagcgcaactgcgtctctggccgtccaggcaggacaggccgtcgatggtgaccgggatgtggttgtctcgatgcatcggcgatcggcagccgcactctgcaccgatttgcctgccgataggcctgagcgtcgacctttccactggccattggagtttccggaggtgttcgcgcacgaggccaaaggtttcgatggcatagtcggaaatccgccttttttgggaggaaagcggataacaggtactgcgggaacagtttttcgagactggcttgttaattatgtcgccagcggaaaggtcggaagcgctgatctggtcgcatactttttcctacgttcttatacgcttctttgtgagaatgggcactttggtcttcttgctgtaaacaccattgctgagggtgatacacgccaagtcggtcttgaggagatgctcaggatgggggctgtcatacatgcagcctaccccaacgaggcttggccaggagccgctgcggtcgtcactagtcgtgtccatgtacgaaaggggggatgggaaggccctcgcaatctgcaaggcactgctgtcccgcatatatcagccttcttgtctggacgtgaagattggagtctccagcgacttaaggctaatgtagggattacttttattgggtcggttgtcaacggcatggggtttattctcacgtctgaagaagcgcaaaaaatgttagatgccgaccccaagaattcagatgtgatctttccatacctcaatggtagcgacctaaattctgatccatatcaaagtccgagtcgttttgtaattaacttttgggattggagtgaagagcgcgccaagacgtaccttgaaccctatgagcgagttctttctcttgttaaacccattcgtgaaaagctcaatcgcgcaaaataccgagatcgttggtggcattactcagaggcagtcccaaatctctatcacacgattgggtttgggcacagctttcaaaagcatccggatagctggaatcccgcgcttaagcaagcagatcgagtattggtggttacgcgcgtaagcaaaacgttggcattctcatttgtcaggacgggcattgtattttcggatgcgaccgtcgttttttcgttggccagagatcgggatctggcactacttcagtctagtattcatgcagtatttgcgtggcaacacgcttcacgactgaagaacgacttgcgatacagcccaacggatgcactcgaaccgttcgccttccctgctggcttccatgacgcaccagacgggccactggatgacttgggaggtcgactccaccaaggacgagttgacgtgatgcgagcagaccgcatcggtttgaccaagctctataaccgttttcataccgacaccgagcgtgatcctcgcatcgaagagctgcgctcgttgcagcgccaaatggacgcggctgtcgcccacgcctacggttgggacgaccttgatctcaatcacggcttccatgaagtgccctatctgccagagagcgatcgcatccgctttaccatttcggagacagctcgcatcgaagtactccagcggctttcggagttgaaccgccagcgctacgaagaggaagtggcccaagggctgcatagcggcagtacgaaacgcccctcgccccgtactccacataccagccaacctgtcagtgccactccggtccaagctgggctcgacttcgatacagcgccgatgcccaccgtgaatggcacgatcccggcaacgaaaattctcggattccttggagccaaccaaggctggcatgccaagtccgagatcctcgcaactaccggcatcccgactgcgcagtggaacgccgcgatcgccagcctgatcgccgagggcaaggtcgaacgccagggagaaaaacgtggtacgcgctaccgtgcgcttggcaaggcctcttga

SEQ ID NO: 336124 - DNA, 3132 bp, Pseudomonas aeruginosa
atgacagcagcatcggaagccggcatctaccgtaatcccccagaacctggccagctcgtcgaagtgcggcggcggcagtgggtagtggccgaggtggatgcttcgactcagggagccgagcgtcagcacgcagttactctgtcctccattgatgaggatgccctgggtgaggagctccgggtgatctgggagatcgagccgggtgcgcacgtcatcgagcgtgccggtctgccggcgatcaccgggcaggacgactccgacacgctggaggccttcctcgatgccgtgcgctggggcgcggcgaccaatgcggatcgcggcttcctccaggcgccgttccgcagcggggtgagcatccaggacttccagctcgatcctctagtacgcgccatcgacatggcccgggtgaatctgctgattgccgacgacgtgggtcttggcaaaaccatcgaggctggcctggtcatccaggaaatgctgctgcgccatcgggcacgtagcgtactgatcgtctgtccggcctcactacaagagaagtggcgtctcgagatgctggagaagttcggtctcgacttccgcatcgtcgatagcgagtacattcgggagctgcgccgcgaacgtggtatccatgccaatccctgggtatcgttcccccgcctaatcacctccatggactgggccaagatgggcgatggcctgcgcgccttccgcgacatcctgccgccgcacatcggctatccgcgcaagttcgacatgctggtggtcgacgaggcgcacaacgtggcgccatcgaccagcacccagtacgcgatcgagagccaacggacccgcttcatccgcatgatcgcgccgcacttccagcaccatctgttcctgactgcgacgccacacaacggctacaccgagtctttcacctcgctgctcgagcttctcgacgaccagcgtttcgcccggaacatcctgccggaaacgttcgagaagcagctggctcaggtgatgatccgacgcctcaagagcgagatcaccgacaaggatggtcgaccgatctacgccaagcggcgactagaggccttcgccatcgactacaccgccaaggagcgcgagatccatcgcaagctgcaagcgttctgcgcaagccgtgaagcggccgccgacgatggtgccggcgcgacaggcatcagcttcgtcaaccagctgctgcgcaagcgcctgttctcgtcaccggcggccttcgccgtcaccctagcgaagcacgaggccactctggacagcggcggcaaccgcaaggagcgcaacgacctgtcggagcgcatcctgctcaaagccatccagcgtgctgaagaagactacgccgacgatgccgaagtcgagagcgctcagggggaggcggtcgaagaagccagtcgccggatgcgtccgctgagtaccgaagagcgcctgctgttcgacgacctgctcgactgggcgcaacaggcgatgcaccgcccggattccaaagccaatgccctgctcgcctggatcgacgaacgactgaagaccgatggcgagtggaacggcaaacgggtgatcctgttcaccgagtaccgcaccaccctcgactggctgcaccagatccttgcctcccatgacctgggtggggatcgcctgatgaccctgcatggcggcatggatcacgacgatcgggagcgagtgaaggccgccttccaggctgcgccggacgtttcgccggtccgcatcctgctggccaccgatgcggcgtcggaaggtatcgacctccagaaccactgcaactacctcatccatctggagatcccctataaccccaacgtcatggagcagcgcaacggtcgtatcgatcgccatggtcagcgcgagagcgaggtgctgatttggcatccggtcgacgcgcgcgaggacgccgaagcggtcggtggccacaaggaggacatcctgcgcgcgctgcgcaagctcgactccatgcgtgcagacatgggcagcgtgaacccggtgatcgctccgcagatgtccggattgatcgaaggatccctgcgtgagctggacacccgtatggccgaagcgaagatcgcccgcacgcgtcgcttcgtccgcagcgaacaggacatcgacaagcgcgtggccaagctgcacgagcgtttgctcgagacgcgcgaggacttccatctctcgccggagcatatcctcaagacggtcgagaccggactggtgttggcggaaaagcctgcactgaaacccctgaagctggagggcgtcgaggcgggcaaggtcttcgagctgccgccgctgggcggagcctgggagcgctgccgcgagggcctggcgcaccccttcaccggcaagatccgccctgtgaccttcgatcacgaggtcgcgaagggccgtgacgatctggtgctcatccacctcaaccaccgcctggtgcagatgtgcttgcgtctgctacgtgcccaggtgtgggagcgcgaaggcaagagcccactgcaccgcgtgacggtgcgcgtgctgcccgacgatcgcctggaggcgcctaccgtcgcggtggtgtcgcgtctggtcatcaccggcggcaatcatcatcggctgcacgaagagctgaccgtggcgggaggctacctgcgcgagcgcggcttcaagcgtgaggacgcggtcggccgggtgcaagcctggctggacgatggccagccctgtcgcctcaatgacccggcattcgaggtcctccgatcgcgtttcgccactgccgaaggggccatcctccaagccatcgaagcacgctcgcgcaatcgcctggagcatctgggcaacaccctggaaacgcgccgccagaaggaagaagcggatatccatgccgtgctcgacgagctggagaaggcgatccgtcacgagctaggcaaggacgagcaacccgagcagttctccctgttcagcgaggacgaacgcactcaggtgcggcgtgacagctccgccctgaaagcccgcctggagcgcattcccagcgaacgcgaacaggagacccgaggcatcgccacgcgctatgccgaaccgcaggatcgcaccttcccggtcgccgtcatcttcaccgtacccgcatcgttcgcccagggagaccgtgcatga

SEQ ID NO: 336125 - DNA, 186 bp, Pseudomonas aeruginosa
atgaacggctatgtcggcctgcgcgacgaccgtcgcgacggcgagcgcctggcggcgcggatcggcctgctgttccccggcccctcggcggcctggctgcaacgcgccgaacgtctgcggcggcagcaggcgtcggcgggcctcggggtcaggcgtgggtggcctgcatcgacgggcgctggctga

SEQ ID NO: 336126 - DNA, 1104 bp, Pseudomonas aeruginosa
gtggatgaagacgtcagtcagttcgtagtagataacaacttccaggccgacttcgaaacaggcgccctgcgccacaccctgctgctaggcctggatcacaaccgcaccgacaatcaatacacatcaatctttggcagcgcgccgccgagcaacgtcaacaacccgatctacggccagccgatcgtcaaaccggatcgttcgacggccttctacgactacaagcagaagacctaccagaccggcctctacgtccaggaccagatcgccctcgacaattggcgcctgaccctcggcggtcgcgaggactgggtgcacaccggggccaccttctacaacaagggcgacgccaccaataccagccgcgacaagaagttcagcggcaacgcggcgctcagctacatcttcgacaatggcgtggcgccctacatctcctatgcggagtcgttccaacccaccactggcgccgatatgaacagcaccagttcgctgaagccgaccgaaggcaagcaatgggaaatcggtgtgaagtaccagccggtgggctccgactcgctgttcaccgccgcggtctatgacctgcgccaggagaacgtcagcgtgtcgcagaacataggcggcacgccggtcacttcgcagacgggcgaagtgaaggtctccgggatagagctggaagccaccagcaacgtcaccgacaacctgaagatgatcggcgcctatagctacgccgacaccgaagtgaaaaaaggccagtacgcaggcaaccgcctgcaacaggcgccgcgcaaccaggcctcgctatgggccgactacacctggcacgagggtacgctgaacggtttcagcgtgggtgccggcgcccgctacgtaggctcgacctacggcgaccaggccaacacctacgacggctacgccggctcgtacaccctgtacgacgccgccgtgcgctacgacctgggccaattgaacggcagcctgaaaggcgtcagcgtggcggtcaatgccaacaatctgttcaacaaggactacctggcgtcctgcgacggctactactgctactacggcgaccagcgcagcgtggtgggcagcgtcagctacaagtggtga

SEQ ID NO: 336127 - DNA, 750 bp, Pseudomonas aeruginosa
gtggccgaacctttgctgatcatcggttcctatctgtccccctatgtgcgcaaggtgctggtgctgctggagctgaaaggcatcgcctaccgcatcgaccccatcgtgccgttcttcggcgacgaggccttcgagcgcctcagtccgttgcgccagattccggtgctggtggacggcgacttcgtcctcaacgattccagcgtgatctgccagtacctggaggagcgctacccgcagccgagcctgtatcccgccgacatcggccagcgcgcccaggctcgctggctggaggaatacgccgattcgcggctgggccaggtgatcatctggcagttgttccaccagttggtgatcaaccgtggcatctggcaccgcgaacccgaccaggcgatcctgcaacgcacctacgacgaagacctgccatcgatctgcaactacctggaagggcgggtcccgccaagcggctggctgtgcggcgagctgtccatcgccgatgtcgccgtcgcctgcctgttccgcaatgcccagttggcgcgctaccaggtcgacggcgagcgctggccgcgcctggcgcgcctgttggctgacgctttcgccctgccggccttccagcatctggcgcgtttcgagaaggccaccgcgcagaccccggtcgccgaacagcgccaggcgctgcgcgaggccggcgcgccgctcagcgcgaccagccacgcccgcgagcggccggtgcgcggtccgatgagccgctga

SEQ ID NO: 336128 - DNA, 600 bp, Pseudomonas aeruginosa
atggatatagataccttcaaggttgaagattttttcccgtactatctaacccaggagcagaaaactggattagcagacgcgtttagacaattttctccagacagcaatatttacacagacctgtttgccactgagatactgcagggcgattgctgggagaacgtaccttattttgattacaattcatcgcaaacaagaaaagtcaagggggtcatactctccaactcatgcgacatcgaccaagacaacaaaagagatctcccggtaaatgtaacctttgccccgctcgtatcttttgataaatacaaagccgcccttgaaaactcacaaaaccttagtagagagtcaatagaccagaagcttaacgccattaaagaacaaagaattaccagcctgatatttttccccgcaggggcttcactgctagaggactgcattgcagtattagacagtgtgttttcgctacctttaaaactttttctccaagaaaaacccgagcacaaaaactttactctgaatcagcttggtcatttcctttttgcatttaaactgtctatccattactgccgccttcatgaagggctgcatcgtgaagtctga

SEQ ID NO: 336129 - DNA, 759 bp, Pseudomonas aeruginosa
atgccgaatccgcttcatcaagtaccgacaaagctggggcgggaaccgctaattgatgcggtttttgagatgcgtttctcttcaggcgtcgcagtgggaagtatattgccaggcattctattcagcgcattgcaaggcaaaaaaagcatagagcctactccaattatgtctatgcccaaagaagttagggaaatggacccgaacttgcgctttgccccgttatttaagcttggctgggatagatattgggtttttgtaggcgacaactcttgctctgtttcgagcaaactcccctatgctggatggagcaatctaagaagcgctatctacgaagttatgtccatagcttgcagctccggcttaattgactctgtcaatagatactccatgaagtacattgacattattagtcacgaattagacctacccgcctctgaggtcttcacgctaaatttaggcataggtgataaaaccaccatcaatgactacgagattcgcgtctcttttacgcagaaaaattttgaacactctataagacttatatctgacgccacgactcaattgatcggcgaatcgaagccacgacaaggaaaagtaattgacatagactctttcgccaatattggcggagagtctgcagaaattttcctagctaaaatcattgaccgttccgacgaaattcataaggcaagcaaagagatcttcttcgagtgcctttcggaaagagcattgaactggttggagccaagctatgagtag

SEQ ID NO: 336130 - DNA, 1179 bp, Pseudomonas aeruginosa
gtgagttggcctttggttcagattggcaaatatgcagacaaggttcggacgtggaaccctgctgctggagaggagtgtattttccagtatgtcgaccttagctctgtcgataaaagcaggaaagttattgatctagataacgtggcggaaatttcttctgcagaggccccaagtcgtgctcgtcagttggttgtggcaggcgatgtcctggttgcaacagttcggccaaatctgaatggggtcgctgtggttcctgctgagctaaatggcgcgactgcttctactgggtattgtgtcctccgagctgacgaaaaaaatctgcatggacgatatttgtttcattgggttcaaacaggttcttttgttgaggacatgatgtctaaagctactggggctaactatccagcagtttcggacaagatagtgaaagagagcaaaatccccctcccacccctgcccgaacaaaagcgcatcgctgccatcctcgacaaggccgacgccatccgccgcaaacgccaacaagccatccagctcgccgacgacttcctccgcgccgtatttctggacatgttcggcgacccggtgaccaatccaaaggggtgggatacatgtaagttcgaggcgcttacgagtctggtgacttatggcttaaccgttcgtcctgaatatcacgaagaaggtattccgttgatatcggctagggaaattcgtactggtgaattggattttgagtcttgtccgaaaatttcaaggtcagactttgatgcgctgagtgaaaaaggtcggccaaaaaaggatgatattttgttttccaagacaggcagcataggtcattgcgccatagtgaaatctgaattggattttgctgtcactcagaatgccgcacgaatagtgccaaataaggaggtttgtgatccgattttcttgcttgcttttatgagaacaaattatttttacgatttggcaaataaggaagcaaagggtaatgctgttaaggacttgcagttgggaattatgaaggattttcccatgtacattcctccaatttcgctacaaaagaaatttgttgatgtttattcgaaagcgtctttgctctctgaaaaagtaagtggtggatcgattctcctgaattctaattttggagcgttaagccaagcagctttctccggccagctgtag

SEQ ID NO: 336131 - DNA, 147 bp, Pseudomonas aeruginosa
atgcgcctcaaatccgtcaagctcagccattttcgcggctaccgcaccaccacggttattcccatcgacgaagccatgaccggtagcgtcggtcgtaatgacgatggccaatcggtcagccttgagaggtcaggctcccttgaatag

SEQ ID NO: 336132 - DNA, 666 bp, Pseudomonas aeruginosa
gtgtcagaactcaaaaaattccaggtccaaaccgcccgtccgctgccgatcatcgttctggctgacaccagtggcagcatgtctgtggatggcaagatcgaggcgctgaacaagagcctgaaagacatgatcagcagctttgccggcgagagccgcctgcgggctgaactgcaggtcagtttgatcacctttggcagtcaagcagaggtgaatttgcctttgactccggctcatcagttgcagggcttcaccccgcttactgctgcgggggcgactccgttgggtggtgctctggcactggccagccagatgatcgaagacaaggacagcatcccctcccgcgcctacaaaccggtaatcgtgctggtttccgatggccaccctactgatgactggcagggttcctttgctcgtctggccaatggcgagcgctcgtccaaggccactcgctttgccatggccataggtgctgatgccgatgagagcatgctcggtgattttgccaatgacccggaggcaccgctgttccgtgccgagaatgctgcggatatccatcgttttttccgcgctgtgacgatgagcgtcagtgcacgtagccgctcggcgacgccgaatcagtctgctccgctgcaaatcccgacggatgatcaggactgggatttctga

SEQ ID NO: 336133 - DNA, 696 bp, Pseudomonas aeruginosa
atgcgcttgttggcgagtggggcttcggtgaggggccccgcccaccagcaggatgactcacctaaccaggatgccctggccgtcagtggtatacgcggcggttggtgcgttgcagttgccgatggattgggcagccgccccttgagccacttcggttcgcgcaaggcggtgcagttgtcacggcacgtgcttcggtgccaggcggacattactcatgcagcggttactgacgaggttcgcaaggcctggctggcctgttttggcgagcgttatcgcctaaatgaaacgacctgcctgtgggcgcgcgtggacgcccgtggccgggctgttgccgggcagattggcgatggattgctgctggcaagaagcgctggcgctttcagggtgctgaccgatcaacgccagggcttcggtaatcagaccctgaccttggcccaggcggatgcctggaatactcgcagtttcgagtttgagttgagccagccgggtgatggcgtactgctgatgacggatggtatctcggatgacctgattccatcgcagcttgagtcgttttttgatgccatttaccggcgccaactgcgttgtagtagcaagcgccgcatgcgccgctggttgacgggtgagctgctggactggtcgacgccacgccatggtgacgacaagagtattgctggaattttcttaacggattga

SEQ ID NO: 336134 - DNA, 1437 bp, Pseudomonas aeruginosa
atgagcacgaacaaagccgcgccgcagaagcagcgcatggtgcaggacagcaaaggttcggtttatgagctcacgagtgagttgagcagtggtgggcagggcgttgtttaccgcacccagtacccacaagctctgatcaaggggtttaccaataaggatgagcaggcgcgccgtcgttggcgtgagcacatcgaatggctgacccggcaggatctggccgatttgaagctggctagaccgcttgaactgctggctgagccacgctgcggttatgtgatggagctgatggacgggctggtgcctttgcaggggctgctggacagttttgctaatgctgaagaagaggcacatgaagattatctgcgccagggcgggctgcgtcggcgtattcgtattctgggccagatggccagaacactgaatcagttgcacgggcgcggcatgctctacggtgatctgtcgccgaacaatatctttgtctcggacgatccggcgtttgccgagacgtggttgattgactgcgacaacatcagcctcgatagccacagtggcttgaccctgcacaccgtggactatggcgcaccggaagtggtgcgtggtgaggcgttgttgtccagcctcaccgattgctggagcttcgccgttattgcctatcagttgctgacacacaaccacccgttcaagggtgagatgatcagcgacggtgagcctgaagtcgaggatgccgcgctgagcggtgagcacccctggatcaacgatagcgaggacgacagtaacgcttgcttcgttaatctgccgctgcagttgctggagcacagcaagctgccccaactgtttagccgttgcttcgaggctggacgagccagcgcctatgaacgcccggctatggccgagtggcttgaggcgctggttgaagtggacgagcgtatctattgctgccctggctgcggcagtaccagcctgttgccagtggatttgcgggctgcggacgaagcggtgtgttttttctgtaaggcgccagctgacagccgtctggttctgtttgaggagttcattgccttgcctgccgagcaggacggggatggggtgagtcctcagcagctggtggcgacggggcgaaaggtctggttgcagccgggagggcaggttgagctcaagcgcttgctgccgacgttcagctatgaccgttggccggctgaccatatccgtatcgagtacagcgacaagggcctggggattttcccgctgcctgagagccagttgcagttgcagcgcggggagaacattaaaccgttgcagcgttatcagggcctcaaggagagcctgcgtggtcaggatgaggaacccttcctgattcatgtaggtgagcctgcgaagtcagggcatacgggctccgggttgccctccagcaaagtcgtctggcaattccggtggtga

SEQ ID NO: 336135 - DNA, 3396 bp, Pseudomonas aeruginosa
atggaatttaaagatttccccatgctgtcagccgatgtgctggcgctttctacagatgagtctgtggatgccttgcaggacgggcaggcgattttcctgcagcgctatcaggatgactggctggcggtgcagggggatgtacgcatccgcgtcagctgtacccaggccgatgccgaaatatttggccttctggccctgcgtgatcagacccgctggttgttgactggtacgaagaaaaacaagctgctggtgcaatactgcgcaccggttgaagtaacggcaatgcagcttgaactgggtgtggatgagctgcttgctgaggatctgcacgccaagcgcgaaattgctggcagcactgttgagctggcctgtcgctggtttgccgagcattttgtggtacggggcctggctgagggtgactggctgacggttgctcgtttcagcaataccgctaccaagggcggctttcagttgctgggtaatggctggcgtgccgatgtcgagcggcgccaggatggcagttatctgctcaagcgtgttacccgccatacccagcgcgatggtgcgttctccctcctgctcggccaatttgaatttaaggatgcctctgttgcggctgcactcggcagcgccagtcagcaggctctgctgagtgcggcgctgcgtgacaacgccagctatctcgaactctggaatctttacaacgataaagagtggcaaagagctttagagcaggcagaaagtttgggttctctggcttacgccgagtgccacggctttcaggagggacgtggcaatgtctggcgtctgattcccaagtcgcaggagcagtatcaggcgttccgcgagcgctggcgcgatctggagctgagcagcaatgatcagtttgatctgggcgatcagcgcccggactggctggaagagctttcatccgagaaggctcaaaggactgccaatgctccgcgggggactattcgcttcgagccagattgcgtgattttcaaacaggcggcgggtaagaccaacatccgaccgaaagcgggggagggctggttgtatctgtctcttgccggccaacgttcgatgggtaagcgtcgcttggcagccaagcagtcgattgactcgggcaagcggctgccgcaattgaaatggctgctggaaggggttgcggttcctgctgcgcgacgacgcccgatcagcgggctgaccccatacgtgctggagtctttcaagggtggcaagccgaccgagaagcaggcgctggcgctggattgcgcgctcaatacccctgatctggcaatcatcatcggccctcctggtaccggtaaaacccaggttattgcagcattgcagcgttgtctgggtgagcgagcggagaagcagaatattgcggcgcaggtactggtcagcagttttcagcatgatgccgtcgacaatgcactggagcgtagcgatgtattcggcttacctggcgcgcgggtgggcggcaagcacggcgagagtgatcaggcggctttgattgagccttggctggaacgccaggcggctcatttgcaccgcaagattgcgcaggaatacagccgcttccctgagcttgagcagttgcgggccatttccgcgaggttggcccttgcccgggtagcgagtaccggccctgcacagcaggcggatgagttccagcgccttttgcatgacttgcgtgaactggagcaaagcggcctggcattgccgccccggcttgaaagtcagttcgaggagtatatcgatacgcttgccggtcaagcgccggctacagctgcgggaggtctgcctccctctcagctgctcaggcgtatccgtgctctgcgtgtcgaggttgctgcctttaccgatgatggcggcgagcgtgcctgggatctgctgagctggctcaagcgccatgaaaaaggtgtggccccggagctgctgcgcctgctggaagaacttgccgacagctcgcacgttgagccggcgacccttcaggctctgaagatctggaaggatctgttgcttgatcagcacttgccggattaccggccggctgcgctgaaacgccaggtagaccctgatggcctagcgctgcttgatgaggtggatcgctatctggaagaccgcatggccaagcgcaagcagggggttgcatgggtcttggagcaactggtcgatagtctggagtccgatcgttccgctgcgcgggctgtggtcaatgagtattcgatggtggtcggtgcaacctgccagcaggctgcgggcaagcagatggaaatgttgaaagaggtatccactagctccaactcggatatcgagttcgatacggttgtcatcgacgaggcagcacgggccaatccattggatctgtttattccgatgtccatggccaagcggcggattgttctggtgggcgatgaccgccagctcccgcacatgcttgagccggatatcgaggggcagttgcaggaggagcatgaactgaccgaactgcaactggcggctttccgatccagtcttttcgagcgtatgcgggtcaagctacaggatttggaaaagcaggattcgattcgccgtgtggtgatgcttgatacccagttccgcatgcatccggtcttgggcaactttgtcagtaagcacttctacgaatgtgaaaacctgggggttctgcattccggcaggccggcagaggcgtttgtattcagccaggagctgctttctaggcttgggccgctggcggagtcctaccgtggccatgtatgtcagtggattgatgtgccggcggtgcaggggcgtgatcagcgccggggaactagccgggttcgagagattgaggcgcagcgcattgctgacgaagtggtaaagctgatgcaggctggcggtgaggcgttgtctgtcggcattattactttctacgcggcacagcgcgatctgatcatggagaagctcgctcagcagaaaatcgacggtactcccttgatggtcaagcgcgaagggggctacgagccgcatgagcagttcaagttgacccgtaaggtgcaggcagatggcagcgtggttgcagaggaacgcttgcgggttggctcggtggatgccttccagggcaaggagttcgatgtggtgctgctgtcttgtgtgcgcagtttccagccaaatcgctcggggcgggctgctgccagcgagggggatgatcgcgagctgcaactgaaccgtcagttcggcttcctgcgtttgccaaaccgtatgaacgtggccatgagccggcagaggcagatgctgatttgtgtcggggatgcggctttggccagtaacccggatgcacaagaggcggtgccagctctggctgctttctatcagctgtgtggaggtgagcatggctgcattcgctga

SEQ ID NO: 336136 - DNA, 1491 bp, Pseudomonas aeruginosa
atggctgcattcgctgaaaccggtacttatctgcagtttgctgaaaagcctcgcggcgagcccaagcccttgttgtggccggtgctggttcatcgcgtgctttatcccgaggcaaaagaggctcagttgaatctgttccagcgtgctgtgctggggttgatccgggcacaggtgacgcaagaggaggcgatcgccgagctgaccgggctgcatgtcaacctgatcaagctgatactggctcaaggagtgagtaacggctggctgactgatagtgcccgtgggctgactgaaaaaggcgagcaactgctggatggtgagtctgttgaggatgacaacctgaaggctggttatctgttccaggatgctatcagtggtcagttctggccacgcttcgctgagcagcttgattcgatcgagcccgaagatccgctgcaacgctatcccgtattcaaaggggagcggaaaagcggcaagtcaatccggccgtttgtgatggcggcgggcaagtcatcactgccggtgctggatcatgaggtgctggcgatagcttatcgtgagtatcgggatgattatcgggcggctcggcagctcgatagcggccagttcccgcaattccttaaattgtctggtgtgcagcggctggatgataccgccaagcctgcaagggtactgctttgggccaagcctgatgacgaggggctggacctgtgggtggtcgacgatccgtttacgctgcgagccaacgcctggtggttacaggatgctttgcgggagcagactgaggggggtaacaagtacctgctcaaccatttacagcctttggtttctgttccgcgtgcggatgatcagacggttgagcagtggctgcaggccatgcgccagcaggcggatatgcaggtgctcacggaatacccctgggcggcgcggcaaccggatatcaagcggcatttggcagccctgctactgcgtatgaacaagctggcacaaggcgaccagagtgagcaggaactggatgctgcagtgatggagtgccagaaactgcttgaggtcctcatgcagtggttgattcaccaatatccagttgacgcaggccatctgcccaaacagaaaaaccttggccgagggctaaatgcgcgcgtgctatccgccttgcagttgccggcgtttaccgatggggtaatcagcaaactagccgggcaaaacatcaatcagatcattttggcttgctctcggccaggcagctccctgaaggctttgctgtttgctgcagcaatgggaacgctcaaccactccgggcacccgttaaagacgctgttagctcgcgagctgcaacttgacaggctgttgctgcttgcggatttgcgtaacagcagcacccatgcgcagagccgctttaccggacgagaagtcgcccccctcacctatgaggaaacgctggataacatccagtacgcgctgggcttcaccgaattttttaaggaatggatgtaa

SEQ ID NO: 336137 - DNA, 2472 bp, Pseudomonas aeruginosa
atgggcaagaaaagctcgaacaagtttggtccacagcaaatcccagcagcggcaccgtctgcggccggtatggcccgtgcttcagtggagcagcaagtgaatgtatggagcgcttctttcgagaacgcttccaaggcctatcagtcctttgacatggcactggatatttctgtcgagcgtgagtggttgcgcggcgtctgcgagcgttttgagggcgacagtgatctggttcgctggattgagcaattcgccacgctctgcaaggagttggtgcgcttcaaggagcgtttgcatgacgaatatgccgagcggtgggctgctgccagcaaactagctgaaactgccgaggcggcggcactggcgcaggtagccgaacaggaagcgcttgtggccgtccgctccggactggatgcagagaaagctgagctcgaggctgagcgggacaagctgtttgagactcagcaggcattggcgctgaagatggccgaaaatttggaggccgagcgttccctgaatatgcgagaggccaatgcgcaagccggctttgttgcgcaaaacgaagcggctttacgtcagctggaagcgcaacagcgtcagcaggtgcgtcagcatgaagtggatcttcagacgttgcgcgaagataagcaccagctcgacggtgaaatttctctggcagcaaggcggctggcggagatcaagtttagttgcacggaggcagaggctgaacgtgtcaggttgcttgatcagcgtgagcacgacatcaagcagaaagtggtcgagttagatcgtgcgcgtagccgcctggatcgtgagagggcggatatccaggcagaggaaaaggccttgcagcagcgtctggatgaggaaatggcatccgagcgggcgaatcatcaccaggttgttgccaagctggaagagcagcgtgagcgggcctggagcaaggcgaatgaactcaaggagcagctgctcgatattcaggaactcaagcaatccctgggcgaagtatccggagctgagatcctgcagcaactggaagcgctgcgtcaggaaaaccgtgaactcaagcgcagcctggagcaatcggatacggcgcaattgcagcgcgataatgactacctgcgtgacagcaaggctgatcttgaaagagaagtagctgagctacgccctgagcgggatgagctgcgtcgtgagttgagcggcaagcgtgtcgcggctacagagcttgaggctgtcgcgcgtgagaaacgtgttctggagcaacacaagaatacccttgccgttcacatagatgacctcgaaagccgcatcgagcagctgaccagtgcgcagaagacccagacaccattcccagccatgtcgctgatggatagtgagcgcgattaccgggcgcgtatggacctagatgaagtgcctgatctcgagacattcgccacccagttgcagcatcggattgctaaagctgaaaagcacgtagaactgttctatccgatcgaggatatccgcgtgttgctggggggcttggccatgagccagctgcatgtcttccagggtatcagtggtaccggtaagaccagtttggccaaggcttttgccaaagcaatggggggcttttgcaccgatattgcagtgcaggcgggctggcgtgatcgcgacgacctgcttggtcattacaacgcctttgagcgacgcttctacgagaaggactgcttgcaggcgctatacaaagcgcagacgccgcgttgggaagacacctgcaacatcatcctgctggatgagatgaacctgtcgcgtcctgagcagtactttgccgagttcctctctgcgctggagaagaacaatccggaggagcgcttgatcagcctctcggaaacgtcgttgcccaatgcacctgcgatgctgaccgagggacgcaagatcagggtgccagccaatgtctggtttattggtaccgcgaaccatgatgaaaccaccaatgagctggcggacaagacctatgatcgtgctcatgtaatgactctgcccaagcaggataagcgcttcacgatcaaaccgtttgagccggccaactactcttatcgctccttgcgcaaggcatttggcaaggcaagagctgagcgcaaggaggaggtcgtcaagctactgaaggacctgaccggcgatgccttcaccgaacagttgggcagccagtttgagctgggctgggggaaccgctttgaaaagcaggcgctggatttcatccctgtcatgctggcttgcggggcttcttcgggggaggcggtggaccacttgttggccacgagaatcatgcgccctggcaaagtgaccggccgctacaacgtttctgccgagacgctgcgcaatctgaaaggcgctctggaggacttctggatcagcgctgatctggcgggtgatccgcgcaagtctatggagctgttggaggctgatattcgtcgcctggatggccgtagctga

SEQ ID NO: 336138 - DNA, 1821 bp, Pseudomonas aeruginosa
atgtggtttgatcgttttacgggtgagcagtgccggcagttgccggcactcattcagcccggccgctatcagtctgtgaatgacgggcctgcattcaatggccatacaccggtatttacgggggtgctggtgagtgatggtgatcagcgctgccagttgggtgatgaggcttgcacttttacgccgccgcaaaaaagtctggcggcggcaacggaattgctgagcaaggtcattgcgacgattgatgccgaggcactgcaggcgcctttgatgtctcctttgatgccagcttccatcatcgatgccaagagccatctgcagccctttgaggagcggcttctggatgtggtgaagcaagggcatctgcatcacatctcgctgcgtccgcgcctcgatcttcactatgaggatgaggttgctgatatcgggcgtgcacgtcgtttggccaaaggggcgctggtgcatctggcctcgcactcggagtgctggcagcggcagacgttgagtggcgtgatccccaagaaggtactggcccgcttcagcgaagatgactatggcatctatgagaatcgtgtctatgcgcgcttgctggataagattgaacgctatttgcacgggcgcttggcggagttgcgtggcttgcaggcgacgctgaatcaggcgctgcgcttctatgaggcggagaatgtcgattaccgtctgcgtgaagaaatttgccgcttgtgggggatgacattcagcgcagaggaaaccagtaacgcatcaaagttgcttggtgaaacgcttgaaaagcttgaacgcttgtaccagacgattgcgggcctgcagcaaagtggtctgtatttgttggtcagccggcaggcacaagtgacaggtgtgctgcatatgaccaacatccttggtcacgatcagcattaccggcatctggctatcttgtgggatcagttggccaaggtgacacaggccaaacgtgccacgccggcagagcgcttcaggcagaaccaatctctagcttctgtctattctcgctacgccggtctggtcatgaggagggcgctgctgccttatctgaatggccaggacgaaggtgtctgggccggaaggcacatacttcttcggcaaagtgggctggagtggcatttgcttagcagttctcctggcctttcaacgccagaggacgtattgcttaccattgtgccttggttgagtgatgcgcctgctcctgaggtgaccccacagagcaaggagcggtttatcgcctggccggcaatggggcaggagattgatgcggcttattgcccggagcagtggataccgctgtctcccacggacatgtattgcacggagcgctttggcttgctggttgaccaggtgctttgccgaatggctctgattacgtatgcgcagccgttgcaaaaaatcccgcaaaaagtgctggaacaggcaaagcaggttgcgggggttcaggttaattcagagcaaaatgaactgattgttactgaggccttggccggggaggcagtgacggcgctcaaggaggcattggttgcctctaactccactgcgcaagcgtcagccctggaaggtcacaaccaggcgattcttgctttggaaaagtgcccggtgtgctctggcagggctccgctggttttccaaagccctttagggttcaaagccaactgtttggataaaaagtgcgcaacgcgctatctgcgcttggagcagaccgggcgtgtttttgaacagtcaataccggagtccactgggtttacggtggttggacgaagggcatttacgattaggcagatggctggcgcctga

SEQ ID NO: 336139 - DNA, 426 bp, Pseudomonas aeruginosa
gtggtctgttcagctttcgatgtggcgcggtcttgctactacgtccaccgtcttcgacggcggcgtgtcgatgctcgccgcgtggcgctacgcagccaagtcaaccagttgttcagccagagtcggggctcggccggcagccgcagcattctgggcatgctgcgcgaagagggcgtgaccatcggccgtttccgagtgcgtcggttgatgcgtgagctgggcctggttagcaagcaaccgggctcgcacgcctacaaacaggccacggttgagcggccggatatcccgaatcggctgaaccgcgaattcgcgaccgagcatcccaatcaggtgtggtgtggcgacatcacctacgtctgggcgcaaggccgttggcactacctggccgcggtgctggatctgcatacccggcgggtgatcggctag

SEQ ID NO: 336140 - DNA, 1047 bp, Pseudomonas aeruginosa
atggatagggtgtactgtgacgtacatgaagactacgtcgtaaagcacatagttaactccaaggctcagtatcgctttgtccaagtaaagaccaaaagcaagctaaactaccaatactccattctggaaatatttgggctcaaaaaaaagcccaggaaggacaaccctgaacatgatttggcgggcagcttcgcagggaagctcttgcttcatgtcgaagaatttggcgaagcctgcagatcaattgagatttgcaccaatgttaacttcgacgacgaagtcgaacaaatcgttagcgaaatacaaggcaagctaagccctaccaagcatacaactagcttgatttccgaaacaaaaaaactcatcccatctctcaccaccaaaagtgatatggaggttatagacttcctttcgcatttagcactagcaccgagaaagcaaatcctcaacgaggaagaggatatcttcgtaacacaagcgtcaacgcaaatttataaatatagtgaaatcaatcttaaccccattgaggttaagaaaataataattcagctcttatctctcatagaagagcgctctgccacccctctttccagcaatatcacagaaagtgatttagacgccaaggctagcgtaaatctaaatgacatcctggatattctttgcatatcacgatccgcttattatgcgcttaaagctaacggtgacgatagtgcaataaaatccgtatcaatcctgcagcgaatgctgaaaagatccggcttctcagacgaaactgtagataccttcgccggattcaaatgcaactgggaaacatggtatcggataaatagacatgcactcctagagttccgcctcgccatcgccaaagaaaagatcatccaactggccaagaaaatggcaattggtcagatcgacatgaactccataacccccgaaatttcactattaaaatccgatctctgcaccactcttggccgacaagatatcgatgaagagcttacattcggtgccgttctctctgaactggtgaaaggagaggcacaatga

SEQ ID NO: 336141 - DNA, 1791 bp, Pseudomonas aeruginosa
atgaagtttgaatcgctggaaatcatcccaaacagtccaaacggctggcactctggcgagcttaaatttggcgaagcaattactcagttatatgcgaaaaatggcagtgggaaaacccctctgatccaggcaatgatgttttgcttgggtctacacgtgcagttcagggatgacatagttagaaactgcaagatggcacgactgaaagtcatgcttaatggaaagggcttcacccttgaacgaatgatgggggactccttcgatttgacggtaaaagtcgacaacaagaccgaaaacagattctacaacgaggaagatttttcgaagttcatgttgaaatcgctaaagctaagaagcgataggctggtaactaacggaaacactcctacgatcccatatttctctgccctgcttccactattctacttggatcaagatcagggatactctgagtactatgcgccgccacgcccaggctttataaaaaaccaattttctgaaatggtcaggcttgccgcaaactttcctccacagcactcttacgacaagaagaaaaaagcgattgaggttaaaaaagaccttgattacttagacatcacaattgtggacagccgcaaactgatggatcgcctggctcaggaactcccgtccccggtcagaaagattgaggatattgaaaagcagatatcagaatctaaatctcgactggaagacttgaaaaagacaaaagatatcaagagcgagtctatttccagtcttgatcatttgataggcgctcagagacggcggcatcacgagctaacatctgaagaggcctctctcgagtccaagatatccagctccacacaaatacgtgaagaaattcaaagcgaaatcgagactctcaacctaaatgaagaggcaagaagggcatttgtctcgttctccgacatatgcacatcgccgtcttgcggaatattcatggctagtgcggactcttatggaaaaagcctattatatctacgagatcaaattaaagatctcgagattgccaccgtatcgaatattcaaaaagctgaagccatttccactgagaagcaatttattgaaaagcaaattactcagctagcacagcaaaggggtcttgctgagcgcgaggcaggcatcgaagtattcatcgaagccatcagtagaattgcttctgaaattttcgaattagaattggaaaaaaacaaactcgagaaatacgaacaacagaaaaaatctcacttggaactcttgactaggcgagagaccactttaactcttgaaaattcactacaaacctcacgagagcaatccccagatattcttgaatttagaattgaactcggccaaaaaatggcggagtggctggacattcttaactctaagaatatttctagagatattcgaatcgactcagaactgaaaccgatcctaggtaccgagaagcttggaataattaaaggaagctcaaaagccagaactgttcttgcgttccacgctgcactttttgagctctgcacaaacaaccaaaactctccattcagagtattgattttcgatacgcctcgccaacaggaaattcactgggaagatcttgacgcgtacatccaggcgctgaagtccgtagcagtaagaaataaggctcaagttattttctctactactagctataaatatgaaattgacacaaagaccgacatagaatggctgcctaaatttgcgggcgatgaacagccaatgtatttagggaagatcggtcaagctccgattgaagggagtgagtaa

SEQ ID NO: 336142 - DNA, 714 bp, Pseudomonas aeruginosa
atgcgtgaccgtatggccgagagcatcgagaagttcggagtgacgacggatctcttagagggcaatcagaactacttactgatccctaagaagcacttctcctggatatcggagagcgaacgtcagctgtcttggatcaagcgcagactgccccgtgaaatggcggccgagcgaatctattcgccggcgctatctgagagagacctactgatagccacgatcgactgcgctgaatcgcccccaaggggaaagacgtcatttctggcaaacctgaagcgcgcatgggacgagcagcagcaactggaccagcaattggactggatcaaggaacggaacgaacgagaggcctgcttgcgcgtctgggagtggctgagcaaacacctttccaaccatgtgttccccaaccctcgccctgggagccatcaacgcctgctgcaaaccctcgacaccttcatttggccccctcttgagagagctcactgcatcgcgacggtcaggcgactttggaggcagaaacttcggcgccaagaagcgaaaggtaggaagcaatacaacttcatcctgagcgacaaggcgatcaagcgtctggacaggttctccaaaaatctcgagccctctagagcccgcatcttagaaatcctcctgcagatggaggatgagaaggatctgtatctcaaggagcagattcgtgtactgcgagggatcgagctctga

SEQ ID NO: 336143 - DNA, 399 bp, Pseudomonas aeruginosa
atgagaacaacaacaagcattcgccgtgtcgctgccgtcctggcagcgctgcacctgctcaccttcgccgaggttccgctcgcccaggcggcgatgatcggcaccgccgaggtcatgcagcaacagcagcacaacctcgatcgccagcaactgctgaagatgctcgacgaccagggcgtccagaagaagctggaggccatgggcgtgccccgcgaccaggtggcgagtcgcatcaacagcctgaccaacgccgagctggcgcagttcaaccagcagctggaccaggcgcctgcgggcggcatcatcggcatcatcgtgttgttcctggtgatcttcatcatcaccgacatgctttgcgccacggatatcttcagcttcatcaaatgcatcaatcggtga

SEQ ID NO: 336144 - DNA, 900 bp, Pseudomonas aeruginosa
atgacatttaaaagaactttatcgggacgatcaaacctgcctgcttttttgggcgtaaatttcgtgatatacactgagggcggtgaattcgataaagaaaaaaaacaaagcagccactcaatcgatgcagtattctggaaaggcttcttttcacgatttctaccaaaatttagttacgaaattaggcctttaggatcaaaggataacctgttgccgcatgctcaagatgttgccgcatcaaaggtcaaaaatactatagtagccatggatcgcgatcacgatcaccatcgtctctgcctaatagatcacccttgtgttatttatacctatggctatagttgggagaacgatgcctggagggcagaagctataatttccaagcttgaaagaatttctacaaaaggtattaatactgataccgcagaggcgattagagacaaatgtcgtaatttttcacttgacttcaacaggcttatatttgttgatgtactttgctcactcaagagagtacaagggatacatcgtgagaaattctgggggtatgtcgacattagcgacgccaaccggttcagggttaaaaaagaagcttttaaaaagctgattggtacaatcaagaatggaagagtcgacaagtttcagtataatggccaggaaagagtcgtggctgaacgtgactgctatggtaaattgtgggctaaattcttgtacgggatattttgtgaatgctttcgcgaggttacagggcagaaaaatctaaatagagaaatagcggacatgctagtggctgagcatttccagcatacagatttggatagagacccagaactgagggattattatcagggcattgctgcagttctgaatagacgggtaattaaggggcacattctgcaacgctag

SEQ ID NO: 336145 - DNA, 1263 bp, Pseudomonas aeruginosa
atgaatctcattgaaagtgtaaccattaagggtttttggggaaatcacgaagtttctttcaagacaagcgaggatttgaatttcttaatcggcccaaacggctctggcaaatccaccactctgaaaataatttctggagtccttcgtgctgatcgggactacttgtcggagctggatttcgagtcggttcgtataaaccttaaagatcctcgctcgaagcgtaaaccatacattgaagcagtgaaaaatctcagtgttcctttttttcactgtgactacaagcttgtcgagtcatctactgaaaggccgtatacgtatgttttgagtgatgtggatggttatgataccgcaagcaaaagctcgttctttattcgagcccaactggcaggcaatacagctgccagccgcactcttgtgaaacatctatctgaaatggtttctctgacttggttatctgtgcagcgagctgcttcgcttaaaggcccaggggggagtgatccagtcgatttgagactggacgatttctcgaataggttagtcagatatctctcctctttgagtaagcaggtaaacgcgttacatgagcgctttcaagagcatgtatttctctctttgctagttaaagaaaatgacaagcttgcggctctcccggggcagaaaaaggttgacagtgagaaacaggcattattgcagattttttctgaattcaagctcgacaaaagaagttaccaaaagaagcttgatgggcactttggcatgctagaagacctccgtggtcggtggggaaaaagtaatgatcttaagccagccgatttcatggcccttttctcccttcatcgcattgagagcactgtggatttctgggaaggtattaccaaagaaaagaacagtatcgtttcgtcacgagatctttttttggaaatactcaatagactgctactcaagaaaatcatatcgatcaatgagcgcaatgaactagtaattaagactgactctggaaagactttgagaccctcccagctttcgtctggagaaaagcagatcattgttattcttggtgaagctctcttacaggaagggcaaaactttatttacatggccgacgaaccagaaatttcacttcacgtagcttggcaggaaagcctggctaaaaacattaaaaaccttaaccctgctgcccaaattgtgttcgccacccactcccctgatatagtcggacctgaccaagatcgtttaatccacatggatcgttgcgtaaaatga

SEQ ID NO: 336146 - DNA, 321 bp, Pseudomonas aeruginosa; identical to SEQ ID NO: 322269

SEQ ID NO: 336147 - DNA, 123 bp, Pseudomonas aeruginosa
atgcaaagaacagtgaccgccctctgcatcatcgtcgccaccctcggcctagtcgcagtgttcgcggcggaggtattcccgagcctccgcacgctggccgtctggcaagcggggtgctactga

SEQ ID NO: 336148 - DNA, 792 bp, Pseudomonas aeruginosa
atgagtttactctctatcagagtgcagcaaggccagactagcttccaagttttttcgccaacccgccaactctttaagtttttgctgtgcctgccctggaatatcactgacatcaatcccttgagtgaaatctttggcttcaagtttttctgctgcaagctcgcagaatactgcaatctggcgaagaccaaggacgacaaataccagctcactaccaaaaaccgtaacgggcactccttccaacagcgtcaccgtatccttgagctccctacgcagaacagcatcagctttcactgtcgaaagtccagctttacttgcctccctagccaatcgatacatcagttgctcaaagtgacacaccagagaatatgcagccccactgttactgcattttgcgaaacgctcctcggcgtgccgatctgcaatgctcttccgcgtctggaagtaggggacacctatagcaacagctatcgcaagaaagccacccagagcctgagcccaacccgcagtatcagccggaaggtacccatttttcacccaataagcagtactgccgaccagcaaccacaaactggcactgacaaaaaacaaccaccaaatcgcccatattgtccgttcaaccaacgtcgacggaatttctaccttcaagatgaactccctttatcggcaaagctggatggagattgcttacttgtagatcattggtcgagaggtagccatataatcgacctgagcgaccagatgcatgccagacaaaagcagaaggaggacggagcatgcaaagaacagtga

SEQ ID NO: 336149 - DNA, 1836 bp, Pseudomonas aeruginosa
atgagcagcttccagcagcacctccaccaagcagcccaacagcgcgccctcccgttccagaaagagctttatgtcgacctcttcgccggcgccggcggcgcaagcagcgggggcgctcgtgtctatcgagatccagacattgcgatcaaccacaaccccattgccattgccgttcaccgagccaatcacccgaacaccctccacttcaggacagacgttttcgaggtagatccgctagaggcaaccggcgggcaacccgtgggcattctgtgggcctcgcccgattgccgccacttcagcaaggccaagggcggcgcgcctcgcagcaagcgggtccgctccctcgcctgggtcgtggtccgctgggtacacgcgacgcgcccacgtatgttcttccttgagaatgtggaggagttccaagactggggaccgctcgacgaatccggcaaaccgatcaagagcgaggctggtcgcacgttcagggcattcatcgcttgcctgaccactggcttggcccaggaccacccggacatgtccgagatactcgacgcaatcgggctgtgggttcccaaacaagcactagtgcgcggcctgggctgtgatgttcagtggcgtgaacgccgagcagccaacgccggcgccccgacaatccgcaaacgcctgttcatgatcggccgcaccgacggacgccccatcgtctggacctccccgaaacgtcaccagactccgcagccgggtcagctaccttggcgctctgccgctgagtgcatcgactggagcgacctgggcaccagcctgtttgatcgcgcccgaccactggtagacaacacctgccgcagggtggccaaggggttctggaggcacaccgtcatggccgaccagccctaccttgtcccgatggatgctcaacacctggcggcggccagcctcacggaattcgccaacgcgagcagccaacgcaccttcagcgtggccgagcccctgcggacgcaagtcgcccaggtcaagggcggacacttcgcactgtcagccgcaacgctggtggagatcggctacggcgagcgagccggacaagctccccgcgcccccggtttggccaagcctctaggcaccgtcgtggcgagcagtcgaaagcacgccctagtcaccgcagcgatggtgacactgcgcaagggctctgtgggcaatggactccttcagccgatgaactccattaccaccggaagcgggcaccacgccatcgctgcatgccacttcgagcaagccaacggagggttctataccggtgacggccgggctgccgatgcgccactcagtacgatcctgggacgcggtacgaaccaacgcctggctactgcgtacctggtgaaatactacggcaccgggcacaactgtcaggacttacgcgagcccatgcatacgcttcccaccagagagcgcatggccctagttacggttaccaaggttcctgccagcatcctgccgcccgagctgctggagcgcgcaaagcggtgcgcggagttcctacgcaagtatctgccggagcacttcagcgagccagccgacgtcgtgctactgggggactacgccctggtggacttcaccctacgcatgctcaaggcgccggagctgaagatggcgcagggcttcagccccgattacatcattgatcgcggcttgttcgagaccgtcgatggacaactcgaatggcgccccatcaacaacaccgaacaaatccgcctcatcggcaacagtgtttgcccggatgaagcggaagacctcatcgccgccaacgccgcggacctgatcgacctataccaacgggaggcagcatga

SEQ ID NO: 336150 - DNA, 363 bp, Pseudomonas aeruginosa
gtgatctcggcccgcgtgatctcgatcacgcgggcctgcctgctgctagttggtctcggcgccgccggcggtgtctggttcggcgcgcggcactatcgtccgcagctcgatgccgcgcaggcggatctggccgcctgccgttccgctcgtgggagcttggaggccgcagtagcggagcagggcaggcaggtcgccgcgctgcgccatgccggcgagcagcgcgccagagaggccgcccaggcgatggagcaagcgcgcaagcgcgccggcgatgagtatgccgcggcgcatcgcctgctgcgtgagcgtaccggcggtgagcactccgtcgaggtggtcattgatcaggagttggggctatga

SEQ ID NO: 336151 - DNA, 264 bp, Pseudomonas aeruginosa
atgaaggtggtgctgatactggtgatggtcgtgctagcgggatgcgccggctggcaagaagacgagttgcgcatggtgcgggtggaggtgccggtgagggtgctgtgccgcgtgccggtggtggatgtgccggcctgggcaaccgctagtctgaagaagaacgatgatctccagaccaaggtacgggcactgttggctgagcgccgacaacggatcgggtacgagggccagttggtggccgccaatagggcctgtaagaattag

SEQ ID NO: 336152 - DNA, 1701 bp, Pseudomonas aeruginosa
gtgcatcttgtaactagatcttattttgataatttttgcagggattttggggctccctacgaagaagctaaaaattttgaggcatttgttaattattgcgctttttcgaagtattctggagatagcgttgaagctagtgacttagtgtatgaaggggctgaccctgggattgatggagctcttctgtttcttgatgatcgtgcagtattttccgtggaggaactggaagagatttttaagactactcgtcgtgagtataaagtaacgatagttttaactcaggcaaagaggtcgatgagttggtctaagcaggaggttgactcttttgtggctgcagttgttgattacttgtcggagacgcctgcgcaaccacatagtcgttatctttctgacttcaaagatatgtttaaaaaggtctttgaaaatattggtagggttgttggtggactaccaaatctccacgtctatttcttcagtgcagcatccgatacagatgctgtggaaatcaacgcagcttttcaagttggagaggctgcgctcaaaaaattaggttattcgaatgaaactattttttttaaggcacaccgagaggtaatacatgatctgtggctttcggcgggtggccccatggaagctcgattggctactgtaggatacgctccctttcctgcggcgcccaatataaataacgcttatgtagcaacagtcactgcacgtagttttattgactcaatattgaaagatcagaatggcagtcctagaaagaagctctttgaggagaatgttagggactttcttggggttgatgttgaggtgaattcggagatagcggaaactctaagtgatgaagagaaaaagccaagatttggtctgatgaataatggtgtaactatagtagcgtcaagtgttaggcccgctgggcaagaaatctatgtgcgagattttcaaattgtaaatggttgccagacttctaacattcttatatctatggatgctcaagtcgacaactctgttagcttgatgataaagctaattgaggctgatgagccttcagttgttgacgatattgtgcgtgctacgaataggcaatcgaaggttgaagacgcacagtttgtgtcgacattagactcgttgcgtgatttggaacaatactttaacgctaggggggcgggggaggctaatagaatttattttgagcgtcgaaaaggacagtatagaactgagaatgttgcacccgtacggattttcgatgtgagagaaacagcacgttgctatgcggctctcgttatgatgcgtccggatctttccagtcgttatccaaacagattaactggggagttactaagcgatgtatttgctcaaggtgcgcctgaagaagattactataccgcttgctatagccattatcgcttgaaaatgcttacatccaacaagcggtttgatggtaggtactcgaaactgcgctggcatattattactgctgcctcgaagtattgcggtgccaagtatagggaaatggggtgtaggactaagaatgaggctttatataatcttttttccagtaatgatggggactggtttgatcggcttgatcttttggttaaaactgcactacctgatcctgacatctctcgtgacttgttaaaatctccaccgctcactgcaactgttctttcaaatttggatgcaatattggactga

SEQ ID NO: 336153 - DNA, 624 bp, Pseudomonas aeruginosa
atgaacgacaaaaggctttctgaaaaattaatctatcttgattcagactttatatcgcgactatacgaatcagaatttaattactccccaaaaacacagataacgcgcacagaaagtatccaagcatcagcatctctagcccttttctcaggtggcggcaactcgagcgagagtaggagttacagcgtctcaagcttggagatgctagataggcttggcaaacgccttaagagttatccagagttttcctcactcgactacaaaatggactctccatctgcttactgctggctcgaaggcgtcttaggagtcagcaaaatcgaagtaacaaaaacaactcacacaataactctgattggaaagccggacccgaataaaccagagaaaagcagcggaattatcggagaagaagtattctttagtttcaaaagtggcgattccaagttcgccctatcacctacagatcagtacttcatgtctggaattgccgcactcaaggggttaacacatatagtggttgacaggttgtcaataccgagccgcgccttggttcgcgttttttcggcgaacacttcgttcggagaatggattgcgacaccactagttatctatgacaccgactga

SEQ ID NO: 336154 - DNA, 1473 bp, Pseudomonas aeruginosa
atgagtaaggcacctctaaatctagtttctactacgatctacggcgacaacacctctatagatgggcttggagatcctgctggaggtggcactggaaagggaaggcgtgttcctggtgtcgaggctagcgaacgtccatttctacaagtcatgcaggaagagtcaattattcgtagtggtattgagaaagatggatacccagaggtcaagaagaaaatagagagtaagatgaggtccgctgctgccaaagcgcgcaaggcagcgagagataaatatagtacggcactggagaagctggttggtgaggtttcgggcttcctaagtttcattgactcccaatttggccttatggaggaaaaaattgctgaaggtagtaagtcgtacggctcgaatcctatctacatggttgcggatttttctacgcgtgagctgatgaaggcacgtgaagaggcgaagagaacaaatgataactcttcgtatgtggcgttctgggataacatgtctaaaagttataaggctatctatgaggggaaagcgtactctgaaagtatcaagaaggtaggggaagattttgatagtctagcgcttcagatgttagattcaacggctgcttccttgagtgatgacctggcggttgttcttaggagagttagtgctcaaggtgctatttttgatcagcaaagagatattcttcttcgtgagttgcccaaggatttgcggggaagagtccaggtaaaagctggtgatatctctaaagatacgcgtttgaatggtgtgaatagactgcgaagggctgctcaacagatttccgaggaaagtaaggtcgctgctgttggttataagtacaggtttgccaatggaaatataactcctccgctgagttcaatggaaattgatgagctaaatgttctggttgtaaagcaggagacgacagatatagggaagaagtggctcgactaccatcaggcaacgctgaactccgagaatgctagggttgcaagtgattttgctaatgaaatcggccgactcgctgattacataaaacggtcggagtctcttgggggacaggcgcaagcaagaatcgatgttaagaaaggtatcccgcaaagcccgcctggtgtggatgttgttagtaacatggagctttccaaaaagcagagagggattcttaagagcaatgtactagtgctgtcatggttctatggtcaggttaaaaataatagtccatgggactacaagcagcaaggtgcacagtatgaggctttcggaaacttcaattacggtgctacgggcgctgccgcgggattgtcggagcagattttattgagagcggcaggtgctgctcagactctagcaggaacctctgataaagattttggggcttggtgggcggggactccgtatggcgacgatcccgttgatcagatatggattaaggcgggaatagactatgcgaagtcgaaagggtactaa

SEQ ID NO: 336155 - DNA, 942 bp, Pseudomonas aeruginosa
gtgcgatcgctcgccgacctagcttctgcaacagccgtaaccctgcacctgcgtttcgctgtcgaccacttcgcgccaccagcgtcggccggcatgcggttgtcgcgtgctacgaaaaaacgcactcgatgccttaaaaagaaatgcgcggtggatcaagcgtattccgctatatttataaagctttccatttccttggaggcagcgcttgcgcctgaatcagtcatatctcggctaaagatcgaggctgagaaccttcgttcgcgtcgtggggagctggaggctagccttgtcaaatgccaaatactacttagtcaggttaaagaattgacgcccttctttaggcgccaggaggctcgaaatacagcatctaacttgaatagattgattgctcatcatcaacgtattcaagagaaaatcgatacggactatgatagggttgttgaatacttagagaaaagggtaaataaatttttctctaaagatttaatcaatgaaatatactcaaggatcgatccgcatcctgattttaaaacgattgagcttaagtgtgatttcaaaggagatagcggcccgcgccttgaggtgcttttaaaagacgaaaacaacaagctgaacgcccctgcctttcactttagttctgcccagccaaatatattgagcttgagtatatttctggcgcgagcgattcatgcacgtaacgcgaatatttcaattgacacgatattgattgatgatccaatccattcgatggattctataaatatactttctacgattgatatattaagaaatatttgctgcaacttgaataagaaaataataatttcaactcatgacgaaaacttttttaggctgctaaagaagaaaatcccagaaaatctatacaactcaaaattcattgagctcgaaacatatggaaaagtggcacgacgagaatga

SEQ ID NO: 336156 - DNA, 711 bp, Pseudomonas aeruginosa
atgacctgcattctggtcgcgcatttaggtgatgaggtcatcatcgcggctgacaaacgtgtcactcagatcaccgagcacggcgcaagaatcccttgcggtgacaacgaagagaagatcgtcagaacagaggttggcatcatcacgggcgccggctccctggcgatgcttgatcctgtcaaatcgcttgtcagagaccatggcttcggcagtcctgatgaggtattggagctgatcctgcaagcccgcgcctcatttgcacaggttcatgctgatagccctcgcttagcagccgatctcaccgagacgtcatggatgttcacgtaccccactctggtgaatgatcaacctgttactcgtttcgtctacttccaccagcaccacagcgccgaatccctatgtcgcctaaccgagggtagagtgatgtgcttcccaggtggtttctctctggcgcaagctcaggcgttgcaggccaggctacaggctgtggttactgaagctcttgagtccttaccagctaatcaagtcaagcagtccgtcgtgtcgtccatgctcaccctgatgagtgagaccgctgcaattagtggaactgtttcgagcacctgtgatgttgcgcttgtaaacggcagggatgtagatattgcctcaggcgtgtcggagggtgatgaaattctggaattcattccgatgccccgcttagcagctcagtga

SEQ ID NO: 336157 - DNA, 1377 bp, Pseudomonas aeruginosa
atgaagcacctttcgctgacagcacgcatgagcctgatgttcatgtccgcggtaattgcagtcctgacggtagcagggctgagtttcaatatgctcagccagcaccacttcaagatgctggatcggcaggccctggtggagaaactcgaatccgccaaacatatcctcaacaatgctcgcggtgaagcgagcctttcggaagaattaccgcagttgcgagccttgctgggagcccatcaggatctggcggccactatcctggccagtgacggttctgtactgttctccgcccccagagcagtcgaagtaccagagcgtttcagacgtgaaaatgagcagagcatgtgggagtggcagaacggccaacacatgtaccgcggcatgacggcgcaaatctcggtagccgatcaggctgagccgctcacagctttgctgattcttgacgtcaccaatcacacacactttttcgacacgctgcaacgatggttctggattggattggtcatcagtgccctgttcagtgccacgctcggctgggtggttgctcgcagcggccttaggcctctgcggcaagtcactcatgtggcctccgggatgtccgctcgctcgttacaggaacgaatccctctcgaaccagtgccgcgggaacttcagcaactggttctatccttcaatgcgatgttggctcggctagaggatgccttcgttaggctctccaatttttcggccgacattgcccacgagctacgcacgcccgttagcaacctgatgacccacaccgaggtcgtgctgagcaagaaacgcgatatcaatgcctatgaagagaatctctactccaacctggaggacttgaagcgcatgtctcggatgattgatgacatgcttttcttggccaaggctgataatggcctaatcatccccgagcaggccaggatcgaactggctgacgtagtcttcaagctgtttgactactaccaccttctggccgaagaacatggcattgaactatcgctcacaggcacaggccaagtgctgggagatcggctgatgcttgatcgtgcactttccaacttgctgtccaatgcactgcgctacacgccggtgggacatacaatttcggttttgatccgcgagacagcggactccacaaccttcagcatcgagaacccaggggacacaattagctcagagcatttagagaagctcttcgaccgcttttaccgggtcgaccccgctcggcgggagggaagcccgagcaacgccgggctcggacttgccatcacccgatccatcattgaggctcacaaaggccgcatctggtgcacctcagccgccggcctcacgggctttcacatcgaattgccccattccagatga

SEQ ID NO: 336158 - DNA, 2229 bp, Pseudomonas aeruginosa
atgtacccccaattccgtcgcggccatctcgccgctgccgtccttttcgcttcatcgagcctgctgggcgggcaggccctggccgaggacgagcgcctggaagaactggacgaacgcgccgaatcggtggtccagctgggtgacgaggtggtgctgggcaccgccgaacaggagctcaagcaggcaccgggggtatccatcatcaccgccgaggacatcaggaagcgcccgccggtgaacgatctctccgagatcatccgcaccatgcccggggtcaacctcaccggcaacagttccagcggccagcgcggcaacaaccggcagatcgacatccgcggcatggggccggagaacaccctgatcctggtcgacggcaagccggtcagctcgcgcaactcggtgcgctacggctggcgcggcgaacgcgacacccgcggcgacagcaactgggtgccgccggaggaggtcgagcgcatcgaggtcctccgtgggcccgcggcggcacgctacggttccggcgcggcgggcggggtagtcaacatcatcaccaagcgcccgaccgatcgtttgcgtggctccatgacggtgttcaccaacattccggaaagctccaaggatggcgccacgcgccgcgccaacttcagcctcagcgggccgctgaccgaagccttgagcttccgcgcgtacggcagcgcgaacaagaccgattcggacgataccgacatcaacctcggacataccgtcaacccgagccgtaccgtggccggacgcgaaggggtacgcaatcgcgatctcagcgggatgctgtcgtggcaggtgacccccgaccaggtcgtcgatttcgaagcgggcttcagccgacagggcaacatctatgccggcgatacccagaacaacaacggcaccgccaatacccagggactcgccgacgacggtgcggagaccaaccgcatgtatcgcgagaactacgccatcacccacaacgggacctggtcgttcggtacttccaggttcgtcgcccagtacgactccacccgcaacaaccgtctggaggaggggctggccggttccgtcgaggggcagatcggcgccgaccgttcgttcagcaccagcaagctggagaactatcgcctcagcggcgaactcaaccttccgttgcatgcgttgttcgagcaggtgctgacggtgggcgcggagtggaacaaggaaaccctcaacgacccgtcctcgctcaagcagggcttcgtgggaagcgatagcttgccggggacccccgcggccggctcgcgaagcccgaaaagcaaggcggagatccgtgcgctgtacgtggaggacaatatcgaactgcgccccggcaccatgctcacccccgggctgcgcctggacgatcacagcgacttcggcctgaactggagcccgagcctgaacgcttcccagacgctcggcgaatacttcacggtcaaggccggtatcgcacgggccttcaaggcgcccaacctgtaccagagcaacccgaactacctgctctatacccgtggcaacggctgcccgatccagaccagcagcggcggctgctacctggtcggcaacgagaacctggacgccgagaccagcgtcaacaaggaactgggcatcgagttccggcgcgatggctgggtcgccgggctcacctacttccgcaacgactacaagaacaagatcgtcgcgccgctggatgtcatgggacagaccgggaccggtaacaacatcctgcaatggagcaacgcgaagaaggcggtggtcgaaggcctggaaggcaacctgctggtccccctgcacgaggacctgagctggagcaccaacctgacctatatgctgcaatccaaggacaaggacaccggcaacccgctttcggtgatccccgagtacaccctgaactcgaccctggactggcaggccagcgagcgtctttccacccaactgaccagcaccatctacggccgccaggagccgccgaagcatggcaccagccgcaacacgccggtggtctcgcgaaaagaggtgggtacctatggcatctggggcgtcagcgccggctacaccttcagcgagaacctgagcgtacggggcggggtaagcaacctcttcgacaagcgcctgtaccgccagggcaactccttcgacgccggcgcggcaacctacaacgagccgggtcgcgcctactacgtttcgatgaccacctcgttctga

SEQ ID NO: 336159 - DNA, 2778 bp, Pseudomonas aeruginosa
gtgttcaaggatctcggcatcaaggggcgcgtactgctgctcaccctgctccccaccagcctgctggcgatggtgcttggcggttacttcacctgggtccagctgtccgacatgcgcgcccagttgatcgagcgcgggcaactgatcgccgaacaactggcgccgctggccgccaccgcgctggcgcgaaaggataccgccgtgctcaaccgcatcgccaacgaggcgctggaccaaccggacgtgcgcgcggtgaccttcctcgacgcccgccaggaacgcctcgcccatgccgggccaagcatgctcaccgtcgccccggccggcgacgccagccatctgagcatgtccaccgaactggacaccacgcacttcctgctaccggttcttggccgccaccacagcctgtccggcgccaccgagcctgacgacgagcgcgtactcggctgggtcgaactggaactgtcgcaccacgggaccctgctgcgcggatatcgcagcctgttcaccagcctcttgctgatcgccgccggcctcggcgtcaccgccctcctcgccctgcgcatgagtcgcgcgatcaacgcgccgctggaactgatcagccagggcgtcgcccagctgaaggaaggccgcatggaaacccgcctgccaccgatgggcagcaacgagctggacgaactggcctccggcatcaaccgcatggcggaaacgctgcagagcgcccaggaggaaatgcaacacaacatcgaccaggccaccgaggacgtacgccagaacctggaaaccatcgagatccagaacatcgagctggacctggcgcgcaaggaggccctggaggcgagcaggatcaagtccgagttcctcgccaacatgagccacgagatccgcaccccgctcaacggcatcctcggtttcaccaacctgctgcagaagagcgagctcagcccgcgccagcaggactacctcacgaccatccagaaatcggcggaaagcctgctggggatcatcaacgagatcctcgacttctcgaagatcgaggccggcaagctggttctggaaaacctccccttcaatctccgcgacctgatccaggacgccctgaccatgctggctccggccgcccacgagaagcaactggaactggtcagcctggtctaccgggataccccgatccaattgcagggcgacccgcagcggctgaagcagatcctcaccaacctggtcggcaacgccatcaagttcacccagggcggcaccgtcgccgtacgcgccatgctcgaggacgaaagcgacgaccgcgcgcagctgcggatcagcgtacaggacaccggtatcggcctctccgaggaggaccagcaggccttgttcaaggccttcagccaggccgacaactcactgtcgcggcaagccggtggcaccggcctgggcctggtgatctccaagcgcctgatcgagcagatgggcggcgagatcggcgtcgacagtacgcctggggaaggtgccgaattctggatcagcctgagtctgccgaaaagtcgcgacgacaacgaggagccaggcgcctcctgggccgcgggccagcgcgtggcgctgctcgaaccgcaggagctgacgcgccgctcgctgcaccaccagctcaccgacttcggcctggaagtgagcgaattcgccgacctcgacagcctccaggaaagcctgcgcaacccgccgcccggccagttgccgatcagcctggcggtgctcggcgtctcggccgcgatccatccgccggaagagctgagccagtcgttctgggaattcgaacggctcggctgcaagaccctggtgctctgcccgaccaccgagcaggcgcaataccacgcgaccctgcccgacgaacaggtcgaggccaagcccgcctgcacccgcaagctgcaacgcaagctgcaggagttgcttcaagtccgcccgacgcgcagcgacaagccccacgccatggtttccggacggccgccacggctgctctgcgtcgacgacaacccggccaacctgctgctggtgcagaccctgctcagcgacctcggcgcccaggtcaccgcggtggacagcggctacgcggccctcgaggtcgtgcagcgcgagcgcttcgacctggtcttcatggacgtgcagatgcccggcatggacggccgccaggccaccgaggcgatccgccgctgggaggccgagcgggaagtcagcccggtgccggtgatcgcgctcaccgcacatgcgctttccaacgagaagcgcgcattgctgcaggccggcatggacgactacctgaccaagccgatcgacgaacagcaattggcccaggtagtgctgaagtggacgggactgagcctgggccagtcgctggccagcatgagccgtgcgccgcagctcggccagttgagcgtgctcgaccccgaggaagggctgcgcctggccgccggcaaggccgacctcgccgccgacatgctggcgatgctgctggcctcgctggcggcggaccgccaggcgattcgccaggcccgcgacaacgacgaccgcaccgctttgctcgagagagtccaccggctgcatggcgccactcgctactgtggcgtgccgcagttgcgcgcggcctgccagaccagcgaaaccctgctcaagcagaacgatccggcggcggccgcggccctggacgagctggacaaggccatcgaggccctggccgacactgcctcggccaccacccacctgtcctccaccagcctcgactccagcgaactctga

SEQ ID NO: 336160 - DNA, 153 bp, Pseudomonas aeruginosa
gtgctggcacgcctgctgagcttccccaacgtggtggtgactgcccaccaggccttccttacccgcgaggcgctggcggcgatcgccgacaccaccctggacaacatcgccgcctggcaggacgggacgccgcgcaatcgggtccgggcctga

SEQ ID NO: 336161 - DNA, 180 bp, Pseudomonas aeruginosa
atggacctggaggaccagttgatcaagacggacatcgacactgcacggtcgaagagcattacagcgaccccgaccctagtcatccgggacaaccagacgggacgaagcgtgaagctagagggcatcgccgacgaaaccacgttgctgtcggcgatagactggctagccaaggatcactag

SEQ ID NO: 336162 - DNA, 282 bp, Pseudomonas aeruginosa
atgaagggagcaacgttgcacaggctgatcgatatctacgccgacagtcgccgtgacctgcgcgtccgtttggcggccctccggatgttcgtccgcgcggtgtgcgccgatcgcaacaccagcttcgccgagtatcgccaggtggtcggcggctcctcaagggcatgccgttcaccgagcaggcgcttgagcgcgagcgagcggcatatctggatcgcaccagagctgcgagacaggccatggaggagagcggtgcctggcttatcggaaactcagccatga

SEQ ID NO: 336163 - DNA, 366 bp, Pseudomonas aeruginosa
atgactgatcaagctatcgagcaagaaatccaagccaagggccttaccgcaccgcgtatcacgcctgccagtctcgaagcgaacatagatagcgagcattacttcactgcattggatggcgtagacggttactaccgtggcggctatgaggcacaaggtgtgcgtaatgccgaagcactaagcctgctaaccttctgcgtgttggtactcaaaaacggtttcaccgttaccggcgaaagcgcctgcgccagtccggagaacttcgacgccgagatcggccacaagatcgcccggcagaacgccgtttccaaggtctggccgctgatgggctacgagttgcgcagcaagttgagcttagcctcctga

SEQ ID NO: 336164 - DNA, 2229 bp, Pseudomonas aeruginosa
atgagcgccaactttcaacaactcgccaatttcatctggtccgtagccgatctgctgcgcggcccgtatcgcccgccgcaatacgagcgcgtgatgctgccactgaccgtgctgcgccgcttcgatgcagtgctggcccccaccaagcaactcgtccttgctcgctacgaagcactgaaaggtaaggagcccgcattggtggaccgggtattgaacgaggttgccaggagcgaagacggcacgccgctgggttttcacaaccatagccagctcgatttctacaagctcaagggtgaccctgacaacattgctcgccacctcaccgactacatcaataatttttctgagaacgttcgtaagatttttgaacgtttcgatttcgaaaaagaaattgaaaagctggaagagtctaaccgcctctatcaggtcgtttcccagtttgccgaaatcgacttgcaccctggtcgcgtggacaacatcaccatgggactgctgtttgaagacctgatccgccgcttcaacgaatcggccaatgaaacagcgggggaccacttcacgcctcgcgaagtcatccagctgatggtcaacctgctgctggagcctgacaccaacgtactcacgcaagagggcgtcattgtcaccatttgtgacccggcttgcggcactggcggcatgctggccgaggcccaaaactggatacgtgctcacaacgagcaggccaccgtgaaggtgtatgggcaggactacaacccgcgctcctatgccgtggcggcctccgaccttctaatcaagggccagaaagacagtcgcgtcgagctcggtaacaccctcaccgatgatcgttttaccgacatgcaatggttcgattacctgttggccaacccgccgttcggggtggactggaaggccgagaaaaaggagatcgatcgctggcccgatttccgaggctacaagggcaagctgccacgcatcaacgatggtgccttgctgtttctattgcacatgatcagcaagtttgccgattacgagccagatgacaaggatctacccggctcgcgtgctgcggtcgtgttcaatggctcgccgctgttcaccggaggggcgggcagtggtgagagtgacatccgccgctggatcatcgagcgcgacatgctcgaagccatagtcgccctgccggagcagatgttctacaacactggcatcggcaccttcgtctgggtggtgacgaaccgcaaggtagccggccgcaaaggcaagatccaactgatcgatgcgcgcgaacgctacacacccatgaggcgcagcctgggtgacaagcgccgctaccttgagcagaccgccattgatgctattacccgtgaccatggttcgtgctcaaacgcaaagcattgggtaaggctggacaaggacggtaagcccctggagtggcgtgagtcggcaccgacagagcaggcacccgaaggtcagaaatggagcgaacgcaccactgctcaagttttcgataacaccgacttcggctaccgccgtatcaccgtgctgcgccccctacgcttgcgctttgagatgaccgatgaggcgcgtgaacgcttcctcaatacctgccccgaactgtatgacgccctgcaagctgtgcaggaccgactcggcagcgagccgtatttcgactggaaccatgtgtgggatgaggtgcagcaggttttcaagcatctacctcgcaatgtggaaggctggacaaaaggtgccaagggcactgcgcaaaagaaaatcttccgcgagtgcttcaccacgaccgatcccgatgctgcgccggtcatcgccaaacgctacaagaagggcgaggtttccgtcggctctgcactgttcccacagcagacactgcctccagtggagcccagtgatctgtatggcctgctggggctatacgccgagggcaacacctttgtggagtacgagcccgatccggtactgaaggatgcggagaacattccgctgaaagaggacatcgtcagctacgtgctgcgtgaggtgcgcccctacgtggccgacgcctggatcgaccgcgagacgctggacgagcaggatggcggcatcggcaaggtgggttacgaaatcaacttcaaccgcgtgttcttccagtaccagccgccgaggccgctggccgagatcgatgcagagctggctgaggtcgagaagcggattttgagcttgctgcgggaggtaacggagtga

SEQ ID NO: 336165 - DNA, 1191 bp, Pseudomonas aeruginosa
gtgaacgacgccgcagttcgagtgaagtttatttgccgcctcgggtatggcgattcattgccaaaggaagaagcgttcgccggtgatgtacccgtatatgggtcgaatggacagtacgcaaccacagctgtgagaaacactgaagtgccagccattgtgttggggcgcaaagggtcatatggaaaagtgaactgggcttctgagggctgcttcgcttcagacacgaccttcttcgtcgatgagcgtcttactaccacgaatcttcgatggctatattgggggctgcagactctgggtttggatgaaggttctcaagaggcagcggttcccgggcttaatcgagaatctgtgtatgaggaacgtatattactcccttcatcggcccatcaagcgttcatcgccaattacctagatcgcgaaaccgcccgaatcgacgatctgattgccgagaaggaacgcatgctgtcgctactaaatgaaaagcgcgccgcccttgtcagccatgccgtcacccgtggcctcaatcctgacgccccgctcaaaccatctggccaggagtggctgggcgagattccggcgcattgggatatatgccaactgaaacacacctgggcctcatcggactatgggctatcggaaagcatcagggacgaaggaaacattgtagttcttcgcatgagttgtatcgtcgatggtcggattgatgtttcgaagtccggaatgatcactgaagtcgacgatcacttgctgctccgacgagacgatctgctcttcaaccgaacgaatagtcttgatcagatcgcgaaagctgggctagtagatttcgacccgaaaaaacctttgaccttcgcttcctatctggttcgtatacgtgcgaatcatcgtgcgatgccgcagtacttggtcgcgttactgaatgcgtcgctgttcctagagtttgctagaaagaacgcaattccagcgatcggccaggccaatctgagcccgacccgatacggggagattcacatccctttgccgccaaaggccgagcaggaggagatcgtcaccttcctacagcaggacgcagaaacatcgacaccagtccgggaacagataaaaagctccatcaatctgctgaaggagcgccgtgccgcgctgatctccgccgccgtcacgggcgagatcccgctggagggaatgaaaagttga

SEQ ID NO: 336166 - DNA, 1344 bp, Pseudomonas aeruginosa
atgacagtgattgccggtgtcaatggtgtgggtaagtcaacgatactgcaggcaatagcaatcgcctactcccatgccctaccggaatttacggtatctagggagaagccgctgccaatactcaactcggacatccagcaaggtaagtcatcctgcattatagaaatatggagtgacggcttggaggcagcgtcgctgaacatgtttctttccaaggaggatcttggtcggaatgaaaagctttctcttgagcgcaagcaatccttgatgaagcaggagctttctctcttagaaaaggggactccggattacaagaacttgaaaaatgacatttcctgggtagataagcgcctagagggagattttgaaaggcgcttgaactggttgtttaccgatacctatgaaaccgaagcgcggttgagacggtatctgaagagcagtccaacacaggcactggtggtttattactccacgcaccgtttgctttctagacttccgccaaaacttaagggtgaatttccatttaagcagtctgccgctttctcaaaatctctgacacaactagaagtgtctctcaatgagtttgcgaagtggcatcgcgcaatcaactcattccgggttgtcagaaaagacggtgaatatgcttcgcgagtcttaagtcttcttcaaaaggctattgctggactaataccccagatcaaggggttttggtttcatgagataaacccaccgcgctacacggtcgtgaaagatgcaacttttgatgagcagataaatgacaagaagtttgagaaagagttttttttggagcagctatctgatggtgagagagggctgattgctttggtgttcgatctcacacgtcgtctagcgatcgccaatccggatagcgaaaatccaatcgcagaaggtgaggcgttggttttgattgatgagattgaactacaccttcatcccaaatggcaaagagagatacttccacgactgcgcgatacctttaaaagttgccagtttgtggttaccacccactcgccacaggtcattggtgaagttgaggcgaaatgtgtcaggcttctaaccatgagagagggtaaggtggcatccgaaactccaagtatggcctatggagcggactcaaactggattttgagtgttctgatgggggctgatgaaatgaatgaggatgttgaaaggaatatcgaagaaatcgccaggctgactgctgagcgaaatcttgaatctgcaaaagaaaagttgagcacgcttcgggagcgcgttggtaattcggcagcagttcagaagatttcctccacgattgaaagggtggagaggctcggaagatga

SEQ ID NO: 336167 - DNA, 708 bp, Pseudomonas aeruginosa
atgagggctgtagaaaaaagacaatcaccagagtgtttgcggggtttcattgatgggcagcttgccattgagcctgagccagttaacgtaacttacaaaaactttcgagagaaagctaagctgcttaatgagttgacattggagcagtatggcttgtgtggctatacaggggcgccagtagatggcgatcgaatttcgaagctggccagtgcatcaggcgatgttgtatttaaaaatcacatcgaacacttgaagtgtcaagatttatgtaagcaggaactgatcgactcgggaggagtagttggtagggatcttggtgatgacttgaattacttcaacatgatcgccgcgctagggatgagtggttctgaggctgagcactttggcgcggaaataaaaaaaaatatgcccttgccagttctacctacgcaagcagactgcgccgaccacttcggatttcaggaattggatggtggagtcactggccttactgtggccggtgaagaaagtattaaagtcctcaggttggatcacaaaacgctagatggatggaggatgtctgcgattgaggcctggctcaatcctgaggtgattcaaacgcgtgaggattttgaggaagtcatccaggccgtagaaaatccagttgatggaaggctcccagagttctctttcgtgatccgtgcaatagccaggggatatcttgaatga

SEQ ID NO: 336168 - DNA, 3027 bp, Pseudomonas aeruginosa
atgaaatccacctccgaagccgcctttgaagctgccatcgaagtcgttctgctggccaatggctacgctcgcgttgacggaaaaggtttcgaccgcgagcgtgcgatcttccccgatgagattctcgccttcatccgagccacccagggcaaggtatgggaaaaactagaggccttgcacggtgagcagacggggactcgggtggtggagtcgctggtcaagtggctggatagccatggtgcgctggcaaccctgcgccacggcttcaagtgctttggcaagacgctgcgcatcgccttctttcgtccggcgcacggcttgaacccggagctggaggcgcgctaccaggacaaccggctggggttgatccggcagctgcacttcagtccgaagagtgaaaagtcgctggacgtggtgctgtcggtcaacggcattcctctggttacgttggagctgaagaaccccttgagcgggcagacggccgccaacgccattcatcagtaccgtcatgatcgcgacccgcgagagccgatcttcgttttcagcaaacgcaccctggtgcactttgcagtggacaccgaagaggcgcacatggcaacccggctggcggggacttccacctacttcctgcctttcaaccgagggtttgagggcggcgcgggcaatccgcccgatccggatggacgcaactacaagaccgcttacctttgggaagaggtactgcagcgtgacagcctgctcgacctgctcgcccgctttttgcacctgagcgtggaagaaaagaccacggacgaaggcaagaaggtgcgcaaggaaagcctgatctttccgcgtcaccaccaattgcaggcggtgcgcaccatggtggagacggcggcccgcgagggtgtcgggcataactatctggtcgagcattcggcaggcagcggcaagagcaataccattgcctggctggcacatcgcctctccagtctgcacaaccagcaggatgagcggctgttcgatagcgtggtagttatcaccgaccgggtggtgctggatcgccagttgcagaacaccatctaccagtttgatcaccggcaaggtgtggtgcagaaaatcgatgaggattcgcgccaactggccgaggcgcttgaagctggcgtacccatcatcatcacgaccctgcagaagtttccgttcgtctcggcacagttggccaggctgaatgaggaacgcagtgaggcgagccggagccatctgcccacgcgcaagtacgcagtcattattgacgaggcgcacagctcgcaatcgggcgaaacggccactgagctcaaaggcgtgttgggtggcgcgcaactgcgcgacaaggcgctggaaatggctatggaagagggtgaggcggatctcgaacgcctgttccgttcgatggccaaacgtggccagcagcccaacatgagctttttcgccttcactgctacgcccaagcacaagaccttggcgatctttggccgcagcggtgaacccttccaccgctacacgatgcggcaggcgattgaggagggctttatcgaggacgtgctgaagagctacgtcacctacaagacctattacaagctgatcaagaaggcagaagaagaccccagcgttgagcgcaagaaagcggccaaggcactcgcccgtttcatgcgcctacacccgcacaacatcggccagaaaaccgaagtgatggtggagcactttcagcacttcactcgccacaagatcggaggccatgctaaggccatggttgtgacgggctcacggctggaagccgtgcgctacaaacaggagttcgaccgctacatccaggagaagggctactccatcaagagcctggtggcattttcgggcagtgtggaagacgacaagatcccggaaaagcagtacaccgaagtcgaaatgaacgatgggctgaaggaaaaggatctgcccgagacctttaccaagcccgatttccgtgtgctgctggtcgccgagaagtatcagaccggcttcgatcagccgctgttgcacaccatgtacgtggacaagcgccttgcgggcattcaggcggtgcagacgttatcgcggctgaaccgtactcatccgctcaaggatgataccttcgtcctcgatttcgtgaatgattctcgcgaaatccaagaggccttccgccagtactacgaaggctcggtgatgggggaagaggttgaccccgacaagctgtacgaggtgaaagctgaactcgatgcctccggcatctacctgcaaaccgacgtgtctgagttcagccgtgtcttctttgccccgaagcgccggcaaagccctgccgaccataaaaccatgaacgcgattcttgaccgggcggttgcgcgttttacgcagatgcagggttccgaggaagaggaagcagagctctggcgcggcaagctgcaagccttccgcaatctgtatagcttcctgagtcaagtgattccgtatcaggacagtgacctggaaaaactcttcacctacctgcgacacctcgcattgaagctgcccaagcgcaagagcgggccgggctatcagttcgacgaggaggtcgaactcgactactacaggctgcaaaagatcagcgaaggctcgatcagtctcagtgagggctataccaaaccactggatggcccgcgcgaagtggggtccggcatggtgcgtgaggagcacgtgccactatctcgcctggttgacatcatcaatcaacggttcggtggtgagctgaacgaagcggatcagcttttctttgaccagatcgcggaggcggcaagcctaaacgaatccctgcaaaaggccgctgaagtcaattcgctcgacaagtttcaactggtgtttcggcaggtgctggagtccttttttatcgagcggatggaactgaacgaagagctgtttaccgactatatgggtaagcctgagttgcaggagctgatctcaaaatggctcggtagccaagtctacgcgcggctatcagtcgcatctaagcttggagactag

SEQ ID NO: 336169 - DNA, 303 bp, Pseudomonas aeruginosa
atgatcatcaagttgtcaccgtttgctccgctgccgggaagcgacgagcgcctgtcactgagcagggctggcgatgtactcaccgtgaacggccaggcgttcgacttcactcccctcccggagggcggcgagttgccgaccgaggccattggatcggagttattcgctggtcctgtggcgcgaagggatggacggctggaactaaccctgcggttcccgctggccgctgatgccagtgccgccgctcgcttccctgaaccgttgctgatcgaggctgatggacctgtggagttaccgcgatga

SEQ ID NO: 336170 - DNA, 1698 bp, Pseudomonas aeruginosa
atgctcaacggtggaccgctcaatagcgctgcgctgaactcggccgctcactccgctgtgcctggtcctgagccgatcatccctggctacgctttcacatggcgcccaatcgtacgcgttggcgatgacgacgttacgccgctcctgaccggggagatcgaggtcgatcgtgaagagggggcggctggcgtcgcgtccttttcgatctatctcggcgacggacctgttgttcctgcggactggatcggtcgaaccgtaaccatcgactacgcaacggagaccgcgggtgaactgagtcaggggcgacggtttacggggagagttacacagccagcctggaatcctgttcggcgcgtcctggacgtcagttgcacggaccaattgcagcagcgtgtagaggccatggagattgcggccgtcgacgccctggtcggcggcgcctggtcagcggatgtgttcgagccggtcgatggacgctcgcggtgggactacgcccaggagcgtttgaccagcgtaaccgggagcttggactgttcgccatatggtgctctccgcgtcacgtcatggctttcggtggcgcctgcctacgagttcggccaaggctctacggtatacggatcgcttgcggtcgagttggccgacctgagctcgcagacgaacagggtcgagatcgagtgcgactaccgattcagccggctatggcagttgaacgcctcgtatggttggcagcaccccggcacgggtaacgctgttggcgaggcagggttttgcaactggcgcggcgatgacaccgagttaccggatgtcgagatgatcacctcggcgaccgagagcagcggccagacgttgttctatgcgacctggtatccactgccgcccacgggcgtctactgcaatccgccggcggcatgggtcaacaacttcaccgagctgctgctcggcggaaattggattgctggccggcgatgggtgcagtccgtaaccgagcgctaccggctggtcatggaagttcagccgagcgtggcggcgaccggcccgattgtcggtcggcagcgtgcctcgttcgagatcgagtcggacaaggccgagcgctgggaaagcgacccgatcaccggcggcagcaccggccacgacgacgagaaggatggcaaccggcgtttgtctgcgctgaactgcttgttggcccagggcgccacgacgctcattgctgcgcaccgcggcacgaccgtgacctgggatgtgccgacgtccatggtcctgccgatcgatcttgtacatacgctccgcctcgatgatcagggcgcgcgtgcggtgggcaagtgtcgacgcattgtcgaccggctcgacctcgcatccggaagcgccctgaccacgatctctatcgcggtgatgcgaggcgggggcggcgcagcagacccccttgttcctcctgctggctcgtccgatcccgccagcccaccgtcgggcgggggacagctctcgacgcagcttggaggacgcaacggcagtcccgcgtatgacgatgaggcggatggtttctcaggcaactggagcaatcgcgatcccggcgccgaactgttcccgcggcgcttctcgttgaccgcgaaagacattccggagacctacagggacgagcatgcgcctgagatcgcggccacctaccgggtatccgtgcctgacgacttactggagatgtag

SEQ ID NO: 336171 - DNA, 468 bp, Pseudomonas aeruginosa
atgatcgacccagcagacaagcaaacccaagccctccccctggagcagccgaagcgcgggcgcggtcggccagccaccggcaaagcgctgtccgacgcagagcgggcgcggcgataccgggcgaacaagaaaaatcgtaacgcccaaccgtcacgaaaagagaccccatcgatccccgctgatggcgtaaaggaaatcctcgacggctggcagcgcacccaagaggagctcgaccaggcactgcaacgaattaccgagctggaagccgaattagcgtcacgcgtcacgaaaaaagaagaagccgaggcgaagacctggacgctccagggacgcagcggaagcggcaagtggcagaacctggccgcaggtctggaccgaaaagaagccagccggcaactggatcgagtgatcgacaacaagctgctgggatccacgaagggccgccaataccgactggttgaagaataa

SEQ ID NO: 336172 - DNA, 330 bp, Pseudomonas aeruginosa
atgacaatcgccgcaaatctcaagaaagcacggaagacaatgggactgacgcaggagcaggttgccgaaaaaacagggatacccctagcgacaatcaagaaatacgaagcaggaaaacagccgccaccaggtgaccgcataggagccctggcaagagcgctcgccgtatcggcagacgacatagtgttagaggaaagcgagcgtcagctttccgaagagctgcgggcaatattcctgcgcttcgaccacttgccggacgacatgaagcggcaggtgaagctagcagtacgcggaatcctgatgagctacgagcaagagctactcggctag

SEQ ID NO: 336173 - DNA, 1173 bp, Pseudomonas aeruginosa
atgtcgccttcgaccgaccagcagagcaggatgttctacgactaccttacggtagagcaggtgtatccatacccgctccccaaggtgtcagatacgggcatctgctactacgaccggcgaaccggcgaaaccctccgcgatacagcccctggctggaagcatgagggtagctattcgaccctgatcaagattcgcgtcgatggctgcaagctccgcgtcgagggcaatcccagcgccgtcaatcggctcgacaatctcgacggctaccgctccctggatgactgcatcgcggtctacaaccaaatccttcttgagtacggcgaccagtacggtttttggcggttgccacgattcacgaagtgcactgagtgggggcttcgccagggtgatgacggcacgaagtccagcatggtcggcaacggtgcgcgtattcggcgtatcgacctgaccacgaatcggacggtggggaagggcaacgtgatggcctatatccgggcgctcagcacccagcgatatggctacaagaacgcccatctctacgaagacgggctgacctgtgactggaaggctcgcgaccactacgaaaaggcctatgcgaaaggtccagccattcgcaagttcctgtttcccaagtgcaaacgtaatttcggcgaagagtccgccgagttccgctatctccaacgcctggccgattactgcgacgaccagggcgtcgttcggatggagcaagaactcaagagtgagtttctccaggcgaagcggctggagtggtggggattattcgatgagcagcaatttcaggccattcacaaaaagttcttggccatagacgacaagctcgaggtaacggcaatggactacaggactatcgctgatcagttgatcgctaagggtgttgttgctagccgtcaggcggctaatgcgacggcgaatatcgccctgcaatggatgaactgtcccggcattacgtttgacttcaaaaacgctcagaccaagcgctatcgcgctcgcttgaacaagatcggcctgaatatcgctcaaccctatgacgtcactcgccatagcgcggtgatcgtgcgtcgtgccgaagagatcgtgaccaacgatttcttggtgctgccggagttctaccggcacgccccggtccagcgccatctacggttggtggcctga

SEQ ID NO: 336174 - DNA, 234 bp, Pseudomonas aeruginosa
atgctgcgcgctgatttcgacaatatcgaacgcatgctgtgggccgttcgcaacggtcgcaggcatgctgaggtgtcgttcaacgttgcccgtttgttcggctatatggcgtgcctgctttgtcatggcgatatcgatgacgccgtgcataagcgcctggatgcgttgctgatgaacgctcaggactacgccatgcgtgttgtcgtcgacctcgaatggcaggggtggtcgtga

SEQ ID NO: 336175 - DNA, 189 bp, Pseudomonas aeruginosa
atgggctcggtcatgagcatgaaaactcgcatcttcctgcgcacgctgcgcttcgttgcctacaactggtggcttccgttcctgctgggcaatgtttccgcgctggtcggctttgccttcactgctgatctgatcaatgacgcgttcgtctcgtcgctcgaaacggtggtgcaatcatgcgcacggtga

SEQ ID NO: 336176 - DNA, 237 bp, Pseudomonas aeruginosa
atgcgcacggtgagcttccagggcgcgaccctttcgggcagcgagcggcgttcgtcgcagcttcgccagcaggtgagggcggcggtgaatcagtccgtgttgcagcagcaagtcgcggccacgctcaacgccctggagcagcacaaagagcagggcggcaagcccgaaaaggtctggtccacgatctccaacgaaaagggcacgccgtgggtcggcgatgtgttcgggtggccgtga

SEQ ID NO: 336177 - DNA, 309 bp, Pseudomonas aeruginosa
atgcccttcgtctatctcggcctgacccgcgacgccggaacctcgaaaaagaccggcaacgcatacgacatcgcggtcgtgcacttcgccgtcgatgccacgcaatcgacccgccccgatcgcaagtttgctctcggcctggaacctcaaaacctgccgatcgcgccggaagcggtgagccagttccaacgcgttgaaccgctgtcgtcggtgaacttcgagttcgagccggaccctcggaacatgcaacgcaaccgtattcgtggcgttaagccggtaccgaaagcgggtgctcaggcggcgtcgtaa

SEQ ID NO: 336178 - DNA, 294 bp, Pseudomonas aeruginosa; identical to SEQ ID NO: 332596

SEQ ID NO: 336179 - DNA, 174 bp, Pseudomonas aeruginosa; identical to SEQ ID NO: 332595

SEQ ID NO: 336180 - DNA, 192 bp, Pseudomonas aeruginosa; identical to SEQ ID NO: 332594

SEQ ID NO: 336181 - DNA, 1137 bp, Pseudomonas aeruginosa
atgttcattgattggttaagcgttactcaggagtttccgtacgaccttccggtcgtgagtgacgtattccgcatgactgtcgatgccttgactggtgagcatctggcgacaagccagccgcgcataactcacgaaggcagttactccacaacggtttctatcagtgtccaggggcgcaaggtcacggttgagggcaacccatcccggatcaatcgccgggacaatctttggggttacacccgcatcgagcagtgcatcgctgtttacaaccggttgcttgcggagcgtggccttccgggcttcacacgctgccgtgaaattttcttgcgtgacggtgcgtcgggcgcgaagccgggtgattgggtggctgatggtgcggtgatcaccatgattcacctgactagcaatgtcggggtagggaaggggaatcagctcgattatttgcgtggtctttccagtgttcgttatggccggttgatcccgtttctcttcccgaacggtcggactgtgagttggacgacaaagggggccgacaagggtgcgcggctccgttacttcaaggtctatgacaaggcctttgagcttgaacagcacctgttgcctcggatgcgtcgggagttcggccctgaatccgaagagtgccgctatgccgaacaactgcgtgactactgccttgaacatggcgtggtgcgctttgagcaagagctaaagagcgaatttcttgcccgcctgaacctccgctattggggccttttcgatgaacgccggtttgagccgctgcatgacgaattcctggccctggattcccgcttaaaggtgactgctatggacctcgcttcgatctccgatcagttgttgttggaaaaggttgtggacactccgaaggccgcccggacaactgcttcttatgctctggagtgggcaactggtggcaagttcgattttcataagcgccaggtgaaagaacatgctgcgcgtttgaatcggatcggcattgatatccgccagccatttgatgtgacccgtaactcgctggtcttcgttcgtgaggctcgcgaggtggttaagactttcgatctgatcgcgccgagctggtaccggaagcctgtcggtcatctgcaattggtggcggcatga

SEQ ID NO: 336182 - DNA, 1005 bp, Pseudomonas aeruginosa
atgctgggcgggccatggctcgctgcaaaattaattttccgaaaagagtccgctgatggcagttatattgcgggcgaaataaatacgaccgagacagagtggtgggttaatgccgtatgcttaggtgtaggagtactgcttatagcagtcggcttatattttgcctggatcacatttcaagatcagcgtagaaaattactgatcgccatagagctgcgtggactgagccagacagcagatagcccactccaaagtgcgattccctctctggctctcggccgaagagaatcaatattcattgatgtgcgccagctggttcaaggcacaacagcacaaaagcaagaagctgtaaacgccgtcaacctaatccccactcgtctcaagcaactcaaagatggtagagatcgcgatgatctgagcgtgtatgctggagggctagcacctgttccactcttgttcctcacagggaatttgctagcggcagaaagcaaaattcactggcttgactggaatagaaagacatcaatgtgggtatcgccggatgagggtaccgacctgaccgactctttgcctataaactatgagccagcataccaagacgtagtattagctttttcggtctcataccccattgaccgcctagaactcacagccgccttcccaggggttcgtattgttgaactcaagatagaaaacccagttccaggactggtgatcagcgaggcatccgttcagaggctcatgcaagacttcatgagcagcatggccattctaaagtcgaaaggcgcaaatagagtgcatcttatcctggcggcaccaagtattctctccatcaggcttggctcaagttacgcaggccgcaacatgcctgaattaatagtctaccaatatcagcaagctcaaaaggaaaacccgtacccctggggggtccgcatgccaaactcagaaatcaacgaaggcgaactagtaactcggcaagcacctcaagcaacaagtcatgcataa

SEQ ID NO: 336183 - DNA, 1140 bp, Pseudomonas aeruginosa
atgagaaggggcagaagcggccccatcacgccaaaagtgtgccgggttaatcaaggaacaacacaactacccgcctgtcatcaagagcgtttagggcttcttgatgtcaccatccatcaaatctatgggcttttgagtgagtggggaaatgactggtgggacatcttcctcagcaggctgtcaccctctcagcgtgctattgccacctcgccaaaaaaacggggtgtaattctgcgtgtacctagcagctttgggcactcattactgctgctctattgggggctgcgcccagcaaagatgcgaaccacttatctcctacagcggcaggatcatgagtacttggtccaacgtacaggcggagaaccagacatgcgccacgtcattgttgccggctgtggctctatagggtcccgcgtggccgaacatcttgccctagcaggggttagcaaaatcaccctcgtggacaatgacaaattcagtcctgacaacctgggcaggcatgtacttgggaagcagtcgatctccaagtccaaggttgatgagctggcaacccttctgaaagagcggatgcctggtattcagatcgaagctagagcgaccagtgttcaaaaagcgctggataaaggagagctagccggggctgacgctatcgtgcttgcaaccggtaactcgactctcgaacgctccatcgctcgaagagcattcagagagaggtggccatcactgatcgtatctacaagtgttgaagcagctggcttgggcgggcacgcaattgctatgcgccctggcactccaggatgcctagactgcctatatatagatccggacacgcaaaaccccctccctagtatgcgcaccgccctcatggcgcccggccaaaaagtaactcgtcaattgacaggctgcggcgctttcacaccttattccgcactagacgcgactcggacagcgatcctcgctgctgagcgtgtgctaaccaatgttcctctctactcacgctgggcgggggaggcggttctcgccaaagcagaagggatacagccctctgctacgtacgacgccctgcgcactcgacgcatcgccttagacatcacgccatccgaattcgcccagccggggtgtccatgctgcagcgtttga

SEQ ID NO: 336184 - DNA, 981 bp, Pseudomonas aeruginosa
atggctcgcgcgcaaactcagtttgaaagctttcatcggacgattcttttcgggtacgacagcagtcaggaccttcgtgacagaagggataccctggttgccgacctgaagaaaaacatcagcgcggatgcacctccttacacaaccttcacccagggtagctatgcgctggacacaggtatccatccgctggatggcaatccggatatggacataggcgtcctctttgaatgctcgcccgacgactaccccgatccgctggttctgaaaaagtacgttcgcgatgcattagagcggcacaatcgcactgttaacattcgccgcccctgtgtgaccgtcacctattacagagacgaagctcccctccatcacatcgaccttgccgtttattgctcgaacgccgccggacaaactcaaatcgcctggtgcagagaaagcacatcactagctgacagggagtggaaaccgtccgaagcccgggagcttacagagaagatcaccagccagttctctggtagcgaccgtgaccagttccgccgatgtgtccgagcgctcaagcggtggcgagatgaaaagatcggccacaaaaacaccccgagcatcggtctgactgtggcggcctacaactggttcgtccctcgctatgaccccatcgatggcaaacccatagacctaattgcactgcgagacctcgtagatgcaatgcttgccaggtggacgggctcgcgcctccaggtccatcttccggttgcgccacacagcgatctcttcgagcggatgacagacaaccaaatgacagacctcaagagccgacttgaagaactacgtgatgccttaaacgaagcggatgcacaggccgacacccatgaggcatgcaaaatactgcgtaagaaatttggcgaagacttccctgttccagaaaagtccgacactaccaagcaaacctctgcgggggtgagcacttctggtcgctccgcttga

SEQ ID NO: 336185 - DNA, 492 bp, Pseudomonas aeruginosa; identical to SEQ ID NO: 328607

SEQ ID NO: 336186 - DNA, 798 bp, Pseudomonas aeruginosa
atggtggccaccgcctcgcgggcgccgacttgcagctcttcgatcatcttctggatctgcagcgccgattcctgggcgcgatgggccaggttgcgcacctcgtcggcgaccaccgcgaagccgcgtccggcctcgccggcgcgggcggcttcgatggcggcgttgagggcgagcaggttggtctgctcggagatgcccttgatcacctcgaggatctggccgatgttcaccgtgcggctgttgagggcctcgatgttggcgcaggaggcgctgatcttctcggaaagctcgttcatcgcgcggatggtctgctcgaccacctgcttgccgtcctcggcctggtggttggcgtcggacgcatggtgcgaggcatcggcggcgttgcgggcgatttcctgggcggcggcaccgagttcgttgatcgccgcggcgacgctgttggtacggttggactgctcgtcggagttggccatcgaagagttcgaggcgttcaccaccagttgcgagacgtcgtgcagtttgtgcgcggtcccggcgacttcccggatcgagcgatggatccgctcgacgaactggttgaaggcatcgccgagcacgccgaattcatcgcggctggtcacggcgaggcgcttggtcaggtcgccctcgccctgggcgatgtcctgcatggcacggcccatcaggtgcagcggctgcatcagcaggcggatcagcaggccgagcaggaccaggatggcgacgatggagatcagcgcggcggcgatggccgagacgcggaacttgctgagcatggcgtag

SEQ ID NO: 336187 - DNA, 288 bp, Pseudomonas aeruginosa
atgaacgcgcttctgagagctcgccctattgacccggagaacagcttcttcaaggtcaaccccggactttccaagcgggaagccttggacgaggccagcgtcattctggccggactcagcgacatcctcatctccctcgtcgagggtagccccatggatggcaatggctaccacgcgctggcgtacctgagtgatgcggcaaaggcgctggtggatgccgccatccctctgcctgcggaggaggcggaaatcgccgctgcgctcaatgcaaaggagcgccgccaatga

SEQ ID NO: 336188 - DNA, 318 bp, Pseudomonas aeruginosa
atgcaacagaaaacccaaaatgcgcaaccctcgcgctctgctcatcaactcgcatcagacctgctggatggcctcgaagccgctgttgagaccgtcaaggggctgcgcgccatccttgcactggtccgtagagatgagcagtgcagcagttacctcaaggatatctgcacgataggactcggtcaggccgagttcgttggcgggaaccttgaggatgatatgaaacaggccgacgcagaactgttcgaactggagcgtgtcgcgacccaatccggaagtgctgaaaacgtgtcgcgatacgaaggcggtgcagcatga

SEQ ID NO: 336189 - DNA, 495 bp, Pseudomonas aeruginosa
atgcagcgacgccggttatctgcccgcattttgctgatcagtgacaaggaacggctgctgctcttgaacatccgttacgagagtggtgtcttggcgggcagaagctattgggctactcccggtgggaaactgcgagacgatgagtcctttgaggacgcagccattcgtgagcttcatgaggagactggcgtcgtgacacggactgttgggcattgtgtggcacgcagggaattcccctggcagatgccagatggtgagcaggtgctcgccgttgagcactactacgtagttcgcgtgaaggatgagctgtgttcgagagcgctatggagtgatcaggagcgcgaggtcatacgtgacgttagatggtggacactgagcgagttggcagtctctcgggagcagatctacccgcacgacttaccgatcctgtttgacctggcgcataagccttcaagggatatcccgatcacctgtagtgaccgaggtgaaaggtaa

SEQ ID NO: 336190 - DNA, 651 bp, Pseudomonas aeruginosa
atggatgtcgacatgttgattgagctttaccctcgggtctatcacatggcggagcgcggagcctgggatagcattcgcacgcgtggattgatgagcgcgaccgcagtccttgaccatctttcagttgagggtgatgaccgcgtctcattcgagagcgagcatcgcagtgagaaaatgaatgtgaggccaggtgacccttccgatattgtacttcgcgatcagaagcctatgcctgaggggcgtttgcttcaggcactcacagatggaacaacgccacgccaatggtatgagttgatcaacaataaggtcttcttctgggctgaagaagctagattgcatcgtttgctcggcgctcgcgattaccgcaggctcgagcacgatgttcttacgttggactcagcgagattcatcccggcctatgcggaaagcatctggctgtgccacatgaattcggggaacacgtggcccataccgcatcgacgtggtatcgacgtcttccgtcgagtgcctgattatccggtgaagcggtctgggaaaccggtgaaaaacgtcgtggagcttgtggtcgattattccgtcccagacattgctgatttcgtgcttgaagtccggcggatgcggggtagtgatgtgctgggtgtgatcgcatag

SEQ ID NO: 336191 - DNA, 1677 bp, Pseudomonas aeruginosa
atggagagtcggcagatcgtcgtgatcagtggcaaggcttgtagtggcaaaagtgggttggcccgcctacttgaaaaagaatacggctttagggtcgttcgcgaccgtcgagtgtctcaggatgctgagtggaacctcaacatgcctcagacggcactcatcgaccggcgacgcgagctgacaaaggccgagaatgcgccatggatgctggaagctaccaaggcaatctgcttgaaggagcaggatggccgtcccttggtcgttgatcatttgaactcgctctccgaggtacagcagtttcgactgacctttggcacaaacctggtgcatgttcacctttatgcgagtgagcccacactcagggcgcgttacgcggagcgatcagagcttggagagtcgtcagcctatgaccaggtcaatcagctcaatgatccggctgagatcgatgcgctgaagaaagatgcggatgtccgaatctacaccgagcgttcggattcaagcgacacgttagtgcgggtggctgcacgtttgcatctgtatacgccgcctgatatcagatgcgtggatgtgctgatcggcggtcagtatgggagtgagggtaagggcaatatcgtttcatacttggcccgtgagtacgatgttatggttcgtgtaggtggccccaacgctgggcataccgtggtcaactctgccggcacctatacctaccatcatctgccttctgggtcgcgcgacgtaactgcccggttgctcctgggcccaggcatgactattcacttgcctgggctcctgcaggaaatcaaggattgcggtatccgcgaagaccgactcttcatcgatcctcaggctctcatcattgaggatgaggacatagttacagagaaaaaagggcatttggtatcaactattgcctccacgggaagtggaagcggggctgcggctgcacgtcgtatattggacagaggtaaaagggtcaggctcgcgcgagatgtagaagagctccgcccctatgtaggtgtctcgggtaactatcatggaagcacctccgaccgcttggaggaggcctatcgcagcggtcactccattttgcttgagggtactcaaggtagtggcttgagcattttccatggtgattatccgcacgtcacgtccagagatacgaacgtggcaggctgcattgcggaggccggcatttcacccagcagaatccggaaaattctaatggttattcgaccgatgcccatccgtgttggtgatccagatggagcccaggggcacacgtcaggcaagctcaagcatgcaacgacgtttgatgaaattgcaggcaaggcgggcctggatgctcaagcgttaaacaccgctgagaagacttcgacaactcgccgcaatcggcgagtgggttggtttgagtgggatcaattccgaaaagcgtgcgcgctcaatgcgcccaccgacattgttttgacctttgcggattacctcaaggcgagtaaccggaatgccaggcgattcgagcagttggatcctgaaacgatcaaatttgtggaggagcttgaacgtgtatcgcacgcccccgtttcgctgataaacacaaggtttacacgagacccagatcccagcgatttacgttccttgattgatcgacggaattggactgctcgttcagggaggagatga

SEQ ID NO: 336192 - DNA, 618 bp, Pseudomonas aeruginosa
gtgacaagattaataactctttgtgttcttgtctttttaatgttcgggctgatagcgtgtgctttgctaatattttggggtgacccactgagagtgttccatgcaagtcgtcaagatttagttgatttcggagttttttttggaggggtggttggaccgctggctgctagcgttactctcatcgttctggtctatacgctgctctgtcaatcagaacagttggagattatctccgatcatagaatgcaagagcagcaggtggctatgcttaaggagtatcaaggggagcttaagcatatgcgtgagcaccagctttcgccgcaagttcgttttgaagatgtgctttccggggtggttcccctaactgatgaaattagaattattttttcagctaaacttagacggtatgttgaagtcttggggtactactcgggggctgttatagtttataagtcaaattaccccatggcagtatttttcgacggaagggcatatgctcagtatgggataagagttctggaagatgttttaccttttgctgattgtttggatgccatgggaaaagtagctttagagtttattaggctggaccttactcgtagccctgaagataaatag

SEQ ID NO: 336193 - DNA, 429 bp, Pseudomonas aeruginosa
atgtacgactatgcaatccgtttcgaacaggacgatagcgctcctggcgtcgccgttttctgcagagacctgccggaactgaacagctacggcgacgataaggcccatgcaatcagcgaggcggttgacgccatcgagtcaaccctctcgctgtacgttgatcagcgccgagaaatccccgcagccagccaggcacaaccaggcgagcgcgttatccatctgccggcggttaccgttgcgaaggtcgcgctctggaacgaaatgatccgtcgagatatgcgaaaagctgacctctgccggctcctcgggatcgcgcagatccagggtgacaggctcgtcgacttcctccacaacaccaagatggaagccatggagaacgcgctatccgccctcggcctccgcctatcagtgaatatcgaggcggcatag

SEQ ID NO: 336194 - DNA, 183 bp, Pseudomonas aeruginosa
atgaagttcagcgaattcagacgatggttgaaggcccaaggggtgaccttcgaagccggcaagggaagccacttcaagatcaccgccccgaacggcaaacagaccaccttcgcggaccacggagctaaggaaatgccagaaccgacccgcaaggcgatcatcaagcaactggggctcaaatga

SEQ ID NO: 336195 - DNA, 651 bp, Pseudomonas aeruginosa
gtggtttctctggcaactggagccggaaagcgcggcctaccatatcccgagtgtcttgcgtctacgtgggcggctggacctggatgccctgcaacgcagcttcgacagcctggttgcgcggcacgagaccctacgcacccgttttcgcctcgacggcgacgaggcgcgccaggagatcgccgcatccatggcattgccgttggatatcgtcgcgttggggccgctcgaggagggcgccctcgctcggcaggtcgagacgacgatcgcgcggccgttcgacctggagcgtgggccgctgctgcgggtgagcctgttgcggctggccgaggacgaccatgtgctggtcatggtccagcaccatatcgtctccgacggttggtcgatgcaattgatggtcgaggaactggtccagctctatgccggctacagccaagggctcgacgtggtgttgccggccctgccgatccagtacgcggactacgccctgtggcagcgcagctggatggaggcgggggaaaaggagcgccagttggcgtactggaccggcctgctgggcggcgagcagccggtgctggagttgccgttcgaccggccgcgcccggttcggcaaagccatcgtggtgcccagttcatcctggaactggatattga

SEQ ID NO: 336196 - DNA, 291 bp, Pseudomonas aeruginosa
gtggtgctggaccagcaccagtacatggtcgtcctcggccagttgcaacaggttcacccgcagcagcggcccccgttccaggtcgaatggctgcacaacgatggcctgtatccgttcgatcaggccttcttcaccgaactgttcccgctcgatggaaacgctaaccgcaggttgtacctgctggtacgaacgccctccctccagccggaagcgggtacgcaaggtttcatgccgcgcgaccaggctgtcgaagctgcgttgcaaggcatccacgtccagccgcccgcgtag

SEQ ID NO: 336197 - DNA, 231 bp, Pseudomonas aeruginosa
atgaaacgagcaaccgttgtaaccgaactgccgaccagcaccagccgggacatggacaagttcgttgtccgtctgccggacggcctgagggccgaggtggaagccgaagccaagcgagactcgcgcagcatgaactccttgatcgtcgttgccctgcgcgagtacctgcatggtcagcgccgaaagcaggcgctcctcgatgcgttgaccgctgccaccggagatcgctga

SEQ ID NO: 336198 - DNA, 351 bp, Pseudomonas aeruginosa
atggccaagtaccgcatctcccatgatgcccaagcggacatcgtcgatatcctgcgcttcacccacaaccgcttcggcgatgccgcgcgccgacgttaccaggcactcataggggcggcgctggaagcagttgcgacagacccacaacaggtaggcagcatcagccgtgaagaactgggagctggcctgcgcagcatccacctcgtttactgccgctcgatgcccaacgtcggtaaggttgttcggcccaggcacttcgtgttctaccgggtggcgacagaccaggtgctcgaggtggttcgcgtgcttcacgactccatggatctggatcaacacctgccccaacgatga

SEQ ID NO: 336199 - DNA, 273 bp, Pseudomonas aeruginosa
atggcaacgagaaacgtcgtccttcccgatccgctggagcaggatatcaacgagctggtggagaccggccgctatcagaatcgcagcgaagtcatccgggcaggcttgcgcctgctgctgcaacaggaagcccagaatagcgccaagctcgaagccctccgcaacgcaacatccagtgggctgatgcaactggaacgcggcgagtacgacgagatcaccagcgacgacctggcccaatacctcgacgagctcggcaaccaggcgagccactga

SEQ ID NO: 336200 - DNA, 234 bp, Pseudomonas aeruginosa
atgactagccgcatcggagcgaaagcgctcggtgaccagctctacagctacatcggcgccatccaggacttggctaccgcagttcgcgaagacttggctttcgaaggttgcgagccgggcccgcgcctgaccgccgagcaggtggatgcgatccatctgtcgattatcaccatcgccaggttggctggcgaagacttgatccaactgctgaccgagatggaggtgccggcatga

SEQ ID NO: 336201 - DNA, 198 bp, Pseudomonas aeruginosa
atgaagaaaaccaattgcgccgcgatgctatcggcactggtgctcgcgtcgtgtacgtcaaagcccgctgccccgcagacggagtgcacccggctcccggagcctccggcagcgctcatgcaggaggagccgtccttgctgccgctgatggacaagttgtttctgatctccgagccggagtcgagcgacgcgaactga

SEQ ID NO: 336202 - DNA, 300 bp, Pseudomonas aeruginosa
atgctggtcacgccaggaatcttcaagcgttatgtccaggagcatccggaggttgaaaagctggcccaggccaaggagaccgccggctggaagctggtgcagcgcgcgttcgagaaacagggtcttcaccgaaagaccagtaagaatctgaacatctggaccatcaaggtttctggtcctcgcaagacgaaggagctcaaggcttacctgctccaggatcccaaactgctgttccctgtgcagcctctggacaacccaagcctcacggtcatcaccgatgccgaaggaggtgtggaatga

SEQ ID NO: 336203 - DNA, 372 bp, Pseudomonas aeruginosa
gtgcgcgaccaggtggcgcccatcggcatcaacatcgagcgcatctactacgcatccgacctggtcctcccgccgcaggtcacgcagagcctcaacgcgaagatacaggccactcagatggccgagcagcgccgtaacgaggtcgcccaagccaaggccgaagccgacaaggagcgcgcccgagcccaaggcgaggcggacgcgaagctgaccctggccaccgccgatgggaaggcgatcgagatccgcgcccaggcgctgcgctcgaacccagacgtcgtgaccctcaacgccgtcgagaagtgggacggaaagctgcccacctacatggccagcggatccccgcttcccttcatcggcatcagcaagtag

SEQ ID NO: 336204 - DNA, 744 bp, Pseudomonas aeruginosa
atgatcagcatcaagccggaagggttccagcagcagctcggcgacctgaccgagcttgagcagcggcagattccttacgcgacagctactgcgcttacgcggaccgcgcaaggcctgatggatcgattgcgcgatgagatgcgtgtcgtattcgaccgcccgaccccgtacaccctgaacagcctgcgcatggtgccagccaggaaagaccggctcgaagcgcgggtttggttcaaggacgaagcggacggtgcgcagcctgcatcggtgtggattgcccccgaagtctacggtgggccgcgtcggaacaagccggccgagcttcagctcagggccaaggggatactgcccgaaggtaagtacgtggtgcccggtgccggcgcggacctggatcgctacgggaacatcaggcgcggccaggtcaccaaggcattgagcggcatccgcggcttcagccaggccgggtacaacgcgaacgctaccgatagcagacggagccgagcgaagggtaatgctcgccgctacttcgtcatgacccgtaagggccagcccataggcattgctgagcgcacaggccgaggccgggatgctgtctcggtcatcatggccttcgtgtctcgcccttcgtaccgccgccggctgagcttcttcgagatcgcgcagcagtacgccgacgagaacctgccacgcgagttcgaggtggcgatgcgcggcgttgctgctcggttcgctgcgaggcgctga

SEQ ID NO: 336205 - DNA, 198 bp, Pseudomonas aeruginosa
atgaagaaaaccaattgcgccgcgatgctatcggcactggtgctcgcgtcgtgtacgtcaaagcccgctgtcccgcagacggagtgcaccaggctcccggagcctccggcagcgctgatgcagggagagccgtccttgctgccgctgatggacaagttgtttctgatctccgagccggagtcgagcgacgcgaactga

SEQ ID NO: 336206 - DNA, 333 bp, Pseudomonas aeruginosa
atgaagatgcctgacaaacccgacacttgggcggctctgctcgcctggctgagccagcatgcgccgatcatctacgcctccctgctgtcgtgggccatggctatggccaggatcatctacggcggcggcactcgccggcaggctctcttggagggtgcgctgtgcggcgggctggcgctgacaatcatcagcggcttcgagttcttcggcgtgccgcagagcatggccaccttcattggtggctggatcggcttcctgggcgtcgagaagatccgtgacctggccgaccgctacgccgggatcaagctgccgcgtcgagggtctggcgaatga

SEQ ID NO: 336207 - DNA, 981 bp, Pseudomonas aeruginosa
atgcagttcaccatcacgatcaaccaggcaaaggcgcttgaatgggggttgaacgcacagcaggcgctgctgttcgccttcgtctacgagtgcccgtcctgggcaaagcttcaacaaaccgccggcggcgagttctacgtgctgagcaaggcgaaaatcatcgaggagcttcctgttcttaccgacaagacagacaccgcataccgtctgttgaagcagctagagcaggctggagtagtcgatctctctagcacccggaacgtaaccctggtgcggctgacggccaaggggaaggagtggaacaagaagctggatgggtcggagaaatttccgacctcggaaaaaaatccgacctcgctatgtggtggtcggaaaaaaatccgacctacctcggaagaaaatccgatcagggtcggaaaaaaatccgagcaagggtcggaaatatctccgacaaatcaggtaaccagtaatcagggtaccaatcaggacaccagtcagtacctttccggggaggctgcgccagccccggcagggatgttcgtcggcgccgagcaagactctggtccgcgctgcgagataccggctgacatgccggggccgaaagacccgacgtgcaagacctaccggacctgggcgaactatgcgatcgcctaccgcaatcggcacaagacttggccgctctggaacgagtctgtcgccggaaagctctccaagttcatcgcccgtgtcggccaggcggatgcaccgaaggtcgccgcgttcttcgttcttcgcgtcaatgacgccgcagtgaccaaagcctgccacccgattggcatgctgctggcgaatgccgagggataccacacccagtggcagaccgaccggccaaccaccagcacccaggcccgccagcaggagcacacggctgccaacctatcggccgctgagcaggcccttgccgagcagcgcgcgaggagggcggcccatgctgacgcctga

SEQ ID NO: 336208 - DNA, 198 bp, Pseudomonas aeruginosa
atgacctacgaacaggcgctcgcccatttcaaaacggggcgcgccattgccttggccctgggagtgagcccaggtcggatttctcagtgcaagtcggaaggtggtttttcttaccagcatcaatgcgtgctggagaaggcgtcatccggagcgcttcaggcgcgggaagaggacgagcctcgcagggctgcctcctga

SEQ ID NO: 336209 - DNA, 276 bp, Pseudomonas aeruginosa
atggaacccctgatcatgaacggcgcgactatcgggatcgacagggcgaccaccaagatcgtagatggagaggtctacgccctggagcatgacggaatgctgcgggtgaaatacctataccgccttcctgggggcggtcttcgcctgcgaagcttcaaccgagacgagcacgcggatgaggattacgggccggagcaggtccgagacaaccacatcagcattatcggctgggtattctggtggtcgacagtccgcaaccgcggcgccttcaagtaa

SEQ ID NO: 336210 - DNA, 306 bp, Pseudomonas aeruginosa
gtgaacaaagaagaaatctacgacgagcagatcagcccgctgatgaagaacatcatcagcgtttgccgtgagcatggcattgcaatgatcgccagcttcaatatcgcccacgacggtgaaggaccgaacggcgaagactgctccctcctgacctgcacctctcacctgcctgatggtgaaggcactttcgatgagcgcttcagcaaggcagccggggtgattcagaaaagtgcaccgcatcacatcggcatgaacatcaccacgcagcacgcggatggcactcggacgcttactgcggtgatctga

SEQ ID NO: 336211 - DNA, 381 bp, Pseudomonas aeruginosa
atgaagcaatccgaattccgtgccgagctggtcaagatcatgcccggctacaactggacggtccataaaagccattcgccagatacgtacctgattgcgacaggaatccagtccagcggctcaaatcgcctttcaacgctgcgcgtcgagcgtcgtgaggcctatgccggcagtggatcggcgcgatacgaggttaagagcgccggctacggaagacgcgcgccgtggctccacatcgccgctgataagacgctcgcccgcgcccttcgcgcactgcaagaccactacgagcgaaccgcaagtctgtactggtcgcatgctggacacatgaagacggggcggaaagccgttgccgccgcgcccggcaaggagggggtgtga

SEQ ID NO: 336212 - DNA, 381 bp, Pseudomonas aeruginosa
atggctgaagaactgaaaccgtgtccgttctgcggatgctcgatgcgcctggtgagcaaccacgactggcaccggatcgtaggcgatcactcggccgagtgcgtgtttctcgacagcgaaaccatgatggtcccagccataaaagatcagcgtgaaatcgccatcgctgactggaacaccagatccgtccccgcaggccatgtggtggtcagcgaggatctgctgcgacgcatagagcgggagtgccggcgagagtccgattggaactgcgaaaacgttccggcaggaacgaacgcagccacgacacgcgcgaagaagatgcttgaaattgcgaacgacctgcgcgccctgctgagcgagcaggagggagggaagcaatga

SEQ ID NO: 336213 - DNA, 741 bp, Pseudomonas aeruginosa
atgagaacgcagatatggagttctggtggaggtactcaaagctcagcaatcgcagcgttgatatgtcagggggagctgacccctgacttgtcgatcatcgttgacactgagcgcgagatgagcaccacatgggaatacctggatcgctgggttctaccagcgcttgaggccgctggagtcaaactgaacagagttgccaagagcagctatgcgaccgtcgacctgatgcgcaatgacgacgtgctgattccggcattcacgacagaaagcggggctgtaggtaagctcccgacatattgcagcaatgaatggaaacagcgtgttatgcgccgctgggcgaccgaacaaggggttattcaggctgacgtctggcttggcatgacaatcgacgagctacgccgtgtgacacagccagtcgggaaatggcagcacagatacccgctgattgagcgacgcatgacacgaggtgattgcattgcaatggtcaagcgcatgggttggccagagcctccccggtcggcctgctacatgtgccccaatatgagttcgcatgatcggagatggcagaaagagaatgctccagccgactttgagagagcatgcgagtttgacaggcaattgcgactcattgatcaggacctgtggctggttgaaacggcagaacctctagaggaggctgacttttcgattgagagcgaccttttcaccggcaggtgcgattcgggaatgtgtttcaactag

SEQ ID NO: 336214 - DNA, 291 bp, Pseudomonas aeruginosa
atgcgcacgaaacccttccgcccgccgcgccggcatgagatcgccggcctccgctactaccgcactgcctcagcctacaactggctcgggatcacgatggcccatccgacccgagcaatccagttgctgctcgagcagtgcgagccagacgtgctctcgccgatgttcaacatcgagatcgacgcgatcctgcgccaggccgacgagtacgcaaagaccggccaggcgctcgagcgcgagcaattgcgcgaaatgctcatgcacctgatctcgaaagccgcgggcgactga

SEQ ID NO: 336215 - DNA, 447 bp, Pseudomonas aeruginosa
atgaagaacgaataccgctttggatacgacgagatgcttatccagatccaggcatgcgttcctgactcacaaaagggggacggattgcctatgacgatggccagagcgcaatggataagccaagtctttgtgctgtgtacccttggtaactcactggcacgtgacaaaggctggaggctatggggcatggatgccattgagtatgcgctcatgcgttgctactcctggccactggaaaccattcgggagatgccaattcgggataggtggctagcactgcatgaagagctggcggatttgcaatgggatgaagaggctcagcaggtatggctagcgaagatcgaaccagtgctgccaggcgcaccggggacggactacgacgtctggcgttcggatgcgccaggatttcaattaccccaagctcctggctatctagtggtccggtaa

SEQ ID NO: 336216 - DNA, 240 bp, Pseudomonas aeruginosa
atgcctgacgtcaccgcttaccggccggctgaggacgagctcgctcaactgcgcacagaggtccgcatgctgcgttccgcgcatgacgacctggcctgcagccgacagagcgatcgtcgcagccttcaggcactggtgaggcgcctcctggatgccgccgccaccgacagccttccccgctccctggcagagatggagacctggctgcagctcaacagcgaggagaccacgaatgcgtag

SEQ ID NO: 336217 - DNA, 789 bp, Pseudomonas aeruginosa
atggtggccactgcttccgggcagaccggggacggttccaaggtctcggctggaggggcttcggccgctggcaagccggtgggcagttgggtcgaacagatggacgcctcctgggcgagcctgcgcgaccaggcgcaggacgtctcgggaatgatggacatgctgtttaccaacgccttcaccaatatggagaacgccctgttcacctttgccaccacgggcaagctgtcgttcaaggatttcgccgactcggtgatccaggatatggcgcggatcgccgcgcggcaggcgacgctgcagatcatcggcagcatcgtcggtgcggtcagcgggttcttcggtagcggcgcaacggcgggctcgcggatttccgactataccggctcggacatggccaattgggtcagcaagcaacgcgccggaggcatgcctgggttcgccaggggcggtgccttcaacgatggcatccagagcgcgccggcgctgttcagcatggccggcggtcgtccggcgctgatcggcgagcgtgggccggaagccatcatgccgctgagtcgcggttccgatggcgtgctcggcgtgcgcgcgctcggcggcggcgaggggggcaacgtcttcaatttctccaccagcgtcagcctgggcggtggccgcgagggcgcggcgacggccagcggcgacgacggtacgggacagcagctggcgggaatgatcaacgatgccgcgcgcaacgtggtggcgcaggagctgcgccccggcggcctggtatggaggatggtgaatggctga

SEQ ID NO: 336218 - DNA, 471 bp, Pseudomonas aeruginosa
atgaccaccatccctgccggcctgtgccaatgcgggtgcggcgctgctacgcgcgtcgctccggtgaacgatcggtcgaaaggctgggtgaaaggccagccggtcgcctacgtgaagggccaccacctgcgcggtgacaaatccggcgagcgctctccccgctgggcaggcggccgccacctgagcagccatggctacgtcgtgctctggacaccggccggccgcaagtatgagcacgtgctgatcgctgagcaggctctcggccgggagctgaagcacgtgcggcgcggacacccactgaacgaagtggtgcaccacatcaacggcgtgaagaccgacaaccgtcgggagaacctgctgatctgcacccatgagtaccacgtggcgctccaccacaggctccaggcttcgccggattggcctgagtttccgccggtggcgcggcctggcttcggaggtacgagcacatga

SEQ ID NO: 336219 - DNA, 360 bp, Pseudomonas aeruginosa
atgatcaacattcctcccgcatcctttcgcgttacgccgtgcggcgaggtggacgccgccgcattggagaagctacgcaacagcttcgacacgtcacagctactcggactggttgatcgactggacactagcctggctgagctgggtgggatgattgctatacgcgacgacttgctgaagctgcatacgatggccaagacgttggtcgaaggcacgctttcgccggttacgaccgaggaatcttgtgtctgggaggtagccgaatcagtgctattagatcttgagacgttgagttcctggattcgcactgctcagatgatgatggggtttggggagcaatggaaccaaaaaccaacgtaa

SEQ ID NO: 336220 - DNA, 396 bp, Pseudomonas aeruginosa
atgaacatcactctcttcactcgccccaagagcgtgctgactgtcggtctggccctgctgctggctttcgaccccaacctgatcttccagtggacgggattggtgctgggtgacgccggcacgttgctgggccgcattctgggcctggtctacctggggatcgccatcgagctgtggttcgtccgcagcaactcagacctgccggcgcgcaacgcgctgcttctgaccgcagtcgactgttccgtcgtggccttgctggtccaggtgcaactggccgggctgatgaatgtgctcggttgggggctgattgccgtgtacctcggctccggcctgggattcctctggtgcgccatgcaagtcgccaggaatggcgccgtacgcgaaagcctttcctga

SEQ ID NO: 336221 - DNA, 372 bp, Pseudomonas aeruginosa
atgaagcagcttggtttccttctcgcccttggcctctgcgccatctccggcacggccgcggcggcttgcgatgccgcggccggccaaaagctgttcgagtccaagtgcaccgcctgccattcgctggcggagcacaaggtcggtccgcgtctgcatgacgtgtatggccgcaaggtcggtacggcgcagggctttggctacacgccgaccctggagcaggccggcttcacctggaacgcggaaaagctcgatgccttcctgagcggcccgatgaatttcctgccgggtaccgcgatggcgtttggcggcctgcgcaagcaggacgatcggcaaaacatcatctgcttcctcgaacagcagaacaggagctag

SEQ ID NO: 336222 - DNA, 1458 bp, Pseudomonas aeruginosa
atggccgatgaaaaagacgacgccaagggcgtcagtcgtcgtggtttcctgcgtggcgccggggctggcgcggttgtggtggcaggcgcaggggtcatggcaaatgccatgggcgctgaacagaaaggctgcaagaccgcgggttgcgattacgacgtggtggtgatcggcggcggcttcgccggtgtcaccgccgcccgtgactgtcgcaagaatggctacaagacgctggtgctggaggcgcgcaatcgccttggcggtcgcaccttcagcaccgagttcgccggccacaaggtggagctgggcggaacctggattcactggacccagcccttcgtctgggccgagacccagcgctatggcctgaaggtcatcgaatccccggaacgcgctgaatcgtcactggaaaccatggtgatcctggcggaaggcaagcggacgcaacttgctggcgaagagctgctgccggtgctgcaagcgttcgatacctacttcgcggacgctcgcgacatctgggaacgtccctacgactcccgcttccgctggaacaagctcatggcgcaggacagcctgagtgcccgtgatcgcctcgaccagttgaagctcaaccctgtgcatcgcgctgccgtggactcgtatctggtgggtatgtcccattgcccctctgaccaggtttcctacaacgagatggcacgttggtgggccctgccgggttacaacctgtcggtcctcaacgactcgctcactcgctacaccttcaaggacggcaccatcagcttgatcaacgcgatgatcgaagacggcaagcccgaagtgcggctgtctacgccggtgaagaaggtcgaggacaagggcgaccacgtggtcgtcaccacccagaagggtgagcgcattgtggcgggcagcgtggtcctggcgctgccgatgaacgtgctgcccaacatcgagttctctccggcgctggaccccaagctgatcgaggccgctcacgaacggcacgccggcaccggagtcaaggcggtcatcaaggtcaagggcaaggtcggtggggaaggcaagctgtatggtctggccgactcggatcatcccctcaatgtggtgttcacctacgccaaggccgaggaccacacgctgttcatcggctttggcgacgatcccgccaagctcgacgtcctggatcgggacgccgtgcagcaggtcatgcagtccttcttcccggaaatggaagtggaagactgcttcggttacgactggaacctcgacccctacagccggggaacctgggccagctaccgacccggctggtacggcaagtatgccgatcacttcggcaaggctccgggtagccgcatgttcttcgcccagggcgaccacggcgagggttggcgcggattcatcgacggcgccatcggcgggggcggcaaggcggccctgctcgtcaaggagctgctgggatga

SEQ ID NO: 336223 - DNA, 1002 bp, Pseudomonas aeruginosa
atgccgtcgtctagctgccataccgtccttgccgaaagcttcttccgtcgcaacgcagagttgtttcgcccgcacctcgctgctgtcggactgcgcgagcagattctcagcgcaccggaatcagaaattccagtgacaaagtacgtcgccctctgggaggtgcttggtagcgaggtttcaccgaccattggcctggaggtggccatgcgcactgagagcagtgagctcggtgcctatggccatgccatacgctgtgccccttccatgcaattggtactgcggagcctgagccgcttcatggtggtgttgacccaggccacgcaactggacttcgaggacaacggcaagcggattagcctggcctatcgggtcaccgacgcgtccatcgtgcagcgtcgccaggatgcggaattcaccatttgcaccatcctcaacctgcttcgtgaggtgacccggaatccgcagctgtcacctgttcgagtggatttcgagcatcgggcccccagcgacctggcctcccaccgcgaggtatttgggtgtcccattcgcttcgagcagccggacaatcggctgtacttctcacgcgagttgctggacatgccaatccgcaccgccgatcagcgcctgttccaggccctcgagcccttccttgaacagcagcggcaaagccgggcggcgtcgacagacgtgctcagccaggtcgcccaccacattgccagcagcctgagcagtggctgtgccagcctggagcaggtggccagcgacctgaagattggcgttcgtacattgcagaggcgtttggccgagcagaacgtcgagttcagccagttggtggaggatgtgcgccgctccctggccgagagctatgtgatgcaatccgactacagcctgacggagatcgcactgctgctcggttactccgaagccagttccttctgccgagccttccgccgctggacccaactgactccccagcagttccgccaacgcggccgatcctga

SEQ ID NO: 336224 - DNA, 387 bp, Pseudomonas aeruginosa
atgggcaggctccacgaaaaactgggtttgccgaaaggtcactactatcagcacgtcgccgtgctggcgggcctgccggtttcgttgatctccgatctggcgagcgagctggaacgatcactggagcagatcgtggagtgggtcactgcgtcccccggcagcgccgtgatgtctatgcaggcaagtgaggtgttctgtcgtattatcgagatcctcgatgcgctactggagctgtacgagggggatctagacggtgcgctccattggctaacagcgccgaatgtggtgctgtccaatgagaggccggtcgagctgctggtaaccgaacctggtgcgcgcgccgtgcggcaggctattcgggcgattgaatatgggctgccagtttga

SEQ ID NO: 336225 - DNA, 927 bp, Pseudomonas aeruginosa
atgtggttccgcaacctactgatctaccgcctcacccaacccatcgacacaacggccagcgctctggaaagtgccctggcgagcaaaccggcacgcccctgcgcctcccaggagttgaccacctacggcttcgcgccgccggtcggcaagggtgacgcaccgctggtacgcgaggcgaacggattctggctgatctgctgccgcaaggaggagaagatcctgcctggcagcgtggtcaacgacgcactgaaggagaaggtcgaagagatcgaggaaacccagcagcgcaaggtctacaagaaagagcgcgaccagttgaaggacgagatcgtccagaccctcctaccgcgcgcgttcacccgccgcaagcgcaccttcgccgcaatcatgccggcggaaggcctggtgatcgtggacaccgccacggcgaaggccgccgaggatctgctatcgaccttgcgcgaagccctgggctctctccccgtccgaccgatcgcaaccaaggtttcgccgacggcaaccatgaccgagtggctgcgaagccaagaaactaatgcgggtggcgacttctggctgtgcgacggcgccctgctccgcgacaccgacgagcaaggcagcatcaccgccaaacaccaggacctgaccagcgacgtgatccgccagcacctcgactcaggtaagagcgtcaccaagctcgctctcgcctggaagaaagacctctacttcgtactcgacgagggtctggtgatccgcagcctccgcttcgacgacctgctgcaggagcgggcactggacgacgctggtaaggattccgacgagttcgcacaggccgacgccagcttcgtcctgatgatgctcaccttccagcaattcatccccgagctgctggtagcactgggcggcgaagaagttcccgtaggcgtctga

SEQ ID NO: 336226 - DNA, 948 bp, Pseudomonas aeruginosa
atgtctttagaaatcaaatctccggaagattttgttgataggcctgactatcgagaggttttggattttggtgaaaaatccggcagagagcttttagagattcttggtgcgtacatatttccggataccaagtctgtgaagtgtgggattcggaactgccgtactccgcatcggcgcggatatttgatcagcaccacagatggtctggaaacgaacataggaaatgtctgtgggaaaaaacacttaggagcaatattcaccgagaagacgaaccagtatagaaagaagcaggcctatcaacggaatttagaacagtttcatattgttaaatctcgcgttcaggagttgtggggagagttggatgaactaaagcttgcggctgaacgtgtatccaagttgaagatactcctgaacaagtgtcatccaaatctcgttcgtgttcttgttaaccgaagcaagatcaataactctgcactgggaaggcgcattcccatgactcgagaggaggcagagcgcttgtacgtccatgaggcgaaagaaagcgtcgatggcaaggttcaacaatttgaggcatggctggcaaaagggtggcccaagaagctggtagtggccggccagatcgctgggcttaggttctggatgagcgatcttcaccaagtactaagacaagagattctaaacccagctgaagagatacagaaaatcgatatcaatggaattgaacagctaagccttaggaaactgacagagttctcacgttggtcacagcaactagatacaaatttggaaaaagccagaaccataattttagacggagaggcgtttttcgagttgcagaatgttcaaatgttgaggctgttgggggatgagcttgacgcagcgtctagcatattgctagagcctgcactgggcgacttcaggactcaggcggtttggttctacggataa

SEQ ID NO: 336227 - DNA, 312 bp, Pseudomonas aeruginosa
atggatgcgaaaaatcttgcagttctgatgcaactgaagaaggcgatggaggaggcgaatccgccagccatccctacaccgtttgaaccgacgccggaaaagcctcagaaaacgggctggatcgtgaagaactgtcggttctgcaagaccacaaagttccgttatcgggccgagtgggttaatcctcccgtgatgtgcgagggatgtcgaaacgagcgcaagactcgctacaagcctggcaagggcgataccctctatgctgaaacgaaagtctttcatggtggcggccctggcacgggacgccgaaagtga

SEQ ID NO: 336228 - DNA, 321 bp, Pseudomonas aeruginosa
atggctaaacagcagaagcaaaagcaggaagtgaagccgctggggccggtcgagaagctggggctgcggatttcggagatgatcaactcaccgaaagcacaggaactgcggacggtgacgatccatcgcttggacacggatttggatgaagcgtgggaccaggtgatggaactgctatctgagacggacggcatcgacatggtcttcaacgacgacggcaccgtaacgctgaagtgggaggatcaggaaggaggtgatgaccaggtggaaagccagagcgaggatatggcgacctatcaggtcaagcggaggggtaagtag

SEQ ID NO: 336229 - DNA, 912 bp, Pseudomonas aeruginosa
atgcgctgcgccctggtcattcccacgcgcaacgccggcgcgcacctggaccggctgctgccggccctggtcgcgcaacggcggcagccggacagcatcctggtggtggacagccgctccagcgacgacacggtggagcgcttccgcgccttcggcgcgcgggtcgaggtcatcgagccggccagcttcaaccacggcgggacgcggcgctgggccagccagcaggtcgaggccgacgcgctgatctacctgacccaggacgccattcccgcctcgcccgacagtttcgccaacctgctcgacgaactctatgccgaggccgacatcggcgtggcctacggccgccagttgccgcaccccggcgccggcctgctcggtgcccaggcgcggcgcttcaactacccgccggaaagccgcagcaagcgcctggccgacgcctcggaactggggatcaagacctgcttcagttccgactcgttctccgcctaccgcagcgacgccctggcggccgtcggcggcttccccgaagacgtcatcggcagcgaggacgcctacgtcgccgcgcgcctgctgcaggccggctacgcggtgcgctacgcggctagcgccgaggtctaccattcccacgattaccgcttgctggaagagttccgccgctatttcgacatcggcgtgttctacggccgcgagcgttggatacgtgccgccttcggcggcgcgggtggcgagggcaagcgctatgtcctcgccgagatacaggccttgcgtgccgccggtgccctgtatcgcgtacctgaaatagcgctgcgtagcgcgttcaagctgctcggctaccgccttggccagctggaacgccacctgccggtcgccctcaagcgccgcatcagcatgtttccaggctactggaagtga

SEQ ID NO: 336230 - DNA, 1206 bp, Pseudomonas aeruginosa; identical to SEQ ID NO: 333063

SEQ ID NO: 336231 - DNA, 294 bp, Pseudomonas aeruginosa; identical to SEQ ID NO: 332596

SEQ ID NO: 336232 - DNA, 543 bp, Pseudomonas aeruginosa
atgggctggaaagcactcaaggacgcctacggcatcacacacaacgtctgcgtcaccagcaaaggcatctgcatcggcagtggctatgtccatgacctagtggtcatcgatccggtatccggcagcgtccgggagaacgaagccttcgggcgcttcctcccgcagtattacccagcgttgggcgcagcttcgccggctgaaattctcggccacgtccaggcagaggacaaattcgaggcctcgatccctgtgtacacctacgaaggcgccgagattattgagaagcgctgcgaagcccttggctggccgaacgcgacacatgacggcgagctgatgtacgagaacaagttcagcgccgaccgcgacgtagtgatcgggtgggccaagcgcagcgccgagcttgaagcgaagcacctggatgaggccatcttgcgagtgcaggagcagctggttgatttgcagaatcggctggacaaggcgcgcacgcactcggaaaggctggcagctgaatacccatcaatccctgccgcctcctactactga

SEQ ID NO: 336233 - DNA, 342 bp, Pseudomonas aeruginosa
atgaacgacttcgatgcaaagcggcaacaaatcctggatgccttcggcattggaaacgtcgcgagcgcagcgggtaattcgtctgatcccctgcgctgttatcaggtaggcgattgcgactggttcgccgcaacatcttcggaacaagcactggagctgatgcgtgaaatggtcggggatgaagactgggacgccagcgactacgaggtcactctgaccggcgacgaaatgctcgatatgcgttggtgtgaagaaggccaacctagcaaggatgctgggtcgttgcgtgagtggctggcagaggccaaagagccgggttggctcaacggctccgaaccatag

SEQ ID NO: 336234 - DNA, 336 bp, Pseudomonas aeruginosa
atgagacgaatcgttatccggtcaaccgcagcaggcctcgccctattcatctgcgtgatcgcttaccagggctacagctatgccgcagcgcttggtaaggctacggaagatgtgctgaacagttgggcaaagctgaacgatgttcagagcgccgaggtgagcctctaccgagccgagtgcatttcgatccccgccagtgccaaagagagcaaggttccggtgcgcctggagtcgaataccgaatgtgccgctcgaatcggggcgcctacccttggctcggcgattgaaatcgcaactgatgacgtgagcgtgccggcgccactccgctggctttga

SEQ ID NO: 336235 - DNA, 2724 bp, Pseudomonas aeruginosa
atgggccatcgcgacggggttcccgccagcaccatcccgctgttgcagaccaagctgttcccgccaggcgccggagggttgccgctgcttccccgccaggcgctgatcgaccgcctgtacgaggcccgcgggcgacgcgcgatggtgctcagcgcgccggccggcttcggcaagagcaccatcctctgccagttgcgcctgcgcctgctggagcagggcgcggcggtggcatggttgtcctgcgacgagaccgacagcgaaccgcagcgtctgatccagtacctgctggcgagcatccagcgagtggtcccggcattcggcggcaataccgccaatctgctcggcaccgacgtcgcggtgccgctggagggcatcctggatgccttcctcgccgacctgcgtcgcctggaaggccccttgtacctgttcctcgacgatttccaccgcatccgccacgccgccttgccgcatggggttcgctacctgatcgagaacctgcccgatcacgtgcgggtggtggcctcgacccgcttccgcccgcgcttcctggtcgacgaaccgaccctcaagccctggaccttctgcctgagcgcggaagacctgcgactttcgcgcgaggagagcgatgcgtttctcctcgacctcaaggggctggagctgggcgagcgcgagctgaagctgctgttcaagcgcaccgaaggctggatcacggcgttgcacctggcggccctggccctcagtcgcaataccgaccgggaaggtttcctccgcgggctctccgggaccgaacggaacatcgccgactacctggcggaagacgtgctggccagcctgcccgccgacctgcagctgttcctcgaccagacctcggtgctcgatgagttcaatgcggaactgtgcaatgcgctgaccgggcgtcgcgacggcctggacatgctcatgcgcctgcagaacgagcagttgttcgtcatcgccctggacgaccagcgcgaatggttccgctaccaccatctgttcgccgagttcctccaggggcggctgtcccggcatgccgatccgaccccgttgctgcatgcggcggcgcgctggtgcgaggggcgcgacctggccgaccgggcgatcaagtacgcccttcgcgcccgcgactacctgttcgccgccgagttgctggagcgccagggcgcgcgcctgatcgccggtaaccgggtgtacggcatcctcggcatgctcaacggcattcccgccgaggtgatccgcgagcatccggtgttccagatcttctacgcctggcaactggcgttcgagcaacgcttcgccgaggccgaggcgttgatcgaggaggtcagccaccgcctcttgcaggggcgcggcaaggtcatgcacttcgggctcggcgagttgctcgccgccgcccaggtgctcaaggccctggtgttgctctaccaggacaagctcgaagcctgcctgaaggtcgcccgtcactggctgtccatggtcccgagcaaccagccggtgttccgcgccagcctgctctgcgtgcaggcttcggcgcatgcgctgctcggcgactacgccgaggccgccggcgccatcggttccgcgcgggaggacctgaaagtcgccgacagcgagtacctgcaggtggtgaccagcctgatcgaatccctgatctgcaaggagagtggcgacctggagcggggcagggcgatagccgagtcggcgcgcaaccgggtcgagcaggtattcggccggcgcagccgggtcggcggacccttgtcgctggcctatgccgacctgctctacgagcaggaccggcatgccggcgtgctcgccgaactaccgctggcgacggtctggcgggatgtcgcgacgccggtggaactgctcagtcgcggccagttggtcatggccaaggctcgcttcttctccggcgccgccgagcaggggctggcgcaactcgacgaatggctgagcggtctgctctcgcccggctacgagcgtgtctatgctcacgccatgagctgcaaggtgcagttcctgctgtggctgcgccgtccgaacgaagccgaacgggtctgcctgcaactggagcggcatcttgccgggctctccggcgagcggcatgccgacgcacagaccgccctggtcctggcggaggctcggctggcattgtccgagcgtcacgcggaacgcgcgcagagcaagctggaaagctgtctggccggctactcttccgcttaccagagggatcggcggctgcgtttgtccttgttactttctgtggcgtattggcagaaaggtaacagcgaaaaagccatcggcctgttcctcgccacgctcgaggaagcctggaatctcggctaccgccggctgttccaggacgacgcgttgtggctgttgccgatgtgggaaagctggagggaagcggagcccaagcgtgccgcggcctggcaggggctggccgacctgctccgcgagcagtgccggaagctctccgtggacccggaaagtttcgatgaaaatcaggatgttagccatcgcgaacgggaaatcctgcggctggtggcggcgggcttgtcgaaccgcgatatcgcgcaggcggtgcacctgtcggaagccaccatcaagtggcacctgcacaacctgttcgccaagctgggtgtgaagagcagaacgcaagccgtactaaagggtaaaagcctgggactgctgagcgaggcgtga

SEQ ID NO: 336236 - DNA, 1938 bp, Pseudomonas aeruginosa
atgttcgagatcagcgtccacccggtgccggacgccgtccgccagcgtgcctacctgaacgacgacgactaccagcgcctgtaccgccaatccgtcgagaaccccgacgagttctggggcgagcaggccaaggccttcctcgattggttcaagccctggcacagcgtccaccacggcgacctgaggaaaggccaggccacctggttcaagggcggccagttgaacgtcgcctacaactgcatcgatcgccacctggaacgccgcggcgaacagatcgcgatcgtctgggaaggcgacaaccccagcgaatccgcgcacatcacctaccgcaagctgcaccacaacgtctgccgcctggctaacgtgctgaagagccgcggcgtggaaaagggcgaccgggtctgcatctacatgccgatgattcccgaggccgcctacgccatgctcgcctgcgcccgtatcggggcggtgcactcggtggtgttcggcggcttctcgccggactcgctgcgcgaccgcatcctcgatgccgactgccgcaccgtgatcaccgccgacgagggcgtgcgcggcggcaagtacatcccgctgaagcagaatgtggaaaaggcactgaaggactgcccggacgtctctaccgtggtggtggtcgagcgcacccagggcgacataccctgggtcgaaggccgcgacatctggtaccacgaggcgctccacgcggcctcagccgactgcccggcggaagcgatggacgccgaggacccgctgttcatcctctatacctccggcagcaccggcaagccgaagggcgtgttgcacaccaccgggggctacctgctcggcgcggcgatgacccacaagtacgtgttcgactaccacgatggcgacgtctactggtgcaccgccgacgtcggctgggtcaccggacacagctatatcgtctacggcccgctggccaacggtgccaccaccctgatgttcgagggcgtgcccaactacccggacgcctcgcgcttctggcaggtgatcgacaagcaccaggtgaatatcttctacaccgcgccgaccgcgatccgcgcgctgatgcgcgaaggcgacgccccggtccgccagacctcgcgcagcagcctgcgcctgctcggctcggtgggcgagccgatcaacccggaggcctgggaatggtactaccaggtggtcggcgagaagcgctgccccatcgtcgatacctggtggcagaccgagaccggcagcatcctgatcaccccgttgcccggcgccactgcgctaaagccaggctcggctacccgcccgttcttcggcgtgcaacccgtgctgctcgacgagaaaggcaaggaaatcgacggcgcgggcagcggcgtactggcgatcaaggccagttggccgagtcagatccgcagcgtctacggcgaccaccagcggatgatcgacacctacttcaagccctaccccgggtattacttcagcggcgacggcgcgcgccgcgacgaggacggctactactggatcaccggccgggtcgacgacgtgatcaatgtctccggacaccggatcggcaccgccgaggtcgagagcgcgctggtcctgcacgatgcggtggccgaggcggcagtggtcggctgcccgcatgatgtgaagggccaggccatctacgcattcgtcaccctgatggccggcagtcagcccagcgaggcgctacaacaggaattgctggccctggtcggcaaggagatcggcagcttcgccaagccggatcacctgcaatgggcgcccagcctgccgaagacccgctccggcaagatcatgcggcgtatcctgcgcaagatcgcctgcaacgagctggacagtctcggcgatacctcgaccctggccgatccgggagtggtgcaggggttgatcgacaaccgcctcaaccgctga

SEQ ID NO: 336237 - DNA, 267 bp, Pseudomonas aeruginosa
atgaaattcattgacgatatcttggagtcaatatctggaagcacgagaacaaaaattgaagatcctttcattggcgctttcattggctcgtggctaatttgtaattgggatagcttagcgctgctggtatggggagagggaaccgccacagatcgaattgcagccattagcaagcactaccacgaattgaagatattcgaattcaactcactcgtggcaatccccctaaagtggaccccggaatcgagacagcggtttaagctgtaa

SEQ ID NO: 336238 - DNA, 519 bp, Pseudomonas aeruginosa
atggcaacccccgcctacatgtccatcaccggcaccaagcagggcctgatcaccgccggcgccttcaccgaggattcggtcggcaacacctaccaggaaggccacgaggaccaggtgatggtccagggcttcaaccacgaagtgatcatcccgcgcgacccgcagtccggccagccgaccggccagcgcgtgcacaagccggtggtcatcaccaaggtcttcgacaaggcctcgccgctgctgctggccgccctgacctccggcgagcgcctgaccaaggtcgagatccagtggtaccgcacctccgccgccggcacccaggagcactactacaccaccgtcctggaagacgcgatcatcgtcgacatcaaggactacatgcacaactgccaggacccgggcaacgcccacttcacccacctggaagacgtgcacttcacctaccgcaagatcacctggacccacgaagtctccggcacctccggctccgacgactggcgctcgccggtggcagggtga

SEQ ID NO: 336239 - DNA, 234 bp, Pseudomonas aeruginosa
atgcgcaatacgcaacagcaccaagacatcccccgtttcatcgacttgaacatggtcaagatgagaacgggaatgggcaccacgttcatctacgaccatatgaagaaaggggacttcccgaaagggcgcaagttcggccgcgccacccgctgggcagaggctgaaatcgaccagtactgcaatggcacctggactccgccggcaccggcaaacgaagaagaggccgcggagtga

SEQ ID NO: 336240 - DNA, 528 bp, Pseudomonas aeruginosa
atgagcatcatcctcaagggccacgccctcaaccagcgccagctcgacgcgatcactccggtgatgaacgacctgatccaaggccgggttggccaggcgggcttcgaagaggcctgcctcaaagcgctggagaacgccggctgcccactgggctacgacaccaccatgccaggagccggctcctccgtcgaacagcgggcaaccaagtggctgcgcgacgggcaggtcggcgcctcttctcgctccatccatgatcacatgctgggccttactccgaagcgtggctactacgatcacccccacgacccggacgatctgaatcggtgcctgcttctgctggacctgatccctgaatggaagcctcgcatgcgcgaaatggcccagcacagtccggaatgggccgcactggcgagcagttgggaaaagctcgccaatctcttcctaagcgaagccggcctggactggcaacgcagcagcgaagccccggaaacctacgcggcgatgcgactcctacggggtgacgcatga

SEQ ID NO: 336241 - DNA, 1272 bp, Pseudomonas aeruginosa
ttgaaaattgtacaaaaaataaccagtccgctcgattgtcccgccttcatcgccgcccaccgccagaatcctcaagactttacccgccgacgccagctcaccttcaagaacctcgtcctgttcctgctcaatcagccgcgcacggccctgcaaaccgaactcgatcagttctatcgcgtactcaatcaggcgtcgactgagacgcaaatggtcactgcgcaggccttctgcaaagcgcgcaaaaagctcaaccccgaggtatttgaaagtctcaatcacctcctgcagcaacaaattgactgcttcgggctgcgtcagaagtggcgtgggctgagggtgctcgcggtggatggctcgaccgtgcatttacccctggagtcgaccatggcgaccttctttggcagtcactctggctttcccatggctcgcttgtccacactctacgaagtcgctgacggtcaaaccctgcatagcctgatcgtgcccctgaccgtcggcgagcgcgactgtgcccatctgcaccttgagcacctgccggctgacagcctgacgctgtttgaccgtggttaccctgggcactggttattcgcgctgttcgcgcagcaacagcggcactttctgatgcgcctgccctgtggctataacgcccaggtcaaagcgtttctatactctggccaagttgaagacacacagcttttcgtggccaaccatcctgaagcacgtctgttctgctccgaggctggcgttgatcctgccagccagatcgagctgagactgatccgggtcgagttggccaacggcgaaagcgaggtattgctgacctcgttgctggatcgagaagcctttcccgctgaggtgtttgccgagctttaccaccgccgctggggcatcgaaaccgacttccgtcgcctcaaacaaaccctgacgctggacaacttcagcggccgcagcgtgactgctgtaaagcaggactttcatgccgctcaactgttgaagaacctggcgctgttgatgcagcacctgctacagccggtcatcgaacagcgccacaaaggtcgcaagctgcgatggaaagtcaacttcacccaaggcgtgtcacggctcaaaaataccctggtcgagctgctggtgcggcactgtgctcaggggctgagcaatgtgctggccttgatggctaaaagcctcagtgccgtacgctcaggccgtagctttgcgcgccaacgcaaacgcgcagccagccgaggttgtgagggctacaaaccgacgcgctga

SEQ ID NO: 336242 - DNA, 198 bp, Pseudomonas aeruginosa; identical to SEQ ID NO: 324423

SEQ ID NO: 336243 - DNA, 438 bp, Pseudomonas aeruginosa; identical to SEQ ID NO: 324428

SEQ ID NO: 336244 - DNA, 345 bp, Pseudomonas aeruginosa
atgagattcgagcagccctcaccgactatcgactacagaagaaatatggtgctgcaagcattgctgaagatcgaggcgctccacgagctcgcacatgccgcctctccagagctgctagcgaacattaaggaaacgctggccgacccagatagactttgcgaaatggcgacagcaatcgccttatattaccttcaccgggaacctacagttccagcgctatacatagaactcgtcgaggatgaagttgcacgctaccccttcacctatgacgagatagagtcagtgatggattcaaagattagggaagtcctattccctaggtatgagcgataccacgatacatga

SEQ ID NO: 336245 - DNA, 753 bp, Pseudomonas aeruginosa
atgaacatgcaaaccagcatcgacaggaacctcaatttcgactttgtgcgcaggcaagtcgagcaaccgccagcttgggcctctgaggtcctgctgtcatgggaggaagcctacccccaggaaaagcacgccttccttcaaagccactactggaccgagacgggatcgatcaatgtgttccgcgtcgtgggtacggaccactgggattaccaaggaaagtcctggctcgacttcctcactggcggcaagcgaatgcagcgaaacctgcaggccttgctggacaacccgagctactacctgcagccaacggagcgcaggcccgcgatccactacaacacgctcgatggcttgagcttctatgtcggatccgacggcaaccaccgcacctgtattgcccgattcttcctggccgaacagcagaaaagccagcttcacgacgtgacgctcaaccactaccaggtcaacgacagcttctaccgcctgtacgggcaacttcggcaactgctcctgctacaggggctacctgtgcaaatccatccggagcgtgtgcagttgggccgggaagatactgctggctggaagatggatacctaccagaccacattgaactggttgaacctcaagacccaggaggaaatatctctgaacgaagcccagacacgggagcaactcatcgacctcatgcggggaaaaccatctgaagagcaatcgcgaggctggaagacaaagctgaaatggctcatttcaggctga

SEQ ID NO: 336246 - DNA, 234 bp, Pseudomonas aeruginosa
atgattgagtctgaaaagaaagccgccaatggtgattcggtttggcgattgagacaggacggaactgtcgaaatcaatgaagcagatgtttccgatgcagtggtctcgcctctctccgtcattggtatcggtctgccgaaagagtttacagaagagttagaaagaaaagccgacctgctcgagcgccggctttcgaggatggaggcggctcttgggcttgagccgatcctttag

SEQ ID NO: 336247 - DNA, 603 bp, Pseudomonas aeruginosa
atgagctcgatgacggtcatcaagctttccggtccgctcattcgtgagttcggtcggacgcatcaccggcagttggaatctggcaccgccaacgaggccttctcggctctacgcaacaccctcccaggattcaaggacgccatcctccgcctggagcggcagggcatgcgcttcgcgatctttcgcaatcggaagaatgtggggcctgatgagcttgggatgggcggttgccgggagatccgcgttgtgccggtgattgcaggcagcaagcgggctggcctgctgcagaccgtggtgggtatcgcaatggtcgtagcagcgactgtcgctgcagggcccggcggcttcgctgccgcaggcggtgtcgtcggtgggattggtaccgcaggcatcgccctgacgcttggcggtgttgtgcaaatgctcagcccccaggccaaggggctttcgatgtccggggcgccggagaacctgccgtcatacgccttcggcagtgcaaggaacaccaccgccagcgggaacccggtgccgatctgcatcgggaagcgccgctggggcggggcgattatctcggcttcgatctacgccgaggacaaggtgtaa

SEQ ID NO: 336248 - DNA, 744 bp, Pseudomonas aeruginosa
atgaccttgttagcggatatccagaagctggagcctggctccgagatcatgctgttcgaactggacggcacggactacggggtcgatgtgctgcgctttcatgggcacgcgattgcgcatacccctcaggagctggcagccgccggcgccaatgcggaccagttgccggcgaagtcgatttggtggcagggaaacgaatacgccgcctggccggtgcaggttgagggcctggaggcgagcggcgatggggcatcggttcgaccgaagttcacggcagggaacgtcaatgcacgcatctctgcgctgtgcttggcctacgacgacctggccaacttccggctcacaatccgagaaacactggcgagatacctcgacactgagaacttcccggatggcaatccagatgccgacccgacgcaggagtcgatcagcatctggttcatcgaccagaagacaactgaaaacaatgagcaggtgtcttgggatctgatcagcccaggcgatggtgaagactccattggccggcagatgaccaccttgtgccactggtgcatgacgggtggttatcgtggcccctactgccagtacacagggcctggtttcgacatcaacgatcagcctacggatgatccggcaaaggaccagtgcgcaggcctgtatcgatcgtgtgaatctcgcttcggcgctggcaaccagttgcccttcggcggcttccccgctgtctcgatcatcgccaggagctga

SEQ ID NO: 336249 - DNA, 339 bp, Pseudomonas aeruginosa
atggctatcgaaaccttcacctggattccggacgacgaggcctcgtgcgatggcgaaatgcgcctgcgaaagtcccagatgggagatggctacgttcaggtttccagcgacgggctcaatccagatagccagacctggacgcttaccttcggtggtctggccgaggaggtggcgctgccgttggcgttcattcggcgccacggtggctaccgtgccttcctctggacaccaccgggtggtgagcttggcctctaccgctgtgaggcgtaccagagccaacggcgcccggcaggcatcaccgttctttcattgaccttcgttcgagcgtatcacccatga

SEQ ID NO: 336250 - DNA, 3009 bp, Pseudomonas aeruginosa
atggccaccggcagtaccgaggagtacaacgaggtccaacagcacctgctgcgcactgcgcaggagacctaccggccgttggctgaggcgcaggagctgtacatccgcacggccgacgtcatgcgctcgctgggctttgacacccagcagaccctagacatcaccgacagcttcagcttcctgctggtgaccaacgctgcgtcggcagacaaggcgagttcagccctgggcgcttactcgaaggccctgcagaccggcaaggtcgaagctgatggatgggtttccattcaagacgcaatgcctaccatcgtcaatgcgatcgccagcgcgaccggcaagagcgcggaggagatccgcaagctcggtgtacagggcaagctagccttggaggatatcaatactggtctgctgcgtacggttgatgtcaatcggaaggctgctgtggagatgtctaccagcgttcaggatgccttgacgaatttgggaacggccctacaggacttgattgggcgtagtaatgaatctctgaacgccactggcttgctggccgaggggctgggactcgtagctaccaaccttgaggcagtggtaactgttggcggtgctgcggctttgggggctctgtctggctcgctcttgcaagctggagtcgcggccgtaaaacatgcgcagagcttaattgctgaacggtctgcagcaatcgctgccgctcgtagtgcgttggctggcgcagaagcgcgagtagcctttgcgtccgcccagatggcggcagcagaagcgacagtcgctgccgctactgggatgcgaagactgtctcttgtagaggcggaactgattccgaagcaggtcgctctcacggcttctacggaggccctcgctattgctcagcgcaacgttgccagggcgggtgctattggctccgtcagcgggcttcttggggttcttggtgggccggtagggttggcggtaacggccggcgcggcagccgcctcgttccttctgcttcgcgacaacgccgaccaggctggcgtcagcctggatgacctgcacaagccggtcaagcagttgcgggaggagttccagaagctgagccgcgacagccgcgatgctgcattggttgagtggaaacgcgaggagatcaaggcgaccgaggaggtgcgcgctgcgtacggtgacctggcggcggatattcgttccgctctggtgactgctccggcgagagattcaggtggtcagtacacgaagcagctctccgaataccaaacgctactcgaccgcctgaaggaggccaagagcagcggtgaggcgctggcgccgatcctccgcgaagttggcgagcgccttggggttgatcctcaggatattgatagttgggttctgcaagcgcgcgcgctcgagaaggcgtcggatcgctctcgcgatatgaccgagaagctgcgtgtactgaccagcgtaacggaccaaaacactgcctcgaccaacgcgaacaatgccgcgaagactggcatgagtagcgccggtcaaagctacctcgacacgctgaataagcaactcggtaccttgcaggacaatggcaatgccatcaaggcggcgaaccgctacatcgccgagaacaaggatctcaccgagctggatcgccaagagatcctgaagtcggccaatgctattgaggcgcagaagaaggccaatcaggccgcaacagccagtggcaaggcgcgtaccaaggcggtaagcgacgagatcaaggcgatcgacgacttgatcgaccgagcgcttccggagaagaagcggctggaggatctcgccgcgggcatcgaagggctacggaaagcccatagtctcgggaagctttcggctgagcaactggaagaggccatcaagaacctgaacgaacagtacggggacgccactctgcagaagcagatccaagccgagcagaagctggccgagatccggcgcaacagcgcggagtcttatcgtgctgcgatggagctgatgctgcaggcgcagcaggactcgatcaatgcgagcgtgtcggccatcgggctgggggaccaggaaggtgagcagcaggaccgtctcaaccagatccgtaagaagtacgcagatctccggcgggcgctggaggagcagcaggaagatgcaagccggcgcctcagccagttcgcgtacgaacaacgccttgccgacctggcggagttccagtcacgcgaaacacaggctgaggttgacggctatgagcggcgcctgcaggcgatggcggactatcgaaacggtgcccgccgcgcctggcagaacatccaggccgatgcgaacgacgtagccagtgccatggatgatggcctcactgccggcttctactcggcccgcgacgccctggccgactttgccaccaccggcaagttgaacttccatgactttgcctcaagcgtgatcaacgacatggcgagaatcgctgcccagcaggcggccacatcggctctgagcggtttgttgggcattggagcgtctgcgctgggcgggtggtttggtgggtcagcgacggctggtgcatcagcatctggctacaccggaagcgcatattcaaattgggcggccatgcaagcggacggcggtgcttgggctaacggcgtgcagttcttcgccaatggtggggttttcaccaacagcgtggtcaacacgccgaccgcgttcggtatggcgggtggacgcatggggatggtgggagaggccgggccggaggcgatccttcccctggcacggaatagcgatggatcgctcggcgtgcgcatggtgggtgggatgtcggcgggaggtgcgacgactgtccaggtgaacatgcccatggagtttgtcatggaggatcgaagcagtgatggcatggcgctggatccgcaagcgttgcaaaagggcatggagcagcagatgcgtagcattgcggagaaggtggttgccgactcttggcgtcccggtggaatgagcttcaggcagagcatagggaggggttga

SEQ ID NO: 336251 - DNA, 345 bp, Pseudomonas aeruginosa
atgagcgaatcgatgcacggcaccgtcaccctggtggtgggtgcgcgtaccttcactctgcagccgacccttgaagcggctctgcggatcgaaacccgtttcggcggcctgcggccggcgctggatgcgctgcgcactttcagcatcgccgcctgcgcagatatcgtcgtagccggcgccgggctgaagcctgagcagcatgccgagatcgcttcggcggtattccaggcaggcgtctccgacgtagttgggcgcctggcgccgtacctggttggcctgatgaacccagttccgccgagcatcgtcgcccggggaaagcccgaggcggacagcacagcgcagtaa

SEQ ID NO: 336252 - DNA, 507 bp, Pseudomonas aeruginosa
atggcagacaatctcaacaccgccgctggctgccgaatctcgatcggcaccaagaagccatcggccaccaagaccgagtacgaggcagatgtgtacgtcgaagtcggcgaagtcgaggatctgggcgagttcggcgataccttcagcaacgtgaacttcactgcgctgagcgacggccgcgtgcgcaagtacaagggcactgccgatgcgggcgacatgaccctgaccgttggcctggacaacggcgacgccggccagttggcgctcaagaacgcccatgccgaccgctcgaagggcaactacaacatccgcatcaccctgaacgacggtctgccgggagatccggcggctgagcctccggtgccggcggtgccgcccaccaccttctacttcggtgcgaaggtgatgaacaacaccgtggctgctggcagcgccgacaacgtggtgcgccgcaatgtgaccctgggcatcaacaccgagattcttgagatcccggttgcgatctga

SEQ ID NO: 336253 - DNA, 387 bp, Pseudomonas aeruginosa
atggctgatccaggctttgccctgcagcgcgcaatctaccagcgcctgagcgccgaactcaccgtcccggtattcgacgcggtgccggatgacaccctgtacccgtacgtgaccatcgaccgcgaagtcgcgcagaacaccagcccgatttctggccgcaagcgcaagcagcggctgatctatctcagtgtctggagcgaccatcaaggacaggccgaggtccgccgcatcctcaatgagatcgatgcggcgctggacgagcgtcacctctctgtcgacgaagggcgcgcggtgtcggtcagggttatcgcgtcggacaccaaccgcgaaccggacggtcggacctacatgggttccgctacggtacgcgtcatcaccacttcctga

SEQ ID NO: 336254 - DNA, 183 bp, Pseudomonas aeruginosa
atgaccgaatcatgcaagtgctccagcgagcgtggcctggatccggtgggcgttctggagtcgatgctggccgagcagaggaagaccaaccatctgctggccctgctgatccaggcgctggccgatgagggcgagatagatgccgacatgccgcgcgtcgacctgagcggcaggccgatctga

SEQ ID NO: 336255 - DNA, 333 bp, Pseudomonas aeruginosa
atgaagatgcctgacaaacccgacacttgggcggctgtgctcgcctggctgagccagcatgcgccgatcatctacgcctccctgctgtcgtgggccatggccatggccaggatcatctacggcggcggcacgcgccggcaggcgcttctggagggcgcgctgtgtggtgggctggcgctgacgatcatcagcggcttcgagttctttggcgtgccgcagagcatggccaccttcattggtggctggatcggcttcctgggcgtcgagaagatccgtgacctggccgaccgttacgctgggatcaagctgccgcgtcgagggtctggcgaatga

SEQ ID NO: 336256 - DNA, 1326 bp, Pseudomonas aeruginosa
atgcctgatcacctcccctacaccctgcacctgggcgactgcctgcaggtgctcaaaacatttcccgacaacagcttcgacagtgttgtgactgacccgccctacggcatccgcttcatgggtaaagcctgggacggtgccgacatcgaggcgcgtgcagctcggcgggcggaaatgcccagccatgcaccggatgccgggccgaacggcggccatcgttcagtcgctgcggaagctgggaagtacgacctaaccccaaagggcatgcttgccttccaggccttcacgctggaatgggcggccgagtgcctgcgcgtgctgaggccgggtggacacctgctgtccttcgcctcgccgcgtacctaccaccatatggcggtcggtatcgaaatgtccggcttcgagatccgcgaccagatcatgtgggtgttcggcagcggattcccgaaatcgcacaacctgcagggcgagtacgaaggctggggtaccgctctgaagccggggcacgaacccatctgcatggcccgcaagccactgattggcacggtcgcagcgaacgtcctggcccacggtaccggggcactgaatatcgacgcttgccgcattccgtccgagcctatgccaccaaataccggcgctggcgggttaccgcgtcggcacgcagatgagcagcgcggccctggcgtggtttccaacccacacgccgccggccgctggcccgcgaacctgatccacgacggaagcaccgaggtggtcgcgctgttcccggccgatgccgggcaggccgcgccgctggcaacccgcaacagcgacaagacccgcaacagctacggcgccttcgccggctcacctgatgcccatttctctccgcacgacgccggcggcagcgccgctcgcttcttctactgcgccaaggccagtcgccgcgaccgcaacgaaggctgcgagcacatggagcgcaagccgctgcactggtctagcgggagccagaaccctggcagtttccagtcagatggcaccgacaagaccagccagaacaaccaccccacggtgaagccgacggacctgatggcctacctggtgcgcctggtcactccgccgggcggcaaggtgctcgacccattcacgggtagcggcagcactggtaaggcagcggtacgcgaagggttcgagttcgtcggcatcgagcgcgagccgccctaccttgccatcgccgaggcgcgcatcgcgcacgaacttgagcgcgtcaccgccgcggcagaggaagcggcgaaaggctcggcgcagctcgacatcttccacgacgccaaggggttagcccgatag

SEQ ID NO: 336257 - DNA, 1374 bp, Pseudomonas aeruginosa
atgagccgctttcgaccgataaaccgcgaaatcgactacttgctcccgccgtcggtgcaggactggctgcccgagtcacatttggcgcgctacgtggtggaggtcgtagagggcctggatctgtcgaagctggagagcgtctatgcgggccgtggcagcgctgcctaccatccggctatgttgctgtcgttgctgatctacggctatgccacgggtgcgtattcaagccgcaagatcgagcgagccagctatgactccctggcgttccggtttatcgcctgcgaccagcacccggatcacgacaccctggccagcttccgccgtcgccacggagagcagttcgccgcgacctttgtgcaggtactgcaaatcgcgcgcgagaaccaagtctcgcgttttggcacggtcagtctggacggcaccaagatccacgccaatgcctcgcggcacagcgccctgtcctatgctcacgccgagaagatcgaggcccagctaaaggccgaggtccaggagatgctcaagctggcagaagcggccgatcagagcgacctccccgacggggtcagtctgcccgacgagatcaagcggcgcgaagaccgcctggccgccatagcagaagccaagaccaagatcgaagcgcgggccaaggaacgcctcgagcgcgagcaggccgagtatcaagccaagctggacaagcgcgaggccaaggaaaaggccaacggcaagaagcctggaggcaaaccgccgaagccgccgcaggtgggcccgcgcccggacgaccagatcaacctgaccgacgaagagtcgcgcatcatgaaggtggctggtggcggcttcgagcagtgctacaacgcccaagcgctggtcgatagcgaatccatgttggtcatggcgccgcatgtgacccaggcgggcaacgacaaggaacaggtcgtaccgatgctggccaagcttcaagcgcttcccgaggagctgaaccagccggagaaattcctggccgatagcggctacttcagcgagaagaatgtcgaagcctgcgaggccgccaggatcgagcccctgattgccgtgggccgcgacgcccaccatcggcactggcgcgagcgtttcgaagagccggcagcgtcatcggagccgaccagtccggtcgacaaaatgaagcaccgactcaagaccaaggccgggcgcgcggcctatgggcagcgcaagcagacggtggaaccggtattcggaatcatcaagtcggtgatgggcttccgtcagttcctgctgcgcggtctggcgaatgtccagaacgaatggaccctggtgtgcctggcgtggaacttgaaacgcatggccacgttgcgcccgcattccgttcaaaatgcgtga

SEQ ID NO: 336258 - DNA, 288 bp, Pseudomonas aeruginosa
gtgacagaggttaagaaacgcaaggttcacagcgcagaattcaaggcgaaggtgggcatggaagcgatccgcggggagaagacgctcaacgaaataggacaacagtacggcgtgcatcccgtggtggtcagccagtggaagaaggcaatccaggaacaggcagccacgctgtttgccagcaagcgtggcccaaagcctgcagagcacgccgacgaggaccgcttgtacagcgagatcgggcgcctgaagatggaattggattggctcaaaaaaaagtccggactatga

SEQ ID NO: 336259 - DNA, 948 bp, Pseudomonas aeruginosa
atgaacgcagacgtacggatgaactgggtcatgcaggacacgtccctgccgattactcgccagtgcgagctcgcgcaggtgccccgggcaactttctatggccgcaggcccgccaatctggccagtgatgaacacttgctgtacatgcggctgatcgacgaggagtacacccgccacccgttctacggcagccgccgcatggtggtatttctgcagcgtgggggccacgaagtgaaccgcaaacgggtgcagcgtctgatgcgcgtcatgggcctggcaggtatggcgccgggtccggcaaccagtcatccacacccccagcacaagatctatccgtacctgctgcgaggtttgcagatcgtgcggaccaatcaggtctggagcactgatatcacctatatccggctggcgcgtgggtttgtctacctggtggctgtcatcgactggtactctcgacgggtactggcctggcgcatctccaacagcatggacacggcgttctgcgtggactgtctacaggaagcattggatcagcatggatgtccggagatcttcaacagcgatcagggttctcagtttacgagcgaggccttcaccggcgtgcttagagttgccgggatcgccatcagcatggacgggcgtgggcgtgcgctggacaacatctttgtggaacggctctggcgtagcctcaagcacgaggacatctacctgaagggctacagtacggtggctgagctcacgctcggactggtcgaatacttcgcgttctacaacggcgagcggccccatcagggactgggaaaccgcactcctgacgaggtctatgccgatggtattggcggcggcgccaggattgctaatcactttgaccgggacggaaatccttccagcccggtcgcatcggggcagcgccgttcggctgcagtagaagcaatggatttagcttaa

SEQ ID NO: 336260 - DNA, 255 bp, Pseudomonas aeruginosa
atggacaacaaacctctcatcaagcccgggaagctcttcctgatctgtatcgccctgctggcctatgccgggctgtccgtcgccttggtgggcggcattgggccggccctggtcagcagccgcgacgatgttctggtcttcgcgggattcgccatccccggcgtctggttgatcgcctcggtctgcctcggcatccacctcgccaacacccgccgcgaagaagcggccaccaccagcaaggagaaagaccaatga

SEQ ID NO: 336261 - DNA, 537 bp, Pseudomonas aeruginosa
atggaggagagcggtgcctggcttattggaaactcagccatgatcgagcaggccctgtcgttcgacgacctgtgcgatctcctgggggtgaatcatgcccaccgtgccgaggctgccgaggtctgcgcgggcgacgccggaatcgttggcggcctgctatggattggcggggagttcgaggacagcgcgaaccacaagagtggccgctccaaccgaggggacactgggccacttaccgccgcggtccagaacctgttccagaagttcctgcttgaaaatccgtcggtcatccctgacccgttcgccccgggcggccctttctacggcgccccgcggcaggagatggcgccagacggaacggtgcagattcggcgaccggcactcaccgtccacagccaggacggatcgatccgcacggtggagcgaaaggaggaggtggttgacggtgagttggttgcccgcgggcggcacgaagcaccgcggcgcctggtcgtagtgcgccacgaagaggagatagggaatgggaagctcgactag

SEQ ID NO: 336262 - DNA, 624 bp, Pseudomonas aeruginosa
atgcaggaaaagcccaccgctggccgccccactcaggagtacgtcttcaccggcgaccagggcaagcgcgacagcatcatcgtcgtcgcccagctctgcccggagttcaccgcccagttggtggaccgctggcaggaactggaacagcaggcttcccggccactgaccgccgccgagcaattactggccagcgtgcaactcaccgtcgatctggagcggcggcagcggcagaccgagcagcaggtggcagcgctgaccgaaaccgtcggcgatatggaccgatcgcacccgctgctcgactcgatccccaacggcatggagagcatcaccgctatccggcagcggatagggaagcagtacggccttccgcccagggtgatcgacgcggtggtgcgcgacatgccgcacagcccgcgccccttcgccatggtgcgcagcaagcacgaggaactgaacgcgcgcccctacgcggtctgggcaaaggccgagatcagcaggctgttcgagcgcttcgtgcgcggctgcaccttcgtgacccaacaccgagccacgcacccggatttcggcgccggccgggagcgcttccagatgcgcggccccccttcgcaggagatcggcgaatga

SEQ ID NO: 336263 - DNA, 300 bp, Pseudomonas aeruginosa
atgttcaccgtgcggctgttgagggcctcgatgttggcgcaggaggcgctgatcttctcggaaagctcgttcatcgcgcggatggtctgctcgaccacctgcttgccgtcctcggcctggtggttggcgtcggaggcgtggtgcgaggcatcggcggcgttgcgggcgatttcctgggcggcggcgccgagttcgttgatcgccgcggcgacgctgttggtgcggttggactgctcgtcggagttggccatcgaagagttcgaggcgttcaccaccagttgcgccacgtcgtgcagttga

SEQ ID NO: 336264 - DNA, 624 bp, Pseudomonas aeruginosa
atgcaggaaaagcccactgctggccgccccgctcaggagtacgtcttcaccggcgaccagggcaagcgcgacagcatcatcgtcgtcgcccagctctgcccggagttcaccgcccagttggtggaccgctggcaggaactggaacagcaggcttcccggccactgaccgccgccgagcaattactggccagcgtgcaactcaccgtcgatctggagcggcgacagcggcagaccgagcagcaggtggcagcgctgaccgaaaccgtcggcgatatggaccgatcgcacccgctgctcgactcgatccccaacggcatggagagcatcaccgctatccggcagcggatagggaagcagtacggccttccgcccagggtgatcgacgcggtggtgcgcgacatgccgcacagcccgcgccccttcgccatggtgcgcagcaagcacgaggaactgaacgcgcggcccttcgcggtctgggctaaggccgagatcagcagggtattcgagcgcttcgcgcgcggctgcaccttcgtgacccaacaccgagccacgcacccggacttcggcgccggccgggagcgcttccagatgcgcggcaccccttcgcaggagatcggcgaatga

SEQ ID NO: 336265 - DNA, 336 bp, Pseudomonas aeruginosa
atgaagcaagcactcatcggcaccgcgatcagcctgctgctcagcgcgtgcctgtatttcggtcaggggtcgcttcaccagttcgccttctatgtggcggcggccacgaatgttctctgctggctgctgatattcgccggcggcatcaaggggcaaggagccgcgaacctgctcgcccgcccttggctctccatccctaccggcgctctgcacgtggcggccctggccctcacagatcaccctgcactcgcggcttcgagcctgctggtgcaaatggcttgctacgccctcgcctaccaggcagtgcgcagcgccaagcaagggggtgacctatga

SEQ ID NO: 336266 - DNA, 372 bp, Pseudomonas aeruginosa
atgcatggcgaggcggcccgccaccaggctcgcctggtggagtgcgcggggatccaaggcggcgctaaagcattctggagcgctatcgatgcgatcttcgctcagtcggccggcaacgggggcgggctgcctggcggcacattggactttcctgatctggaccaggctcgactggagaaatgtgcgaaagacatggacctggtggaccagttgatcaagacggacatcgacactgcacggtcgaacggcattacagcgaccccgaccctcgtcatccaggacaaccagacgggacgaagcgtgaagcttgaaggcatggccgacgagaccacgttgctgtcggcgatagactggctagccaaggatctctag

SEQ ID NO: 336267 - DNA, 231 bp, Pseudomonas aeruginosa
atgaaacgagcaaccgttgtaaccgaactgccggccagcaccagccgggacatggacaagttcgttgtccgtctgccggacggcctgagggccgaggtcgaagccgaggccaagcgagacgagcgcagcatgaactccctgatcgtcgttgccctgcgcgagtacctgcatggccagcgccgaaagcaagcgctcctcgacgccttgaccgctgccgccggaggtcgctga

SEQ ID NO: 336268 - DNA, 231 bp, Pseudomonas aeruginosa
atgaaacgagcaaccgttgtaaccgaactgccggccagcaccagccggaacatggacaagttcgttgtccgactgccggacggcctgagggccgaggtggaagccgaggccaggcgcgatgaacgcagcatgaacagcgtggtcatcatcgccctgcgcgagtacctgcacggtcagcgccggaagcaagcgctcctcgatgctctgaccgctgccaccggagggcactga

SEQ ID NO: 336269 - DNA, 231 bp, Pseudomonas aeruginosa
atggtgcgttacgaggccttgaccatgcctgaccacatcattgcgctgatcgacggacaggccaaggaggattcggccctccgcgagcttgaggaaagcctgctgatcctggagcactggatcgagcaagtcgggatgacggatggctacgtgggagtggttgagatcgaggccgtagaggcggtgatcaacgcgctgaggcgccagcaggcggcagggagcggggcatga

SEQ ID NO: 336270 - DNA, 279 bp, Pseudomonas aeruginosa
atgagggccactctgggtatcagcttccgggcgactgcgccggttgatctttcgaagggaggtcagaaagcgaatgtcctgtgcgtgatggatgacatcgatgccgacctcgcattggacagcgcagtcgacctgcttgacgcgattcaaggcgggctcctcgacatcctcgacgagccgagtgttagtcgtcgcgtagtcctacttcttcatgcggccgagacagccactgccctggtccgttctgccctggagggtggggaggtggccaatgactag

SEQ ID NO: 336271 - DNA, 2064 bp, Pseudomonas aeruginosa
atgcatatccaatcgttgggggctactgcctcctcgctgaatcaggagcctgtcgaaaccccgtcgcaggcagcgcataagtccgccagcttgcgtcaggaaccttcagggcaaggtctcggggttgccctaaagagcacgccgggaatactttccgggaagttgccggaaagcgttagcgacgtgcgtttcagcagtccccaagggcaaggggagtcccgtactctgactgactcggcagggccgcggcagatcactctgcgccagtttgagaacggagtcaccgagctacagctcagtcggccaccattgaccagtctggtcctaagcggcggtggtgccaaaggtgcggcatacccgggagcaatgctggcgctagaagagaaaggcatgctcgatggcatccgcagcatgtccggttcgtccgctggcggcatcaccgccgcccttttggcctcaggtatgagcccggcggcgttcaagaccctttccgacaagatggatcttatttcgctgctcgacagctcgaacaagaagctgaagctgttccaacacattagcagcgagatcggcgcatcgctgaaaaagggcttgggcaacaagatcggcggcttctctgagttgctgctcaatgtactcccacgcatagattcgcgggctgagcccctagaacgcctattgcgcgacgagacacgcaaggccgtgctcggacagatcgctacgcatccagaggttgcacgccagccgaccgttgccgccatcgccagcagattgcagtccggctccggagtcacctttggcgatctagatcggttgagtgcttacattccccagattaagacgctgaacatcacaggtacggccatgttcgaggggcgtccgcaattagtggtgttcaatgccagccacacaccggatctggaggtcgctcaggcggcacatatctccggttctttcccaggagtgttccagaaggtcagcttgagtgatcagccgtaccaggccggcgtagagtggacagaattccaggatggcggggtgatgattaacgtgccggtccctgagatgatcgacaagaattttgacagcgggccactgcggcgcaacgacaacctgatccttgagttcgagggcgaagctggggaggtagcgcccgaccgaggtactaggggtggcgcgctcaagggctgggtcgtcggggtgcctgccctgcaggcgcgcgaaatgctgcagctcgagggcctggaggaattgcgcgagcaaaccgttgtggtgccgttgaagagcgagcgcggtgatttcagtggcatgctcggtggcaccttgaacttcaccatgccggacgagatcaaggcgcatcttcaggagcgcctccaggagcgagtcggtgaacatctggagaaacgtcttcaggcttcagagcgtcataccttcgcttctctcgacgaggcgctgctggcacttgatgacagtatgctcaccagtgttgctcaacagaacccggagatcacagacggggcggtggcttttcgccagaaggcgcgggatgcgttcaccgagctgactgtcgctatcgttagcgccaatggcttggcgggtaggctcaagttggacgaggctatgcgctccgctcttcagcgactcgatgcgctggcagatactccggaacgcctagcatggttggcagctgagttgaaccatgctgataacgttgatcatcagcagttactcgatgccatgcgcgggcagacggtgcagtcgccggtgctcgccgctgcgttagcagaggcgcagcgccgcaaagtggcggttattgccgagaacattcgtaaggaagttatcttcccctctctgtatcgccctggccagccggattccaacgtagctctgttacgtcgggcggaggagcagctacggcatgccaccagtccggcggaaatcaatcaagcgctgaacgatatcgtcgacaactactcggcacgaggcttcctgcgtttcggcaaacccttgagttcgactaccgttgagatggctaaggcttggcggaataaggagttcacatga

SEQ ID NO: 336272 - DNA, 1014 bp, Pseudomonas aeruginosa
atgggtaatccgatcctggccgggctgggtttcagcctgccgaaacgccaggtcagcaatcatgacctggtagggcgcatcaacacgtcggatgagttcatcgttgaacgcaccggcgtacgcacccgctatcacgtcgagccggaacaggcggtcagcgcgctgatggtaccggcggcgcgccaggccatcgaggctgccgggctgctgccggaggacatcgacctgttgctggtgaacaccctgtcgccggaccaccacgacccgtcccaggcctgcctgatccagccgctgctgggcctgcggcacatcccggtgctggatatccgggcacagtgcagcgggttgctgtacggcttgcagatggctcgcgggcagatcctcgccgggctggcacggcatgtcctggtggtctgcggcgaggtgctgtccaagcgcatggactgttcggaccgcggccgcaacctgtcgatcctgctcggcgacggtgccggcgcggtggtggtcagcgccggcgagagtctcgaagacggactgctggacctgcgcctgggcgccgacggcaactacttcgacctgctgatgaccgcggcgccgggtagtgcctcgccgaccttcctcgacgagaacgtcctgcgcgagggcgggggcgagttcctcatgcgcggccggccgatgttcgagcatgccagccagaccctggtacggatcgccggcgaaatgctcgtggcccatgagctgaccttggacgacatcgaccatgtgatctgccatcaaccgaacctgcgcatcctcgatgcggtgcaggagcaactgggcattccccagcacaagttcgcggtgaccgtggatcgtctgggcaacatggcttcggcctcgaccccggtcacgctggcgatgttctggccggacatccagcccggacagcgggtgctggtcctgacctacggttccggcgcgacctggggcgcggcgctgtaccgtaaacctgaggaggtgaaccggccatgttga

SEQ ID NO: 336273 - DNA, 906 bp, Pseudomonas aeruginosa
atgttgaggctttcggctcccggtcaactggatgatgacctgtgcctgttgggggacgtccaggtgccggtgtttctgctgcgtctcggtgaggcgagctgggcgctggttgaaggagggatcagccgggatgccgaattggtttgggcggacctgtgccgctgggtcgccgacccgtcccaggtgcactactggctgatcacccacaagcactatgaccactgcggcctgctgccctacctgtgtccgcggctgccgaacgtacaggtcctggcgtccgagcggacctgccaggcctggaagtcggaaagcgcggtgcgggtggtcgagcgcttgaaccggcaactgttgcgtgcggagcagcggttgcccgaggcctgtgcctgggacgctctgccggttcgcgcggtggccgacggcgagtggctggagctgggaccgcggcatcgcctgcaggtcatagaggcccacggccacagcgacgatcacgtggttttctacgacgtgcgacgccgacgcctgttctgcggcgatgccctgggcgagttcgacgaggcagagggggtgtggcggccgctggtgttcgacgacatggaggcttacctggagtccctggaacgtctgcagcgtctgccgaccctgctgcaactgatcccgggacacggcggcctgctgcgggggcggctggccgcggatggggccgagtcggcctataccgagtgtctgcgcctgtgccggcggttgctctggcgccagtccatgggcgagtccctcgacgaactgagcgaggagctgcaccgcgcctggggtgggcagagcgtcgacttcctgcccggcgaactgcacctggggagcatgcgccggatgctggagattctctcccgccaggcgctgcctctggactga

SEQ ID NO: 336274 - DNA, 1593 bp, Pseudomonas aeruginosa
atgggcgcggggagatggctcgtgagcggggttggctatcgactggaagaaagtctggagtaccgcacgctggtgccggaggcgctgtcgatctggcgcatggccggcgccaaccggatgctgttcgactgcttcgacgtggacagcaaggctgcgcggcgtagcgtggcgatcctttccagctgcctgcgcatcgagtgctgggggcgcgatgtagtgctgcgggcgttgaacgccaacggacgcgccttgctggcaccgttgagcgaggcctgtccggcccaggtcacctgcttgcgtgacggcgacaccctgcactggcgcttcccccaggaagagtcgcagccggacgagtggcgacgcctgcatggcctgtccagcctggaggcgctgcgccgcgtgctcggaacgctgggcgacgcggaggagcctgcgctgctgggcggcctgttcagtttcgacctggccgagcagttcgaacccttgccggcgccggccgaacctgcgcggcattgcccggactacctgttcctggtgccggagttgctgctggatatcgatcacctggcgcgccggacttcgctgcaggcgttcgtccacgatccggccgggcacgaccggttggccgccagcctgcgccagtgtgccgacgaattccacggcgccgtggaggaggcttccgtgtcgccggtggcaggcgtacgggccggcaactaccaggtcgacctggacgatgcgagctttgctagccaggtggagcgcctgcaggcccacgtgagggccggcgacgtgttccagatcgtaccgtcgcgcagcttcagcatgccgtgcgcggacccctggcgggcctatcgccagttgtgcctgcgcaaccccagcccgtaccgcttcttcctcgatgcgggggacttctgcctgttcggcgcttcgccggagtcggcattgaagtacgacgcggagagtcgcgaggtggaactctatcccatcgccggcactcgcccgcgcggacgcgatgcccggggcgccatcgatgcggaactggacaatcgcctggaagcggagttgcgcctggacgccaaggagatcgccgagcacatgatgctggtcgacctggcgcgcaacgatctggcgcgggtctgccgcagcggtacccggcaggtgcgcgacatgctcaaggtggatcgctacagccacgtgatgcacctggtctcgcgcgtggctggcgaactgcatggcgaactggatgcgctgcatgcctaccgtgcctgcctgaacatgggcaccctggtcggtgcgccgaaggtccgtgccatgcagttgctgcggcagtacgaggatggctatcgcggcagctacggtggcgcgatcggcattctcgacagcgccggcaacctcgataccagcatcgtcatccgctccgccgaggtccgcgaaggtatcgcgcgggtccgggcaggcgccggcgtggtgctggattcggatccacggctggaggccgaggaaacccgcaacaaggcgctggcggtgctgaccgccgtggccgctgccgaacgcgaaaggggagagcgcgatgcgcatcacgctgttggataa

SEQ ID NO: 336275 - DNA, 408 bp, Pseudomonas aeruginosa
atgcctattcataacctgaatcacgtgaacatgttcctccaggtcatcgcctccggttcgatttcctccgctgcgcggatcctgcgcaagtcgcacaccgcggtcagctcggcggtcagcaacctggaaatcgacctgtgcgtggagctggtccgtcgggacggctacaaggtcgaacccaccgagcaggcgcttcgcctgatcccttacatgcgcagcctgctgaactaccagcagctgatcggcgacatcgccttcaatctcaacaagggtccgcgcaatctccgggtgctgctggacaccgccatcccgccgtcgttctgcgatacggtgagcagcgtactgctcgacgatttcaacatggtcagcctgatacgtcagcctgatacgcacctcgcccgccgatag

SEQ ID NO: 336276 - DNA, 165 bp, Pseudomonas aeruginosa
atgcgccatctgatcgacgtggcgcggcgcaacggcttccgccagatgtattcggtggactcggcggccaaccgggcgatgcgcgacctgtgttgcgcactgggcttcgtcggccagcgcgacccggacgactcgacccaggtcatccaccgcctggccctgtag

SEQ ID NO: 336277 - DNA, 1140 bp, Pseudomonas aeruginosa
atgggcaactacatcaagcctttgtccgcgggcgtcgcactgatcgcctcggacagcacctggatcgaaggcaaggcgatccagcaactgcaaaccaccgccgagctggacggcatgcgccgcgtcgtcggtctcccggacctgcatcccggtcgcggctatccggtcggcgcggcgttcttctccgtcggccgcttctacccggcgctggtcggcaacgacatcggctgtggcatggccctgtgggaaaccggcctggcccccggcaagctgtcggcggacaaactggaaaagcgcctgggcaatctcgacctgccgctggacgagacctggaacgattgcatcgaagccctggagctgccggcccgcgagcactggcgcgcgctcggcacgatcggtggcggcaatcacttcgccgaactacagcaggtcgagaccgtgttcgaccaggctgccctgcacgccctcggcctcgatgccgatcgcctgcaactgctggtgcacagcggctcgcgcgggctcggccaggcgatcctgcaagagcatgtcagcctgcacggccacgccggcctgctcgacggcagcctggaagcttccgcctacctggcgcggcacgccgatgcgttgcgcttcgccgagggtaaccgccagctcatcgcccggcgcattctcgaacgcttgcgctgcgacggcctggaactgctcgacgtcaaccacaacctggtggcgccggcacaggtcgatggcgtcgacggctggctgcaccgcaagggcgccaccccggccgaccagggtgtgctggtgatccccggctcgcgcggcgactacagctacctggtggagcccgtgccgagcgcgcagagcctgttctccctggcccacggcgccgggcgcaaatggcagcgcggcgagtgccgggaacgcctggcggcgcgcttcagcgtcgaccagctgggccgcacgcgccttggtagccgggtgatctgcggcgaccgccagctgatctacgaggaagcgccggaagcctacaagggtatcgactcggtggtcggcgcgctgctcgaagccggcctgctgcgcctggtcgcccgcctgaagccggtgctgacctacaagacccgtggggagtgctgccgatga

SEQ ID NO: 336278 - DNA, 1227 bp, Pseudomonas aeruginosa
atgaacaagacgccccacaccattaccgacgaactgctggatcagcttctggccaattatcagaagcctgaagacttgatcggtaccgacggcatcctcaagcaactgaccaagaagttggtcgagcgtgcgctggatgccgagctgacccaccacctgggccacaacaagcatcagcctgtcagcaattggatgggcaacacccgcaacggtttcagcaagaagaaactcaagggcgagttcggtgaactgcccatcgaggtaccgcgcgaccggcatggcaccttcgatccgcagatcatcgagaagcaccagacccgctggacgggcttcgacgacaagatcctttcgctgtatgcccgcggcatgacggtgcgcgagatccaggcgcacttgcaggaaatgtacggtgccgaggtgtcacccagcctgatctcctcggtgaccgacgcggtggccgatgaggtcaaggcctggcagtcgcgcccgctcgatacggtgtatcccatcgtctacctcgactgcatccacagcaaggtgcgcgagggcgccgtgcgggtgaaggcggtctatctggcgctgggtatcaacctggccggcgagaaggaaatcctcggcctgtggatcgcccagaacgagggcgccaagttctggttgcaggtggtgaccgaactgcgcaaccgtggcgttcaggacatcttcgtcgcctgcgtggatggcttgaagggcttccccgaggccatcgaggcggtgttcccgcgcaccagcgtgcagctgtgcatcgtgcacatggtcaggcacagcctgaactacgtgtcctggaagcggcgggcggaggtcgccgccgacctgaagcggatttaccagtccagcaccgctgacgaggccgaactgcgcctcggtgaattcgaggccaagtgggatgacgactacctgccgattggccagtcctggcgacgcaactgggccaggatcacgccgttcttcgacttcccgccggagatccgaaaggtgatctacaccaccaacgccatcgaatcggtgaacatgagcctgcgcaagattaccaagaaccgcggctcgttccccagtgacgaggcgctgctgaaactcttctacctggcgctacgcaacatcagcaagaaatggacgatgccgatccgtgactggaaggcggcgctgactcgctttacgatcagctacgaagaccgcctgccgcagcagtaa

SEQ ID NO: 336279 - DNA, 1227 bp, Pseudomonas aeruginosa; identical to SEQ ID NO: 336278

SEQ ID NO: 336280 - DNA, 687 bp, Pseudomonas aeruginosa
gtgcgcgataccctcgatccgatcgacgccgccatcggcgtaagcaacggcggctggaaggaaaaggacagcgggcatgccgtcgcgcaacaggtggacaccgcgctggcgtaccgctacgggcgcgacacgcgcagcgtggagagggcgttgaacgaaggcaaggaactggcccggcagacccatgtgttttccgctcgtgaactgggcaccggcatggttctggtcacccgcgcggaaactccctacgaggcccggctgcgcctgcagacggcggagggccatctggagcccttgtcgttccactcggccatacccaacaacccggagcataaccggcgggtactggcctatgacctggccatcggggccggggacagcgtggatgatgtggttttctatcagtatctgtgtcgggtggcggattggcggttggattggaaggctaaggacaaggggctaaatggccaagcaaatgacgaaatacatattccgagcgaagaggtgcaagcgttgtatcacgcggaagagcctaaaaatagcgagctaatagacgccactgtagtctaccgcaagagtggcaaactccctgtgacagtaggagacagcctgccttccttggtggcgacacaaaccatcgaagaccgctattacagccggccggtgcgttttggaggagcgagctga

SEQ ID NO: 336281 - DNA, 981 bp, Pseudomonas aeruginosa
atgctggttcacctgtccgttcacaactacgccatcgtcgagcacctggatctcgaactcgctaccggcatgagcgtgatcaccggcgaaaccggtgcgggcaagtcgatcatgctcgacgccctcggccttaccctcggcgaccgcgccgacagcggcgcggtacgtcccggagcggacaaggccgacattctcgccagcttcgacgtcagtgccatcgccgaggcccgcgactggctcgccgagcgcgacctggaacaggacggtccgtgcatcctgcgccgggtgatcactgccgaaggtcgctcgcgtgcctacatcaacggcacgccctgccctctgggcgacctgaagagcctgggcgaactgctgatcgacatccatagccagcacgagcaccagtcgctgctgaagagcgagacccaccggcgcctgctcgacgagtacgccggctgccaggagctggcgcgccaggtgcagctcgccgcgcaacgctggaagcagaccagccaggaactcgaacgcctgtcgcgtagcggcgacgaacagcgcgcccgccaccagttgctcagttaccagctggaagaactggaaaacctgtccctcggcgaaaacgaactggaaagcctggagcaggagcagaagaccctgagcaacgccgaaagcctgctcgccgcctgccgccaagtcgtggaaatgtgcagcgagagcgatgccggcaacgtcctttccgcgctcaatgccagcctcagccgcctgacctcgttcagcggccagcccgccgccctcggcgaagcggtcaacctgttgtccagcgcgcagatccaggtcgaggaggcgatcggcgaactgaaccgcttcgtcgaccacttcgatgccgatcccaatcgccagcagcaggtcgaggagcgcctggacgtcatttattccctggcgcgcaagcaccgggtccagcccgccgaactggccgacctgcagtag

SEQ ID NO: 336282 - DNA, 1377 bp, Pseudomonas aeruginosa
atgggcatttatcgccggtatgcggcagcgtttctagcattcgcgttttttctctcctctgaagtttcgtattccgcgactcgaaagagcgtcaccgtgcctagtgcaagtcttgttgcgcgcggtggcggctctccttctgtttctggtccatctttaaagattcctggccagcctggtgttgaatatatccctcggtctggcggcggggcttctggtgttccgataaagatcatcccgacgattgatttctctatcccaaggactattaaaggcagtgtttcttcgctcaagggtggaattgctggtgttgctgcaactgcggccatgtcaatggctcttgatagtatcgggggctttattgacgagaatggcaagccggttaagaaagtaagtgacgccccttcaggggccgtggcgggcgtttattacactagaccgccacaaaatgttggcggtgtttatcttgatcttaagtatgggttaactcgtcaacaggcttgcgaatatgaggttactcagagtggcaactgtgtaattagaattaatggcattgtgggttcttctattatttacgccaatagttgtgaccctggcgtgtggtttaatgtttcaactggcaagtgcgatagtttgtggaagcctggcgagcatatagagtcgttgactgatccggattatgacgatattacggattcgctgtctggtgtggttgatccgaattggcttaaagatttgctaacggcgacgtgcgaagggtctttgaatcctgccgcgtgctatgagcagatgtctgaaaccacgcatcttagcgggccttcatcggtaaacggccccaagacctcgacgacgacgacgaccacgaatcctgatggcactaccagtacgacgacgaaggacactcaaactaagtatgagattaagtatggcgataactatatcgactatacggaaacgaccacgaccacgaccacgaaagacggtgataaaaccgaagagacgactacgaccgacactgatgacgtgacagcagaaattcctcccgaagagaaagaggatgagggcggtagttttgaagatgccgaatttccggaagttaagccgttctatgagcaaaaatatgaggatgggttagagggtgtatggcgtgacaagcgcgccgaatttgaagatacggaatttatgaagtttctccaggggttcattccgtcgttttcggggcggtgtccggcatttgggctggatatgaatattgcgtcctgggcgaactatggttatcagcaattcgggtctatctgctatgtgcttgatttcgtgaaggcgattcttatggtttcggccttgttcttgtgtcgcgctctgatttttgggggttga

SEQ ID NO: 336283 - DNA, 276 bp, Pseudomonas aeruginosa
atgcatctggtcgcaaccatgcgcggcaagcgctttcgggatggcgttgaggaagagtttctgggcggttttatccagctcgcgaacaacgggcagccggtcagtaaggtgtcgtttgacgacctgcgcaccgcaggctattcgatcacttgggaatcgccgacggtcgtttcgctgacgtacaagggcttcgatatcggttacgtggtaacggatatgccgctggtgtccgcagcaaaggacatcgcagtaaccacgcctgtgcaggcgccttga

SEQ ID NO: 336284 - DNA, 468 bp, Pseudomonas aeruginosa
atgatcgacccagcagacaagcaaacccaagccctccccctggagcagccgaagcgcgggcgcggtcggccagccaccggcaaagcgctgtacgacgcagagcgggcgcggcgataccgggcgaacaagaaaaatcgtaacgcccaaccgtcacgaaaagagaccccatcgatccccgctgatggcgtaaaggaaatcctcgacggctggcagcgcacccaagaggagctcgaccaggcactgcaacgaattaccgagctggaagccgaattagcgtcacgcgtcacgaaaaaagaagaagccgaggcgaagacctggacgctccagggacgcagcggaagcggcaagtggcagaacctggccgcaggtctggaccgaaaagaagccagccggcaactggatcgagtgatcgacaacaagctgctgggatccacgaagggccgccaataccgactggttgaagaataa

SEQ ID NO: 336285 - DNA, 330 bp, Pseudomonas aeruginosa; identical to SEQ ID NO: 336172

SEQ ID NO: 336286 - DNA, 1173 bp, Pseudomonas aeruginosa; identical to SEQ ID NO: 336173

SEQ ID NO: 336287 - DNA, 234 bp, Pseudomonas aeruginosa; identical to SEQ ID NO: 336174

SEQ ID NO: 336288 - DNA, 189 bp, Pseudomonas aeruginosa; identical to SEQ ID NO: 336175

SEQ ID NO: 336289 - DNA, 309 bp, Pseudomonas aeruginosa; identical to SEQ ID NO: 336177

SEQ ID NO: 336290 - DNA, 135 bp, Pseudomonas aeruginosa; identical to SEQ ID NO: 330349

SEQ ID NO: 336291 - DNA, 822 bp, Pseudomonas aeruginosa
atgcttcttttcccgcgtaacgttccacgtcgacagacagatgacgatcaggaagcacagcgcagcacctttgaacggccagcgcttccagatcggcacaatgtcattggcggccagttcctggcctgcggccgaagaccgcgtatgcgacttccagaatccgtagaactgtttctgatactcccggatgctggtattcacgacctcaccgcgcagaccatcctggaccttgcggatatagcgatcattggtgccgaaagctgtggctttcttacagcgatacacgacctggacaagatcacgaattgcacggttgatcttgccgtaactctgagtgatcaacagcacatcagccagttcgtgacgatgaagcgaataccactcttcaaccggcacaggcgtgccgcgcagcggtatcgaaaggtgacattcatcgatcacatacagcggaccgaatccttcatcaggatgccgccaagggtccgcataatgatcaaccctactaaacgggcgtactaccctactctcatcctcgccactctcattgttgaacacctcaacagtagaatcccgaagctcgatcaaatgccaagactccggaaaaaacgccttgaacttatccatatccaaggccaggttcgtgatgacctttcgcccttgattcaacgcaggaacaacatgatagacaacagcctcatgagactttccgccaccaggctggcccaggatcaagttaatcattacgacccccagcggacaaacgggatagtttgtaacaggaatcggacgaccagagcgctgacaataagcgttatagcctga

SEQ ID NO: 336292 - DNA, 1866 bp, Pseudomonas aeruginosa
atgaacaaggcgaccgcgccggacgctgaccagcgggacagattctttggaggtagtgacagggccggaaagccgatcctgcgccgctccctggtagtccgcttcggctgctacctcaccctgctggtatcgctggcgctgatcgggatgttcagcgccctgctcttcgccgactacacgcaccaggacgccgcggtgatcaaccacgccggctcgttgcgcatgctcacctaccgggtcgccctggagcccagcctggaaggccgccaggcgctgctcgggaccctcggcgaacgcctcgacagcggcgacatccgccgcctgctgcaacgccaggacgccgacgacccgatccgccagctgcaccaggagctgcgcgagggcctggcgcgcctggacccgcgcgcgctgcccggacgcgccgtgctggacgcctacgtcggcgacatcgaccgtttcgtcggcatcctccaggccaaggccgagcgccgctcgcaactgctcagcacggtgcagggcctgtgcctgttcctcagcctgctggtggtgttcgtcaccctctacgacctcagctaccacgtcatcggcccgctgcgcgaactcaccagcaccgcccgccgcctgggccgcggcgagctggacgcgcgggtcacctacagcggcgaggacgaactggcgcaactgggcgagcgcttcaaccagatggccggcgagctgaagagcatctacggcgacctggaagagcgcgtggaggacaagacccgcgccctctcgcagagccaccagcgcctcgaactgctctacgccagtgcccgccggctgggcgagaacccctacgacagccgcaccctgcaaccgctgctgaaccagttggagaaagtgctagacgccggccgcgtgaccctctgcctgaacaaggacggggtcgagcgcgcctacagttcgctgaccaccaccgagcgcccggcggacttctgcctgcagggtgactgcggtagctgccgcgagcaggccagcgtctgcgaccaaccctcgtccctggcccagccattgctgatgcagcccctgtccatcgccggccaccgtttcggcgaactgttcatcgaaagccgcagcggccgcctggagaactggcagcagcaactgatcgagaccttctgcgacaacatcgctcgcaccttcgccctgtccctgcaacaggaacaggaaagccgcctggccctgttcgccgagcgcggcaccatcgcccgcgaactgcacgactcgctggcacagtcgctgtcctacctgaagatccaggtcagccgcctgggcaccctgctcaagcgcgaggcgccggcggagaagatcgaggacaccctcgacgaactgcgcgaaggcctcaacggcgcctaccggcaactgcgcgaactgctcaccaccttccgcctcagcctcgacgagccgagcctggaagccgcgctggggaacgccgtggccgagttcggcgagcgcggcgaggtggcgatcgaactggacaaccgcctgcaacacgtgccgctgagccccaacgaggaaatccacgtcctgcagatcgtccgcgaggcgctctccaacgtggttcgccattcgcaggcgcaacgggcctgggtgcgcctgagcagccaggccgacggccaggtgagcatcgccgtcgaggacgatggcgtcggctttgatccgcagcagaaccgcagcggccactatgggcttaccatcatgcaggagcgcggccagaccctcggcagccagttacgcttcgaagcgcgcgcgccccacggcacgcgagtgctcttgagagagggtgagaaatacctagggggaggtgcgcgaaaaatcgagatatag

SEQ ID NO: 336293 - DNA, 201 bp, Pseudomonas aeruginosa; identical to SEQ ID NO: 324238

SEQ ID NO: 336294 - DNA, 261 bp, Pseudomonas aeruginosa
atgagtgagtccatcaacctgcaggcgctgctgcagcgcctggacgagcaggcctatgagcagctctgcatcgaagctgcgcgccttgccgaagagaacgagtacctgcgcaccgagctgacccgcatggaggaatgtgccgaaggatggtgcaacgaggcccagcatctccaccagcaactggcggaagccaccgcaggccaggccgctatcacccagtccggcgccctgatcgtcattccgatggagcgctgcgcatga

SEQ ID NO: 336295 - DNA, 3843 bp, Pseudomonas aeruginosa
atggcaacgggcaaagaacttgatctggcactacgcatccgcgctgacgggaatcagggcgcccaggccctggataacatcaacagccaggtcgagcagatcggtaccagtgccaccgccaccagcagtcagctgagtgcgatcggcgagagcgccgatcaacaggcggcacggctcaaggccatggtggcggccagccttcagcagcaggccgcgttcgacgccctggctagcagttccgacaagctcaacacctcaacccgcgccgcaactgccggttggcaggagagcgcccgcgcccaatcggcgtcgatgaacgcctaccacaacgccgagcgtgccaggcagcagcagatcgcaaccgagcagcgagccgccgaagccgccgccaaggcctcggccgagttcgacaagcagcagtcggagctggccaagttgctgggagcgatcgatccggttacgcgtgagctggagaagctcgacaacctggaaaaacgcctggggcaggccaggaactcccaactgattgatcccgagggctttgcgacctacagcgcgcggctccaggaacaacgtgaacggctgctcggaacgtctgatgcgatgaaagtcgccggactgtccgcggggcagtacaagcaggcgatgcagcagttgccggcacagatcactgacgttgttaccagtctggccagcggcatgccggtctggatggtcgctatccagcagggcggccagatcaccgatagtttcggtggcgtcggggaaaccttcagggcgctcggtgaaaagatcaagtcgttcttcggcctgaccagttccgtaaatgctggcggcattcttgccgtgggcgaaggccttgcggccgttgcaaaggagcaatcggcggttgccgatggggccgacaatgtcagcgacggcttcaccgacatggccgatacggcaaacaccacggctgaagcggcggaaaacgccaagggagcgctttcagggctggggagtgctggcggcgcatttgccatcgttgcagcggcggccgcagcggcggctgtcgcattggcctatgcctacaagaaaggcagcgacgaagccagcgaactcaacgaatcaatcatcctgaccggcaactatgccggcaccagcgctgggcagctggcagcgatggccgcatcgcttgccaaagtgaacggtacacggtacgaagctgtggccgcgctgtcggagatcacttccacaggtaagttcacggtcgagcagatcgaacaggtcggaaccactgcgattgctatgcaggaggcgactggtaaggccgtttctgaaaccgtggccgagttctccaagctggccgatgatccggtcaaggcgtcgcagcagctcaatgaccgctatcactacctgacggcctcggtgtacgagcagatcactgccctggagaggcagggggacacgctgggtgctgcccagttcgccatggacgcctatagccaggctatggacgagcgggcgaatcagatcgtcgagaacctgggcacgatggagcgcgcgtggaggactgttggcgacatcgcaaaaggtgcatgggacgagatgctcggcgtgggccgcacggaaacgcctgaagagcgtctggagcaactgagcggtccggcgttcaagccaggccaggcagctgccagtgccgcagttttcgggccgctcggctggctcaacgaggtgcgcaaggctttccagcgcaactcaatgtcggacgaggaacgcgggaagcaattcaccgatgcccttcaggaaattcaagatgaaggcgagaaagcccaggcggcgcggctcaaggcttatttggatagtgaagccacgcgcggtcagcagagtatggaccggctgctggagactgttcgcaccaataaagagaaacgggacaagttgaaccgggaattggatcgcagcatcgccgcgattcaagccacgaacccgaacgacgagcgcctgcggccggaaaacatcgccgctgctcgcaaggccattgatcagaagtacaaagacccgaagactccgaaggggccgagtactccactcgatcagtccaccgtcaccgaagcgaagaaccagctggaccagttgcaggccgactacatgaacgccgagcagaagctccaggcgcagcagcgcgccggcctgctgagctatgcggactatgtcgcgcagcgcggcgaactgatcagccagaacaaggaccaggtcaccgcagcctatgagggggaaatccaggcgctggaggcgctgcgcgacaaaagttccaccacggcggcccagcgcatcagcctggaccagaagatcgccgaggccaggaacaacatggtcaaggcgcagaagaaggcagacgccgacctggaagtcctccagctcaacgaacaggggcgcctgaagaaacaggcccaggcagtcaaggcctacagcgatgcgctccagcaacaacaggatgcgctggccctccagggtcaacgtgccgccgctgccgtgggcatgggcgcgcaacagcgccgcttgttcgatcagcgtggcagccttgacgaccgattcgcacagcagcgcctggacctggcgagccagtacggcgacggctcgcgtggcatgagcctcgacgagtacaacgacaagctgcagaagctgcaggcgaaccacgcggcgatgaccgagcagctccaacgcaactacgcggccttgcagatcgcgcaggcagactggaccaacggtgcccgctcggcgttcgccgactatctcgactcggccaggaacgtcgcgggccagacctacgacctgttcagcaacgcgatgtctggcctggagaacagcgtcgtttccgccgtaacaacgggtaaggccagcctggatgactttctccgtacgctcgcggccgactccgctcgtatggcgaccaggcagctcggagcatcgttgctcagtagcttcggactcggcgagaccaaagacgctggcagcaaagacctggccgtaggtgcctcggcggtctcggcatcggccggcgccctggcaaccgcgggaggcactctcgtgaccggcgccgcggcgattcaggctgcagccgcatcgctagcggcagcgaacggtggccaggtgctgggcggcgcagcctctgcagccggacaagccggtccagcggctgctattgctgccgcgtcgaccgaaggcgcagccgcaatgggcagcgcgatcagcgaagcaaccacgtcgggcggtggcactctggcgagcgcgctggctggagtgtttggtcagggtgccagtttgttcggcaacctgttcagcagcctattcggtggcggtgctgctggcggcactggcggtggtggtggctggttgcaactgggcatgagtgccgccagtgcgtatttcggaggtggcttcgccgatggcgggcgtatccaaggaccaggcaccggcaccagcgacagcatcccgatcctggcctccaacgacgagttcatgacccgtgccgccgtggtacggcagcccggcgcactcgcgtttctggagcagttcaaccggtatggcatggctgccctgggcgcctgggcgaacccagtccgccacgctacgggcggcctgatggggactcctgctccggccatgcccgctccgggcctttctgcttcgcgcctgcaggagccctccaagaacttcagtacctcggtcgccaactcgatctacctgcacgccgttcaagacacggatcagatggcggccgacatgtgggccggcaaaggcggcgaacacttcttggtctggctgaacaagaaccgccaggccgtcaagcagattatctag

SEQ ID NO: 336296 - DNA, 798 bp, Pseudomonas aeruginosa
atgactgccaggatctaccgggaagtcgtcaacccgggaaaactcgacgaaacacagaggggaaacctcgcaagcgaactctacgcgattcacgccaggatctttcatggcgtccagtatgaatccttcgctcgcgaggtcatccactccaccgcccgcctcacccgcatcgccatctaccgcaaccgccagcacgagatcgtcggctactgcgccgtgcatttccacgactcggaagtcttccagtacagcaaggcctgcgtgatccgcgccgagtcggggatcctcccggagtaccgcgggagcaaccagagcattcccttccttacccgccaggtgctgcgctacaagttgctcaaccccggcaagcgcctgctgttcctcgacaccctgatccatccctccagctacgccctggtgaccaagtacgtggatgacgtctggccctgccactgcgacctggaaagccaccacgtgaagttcctcgaacacctgatcgcccagttcagcttcaagcgcagcagcaacgatccgctggtggtcgacaccggctggaccaccaccgaggccgatcacgaacgggcacgctgggctacgcacagcaatccgaatgtgcgtttcttccttgatcggaacccggaatatcacaagggcaacggattgatcacggtattcccgattaccttgaagaacatctttacggcgacccggcgtttcaagcgcagttcttcggtcaagcgtaaacagcaccagcgttacaacgcggcttcggcgaaagtcgggaatatcgcgttgtaa

SEQ ID NO: 336297 - DNA, 5472 bp, Pseudomonas aeruginosa
atgattaccctgaacctcaatggcaaggatcatcagctcgatgtcaccgaggatatgcccttgctctgggccatccgcgacgtcgtcggctataccgggaccaagttcggctgcggcatgggcctgtgcggctcctgcaccatccatatcgacggccaggccacccgttcctgcatcacgccggtgagcctggcgcagggcaggaaggtcaccaccatcgaccacctgcacaccgacaaggtcggcgaggtcgtccagcaggcctggctggacatcggcgtggcgcagtgcggctactgccagggcgggcagatcatgtcggccacggcgttgctgaagagcaaccccgcgcccagcgacgagcaggacgaggacgcccaggcggcgctgcgcgaggcgctgaaaacgcacctcaagcagcaattgccggactacatggtgccggcccacctgctgttgctcgccagcctgccgctgaccgccaacggcaagctcgaccgccgcgcgctgccggcgcccgacccggcgctcaaccggcaggcctacgaggccccgcgcagcgtgctggagcagcaactggccggggtctggcgcgaggtgctgaacgtcgagcgggtaggcctcggcgacaacttcttcgaactgggcggcgattcgatcctgtcgatccaggtggtcagccgcgcccgccagctcggcatccacttcagcccccgcgacctgttccagcaccagaccgtgcagagcctcgccgcggtggcccggcacagccaggccagccaggccgagcaggggccggtgcagggcgacagcgcgctgacgccgatccagcactggttcttcgacctgccgctggcgtgccgcgaacactggaaccagtcgctgctgttgcagccgcggcaggccattgacctcggtctgctgcgcaagtccctgcaacgcctggtcgaacagcatgatgccctgcgcctggcgttccgccaggtcgacggcgagtggctggcgcagcatcgtccgctgcgcgaacaggaactgctctggcacgtcccggtgcaatccttcgacgaatgcgccgagctgttcgccaaggcccagcgcagcctcgacctcgaacaggggccgctgctgcgcgcggtgctggtggacggcccggccggcgagcaacgcctgctgctggcgatccaccacctggtggtggacggggtgtcctggcgggtgctgctggaggacctgcaacaggtctaccgtcagttcgccgagggcgccgaaccggcgctgccggccaagaccagcgccttccgcgactgggccggacgcctgcaggcctacgccggcagcgaatcgctgcgcgaggagctgggctggtggcaagcccggctgggcgggcagccggtcgagtggccgtgcgaccgcccgcagggcgacaaccgcgaggcgctggcggaaagtgtcagcctgcggctcgacccgcaacgtacccggcaattgctgcaacaggcgccggcggcctaccgcacccaggtcaacgacctgctgctgaccgccctcgctcgcgtgctctgccgctggagcgggcagccgtcgacgctggtgcagttggaagggcatggccgcgaggcgctgttcgacgatatcgacctgacccgcagcgtcggctggttcaccagcgcctacccgttgcgcctgaccccggcgcagagcccgggcgagtcgatcaaggcgatcaaggaacagctccgcgcggtgccgcacaaaggcctcggctacggcgtgctgcgctacctcgccgatccggcggtgcgccaggcgatggccgcgctgccgacggcgccgatcaccttcaactacctcggacagttcgaccagagcttcgccgacgccctgttccagccgctggaccagcccaccgggccgatccacgacgagcaggcgccgttgcccaacgagctgagcgtcgatggccaggtctacggcggcgagctggtgctgcgctggacctacagccgcgagcgctacgacgcgcagacggttaacgagctggcgcaggcctatctcgccgaactgcaggcgctgatcgagcattgcctggaagacggcgccggcggcctgaccccgtccgacttcccgctggcgcaactgagccaggcgcaactggacgccctggcggtgccggccggcgagatcgaggacgtctatccgctgaccccgatgcaggaagggttgctgttgcacaccctgctggaaccgggcaccggcatctactacatgcaggaccgctaccggatcgacagcccgctcgatcccgagcgcttcgccgccgcctggcaggcggtggtggcccgccacgaggcgctgcgcgcgtcgttcgtctggaatgccggcgaaacgatgctgcaggtgatccacaagcccggtcgcacccgcatcgagttcctcgactggagcgagctgccggaggacggccacgaggaacgcctgcaagcgctgcacaagcgcgagcgcgaggccggcttcgacctgctcgaacagccgccgttccacctgcgcctgatccgcctgggtgaggcgcgctactggttcatgatgagcaaccaccacatcctcatcgatgcctggtgccgtggcctgctgatgaacgacttcttcgagatctacggcgccctcggcgaaggccgcccggcgaacctgccgacgccgccgcgctaccgcgactacatcgcctggctgcaacgccaggacctggagcagtcgcgccgctggtggagcgagagcctgcgcggcttcgagcggccgaccctggtgcccagcgaccgcccgttcctccgcgagcacgccggcgaaagcggcgggatgatcgtcggcgaccgctacacgcgtctggacgccgccgacggcgcgcgcctgcgcgaactggcgcagcgctaccagctcaccgtcaacaccttcgcccaggccgcctgggcgctgaccctgcgccgcttcagcggcgagcgcgacgtgctcttcggcgtcaccgtggccgggcgtccggtgggcatgccggaaatgcagcgcaccgtcggcctgttcatcaacagcatcccattgcgcgtgcagatgccggccgccggccagcgctgcacggtgcgcgaatggctgaaccggctgttcgagcgcaacctggagttgcgcgagcacgagcacctgcccctggtggccatccaggaaagcagcgagctgcccaagggccagccgctgttcgacagtctgttcgtgttcgagaacgctccggtggaagtctcggtgctggaccgcgcgcagagcctgaacgccagttccgactccgggcgtacccacaccaacttcccgttgaccgtggtctgctatccgggcgatgacctcggcctgcacctgtcctacgaccagcgctacttcgaggcgccgaccgtcgagcgcctgctcggcgagttcaagcgcctgctgctggccctggccgacggtttccatggcgaactggaggccttgccgctgctcggcgaggacgagcgtgacttcctcctcgacggctgcaaccgcagcgcccgcgactacccgctggagcaaggttacgtgcggctgttcgaggcgcaggtggcggcccatccgcagcgcatcgccgccagttgcctggagcagcgctggagctacgccgagctgaaccgccgggccaaccgtctcggccacgccctgcgcgccgccggcgtcggcatcgaccagccggtggcactgctggccgagcgcggcctcgacctgctcggcatgatcgtcggcagcttcaaggccggtgccggctacctgccgctcgaccccggccatccgacccagcgcctgacccggatcgtcgagctgagccgcacaccggtactggtctgcacccaggcctgccgcgagcaggcgctggcgctgttcgacgaactcggctgcgtcgaccggccgcgcctgctggtgtgggacgagatccagcagggcgagggcgccgagcatgatccgcaggtctacagcgggccgcagaacctcgcctacgtgatctacacctccggctccaccggactgccgaagggcgtgatggtggagcaggcgggcatgctcaacaaccagttgagcaaggtcccgtacctggaactggacgagaacgacgtgatcgcccagaccgcctcgcagagcttcgacatctcggtctggcaattcctcgccgcgccgttgttcggcgcccgcgtggcgatcgtgccgaacgccatcgcccacgatccgcagggcctgctggcgcacgtcggcgaacagggcatcacggtgctggaaagcgtgccgtcgctgatccagggcatgctcgccgaagagcgccaggccctcgacggcctgcgctggatgttgcccaccggcgaggcgatgccgccggaactggcgcgccagtggctcaagcgctacccacggatcggcctggtgaatgcctacgggccggcggagtgttccgacgacgtggcgttcttccgcgtcgacctggcctccaccgagagcacctacctgccgatcggcagtcccaccgacaacaaccgcctgtacctgctcggtgccggcgccgacgacgccttcgaactggtgccgctgggcgcggtgggcgagctgtgcgtggccggcaccggcgtcggtcgtggctacgtcggcgatccgctgcgcaccgctcaggccttcgtcccgcatccgttcggcgcgccgggcgagcgtctgtaccgtaccggcgacctggcgcggcggcgcgccgacggagtgctggaatatgtcgggcggatcgaccaccaggtgaagatccgcggcttccgcatcgagctgggcgagatcgaggcgcgcctgcacgaacgcgccgacgtccgcgaggcggcggtggcggtccaggaaggggcgaacggcaagtacctggtgggctacctggttcccggcgagacaccgcgttccagcgccgactcgccggccggactgatggtggagcagggcgcctggttcgagcggatcaagcagcaactgcgcgccgacctgccggactacatggtgccgctgcactggctggtgctggaccggatgccgctcaacgccaacggcaagctcgaccgcaaggcgctgccggcgctggacatcggccagatgcagaaccaggcctaccaggccccgcgcaacgaactggaggaaaccctggcacggatctgggccgaggtgctgaaggtcgagcgggtcggggtgttcgacaacttcttcgaactcggcgggcattcgctgctggccacccagatcgcctcgcgggtgcagaaggccctgcaacgcaacgtgccgctacgggcgatgttcgaatgcaccacggtggaagagctggccagctacatcgagtccctggccccgagcgagatcagcgagcagaaggccgagcgcctgaacgacctgatgtcgaagctggaaatgctctga

SEQ ID NO: 336298 - DNA, 690 bp, Pseudomonas aeruginosa
atgctcgggacgcacttgcggctcgtcccaggcctcggcaacggccgggtccaactggtcgacgcagagcagttgcggggcgttggcggcggacagttgcgcattcatccgcagcaatggctcgcgcaggtcagcggtggtcaggaccaggcgcggctcggcgtcggcgatgatcgacaacaggcgttcctggtgatggcggcgcgccgactccggcggataggccggcaccgcgatgaccccggcatacaggcaaccgaagaacgccgcgacatagtcggggccgctgggaaacagcagcaccgcgcgatcgcccagctgcgcatgggcctgcagggccgcggcgatgctccgcgcgcgcaggtcgagatcgcgatagctgaggaccacgccttcgccatcgtcctcggcgaggaagcgcagcgccaggcgctcgggctcctggacggcgcggcgacgcagggcctggaccagggtggtgggaagttcgaaggcgtccatcatgtgttttcctgcctgaattcggcttgcaatcgagttctagtgagtctccggaaacagtcgtcgcggccgcccctcaactggcggcgcgcatgcttccccggaccttgtccttgtgccagcgcagcagatgctggccggcgtagcgacgcagcaggcgcagcaactgcccctgctgttcgcggatga

SEQ ID NO: 336299 - DNA, 1158 bp, Pseudomonas aeruginosa
atggaattcaagttcttactccccgccaaagtcgtgatgggacccggcctgcgcgagcgcaccggcgaatacctgcgggaactcggcatggcgcatgtgctgatcgtgacggacgccggggtaaaggccgcaggcctgttgaatggcgtgtatgccagcctgaatgagtgggagatcgcgttcgacgagatatcggacgtcaaggcaaaccctcgcagcgaagacatcaaccaggcggcgcagctgtatcgcggcaaaggtatccaaggcctgctggccatcggcggcggcagcgcgatggacgcggccaaggcgatcagcctgctgctgacccacgagggtcggatcgaagactacgagggcactttcaccctcaggcacgccatcccacctatcgtcgccatcccgaccaccgccggaaccggcagcgaagtgacctgtttctcggtgatcaccgataccgcccggcatttcaagatgagcgtccaggattaccgggtgggccccgttctggcattgctcgactcccgcattctcgacacgctgcctgcatcgattgccgccgcaaccggcatggatgctctcacccacgccatcgaagcctacacctgccgcgtgtcgaatccgatcagcgacgggctggcgctgcatgccatccgcctgatcagccaatacctcaggcccgccgtactggagccgggcaacctgcatgcacgcgagcaaatgctggtggccagcctgatcgccggcatggccttcggtaacgcggacgtcggcagcgtgcactgcatttccgaagccatcggtggcatgtacgacacgccacacggcgtgggcaacgcgatcttcctgcccttcgtgttcggccataaccgcgacgccgacatcacccgccacgcgcaggtcgcctatgcattgggtatcgaccccaacctctcgccggccgaggccgccgaggccgccgttggctacctgttccagatgagcaaggacctgggcatcccccgcttcgccgaggtgaaaggcgtgcgcgaggaagacttcctgagcatcgccgaaaagtcgaagaagaatttctccgacggcagcaatgccaagcaaatgacggtggaaacctaccgtgaaatcgtcgccgccgcttaccactacgtagcgtga

SEQ ID NO: 336300 - DNA, 1926 bp, Pseudomonas aeruginosa
atgacaacccgtaatccgttctcgcgtcgggcccggttgccgttggccgtcagcctggcttcctcgctggcggctccggcctttggggtgaccttcaacatcggggaaatcgaaggttccttcgactcggcgttgtcggtcggggccagctggtcgaccgccaagccgaacaagaacctgatcggtgtgaacaacggcggcaagggactttcccagacctccgacgacagccacttgaacttcaagcgtggggaaacgttctcgaaggtcttcaagggcatccatgacctcgagctgaagtacggcgataccggtgtgttcctgcgcggcaagtactggtacgacttcgaactgaaggacgagcaccgcgagttcaaggacatcgacgacagcggccgcaagaccctggccaagtcctccggcgccgaactgctcgacgccttcatctaccacaactatgccatcggcgacctgccgggcagcgtgcgcctgggcaagcaggtggtgaactggggcgagagcaccttcatccagaacggcatcagcgccatcaacccgatcgacgtcaccgccttccgccggcccggctcggagatcaaggaaggcctgatcccggtgaacatgttctacctgtcgcagaacctcaccgacaacctgtccgccgaaggcttctaccagatcgagtgggaccagacggtggtcgacaactgcggcaccttcttctcccagccggacgtggtggccgatggctgcgaccagaacctggcggtgctgaccaacaacaaggcgtccatcaacctgctcaacaacgtgctcgccggggctggcctgagcgttaccccgtcgccctgggacgagggcatcctggtccgccgcgggccggaccgcgacgctcgcgacagcggccagtacggcttcgccctgcgctacttcgccgacgaactgaacaccgagttcggcgcctactacatgaactaccacagccgcctgccgatcttcagcggccagggcgcctcggccagcaccatggcggcgatcaatgacctcgccacccgcctcgccgcgatcaacccggcactggccgcccaggccgcggcggcggccaccgccggcaactccagctacttcatcgagtacccggaagatatccgcatgttcggcctgagcttctccaccacgttgcccaacggcaccgcgtggagcggcgaagtcagctaccggcccaacgcgccggtgcagctgaacaccaccgacatcctcttcgccggcctcgacccggtgagcatcggcggcaaccgcccctacgacaacgcctcggtgctgaacggccaggccgggcaggacctgcacggctatcggcgcaaggagatcacccaactgcagaccaccctgacgcacttcttcgaccaggtgatgggcgccgagcgcctgaccctggtgggcgagatcggctggacccacgtcggcggcctggaaagcacctccaaggcacgctacgggcgtgacccggtcttcggaccggggccgctgccggggaccatctccggcctggccagctgccaggcgctgaacgtcagcacgctgggcaccgccgaagcgaacaacgtcagccgctactgcgagaacgatggctataccacctcggacgcctggggttatcgcgcccgtgcgatctgggactacaacgacgtgttcatgggcgtgaacctcaagcccagtgtggcctggtcgcacgacgtcgatggctattcgcccggccccggcgccaacttcgaggaaggccgcaaggcggtcagcttgggggtggacgcggagtaccagaacacctacaccgcgagcctctcctacaccaacttcttcgacggcaagtacaccaccgtggacgatcgcgacttcgtcgcgctcagcttcggcatgaacttctga

SEQ ID NO: 336301 - DNA, 888 bp, Pseudomonas aeruginosa
atgctcgcggcgggcttcggcgagcatctcgtcgatggccttgacgaagccggtgtcgggttgcgcctccagctcgccggagaggcgcagcggggtatccggcgccaggcccatgcgcagggcgatgacgccgagggcgttgctcagggcgccttcatcgcggacctgggcgaggctcgcctgggacagcgcggtctgtgcctgcaggcgatcggaaagggcggcggcgccggcccggtacttggcgtcggcggcttccaggttctgcgccgccagctccgcgacctgccgcgaggcggccaggctgcgctgggcggcgagggcgtcgtagtaggcctgggcggcgagggcgaaggtgttctgcagggtcgcgtcctggctggcgttggccgccagcagcaactgctgggcgttgcgcagggcggcgctgcggcggccgaagtcgaacagcacccagctcaattggaggctggcgccgcgccggtggcgatggccgtcgccggagaggtagggggcatcgcgataatccatgtcgctgtagccgcgactggcgtcgagacggccgtccaggcgcggcaggtaggcggacttgccgatcccgacctgggccgcctgggccttggcattggcccaggcgaggcgggtctgcgggtcgtggcagaggatccgctcgatggcttcctccaggctcagctcggtcggtggcggcccgccgcggcagggcaaaccgctgccgccgaggtcgtagaccgcctggccggcgacctggccggcggtgccgaacacgtccggctcgtaggcggcggcgccgggaaccaggccgagcaggccgcacaacaggccggcgagggcacgcatcaggcctgctcccgcgccgcggcggcctga

SEQ ID NO: 336302 - DNA, 501 bp, Pseudomonas aeruginosa
atgtccatcaccggcaccaagcagggcctgatcaccgccggcgccttcaccgaggattcggtcggcaacacctaccaggaaggccacgaggaccaggtgatggtccagggcttcaaccacgaagtgatcatcccgcgcgacccgcagtccggccagccgaccggccagcgcgtgcacaagccggtggtcatcaccaaggtcttcgacaaggcctcgccgctgctgctggccgccctgacctccggcgagcgcctgaccaaggtcgagatccagtggtaccgcacctccgccgccggcacccaggagcactactacaccaccgtcctggaagacgcgatcattgtcgacatcaaggactacatgcacaactgccaggacccgggcaacgcccacttcacccacctggaagacgtgcacttcacctaccgcaagatcacctggacccacgaagtctccggcacctccggctccgacgactggcgctccccggtcgccggctga

SEQ ID NO: 336303 - DNA, 1392 bp, Pseudomonas aeruginosa
  misc_feature (1082)..(1091): n is a, c, g, or t
atgatcagaatggcgctcaagccactggtagcggcctgcctgctggcttcgctgtccaccgccccgcaggctgctccttcgccctattcgacgctggtggtgttcggcgacagcctcagcgatgccgggcagttccccgatcctgccggccccgccggaagcacctcgcgtttcaccaaccgggtcggcccgacctaccagaacggcagcggcgagatcttcggaccgaccgcgcccatgctgctcggcaatcagctcggcatcgccccgggtgacctggctgcctcgacctcgccggtcaacgcccagcagggcatcgccgacggcaacaactgggcggtgggcggctaccggaccgatcagatctacgactcgatcaccgcggccaacggctcgctgatcgagcgcgacaataccctcctgcgcagccgcgatggctacctggtggaccgtgcccgccagggcctgggtgccgatccgaacgcgttgtactacatcaccggcggcggcaacgacttcctccaggggcgcatcctcaacgacgtccaggcccaacaggccgccggtcgcctggtggatagcgtgcaggccctgcagcaggccggcgcgcgctacatcgtggtctggctgttgcccgacctgggcctgaccccggctaccttcggtggtcccttgcagcctttcgccagccaactcagcggcacgttcaacgccgagctgaccgcccagttgagccaggccggcgccaacgtcattccgttgaacatcccgctgctgctcaaggaaggcatggccaacccggcttccttcggcctggccgccgaccagaacctgatcggcacctgtttcagcggcaacggctgcaccatgaacccgacctacgggatcaacggcagcacgcccgacccgagcaaactgctgttcaacgacagcgtgcacccgaccatcaccggccagcgcctgatcgccgactacacctattcgctgctgtcggcgccctgggagttgaccctgctgccggaaatggcccacggcaccctgcgtgcctaccaggacgaactgcgcagccagtggcagggggnnnnnnnnnngcagccagtggtaggcggactgggagaactggcagaacgtcggccagtggcgcggcttcgtcggcggcggtggccagcgcctggacttcgactcccaggacagcgccgccagcggcgacggcaatggctacaacctgacccttggtggcagctaccgcatcgacgaggcctggcgcgccggggtcgccgccggcttctaccggcagaagctggaagccggcgccaaggattccgactaccggatgaacagctacatggccagcgccttcgtgcaataccaggaaaaccgctggtgggctga

SEQ ID NO: 336304 - DNA, 903 bp, Pseudomonas aeruginosa
gtggcttgggcgactcagcgagaggccgagattctggcgggagtaggaagccccaaaggggcatcgaactcgactttgaaggaggccctggagaaatacaagctcgaagtatcgcccagcaaggttggccagcgctgggaggagatccgcctggacaagctggtcaatgagcttgagttcgtaggtgagcgaatcgtcgatgtcggggcggaacagatcgccgcctggcgtgatcttcgcctgaagtcggtggccacctccaccgtccgccgtgagatgacgctgctgtcgagcgtgttcgagcaggctcggcgcgaatggcgttggatcaaatctaaccccgtgcgcgaagtgaagcggccgaagaaccgacctcccagggaccggcggatctcagcggctgaggaaaataaaatcctcgacggtctcgggtatgtcgatggcgcgccgccgacgaccaagatgcaggagctcggctatgccttcctgatcgcgctggagactgctatgcggcagggggaaatccttggcctatcgactgggcgtgtgaatcttccgggccgctacgttgagttgactcataccaagaacggcgatgcgcggaaggtccctctgagctcgcgagcggttgagctactgcaggtcctggtcaatgccgctggtgatcgagaagacctgttcaccctgtcttccaagtcagcggacgttttgttccgcaaggtgcgtgatcgacagaagatcgatggcctgaccttccacgatacgcgccatgaggcgaccactaggctcgccaggaagctagatgtcttggacttggcgaggatgacgggccaccgtgacccgcgctcgctgatggtctactacaacgctactgctagcgaggtggccagccggctggattga

SEQ ID NO: 336305 - DNA, 648 bp, Pseudomonas aeruginosa
atgattcgactaactcagcttgatcctggtgagtttaggtttttggagcctggcgatatgtgcgcctgcctcggggagtacaccgctggtggcgggtacggggctagcgagacgaaccaacagatattcaacctgaagcaccgcccgaactctgccgacaacttgctctattggaagcgcaaggcagttggctattgggggcggatgctcgctgagaccaatctcctatgggattactgcttggagaatgccacgttcgtaccgatcccgtgctccaaaccggtcggacacccagagcatgacgaccggatggtccgtgtgttgcagcgtatggcccagggacatccagggcttgatatacggcaggtcctcttgcagacatctgtgcgcgaaacacagcacggcggagaccgattgaccccggcggaaattttgcaaacgctgtcagtcgatcctgctgtgattgttcagcctcttaaacggactgtcatcgttgtagacgacgtgattactcgcggtgcgagctttgccgccgccaagagcctactgatggggctagataacgtcgaggaggtcgttggcctttttctcgcgaagacgatccacccgcccgtagagttcgatcttgacgaggcttttgagttctag

SEQ ID NO: 336306 - DNA, 693 bp, Pseudomonas aeruginosa
atgagtcactcagaatcaccaagccgcctcataggggtggggatctacacgccttacgaggcatcgctttacaccgggataccggccaaagacattcgcagatggatgtttgggtacaagtcggacggtgtagcgcagccgggcctatgggcgccagagcttagctttactgaagagagattgctgggcttccatgacctgctggaaatccgtttcgttcatgcctttcgccggcacggcgtaagccttcaggcgatcagggcggcatcccgccaagcgcgggagctattccatcaagcttatcctttcacctgcaggagatttcagacggacggaaggcgcatttttgcgaccgtcttggatgaaacaggtgatgagaccatccttgatttggctaagcgtcaattggtattcaagcagataattggcccgtcactttacgaaggcatcgactatgccgaggaaggtaaggctcagcgctggtatccagtaaaacggagcaaggctgttgtgcttgatccgcagataaacttcggaaagccgacgctaaattcagtaggaatcgacacatcgtccatctaccaagcctatttggctgaaggcgagaacatccggcgcgttgccgcactctacgaaataaaacctgcagcagtggaagctgcggtcacctatgagcacggactagccgcttga

SEQ ID NO: 336307 - DNA, 231 bp, Pseudomonas aeruginosa
atgatcgactggagcaagttaaagaccgctgaacagcaggcgcaagaacgctggcaggctgagtgcgatgccgccgccgcagcgcgggcgaatgcctaccgtctagagagtgacccgctcaagaccgaggccgaggtcgaagcgatcaagggcggctccgagccggacctagctacctgggtcaaggctgttcaggcgagcaaagagcggtatccgctcccatggtcctaa

SEQ ID NO: 336308 - DNA, 978 bp, Pseudomonas aeruginosa
atggccgacaaaccgaaaggcaaggcagtaggaggtaaagccagggcggcagctctgactagcgagaagcgcaaggagatcgccacaaaggccgccgtggcaaggtggggggcaaagcctgccaaggcgtctcacaaggggaatttcaaggaagagttcggtattgatgtcgattgctatgttctggatgacgctaataagacggcagttatcagccagcgaggcatggcggcagcgctcgggctcgatgatagtggtcgggctctacccaggttcgtcgaagggaaaaaggtctcagcagccctgggggcggaagtactcgaaaaattgtctaaacctttgattttcaagggtgacatcccgggggtgaaagctcctccaatagggagtgtgcacggctatgacgtttcccttttgattgatatttgcaaatcactgatcgcggcagccaacaaaggagagttgctgaaaagccaagccaaaatcgtggcgcaagctcagatcatcctctcggcgtcagccaaggctggtatccaaggactggtatacgcactggccggatacgaccgcacgaaggaagaggtcatcgcggcgtacaagatgtacgttatggatgaggccagggagtacgagaaagagttttctccggagttgtacgagcattggtatcggctctacggactggacaagccggtgcgtggcaggccgtgggagttcaagtacctcaccattgaccacatttacaaaccactggcaaagagcgccggcaaggtcttcctactcgcgaagacgagcaagaaggccaacggagagcggaccgataaaatccaccagttcttgtcggaaatcggtgtaaaggctctccgcacccaggtgggtaaaatcacgggtatcgcatcggtgtctaggactcgcgaagagtacgagcgttacattgccgagcagatccacggccagacttcgcttgatttatcttga

SEQ ID NO: 336309 - DNA, 561 bp, Pseudomonas aeruginosa
atgctcaagggatacttcagctttcttcagaaatatcaagatcatgagttcctgcattggaacatgagagacgacgtctatgggtttcacgcccttgagcatcggtatcgagtgcttgggggaaaacccttcgagctaccagatgaaaagaagatagacctcgcacgactgctagtgaggctgtatggcaaggcttatgctcctcacaaagatagccagggtcgcaagggacgcatcatggctctagcagagctgaacaaggtaacagacgaagatgcattgacaggcgcacaggaagccgaggcatttgagcagggtaattacatcctgatgcaccgttccacactcagaaagctcgacatgttcgccaatttcttcgaacgcacccacgaaaaaagcttgatcaccaatgcaaaatggatggacaaggtcggggtccacccagtggtgatcaccgagctagtcaaggaccatcctctgttcactatcttcgtagttggcggggccctggctggagcattagccaagtacaacgacttctggagatggctcacccattaa

SEQ ID NO: 336310 - DNA, 1227 bp, Pseudomonas aeruginosa
atgctagaggatctggtggcactactcgaccagcagcaacaacaaggaggagcgcaggcactgaagaaccttgcgtctctacttgaccaacaacagcagcagaaaggccggcagctccttcaggacctggccgccgtcctcgaccagcagcaacagcagggaggccgcaacctgccgaacctggccgcgctgctcgaccagcagcaacagcagaagggccggcagttcctccaggacctggcggcggtcctcgaccagcagcaacagcagggaagccgcaacctgcaggacctcgtcgcgctgctcgaccagcagcaacagcaaggaggccgcaacctgcaggacctcgccgcgttgctcgaccagcagcaacagcagaaaggccgcaacctggccgcgctactcgaccagcaacaacagcagaagggccggcagttcctccaggacctggccgctgtcctcgaccagcaacaacagcagggaagtcgcaacctgcaggacctcgtcgcactgctcgaccagcaacaacagcaaggaggccgcaacctgcaggacctcgccgcgctgctcgaccagcagcaacagcagggaagccgcaacctgcaggacctcgtcgcgctgctcgaccagcagcaacagcaaggaggccgcaacctgcaggatctcgccgcgttgctcgaccagcagcaacagcagaaaggccgcaacctggccgcgctactcgaccagcaacaacagcagaagggccggcagttcctccaggacctggccgctgtcctcgaccagcaacaacagcagggaagtcgcaacctgcaggacctcgtcgcactgctcgaccagcaacaacagcaaggaggccgcaacctgcaggacctcgccgcgctgctcgaccagcagcaacagcagaagggccggcagttcctccagggcctggccgctatcctcgaccagcagcaacagcagggaggccgcaacctgcaggacctcgccgcgctgctcgaccagcaacaacagcagaagggccgacagctcctccaggacctggccgcggtcctcgaccaacagcaacagcagggaggccgcaacctgcaggacctcgccgcgttgctcgaccagcagcaacagcagaaaggtcgacagttcctccaaggcttggccgctatccttgaccaacaacagcaacagggaagcaaacaactagccaatctgaagggtgagtctcaatga

SEQ ID NO: 336311 - DNA, 294 bp, Pseudomonas aeruginosa
atgctgctgaccattcgcgacgttcccgaagacctggtgcgccaggccaagcttgcgaccggcaagggcaccggcagtcaggcgttcattgccggcatcgagcttatgatccgtcagcgtgatcggatcgaggctatggaagaggagattcggtcgctgcgcgagaccctcggtgtgttccagggcgtgcttgctgatgcgcatgccgccgctgtgcaactggctgagattgccgggcagcgcgatatgctggtgtccgacaacccgttgcgccccgtgcatcgtcgccgctag

SEQ ID NO: 336312 - DNA, 1401 bp, Pseudomonas aeruginosa
atgcatccgatgctcgaccgaatccacatgttcatccgcttccgctcggagcacgtccagatgattggtcggcccgagtccccgaccctggtcgttgacctggagtcgttgggggtgcgcatgcggtcttcgggcggcgtgctcaggcgtgaggacggggaggggtacgacgtggaggggctttcccatgcctgggagtcgctgccgtcgagctacacgcccatggccttcaaggtgttccatcagtccctgggcaagcgccttgatcctggtgtggagctgaaagcgtctccggccaagctgctccaggggcacaacgtcttcgggccgacctcaatccgcatgggggctgaggtcatgttgaagtggctggctggcacctatccggacctgtattcgaagctcgatgtgctgtcgattgaggtctacgccctggactgcacgttctcggcacgcatgccgaatgaacagaccgccctccaggtcatccagttcatgcgcggggtcagcaatggccagacccgcaaccggggtgacgactacgagaccacggcctactggggttcgaaagaggggcgtctgcgcaagatcaaggcgtatctgaaggggccagagttccggcgtcagttggacgaaattctcaaggctgctcgcggtgccacggtcgatccggaaccgcgccaggacctggataacgctcatgtccgcgcctggaagctgcacaagcgcgagcggcacatgcccatgtcgagcctttctgctgcgcggacgctgcgggtcatgcaggaccctcggctccaggagttcgcgcggcttcttcttcgcctcgaggcgaccgtcatgcatcgctggttggagcggcggaatctgccgacgaacctgtgggagctatgtgactaccaggaggcgcttcgtgaccaggagcgctgtttcattcaggagtgttggagagcggtaactgctgagctgttcgcggcctttgagggtatgaccatgaagcgaatcgacgatgacaaagtgctggccgcacttatcgagaagtacacgaaagtagggaagggcaggtggaccaaggcccgcgccgacaaggcaacgggagcgatcatccctgctgtgttcgtgccgggcaagcccagcgatgcctacgcccggaacctgttccgtacatatcgcagccttaaggactacgggtgggaagagaccatggcgtcgatgaatcgcgccagtttctacaaccacgtgcgtgacctacaggcggccggcatttccaaggcgatgctccagaacctgagtgagtacgacaacacccgcaacgtggtgccgatcctgcggttgctggaggtggatttctcggcgcagtaccccgactggtacgtcgagccgaccgtggaggccgcgtga

SEQ ID NO: 336313 - DNA, 207 bp, Pseudomonas aeruginosa; identical to SEQ ID NO: 324729

SEQ ID NO: 336314 - DNA, 327 bp, Pseudomonas aeruginosa
atgcgaagccagggttatcaccacagcagcccaggcttgccagaattcaccaccgtcacccgggttcccgtactcaccggcgcaaccgtcgacgagttcgcggccatcggcgccgccgtaccggctcgtgcctcgcccggcccggccacgccgacagccgcccgaggcttgacgcaacagcaggtatacgaggccgcaggcgtgagcaagtccagctataggggtcatgccgagataaggggaaaattcactcacttcccctctatccatatgattaatatcacaattttaaaaaaccacatgggtatcgcgatgcggcgattctga

SEQ ID NO: 336315 - DNA, 243 bp, Pseudomonas aeruginosa
atgcgcatgctgatactccaaagtggccgccgctgcggccgctcgaaaagcctgcagccattgcttcagtatgccctggccaacggttggagggttggactgaccaacggcgggcatctgcgcttcaccaaggcagagcggccagttatccacaccagcagcacgccgagcgattggcgcgcagtccgcaacgcggtggcgatgctggccagggccgatcgcaaggaggtgatccttgtctga

SEQ ID NO: 336316 - DNA, 858 bp, Pseudomonas aeruginosa
atgaccgcctatcgcccactacttcgctatcacggcggcaagtggaaactagccccgtggatcatcagccacatggccgagcacaagacatacgtcgagccattcggtggcggtggatccgtcctgattcgcaagccccgcgcctacgccgaggtctacaacgacttggacgaggacgtggtgaacctgttccgtgtcgcgcgcgaccgcggcgaggagctgcgccaggctctggcacttactccgttcgctcgaggcgagttcgacatcagctacgacgaaacagcagacacgctggagcgcgcacgccggatgatcgtgcgctcatttcaagggttcgggagcgcagcggcgagcggcgaacgcacggggtttcgctcatcgtcctcccgttcgggaacgtccccggcgatggactggcgcaactacccggacgcactgtccgcgatcattgaccgcctccagggcgtagtgatcgagaatcgcgacgctatggaagtgatggcacaccacgaccggccgaccactctgcactatgtcgatccgccctacgtgcattcaactcgcagccccaaggtccggcacaacgaaaccgggaagagctatcgctacgagctcagcgacgagcagcaccgggaacttgcggtcgcactgcatcggttggatggcatggtcattgtctctggctatccatgccccctatatgacgatctgttccagaactggcactgcatcgagcgcgcagcgcatgccgacggtgcacgccagcgcgtcgagtgcttatggctcaaccctagcgcttaccagggactggctcagttcgacattttcaaggagggcaacgcatgcgcatgctga

SEQ ID NO: 336317 - DNA, 627 bp, Pseudomonas aeruginosa
atgagcgaccttttctacctgcaggacagccgcagcaacgtcgggagccgagcaacgttctggcgtgccggcggcggctacaccacgaacctcgacgacgccgagacgttcgcccgcgaacgcgccgtaaagcagtacgaaaaccgcgacagcgatctgccctggcccgtggactatgtccgcgcccgggcagaggtcggggtcgactgccagtacctcaccaggtcagaagccgaggcctaccgcaacgaggacggccgcatgtatgtggcgtacgcacgcgagtgggacggaaacgacctggtatggcgcggcgcccaaggcccaaccgccaacctggacgacgccatccacccgggggcggctgatgccgctgggttcctggcccagggcttcgagctgtggccatgcggctacatcgcggagcactcccgcctggtagtccgcgccatgctgctcgaccacaagcaggcgctgcgctcggtcggcctcaagctgcccaagctccggcgcccgcgctatcgcagctacagcaacctgctcaactgcgaaggctgcggccgtttcctcaacgagcgccagcgcttcgacgactgccccaactgtgggacaaggaatgcgccatga

SEQ ID NO: 336318 - DNA, 1911 bp, Pseudomonas aeruginosa
atgcttaagcgcaccctctaccacttccacttctgctgcggcctgggcggcggtgccgccggtttcaaccgggcgcgtccgcgggtcggcaacgtcgaggccgaatgggtctgcctcggcgggatcgacgtggacccagccggcctgcgcgacttcgagcgactggctggtgtcccgggcaccctgctggacctcttcacccgcgaccagtacgtgcggttccacggcaaggagccgccggcaggctggcgggaggcgaccccggaagatattcggcgcgccgccggcgggcgccggccggatgccgtgttcatcagttccccctgcaagggcgccagcggcctgctgtccgagaaaatgagcctgaccccgaagtaccaggcgctgaacgagttgacgctccgctgcatctggctgatgggcgaggcatgggctgatgacccggtgccgctgatcgtcttcgagaacgtcccgcgcctggccagccgcggccggcacctgctggaccagatcaacagcctgctcggtggcttcggctacgccgtggcggaaaccactcacgactgcggcgaactcggcggcctggcgcagtcccggaagcgcttcctcctggtggcacgccacgtcgagaaggtgccgccattcctgtacgagccggagaagaagtcgctccgcgccgtcggcgacatcctcggccgcatgccgcttcccggcgacatcgaggccgccggcccaatgcaccgcgtaccgtccctgcagtggaagacctgggtgcgcctcgccctggtgcgcgccggcagcgactggcgcagcctgaatgacctggccgtcgaggacggctacctgcgcgatctgatcatcgtgccggagtaccaccggggcgtcctgggagtgaatcactggggcgattcgtgtggcgttgtcgccggcgcgagccgcccgatgaacgggcggttctcagtcgcggatcctcgcgcgccggcaaacgccctgcagtaccagcagtacggcgtgcgccgctggactgacacctcgggcgccatcatcggcgtcaagtctcccggccagggcacgtactccgtcgccgatccccgcggccagagcttcggcaagtaccccgtcaccgactgggacggcccgtccggcaccgtgatcgcggccagtactaccggccagggtgctttcgcagtagcagacccgcgcccgggcggcgtccggcacaacaacgtgttccgcgtcgtcagcatgggcagccacgccggaaccatcactggcgggcactcgccgagctccggcggccaggctgttgccgatcccaggtaccacaactggcaccctggggcgagcagccgcaaattgcacgtcggcgagtggggaagcgctaccggcacggtcaccggctcccagcaggtggccagcggcgctctgtcgatcgctgatccgcgcgtgctcgatcgcaccaagggcgacgcctacctgaccggcgggcactacggtgtcgtcgggttcgaccagtccgccggcgcagtatccgccagcgcgcggcacgacaatggccggtggagcgtcgccgacccgcgcatgccggcggcgaacgaccggctcacctgcatcatccagtcgctggacggcacctggcaccggcccttcaccaccttggagctggccgcgctgcagagcctggtggacccggaggaacagttgatcctcgacggcctgagcgacagcgactggcgcgagcgcatcggcaacgccgtaccaccggccgcggccgaggccatcgccggcgtgatgggcaccaccctgctgctggccgagcagggcgagacgttcatgctcagcaatacgcctatctgggtgcgcccggttgcggtggcgctgagcgtttcacaacccgctgaaagtcgctga

SEQ ID NO: 336319 - DNA, 177 bp, Pseudomonas aeruginosa
atgaagccctgcacccttggcaagcgccacagctggacattcgtccgtaacgtcgtcaccagccacctgagtggccgtttcggccgcatcaccaagcgcgggttctaccgctgcgaatgcggcgccgagaagtacggcaacgccggcgacctgtccgggggtagcacccatgcttaa

SEQ ID NO: 336320 - DNA, 645 bp, Pseudomonas aeruginosa
atggtcgacctgcatcaggaattcgcctccagccgtttcttcaacgaagatcgtattgaccggcgtagcaccgatgctctggtggggctcgccgcaggcgtggtggcggatggggtagtgaatgtcgatgaggcgcgcttcctcaagggctggatcgagagcaacctggcccaccttgaggatcccgtcgtcaatctgctctaccggcgtataagcgccatgctgcaagacgggattctagatgccgaagaagcggccgatctgatgcacctgctgcacagctttgccgggctggtcgtcggtcggcaggagcaagctgcccagttcttcaccgcaccgtcggacttgccgttcaacttccccgcccctgatctggtgttccaggacagagtgttcgtattcaccggtaccatggcctacggcccgcgcaaggcatgcgaggcgctgatcctcgaacgcggcggcgtgataggtgggggcgttagcaagaaaatccattatttggtggtaggcagcattggcaacgaccaatggcggcatgccacctacggcaccaagattatgaaggccgtcgagctacgggaggccggtgcgcccatcgctatcgtcggcgaagaccattggcagcgcgcgttgttcggatga

SEQ ID NO: 336321 - DNA, 741 bp, Pseudomonas aeruginosa
ttgattcaacagaacctggtcaagttgaacgtagagaacgtctacccgcagaaagccgggacgttccacgcgggcggcttctgtaagtgtgacgatggcctcgactacgcctttaagcaggtcgcgcttggtgcagaattcgtaccggctaccgagtggttgtgtggtcatctttccaacacctgccggatccacactcctccaatggaaattttgcagggattggatggtcggatgtggttcggatcaagaattgagggtggaacgctggatgccgaccagtgcgtcatggcattggcggccggtgaaatggacaagcagatactcggtctgcgcgaacggctttcagccatctacgctttggatatgttcgtgaacaatatcgaccgacacctcaagaactacctgttccggtccagtctggacggtgttgtgatgctggcgttcgattacagctttgcttggctggcgcacggtgcagaactgaatgggtatcccagtcctgacagcaaaacagggcaagtgagagcttttctagatacactctacggcttcgatcttgcctcagcagagaaggtgctcaacgcgatccagggcttgccagccgagtggatcgacggtccggtaggtgcgatgccggatgagtggcagcacggtgttgatgtagcgacggcagtggcctggtggaagagtgacgcgcgggccattcgctgcgagacgatcaagggggcgctaaagtga

SEQ ID NO: 336322 - DNA, 222 bp, Pseudomonas aeruginosa
ttgaagtcctttgtaatggccaaggcaaagttggagcttggcaaagagacaaaatgctatgcggtgtactcggctagtgcggcagatgaaaaagacaaatccgaagccattgatctcctgagcgaagggtcggactttatattcaacctgcgcagccagaaggataaagtggattacattcaaagaatggaagaggcctccggcgttcaaaggttgcactaa

SEQ ID NO: 336323 - DNA, 1164 bp, Pseudomonas aeruginosa
gtggatgaaaacggcaagatcatttacgaagcccagacaaagttggaagccagcggaaacagagttgccaaccaggtgagccatgaagatcacaagtacagtaaatatttcggtaagaagctggaactgcccagcgaacaggtcgaagacgccaagacctactgccgcaatcgtgcggaaaacttaagaaaacacgcactacaggctgagcagaaaggaaaaccggagctcgccgaaaaattccgcgagcgcgccgacaggttcgaccagcttgctgaagaagacatcgttgaccttgggattacgaccgagcaggccatcgactacgcagaaaagccgctgcgcgagacgataaaagatatcgctcgcaccagccaccgggcaggtattgagggagcgaagtacggcgctgtcatcggtggcgtaatttcgttgttgaccaacgcgttcaatgttgctcaagacaaaaaacagttgggtgaagctgcccaggatgtggccctcgatacagctaaagccggcgcacttggatacaccaccgctttcgcaggctccgcgctcaaaggtggcatgcaacaatcgagcaaccaaaccttacgcaccctggctggtaccaatgccccagcgctggccgtcacaatctgtatgtcgctgggcacctccatcaagcgctacgtcactggcgaaatcagtgaagcacaactgcttagcgaagtcggggaaaaaggtgcaggcatgctctccagcggcatgatggccgcactggggcaactcgccattcccgtaccattcgtcggcgccgccgtgggtggaatgatcggctacgccctttcctcattcttctataagagcgcactggatgcggcccgtagcttggagctttcgcgccaacagctggagcgcgtcagggccattgagtctgcggcccgtgatcgcattgccgatgagcaggcggccctggacaactttactcgccacgaaatccctcagttgcgccaggaaacccaacgcctgttcgatattgtatcgagcagcgccagcaatgttgacgaccttgcaattgccatcaatgagtacgccacgctgctagggaaacagctgcagtttcaatccatgtccgagtttgaggacttcatgaattccgaccagccactcatcctgtaa

SEQ ID NO: 336324 - DNA, 618 bp, Pseudomonas aeruginosa
atgcttataaagatgctgccgaagcctgaaaaggggcttctgctcgatttgctccaactgcttgcactttccgacaacccaatactctgggacggaaaaaggtacgatgagctgacatcagacaccgatctgagcaagctttctattcaggtggatgagttagagcgtgagctgatctcagaccttgagcgttcttcaggccaatccctgcgcggaagttcgagttttgagggagtccttgctggtgtgctggcggggggactgaaatctgggaaagcaccgacatcgattgtcgaggagcaactgatagcagaactcaagacctttccaatccacaagatggagctacctgaaactcgcgtagcggcggcaaaagcagtcttggacaaacttctggaagatcaatctaaggaccggccagaacccccaaaaatcatgctgtttgacatgatcttgttggcgctgcgtgacggatcaatctcgtctatcgagcgtgagctgctcaaagcattccagcaccactatcaaattcaagactttatcttcgaagaattactagatcgtgctgaagctttgaacagcgaagtcagcaaaaccatcgccctagttctagaataa

SEQ ID NO: 336325 - DNA, 1023 bp, Pseudomonas aeruginosa
atgcccattcctctcatcatcggcgcggccgccgcagcagctggcctctacggtgcagccaaaggtgtaagcggcgcgatcgaccacagcaatgccaagagccttaacaatgacgccagcgccatggttaatgctgccaaccagaaggttgacagtttccgtaagaataccaatgaagctctggaaaactacggacagcgcaagctacgcgtctttaacggagtcgtagcggactttctcaccatctttggtcgcctgaaaaatgtggaactcatccagacacccgaactggaaaaactaaatgccggcgatttctcgactactgccctgactggtttgcgccaagactatcaagcactcaaggatgcagggcttggcctgggagcaggtatgggtagtggggcagcactagccttcggcgcttacaatggaaccatgctgcttgccactgccagtacaggcacagctatttcttcgctcggaggagttgcagctaccaatgccacgctggcctggctaggcgggggctcccttgcagccggtggctacggtatggccggcggcatgatggttctcggcgggatcgtcgctggccccgctttggctatcttcgggcacatcgtggggaataagggggaagcggctctaaataatgcgcgtagtaatctggagcaagctaaaactattagtgatcaggctgagctgatggcaggtaagcttcaggctattgagcaggttacattgcttgccaataaaactctctccgagatcacctcgcatttgcgctttgctacacgcgacatgcgaatcacaattgaagagcacggagaaaatttccaagatttctccatggaaagcaaacaaattgtttttcgttcagttaaatacgcgcagctgattaaagccatgatagatacagctattcttgatcaagatggcaatttggttctctctactgagaagcgagtgcgagatatttctttagtctcaagcggccaaaaaaactccttggatactccataa

SEQ ID NO: 336326 - DNA, 261 bp, Pseudomonas aeruginosa
atgcaatcgagcttttacgacctcgagtacgccgccaagaagaagctgacccgccgtgaccgcttcctcgccgagatcgatgccgtcacgccctgggctgcgttggccgccgtgctggacctttttaccccaagggtaaggggccgcggtctgccaccgatcggtcttgagcgcatgctgcgtatgtataagtggggtgatgcaacagctcgtaccaagaagctgaatatggtgaaccttgtcgaacctccatcatcgtaa

SEQ ID NO: 336327 - DNA, 273 bp, Pseudomonas aeruginosa
atggccacttcaatcaaaattgatgacgagctaaaaggtcgcattcagcagttggcgagccaacgccagcgctcgtctcactggatcatgcgcgaggcgatcacccagtacgtcgagcgtgaggaggcccgtgagagcttcaagcaggaagccctcgcatcgtgggcggcgtatcaggaaaccggaaggcatttgaccagccaagaagcacggacctggctcggtagctggggtacagatactgaggtagagcttcccaagtgccacgattga

SEQ ID NO: 336328 - DNA, 261 bp, Pseudomonas aeruginosa; identical to SEQ ID NO: 324247

SEQ ID NO: 336329 - DNA, 489 bp, Pseudomonas aeruginosa; identical to SEQ ID NO: 324248

SEQ ID NO: 336330 - DNA, 231 bp, Pseudomonas aeruginosa; identical to SEQ ID NO: 324249

SEQ ID NO: 336331 - DNA, 822 bp, Pseudomonas aeruginosa
atgagttttaacagccgcgaaagctcgctcgcggatgggcagccggtgcggctgtaccagttcagccgtggagccatccgctggagctacaacagcagcgaccgggacatcacctaccagaaccagattttccgcaccgtgccgggcggcatcactgacaacgggatcatctgttccggcgatccgcagtccgaccagttcgtcatcaccgcgccggccgacctcgacgtcgcgctgctgtacaagacccggtcgccgagcggtgccatcgacttggtcgtctacgacatgcactacggcgacaccgaggcagcggtttcctgggtgggccagattggcgatgtggactggccgaccgtggacagctgccgcataacgtgcgtgtcagaagacgaactgatggaccagcccggcttgatcgacacctactgccgcacctgcacggcagtcgttggcgaccatcgctgcaaggtcaacctcgttccgtatcgcgtgacgctgacgccgcagagcatcagcggctgggtgatctccagcggcgtggtcgccggctatgtcgatggctggtttaccgggggctacgtcgagtggcaagtggacggcgacaactacgatagccgctacatcgagcggcacgccggacccgatctttacatcctgggcggcaccgagggcattccggcaggtggccaactgcgggtttatccaggttgcgacgggctcgcgcagacctgcgacgacaaattcagcaacctccccaacttcagggggtttaacgcgatgcaaggcaagtcgccattcgatggcgaccaggtctggtga

SEQ ID NO: 336332 - DNA, 219 bp, Pseudomonas aeruginosa
atgatcgttacggctcagcacctgcataccgtgccgacctggaccactcggcagggctactgccaccggcaggcgcgggacttcttcaagcgccatggcctggattggatggcgttcttacgggacggcatcgaggccgacgtgctagtcgcgaccggcgacgcgctcgcgctcaagctggttgagcacgcatgccaggaggtagccgatgggcgctaa

SEQ ID NO: 336333 - DNA, 1044 bp, Pseudomonas aeruginosa
atgtccgaagcgaaggacacgctcctcaggctcattgccctattacgcctgattccccgagagccaggccgcattgcgaccacaaccctgctggagaagctcaaggatgatggtttctcggtaagcctgcgcactgtccagcgcgaccttgatcggctttccattccgtttgccctgctgcgcgacgaaagctccccgtcatttcgctggagcctatcggacaaagcgcccattgatctgtcggccatggatacccccactgcactggcgctgtacctcgcggaaagccacctccagtccctgctccctcagagcgtgctggatcagcttggaccacagtttcgtatggcgcgcgattatctcgataatctggaaaataacggtctggcgcactgggcacgcaaggttcgggcgatccccaatggcaagtcactacaacccgcaaagatcgacacacatgtctggaaccagacctctaccgccctggtagagcgtaagcagctgcagatcagctatttgagccgcagcaaagccgagttgaagaaactgctaatccaccccgcaggcttagtttcacgccactccatcagctacctgattggtagcgtcgaaggctatgacgacctgcgccagtttgcactgcatcgaatccagcaggctgagcgcctagatattccggcccgatctcgcgtcgacttcgagattgaccactacattcgaaacgatctcaacagcgcagcccctatcaaacaggtggagctgattgccgacgtctctccgcagattgcctggctgctcggggaaacccctctgagcacgcagcagagtttggaggctctggggggcagcgattggaaacgcctgcgcgccttggtaccggaaaaccaagaaacgctttggtggctgttcgggctgggtgagagcattcacgtgcatgagcccaaacggtgggtagacgcaatcaaagaaaaactgaccaaaatgggcaggctgtatatgcaggccaccattaccgatagagaaacctgcaaggaggctctatga

SEQ ID NO: 336334 - DNA, 216 bp, Pseudomonas aeruginosa
atgcgtaaggccctgactcattgttgccaccgctgtgattggcaccagacttcggtaatcagcgacgcgaaaagttcacagcaagagagcttcgatcattgccccaggtgtcgctcccccgagctctttatgcgccaggccacccgtctggagactctagtggctagtgccgctcgcttgggtacagctaatacctatcgcagtatggcaaattga

SEQ ID NO: 336335 - DNA, 969 bp, Pseudomonas aeruginosa
atggctcatctcgtcgaaaccatggcttacgctggcgctaccccgtggcacggtctgggcaacaacctgccgcagaaagaatccatcgaagtctggcaacgcgaagccggcatggactggcagatcctggaaagccctgtgcacttcaagtcggatgccatcggccatctgggcgcgatccactcattccaggaacagaaagtgctctaccgctcggacaccaaggcaccgctgtcggtggtctcgcagcgctatcacactgtgcagccaaaggatgtcctggagttttatcgcgacctgaccgaggtctccggctacgagctggaaactgctggcgtgctcaaggggggtcgcaagttctgggcgctggcacgcaccggccagggcgctgcactcaagggtaacgaccaggtgaatggctacctactgttggccacttcctgcgacggcactctggccaccatggcaacgcccaccaccattcgcgtggtctgcaataacaccctcaccatcgccctggacggcaccagccgtgcgatcaaggtgccgcacagcacccgcttcgatggtgagctggtgaaaaagcagcttggtgtcgccgtctcgcaatgggacgacttcatgtaccgcatgcgccacctggcggaacgcaaggtgcagtggcatgaggcactgggcttctttatgaacgtgatgtgtgagaccagcccgaccggtccgcttcctgaacagctgccgaacgagcgcgctctgcgcaaagtgcaggagctgtacgaaggccgtggccggggcagtcagctcgactcggcacgcggcaccgcctggggcctgctcaatgccgtcaccgagtacgtcgatcacgaacgccgggcgcgcagcactgagtatcgcctggactctgcctggttcggccagggcgcccagataaagcaacgcgccttggacgcagcgttgcagctcgctgcttaa

SEQ ID NO: 336336 - DNA, 405 bp, Pseudomonas aeruginosa
atgctgaagtacatgcttgataccaacatctgcattttcacgatcaagaatcgccctgagcaggtgcgggaagccttcaagcgccattcaggccagctgagcatcagcactgtcaccctgatggagcttatttacggcgccgagaagtccgctaatcccgagcgtaatctggcggacgttgaaggtttcgctgcgcgcctggaagtactgccttacgacgctcaggcagcggctcattccgggcaattgcgagctgagctggctcgtatcggcaagcctattggcccgtatgatcagatgattgcaggacacgcacgtgcccagggactgattctggtcacgaataatcttcgtgagtttgagcgagttccaggtttgcgcgtcgaggattgggtgaacgcctga

SEQ ID NO: 336337 - DNA, 231 bp, Pseudomonas aeruginosa
atggaacaaggtgcagtttttcagagcaaccgcagtcaggcggtgcgtttgcccaaggcggttgcgctgcctgaggatgtgaagcgggtggatgtagtggtagttggtcgagcccgaatcatcacgccggcaggcgaggcctgggacgtctggttcgatggcgaaggtgtgaccgctgactacatggcggatcgcgagcaacctgcagatcaagagcgggatgcgttctga

SEQ ID NO: 336338 - DNA, 951 bp, Pseudomonas aeruginosa
atgctcaaaggtctggctatcactccaccggtactcgggcggatttccatcggtaaggtcatcgagaagaacggcaaacggctgccggagaaggatgaccaattcaccatcacatcccaggtgcagggtaaggacggctggctgctgcacccgctcaatgacgagctacgtcagggcaaggacgacaagctgcgcagcattccggtacgcctgctgttcaacgaaccggagctgaatttccgagcagactacacgctgttcgaccgacaatccggacgccccgtctgcgtcggcaatggcgagacctgcaagcgggtcactcaggacggtatgcagtcgttgccctgcccttcgccggatgcctgtccgctggccagaggcggtgcctgcaagccctacggccgactgaacgtggtcattggcgatgaggatccgctgggcagcttcgtgttccgcaccaccggcttcaacagcatccgcaccctcgccgcgcgcctgcattacttccaggccatctcgggcaaccgcctggcctgcctgccactggaactacgtctgcgtggcaagtcgacacgccagagtcatggcacgccgatcttctacgccgacctgacggtacgcggtggcatggaaatggccgaagcattggtgacagccaatgaactcgattcacgacgtcaggctgcaggcttcaatcaggccgctttggatgaggcggcacgacgcggcttcggcaacggtgcgttcgaggacagcgaggaggatgtcggcgccatcgtcgatgagttctaccccgagggtgaagcaactgctgtagcaacaatgtctcaactcaaccccaccaaacccagcctggctgaaaagctcgatgcacaggctgcacgtcaaaccccacccactgaccaaaaccaaggaggccgccatgcgcctgcacaagctgaaagccagtga

SEQ ID NO: 336339 - DNA, 498 bp, Pseudomonas aeruginosa
atgcgcctgcacaagctgaaagccagtgacacgaccggcacctacttggtcgattcgccggtgacggaaaacgacatcctactgatggccaggcaactggccaatctgcgcctgcgcaaaggacgagccctgacatcgccgaaggaggtattcagtcacctgcaggcgctgctggctgattatgagcacgaggtgttcgcactgctcatgctcgacagccggcaccgagtgatcgcatttgaggaagtgtttcgcggcacgctggatagcgccagcgtctacccacgggaggtcgtgaagctcgccctggagcacaacgccgctgccctgatcctggtgcacaaccacccttcgggagaccctgagcccagcatggcggatcgcaatctcaccacaaaactgcaggaggcgctgaatctggtcggagttagaacgctcgatcacgttgtggtggggaacgaaggctgcgtgtcactggcagaactgggctacctgtaa

SEQ ID NO: 336340 - DNA, 183 bp, Pseudomonas aeruginosa
atgaaactgctgttacggactgttgccgcggtatttatgtttgccgggatcctggcaggctgcctggcgctattgctgctggtgatcctgatggtgcgttttccgccattgctgatcgctgtgcttgtcgcttgctggcttctcagtcgactacagaagtcatctcaaaaggtcctagaataa

SEQ ID NO: 336341 - DNA, 864 bp, Pseudomonas aeruginosa
gtgcgtttggcggtcagtggtcgcggtagtctgtatgagatagccgccctagaacaggttcaggctcaccttgctcagctaaggccgggacacacggaaaatgcggccagtgtgatcccgcagcgcgccctcaatatgtcgcggaaccgtgacagtaaaagtggtagtgcgcggcactcggtacagtatctgctgcttaaagccgtaaacgacggacagtactggcgtgctggcaagggcgaactactcgatgtatcgcagctgacacagacctgcggggctgccgctttggctgtgcagagcggcgatgattggcacacggctgcgcccttgtggctgatcgagaaccaagccctgttcgacgatatcagctggctgcccgccgatgcgagcggcaccttgtgctactactccggacagctaagtagcttgatgctcaattggttggtcgagaggccacgcgcctcacaggtaatccttttccccgattacgacggtattgggcttcagaacttcgctcgactctatgagctcattgggggcacgtgcaaactctggttaatgccgcattggcaggagcggttgaggctgtatggaaatcaacggatttggcaggacaacttagcgaactatcaggatgcggtaagtcgacttcgatcgttgggcatgcccagcgagttggccgagctgtgtgatgctctgcaaggaatgggcttggcattggagcaggagagtgtgtttttacggcggggaatttctcagcaaccggtgaataaaatgctttcagaagaccttgaactgaccgaaattgctaagtctcgttcaagtgagacagccctcccagtcaatctggatgatttatag

SEQ ID NO: 336342 - DNA, 2775 bp, Pseudomonas aeruginosa
atgatggattatggatttcaacggctggtgctgcttaacagtgcaggctacgagcgcgcagagttacctttggatgcgtctgtatcgttggtggctccgaacaatacaggcaagaccagtctgatcaatgccttgcagttcttgctgatcatcgaccggcggcggatggactttggtccacacgacgtagaacgcagtcggcgcttctatttccccaacaacagcgcctacatcctgctggaggtgctgcttcctgagtcgggcagtgtggtgctgggatgtgttggcaagggtgtcagcaacgactacgaatacttcgcttaccgtggccaactgaacctcgatgactaccggcgcgatgacggctgtctggtggcacaaccgcagctgctgagtcatttagccactcgcggcttgctcgcccaacgctatagcggtagcgagttcaccagcatggtgtatggcaacagtcggcgggggcggggagaaaacggtgacttcacaattttccgcctggagcaggcccgccacgctgaggtattccaacgggtgctcacccgaactctgcgcttggacaagctgcaatccaaggaggtgaaggactacctgttgcagatctttcaccgagatctttcggacgcgggcatcgacttcaagcaggagtgggacaaagctttcgccgatgtaaatgccgaccgagagcagtaccaagctgcccaaaagcagctggaacggatcggccgcctcgaaacgctgtatgaggagcgcttgcagttgcgcggcaagttgtttcacctccgtccgctgatcgatcaggcgctgcaggactggcagagctattaccagtctcgctcagctgacctgcaacagacccgcgccggcatcgagcaagccgaagagcagctgcaacatgaccgggtagagtggtctgctgcccgtgagcgcagcctgcagactgaggctgcgctgaagcgcgaggatgagcggcaggctgaactggagcgccggttcacgctgatcgaccgacgcgagacgctggagcgtagcatcgagcatgcgcgtgcagcctacgaggcccaggttgcgctcgttgccggagtacagggtcgaagccccaatgagattgttcgcgatcgcaacagggttacgcaggacgtgcagcggctcagtcgcgaaagagcaagcctgacgggcaacctctatcagcatctgcagcgggagttgaacgcggagcagctggctgccctgaaccggctgttcgcacgggaggttatgacgctgccggagagctgcttccgtctcaacggcgagcaactgcatcaaagccttgagaaatggctcagccaggctggccgccttgaactgccgggactggatctgcagttggctgacctgcccgaccagcaccgtcagcgcagcgctgaagaaatcgatcaggagttgtctgaccttcagcgccagctggctcaggtcgatgagcagctacaggctgcggagcaaattcgggccgctgaggcactcaagcttgaacgagagcatgactaccagcaggccctgcgcgagctggaagcctttgacgatctcgccgtcttgcgcgagcgcggagctgagcgcgagcgatctctgttggactgccggagcgtcttggctgatttaaaggccaagctgagaggagtccaggccgaggtgcagcgtcttcgagaacagctggatggcatacgtaagcagcaggatgagctcgacggccagcacagggagatctgtaccggccgcgatcggcgctgtgatggtgaccctatcttcagctatctggctgatctgccgcatcacaagtgggttggggcaacagagctggctattgaacagctggccgagcacctgcgagagtatcagcaggactgccgccggctactgagccttgaaactgatgtacgtgggttgctcgccgagctgcatacgggtggtttgaccaagttccagacggccgacgatcctgacgaagagatccgcctgatgatcgagtttggccggcatctgccccaggagttcgaggctatcgagcgaaaggcgcgcacagcggtggtcaacgtcacggcgtgcctgcggcaattgcgaggcagcctgaacgatttcaaggccaagatgcgccaattcaaccagctgatcggtcggcgtcggttgtccgacctgtcggtattcaagatcgagcctgaagacgagcaggagctggtctgggcgatcgaggcgctcatcagcacagcggagcaggtggattcaggccagagctttgagctgttcgaccacgggagtgtgctcgatgatgagagcctaacgcgggcgaaggccctgctgatccgagagggtgatgcccgaggcggtttggctgttgagcatctgtttcgcctgagcttcatcgtcggcaaagagggccagaaacctgaggcctttgctgatattgatggcgcagcctccaacggcacggtgctgatggcaaagctggtaacgggactggcgctgctgcaccagatgcaggacaagcgctattcggttcgggctgcctgctacttggatgaggcgctggcgcttgatgggccgaaccagacgagtttgatcgaaacggctgctgagttcggtttcgcacttatcttcgcctctcccgcgccgctggcaaccgttcgttactgcgtaccaatcactcgccacggcgggcacaatcacgtcagccgcaagaattggcaggagttggagccgcgcgtggcgggggctggtgtgtga

SEQ ID NO: 336343 - DNA, 600 bp, Pseudomonas aeruginosa
atgaatcaagcagccacacttcatctgggccgtttgccgagccttggcccgctgttcgagttgttcaatgcgggcaagcacctgaatcacattgcagagcccgctctgtgggctgagctcgagaaagagcaggagcagtaccaagagctgttcgggcgtcttggcttcacactgcgcgtggatagacgcgggtttgcctggttccacttcgacaatgcgagcagcaacgtcagccgcaccacacgccagctggctctgttgttcatgctgctgttcgagttgaaggccgacgaggggatgcacctgcaccgattcggtgactggatcattgatcgcgctgtgctggcaaagttgcttgagcgcggtcatgacttgctcttggctgaggggttagatgaagagtcgctcgtagggctgctcgatcgcgcgtgtgcgtatgggtttgctgagtcagctgcaggaggatggcggctactgcctgccgtctggcggtatctggatcattttgtgaagctggccggggagcaggacggcgagattgaagagggtgttgatgtcagcgaggccatcgagaccagtgaagaggatgagccagcatga

SEQ ID NO: 336344 - DNA, 1245 bp, Pseudomonas aeruginosa
atggctaatccacgctctctggtattcgccctttatagccactggccggtggtcgagtggctggtacagcgcactcgtgagattccagcatttgaatcagagcaagtgctggcgctgatcagtaaggttgatccaagcatgcagcgagacgctcgtgagaatgttctgcgagcgctgatcaacaccgaaattcttcgcgtgctccccagggatgagctgctacagctcaatcccttggtgcttgagttcgtccgtggtctgaacagagagcatgagcttgggctatctgcagtgctccaggcccgagtgcaaggaattcgtgatgctacagagcgcctgaatgaggcaatcgagggtaatgacctggatctgctgcgacagtccgccgtacagcttaccgagttgtttcgccagattgcccagcagctggatcaggatcgccacgccattctcgaaattgcagagaaagccaagagcactgaggcacatgtgccggccgagcggcgttaccgtcgagtgctgcaggcctatgacgactatatcgaaccgatggcggaaatgatggacagcggtccgtccggcagcttctaccgcctgctggaggatgcagaacggcagattgactactgccaggagaaactcgctgttcagggcgcgctttacaccttgcgcatgctggtgcgtcagaccggcttccaggtcaaagagctgcgtcggttgggccgagaggtactcaagcagtgcagcgacacgctcttgcctttacgtgaagagctcaggcggcataacagcctgtctgctgccgtcagccaactactcggacaggtgcgaaagcgaggcttgtcgcggacattccgccaacctgacttccctgtctggcgcgcagagcgtccccggcgggtaacggttggcgatgaggtgctcaccatcatggctgaggccctggcatatgagcctgtgagtcaggccttccccgatgaagctccagctgagtcagcaacagagctgcagttcgtcgatggtgtcgagctgcgcgagcgcctggctgccagtggccctgtgcctagcctgcttgactggatacggacgaactacgcctacctggatgatgccactgtcctgcgcctttaccacgagcttgtcagggagccggagtgggagttccagcaggacgacctgaagcgcagtactgaccttaatctgctgcgcgtgactcactatcctcatggaatacccgcacgatga

SEQ ID NO: 336345 - DNA, 2049 bp, Pseudomonas aeruginosa
gtggaaatggatacgctggaccacaaggccgcaacagcctttgagggttacctggtccgaaaggatctggtgcgaacctttgcccgccagtttccggtacctacctatgtggtcgaatttatgctgggccgctattgcgcctcgaccgaccctcaagagattgaagaggggcttgagattgtgcagcgtcagctggcctctcgcactgtgcgcgccggcgaggaggagctattcaaagctcgggcctacaaggatggatcggccaagctgatcgatattgtcagcgtgcggttcgtggagaaagaggggggttacctggccagtctgccaagcctaaacctcaatcgggtccgcatccccgacaagattgtcgatgacaatgagcggctgttgaccggtggcttttatgccgaggtcactctggaatacgacagtgtgattgctgaagagaagggcaacgcctttggcatctcggagctgcgaccaatccagatgtccaagcgcaacgtgctggatatcctggcggaggcacgcagtaacttcagcagcgcggagtggcgcgactttctggtgcggtccatcggtctggaatccaatgcactgacccagcgtgccaaggatgccatcctgctgcggatggtgcccttcgtggagcgcaactacaacatggtcgagctggggccgcgtggtactggtaagagtcacctgttccagcaggtatcgccttatgcgcacctgatttcgggcggcaaggcgaccattgccaagatgttcgtcaacaacgccagcgggcagcgaggtctggtctgccagtacgatgtggtctgttttgacgaggttagcgggatctccttcgataccaaagaagggatcaacatcatgaagggctacatggagtccggtgagttcagccgtggcaaggaaagcatccgtgctgatggctccatggtgtttgttggcaacttcgacgtggatgttgagcaccagcaacgtgttggccacctctttggcccactgcccgccgagatgcgcgacgatacggcatggatggatcgcatccactgttacctcccaggctgggatgtgccgaagatgaacaaggatctgaccacggaccactttggtttggttagtgatttcttctcggaatgcatgagccgactcagatttgagagccgcgtgtcagccatgcaaaaccgcgttcacttgggcggcgcgctcagtggccgtgataccaacgctgttaacaagacggtgtctggtctactcaagctgatgtaccccaaccaggatatgcccgtctccgacgaggatctggagtgggcaacccgtttgggccttgaagtgcgccgccgtgtaaaagagcagcagaagcgggtaggcgcagccgaattccgtaatacacatttcagctacttcatcggtgatgatggcgtcgagaagttcgttgccacccccgaactcagagctgacaacgagattggtgacgatccgctggagccgggccagatctgggccatcagtgaaggcggcgctgatattgatgacaatgcgggtctgtaccgtatcgaagttaacggtgggccaggctctggggtgaagattctcaacaatcccgcgccggcggcgttcaaggagtcggtacgttatgccgagcagaacctgtattcacggtctgttcagctcgttggcgatcgagatccgcgctctcacgagttctccatccagctacgtgcattcgatgctgcaaaacgaggttccaagctgggcatggcagcattgatcgccatgtgcagcagcctgctgaaaaagtcagtcaagggtggcttgatcgttgtcggcgagatcaatctgggaggttctatcgagcccatcagcaatgccgtaaacatcgcggaattggcagtggaaaagggcgccagcgcacttctaatgccggtaacggcgcggcgtcagctgtatgacctgtctgacgacatggcgaccaaaatcgatatccagttctaccaagatgctcgggatgcgctgttgaaggcgattgtggaatag

SEQ ID NO: 336346 - DNA, 2319 bp, Pseudomonas aeruginosa
atgaaactgattgacttgctggtccaggaagttcgtgccagcgctgcgtacaactcgaatgttcaagccgctcccaatgtcattctctggactgacaagttgcgtcagtgggagtcggcattacccatgttgcaggctgctctgccggagctgatcgtgctgggcgactatgcgcctgaacgcaaaattggtccggcaatctggattaaatgtgtggtcgaaggcgtattgcctgatgttgcgttgcctgcagatcggacgcctattgtttatctgccgggctatgagcgtcgtgatttgcgcgccattgctgcctgtcctgactcgctcaagccacttgctgagctgcagtaccgaggttgctggtggatttacagcaatgcggggcgtgactggacggtgaatgccttcctggtctccagtaacggcggtgccgggcttgatgtggccaaggatgagaaaacccagcaggtcatgttgcgtgtattgcccgaaattctcgagagcgaacgcgatgacttgagcaatcgacgtctggaagcggcggactttaacaagctggtcagcagcgaccctgtgcgtgacctgctcagctggatgaacgacagccaggcctgtcgtgaacgctgggagtcttctcggtggcaagccttggtgggtatttgcgaaaccgaatatcacttccacccagagcaggatggcgaacttacggcggcggagctgctgtgccagcgccagggtgcctgggagggcgtttggcaacgctttttggagtcatgcacgcattaccctcagttgccgcagctactgttgaaggtccaggcagatttggcggccagcggtgctagttatccttcgatcaacgccaatgaagagcagcagcttgaacgtgatctgaacgggctgttgcagcttgatccggccaaggcgcgcctgagcatcgggcagcttgaaagccggcatgcggagcgtcgtaactgggtatggcatgccctggctatggctcctctggcaggggtattggaacatctggccgagatcgctcaagccacctccagcacattctcgggcaccgatcctgaggaaatggcgagccagtatcgcgaaagctattggcgtgcagatgatcatgcactgcgcgcattggcttatccgctgtcacctggtcaacagacactggtgcatggccttctggatctgatttacaccccatggttggacggcgttacgcgcaacttccagaatctggtgcgtagcaagggctacccaggcattgatcaggttaatgaagctacggcggagtatgccgtggccggcgaggcggttttttttgttgatggcctgcgctttgatacggcgcaacgcttagcggccaagctgcaaggcctgggtgaaattcagttggactcgaactgggcagcattgccttcggtaacggccactgccaaggcggcggtaacgccggtgcatgatcggctgaccggccgactaacagaccgggattttgagccgagcctcgcggatgatgacaaggacttttcctcgcactatctacgcaagttcctcaacgagaaaggctggcagtatctggaagagggggagtcaggtgaccctgcctcgaatgcctggttgcaaagtggtgacattgataaggaaggccatgttaagggcctgaagctcgctgcacgcatcgataccttactcgacgaggtcgtcgagcgtgccgaggagctgatcgctgcaggttggcgcaagattcgaattgtgactgaccatggttggatactgactccccggcctatggcgaaagtggacttgcccaagcatctgaccgaaacgcgctggggccgttgtgcggtgatcaaggattctgtggattcgggctatcagcaagtgggctggtattggaatagtgccgtcagcatcgccatggcgcctggcgtttgcagcttcaaggccggtcaaaactatgaccatggtggcctgagcttgcaggagtgcatgacgccggtgattcagatacgcaataccaaggcagtcgcggccatatctgcggtgactgcgaccctgtcggatattcgctggctgggcctgacctgcaagatacaggcagagacccaggctgagggggtgttggcagtactgaggacccacccaggtgacccggattcagaaattaccaaacgcaagccgctcaaagatggcaaatgcagcttgatggttgatgaccagtttgagggcagctcagcggttctggtgctgctggatgatcaaggtaacgtgctggcgaagaagccgacactggtaggagacgaataa

SEQ ID NO: 336347 - DNA, 684 bp, Pseudomonas aeruginosa
atgatccgggtgcacgtcatttgcgaagggcaaacagaggaaatgtttgtcaatgaaatgctggcaccggtcttttttcctaagggtattcaattagtgcctgcgctcgttggcaaaccagggcacaagggcggcaattttaagtttcaacgcctacaggcggatgtgaagaatcgcttgctgggtgatcgcaccgcttattgcactacattttttgactattacggcctaccgcagggtttcccaggtaaggatactctagttgctcatgcggacatccgggacaaagctgcagctgtacaggatgcgatggtcgacgagcttatccgttttatcggtcaagatcccatgcgccgatttataccctttgtgcagatgtacgaatttgaggcgctgttgttcagcgaccctgaggcctttgccattggcgtcgacagaattgccttgaaccagcaccttagtgcaatcagcgcgcagttcgagactccagagcacatcaataatagccctgtaacagctcccagcaagcgaatcgaggccttgatagctgactatcaaaagccattgatgggaacgctggctgccttggaagtgggtttggatgtaatgcgtgcaagatgcgcgctgttcaatgattggttgacgcgcattgagtccttgctggtgaccaatgaagcaatctga

SEQ ID NO: 336348 - DNA, 1104 bp, Pseudomonas aeruginosa
atgagcgcgatccacaagctgtctatcagtggattcaagtccatcagaaagatggagaacctgaacctgtcgagccttaacgttttgataggggcaaacggtgccggaaagagcaattttgttgcctatttccgcatgctctcagaacttgtggagggacggctacaggtctgggtaagcaagcaaggcggcgcagacaggcttctcagttatggggttaaagaaaccactgaaatgaccacatctgttcgttttggtgctaatggctacgatattgcgctggagccgagggttgatggtggattcactttcacatctgaaatgctgtatttcaatggtccttaccacggtgtaactcgtcctaggttgggggctggacattccgagtcgaatctcaaaaatgtgatggcgagtggtgcgtctaaaaaaattgcgaccttttgctttaacgctatcactggctggaaggtttatcacttccatgacactagtgatacggctggcgtgaagcgccagtgtgctgtgcatgacaacacctttttgcggatggatgcctcgaacctggcagcttttctcttccgattgaaaagtgaagcgcctgaggtttacaaccagattcgtaagacggttcgtctggcagttccgttctttgaggactttgtgctcaagccgacgaccttgccaacagaagaacagcagatccgtttgctttggaagcaaaacgacagtgattacgcactctggcctagccaactttcagatggttctatccgattcatctgtctggtaactgcgctgctccagcctgatcccccaacaactattattattgatgagcctgagctgggcttgcatccctatgcaatcacgctgcttggggcgctgatacgttcggctgccatgcgaactcaggtgattatttccactcagtcagttcccttgctcaacgagtttgaaattgaagacttgatcgtcgtcgagcgtgaagagggaggctcggtatttaagcgcctggctgaggcggactttaccagttggctggaggattacagtatcggtgagctgtgggagaaaaacgtcctgggcgggaggccttcacgatga

SEQ ID NO: 336349 - DNA, 1794 bp, Pseudomonas aeruginosa
atgatcaagtcggtttataactacccagtctccaccctgctcgatatcgagagtggggtggtttatgccataccgcgctaccaacgtgagtacacctggagccgggcgcagtgggatgcactgttcgacgatttgctggagaacgagccgaattactttcttggctcgatcatttgcatcaatcagtcacaagacgctttgtcggtacaaagcctggagctggtggatggtcagcagcgcatgactaccttgtcgctgttgttagctgcgatctaccaaagcttcagagtgctgcccaacctgggcatggagcagcagattgagttgtataacctcaagcacaagctggtgctgaagagaaagtcagaccagccacgattgatcccccaggtacagaacaacaaccagcaggattacttcgcggtgctcggcaaagccgggattttggacgatgtggagcaggtgcagcacgcaggtaaccgccgtgtgctgaaagcctaccggcactttctgtggcgtattgagcagtatctgcaagagctcagtgagccagtcgcgggcttgcaagcgctgctggacaaagtgaacaccgctaccctggtcaagatcgaggtggccggtcattcggatgcctacaccttgtttgaatcgctgaacaatcgtggcgtgccattgacggccattgatctgatcaagaacaagcttctggctgtgctggaagcgaaggactctggcagcatcgacaagcactacaaccgctggaagaaagtcatcgatgccctgggagatgactatgcggtgcaggagcgattcttccgtcagtactacaacgccttcaagcctgatttgaaggacatcgtctcggtgccggtggcgaccaaatccaacctgatgcaggtgtacgagaagctgatcgcccatgatgctgagagcttcctgcaggcaatgatccggctctctgcccattacgctcagatcgtgggttaccgcgccgtgcctgagcagccaaagctatccggtctgctgttgtcgctggatcgtatccaaggtgccgcagcctatctgttgttgatggtgctgtttgagcgtaaggacaccctggagcttgagcaggagcacctggagcaggtggtgcatttcctcatcgccttctttgtgcgacgcaacaccaccgacctgccgcctacccgggaccttacccggatttttatggatgtggccgagacagtgctggcgctaaaaggccaggcagtggtcagccatatccagcaacgcctgactggtgaaagcgccagtgacgagcagtttgagaagagcctgaaggggccgatctatgaagacaacaaggctgtttgccgctttgtgctttgcgctcttgaagaaagtcgtatgaccgttgagacccgggttgatctctgggccttgaaaggcaagcagtatgtttggacgatcgagcacattttccctcagggtgaaaacatccccgatacctgggtacagatgatcgccaacggcgacgctgcgctagcggaacaacaccgccaaacctacgcccactgcctggggaacctaaccatttctggctacaacagtgctctgggtaacaagagctttgctgaaaaacagagccggctggatagccaagggcgcaaggtgggctacaacaatggcctgcacttgaaccaggcgttggccaatgagaccagctggaccgtggataagctcaaggcacgcacggatcttttggtgcaagaggtgctgcagaagtatcctcttaccatttcgttcaaatga

SEQ ID NO: 336350 - DNA, 978 bp, Pseudomonas aeruginosa
atggaacgtaaatggtccgcgaaggatcctgcggttgcctttttccctgtcgagctgaggccggtttttatcgaggcttcagctcaaggtaacgacctgtttgcaggcggtgggtatcaggcgcttcctcgtcaccaagcggtggtcgatgttgagagtaaccatgcctttgcagtggtgaccgaggactatcgcttggtcactaatcgtcaggcgtatgacttagccgccgatgcactcaagcaggtttttgactttacctcgatggaggatatggcctgcctaaacgtgaccatgcccaagtcgcgatcgttctgtcatatcgacctgattcacaaaggaagcgattttgagccctggcagaacgaccgctgggtaccctttgtgcgtatcaccaatagctacaaccgcacccgccgtctgcgctttgaggtcggtttttgccggtggatctgcctgaacgggctgatctttggcggtaaaagtgtcgaaatcagctttgcccatacccggcagttgcaggatgaaatgcgccgttggcatgagaatctcgctggcatcaagctgctagaaaaactctttgtggccaagttgaataatttgcagcgctttcatgtgcctgcacgctggatgctaccgctcgcgtgcaaggtatttgacgtgcgcattgcctctgatactccgatcaaacaacgccgggctgatgagctggttaagttccgccaggccattgcggatttggccagtgattattttgtgtcgatgggtgagcacggctatgccgcccttaatgtgctgacagattacgctagccgacctgtgggggttatcgccccagaaaccatgattgatggcttccagcacaaggccggtgactggatcgatgaatttgttgagcagattgagaagcgtgatttcacatttgaagcctatctgggcgaacacctgaaaacagcagaggtcatcgccagattatga

SEQ ID NO: 336351 - DNA, 3543 bp, Pseudomonas aeruginosa
atgagccaagccacacaccgccagcccctcgacaaagccctgcgccgtgcgctggaagccaccgttgtcaaagcccgtgatattgccgaactggccgcctgccaggcgttgacccgtctgagcgtcggtgaggccaaagcggcggattacctcaatgatcagcaacgccagctgcgtacctgtctgcgcgcccacggtcgccagttaggtgacagcaaacaggccaacggccagcaaagcctgaataagctgatcaccgaagttgcctacgagcattggcaccgcatgctgttcgcccgctttctggagcagaaccatctgctgatgtacgacgagcacacaccgctgaccctgagtgagtgcagcgagctggtacaagacccggacaccctgcgtgatgagctggagcgccgctgccacagtggctgggagctggctggtgtgctggcctcaaaaatgctgccgcagatcttccgtatcgactcgccagtctttgctctggagttcgcccccgagcaccaacgcgagctggaaaaactggtcaccggcctggctgcagaaaccttccaggcccaggacagtctcggctgggtgtaccagttctggcaaagcaagcgcaaagatgaggtcaacaaatccgaggtcaagatcggcgccgacgaactctcgcccgtcacccagctgtttaccgagccctatatggtcagctttctgctggataacagcctgggcgcctggtgggccggccagcgcctcagcgaatccgactggcaagccgcccaaagcgaacaagagctccgcgaaaaagccgccatccctggagtgccacttagctatctgcgctttgtcaaagacgacgcgacccaacaatggcaacccgcctccggcaccttcgacgcctggcccaagcacctcagcgagcttaaagccctcgacccctgctgcggctccggccatttcctggtcgcggccttcctgatgcttgtacccatgcgcatgcaggccgagcagctcaacgcacggcaagccatcgacaaggtactcagcgaaaaccttcacggcctggagctggatcagcgctgcgtcgagctggcggcttttgcggtagctctggaagcctggcgttaccccgatgccggtggctatcgtaccctgccagaactgcatctggcctgcagtggcctgtccatcgccgctgcccgtgacgaatggaaagagctcagccgcaaagccggtaaacagaacctgagcattgctctagactggatgtaccagaccttccaggatgccccggtcctcggcagtttgatcaacccgcgccgcagcaaggccgcgcagatcgctcagtggagcgaattgcagcaactgttgggtgaagcgctcactcaggatcaggccaaccagcaaaaccaggctgacggcgaaatctccgccataaccaatcgcctggaggccggtattgtcgcccagggcttggccaaagccgccgaactgctggctggccagtacacctgggtcatcaccaacgtgccttacctggcgcgtggcaagcagcacgataccctcaaggatttctgcgaaacctattaccccgaaggcaagaacgatctggcaacggtgtttcttgaccgttgcctggaattttgtgaacagggcggcaccgccagtattgtgctgccgcagaattggttgttccttaccagctaccgcaagttccgcgagaagctgttgcaaaacgaaagttggcatttgattgcccgcctggggccaggtgccttcgagaccatcagtggtgaggttgtccaggctattttgattaacctgagccgtggcaatgaggcgggtcagtcgacggatctactgcgcattgacgagcccggcaatttgatttgcggagtcgatgtgtccgggccacgtacagctgcggacaaagcagcaggtttgctcttggatgatgtggttatagtcgaccaggctaatcagctgagtaacccagacgcaaaggttattttagggaaggtggtggaaggcaggcttctcaaagaaatagcttctagtcatttgggcatttgcagtggcgactacagtagattcgggcgttcattttgggaaatggttggtttgtctactgggtgggcttttcatcgaagttcatttagtagtagctctctgtatgcggggatgtcgcaggtctttttttggcaggatgggagcggagactttttagattttctgcgtgaaagattgggagagaaccagattggctcctggctacgtggtatggacgcctggggtaaagagggggttgttgtaaccgctactggagcattgccagtttcaaagtacaccgggacattgtttgacaacaatgtcagtgtcgtaattccagattcgcatcaggaactgcctgggctatgggcatacgctgcatcaggtcagatgcatgatgatgtgagagctttcaaccagcaacttaaaatcacagatcagagcttcgtagaagttggttacgatcgtgtttattggaaaaaggtcgctgaagagcaatacccaaacggcctacctcagccctacaccaatgaccccacccaatggattttccacggtcatccctgcggatcagtaatctgggacgaaggcagcaaatggaccggccacggcgaactgcgcgtcgatgacagcgtgctgcaagtcgcggtcgcccgcctgctcggctaccaatggccggcagagctggacccggaaatggagctggcggccgaacagcgcgaatgggtcgagcgttgccaggcattggccggttttgtcgatgatgacggcattgtctgcctgccaccggtgcgcggtgaaaaggctgccgaccagcgcctggaagcgctgctgcaagccgcctatggcgatgcctggaccaccccgctgaaaaaccgtctgcttgatgccgttggcagcaaatccctcagcctgtggctgcgtgacaagttcttcgagcagcactgcaaactgttccaacaccggccctttatctggcacatctgggacggcctcaaagacggcttcagcgtactggtcaactaccacaagctcgacaaggctggccttgagcgcctgatctacacctacctgggcgactggattcgcacccagcaagccggactcgccaacggcgaagacggcgcccaagagcgccttgccgccgccgaagccctgaagaaggaactggaagccatcctcgaaggcgaaaagccctacgatatcttcgtccgctggaagtcacccgccgaacaatccatcggctggaaccccgacctcaacgacggtgtgcgcctcaatatccgcccattcctgtatgcccgcgacgtcagcaagaaagacgccggcatcctgcgctgggcacccaatatcaaatggaccaaggatcgcggcaaagacgtcgaatccgccccctggtacaccctcggcctgcaatacggcgaaggcgaaggcgcacgcatcaacgaccatcacctgagcttggctgagaaacgggcggcaaggagccagtaa

SEQ ID NO: 336352 - DNA, 3465 bp, Pseudomonas aeruginosa
atgttgaaccgcgagatttacgacctagacccgcaacagaaccggctggaaaacaacggtgttgccgaggtcaaagacgaccagtcccagcaggccctgaaaaccctgcgctacgaattgcagacctttgtctgtgacggcgaataccaggcgggtctcgataaaatcctctccgcttatctgcgcaacctgggtgacgggcacgaacagcccggcgtgtggatctctggtttcttcggttcgggtaaatcacacctggctaaaatgcttcgtgctctttggaccaaccaggagttcagtgatggcgtagcagctcgcgacatcgccgatctgccccaggagatcaaggaccatttcaaggagctaagcatccaagccaagcgccacggtggcctgcacgccgcctcgggcactttaggtgccggcgccaacaacaatgtgcgcctggcgctgctgaacattgtgttcaagtccgccggcctgccggagcaataccaccaggcgcgctttgtgctgtggctgcataagcagggcattttcgatcaggttaaagcccacgttgaagcagcaggcgacaactgggatgacgagctggaagacctctacgtttccagcagcatttcacgtgccttgctggctatcgacagcaccctgggcgatgacgtcaaacaagtgcgccagctgctgcgcgagcagtaccccaatgtgcaggatgtgaccaaccagcagatggtcgacgccatctatgacgctctggctaaggacggccagttcccgctgacattggtggtgctcgatgaggtgcagcagtacgtcggctcggactcggaaaaggcccaccaggtacaggaggtcgtcgaaacctgctgcaagagttctaagttcaagagcaagatgttgttcgtgtccaccggacagagcgcactgtcaggcatggctaacctgcagcgtctgctcggccgtttccagattcctgtgcagctgtccgataccgatgttgaatcggtgattcgcaaggtcatcctgcgcaagaaagcctcggcccgcccgcagctggagcaggtgatgaacgctcacttgggcgaaatctcccggcagcttcgcggtaccaagatcgagcaccatcgcgacgatgaaaaggtcatgctggccgactacccgctgctgccagtgcgccggcgcttctgggaaaaggtcctgcggattgttgataccaccggtactgcctcgcagctgcgtaaccaactcaaggtcatccacgaggccgctcaagccacggcagatcagcctctggggcacgtggtcgccgctgacttcatctacaaccagatctcggtcaacctcttgcagaccggagtgatttccaaagaaatcgcggaaaccatcggccgcttgtcagccggtgatgctgacgagaagctcaaatcccgcatcctgtccctagtgctgctaattggtaaattgcccactgacccaactgcagactgtggcgtacgcgccactgccgatatgctcggcgatctgctgattgatgaccttaaccagggcaaagacgccatccgcacccaggtacccaaactgctgcaagagctggctgacgatggcctggtcatgcccatgcaaaccagcaccggcaccgaataccgcctgcaaacccaggaaagcgctcagtggtacgacaccctgcgccaggaagaggccgacctgcgcggtaacctgcagcgggtagaaaacatccgcgtcgatctgctgcacaaggagctgcgccgtcagatcgctcaggtgcgcctgacccagggcaaatgcaatgagccgcgccaggtgttgccctgctttgatgcggaactgccgaaggatgccaacgagaaaatctatgcctgggttcaggatggctgggcgattgatgaaaagagctttatgaccgaggctcgcagccgcaaccccagcgagccgaccatcttcatttatatcccggctcgtaaccgttccgagttgaccaacgccattgccgctgagcacgccgcccaggccaccctggacaagcgcggcatacccaacaccgatgccggcaaagatgcccgcagcgccatggaaacccgccatcgtgatgcccagaagcaggtgcaggcactgttgcgagaaattttcgaaggcgtacaggtgctgcaagccggcggcaacgaggtggacggcaacagcattagcgagcgtgtcgaaagcgccgctaaggcctcattggtacgcctttaccgcgattttgaccaagccgaccaccccgcctggggcaaggtctacgagcgtgccagcaaagacggtggccagaacgccctcgagctacttggttacagtggcgatgccgaacagcatccggtctgtgccgcgatcaaacgctttatcggtgtctcgaaaaagggcagtgaaatccgcgagcacttcctggccgcgccctatggctggccccaggatgccattgacggtgcgctctatgtattgctcgccagcggcatcctgatcgccaccgacagccgtaacaacccggtaaccgccagcagtcttgatcgcaagcaaatcacccaggccagcttccgtccggaaagcatcaccatccgcccggtggacatgatcaagatccgcggcgttctcagcagcagtggtatcgagtgccagccgggggaagaggccaacaaactgcccctcttggccgagaaggggcgtgagctggccaagcgcgccggtggtcctgcgccattcccagcagtgccagataccaaggtctttgacgaactggcccgccaatccggtaatgcacagctcaagcaggtactggatgagcaggatgccatcaaacaggcgatcaaggactggagcgataccgcccagcgcattgacgcccgccgcggtgactggaccttgctgaccagcctgctcgatgcaagccgcggcctggccttccacgcgcccattcaggccgaagccgatgcgattagccagcaacgctcgttactcgatgaccctaacccggccactgggctgatccagcaactggttagcaaactgcgcgatgccatccagttccatgttcaggcttacttggatcgccatgccgactgcctggcccagctgcaagccgacagccagtggcaacagctcagcgacgagcaacagcgcgccattctggacaagcgcaaactgctgaccctggagcagccggcactcaacgatgccgaggcgattctcgacagcctcagcgaggttagtttggagcagtggaccgaccgcaccgactccctcgccagcaagttcgacagcgcccgcctggaggcagccgaactgctgcaacccaagctgcaacgcatcactctgccgcgcaaaacctttgaaagcgaagcggatgtggatgcctggctgactgaagtcaaacagcagattctcagcaaactcaacgacggaccggtgactttctga

SEQ ID NO: 336353 - DNA, 546 bp, Pseudomonas aeruginosa
atgagtaaccgcctaaaccgtctgctgaaaagctacagcaaccacatcagcctgccgtggatcagcggcctggccaacgagcagcgggtgctttttgccgtctaccacaaggaagacgagctcaggctgcgtgcccgtatcgaagagtttcggctggctactgaaagtgccggccacccatggctggagctggacatcactcggttgtttccagactggatggcacagcaaaagtaccgcgaagactatttcgaagacccggacagcctcaccccgaaatacaaaaccttcgctcgccagtcggtaacggacttggctgagcgcatcaaggatcaggccgacagcaacactctggtggccttggttggctgcggcacgctattcggatttgcctcggtctctgatttcgttaagcagctggctgagcacgtgcccgggcgtctattggtgctgttccccggtgagtacgtcaacaacacctaccgcctactggatgcccgtgatggctggggctatcaggccaccgccattactgcagacaactga

SEQ ID NO: 336354 - DNA, 771 bp, Pseudomonas aeruginosa
atgactgcacagcagaagtttggtttcaaatttggccgtaacggcgcgcactctgcacgcaccatgatgctcgctgagttaacagagctttttcatggccgtggcgttgatgccagtgcagaccagtaccaggaggatattgagctctttaacgtcctgcataagcccactgaaaaagcccgcaaattgacgtggcgccatttggtggatttgtacgccatggataaggaggtcgtgctctttcgtaccttccgccgcctgtgggagagcgacgagcgtgcgcgtgctttattgacctgccaaatggcccttgctcgcgatccactgctgcgactgtcgcaaaacaaaatcgtgggattggccccgggccagctgctgccgcgtgaagagatggagcaagccttcgaagagcagtttcctgatcgctacagcccggccatgctcaagtccttggctcagaacgtgaacggtacctggaccaacgcgggcttcttacaaggtcgcagtaaaaaacatcgctccgagcccgaaattcgtccggtcaacgtcgcctttgcactgtttcttggctacttacagggcgccagtggtaaccgcctgttcaacaccgaatggaccaagctgtttggctgccgcctggagcgcttgctagagctggcccgccaggccagttacaacggtctgttgaatttcaaacactccagtgaggtcgtggaagtcaccttccccgactacctgaccaaggaagaggagggcaggctgcatgagtaa

SEQ ID NO: 336355 - DNA, 897 bp, Pseudomonas aeruginosa
atgcccgatatcgcgctagaagacgcttcgcctaatcagcgcgaacgattgtggcagatcgactttctggtgcgttttcgtgggcaggtgacccggcaagatctggtgcagcgttttggaatcgcacggtctaacgcaacacgcgatttcactctttaccgccagctagcaccgcacaatctcgactatgaccatcgcgaaaaggtgtatcggcgtacttcggtgtttaagccgcttttcacctacgactgtgaccacactctgcaaactctgagccttggccaaggtgtcggcttcgaagcttgcactcaagtcattgtggttgacgctgcgcctaccctgaatcagcccgatcttgagacgctggagtcagtatctcgagccatttatgccggcaaagcgttgaggatcagttatgtgtcagtcagtagcggagaagccagccgggaaattgttccgcacagtctcgtcaatacaggtctgcgctggcatgtccgagcctactgcaggactcatgcgcagtttcgcgactttgtactaacccgcattacctccagcgatgaggtgcccggcggaatagacgaagccgttgaggccagagggcaggatagagaatggaatcatgaagtggttttggagttggtacctcatcccaacgctcgttatgcccgcgccattgagctggactatgggctgaaagcaggccaatccatccatgtatctgtacgggctgctactgcgggctacctcttgcgccgctggggcgtcgattgcagtgctgatgcacgtctgaatccagatgagtaccaactggcactgcgcgaacctcagagtgtcgccaagcaggtcaacctcgccattgcccccggttttagcctggagacagtccattcatga

SEQ ID NO: 336356 - DNA, 378 bp, Pseudomonas aeruginosa
atgagtcgcagaacgaaaagtgatgccctgcaatggctggccgctggattggcggtgttcttgctggtcagtgcccaggctcaggaccgagacctggataacgacggactctgggattacaaccgcggcggcatcgaccgggatgtcgataacgacggcacgtgggattacgacaagggcggcattgaccgcgatttggataacgatgggacttgggatcatggcgccggaggcattgatcgggatgtcgacaatgatggcagctgggaccatgacgccggcgggattgatcgtgacctcgataacgatggcctgtgggacgagtcggccgacggcattgatagggatcaggataacgatggagtgtgggatgagtga

SEQ ID NO: 336357 - DNA, 1062 bp, Pseudomonas aeruginosa
atgaatcaactggatcgaattcgtggttgcctgctggccggtgcggctggcgatgctttgggcgcggcggtcgagttcatggattggccgagcatccggcagaaattcggcgagcggggaattcgggattttacccctgcattcggcaagctgggcgccgtcaccgacgatacccagatgatgctctttaccgccgagggcctgttgcgggcctgggttcggcaaagtgcacgcggtatctgccatccgccttcagtcatccatcatgcgctgctgcgctggtacatcacccagggcggcaaaccaaaggctgaggtcacgcaggatggctggctaatcggtgtaaaagacctgtggtcgagccgcgcgccgggcatgacctgcatgagtgcgctgggcgccagccaggcgtttggcgacaaggccagcaatgacagcaagggctgcggtggcgtgatgcgtatagcaccgcatgcgttcttcccgcaagccttcgagttggcggtcgaaaacgcacacctgacccatgcccatcccagtggatatctggcagcgggcctgtttgccgacattctgcagcggatcttcgagcaaggttgcgacctgaatgacgccatccgccagagcctggccgaacatggccagaaaccgggcatggcggaaacccgtgagatggtcgagtacgccctgcgccagagtgaggccggtatcgcgcctacgcccgaagggattgccgtgatgggtggcggttgggtggccgaagaagccttgggcattggtctgtggtgtgccctgatggccaacagtctggaggaaggtatctgctgggcggtcaatcacaccggcgacagcgacagcacgggtctgattgccggcaacctgctgggtatccagttggggcctgatgccattcccgagcgctggctggagtcgttggagttacgcgaggtgatcgagcaactggcgcatgacatcgagtgggtaccgcgtacctattgcggggattacagctcaaatgtggctgaggatgaacgcatctgggcgcgctatcccgggtcctga

SEQ ID NO: 336358 - DNA, 969 bp, Pseudomonas aeruginosa
atgtacgacatcatcggcgacattcatggctatgccgacgccctcaaattgctcctgagcaaactcggctacagcgcggcgaatggcgtctggcagcatcctgagcgaaaggtcattttcttgggcgacttcgttgaccgcggcccacagcaggttgaaacgctcagcatcgcccaagccatggttgaagcagggcacgcgctggccgtaatgggcaaccatgaatttaacgcagtggcttgggcaacccccaacgcagagcagccagggcagtttcttcgctctcacagcgagaaaaaccgccatcagcactcagcatttctcaatcaaatcggtgagggctcggccgcccatcaacaggcgatcgcctggttcaaaacactgccgttatttctggaactggatggcatcagggtcattcatgcctgctggcatactcgttatatcgagctgctgaaacctctgctcgatgagaaaaatacgattcagccacaagcatggcctgttttgtgtgacgaacagtccgagccgtatgaagcgctggaaaccttactcaagggaatggaaattccgctacccaatggaaccagctttgccgacaaagacggccacatccgcacgcgaactcgtacccgctggtggcaggaagggcagtacctgacctatcgtgatttagccatggtgccgcctgcagtcatcgagcaactctctcacgaacctgttcctgcagagctacaaccgggctatagcggggacaaacctctttttattggtcactactggatgagtggaacaccacacctgctgaccaaccatctcgcgtgcttagacttcagtatcgctggctccaatcctgacacagccaagctgtgcgcataccaatggcatggtgaacagacactcaagcctgaacacctgctctgggttcaccgccaagaaagtgaagacttttacgctttgactcagtag

SEQ ID NO: 336359 - DNA, 720 bp, Pseudomonas aeruginosa
atgcgcttgtcgcaaggtttttttaatacagtattcgatgatgccttcatttttactgaagaacctgagcagattttgcaaacggccaaattgagcgcggacgaacagcttttggcgatgcaggtttggaattcggatctttatggtgagggggctctggatgcttgtgaggctctggttgagcagctgtctgacgtctatcgctggcagagtaacagcgaaggggcgttgatatttgcgtccaagattctcttcttgttgcgcgaccagaatcgccatgtgagctggtttaaacagaatctgaggccggctcggaggaaaaagcgagccacgcttatttgtccaatgtcacaggatattcttcttaccgttacccatgacaataaaatgctgctgccaggtggtctgattgagcgctccgagcttgccattgttgcagcggctagagagctatatgaagaaacagggctgattgcgcagcacttagagtttttgtttgaacacaaatcggaacactacctgcattcggtctttctggtgcatcaagccacaggtatgccgaaggcgcagagcgatgctgctcaagtgatttatgtttcgtctggcgagatattcgagagtggcgggcccagtaacctttctaactccaatcgtgaaattttgcagagatatctgaatggtgagggtggctgcctgccacaagcagagcgcagatattaa

SEQ ID NO: 336360 - DNA, 276 bp, Pseudomonas aeruginosa
atgcgcctgcagatccttgagcaaaacattcaagcactctttttttggatcatcatccaagcagcccgtccagaaagcctcatcgaattcggcaaccactgcggcgccgagatcttcattcaataccaagcgccgatgaataccatcagcaagggcccagtactcatgttccatctcatccatgagattacagcccgtacccatcaagtcatgctgccaaagaaacttatttattgttgctacatccggcaatgcaggcgcttcattcataattag

SEQ ID NO: 336361 - DNA, 1680 bp, Pseudomonas aeruginosa
atggatacagtgattgcccgtatgcccgctccgcttccccccgagctctactacctcagcaacttccgcaccgcgctcgcctgggtgagcgcacgctatggcgatttgctcacgccgcaggagctggcctttatccgccatttcgaggccgctcagtggcaggcgcaggcattgctggtgcgcatgatcatgcgtcgtggccgccactttcggctaagcaagctcaactacccggagatcggcgattgccaggatgccgccctgcccttgcttgaactcggctggatcgacgagcaggcgccgctcactgcgtctgaagttgccgagcttttgcgcaaggacgagttgctggcccatctgccactgacggaacgacgcggctcgctgaaaaagaccgagctggtggatcagctgctggctcaggggctaccggctcagccctttgtggcctggtgtccggcactggatgatcgcctgctgagcctgcagattgatgagctgtgcaaccgcttgcgcctgatgttttttggcaacctggctcaggactggtccgagttcgtattggcggacctgggcatctatcgctacgagtcggtggacatcagccccgagtctcgcggctttcgttgccgtcaggatctggaggattaccttcatctgcgcgaactgcggattcgcttcgaggagggcgaggaagctgaggccgttctacccgagctattgagcttttcctctgccagtccctacctgcgcagccgtcagtcaagccagctgtttcacatcgctcagcacctggagaaatgcggcgagctggagaaatgcggcgagctggagaccgcgctggccgtctatcagcgcagcgaattcagccaggcgcgctggcgccaggtgcgcgtgctggaacaactgggccgcgatgccgaagccctcgagcaggtgctggcattcggcgtcatgccaagcagcgacgaggaacgtcagcgccttgagcgcgctctgccccgcctgcagcgcaagctgggcctgcccgtgacaaagcgggcaaagccgcttgaagccgcgcggatcgagctgaccctgctccggcctggacatggcagcgtcgagatcgccgtgcgtgatcacttcactcgcgaacaagcgccggtgtactacgtggagaacaccctgctctgcagcctgttcggtctgctgtgctgggaggccatttttgccccgctgcccggggcattctttcatccgttccacacgggcccggtggacctctacaacgccgacttttacggccggcgccaggcgctcttcgacgcgtgcctggcccgcttgcagcaacccgactacccccagctgatcatgcagcgctaccgggaaaaattcggcatccagtcacccttcgtggtttggcaactgctcgatgaagcgctgctgcagctggcgctgctctgcatcccggcgcagcacctgcaggcctgctttgcccggctgcttcaagacatcaaggccaaccgctccggcatgcccgacctgatccagttctatccggccgagcggcgttaccgggtgatcgaggtgaaaggccccggtgaccgcctgcaggacaatcagaagcgctggctggcgtttgccgccgagcagggcattccggtcgaggtctgttacgtgagctgggacgtggcatga

SEQ ID NO: 336362 - DNA, 2274 bp, Pseudomonas aeruginosa
atgacctacaccgtagcggtgcgtgccctctgcgagttcaccgccaaggagggtgatcttgacctgcgtttcacgccctcacccaccgctcaggaaggcatcgccggtcaccagaccgtggtgggccggcgtggttctgactaccttgccgaactgccactcagcggaagctaccccggactcatcgtcagtggtcgcgctgatggctatgacccggagcgcaatcgtctcgaagaaatcaaaacccaccggggcgatatcagccgcatcccggccaatcaccgggccctgcattgggcgcaggtgaaggtctacggctggctgctctgccagcagttggatctgcaggaggtggagctggccgtcgtttacttcaacgtgctcacccacaccgagaatgccttcatcgaaatgatcagtgccgccgacctgcagcagtttttcgagcagcagtgtcagcgctttctggtctgggcagagcaggaagaagcccaccgaaaaatacgcgatgcctacctggatacgctgcgctttccctaccccgattttcgccgtgggcaacgccagttggccgaagcggtgtatcgcagtgcccgtgatggccacaccctgatggctcaggccacaacaggtatcggcaagacgctgggcaccctcttccctcaactcaaagccatgccgggccagcagttggataggctgttttttctcacggccaagacgcccggtcggcgcctggcgctagacgccctgcacagcctgcgcgaaggaaacgatgccacgccgctgcgggtactggagcatgtggcccgcgacaaagcctgtgagtatccctacaagagctgccatggcgaatcctgcccactggccaagggcttctacaatcgattgcctgcagcccgcgaggccgcactacggcagagctggctgactcaggagcaagtacgcagcattgccctggcccatcaggtctgcccctactacctgagccaggagctgtgtcgctgggccgatgtggtggtctgcgactacaactactacttcgacatcagcgccctgctctacggccttgcccaggtcaacgagtggcgcgtcgccgtactggtcgacgaagcgcacaacctggtcgagcgtgccaggagcatgtacaccgccgagctcgatcaagaagagtttcatgagctatgccgcatcgcaccctcaggcctgcgcagcgtgctgcagcgcgtcagtcgacactgggagcagctcaaccaggtgcagcaggtggactatcagatccaccctgtcgtgccggacctactggtggcagcgctgcagcgcgcggtcagcgccatcaccgatcatctgaccgactaccccaacgggcaggatcgtctgctgctgcagttctatctgaatgccatgctgttctgccgcctgagcgaggcctacgggccgcactcgctgtttgacgtcacgcgccaggacactcaggcgattggtgatcacaccacgctgtgcctgcgcaatatcgtgccggcgccctttctcgccaaccgtttcagcgatgcccacaccaccacgctgttctccgcaaccctgcgcccggcccgctactaccaggatctgctcgggctgcccgaggaaacccaatggatcgatgtggagtcgcccttctcggctgatcagctggccgtgcgcgtggtgcgcaacctgtcgacccgctaccagcatcgcgagtccagcctcatgccgatctgccggctcatggctgaacagtatcgaagcacacccggcaactacctggccttcttcagcagctacgcctacctggagcaggtccgcgagttgttcatgatcctgtacccggatattcccaccaacgtgcagacgcgcagcatgaatgaaagtgagcgccaagcctttctcgatggctttacgatccactccgagggtattggctttgccgtgctcggcggcgcctttggcgagggtatcgacctgccgggcaagcggctgatcggcgcctttattgccaccttgggcctgccccagatcaacgaggtcaatgaagaagtcaaagcgcggatgcagcagatgttcggtgaggtgaatggctatgactacgcctatctctatccgggcctgcagaaggtggtacaggcggctggccgggtgatccgcacggtcaatgaccagggcgtggtgtatctgctggatgatcgcttcggccaggccaaaatcagggacctgctacccacgtggtggaaggtcgaaccctaccgtctgtga

SEQ ID NO: 336363 - DNA, 654 bp, Pseudomonas aeruginosa
atgattcgacattcgcagaatagtaatctcattattcataatgagcttgactatcgtggcttgcctattcaggtagataaagggcctttcattcgtcagtatctgcaaaagctgcatgctacgattgatcgagctcttcaacagtattctcgtgtctttgccttcagggttgatcttaggtttccagcagcgtttgtgcacggcagagacgataatgcaagtcaagtatttaaaaagtttttagattcctttaagtccaaaatacaccacaatcgttgtatggcgcttagggaaaacaaacatgcgcatcagagccgcgtgcggtatgtttgggctagagaatttgggcagcatgggaagccgcattaccatgttgcattcgttctcaattacgatgcattcaacgctttgggtaagtttgagcctggaagggataacatgttcaatcgactccaggaagcttgggcaagtgccttgggaacgtcggttgaggcagtgaggggtttggttgagattcctgacaatccgagctatagcctgcgtcgcgatggtctaggggttgaagagtttttctatcgagccagttacctatgcaaggcgcctaccaaggtttatggcgatggcagacatgggtttgacagcagtcgaatctaa

SEQ ID NO: 336364 - DNA, 186 bp, Pseudomonas aeruginosa
atgaaaatcattcgtctgaaggctgtcatcgatgccactggcctggctaggtcgactgtatacaagtacgttgcgcagggctcgtttccgaaaccgattccgctgggtgatcgatgtgtgggctggctagagggcgaggtccaggattggatcctggccagaatcgaggagcgagatctagcttga

SEQ ID NO: 336365 - DNA, 1059 bp, Pseudomonas aeruginosa
atgagtcttgattctgttacgcctgctgagcgaaaagaagctgcaaggaagatgctcagggaagctgcaagtggtacgaatcgattgctgctcgctgtcctcctaattcatgctgacgaatttggggtagttcgtgggttgggtatttctgatctgtgcaccctgacggggctcaaacgagaaaggcttgaaatgcatcttttcaagctcaacgaactgggcgcaatacgcttcaagattgctggatttagcggttcaaggatcctgggcagcctgaaaacgatttactatctaaatctgcatcaccgatgtttttataattccaacagcaccttgatggtcttcgttttaaaagcaaaaagtgattatagaaataatgtagatctgctggcagagaaaattttcttaaccgaagaaggggcttgtggtttttactggccgctcactgcggtggaccccttggggccagtaaagttatttgatgatatcgtggtgtcgtccctgcttaactcgaagttggcgggtggcgggcgcgctgagctattaatgctgcgggcgattgtagatcaacatgtctcctcacttctttcaatgcactggaataaactttgcgctaaggaattgtttacggatctggggttgttagaaactataaaatcacaggttaagctcccttggttaaaatccgtggctattgatgctttgtcgggaaggagtgctgaagaagttgtttataacatggttttttacctagcatgtcagtacaaagtgcttctgggttcggcgggcgatcatgtaagtgaaggcatgaagtttcatattcttccattttctgatcaatgccgtgggcggagagcggtgttggctttgcgtaaagatggcgcgctggatcgcaggtgcttggtcatcactgaggcggagagcgaaattcaatcatatgagtgcgaggccgtaatgactgttgaccaacgctttgagtatggattgtttggtgagtttcacgctctgaaacgctatggtaggtcagtgactcgctatatgcccgtttttaggcagtaa

SEQ ID NO: 336366 - DNA, 870 bp, Pseudomonas aeruginosa
atgtccgaacgaatgaaatggatatcccccaaaaacacgtcccagatccaatgggccttgagttatctgaaggagaagagcggcaatcccggattctggcacacccgttacataggggagacggcttaccaacagctcatcaagtgggatcagggtcagattgaaagcgcggaatatagagaattcttaaggcgcatgcggggtgcatgggcccagaaaaagcacagaggaaagaataaagacaagagggcatatagcatcgttctgccagtaaaaacaaagcagcaacttgatcgcatttcaaaagaacttagcttaagtctggctgagacagttgaaaaactaatccaatcgagcaaagaacagcaggagagttttttcgacaatgaacgcccaaagcttcaccaaaaacgtgctgacgacagcatccgcagagatgctaacgactatcgggagaattcggaaatattttccgaactactgacttttagccttatagatataagcatattaaagataaggaacagtgcacaactggactctgaaaccgagatctccgaaatagagcgactaagcactaacctactggaagaattccttaaagaaggtaacgaaggcctcaaacggcgaatgtcaaatattacgctgaacaaccaggccatccctccaaaacgcaccctaatagaaaaaagacttaaaaatcttgtccagactaccaaccaaacaccaattgcacttaagactgaaatcaacccaaacccactattaccacataaatttcaccaagccctacagcatccaaactttaattcagacaaacttaatgaatctctcgaaaaaatgagcagagccttcactgatcaggattaa

SEQ ID NO: 336367 - DNA, 132 bp, Pseudomonas aeruginosa
atgatcggcgatccgaccctggccgatgccatcctcgaccgcctggtgcacaacgcctaccggatcaacctcaagggcgagtcgatgcgcaaacgggcgaaaaaattgacgacgccgagcacctcggactaa

SEQ ID NO: 336368 - DNA, 369 bp, Pseudomonas aeruginosa; identical to SEQ ID NO: 334839

SEQ ID NO: 336369 - DNA, 996 bp, Pseudomonas aeruginosa
atgaacggcggcggtcacgcaactgcctcggcggcgccacgccgcgctcactggcgctggctgcgcaggctgctgaccctggcgttcttcgtgctggtcccggtgctgctgttcctcctggtgaagaatctcgactggcaggaagtccgccacgccctcggcgagtatcgccccgcgaccctgttcctcggactgctgctggcggccgccggctatacggtgttcagcagtttcgacctgctcagccgctactacatcggccactcgctgcccaagcggcgggtcttcaccgtggccttcgtgtgcaatgcgttcaacctcaacctgagttcctgggtcggcgccgtggcgctgcgctatcgcctgtacagccggctcggcctgggcatcgccgacatcacccggatcctcaccttcagcctggtgaccaattggttcggctacctgctgctcgccggcatcctgttcagctgcggcctgccggccttgccgccgggctggaagctcggcagcgacggcctgcgcctgatcggcgcgctgctcctggcgctggccgccggctacctgctggcctgccgtttcgcccgacgccgcgcctggggctggcgcgagcatcggctgaccctgccgtcctggcggctggcggcccttcaaggcctgctcggagcgagcaactggtcgctgatggcgctgctgctgtacagcctgctgccgcacggcgtggattacccgagcgtcctggcgatcctcctgatcagcagcatcgccggggtcatcacccatatcccggccgggctcggggtgctcgaagcggtgttcatcgccctgctccaggggcgcctgtcccagggcgtgctgctggccgcgttgatcggctaccgggtgctgtatttcctcctacccctggcgctggcctgcgtggtctacctgctgttggagcgccgggcgatccgcctgcgccgcaaacagcgccgcctgcgccagggccaggcctga

SEQ ID NO: 336370 - DNA, 423 bp, Pseudomonas aeruginosa
atgttccccatccttcgcccgctgctccataccgccgccctggcctgcgccctcccggcgctcgccgcggacccgcaaccggccagcggcggctgggcgcaacccgacccggcgccgatcggctatgcggtgctgaacgtttcccgcgagcgggtcgagtccggcactgcctgcgatgtcggcctgtacgtccacgacgaactggtcggcaacctgcaaccgggcgccagcctggccctgaacctgcaacccggcgcggtggacgtgcgtcttgcgccgaacggtcctggcgacgcctgccggaacggcatgaccatcctcgccggacagaccctgaccctgcgcgccggggagatccgcaacctgcgcattgcccttggtgcgggcgggctctacctggcgccggtggcggatgggtactga

SEQ ID NO: 336371 - DNA, 1248 bp, Pseudomonas aeruginosa
atgaaagccgtggtattccatgacatcggcgacatccgcctggaagacgtggcggagccgcgcctgcaggaacccaccgacgccatcgtgcggctgaccgcctcggcgatctgcggcaccgacctgcacttcgtccgtggcagcgtcggcggcatgcgtccgggaaccatcctcggccatgagggcgtgggcatcgtcgaggcgctcggcgacgaagtgcgcaacctgcaggtcggcgaccgggtggtgattccctcgaccatcgcctgcggcaattgcgtgtattgccgagccggctactacgcccagtgcgacgtcgccaaccccggcggcagccaggccggcaccgcgttcttcggcggtccccgggccaacggcggcttccatgggctgcaagccgagaaagcgcggattccctatgccaacatcggcctgatccgcctgcccagcagcatcagcgacgaccaggcgatactcctgtcggacatcttccccaccggttacttcggcgccgaactggccggtatcgcccccggcaacaccgtcgccgtgttcggctgcggtccggtcggccagttcgccatcgccagcgcgttgctcctcggcgccgcccgggtgttcgccatcgaccgccacccggaccgcctgcacatggcccgccagcaaggcgccgaagtgatcgacttcgagcgcgaggatccggtccaggccctgcgctggctgaccgccgggatcggcgtggaccgcgccatcgacgccgtcggcgtggacgccgagcacagccatggcaccgccaccccggcgccgcgccaggagggcaccagctggagtcccggcaacgcccccgcacaggccctggagtgggcggtgcagggcctggccaaggccggcaccctgtcgatcatcggcgtctacgccgaagactcgcggcagtttcccatcggcctggcgatgaaccgcaacctgaccatccgcatgggcaactgccaccaccgcaagtacattccgctgctgctcgaacatgtgctcagcggacgcatcgacccggcgaagatcctcacccaggtgaagccgatcggcgacgccatcgaggccttcgaagccttcgaccgccgcgagaccggctggatcaaggtcgaactggtgccgcagaagcgccaggtcgagggcagcgaggaacgcctcgacgaacgcgcggtggacgaactggcgcgccggccgacgccggaaagcggcgcccgggggtga

SEQ ID NO: 336372 - DNA, 2058 bp, Pseudomonas aeruginosa; identical to SEQ ID NO: 334758

SEQ ID NO: 336373 - DNA, 996 bp, Pseudomonas aeruginosa
  misc_feature (781)..(800): n is a, c, g, or t
atggcgagcaagaaaaaggctgcgtccgaagaggtcgtgaccgcttacaaggggttcaagcaagacctgacctgccgcggctaccagttcgagatcggcggaacctataagcacgagggtgaggtagaggcatgcgcttcgggcttccactcctgcgagtatccccttgatgtcttcggctactacgccccaagcgaaagccgattcgccatcgtgaaggcttcggggcatctgagccgtcacaacgatgacagcaagatcgccagcgccaccctggtggtggaggcggaaatcagcatgccgaccatgatctcgcgggccatcgactgggtcatgagcaaggtagataagtcggttgagcagacggtggtgggcgaaacagcgtcgaacaccggctaccaatcggcagcgtcgaacaccggctaccaatcggcagcgtcgaacaccggcgactactcggcagcgtcgaacaccggcgactactcggcagcgtcgaacaccggcgactactcggcagcgtcgaacaccggcgactactcggcagcgtcgaacaccggcgactactcggcagcgtcgaacaccggcgactactcggcagcgtcgaacaccggcgactactcggcagcgtcgaacaccggcgactactcggcagcgtcgaacaccggcgactactcggcagcgtcgaacaccggcgactactcggcagcgtcgaacaccggcgactactcggcagcgtcgaacaccggcgactactcggcagcgtcgaacaccggcaaccgcnnnnnnnnnnnnnnnnnnnngcgactactcggcagcgtcgaacaccggcaaccgctcggcagcgtcgaacaccggcgactactcggcagcgtcgaacaccggcaaccgctcggcagcgtcgaacaccggctaccaatcggcagccgaggtcagcggcaaggagtccgtcgccgcatccctgggcatcgaaggccgcgctcgcgcatctgctggtag

SEQ ID NO: 336374 - DNA, 216 bp, Pseudomonas aeruginosa
atggatttggaagagttcaaaacaactactgccatggttccgccccctgtgatgccttggcgtgactttgctgactggatacggatggggaatgaccacaacaccgtttggggttggatacggaatggctatctccccgcgcacaagatcggcaagcacgtgatggtcaatgttgcgctcttcacccgtcagctgatggaaaaggaggagttctga

SEQ ID NO: 336375 - DNA, 1050 bp, Pseudomonas aeruginosa
atgtctcagaccgataacttcttacacactactcacaggactgtttcgtggttcaaaaaaacctgggcgaacgatgaacttgtactaaaagcccccttccaacgaaacccagtttggaccgacatacaaaaggcttatttaatcgacacaatccttcatggcctgccaatccctgaactttatatgcaggacacaggaaatgaagatggcgacgaaaaacatattgtcgtagatgggcagcagcgaatcagagctgtactagattacctaacaggaaaatttaacctcgatggcgacgacataactccaggatggagtggaagggcattcgaagagttatcagccgcagaaaagaaggccatattcaactacaaatttgtagtcagagtactccccgacatggacgatgaaagccttcgaaagatatttactcgcctcaatcgaaacgtagtctcgctaaaccctcaagaactacgaaatgcgacgtactgggggccattcattaggacaatacagaatatagctgacaatcaaccattctgggctgattcgggcctattctcggcgaatgaccatcgaagaatgcttgaccatgaattcataagcgagatagcagttgcttacctacatggccctcagaacaaaaaagacaaattagaccagacatatcagctatatgaagaaacttttgaggacaaagaaaaacttgttcacaccttcagtacagtaacatcagaaatatctgcaatacttccggatctaaacaaaacacggtggaagaaaaaatcggacttctacacattgttcctttgcttttgcgacaaacacagtgatctccccttaagcaaagacgaacgagaaaacgtcagagagaagatcattagctttggccagaaggttgatgacatttcaaggcttgatgaagaagaactcgaggctcgagacccgcaagtagtcagctactataaagctgtatcaagagcagcttctgatcgtagcagccgaatcaacagaagcacagcctttaaatcatacgtattcgaagagtga

SEQ ID NO: 336376 - DNA, 2967 bp, Pseudomonas aeruginosa
atgccgcgtcgcttgatcctctcggccatggagcgggacaccctgcttgcgctgccggaaaaccaggatgatctgatccgctactacaccttcaacgactccgacctgtcgctgatccgccagcggcgcggcgacgccaaccgtctgggtttcgcggtgcagctctgcctgctgcgctaccccggctatgcgctgggcaccgacagcgagctgcccgagccggtcatcgtgtgggtggccaagcaagtccaggccgacccggtgagttgggcaaagtacggcgagcgcgacgtgacccgccgcgagcatgcccaggaactgcgctcctacctgcaactggtgccgttcggcttgtccgacttccgcatcctggtgcgcgagttgaccgagctggcccagcagaccgacaagggcttgctgctggctggtcaagcactggagagcctacggcagaagcggcgcattctgccggcactgggagtgattgaccgggcctgctcggaggccattgcgcgagccaatcggcgagtctatcgcgccctggtcgatccactcacgcactcgcatcgagccaaactggacgaactgctgaagctcaaagccggcagcaacatcacctggttgacctggctgcggcaggcaccgctgaaacccaattcccggtacatgctccaacacatcgaacggctgaagacctttcaactggtggacttgcccgaaggcctgggccgatacatccaccagaaccgcctgctcaagctggcccgcgagggtggccagatgacgcccaaagacctcggcaagttcgagccgcaacggcgctacgcgaccctaactgccgtggtactggagagcaccgcgactgtgattgatgagctggtcgatctgcacgaccgcatcctggtcaagctgttcggcggcgcgaagcacaagcatcagcagcagttccagaagcagggcaaggcgatcaacgacaaggtgcgcctgtactccaagatcggccaggccctgctggaggccaaggaaagcggcagcgatccctacgccgccatcgaggcggtgattccctgggacgagttcaccgagagcgtcagcgaggccgaactgctggcccggccggagggcttcgaccacctgaacctggtcggtgagaacttcgccaccctgcgccgctacacgccggccctgctggaggtgctggaattgcgcgccgccccggccgcgcaaggcgtgctggcagccgtgcagaccctgcgcgagatgaacgccgacaacctgcgcaaggtgccggccgatgcccccaccgccttcatcaagccgcgctggaagccgctggtgatcaccccggaagggcttgaccggcgtttctacgaaatctgcgcgctgtccgagctgaagaacgccctgcgttccggtgacatctgggtcaagggctcgcggcagttccgcgacttcgacgactatctgctgccggcagagaagttcgccgcgctcaagcgcgcacagaccctgcctctggcgatcaacccgaacagcgaccagtacctggaagagcgtttacagttgctggacgagcagttggccaccgtcacccgcctggccaaggacaacgaactgcccgatgccatcctcaccgagtcggggctgaagatcaccccgctggatgcggcggtgccggatcgggcgcaggcgctgatcgaccagaccagccagttgctgccgcgcatcaagatcactgaactgctgatggacgtggacgactggacgggcttcagtcgccacttcacccacctgaaggacggtgccgaggccaaagaccggacgttgctgctatccgcgatcctgggcgatgcgatcaacctcgggctgaccaagatggccgagtccagccccggcttgacctatgccaagctgtcctggctgcaagcctggcacatccgcgacgaaacctattcggcggccctggccgagttggtcaatcatcagtaccgccatgcttttgccgctcactggggggacggcactacctcatcctccgatggtcagcgcttccgggctggcggccggggcgagagcaccgggcacgtcaacccgaagtacggcagcgagccggggcggctgttttacacccatatctccgaccagtacgcgccgttcagcacccgcgtggtgaatgtcggcgtgcgcgattccacctatgtgctcgacggtctgctgtaccacgagtccgacctgcggatcgaggaacactacaccgacacggccggcttcaccgatcacgtcttcgccctgatgcacctgctgggcttccgcttcgcaccgcgcatccgtgacctcggcgaaaccaagctctatgtgccgcagggcgtacaggcctacccgacgctgcgcccgcttatcggcggcaccctgaacatcaagcacgtgcgcgcccaatgggacgacatcctgcgcctggccagctcgatcaagcagggcaccgtcaccgcctcgctaatgctgcgcaagctcggcagctacccgcgccagaacggcctggccgtggccctgcgtgagctgggccggatcgagcgcacgctgttcatcctcgactggctgcagagcattgagctgcgccgccgcgtgcatgcaggactgaacaagggggaggcgcgcaactccctggccagggcggtgttcttcaaccgccttggcgaaatcagggatcggagcttcgagcagcagcgctaccgggccagcggcctcaatctggtgactgccgccatcgtgttgtggaacacggtgtacctggagcgcgccacccaggcgatgggcgacacgggcaagccggtggacgacgagctgttgcaatacctgtcgccgctgggatgggagcacatcaacctgaccggcgattacgtctggcggcagagccgcaggctggaggacggaaagtttcggccgctacgaatgcccggaaaaccttag

SEQ ID NO: 336377 - DNA, 255 bp, Pseudomonas aeruginosa; identical to SEQ ID NO: 327978

SEQ ID NO: 336378 - DNA, 270 bp, Pseudomonas aeruginosa; identical to SEQ ID NO: 327977

SEQ ID NO: 336379 - DNA, 222 bp, Pseudomonas aeruginosa
atgcaaaccatccagaacttcggctatgacggagcgatgttcctcgcggcactcatctgcgtggctgtctttttgggggtcgcttggcatacctacggcacctatcacgctatccatgacgggaagaagaagtggtcggatctcggagcgggcgtggccgtaggcatcggcctgctgatcttgatcatttatctcgtcaccaaagccaccaccatcatgtaa

SEQ ID NO: 336380 - DNA, 387 bp, Pseudomonas aeruginosa
atgcccgaagaacatctgtttcaggatgggaccctcagcttcctgccgacccgtttgaaccggcaaccggtggtcatcggcggtctgactgcggacgaaatgtggatcacggtcctcaccagcggagcagccgggttcgttcttggcatcccggctgccttggtcgcaggtaacgcggcctgcattccactgggcgcgctgctggtcggcgccctcggcctgggtatcggcagccgcgtcctgcggcggatgaagcgggggcggcctgacacctggttctaccgccaggtggagctggccctctcgctgcgctttcccgtcttcggcaatcgtcacctggtgacgcgctccggcgcctggaccagtcgacgcacggagtccccatga

SEQ ID NO: 336381 - DNA, 885 bp, Pseudomonas aeruginosa
atgatccggaagtcgacaggctcgctcttgctaatgcttgccctacccacactggcccacgcggtggagattctgcgctgggagcgcattccgctggccattccgttgacggtcggccaagaacgtattgtctttgtcgacagaaacgtgcgagttggcgttcctcgggatctgcagggcaagctgcgcgtccagagtaccggcggcgcactctacctgctcgccaacgagccgattcctccagcgcgcctgcgcctacaggacgcgaccaatggcgagcagatgctcatcgatatcgccgccaccgaagcaacggccgaccaacagccgcgcgagccggtcaggatcgtcgccggcgagccagtggctccgcattatggccagtcccgggaagcccagccatcggcagcagcgaaacagaccgagcacgcagaagcaccgaaggccgtgccgcgcgaaacgcccgtccccgtggttctgacgcgctatgcggcgcagatgctctatgccccgcttcgcacggtggaaccggtggatggcgtcggtcaggtgcgcgtcaagcgacagctcgacctgaccaccctgctccccagcctacccatcacggctaccgccttgggcgcctggcggctggacgactactacatcacggcggtgaagctgcagaacgccagcgcccagcacctggccctggatcccagggacctgatgggcaatttcgtcgccgcgaccttccagcacccgtacttggggccccggggcgacgcctccgacaccactaccgtgtatctggtgacgcgcggccgcggccttgccgacgcgctcctgccctcctccatcagccagatcgatcccaaaggaggccgtcgtggcgctgaccggtaa

SEQ ID NO: 336382 - DNA, 252 bp, Pseudomonas aeruginosa
atggttttctggtcggcgctggcggtctggttgttgttgctctggttgtcattcacctcctcggccggcgccgggaaggtgcgtacggtcccgtcgttgaacacgaacgtgaggctgcggatctgcccacgcacgcaggagagtgtccagtcgcccgaggcggtcccgctggctaccgcgccggccacgtccggcagctcgatgccgttggcggtgaggttgtccgggccgatgaggattttgaacgggtaa

SEQ ID NO: 336383 - DNA, 2805 bp, Pseudomonas aeruginosa
atgggtattcctctgcccaacaccgggagcaagaatggcgccacgcaggctcaagcgtcacgcctctacgatcacgacccatcgttcgtcgacctgctgccctgggctgagtacctgcccgacgagcaggtgatgctcctggaagatgggcgttcgcgcgccgcgttcttcgagctggtgcccttgggcaccgagggccgcgatcccaattggatgcagaacgcccgggacgcattgaaagaagccctgcagaactccttcgacgagcacgaaacctcgccctggatcgtccagttctacgcccaggacgagatcagctgggacaatttccaggagcagttgaggcagtacgtccatcctcgagcgcgaggatcggccttcagcgagatgtacctggcgctcatgaagcatcacctggagggcatttcgaagccgggcggactgttcgtcgacaccgccgtcagcaaactgccctggcgaggacaacagcggcgcgtgcggatggtggtctaccgccggatccgcaaggcggatgcgcagattcgcggacaggacccggcggcatatctgaaatccatctgcgagcgtatccaaggcggcctggcgaacgccggcatcgtcgcttcgcgcatgggcggacaggagatcaggaactggttgatccgctggttcaacccgcatccggatcacctcggcaagaccgatgcggatctacgtcgcttctacgaactggtatgccggccggacgaaccgatcctgcaggacgagttgccgctggccgacggcactgacttctcccagaacctgttctataggcagcctgtttccgatgcaacccagggcgtgtggctcttcgatgccatgccgcaccgagtgattgtggtcgaccagttgaacaaagcgccgctgacaggccacgtcaccggcgagacgctcaaaggcgatggcctcaacgccctgttcgatcgaatgcccgaggacacgctgctgtgcatcaccatggtcgtgacgccgcaggacatgctggaagggcatctacagcagctctcgaaaaaggccgttggtgacacccaggcatcgatccacacccgcgaggacgtggccaccgttcgacgcctgatcggccgggagcacaagctctatcgcggagcgatcgctctgttcgtgcgcggccgcgaccacacccagttggaggaacgctgcatcaccctgagcaacgtactgctcggcgccggcttggtgccggtcgaaccgcagaacgaagtcggaccgctgaacagctacctgcgctggttgccctcgaacttcgatccgaacgaaaagcgggccctggagtggtacacccagatgatgttcgcgcagcacatcgccaacctgtcccccatctgggggcgtaccaccggtaccggacaccctggcttaacgctgttcaaccgtggcggcgcacccttgaccttcgacccgttcaacaagctggaccggcagatgaatgcccacggcttcatcttcgggccaactggctccggcaagtcggcgtccctgaccaacctcatctgccagatgctcgccatgtacctgccgcggatgttcgtcgcggaagcgggcaacagcttcggcctgctggccgacttcgccaagcggtttggcctctcggtccaccgggtccgcctcgccccgggctccggcgtcagcctggcaccgttcgcggacgccatcaagctggtcgagagccccgaccaagtgaaggtcctggacgccgaagacatcgaggcctcggactcggtccagggcagcaaggccgacctcgaggacgaccagcgagacatcctcggcgagatggagatcgtcgcccgcctgatgattaccggcggcgaagagaaggaagacgcgcgcctgacccgtgccgatcgcagcgccgtccgccaggcgatcctggcggcggccaggacctgcgccgccgcgaaccgcacggtactcacccaggacgtgcgcgatgcgctctacgaggcctccaggagcgatggcaccgcgccagaacggcgcgcgcggctggccgaaatggcggaagccatgcagatgttctgcatgggtgccgacggcgagatgttcaatcgcgaaggcacgccctggcctgaggccgaccttaccgtggtggatttcgcgacttacgcgcgcgaaggctacgccgcccagctcgggatcgcctacatctcgctgctgaacaccgtgaacaacatcgccgaacgcgaccagttcaagggccggcccatcgtcaagatcaccgatgaggggcacatcatcaccaagcacccgctgctgctgccctacgccatgaagatcaccaagatgtggcggaaactgggcgcctggttctggctcgccacccagaacatcgacgacatcccagcctccggggcaccgatgctgaacatgatcgagtggtggttatgcctgaacatgccccccgacgaggtagagaagatctccaggttccgcgagctgtcgccggcgcagaagtcgatgatgctctcggcccgcaaggaaagcggcaagttcaccgagggcgtgctcctggccaagggcaaggagtacctctttcgtgtggttcccccgagtctctacctggccctggccatgaccgaaaacgaagaaaagaaccagcgctacagcatcatgcaagccaccggctgcgacgagctcgaggcggccttgcaggtcgcagcggatctcgaccaggcgcgcggcctgccacccttccccattattttcccagaccaaccggcagtggagtgccaggacgaatga

SEQ ID NO: 336384 - DNA, 531 bp, Pseudomonas aeruginosa
atgagcaccacgcaacgcacttcccgtccgacgcagggcggtttcgtttccatcgagatgatcatcgtgctgatcatcatcgccatcggggtcggcctgggcctggccgcagcggctgggatgttcagttcgtccaacgccaacgaggaacagcgcaacatcagcgttatcgcggctaacgcgcgggccctgaagacctcttcgggctacggctccagcggcaccaacctgatcccgagcctgatcgcaatcaacggcgtgccgaagaacatgagtgtctcctccggcgtcgtctacaacgtctacggcggatcggtcactgtctcgtccaccggcatgggcttctcgatcaccaccagcaagttgccccaggacgcctgtatcacgctggccaccaagatcgcgaagaacaccttcgagcagaccaagatcaacagcggatccgcgatcacgggagaagtgaccaccgcagccgcgacccaagcctgcagcagcgacagcaacagcattacctggacctatagttcgtga

SEQ ID NO: 336385 - DNA, 540 bp, Pseudomonas aeruginosa; identical to SEQ ID NO: 334809

SEQ ID NO: 336386 - DNA, 864 bp, Pseudomonas aeruginosa
ttgaacaccccggggtactacgacaccgactactccaagactccacggcaatcgtggccctacaacgccacccgcgacgctggtctgccccaggtgggcggtggtggtggctaccccacctgcaagcagtggtgggctgactcagcgatcggcttgcgtgatcggatcaagggccaggtggatccggacctgatgaccagcttccttaagtgggcgaaatggctggaccaggacgaggtgaccgaggcagtcatccgccaggtgatttcaccgtccagccaggtcaaaggcaacgtctacaccgattacggcgggcaggtgggcggaaccgtctggaatggactggctcgtgccggaggcaccctcggagtagcaatgggtagcctggcttacttcccggcgatggatatggtccgccaggcgctgccgatggtgatgtcgttcctcaagatggccatggtcatctgcattccgatggtcctggtcatcggcacctatcaactgaaggttgccatgacgatgacggttgtattctttgcgatgatgttcgtcgacttctggttgcagttagccagatacatcgatagcacgatccttgatgccttctatggttcggggtcaccgcatctttcgttcgacccagtcatggggctcaatacggcgactcaagatgcaatattgaacttcgtgatgggggcgatgttcttgatactacctgcgctctggatcaccgccatcggatgggcaggggttcatgctagcggtatcgtagacggtctcacgaagggaactgatggtgttcagaaggcgggtagtaggggtgggcaaatagcggagcaaagtgtcaaatcactcaatagttag

SEQ ID NO: 336387 - DNA, 3567 bp, Pseudomonas aeruginosa
gtgaccctggcggcggcggcgaacgaggagcacagcttcgccaccggcaagaaggtgacggcgaagaacgatcgggtggaacaccaatcgaccgtggtcagcgccggcggcgatctcagcgtgcaaggcggcaatgacgtgaccttcgttgccagtcaggcgaaggccagcaacgaggcctatctgtacgccggcaacgacctcaatctgctggcggctcacgacgaaagctattcctactactcgaagaagaaaaaaggctcgttcgggcgcagcagtagccggatgagcgagagcgaagccagtaccgtggtgtcgtcgtcgatccaggcgggacaaggggcggaactggtcgccaagcgtgacgtcaacgtcgaggcctcttccgcctccagcacgaagggcgagctggcggtcgtggcggggcgcgatgtgaacctcacggcagctgagaacagctactccagcgtgtccgcgaaatccaagtccggaggcttggggctgtcatccaccagcaaggccaacgcccagtcctcttcctacaccagcgttcagggcgccacgttgagtggcgataccaccgtggtgcaggcgagaagggacatctcggtggccgccagcaatgtggtttctaccgggaagactgcgctgcgtgccggcaacgacatcatcatcgacagcgtggcggagacgtcggagtcgcatcgcagcgagtcgaagaagaagtccggcctgatgagttccggagggatcggcatcacgctcggcacggcgaagaatgcctcgacacaggacacccgtaccgtcgtcaaccagggcagcaccatcggcagtgtgctcggcgatgtcgacatgcgggcgggcaagaacctgtctatcacggcttcggatgtggtggccggcaaggacatcaacctcgtcgggcagaacgtgagcattctcgctgccgacaaccagaacgtcagcgagcagacccgcaagaccagcaagagcggcttgacgctggccttgtcgggaacggtcggtagcgcaatcgacgccacctaccagaatgccaagcaggccaggaacgaagacgacagtcgcctttccgcgttgcaggggatcaaggccggcttgagcggcgtccaggcctggcaggcagctcagcagaacggcggcatgacgggcgagaacagcgcgcagttcgtcggcatcagcgcttcgctgggctcgcagaagtccagctctcggcagcgccaggagcagcagatcagccagggaagcacgctcaccgccggtggcaacctgaacattatcgccacgggttccggggctgtcggcgaagacggcgacttgcgcgtgcaaggcagcaagctgcaggctggcaaggacctccaactgatcgccaaccgcgacgtcgtgctggaagccgcggccaatacgcagaagctcgatggcaagaacaagagcagcggcggcgctgtcggggtaagcgtcggcgttggttcgggcgaggctggcatcagcattttcgccaacgccaacaagggcgccggcaaggaaatcggcaacggcaccacctggaccgaaaccaccctggacgcgggccagaaggccagcttggtcagcgggcgcgacaccacgctgaaaggggcgcaggtcaatggtgaaagcatcctggcgaaagtgggtcgtgaccttaccctgcaaagcctgcaggatcgcgattactacgattccaagcagaagaacgtcggtggtggggcgagtttggctatcgttggccagggtggcggcgccaacttgagtctcagccagagcaagctgcattcgaagtacgacagcgtgcaggagcagaccgggctgttcgccggcaagggcggcttccaggtggaggtgggcaagcacacgcagctggatggcagcgtgatcgccagcaccgccgaagccgagaagaatcgcctgagcacaggctccttgggctggagcgagatccgtaacaaggccgagtacaagagccaacttcagagtgtcagtgtcagcagcgccaacgatggcgccggtgcgttcgtcagcaacatgcctagcggcatgctcattgcctacaaccacggcgatagtgccagcggtaccacgggttcggcgatatccgaaggcaccctggaggttcgcgatccggcgcgccagcaacaggatgtggcgacgctcagccgtgacccgagccgcgccaacgatagcgtcagtccgatcttcgacaaggagaaagagcagaagcgtctgcagcaggtccaactgatcggcgagatcggcacccaggccatggatatcctgcggacgcagggccaactcgacgccgacaaggcggcgcgggccgaactggaagcgcggggtatctccgcgccggacgccggcgccagcgagcggcaagtcgaggactaccgcaaagcgcttctgggcacgaatgcctaccaggacatcatgggcaagtacggcaccggaggcgactaccagaaggccgcccaggcggtgaccgcagccttgcaagggctggccggcggcgacattggctcggcgttggcgggagcttcctcgccctatgtggcgggcgtgatcaagcaggtggcaggcgacaatgacacggcgcggatcatggcccacgcggttcttggcgcggtggttgcgcaggcccagggcaattcggctgctgcggggggcgcaggagcggcggggagcgaactggcggcgcaggtgatcagcgagcgactgtacggaacccgggacagctcgacgctgaacgaagcgcagaagcagactatcaccgcgctggccagcctggccggcggattggccggctccgttgtcgatgggagcagcggaggagccattgccggggccgcaggcgggaagaacgcaacggaaaacaacttccttggcggcggaaccccgccgggcttgatcagctatggtcaggcagcgagctccttgaccgagtacatgcgcaagaacggggcgacagccgaggagatcacccaggcgcaacgtgatctggcccagggacagggcttcgatggcgtacagccagcgaatgagttcatcaaggcctggggcgaggccatggttgcggaggctgccggccttgggattgttgcggggttgggtaggtttgggttgtgggttgggaaaggggcgggagaaactgccatagccgttcccggtcgtgtccaatctcgtataaatattgccaatggccgcacagcaactacaccgcttcgcgataccggaaggccagtatctgcggggtttgaccatgttctacaagggcatttcggagtagaggtttccaactcacggtctgtgttcactatcactccgagtgaactgaaggatgtacttcagagcagccctgttgttaagtcaccagttatggcattgcctgatgggcaattcgtgaggaccgttgatgtaggtaaagtaattggcactaccaatttaaaggatggaggagtgcccacctcggtattaaaaatatttactgacagagctggtaatttgatcacaaccttcccaatcaaggcggtggattaa

SEQ ID NO: 336388 - DNA, 972 bp, Pseudomonas aeruginosa
atggaaggcctgaagagcgccgtgcgctacgacaagacctacttcgacaagatcgtggcctcgctgctgccgctactggagaaactcactaccgggcggatctcggagcttctttcgcccaactacgcggacctcaacgatccgcgaccgatcttcgactggatgcaggtcatccgcaagcgcgccgtggtctacgtcggcctcgacgcactatcggataccgaggtcgccgccgcggtgggcaactccatgttcagcgacctggtctcggtagcgggtcacatctacaagcatggagtcgatgacggcctgcccggctcactcgccggcggcaaggtccgcatcaacctgcatgccgacgagttcaacgagctgattggcgacgagttcatccccatggtcaacaaagcgggcggcgccggtgtgcaagtgacggcctacacccagaccatgagcgacatcgaggccaagatcggctcccgcgcgaaggccggtcagatcatcggcaacttcaacaacctgttcatgctgcgggtgcgcgagaccgccacggccgaactccttaccaatcagctccccaaggtccagatctacaccagcacgccggcgagcggcgccaacgacgcgatcaacaacaagaaggcagccttcacctccagctcacacgaccaggtgcagatgaccagcgtgccgatgctcgagccggcccacatcgttggtctgcccaaaggacaagcgttcgcgctactcgagggcggcaatctctggaagatccgaatgccgctgccggcggtcgatcccgacgaggtgatgccgaaaagcctgcaggagctggctgccggtatgcgcaagggccaggccgcaaacagcgagtggtgggaggcaccgggatactccgccctgcaggatggtctgccccaggacctggtcgacgatttccgtcacctcggcgccggtgaggatgccgcctga

SEQ ID NO: 336389 - DNA, 1239 bp, Pseudomonas aeruginosa
ttgcagaaggaggacttcttccggcatgagcatcggctgattttcaccgccatcagcgagttggccgcgaaggacgccccgtttgacgtcgtgacggtgtcggaagcgatcgaagaccttccagaagccggcgggctggcctacctcggccagctcgctgacaacacgccctccgtggccaatatcgaggcttacgcgcagatcgttcgcgatcgggcgcacctgcggcagttgatgtctctcgggcaccactgcaccagaaccgcctcgaaccaccaggcgaatccctgtgaggttcaggaggagatcgagcagaagctgttcgccctcggccaagatcagcacaagtccgactttgtcgatatcaacaagggcctcgcgaagatcgtcgacaccatcgattaccgcttcaacaacaacgtgacggtaacgggggtcccgacaggcctgaaggatctcgacgagctctccggcggactacagaagtcggatctcatcatcgtcggtgcccgtccctcgatgggcaaaacgtcgtttgccctcaacttgatcgacgccgcgctacagagcgaccaacagaagtctgtccaggtttacagcatggaaatgccagcagagcagctgctgttcaggcttgctgccctgctcggccacctggaccttggcaagctgatgaagggccaactgcaagaagaggattggcccaggctgaccgtcgcgatccagcgcataaacgactatggcagccgactggtcatcaacgaccagggcaacctgacgccgacagagctgcgcgccaaggttcgccgtgcagccaggaagtacggccaccccgtactgatcctggtcgactacctgcagctgatgcgctgcccaggcctggaaaaccgagccaccgagatctcggaaatctcccgctcgctgaaagcactggccaaggaaatggattgccccgtcgtggccctgtcccagctcaatcgcagcctggagaaccggccgaacaagcgaccgaacaacgcagacctgcgtgagagcggcgcaatcgagcaggacgcggacgtgatcatgttcgtgtaccgcgacgaggtctaccaccccaacaccgaggccaagggcattgccgaaatcatcatcggcaagtaccgcaacggcccgatcggcaccgtccgcgccgccttcatcgccaaccagacccgcttcgccgaccttgcaccaacttggcagggagctcttgcatga

SEQ ID NO: 336390 - DNA, 1032 bp, Pseudomonas aeruginosa; identical to SEQ ID NO: 332723

SEQ ID NO: 336391 - DNA, 576 bp, Pseudomonas aeruginosa
gtggacgactaccaccaggtccagagggagctgcgtgccgcagtgcagagcagcctgcccgatctggtcgacaccgacgagtacaccacctgggagggaatgctgtctgtcggccttgtcgattgccctaatggcctgcagatcgtcgagctccgctgtcctgccgacctatatgccgaacatatcgctctggcacattgcatcgatagctacgaccaggccgcctaccgaggagactgccgactgctctcagtacgtgaggctggtcgtccgctggcctctgccgaattggagctcaggcgtgagcatggcgagcctataggtaggccctggagtcccaagcacctttccacggtgcaacttcgcgaattcgataatgcccccgtgccgacagactcgcctgccggccaggcataccgctggttcatggaacggattcgctctggagccatagcgacgaacctgaactggcccgacatgaccgtccacatgacgcgcttcgccaatggccgctggaaggcgggcctcgccgaagccacggcgaagtggctgctcactcggttggaagaccgatga

SEQ ID NO: 336392 - DNA, 261 bp, Pseudomonas aeruginosa; identical to SEQ ID NO: 333075

SEQ ID NO: 336393 - DNA, 489 bp, Pseudomonas aeruginosa
atgaagcgccggaattggaaacactgggtgccgcgctcgccagccgacgcactggacggctgtgcgcagctggccatgcagcgctataaccgcgggatcgagcggcttgccacagaccatctgtgccagaacaacgccagcaccctctacaaatggatgggtaatggccgcctgccgctgaccatggtgctgtcattggagaaagcctgcggcctgccgctgatcactcgctacctggccgccgctcacggcaagctcctggtcgacatcccggttggcaaggcttgcaacgccagcgaccttcagcagctgcagggcgtgctgcacagcgctaccggcgcgttgatggccttctacgacggcaagcaatccgccgaacagaccctggacgccatccgcgctggccttgaatccctcgcctggcaccacggcaacgtcgcccaggcagaaacccctcaactggactttggagtggctgacgatgagtga

SEQ ID NO: 336394 - DNA, 231 bp, Pseudomonas aeruginosa; identical to SEQ ID NO: 326738

SEQ ID NO: 336395 - DNA, 153 bp, Pseudomonas aeruginosa
atgaacatgcaaaccagcaccgacaggaacctcaatttcgactttgtgcgcaggcaagtcgagcaaccgcctgcttgggcctctgaggtcctgctgtcatgggaggaagcctacccccaggaaaagcacgccttccttcaaagccactactga

SEQ ID NO: 336396 - DNA, 498 bp, Pseudomonas aeruginosa
atgaacctccagaaccgcaacaacctcctcctgagcttgatcgccgagacccagttcgacgcctacgtgcaaggctacatggccaaagcaggcgctgccgcaggtgcttccgagaatctgcaaatcgaggctgaaggtgctgcgatgttgcagggcctggtcgctccggttcgcgctcagcagcgtgcctgtggacagtccctgcagaacgccctgctccaaatcgcccacgacctactgttgcagacgaaatcgcaactggccatcgcggccaatgccagttcgatccaagtgatccagcgggacatgaacagggcgatctggaacatagctactaccatcgatcacctggccgagttcgcccaaccctcgcaggacactgtgagggtcatcgaacggctgatgctcttcgtcggcagctcatcaagcactgaaggccagcaactggccgccgaggcaagtgcggtgctcggcatgagcgtgggaggcctggcatga

SEQ ID NO: 336397 - DNA, 636 bp, Pseudomonas aeruginosa
atgagcattctgaccaataccccggtttcctgggtagacgtcagagtgaacatcgacgtcatggagaaaatcctggctacagccgagcgcagcgcgcaggaagacctgcagatcgaacgcgcactgaagctgggagccaccacaacgatgatccagagctttttcggtctgtcgccggaggacaccgccaccaagcgcttgatcctggagatccacccgcgccgcggtcgctggcggcagctcgatgaacagatcgagcgccagatatggttccgctgggagcacctgatgcaggaaaatcaggtccgccttgaggacagcatggagttgctggacatcgcgatgatcctcacagaggaaatcaacgccggaatcgaacaagacagtccagaattcatcagcctcgccattgtttggtctctcatccagagctggttgaaagacgggctctatccgtctggcaagtcgagccagagccaggcgggcctgcaaaagtcccaatccactctttacctcgctagcgtcagctcacacctgccccactctgccccatccgcaacaacgcaggtgaacgctgagacagaacgtcaacaactactgaacctggttcagtcggaaggcgacacagcaccatga

SEQ ID NO: 336398 - DNA, 225 bp, Pseudomonas aeruginosa
atgaagaacaagattgaggatctgcgtaatcacctctttgccaccatcgaagggttgcttgacgaagacaagcccctggatatcgagcgcgcgaaagcggtggctcatgtgggttcggtgatcatcgagtccgccaaggtggaagtgaaagcgctggagatcatcggcgcgccggatggcagcgcaagcacgttcctgcagatcggccgggaggactcgaagtga

SEQ ID NO: 336399 - DNA, 708 bp, Pseudomonas aeruginosa
atgactcgctctgctctctcgaacatcgcctacgaggctctggtgcatgcccgccgcaaattcagcaaccgagaggagcgctgcatccgcgaaacctggaccgccgaacaggaactggtgctgctgcgcctgtatccggatatgccgaacgaggtcctggcagccaggttgaacaaaacgctccagcagatctgctccaaagcgtatcggctcgggctgaaaaaaagccccgagttctccaagaagatccggcaggactggggcagcgcaactcggttcaagaagggaaacaccccatggaactgcggcatgaaggggctgcccgcgcgaggacgcgcaccagaaacgcagttcaagaaggggcaaaagccccacacatggctcccagtcggcagcacgcgggtcagcgctgatggctacctgcaacgaaagatctcggataccggctatcccccccgggactggaagggcatccacatcctgctctgggaagaacacttcggccccatcccaaccggccattgcgtctgcttcaaggacaacaacaagcagaacgtcgttatcgacaacctggagatcatcacccgggccgaacgcatgcgccgcaactccatccatcgctatccacctgagctgaagagcgcaatccgcgtcatcagcaagctcaagcgcaccattcaggaggtcgagcatgaagaacaagattga

SEQ ID NO: 336400 - DNA, 702 bp, Pseudomonas aeruginosa
atggacaagcaaaaagtcctcgccaaggtcgagaagctgatggccctggcgaatgccaagggggccacgccgaacgaggcggaaaccgcattgcgccaggccgcgatcctgaagcggcagttcgacctcagcgatgcggagatctcggcccacacggtggagaccgcgtgcgttcccactcgaaccaggcgctctcctgccccatggctgcatgaactggccgggatctgcgccaactccttcggctgcgactacctggcggcatacgcgatgccagcgggctggacgttcaagttcatgggccgagggatcggccctgagctagccgctcacgcctactctacgctccaccaccaactggtggcggcgcgctcggctcatgtcgctcaacagaagcgctgcaagctgtcgaccaagcgccgtcgcagcaagctcttcgtcgaaggctggcttctcgcagtgcgttcgctggtacgtgactttgccggcaggccggacgagtcgactcaagcagccatcaaggcctacctcgaactacaccatccggagctgaaactcctggagccggcagcgcctacgaaggcccttgcctatgaccaggcctcgctgcacgcaggctgggagcacggcaaaaacactcgcctgcaccgcggcgtcagccggcgagttcaaggcgcgctcgagcagggaggttcccgatga

SEQ ID NO: 336401 - DNA, 135 bp, Pseudomonas aeruginosa; identical to SEQ ID NO: 324426

SEQ ID NO: 336402 - DNA, 621 bp, Pseudomonas aeruginosa
gtggagtgggtttgcctgtatttcttctggcctgacgcgggctggaagcatgcccaggccatgttcgagtacgaactcagttggctgtcgcaggggctgctacacagcgtcgtcgtgcaggagccaggtcgaaccgccacctggctggcccagttggcctatgactggttgttcgtgaagaccgggatagtcgactggatgaccaacatgaccaccatcgcgcaggcagggccacggagccctctggacgttcgctatctcaccgcccagggtgtctccacgctgcagaactacggcctggccgcgctgtacacggtgctgacattcgtcgtgcgcctggtgattctggtcatgacgatcccgttgttcctgatggccgcgttcaccggcctggtggacggcctggtgcgccgggacctgcgcaagttcggcgccggccgggagtccagctacctctaccacaaggcgcgcggcagcatcattccgctagcggtcgtcccttggaccctctacctggcgatccccatcagcatcaaccccttgctcatcctgctgccctgcgccgcgctgctcggcgtagcggtgtgcatcacagcatccaccttcaagaaatacctctag

SEQ ID NO: 336403 - DNA, 324 bp, Pseudomonas aeruginosa
atgttctccgccgcgcacttgaggatgtgcgagccgaccggggtggaaccggtgaaggcgatcttggcgatgcgcttgctggtggccagggcctcgccggcctccctgccgaagccctggacgacattgagcacgcccggcggcagcaggtcgccgatgagttccagcagcacgcagatgcccagcggggtctgctcggccggcttgagcaccacgcagttgccggcggccagcgccggggccagcttccaggcggccatcagcagcggaaagttccacgggatgatctgcccgaccacgcccagcggctcatggatgtggtag

SEQ ID NO: 336404 - DNA, 729 bp, Pseudomonas aeruginosa
atggctgaaacccatcggcttcagatcggctctctccgcagcgatgtcgccctgacgcttcacacctatcacgccgcccgcatctggaccggccggcagaagtcggatgccaagcacagcatcctcggcctctccggcttctgcgcatacgtgaatcgcatgcaccgcggggcagcacaggacgatccgtactccgactggtggctggttcagatcgaagagaaagtcgagaactgccaagccgcgctcaaggccatcgaccagcgactggatgacgtcatggccaagctgccagcgaccctcgatatctccgagaacctgtccgtcacaccggtcaaggtcccgttgttcatctccaaccctctcggcttcaaggcagtctatctcctgaccaactacgacgaactcgcccgtcgaatcctgctggcccagcacgtcgggctggtcggtcgccgcgacatggaggtctggctcgacgaaggtgcatcggtgctgcgcagtctttttggtctggcccagagctaccagttcacgggcgccactcgcgacgacttcgccgcaaacaatgctcgcgccgaagccgcgcggaagatgtacgagaagttcggcgagatcccgcaggacatcctggagggcacccgacgctcgaacttcgctccgccgatcacccggggccgctctgacagtgatgccgatgatgacgctgaccgtgtcgagcttgaggactga

SEQ ID NO: 336405 - DNA, 387 bp, Pseudomonas aeruginosa; identical to SEQ ID NO: 336380

SEQ ID NO: 336406 - DNA, 222 bp, Pseudomonas aeruginosa; identical to SEQ ID NO: 336379

SEQ ID NO: 336407 - DNA, 708 bp, Pseudomonas aeruginosa
atgactcaactcaatccgtttattcgcggctatgagagtttccgcatcgagcgaaacctgcagatcactgacgaaggcgataatctaccgtgctaccgcgctctgcatgaaacccagcagcacctcccagatgaatattttcagtgcgagctgtgctacttcaatggcgatttcgccgtggtaacccaagacttagacgatgaaagagttgaaaaatgccctcaccaaggaatagtgagaaacgtactttacagcatctacggtgagcaggacggcagaaaaaagcttatcggagatcaatactcactgaccgaagccgagagtgtcgttcgatacctttcgttcggcggcggttataaccgctgctgggagatcagaaaaacacatctacccatcagggtgtggaatagcctctacgaaaggttctcgaccaagatgccaatccgcttgccctcggtgttggtatcgctcttctggtgtaacgagcacggtgccgtgggctttcgcttgcacaacaccccttggacggatgagtctctggagatcctggagatgaccgcagccgctcttcgacaagaacagcttgccttcggcctcgacgaacacctggtcgatctgcttcacctcgcgggacaagcagacattcggctcctggtacttgatccattcgcgcccacgctcaagggcctgccgctttatgacgattga

SEQ ID NO: 336408 - DNA, 348 bp, Pseudomonas aeruginosa
atggcagatacgctcaccagccgaaagctcctcggccagctactggtcggagtgatgatcgtcgtcggtctggcagtggtcggtacgctgctcagcctcttcgccctgaaccacttcggcggcatccagggcctggaggcctggcggcaaagcaactactggagtttgttcgcctggcgggcgctgctgtactgcgccctggccatcgcctggttccggctcaagcagcgcaaggaactgagcgcgcatgagcggcagcgcattcggcggatcgagatcctggtgctgttgctggtcctgctcatcgaattcagcaaagcccacttccgcacgggaggcgcagcatga

SEQ ID NO: 336409 - DNA, 327 bp, Pseudomonas aeruginosa
atggacgtgctcagcaaggccctgttgttacagcgcctgatgttcgccggcgccaaggagcccaacgtcgccgccaacggcctggccacccaagccgtcgatcagcagaccagcctcctgcagcaggagatctcgaacctcaagaccgaactggaactccgtcgcgagttggccagcaattcgcccatgcgggtcatcgagcgcgggcaacagcgcgccgcaggctccagcggcgtgttcgagtcggcgcccgatgctgatcgccttgatcgcctgcaggccccctctgccgccggcggcaagtcggggtcgggagggagaccgtga

SEQ ID NO: 336410 - DNA, 198 bp, Pseudomonas aeruginosa; identical to SEQ ID NO: 324448

SEQ ID NO: 336411 - DNA, 270 bp, Pseudomonas aeruginosa
atgactactcacctgatcaccctagtcatcaagcagccgaacgacgctcaggcacgccaactcatgtaccaggggttgctcgacctgatctcacgctacggcggtgaggtggcgtccaaggccttagaggacgaatcgaccctctgtgagctgctggagcagatgctgcccgatcatgaggtagagcaagccaggaaacaggtgctcgaacttcatgccaagcgccgccgaccgggccgcctgcactcgccggcaagcctgaaggtataa

SEQ ID NO: 336412 - DNA, 162 bp, Pseudomonas aeruginosa
gtgggcctggcagtgaacgtggccagcgaagcgcgcctgacggaaatccgtgcctgggggaaaggacttcagatattgccggcgccggcggacgacctggtcgaccggctcggactgcggcactaccccgccctcatcacatccaccgccatccagcagtag

SEQ ID NO: 336413 - DNA, 339 bp, Pseudomonas aeruginosa
gtgaacactccacatcaatcccttcgccgaacctgcctggccgtcttggcctgcagtgcgctggtcgcacagggagctttcgcagcgagcgcctccgagcaggcgaacctggaggtgatgatccggcagctcaacgccctcgaggacaccgcccgccgcagtgcccagggcgccgatgagcccggacagcgcttctacttcgactactcacgcctggccgctgacctgcagcgcatccgccaaggcctgcaggactacatgacgcccagccgcgcccagccgcgtgacccttccgacttatccgggaattacaccctgcgcggagggccgatgccgtga

SEQ ID NO: 336414 - DNA, 348 bp, Pseudomonas aeruginosa
atgctgccccacggcgaggccaacatgctcgacgtctgggagcgaggtgcgaccagctcgataggcaacagccgtggccagctgctcctcgatgccaggcaaacgctgcggcgcccaatcgatccgcagcaggctgcctccgcgaatgaccaggccgactacacccgcacggccagcaacgagatccacagccagttcaaacgactgcccaatcccgacctggtgatgtatgtgttcccgcacctggccggcagcgatcccgccccggtcccgggctacaccaccgtgttccccttctaccagcgagtccagtacgccatgccgggcgaacgcacggaggactattga

SEQ ID NO: 336415 - DNA, 528 bp, Pseudomonas aeruginosa
atgaacactgaagcccgctttccgagtatccacgcctcggccgcgttcaccgactcggcggtggttcatgccaatcaagttggggtcaatccgatcgaactggacgccctcagccaagtgatctcgcgcctttcgcgggacgagagcacggtcgcacccagttcgatggagcgagagcttcgtgagctggaggaactggggtacatcgaaatctcgaccacccaggccaggactctggtggtcactacgcgcgctccggggcaattgctttcggcttacttctggtcggtatggatcccgcgacacctgttcagctgctcgctgaaagtgagcctggtgccgcacctctgctgcggcactcaggactcccagcacctcaccgccgtgttccgcattgcaggcagcaaggacgccgcgcgtgagttcctgcatcagttggccaacaactatcccgggcatgagccggagttgcccgaactggtggccgttcaggtcggtgatgcactcagcaaggaggccgagtcatga

SEQ ID NO: 336416 - DNA, 582 bp, Pseudomonas aeruginosa
atggcaacgtctgtagttcgcgccctccaactggccgttctgctggtcctggccaacatcgctcaggccgccgtggatccaccgccggcgtacaagcagatcgccctgcccaaaggggttccggccgaggtgctctattcggtcgcgctgaccgagagcaaggtcctgctgcgcggcgaatacgttccctggccctggacattgaacgtcgccgggaaatcctactactacgcgacccgcaccgccgcctgcacagcgctactcgcggcgatcaacctctacggggccaagagcgtcgattccggcctcggccaggtcaacatcggctggaacggacatcgtttctccagcccctgcgactccctggatccgtacaagaacctggacgccacctccgacatcctgatcgagcagcgggacgccctgtatgcatccgccccgggaagaccggtggactggatccaggttgccggccgctaccaccgccccgccggcggcgcgcctgccgccaaataccgtaggacggtatcccgccaccttagccaagtcctcggcgtcaacctactggtgaccaatccatga

SEQ ID NO: 336417 - DNA, 375 bp, Pseudomonas aeruginosa
atgcaaatgctcgacggcctacgcccctatgagcgtcttggcatgcggatccccaaggttcagatcgtcatcaactgcctggaccagaccaatgactcccgggcaattcacgagaatgtgcgtgccatcttcgatgagcatcaggacatttctgtgctcgaaacgactgttccggatgcagtcgtttttcgcaacgcagcatcgcgcgggctaccagcgcaccgcctcgaaacgcggcaaccctccaatcgcacatcagcgcccgcgctggaaatcatccgcaacctggccatcgaggtctttcccgagtggactgaccgcttcctggcgctgacgccggaggcggtagcagcactggtcaagggagggcgctga

SEQ ID NO: 336418 - DNA, 351 bp, Pseudomonas aeruginosa
atggccaagtaccgcatctcccatgatgtccaagcggacatcatcgatatcctgcgcttcacccacaaccgcttcggcgatgccgcgcgccgacgttaccaggcactcattggcgcagcgctggaagcagttgcgacagacccactgcggctcggcagcctcagccgcgaagaagagggagctggcctgcgcagcatccatctcgtctattgctgctcgatgcccaaggtcggcaaggtcatccgccccaggcacttcgtcttctaccgggttgcggcagaccaggtgctcgaggtggttcgcgtgcttcacgactccatggatctggatcaacacctgccccaacgatga

SEQ ID NO: 336419 - DNA, 258 bp, Pseudomonas aeruginosa
ttgcagacgaagtcgcaactggccatcgcggccaatgccagctcgatccacgtgatccagcgggacatgaacagggctatctggaatatcgcgactgccatcgatcacctggccgagttcgcccaaccctcccaggacaccgtgaaggtcatcgagcggctgatgctcttcgtcggcagctcgcctagcccggaaggccagcaactggccgcagaggcaagtgcagtgcttggcatgagcgaggggggcctggcatga

SEQ ID NO: 336420 - DNA, 384 bp, Pseudomonas aeruginosa
atgttcgacaactcgattcccgatggccaaggtggctacaaggatcgcggcggcttctggtgcagcgtcgaatggtggcatcaggatgcccagcgcttcgccgaactgttcacgaaaggtatgcgcgtcaaggtcgaaggcagggccattatggaccgctggccggacaaagagtcaggcgaagaagtccaggcgctgaaggtcgaagcctcacgcatttccatccttccgcatcgcctggccgaggtcaccctgttgccgtctaccaacggccaatcgacccagcatcaacagtctcggaacgtcccgcagcaacctgctcagcaggatgcgcaatcgcagcaggactacgacagcgccttcgacgacgacatccccatgtag

SEQ ID NO: 336421 - DNA, 249 bp, Pseudomonas aeruginosa; identical to SEQ ID NO: 326172

SEQ ID NO: 336422 - DNA, 276 bp, Pseudomonas aeruginosa
gtgtggtcgctgaaatgcttcccggattgggagtggtacaacatcaaggtcttcgagaccgacgatcccaaccacttctgggtcgagtgcgacggccacggcaagatcctcttccccgggtatcccgagggttactacgagaaccacttcctgcattccttcgagctggacgacggcaagatcaagcgcaaccgcgaattcatgaacgtcttccagcaattgcgcgccctgagcattccggtcccgcagatcaaacgcgaaggcattcccacctga

SEQ ID NO: 336423 - DNA, 177 bp, Pseudomonas aeruginosa
atgttcgtgtaccgcgacgaggtctaccaccccaacaccgaggccaagggcatcgccgaaatcatcatcggcaagtatcgcaacggtccgatcggcaccgtccacaccgccttcatcgccaaccagacccgctttgccgacctggcgccggggacctggcaaggagcccatgcatga

SEQ ID NO: 336424 - DNA, 1023 bp, Pseudomonas aeruginosa
gtgctcgacctgctcgacgcgcagccggagttcaccaccccgctgtgggactacctggccggtctggtggacgagcagcgggtcagcgatggcaaggcgatgctcgcccagcacgacaagctgctcgaccaggtggccgcgcgctacggcgtggacaagtacacggtggtggcggtgtggggcgtggaaagcgactacgggcggatcttcggcaagcgtccgctgctgacctcgctgtcgaccctgtcctgctacgggcgccgccagtcgttcttccagggcgagttcctcgccaccctgaagctgttgcaggccggcgacatccgcgacgccggcatcaccggctcctgggccggggccttcggccatacccagttcatgccatcgacctacgcgcggatcgccgtggacttcgacggcgacggtcgccgcgacctggtaggcagcgtgccggatgccctcggttccaccgccaactacctgaagaaggctggctggcgcacgggacagccgtggggctatgaagtgaaggtgccggccgacttccccgccagcctggccgggcgcggcaagcgccagccgctgtcggcctgggtcgcccgtgaggtgaggcgggtcgacggccagccgctgccgggcggcgacgagaaggccgcgatcctcctgccggccggggcccagggcccggccttcctggtctatcgcaactacgatgcgatctattcctacaacgccgcggaaagctacgcgctggccatcgccctgctttccgaccgcctgcgcggcggcagcggcctggtggcgtcctggccgaccgacgacccgggcatcagccggctcgagcgcaagcaattgcagaaggcgttgctggcgcgcggctacgacatcggcgaggccgacgggctgatcggcaccagcacgcgcaaggcgatccaggccgagcagaagcgcctcggcctgaccccggccgacggtcgcgccgggcgcaagatcctcgaggcgctgaagggcgcccagccctga

SEQ ID NO: 336425 - DNA, 492 bp, Pseudomonas aeruginosa; identical to SEQ ID NO: 320059

SEQ ID NO: 336426 - DNA, 696 bp, Pseudomonas aeruginosa
atgcatagcaagagcctgaaatacaggcctgacatagacggactacgcgccatcgcagttattcttgttctcctattccacttcgaccttggcgtcggcggtggatttataggggttgacgtattctttgtaatatccggatatttgataacagaagtaatacggaaaggcgttttacaaggtacattctccttcacatctttctttgcaagacgattgcttaggctgcaccctgcgctaatagtgacggtggctgcttgcctagccattggatatcttctatttgacccggcgtcattttcaaaccttgcaaagtcagggcagtacgcgctattttcagtatcgaacatttatttctggattaatcaggattattttgacccgtcagctcatacgcaacccttattgcatacatggtccctagctgctgaatggcaattttatttggtgtggccattcatcgtatgggcctccctgaaagtatcagagcgattctttgttgccgttctttcattacttacagcaggatccctagtagcctcacagatttggctaagtcacgactcttcggcagcatattttctaatcccttttagggttttcgaactttccgcaggggcgcttgtcgtctattttgagcaccataaaaaaacgaatcgcaagcatctattatattcttcatcggactcgctttga

SEQ ID NO: 336427 - DNA, 1077 bp, Pseudomonas aeruginosa; identical to SEQ ID NO: 323515

SEQ ID NO: 336428 - DNA, 564 bp, Pseudomonas aeruginosa
atgaatcgtcccagcaagatcgccagcttcgatgtcgacgcccagaaaggcttcaccccgctgtgcgcggacgaactgccggtgcccggcggcgacgccatcggcgccgccctcaaccaactggccagccgcgccgcgctgcgcctgggcagcaaggacgcgcacagcccgaaggctgcctgggtagtggaaagcgccgagcagatgctgcggccgctggcctatccggatgccgacctgacctgggtgagccactgcgtaccgggtacgccgggtttcgagctgctcgacgaactgccgcggccgatcgactacgacttcttcgtctggaagggcgtggagccggacctgcatccctacggcgcctgctaccacgatctggcggaacgccgcagcaccggggtcatcgaatacctgaggcagaatggcgtgagccatgtgctggtgggtggcctggcgctggactactgcgtgaagaacaccgccctgcaactgcgccgcgccggtttcgaggtgctgctctacctgcccgcctgccgggccatcgccgaggacaccgcgtag

SEQ ID NO: 336429 - DNA, 1167 bp, Pseudomonas aeruginosa
atggccttctctgaacgcatctcccgcctgaaaagctccttgatccgcgaaatccttgccgcggcgcagcgtccggaggtgatgtcgttcgccggcgggctgccggccgagccgatgctgccgaaggtgcagtgggagcagatgccggcctccatgggccagtacggcatgagcgaaggcgagcctgccctgcgcgaagccatcgccgccgaagcgcgtgccctcggcgtcccctgcgaggcgagccaggtgctgatcgtcagcggttcgcagcagaccctcgacctggccagcaagctgttcatcgatccgggcaccgaggtgctgctcgaggcgccgacctacctcgccgcgctacaggccttccaattgttcggcgccgattgcgtgaccgtgccgctgggtgccgagggccccgacctggttgccctgcggcagcgcctggagcgacacaagccggccttcgcctacctgatcccgactttccagaatccgtccggcgtgcgctacagcgaggaacgccgcgacgcggtggcggcgctgctagacgaattcggcgtgaccctgatcgaagacgaaccctatcgcgaactggtgttcgacgagggccgcgcaaccccgctggtcagccgcctgcgcaagtccagctggatctataccggcacggtgtcgaagaccctgctgccgggcctgcgcgtcggtttcctgatcgccaccccggacctgttcccccacctgctgcggctgaaacagtcggccgacctgcataccaaccgggtagggcagtggcaggcgctgcaatggttcggcagcgaggcctaccgccagcacctggccgaactgcgcgagttctaccgggtccgccgcgacgccatgcaggaggcgctgctggagcacttcggtgagctggccgaatggaatatcccggagggcgggctgttcttctggctgaccctcaggcagccgctggatacccgcaccctgctccagccggcgctggccgccgatgtcgcattcatgcccggcgaacctttcttcgccgagccggagcagaatctcgggcgtctgcggctgaacttcagccacgtcgccccggagcgcctgcacgaaggcctgcggcgcctggccaaggtcgtccgcgacgcccaggccgccgaagcggcctga

SEQ ID NO: 336430 - DNA, 2577 bp, Pseudomonas aeruginosa
atgcgggtctggatcgatccgcagaagctggtgggcttcggcctctccatcgacgacgtgagcaatgccatccgcgggcagaacgtgcaggtgccggccggcgccttcggcagcgcaccgggcagttccgcgcaggagctgacggcgaccctggcggtgaagggcaccctggacgatccgcaggagttcggccaggtagtgctgcgcgccaacgaggacggctcgctggtccggctcgccgatgtcgcgcgcctggaactcggcaaggagagctacaacatttcctcgcgactgaacggcacgcccaccgtgggcggggcgatccagctgtcgcccggggccaacgcgatccagaccgctaccctggtgaaacagcgtctcgccgaactgtcggcgttcttccccgaggacatgcagtacagcgtgccctacgacacctcgcgcttcgtcgacgtggccatcgagaaggtgatccacaccctgatcgaagcgatggtcctggtgttcctggtgatgttcctgttcctgcagaacgtccgctacaccctgatcccgtccatcgtggtgccggtgtgcctgctgggtacgctgatggtgatgtacctgctggggttctcggtgaacatgatgaccatgttcggcatggtcctggcgatcggcatcctggtggacgacgccatcgtggtggtggagaacgtcgagcggatcatggcggaggaggggatttccccggccgaggccacggtcaaggcgatgaagcaggtatccggcgccatcgtcggcatcaccctggtgctctcggcggtgttcctgccgctggctttcatggccggttcggtgggggtgatctaccagcagttctcggtgtcgctggcggtctcgatcttgttctccggcttcctcgccctgaccttcaccccggcgctgtgcgccacgctgctcaagcccattcccgaagggcaccacgagaagcgcggcttcttcggcgccttcaaccgtggcttcgcccgcgtcaccgagcgctattcgctgctcaactcgaagctggtggcgcgcgccggacgcttcatgctggtgtacgccggcctggtggccatgctcggctacttctacctgcgcctgccggaagccttcgtgccggcggaagacctcggctacatggtggtcgacgtgcaactgccgcctggcgcttcgcgcgtgcgcaccgatgccaccggcgaggagctcgagcgcttcctcaagtcccgcgaggcggtggcttcggtgttcctgatatcgggcttcagcttctccggccagggcgacaatgccgcgctggccttcccgaccttcaaggactggtccgagcgaggcgccgagcagtcggccgccgccgagatcgccgcgctgaacgagcatttcgcgctgcccgacgatggcacggtcatggccgtgtcgccgccaccgatcaacggtctgggtaactccggcggcttcgcattgcgcctgatggaccgtagcggggtcggccgcgaagcgctgctgcaggctcgcgatactcttcttggcgagatccagaccaacccgaaattcctttacgcgatgatggaaggactggccgaagcgccgcaactgcgcctgttgatcgaccgggagaaggcccgcgccctgggggtgagcttcgagaccatcagcggcacgctgtccgctgccttcggctcggaggtgatcaacgacttcaccaatgcggggcgccaacagcgggtggtgatccaggccgaacagggcaaccggatgaccccggaaagcgtgctcgagctatacgtgcctaacgctgctggcaacctggtaccgctcagcgccttcgtcagcgtgaaatgggaagagggaccggtgcaattggtgcgctataacggctacccgtcgatccgcatcgtcggtgacgccgcgcccggcttcagtaccggcgaagccatggcggaaatggagcgcctggccgcgcagctgccggccggcatcggctacgagtggaccggcctgtcctatcaggagaaggtctccgccgggcaggccaccagcctgttcgccctcgccatcctggtggtgttcctgttgctggtggcgctctacgagagctggtcgatcccgctgtcggtgatgctgatcgtgccgatcggcgccatcggcgcggtgctcgcggtgatggtcagcggtatgtccaacgacgtgtatttcaaggtcggcctgatcaccatcatcggtctttcggcgaagaacgcgatcctcatcgtcgagttcgccaaggaactctgggagcaggggcatagcctgcgcgacgccgccatcgaggccgcgcgcctgcgcttccggccgatcatcatgacttccatggcgttcatcctcggcgtgatacccctggccctggccagcggtgccggcgcggcgagccagcgtgccatcggcaccggagtgatcggcgggatgctcagcgccaccttcctcggcgtgctgttcgtacctatctgtttcgtctggctgctgtcgctgctgcgcagcaagccggcacccatcgaacaggccgcttcggccggggagtga

SEQ ID NO: 336431 - DNA, 534 bp, Pseudomonas aeruginosa
atgtccgaattcttcatcaagcggccgaacttcgcctgggtggtggccctgttcatctccctggccggcctgctggtcatttccaaattgccggtagcgcagtaccccaatgtcgcgccgccacagatcaccatcaccgccacctatcccggcgcctcggcgaaggtgctggtggactccgtcaccagtgtgctcgaggagtcgctgaacggcgccaagggcctgctctacttcgagtcgaccaacaactccaacggcaccgccgagatcgtcgtcaccttcgagccgggcaccgatccggacctggcccaggtggacgtgcagaaccgcctgaagaaagccgaggcgcgcatgccgcaggcggtgctgacccagggcctgcaggtcgagcagaccagcgccggtttcctgctgatctatgcgctcagctacaaggaaggcgctcagcgcagcgacaccaccgccctcggcgactacgccgcgcgcaatatcaacaacgagctgcggcgcctgccgggcgtcggcaagctgtaa

SEQ ID NO: 336432 - DNA, 813 bp, Pseudomonas aeruginosa
atgcggcctctatttcgatgggcgggtagtaaaaagaagctactgccacaaataaaaaaatatctaccgcctcaatactcacgatattttgaaccgttctgtggctccgcatgtttattttttgatacgttgcctcagaaagctgtattgtcagatatgaacgctgagttaattcatgcttactcgatggtcaagacatcaccttcgaaagtatatgagtttctaagcagtctagaagtcagtcaagacgaatacaagcggattagagaccttgaggaaaaagatttagaggattttcaaagggcaggtcggtttatatacttaaataagctatgctttaatggagtgtatagaacaaaccttcaaggaagatttaatgtgcctatgggtgtaaaaaccggttcgattcctagtttgtcagatcttgaggcatatgccgaatgcctaagagacgtcgatttttttgctgaagattttgaaagtgtggttggtcgggctggtgcagatgattttgtttacttagatccgccgtattctaagccagacagtcgaaagcgaggagagtatggacctaattcatttgattatggggatgtggaccgattagtagcggctcttgtctctgccaatgataggggcgttccttttgtattgtcctattgcgagagcgatactcttgtgagtgcaattccatgtgagtggtctgtagagcatctgtctgttaaacgacatgtagcaggttttcaccagcatagaaaaatggttggcgagctgctaatttcaaatcgtccaactatgtcgggggagctatga

SEQ ID NO: 336433 - DNA, 1242 bp, Pseudomonas aeruginosa
atgagtcagctccgttctatgaaagtcgcagttataagtgatttgcatattggtgatatggcgaagggtaaagatttttcacccgacagaactgaaaatgcctcagttgataattatctccaagagttcaatgattttgttgtcaaggaaggtatcggagcagactatctgctggtttccggtgatataagcaatcgagctaaagagcaggagtttgctctggcttctgagcttatcgagaagatagctcgctccttaaaggttagcagagaaaaaatcctcttctgtccgggcaatcacgatataaattgggctgctctccagtcaggaggagaggaattcgatcatttggtgaaggcgaagtatctgaatttcctcaagggtgggctgttgttttccgacaatcaaggtggggggattggccgctttgatgtatccccttatgttgtcgtgtggcctttcgatgatatcaatatctttgcgttaaatagtgctgtttacgatggcccagatgagaatccacatcgtggagaaattaagaatgagcagatagccgccattgatgagcttctagctaagtatgtcgatcggtccaaggttaatatttttattcttcatcatcatccaaagcaatatcaagacaaaacgtttagggctgctgacaaaagttgcatgattaatgccgatggattactgcatgtgctctcgaaacatgaagttgattttgtggtgcatggtcataaacatgttcctcggtttgatcttgaaataaactccgaagggcaccctatatggattctatgtgctggtagctttagttctagacttgatgataggtattttggaggtgtaggtaatttttttcacctcgtagattttcaagatagatgtggcgacaacggttgggccagagggcatgtaaagtcttgggctcacttgcttgctcataactggattgaaagtggcactatcgattttgatagccataatcaatttggggcttatgaaagtcctaaaaaattgagtaagattttagaagatatcttgggtgaggttttcgagagttctcatatggcaagatggtcggatcttgttgagaaaaacgagtctcttcggtattttcctaatgtgcttctgaataatcagctagaaaaagcatcccaaaaagttggtgttttgatggtttaccaaggtgagcagaaatcttttgataaactgattttggttaaggataagatttga

SEQ ID NO: 336434 - DNA, 1758 bp, Pseudomonas aeruginosa
atgaaaatttccagccaaaaggctcagaatccgtttgagaatgataatgctagaaacagcactccggaagatttgccttatcagtttgtttggactgaagatttcgctcgactaatttccccgaaaaaccatattctaattggtgcgagagggtctggtaaaactgctattgttaaaatgttatctcatgagtatctttctaagctaagtcatgagtcagcccaagagttgataagtaacaaaggttttataggtacttacgtgcctatgagattgtcttgggttggcgggttgaagagtaaaccttggttgagtgaagaggggcgagagaagcattttcagtggcgtttaaatgttgcttgctgctcagcattcctttctactgtcgagagttgtctgaatacatatttcgaagaggaattcgaacgaattataggtgagcgagatatttctcttgaaatatctcaagcgtggttttcaaacgcggaatcaaattcgattcggaaaattagggatagtctcgctgatgttgagtacaggaagttgctcgacgaagaaaagttgagggtaaacgaagggaaagaaggtagcaacattggggttgagtttgatgttggattgtttcagccgctaatgcgttcaattgcaatactgaagagatttatcgaatttccgaggtctgcaatatgggctctgtgtctcgatgaagcagagtacttaagtatggagtatcagcgtatattgaattctcacatgagaacgtatgctgatggtttggtttttaaaatcacaacgatgccgtacaagcattatacgctagatacaaatactgccgtgcctctcgttagaggggatgattttaagtatatatatcttgataatgttcagcttccgaaaaaaggtgaggctgagtatgaggctttgaagaagttttgtactgatctgtttgagcgacgtttgaaaggcagtcgctgggatcaagaaggtgtcagtttagaagagttacttggtaattcgtatgtgctttccgataagtctattgataggtcggagattgtagagctcatagaaaaatatggaaatgagtccactgttgagcgtgctaggtcactatcctctagctctaaatttgatgatgaaattggtaggaagttaaaaggagcgttattgcttcgtgaagcagtatctaagttaaaaggcaatgctagctcgcaaatatatgctggcgttgaaatggttattcgatgctcggatggtaatccgcgaagatttattagtattcttaattcgctctatttggcgagctccgatagtgaaggggttaagcaggtaccctattcaattcaagatcggcttctacgccatttctcgaatagcgaatatcgaagaattataagtgagccggggcagggtgatggcatacataagactctttccataattggaaagtactttaaggattgtttgcatcatcgccctctgtctactgatttgattttgtcatttagatataatgttgatgatccagaagtttggtctgtggttagtgaggcagtaggtttaggcttgattagaccactcatagaaaaaaatcagcttgatgaactgcctgtcaaaagtggtacttttagactgtcatatatgctgagtccccactttttgctgctgcctaggcgaggtaagtctgtctcgcttagctcaatacttaatggtgactctgcgagtggcttacctacccagcaaatggagttgatttga

SEQ ID NO: 336435 - DNA, 945 bp, Pseudomonas aeruginosa
atgactcagttgtatgttgaggacatttcttttggtgatgtatgtgccagtgcatatgacgtttcgattttttgctgcggctatgaagaacgttgtacatatttagcatctgtcatagagcggaccctgatgggcgatatgcttgtttttgatttttctgatgagaagctagatgttagaggtgtccgagagaggaatgaaaatttctttcaaaaggtgtcggggagactgattgaagtttcctatggtcaagctcacgtcgtcgtcgaaaatctcaggcagtcaattgaacagctgatgtctgtagggaaagaatctgcaactatcttagttgactattcttcaatgccgaagttgtggacggcggagattctgaatttctttaaaaattacagtgcggagatagagctggtttttgactttatttattctgtgggcgaacatatttacagtgatagaccaaggcagcttagagatccaatagtacttccagggtgtgaagccgtagctacttataataagaaaacagtggcgatatttggacttgggtttgattcaggagctcctgtatgcatccatcaaatgattgagccagatgtgacgttcgcgttggtcgctcgtccgggggctttggaggagtatgctaaacgaacctcttcaataaattcagattttattgatcagtctgtcaaaagcgtgatctattcgccgttggctagtgttaagcaaacttacgacagtatgcgggaagttttctttccttataagaattctgctactacagtacttgtgccgtttggccctaagccccatgccctagcggcaatacttgcggcgatgaattaccaaggtgtaacttgtttgcatgctagtacaggtccgatacttcagtcgattactgctactacggatttggtgatgagtcggatatttagggtggtatga

SEQ ID NO: 336436 - DNA, 312 bp, Pseudomonas aeruginosa
atggaaaccttcaaaaaaatgctcagcctctgggaaagcaaatcgcaggaagccgctgaccgagtggagtacaccctgagcctcaaaaagcatgatctggtaaaaattaaggctttcgcagaggcatatggacttgatgaagccactatcactgagggtcttttgcagtctgctataaaggaagcagagcgagctattccctatgtgaagggatcacaggtcataaggatcgaagagggtgaagaggtgtatgcagatgttggtaagacacctgcgtttgttgctgctgaaaaagtgttatcaaaaaagtag

SEQ ID NO: 336437 - DNA, 1509 bp, Pseudomonas aeruginosa
atgaagaagggagcgatgcttttcgccgtactctgggcggtactcggcctgggcctgctggtcggtttgccggtggccatccatttcattctcggccagtacgacgaggccgggttcagcgggccgcaactggttttcgaggaacagggccattcctacctggcgttcaccctcgacgattatcgcgccaacgaagtggacaacggcgtggtgcatggcagcagccgcagctatgcccaggtggtcgatctcgaggacggcagcctgcgctggagcgcgcgcctggatgccgacaacgagcgcggcgacgactggggctccggcgaactgctgggccagtcgtcgcgctacctgttcttcctgcgcaacgaactctacgtactcgaccggcgcgacgccgccccggcgctggcgttcgacgaactggagcggcgcactggcggcctgccgttgaagtcggcgccctgggggaaggacgcctatcgctacgacgaaggccggggcggattgctgatgctcgccctggacggtcgcgtctggttcctcgacggcgacagcctggccctgcgcgaagccccggaagtcgatgccgcgcggtatttccagggcgacccgccgccgccggcgagtgccgggatcgcttggcaggcgccgggcctgacgcgcctgctcgacggacgcctgctgatcctcgccagcgatcacgaggcccgcgcgctggagcgtggcgaggcgctgccggcagcgaaccaacgggcgcgacgccagcgcctgtcactgggcaccctggattggcggtcgccggcagagaaccgactgcgtccgctgctcgacgcggcctttctgcaggctggcctgctgcccgatccagccgctgccgaagagccgcagcggctgctcgagcgaccgtccgagcggcagcgccagcgtccgtcgctgccgcccgagccgcagccgccggaagagttcgacgagcgcgtggagcgttttcccagtacccgtgcgttccttgcggcgcgcgacgcctaccgccaggaacggcgacgctggattgctgcgcacgatgcctggcgggaacgggtcgccgacctggaggcggcggcggatgccgagtaccgtcgccggcgcgacgagcagacgcgcgaggaggcgttgtaccgtcgctatgcctcggcgctgccgggcggcgattccaggttggcgcgccgtccctggcgagtcgacggcaactggctggtgctgcaccggcgcagcctggccgagcgtagcgaactgctgctcagctcggtgtctgccgacggcagcttgctctggaccctggggctgcccatcgagcgtcccgaacggctgttccgcctggatgcccgcaacctgcttctcagcggccgtggagaggacggcgggcggttggtgcgggtcgatctgcgccggggcagcggcatcgtccatcgcctcgggcgcggcggcgcgccattgcagcgggtcgagtggcccgaaggccaaccgtga

SEQ ID NO: 336438 - DNA, 1530 bp, Pseudomonas aeruginosa
atgacaagaaccctcggcagcatcgccctctccctcctcctcgccgcgccggccggcgccgccgactggaccggcaaggtcctgcgcctgggcgtcgacccgacctacccgccgctcgaatacaagcagccggacggccgcctggcaggcttcggcatcgagatcggcgaagccctctgcgcggagctgcaagcccgctgcgaatgggtcgaaagcaactgggacggcatcatcccggcgctgctgtcgcgcaagatcgacgccatcgtctcgtcgatgaccatcacgccgaaacgcgcacagcacatcgccttcaccgaccgcgtctccaacgcgccgagccgcctggtggtacgccgcggctcggcgctcctgcccgacgccgagagcctgcgcggcaagcgcgtgggggtcggccagggctccaaccaggaggcctacgccaaggccgaatgggccgccaagggggtgcgggtcgtctcctaccagaaccaggaccaggtctacgccgacctcgtcatgggccgcctcgacgcctcgctgcaaggcgcggtgcaggccagctacggcttcctcgacaagccggtcggcaaggatttcgaactggccggagcggtgctggacgaccctcgctacttcggggtcggcgacggcatcggcctgcgcaaggaagacgtggcgctgcgcgaggacctgaacaaggcgctggcgacgatccgcgccaacgggaccacgcgcgaatcaacgcccgctacttcgatttcgacctctacggcgcgccctgaacggcgtccggccgcttttcacctcgaccgacaacaacaagcaatggagagtgaaatgttcctcgacggcttcggcccgcagatactcgccggcaccctggtgaccctgaaactggcgctgggctccctgctcggcgccgtgctcatcggcctcctcggcgccagcgccaagctcgccgccaaccgcccgctgcgcgccctggccagcggctatacgacgctgatccgcagcgtccccgacctggtcatcatgctgttgctgttcttcagcctgcagatcctcctcaaccgcgtcaccgacgccctcggcatcgcccaggtcgacatcgacccgttcgccgccggctgcgtcaccctggcgttcatctatggcgcctacttcacggaaaccttccgcggcgccttccaggcggtaccggccggccaggtcgaagccgcgcaagcctacggcatggggcgctggcgagtgttccgccgggtactcctgccgcagatgctgcgctacgccctgccgggcatcggcaacaactggcaggtgctggtcaagtccaccgcgctggtctcgatcatcggtctcggcgacctggtcaaggccacccaggacgccggcaagggcaccctgcagttcttccacttcaccctggtctgcgggctgatctacctggccatcaccgcaatctccaacgccgcgctgctgtggctggagcggcgcagctcgctgggcgtcaggaggccgctgccatga

SEQ ID NO: 336439 - DNA, 1170 bp, Pseudomonas aeruginosa
atgaccgagcctgccgtcctgcccgccattgcggcgctgcgggaagagatggttaccttgcgccgccacatccatgcccacccggagctgggtttcgaggaacggcgaaccgccgcgctggtcgccgaatgcctggaggcctggggctaccaggtcagccgtggggtgggtcgcaccggcgtggtcggcaccctgtgccgcggcgagggccccgcgctgggcctgcgcgccgacatggacgcgctgccgatccaggaagccaccggcctgccctacgccagccaggtggacggcgtgatgcacgcctgcggccacgacggccacaccgcgatgctcctcgccgcggccaggcacctggtcgagtcgccgcactggcgcggcaccctgcaactgatcttccagcctgccgaagagggcctcggcggtgcccgcgcgatgctcgacgacgggctgctggagcgcttcccctgcgacgccatcttcgccatgcacaacgtcccgggataccccgtcggccacctcggcttccatcccggccccttcatggcctcggccgacaccgtggtcatccgcgtgatcggcagcggcggccacggcgcggtgccgcagcgcaccgtcgacccggtggtggtctgctccgccatcgtgctggccttgcagagcatcgtctcgcgcaacgtcgacccgcaggacaccgcgatcgtcagcgtcggcgcaatccatgccgggacggtctccaacgtgatcccggccagcgccgaaatgatcctcagcgtccgggccctgaccgcggaaacccgtgccctgctggagcgccgcatcggcgaactggcccgcggccaggccgccagcttcggcgcgcgggcggaggtcgactaccggcattgccatccggtgctggtcaaccatcccgggcagaccgcgttcgcccgcgaggtggcccgcgactggctgggcgaggaatgcctgatcgacggactgcggccgttcaccgccagcgaggatttcgccttcatcctcgaacgctgtcccggcagctacctggtgatcggcaacggccagggcgagagcggctgccagttgcacaaccccggctacgacttcaacgacgactgcctggccgtcggcgccagctactgggtgcgactggccgagcgcttcctggcctga

SEQ ID NO: 336440 - DNA, 657 bp, Pseudomonas aeruginosa
gtggtggtcaagctggccgtccggcatccgcgcaaggaagccctggtgctgttctcccgcgagatcgcccaggccgccaccgggatggcgcccggcctgaccggcatcgtcggcggccggccgacggtgtatccggtgatccgcctgttctctttcctgatcgacaaggcgcaatgcgcgttgagcgtagagatcgacggccagcgccatccgctggaactgccggtcctcgaagccttcgacccggcacgattggccgaggcgcgccagccgccacgcccggagcagcccgccagcgccagcgtgccgctggtgaagctagcggtggcgcgctccggcgacaaaggcaaccacagcaacatcggggtcatggcgcggcgcccggagtacctgccgtggatcgccgaggcgctggaggaaggcgccgtggtggactggatgcagcatgtgctcgacccgcagaccggccgggtcggccgctggtacctgccgggcagccacagcctgaacttcctgctggagaacgccctcggcggcggcggcgtcgccagcctgcgcatcgacccgcagggcaaggccttcgcccagcagttgctggagttcccggtggcggtgccgcaggcgctcgccgacgcgctggaaacgcagggcagataa

SEQ ID NO: 336441 - DNA, 1035 bp, Pseudomonas aeruginosa
atgatcagcctggctgacccgctcggccttcttcagcgcatcgatgccggcgatcaggcaactggcggtgcagcggaaaccgtccggataggtggcgctgaccttgtaccggtcggtgggcggcaggccgcgcgcgccttccaccgcgacccggtcgggtccgacctggcgcaggcgcacctcggtgaagtcgcagaccacgtcgggcagcaggtaggcgcgtgggtcgccgatctcgtagagcatctgttcgccgacgctcagttcgctgaccaggccaccggtgccgggcgccttggtcaccacgaagcgcccgtcggcctcgacctcgacgatggggaaaccgatgtgctcatagtccggcacctgctcccagtcggtgaaattgccgccggtgcattgcgcgccgcattcgacgatgtgcccggcgagggctgcctgggccagtcggtcgtagtcgtcccaggcccagccgaactcgtgcaccagggcggcgctgaccaccgcgctgtcgaccacccggccggtgatcacgatatccgcgcccaggcgcagggcctcgacgatgcccggcgcgccgaggtaggcgttgagcgagacgcacatcggcgggaaaggcgcgtcgctgaacatctcgcggatgccggccttggccagttcggcctggcgcgcttgcaggttgtcgccatggagcacggcgatcttcagctgcaccccggccttctcgcaggccgcggcgagggcggcggcacaggcctgcggattgatcccgccagcgttgctgatgacgcggatcttcttctcggcgatctcgcccagcagtggtgcgaggacctcgacgaagtcggtggcgtagccggcgtccggctgtttcaggcgggcgccggccatgatcgacatggtgatctcggccaggtagtcgaacaccaggtagtccagcggcgcgccgcgcaccagctgcgcggccgcggtgcaggtgtcgccccagaaggccgaggcgcagccgatgcgtacggtcttttgcattgttcttga

SEQ ID NO: 336442 - DNA, 663 bp, Pseudomonas aeruginosa
atggagataagccaatccctatttgggctgctgctgaagtctgggactttggtgctctttcgaagttttatagtatgcttagtggttcaaatcaagatttgtagccgggtcggtatatctgagcggaatgttatcgataattggttgataaatatgaacgtattgagaaatcgatgcgctcatcactcgagagtgttcaaccgccccaatccccgaggtttgaaaattcctaaaaagggatattttaacgatcttcagcttgatgctcatgctcgagaaaaactattcgggcttattgcggtttgttggtatcttctcaagaaaattgggccgggttcggattggattcgtcgtgttgccgatcttattgactcaatcccgagtgttccagggtttggtctttcgtcaatggggatacgaactgaatccttcccaagaaggttgttccccgaagctgtgatcgtcgttaagatggttgctccggtagtgaaagacttttcgacacttagttcagaagctctgggcttgactagggaggctgttaaatatcttgagtgtaatttggttgaagcgggtgctattgatgaggctaagggccttattgatgctttgttaggttgtgcgcaagatgttgaagatattttagaaggtggcacgacttaa

SEQ ID NO: 336443 - DNA, 783 bp, Pseudomonas aeruginosa
atggacatgtacgggatcacaccctatctggaacgagctaagacgctcaaagacagcggcgaggagcacgggctcagatacgcggcactagaacttcgcttctgcatggagatgattgcttatcggcaacttcagcagtacggcgatgtttttccgggctctatggttggcttatggaagccagatcaaatcctgaagctattagcatcctttgatccggttgccggcacagggggcgagctctcttttgctcaccttactgaggatggcagcgttcctacagaatggatgccgcttggaaaaagcagaaccattccctggaggaagttcaggaaactgtacaataagcttggctcatatctgcatgcccccgcgcccaagcaggcaggtggagaagcaaaatctctgtcgggagaatccttccgcgagatcatcgtagcgctggaggaagttatgagtgctacgctgatacttgccgtaaaagcagtaatctcagcaaagtgcgattgcggtacgtttgtgtacattggtcaaagcgagtttgattataatgagctggttgtttgcactaataccaaatgcaattcgatctacgctaaggtactgaatgaacaaggagagcaggtactagatcgagtcaaggttctagcattgacttgtcaaggctgcaatgcaagggtgccatttccccccgagcatgtctgggcgccgatacgctgcccctgttgctcacgtattcatcgcttgaaccttgccttcacgaccgttcagccggacacgtga

SEQ ID NO: 336444 - DNA, 1386 bp, Pseudomonas aeruginosa
atgccacaccgccagcgcgccagtgacaaagacctctggagccgtaccctgagcctggttttcctcggattcctctgttacgccttcccctggtcggtattcgccgcccccttgccgatccccacggacgacacgccggcgctgcgcatccagggttccaacaccatcggcgcgaagctcctgccggccctggtcgagggcctgatggaagaggaaggcctggaggatatccgccgtacccccggagaacgggaaaacgaactccatctgctcggcaagagccgcgacggccgcctggtgagggtggagctatccgcccacggttcgagcaccggcttcaccgccctcctcgaacgccacgccgaactcgccgcggcctcgcgtcccgtcaaggacagcgaagttcgcgccctggccggcttcggcgacctgcgcagcccatatgccgagcaggtgatcgccatcgacggactggcgatcatcctgcatccggacaacccgctggcctcgctggacaccgcgcaactggcggcggtgttcgccggcgaggtgcgtacctgggaagaactgggcggcaagggcggcgccatccgcctgtacgctcgcgacgagcagtccggcacctacgacaccttcaaggaactggtgctggccagtcacggcaaaagcctggccagcgacgcccgccgcttcgaatccaacgatcggctggcggccgcggtgagcgccgatccgcacgccatcggcttcgtcggcatcgcgtcggtgggccgggcccgcgccttggccatcgccgacggcgaatcgctgccgatggcgccccaggaaagcctgatcgccaccgaggactatccgctgtcgcgccgcctgttcctctacctgaagcccggcgagaagaacccctgggcccaggccctggtacgtttcgcccagggcccgcgcggccaggcgatcgtcacccgcagcggcttcgtcgcgcagaagatccaggcggtgcagatcgcaccgcgcccgcagatgcccgccgaataccgcaagctcgcggaacaggcgcggcgcctgacggtgaacttccgcttccaggaaggcagcgcgctgctcgacaacaaggcactgctcgacgtacagcgtttgctggactacctgcggcaaaatcggaagttgcaggagcgcaccgtgctggtgggcttcggcgatcccaagtccgacgccgagcgctcggtcctgctttcgcgcctgcgcgccatggccgtgcgccgcgaactggcccgcggcggcgtgagtttccgcgagatcgccggcttcggcgacgagttgccggtcgccagcaacgaccaggaactgggccgacagaagaaccggcgggtggaagtctgggtctactga

SEQ ID NO: 336445 - DNA, 894 bp, Pseudomonas aeruginosa
atgttcgactgggaaaacttccgacacttcctggcggtcgctcgtaccggcacgttgtcgggtgcggcccggtccctgcatgtggatcacgccaccgtgagccgccgcttggcggcgctggaaacggatctgcaggttccgctggtcgagcgcctgcctcgctcctgccgactcacgcccatgggcatacagatctatgagcaagccaaggccatggaaacttcggcttttgccgtggaacgactggcgcatgccagccaggagccactcgctggaaaagtgacgctcagtgcgccgccggtgctagtgacgcacctgctggcgggccggctcgtggatttccgcgcagagtatcccggcatccagctgtctgtttcggcacaggcgcagcaggtttcgctcagtcggcgcgaggcggacgtcgctctgcggctggtgcgccccgaggaagcgagcagcgtggtccgcaagctcgggcaaatgccgtttgccttgtatgccgctccggagtacgtggcgatgcggccccctgaagactggacctttatcgcctatgacgcgcagttcgctgatatgccccagcaacagtggctgctggggactgccggcaaccgaaccgttggctgcgaactaagcgatatcagcagccacctggctgcggcgcgtgccggagccggtgttgctggcctgccatgttttctgggcgacgaagaccgcggcttaatacgtctggaacataaaggcccaacgttctcgcgcgacatatggctggtcgtgcaccgcgatctgcgccgttctgcgccagtccgtgctgtgatggactttgcggtcaaagctgtcacggtgaaatcgggtcttcgcttggaaacactggctgttgtgccattgccatga

SEQ ID NO: 336446 - DNA, 1404 bp, Pseudomonas aeruginosa
atgcgaatcatctggttttattgggtgtttctcgtgcctccctcatttccttctgcacgcggtacgctgctggcggccgcgctgggcttcgtggtcgtcctgctagacgtcagcgtcgtcaatgtcgccctggatgccttgcgccaggagttcgccaccgacgtggccggcctgcaatgggtcatcaatgcctatacgctggtctttgcggcattgctgctgaccagcggcgcgctcggtgatcgctttggtgcacggcgcgtctttcttctgggcttcgtggtgttcacgtgcacatcggctgcgtgcggcttgagcggcagcctgccgatcctgattgccgccagactgatccagggactgggggctgcactgctggtgccgaattcactggccatgctgcagcatgcattcgcggatcgtgagcagcgcagccgtgcagtgggctggtggggcgcgtttggcggtatgtcgctggcagcaggcccggtgttaggtggaatactggtaacgcacctgggctggcgcagcattttcctgattaaccttcccattgggttgatcggaatctacctgacgctgtgccgtgtggcgcctcatgagggcagtcatcggcggagcctcgactggggcggccagggagcggcaatcctggcgctggccgcgttgaccatggcattaaccgaggccgcaccgcttggttgggagcatggcttggttcaaggtggtttcctgttagctattgccgcaaccctagttttcatttggatcgaagcacgtagccattcgccgatgctgccattggaactgttccgcattccgacgtttaccgttgcctccgtctcaggcgtggtggtgaactttgcctattacgggttgatcttcgtattcagcctgttcttccagattcagcagcacctttcaccgcagttgacgggattggcctttcttcctatgaccgtcgtgctgatggcagtcaatgtgctggctgggcgactgatcacgcgcatgggtgctcgcctgttgatggtgtttggattgatgctggcggctttcgggtacctgctactgatgccggtcagcgtggatggcagctattggttcctgaccgttccgatgctgttggcggccagcggcactgcgctgatggtgccgaccatgaccaacgcgacactttcgtcggtggatgcatcacgggctggcgtcgcatcgggtgtactcaactcagcacgccagattggcggcatgcttggtgtggctgtctttggctatctggtccgggacacagcgccagaggcattcatgcgcggtatgcatatgtcgatcggcatttccgtggcacttcttctgttcggcagtgtcttgtgctggctggggattcagccggatcgtgccaaggcatga

SEQ ID NO: 336447 - DNA, 393 bp, Pseudomonas aeruginosa
atggaatttcgccacctccgttgctttcttgccgtagccgaggaactccatttcgcccgtgcggcggagaagctgcacatcgaacagtcaccactgtcgcgggcgatcaaagaactggaagaagacctgagcgtgcggttgttcatccgcaactcgcgcagcacgcgcctgtcgcgtgccggacaggttttcaaggagcatgtgccgcgcatcttcactgccttgcagcaggcccgcgaaggagccaaggcggttgccgccggttatgacggccaactgcgcattgccctgtccgacggcatcacgccgccgcgcctgagcgcctttctggcgaagtgccgggacgatgatccggaagtcgggattcatctggcagaaataccgctgtcgtag

SEQ ID NO: 336448 - DNA, 3576 bp, Pseudomonas aeruginosa
gtgccgcgccagcacacagggtttcaggtgaaaaagcccgacatgccggcgagcgcaatccgcgatgagatgcgtcctggcggcgtactacggccggtcatcgccgaactcgccgctcgctcgggcgcttacatcatcgtcagcgcgcaaggatcggtcgcagacaagccgctgagcgatcgtcgcgatgcgatccgggcgcagctcgactatctgcctgaggccgggcagttgcatagcgacttctacgatcgcgaccggctggcgacatgggtcaatcactatcctggaattgccgcctgggtccgcacgcggctcggcatcggtatgtcgggctggagcagcatcggcgattggggcggcgtcggcgtgagcgaggagacgccctatctcttcaacgacaaggcctgcctaaccgatgagagaacgagcgaccgcgagcaactcaccatcggcgagggtatcgcccggcttcgcgtctctctgaccaaagctcgccaatgtatccggttgatcggcttgtccgggctcggaaagactcgtctcgtgcaggcactgttcgaggatggtgtaggcgaggtgccgctcgatccggggctcgccgtctataccgactattcggcggagactgacccgaccgcacgggacatggcgcgccagttggtgctcgcacggcaacgcgcgatcctgattgtcgacaactgcaacccggctacgcacagcgaactggcccgcatctgttcggaagcggggagccaagtcagtctcttaactgtcgaatatgatgttcgcgacgacgagcccgagcgtaccgaggtctttcgcctgcaatcagcatcgcccgaaatggtggagcggtggctggaaaagaccttccccaatgtgacgcaggtcgaccggcgaaccatatcggagttcagcgacggcaacttccgcgtggcgcgcgctctcgccgacacgctcggaaaaggcgaaaccctgggaaagctcaagagccgcgacctcttcgagcggatttttcatcagcgcaacgagcctgaccgggatctgttttccgctgccgaagaccttgccctgctctattcgatcgatggcgaggacacttcggaaggcggtgaacttgcgcgagtcgccgctattcgcggtgttccagtggcggcgatatatgcggcgctgaacgctcttcgacagcgggggatcgcgcagctgcggggacggtggcgcgctatcctgccgcatgcgatcgccaacccgctcgcagggttcgcccttgaacgcatatcgccagccgatttcgatcgcttctgcgcgtcgcttacaacgcggatgcagaagtccctttcgcgccgcctcggctatctgcatgacagcgccgaggcgcgggccgcggtcgagcgctggctccgtgccgacgggccactcggcgatcttgcggcattgggagaagacggccttcagatcatcaccaacatcgccccggtcgcgcccgatgccgtactcgcgaggatcgagcgagatattgccggcccaaatggcggcgagatacttgatccgcagtcgagcaaccggtggcaatggatacggttgatcaagctcctcgcttacgatccgccgctgtttgaccgcgcggcaactttgcttgcgcggttcctttccgctgaatcgtccgaccaccacaacaactcggcatcggacatgttcgccgagctgtttcacctgcacctgtccggcaccaaagctttgccagatcagcggcgagcgctcgttcgccggttcgcgcaatcgggtgatccggctttggtgcgctgcgccggcgtcgccctcgatgcgctgctgaaggcgcaccatttcagctcatccagcgacttcgacttcggcgcccggtcacgggactatggctggcacccgccgacctatggtgacatctgggcctggtacaacggcgcggtcgacctggcggtcgagctctcgccaatgatcgaaaacgcaagggagcaccttgcccacagcgtaagagcgctgtggcacttcggcgcctgccacgatgcgctcgaacgggcagcgacccacttttcttccgagcgaccttggatcgaggggtggatcggcttccgcacagcgctgcgcttcgagggcaacgagatgccggatgaggtgcgcacccgtctcgtaacgctcatcgaacgcctgaaacccaccgatcttctccatcaggcccgtgcggtcgtacttgggcgcagcagtttcggttgggatgtggctgatggcgatgcggatgacggcgacatcatgaaaccctatgagcgcgcctcccagttggcgaaagagatcggcaccgcactcgcgcacgacccggagacgcgcgctgccttcatcgccgaactgctagtcgaacaaaatccgcagcgcgcctatgaatgcggcattggcctgtcggatggtgccgccgatcttgatgagatgtggagggaactgctggacctcttctccgccgccgaggcggacagccggaatgcgacggtactgggcgggtttatccatggcgcgcacgccaaggattcggcctttgccaacgctacgctagaggatgtgatccagaatcccgatctcgccgcgagtctgccgtatcttcaggcgcgtgttgctatcgatgcccaaggcatagcgcggcttcggcgtgcgattgaacgtggcgtcctttcggcgcggaattttcaaagcatcgccaatggcagtgtcggggagtctccagccgacgcgcttggcccgctgctcaccgacatcggcaatctggccgacggcgtcgagatcgcgctcgatatattgcacatgcacttctaccgcgatcaggaagaaggccgccagcgtgcgccatccttgatcgctgttggccgtgagctgctactgcgagctgacttcggaaagaagcagtcgttgcacgattttgggctgcataccgttattcgggtctgttgcgccggacccgatggagaggcgacattgcgggaaatctgcgctcgcgtccgggccggactggagaccgtctatctctcgtcctacgatctcggttatgtcctcaaggcgatcttcgagacccatcccctgctcgcactcgacgaactcctgctccccgaactcatgccgagaaatcggaggctgtttgaggggggcttcgggtctggcacgccggtggaggatgtcggcgccgagacccttgttcagtgggcgaatatcgatccggatcggcgctatccgctgctcggggaaagcatccccatgttcaagcggcagcagggcgaagaggagaatggtgtctccacgctcttcctggaaatattgggccacgcgccagacaagcgggcgttcctcggtgatatctggtcgcggctgcatccgcgcagctggagcggctcgctcgccgatatcctggttcggcgtcgcgcggctatcacaacgctgggtgacaatgttggaggcgaggttcggcaatgggtcactgacatgctgcccggactcgaacgctggatcgaaaatgagagcaagcgcgatcgggaaggcgagcggagtttcgaatag

SEQ ID NO: 336449 - DNA, 303 bp, Pseudomonas aeruginosa
atgctggaactgtgtgatgcgccagccgatgctgcccttgtctatgaggtcgacgctctcatgcagggcatggcgaacctgcgtcccaaacgggtggaaatgctgttgcgccattgcgtcagcatcaaggccaagcgcttgttcctggcgttggcggagcgacatgcccatgcctggttgccccatatttccctcgaaggtatcgatcttggacggggcaaacgcgtcctagtgcctggtggtcgcctgcacccgagctatcacatcaccttaccggcggatctggatgaacaactgggatag

SEQ ID NO: 336450 - DNA, 945 bp, Pseudomonas aeruginosa
atgaacaactgggatagacgctatacggaccgggttcagctactggtggagatcctgccgctgctggcccaggagcctggctttgcgctgaagggcgggacagccatcaatctcttcgagcatgacctgccacgcctgtctgtcgacatcgacctgacctggctaccggtgcatgactatgaccatgatgtgcaacagatcgaggcagcccttgggcggctggccgagtccctgagggttgggtcactccgcctgcaggtgcagacctcggcggctgaaggcacgcgggcggtgactaggctgattgcaagccgaggccgtgcccgcgtgcagatcgagaccaccccggtcatgcggggcgtcgtgcacccggtccggcagatgcaggtgagttcgcgggtggaggaagtgttcggtttcgcctctgcacaagtgctggatttcgcggacctttacgctggcaagatggcagcagcgctgtcccggcagcacccgcgagacctgttcgacctgggggcaatgctggtggatgagagggccgacgagcgcctgtggcggactttcctggtctacctgacctgcagccccaagccagcttgggagatattggagccgggggagccacaaggcttcgaggagaccttccgcgcccatttcgatgggatgaccgcagaaccgacgagcgttggtgaattgatggaaaaccgggcgcagttgctgtctcgtatggcggtttggcttgatgagccttcgcgggcattcctggaatccgtggaaaatgaaagtccggatttcgggcttatcggattgcctcaggcgtcaggtctacctggtgtccggagaaaactgcagaacctggggcagcgctctgcagtgaagcgcaatgccgatcgccagcagctcggcgaggccttggagcggattgttgccctgcgagctggatag

SEQ ID NO: 336451 - DNA, 351 bp, Pseudomonas aeruginosa
atgagccgacctctcgtcaccgaggcggagcgcgagctgctgctggcaaacggcagggccagtgctgcgggccgggagatcgacccgctgcccgtggtgcgcttgttcaccccggacgcccatgcgacctggcttctggccgagcttgatccttcgggcgaggactcggcctatggcttgtgcgacgtgggcatcggcatgcccgcgctgggcaccgtgaggttgtcggagctggcgtcgatcgtcgggccgctcaagcgtccgatcatgcgcgatctgtacttccgggcgacgcgcacgttgtcggagtacgcgcggctcgcgcagctcaacggctcgatcacggactga

SEQ ID NO: 336452 - DNA, 798 bp, Pseudomonas aeruginosa
atgcctgaccgcgacgccgagcagtggtatcccaccgcggcctatctctacgtcttgcacctagatgacttagccctggcctgggaatatctgcgccggaatccggattaccagagcgactggcggggccgcgtgcgccggcctgaggcggcgcaccgctgggggctgcgtctgctggaagacccaggcttggatgcgcgcgacgcgcatccgatctggttccccgaccatccggagttgatccagctctatcccgatgtcgatcccgtgcccgatgctatggccttcaatctctggcgaatccctggcagaaaatgcctggttcatgatggccggcgcctgctgctgacggctcgctggccaggttgccgtctacggctagccattgcgccgggcctggaggagggtatggcctacgtccatgccgtccgggcctgtgccagatcttgtgcacgctaccgcgcgctcgcggccgaattggacaatctggcagttgccccagacgcgcaacccctggcggcggcccgctgccggccgagctctgccgccttgctggaactgcataccctccagtcgctcgacgccaccctggcgggggcgtcgctgcgcgaagtggcccagggactgtttggtgcggatgcggtagcaagtggctggcatgctgacgcggggctgcgctcgaaggtgcggcgtctggtgcgacgcggccggacgctgatgctcggtgggtatcggcgcctggcacaaatcgacgggcgcggggagggccgctccggtcggcccacaaaacgaccctga

SEQ ID NO: 336453 - DNA, 252 bp, Pseudomonas aeruginosa
atgagtcgcgagcggagccggcgcgcggccatcggcgcgcgcccgccagcgaaaccgcatgccgaggcttgggttcgccagggggatgccagcgatctgcggaaaggcgacctatacaccgcgcgcctgaccctcgacgtcacgccggccatgcgcgcccgcatcaaggtttcggcgtttacccagggggtgacggttgccgatttgctgcgcggacttcttgagcgcgagttcccggagaacaccccatga

SEQ ID NO: 336454 - DNA, 921 bp, Pseudomonas aeruginosa
atgggccaggacgacaccccagacctcgccgcgccgcaagctggcaaggtggcgcccgagacggtggcgctacgcgcccagccgcgcccggtcacacgcttgaaccggcgcacccttgcagcgcttgccggtggtctttctgccgctgtattgggtgcaaccatctggtccttgcagccgccaaagccccggggagggaacgatccagccgagctatataatgtcgaccgcgtttcccgttccgaagggctagaccgactgccttcggactactccaagctgccgccgcctccgcccgaactggggccgccgctgccgggtgaccttggcccggccatcgtgcagtcacagcggtcctcgacgcccagttacacgccaccgggccacgatcccgccgaggcagaacgcctggcgcggctgaaggaggccgaggaggcggccgcctcctgggtgttcttccgcacgagcagcctgcgcccagccgtggctgcggctgcacagcctgcgtcggcggaacccaccttggcaggcttcgatccgctggctgccggccccgcatcgacggcggcgcaacccctcgatccgacagccgtgcagaatcggcaggagcagaaggaggcattcctgcaagctggcactacggaaacccgcaattccgggaacctgcagctaccggcgtcgccgtaccaagtcatggccggcacggtgatcgctggcgcgctggtgacgggcatcaagtcggatcttccgggtgacgtgatcggcgcggtgacggagccggtctacgacacggcgaccggcaagcacctgctgatcccgcagggctcgcgcatcctcggccgctacaacagccaagtcagctacgggcagagccgcgtgcaggtggtgtggaatcgcatcatcctgccggacacatcctag

SEQ ID NO: 336455 - DNA, 1986 bp, Pseudomonas aeruginosa
atggccaagttaaccattaatcagatctctatcgaaaatcttggcccgtttcgtgagcagcagagtttcgatcttagcgtacgagctaaacgccccgttattctgatcaaagccctcaatggcagtggtaaaaccaccttgctcactgcgcttcagatcggcttgtatggatacaaagctattaacttggcgcgtcgttctgaatatgaacagctaattaccggactgcagcgcacggatgccacgggccctgcgcggattgaaatgcagctcagtatcgaagtaggcgatcaagctcaggctctaaccatccgccgcgagtggatgccgacggagaaggggtatcgcgagcagttccgcgtatttgctgaacattatgaagatttggtgctggctgaagaatgggatgactttattaacggcattctgccggtagagctagttcatctattcctctttgatggcgaaaagatcgaagccttggccaaccctgagcgcctacccgcactgttgcgccgggctacagaggtctttttggggctgggcggtattgatgccctggcaggtgatctcaaggctgtggagcgccgtgcaagtaagagaatcccatcaggcgatgctagcgaggatcagcagcaggtcgacgattatgaacaccagctcaaggaactggagcagcgcattgaaatgttgctgcagcgccaagcgcacgcacgaactgaattagatgatgctcagcgcaaacttgaaagtttctccattcaggcgcagcgcagtggcctgcaggcttatcagcaagccgctgacctacgtgtgaaggtcgagctgtgcgagcagcaacacaagcgagcacgcaccgctctggtcgcggcattggaggatcccttgctgccgctagcttggctgggaccactatggagccgctataaggaacaatggcagcaagatcagcaatccaaacacgctcacttgttgatagaagagtttggcaagcgcgaccagcgcattctggagttgctcgcccgtcaagctccgcaggcccggtctgcagtggcggagctgctggcggccgacctacagggcttgcaatccgctaggcgacatccgtcggtactgctccctggcggtgatccagttgaaatccagcttcgtttacaacaagccaagcagcacttgaaagaggcacaagcggccgttgcggccactcagcaggcgatggagaaggcgcaacacgcggtggatcaaattcccgcacatgagcaactcggcgcagtgtttgaggcgatgcagcagcacactcaggcggtctcgactagtgagtggcgagtgcaggagctgacccgtgagctggaggaagcgcgtagtaagcagttgcatttcaatactcgctataaggcggcattgtcccgcgcccgcgccgagcacaaggagaatgccttccagctcaaggccctggaggctgctgatcgagcgaaggcagcattggatgtctttcgcgaccgtttgctggcttctaaggcgcagtggctatcggacatgattactacggagttcaagcagctgttgcgtaaacgcaacttgattgctcgagtcctggtggagccgcagacctatgctgtctccatcgaagatgcgaacgggtatagcctgccaatggagcgcctatccgccggcgagcggcagattctggcgattgctgtgctgagtgcattgattcgtgagcgcaaggggcgtttcccggtggtggtagatacaccgttagcacgattggaccgttcgcatcgcgaggcgctgatccataatttctttgccaaggtctcacaccaagtactggtgctttccacggacgaagaagtggagggtagtgtgcatactgctttggagcagcatatgagtcgagagtatgcactgacttttgatgacgatagccgccgaagtactgttagcctgaccggccgtcagcttcagatggaggccatgcaatga

SEQ ID NO: 336456 - DNA, 2064 bp, Pseudomonas aeruginosa
gtgagtcaagccatagagtttacctccattgaggtcgagaacatttttgcctatgacggcaagagcacaatcgatctgagcgactgcaatggggagcgaaacatcgtcgtcatctccggtcacaatggtgccggtaaaaccagcttgctcaacgcaatcaaacttctgttcctcgggcccgagaatgaagaaatccgtcgagtggggtttggtggagttgctctgactccgaagcattttgtgctagggcagccaggtaggtggtacggcgttttcaacaagttcgctcgcgatgtcagtgatcgtgcgcgcgtcaagctgtcttgggtgcaggaaggaaaacccactacggttgagcgcatcttctcccgcacagccaatgcctccttcacggaccaactgatcgtcacccatatggggcagcagcttaccgaaagcgagtctcgcacctttcttgccggcctggcgccgagcgaaatcgtaccgttctacttctttgatggcgagcaggtccagtctttcgcagacgcagaagaggggcgagagcgtggtgaaattgagcggcttctaaaactttcttttatctcagatcttcttcgcgaactcgactcatactcaaaaagtaagcgtcgtgctggtctacccgaacatgttcgggttgagattgtgcaggcggaaaacaccttgcgagatgctgaagccaagatcgattctctaaatcgtctacgcgttgaaacggaaacggaattcgcagagctgtcgcgtaaacgtgatcgtttggatagccatcgcagtgggcttcgtacagggatttctgaggatgatcgtcgccggatgcttactcggatcgaggtccttgactcgcagcgggaaaagctcaatgccgatttgtgtgaaatcttaccacctgaggctccctggctagttaatctagatcttgtcagagaggtttaccgcctgctcgatcaacagctgacatccagtacggatatgtctttgtctagcaagctccatggggagttgccacaagctctgcgcggtagcttgtctcatttggtcccgccggtggagctttcttcttcgcagtaccaggcattttctgatgccgtaaagcaggcgctagttcagcgcgggctggctgctgatgcatgcatgagcccacttctttcggcagttagccccaagcaggccaaagcacttcgggatcgttacctcatttgggctgagcgtggaccgactcttgttgcatctcaggccgagcaattgcgtcgtatgagggcattgacccaagaagctgaacaggctcggcgcgatttggatgaggctgagttgactactgacggagccaagcatcgtttcgaggagctcagtgcagagattgcggcactggatcgccagacgggggcctatagagagacgctggctgagcttaggatcaaagagactcaggccgttgagagcgctgaacaagccaggcagcgtatccgtcagtgcgaacagcgccactcggcggttacccaggagaaccgcgcttatcagttaagcctgcgggtaaaacgtgctctggagtcgtttcgggacaaaaggcggatgcagataagacagtccgttgaggatcacctcaacgagcgtattagtgtgcttctggcgccaagtcaattgataaaatccgtcacacttgatgatctgtttgtcatgaggtacttcgatgagcacggtgaagaggtcgcgcgtagaagcatttctgcgggcatgcgccagctcgtcgcgatgggcatgctatgggcattgcgtgatgagtccgctcgggaattgccggtgatgatcgacacgccattggggcgaatcgatcgtgagaatcgcagcctgctgatgagtgagtatttccccaacgccggcaaaccactagtactgctgcccaccaatagtgagatggatgaggacgtactccgtagcctggatggctgtattcgccggcgctacgagattcaaaacgaaggtggtacgcgagcacagattgttccaattgatgtgcagcgttacgacaggatgtcggctcgatga

SEQ ID NO: 336457 - DNA, 1503 bp, Pseudomonas aeruginosa
atgattagcctttatttttccgcagaagaaaaggcgttcatggaagagcttctgagcgtagggcttgcatcaccaggaggccataaatggtggctaattcgttttgctatcgctcgttccctcaagattgatggcgagccggaggagcgctactcggtgccttcagcaaaaggcggaactcgaagcgagctaaacctagagcagatcaccggctggggaaaggaggaggcccagaactttgacgatgctttcaggattctcttcagtgtggtgcataacgtagaactctttgatgacaatcgccgctttgttgagttggtgcagcgccatgctcggcgggggctcgagtcgatgcgaggtgcttggacgtcagggcgtagcttttacgattacctgctagatgagttgtatctggatgcggattatctcgagggtattgaggggcgagaagacgaacatggcgctgtagatttcgccatgttggcgcaggggctgaagcaactgggagtcgtcgccacaccggctgccgaggttcaagagggaccgcgtttatctcggttccagttgactctagctggagtagaggattacgagcgtcttaagcgtggtttagatgacttggccttcgccatggggttgggaaacacagggatcggcttaaccaaggattttggagagcggcgcgtggtactcgacgtgcctcggcctgcagctcactggcacgacgtgtcatggccactgattgcggcagcgttaaccaatcgcgacgaggctatgccggtttcgcccggagtggatgtgcttggtcaaccgttgatttttgacctagctgaagctccgcatttgtttatcgccggcgctacaggcagtgggaaaagcgtttgcctgaatgctctattgctttccctggttgtctcttcacaaccaccagagttgctgatgatagaccctaagggcgtggattttaccgactttaatggctacgcggggttgcgcactggcaaagttattacggacatggtccaggctgttgctgcattacgtgacgttgtggacgagatggagcagcgccagatcctgttgcgcgattatggagcgcgcaatattgcagaggcccagctggcgggagcaccgttgcagcgactggtcgtagtgattgacgagttgtcagattttatgttgggccgtactgggggggaggaacccctgattcgcctggcacaaaaagctcgggcaaccggcatccacctcttattggctactcagcgcccagaggcagccacgttctccgggcttcttcgtgccaatgttcctgcacgcattgccttgactgttcagaaagcaactgactctcgcatcattctcgatgaggcgggggctgaaaagctgctgatgcgcggagatatgctggtcaagcttccaggtaggcagtgtcagcgtgcccatggtgtaagagtcgtcagtaccgacgtaaagaccgcattagcatcacggagtagatga

SEQ ID NO: 336458 - DNA, 1134 bp, Pseudomonas aeruginosa
atgaagtacatgacactcagacccacccgttttgaattgttggaactgacattgttggacttaggagctcttcgtggacagcgctcattccgcttccgcaatgaagagggcgagcctactaacgtgttcatgatcatgggtaccaatggcgcaggtaaaaccactgtgcttgaggcgatctatgcaggtatgcgcttactcgacgcgcgtgagcacgactccactggcattgacgacattgatcgtaaatccggtggactgcaattggatgcgcgcgtggcattggacgatggcagccgttccaagctttatctgttgtccatttcggtaggtcgccctggattactcaaacgctggacggacgaggagctagctcaagctggagtagagaggcaaatcgtactttccttccgttcgcgtatcagcggtccaggcttggagcgtagtgctgaatcggacccagaggctgtggcctttgctgaggctatcttagagcgtgctggtgagcccccggcggcactgtttgatgtggctaatggttatccatcggtgctgtatttcccttctgatcgcggtattcgtcggcctccagacgaggctcgcgctattactcgtcccgcgggtctgtactaccgagcggcacatcgttttgatgcggatggtcagagctgggatgcgtcgattgacaatttatttgtctggttcgcttggctgaacgatgggcgcgaggaagaatgccgcgagcttgttaatcgtttggttttccgaggggttaagcgtctaggcgcagtggatcggccgagtctatctgttccagttgaggtggagtcagggactcaccgaatcgatcagctcagtagtggagagcgccaattggtacagttgattgtgcgaattgccagtcacgtaacagggtccactattgtgctgattgatgaaaccgagcagcacctacatctggtcatgcgccggcgtttgataaatatcattaagcaatgggcatgcgagcaccaggggatatcatttgtaatgacttcccatcaggtggactcattgcgagtatttgcccccaaactgcatgagtctggattggtcaagggtggcgcactgctcaagccgaaaatgaaggtgtaa

SEQ ID NO: 336459 - DNA, 891 bp, Pseudomonas aeruginosa
atgtcgattgaagttcagtcatttgatgactttgactcgttacagcagatcgaggcgcaacagtctaacttgatccgagtagtattagaggggagggatgatgtcgccctttttgctgatcaatggtttgtcgccgaacaagaaacgttcaacttcattgaggcgggtcggatagtcgctggcagtggctgttccgcagtgctcaatgctgtggatcatagcttgaatgctgatcgtgtccctgcgatcgggatagtggatcgtgatgtactatttcgcgcaagtgattgggaggtgctctatgaaaaagaccatgagcgatttattcaagccacacatagcgaaaaagtgcatgtcgcctcgttgtgggagattgaagcctacttattagatccagagctgctcaggaatgtggtccgtgcttgtgcccgcaatgccccagctgagcctgggcagatggacgcagcgctgcagcggacgttgggtgagtgtgcggctctgttagatattgctccgtatctggcgggtaagcactctgcaggggtaacagtgccaccaggctacctgtgcaattcagacatacggcagatgcaggaagaagttgctcgtcagcttttgacattggccccgcctagcaatgaagttgcgacgcaagtgcaagggttagttgagcagattaaagcagggctgccacaagctccgagcgagcagctttcgttctacctacgatatattgataccaaacgactactgcagcgcctagtgcacgcgctggagctccgtaacttcaccaaatggctactttcgagcttgcaggcatcggcagggcgccgtccatacgaattagagcaagtgctggagagagctaagcagcgattttccatacactga

SEQ ID NO: 336460 - DNA, 810 bp, Pseudomonas aeruginosa
atgacccttctccccctctctaaacattgcagcgcaatctcaaacatcctcatggaaattgagaatgatcatgactggataggcgtgcatgattggctactcgtcgcatcctcaattatgtccatcaaagtcgacacgattcagcataacccaaatttcggctggtgctgccatggagatgagttcgatgaagcaagggaggtattgcttgagaagtttgtaaaaagcctaactatattcgggttcgcgtggggagcactcgaagcagtcatagatgccatatgcccacctccacacccagataaatcgaagcgcggcaagattggtaacgcatgcaattttcttaagcaagcatttcatacgcgaggatacgtgcttggcctggaggaagaaattgataacttccgaagcctagctcgtcaatgtataggatatgaaagtgtcgaaaaaagactcaagaatgcagggagcgtgggagtgcctggaattggcctttatacagtctacgagctgagaaatttatttgcccacggaagtttagcattcccctttccaaacgaagataaccgccctatcagcgaacactccgacatggttgcgcatgcaaccagaattgttctactccaactccaaatgctacttcttgctcacttcggagagtctgaggagccaattacagttttggaagcagcccacccttttccctggagtacggggacaacgctctggaaagccttgcgctcgtgtcacttagagattgcagaagacccacggcaactctctctatttgacaccaatatccaggggtaa

SEQ ID NO: 336461 - DNA, 936 bp, Pseudomonas aeruginosa
atgctcgaattcgccttagtcatcgtgttcatgctcatcgccgcagccctgctcggacacatagcccacgtacacgcctctccggaaaagctggcttggtacctccaggtgaaggagtggaaagctcataactacacaatggcattgttcgtaggactgctgctcgtcttgtatgccgttactggcatcagccaattgaccggctggaaaccacagcaaccgattgggctattgctgctggcagcaacctgcatcaccgcagcagcctacctttggttttactggaatctgacacctaaagttgccaagcacaaaaaccttttgaaggccataggtgcgctgctcactgtctgcgtcgcaaccacatccaaaatccactcagacatggctatcgctgagctcactggccttcccgcccaggaactaccaggagcacagctatttctgaccttcatcctgacaccaaccatctggtttttggcaatttcgtttgtagtgggctttatcagcataccgcttacactgctgttgctgatctggggtatctacaaggactggaagaaagacaaaggcagcaaattcgattttgcatcagcgagacatatctgcgcctgggttgccatgacctacttcagcatcattgtgctcactatgagctctggcattctcaagaaaagcttctatgaaaagcgactgaacaacgccattgcttattcagccttcctgcttccaccatcgtattgtggcctgccagataccaaaggggccagtgttgcagtgatgaagtacaagcgcgcggccttggccttaccagacgaaaagatgggttatacgttcagcaaaattgcctgcgacccactacaaaaatcgccagagcaattggtttccgagctcggagcaaagagcaagccgcttgagttaacccaggcgccgtga

SEQ ID NO: 336462 - DNA, 309 bp, Pseudomonas aeruginosa; identical to SEQ ID NO: 327388

SEQ ID NO: 336463 - DNA, 1242 bp, Pseudomonas aeruginosa
atgagtggtaaagaacagcgccctttggtcccacggttgcggttcccggagtttcgggccaaggacggatggggctgtgaatttggaaatttgatctttgatcaaatttccaataaaaatcataactccgacctcccagttcttgccataacacaagagcaaggagcgattcctcgggacatgattgattatcatgtttccgtaactgataagagcctggaaggctacaaggtagttgaagtcggcaacttcatcattagcctgcgctcttttcaaggcggcattgagttctctaaatatcgggggatttgtagtcctgcttacgtaattctacgcttaagaagtgaccactctgaagattactttaggcattacctaaagactggtcggttcatagctcgcatgactaagaaccttgaggggcttcgtgatggaaagatgatcagttacaagcaattttcagagcttgagctaccaaccccttcgcgcagtgaacaacaaaaaatcgccgactgcctgtcttcgctggatgatctgatagcagcggaaacccaaaagtttgacacccttaagacctacaaaaagggcctgatgctgcagctttttccctgcgaaggcgacagcgtgccacggttgcgatttccggaattccaaaatggcgacgaatgggctgctctgatgattggcgatatgtgcaacctgattaacggctatgccttcaagccggaagactggaaatcaaatggaacgccaattatccgtattcagaatctcaatgacccatccgccgagttcaactattcccaaactccagttccagatcggaatcgcattgagtcaggggatttactctttgcttggtctgggacgctgggggtatccttcggtgctcgcatctggagtggtccgcccggcgtactaaatcaacatatttttaaggttgtgttggatgaaagtaaaatcacattgtcattcgcattgctgatatttttgagggttgaggaggatatagcgaaacaagcgcatggatttaaagcctcatttgttcacgtcagaaaatcggaccttgttaaagttaaactgctacttccatcgctcccagaacaaaaacgaatagcctcttgtttgagtggtcttgacgagcttattactgcccaaaaacaaaagatcgacgttcttaagacccacaaaagggggctaatgcagcagctgttccctgtgcttgatgaggtgggtgcatga

SEQ ID NO: 336464 - DNA, 417 bp, Pseudomonas aeruginosa
atgaaagcgttgctgctggcggccatgccggtggtgctgatggatggccatgcaccagacctcgatcaatggtcacgcattgagcctgccattgccgccgccgtggagtgccgtcaaaccttgccgatgcacgcgctggatgacatcgcgcccaatgcccccggcagttggttgcttgcaccggcacgcagcttcacggtgtttggccttccggtgaagcggatcgagctgttcatcgacccggatggcgagctgggtgcgagctatacagccgttattgaaaaacgcagtctggaacaggtacgcaagcagctgaagcttgccagccagcgcgggcgcatcggccagctctcagcggatcagcccagtgccgaagttcaggtgagctgcgtggtggctacgacggggcaggggtga

SEQ ID NO: 336465 - DNA, 150 bp, Pseudomonas aeruginosa
gtgatcgccttcatagccgacggccgcctcgacatcgcaccgctggtgaccggtcgcatcggcctggaagaaatcgtcgagcgcggtttcgaagagttggtgaacaacaaggagcacaacgtgaagatcatcgtctcgccgggcggctga

SEQ ID NO: 336466 - DNA, 465 bp, Pseudomonas aeruginosa
atgctgatcggtgcgctgctggttctcacctgggtcatcctcctcgtccgatacccggccaaggccctgccggtctccctggcggctctcgccgggctgggcctggtggcggcctgggtgatctggcaggacaacgacgaaagccgccacctgcaacgccaggaactgcgcctgagctatgcgccggaacgctgtccggtggaccggccgctggcggtcgagctgaagaacggcagcgaccgtccgttgctggagctacgctggaggatcgccgcctaccgccccggcgacagcgtcaacctggccgacaccagcttcgacagcccgcgctaccgggcgccgaacgccctgctcggcggcgacagctggcacgactgcctgccgctgccgccgctgcgtccgggctatcgcgccagcaccctggaattccgcgccgaacgcctggacgggcgtttcggcaactga

SEQ ID NO: 336467 - DNA, 936 bp, Pseudomonas aeruginosa
atgaaccgactgatccgctcactctgcctggcctgcgccggcctgttcgccgccggcctggcgcaggcggaaaccctgcgcatcggcggcaagaccttcaccgagcagcgcatcctcaccgccatcaccgcgcagttcctgcagaagcgcggctacgacgtgacggtcaccaccggcctgggcagcaccctggcccgcgccgcccaggaaagcggccaactggatatcgtctgggagtacaccggctcgtcgctgatcgtctacaaccacatcgacgagaagctcgacgccgcggcttcctaccgccgggtcaagcaactcgacgaagcccagggcctggtctggctgaagccgacccgcttcaacaacacctatgccctggccatgcccgaggaacaggccgagcacctgggcatccagagcgtcagcgatctcgcgcgggtgctcgccgaacagcaggaggccgagcccgggagcacccacctgttcgccatggacccggagttcgccggccgccccgacggcctcggccccatgagcgagctgtacggcctgcacttcacccgcaacgacatccgccagatggacgccgggctggtctacaccgccctgaagaaccgccaggtgttcctcggcctcgtctacaccaccgacggccgcctgaaggatttcaagctgcgcgtgctgaaggacgacaagcagtacttccccttctacaacgccgccccggtggtgcgtaaggaggtcatgcagcgccatccggagttcgccacgctgttcgatccgatcatcgagcggctcgacgacgccaccatgcaggcgctcaacgcgcgggtcgatatcgagcagcagacgccacagaaggtcgccgccgacttcctccgcgaacaccacctgctcgacgacggccaggccggccagggaggtagccagtaa

SEQ ID NO: 336468 - DNA, 2196 bp, Pseudomonas aeruginosa
atgagtggccgctccgctggtttcgccctgcccagccgcgacgagtggcggcgcgcgctggccgagtgggcgcgcagcgacggggcgacctggatctacgtgttcaaggtgctctgcgcggccttcctgaccctctggctggcgatgcgcctggaattgccgcagccgagcacggcgaccatcaccgtgttcatcgtcatgcagccgcagagcggccaggtgttcgccaagagcttctaccgcatcctcggcaccctggtcggcctcagcgtgatggtcaccctgatcgccctgttcgcccaggagcgagtgctgttcctgctcagctcggcgatctggatcggcctctgcaccgccggggccgcccgctaccgtgacttccgctcctacgcctgcgtgctcgccggctacaccgcgacgctgatcggcatccccgccaccagccatccggaaggcgccttcatgcaggcgatctggcgggtcctggaaatcagcctggcgatcctctgctcgggggtggtcagcgcggtgatcatgccgcagaccaccagcgcggcgatgcgcaatgcgctgtacgtgcgcttcggcctgttcgccgcgttcgtcctcgacagcctgcgcggggtcggcgggcgcgagcgcttcgaaagcagcaacgtggccttcgccgcccaggcggtgggcctggagacgatgcgcgcggcgagcgccttcgaggatccgcacatgcgcctgcgcaatggccggctgattcgcctgagcagcgagttcatggccatgaatacccgtttccacgccctccaccagttgctcgaacgcttgcgcgcgcagggctccacccaggtgctggatgcgttcgagccgtgcctggaggaaatcaccgggctgctcgaggagatccgtggccgcgccgtcaccgaccatgacgccgagcgcttcgcccagcgcctcgccgactgccgcgaacgcctgatggcgcgtatccgccaggcgcgcggcgagctgctggcgcgggagccgggcgaagaggcgcggctggacttcaataccgccgccgagctgctctaccgtttcgccgaggaaatgcacgactacgccctgacccatgcctcgctggccgcccaccgccacgagcgcgagcagtggaaggacgccttcaccgccaaggccaacgcggtggcggcggcagtggcggggatgcgcaccgggttgatgatcctgctgttcggctgtttctggatctacagcacctggcccagcggcggcaccttcgccctcaacgcggtggcggtctcggcgctggcctcggcggcgccgaacccgaagaaggtcgccatgcagatggccatcggcaccatggcggcggcgctgctcggcttcagcgagatgttcttcgtctacccgcatatcgacggtttcccgctgctatgcctggtactggcgccggtgttcgccctcggcgcgttcatctcctcgcggccgcagtgggccggctacggtctcggcctgctggtgttcttctgcttcggttcggtgccggcgaacctgaccgtctacgacccggcccacgtgatcaacgagtacatcgccctgatcctctcgatgctgctctcggccgcggccgccgcggtcattctgccgcccaacagcgcctggctgtggaagcgcctcgagcgcgacctgcggatgcgcgtggtgttcgccatcagcggcaggagcagggggcttggctcggccttcgaaagcggtacccgcgacctgctgaaccaggcctatggcgtcgccgccgggcgcccggacgtgcagcgcgggctgctgcgctggatgttcctggtgctcgaggtcggccacgcgatcatcgagctgcgtcgcgagcaggagcgcctgccggacgaaccctgctacgccgaggccatgccctggcgccaggcgatccgcgccatggggcgggccctgatccggctgttcgtgcgccccggtgcggagaacctggagcgcgccctggcggctgtcgaccaggccatccacgcggccaggcacaccgacgaaccctgcgcgccgcacttcgacagctcgccgctacggcgggtgcgcagctacctgcacttcatccgttcttccctgctcgcgccgacctcgccactgaccgaactggccggccggacgagcggccaaggtaccgtccatgcctcgtga

SEQ ID NO: 336469 - DNA, 216 bp, Pseudomonas aeruginosa
atgcgccggcgcatcccgccaggcggggccgacaacctgaacggccggcgtcaggcgccgcgacccgccgagcagcgccaaccggcgaacgaggtgcgggtgaccgtggtggcacagacgctgcctctgaaggaccgcgcctgtggcgttttccaggaaggcagcctggaacgacgcgactgccgagcccatatcgggctgcaattccgtgattga

SEQ ID NO: 336470 - DNA, 609 bp, Pseudomonas aeruginosa
atgattaactcgctgattcgttttcggagtagcattaaagagacaaagaatttaacggcaatttatgattatctcactgaaaatgttagagcccctgtcgaggttggggatttacttaggtcgaaggttgtctatgcagttagtgcgcttgacaagctaatgcatgatcttatacgtattggaatggtggagatatatgaggggaaacgggcagcaactccaaaatataataatgagccaatcaaaatatcaattgttcaccagctattagaaaatgataccgctatggctgccagcgcttttgatcaggccgtagcggaaaaattgaaaattctttcctttcaagatcctgataaaattgccgatggcttgagttttatatgggcagaaaagcagaagtggcaaaagatatcgtatgtcttagagggagatgaagacgaaattaagaagactctaaagctaatagtatctcgaagaaattcgattgtgcatgagtctgactataatccggtaactggagaaaagaactcaataagcaggcaggaagccattgatataattaacttaatagaaaaaattggtgtggcagtggtgggactggttaaataa

SEQ ID NO: 336471 - DNA, 1032 bp, Pseudomonas aeruginosa
atgtcgaagcggctagttctttttaatcacaaaggcggagtaagcaagacaacgacggtatataatattggttggatgttggccgagaggcataaggttctcttggttgatggagatccgcaatgcaacttaacaagcctgattctgcgagacggatttgatgactattatttagatgaagctacaaaattaaacaacctgaaagacggggttagccctgcctttgatgggaagcctgttccaataaaagctattgaatgccctgtatcagaaagaattaagaatttacatttgcttcccggtcacgcgaatctgtcagcatatgatgcggcactaacattggcccagaattctaataatgcaatttccacactgcagaatttgccaggagcatttagtgaactaatacgcttggttgaagagcgctacgaaatagattatacaattatcgacttgaacccaggcttgagctcaattaatcagagtctgtttttgaatagtgatgtttttgtgctgccaacaaatcctgatccattttctattatggcaattgagactcttgcaggaacgctacctagatgggctgcctggaagaataatgcattagctgactttgcttcgtctgcatacccgttgcgcttaaatattcccaagtttggtggaacattgattcagcgtttcaatatacggaatggaaaagcggctaggccatacagggacaatatagacgaaataaagcaggttactaatacaaagctaattccagctttgaatagggctgctatggtttttcccatggatgattatcctgctgaactgaaagaaaacaatttctgtctttctgaaatccaagattttggaggcttgctacccaaggcctttggtgttggagtcccggtattcgcgttaactgacgaagaaattgccgaaaccggccctgtactagaggctctgcagagaagaagagaacagttgcgttttcaaatgaataatataattgagcagctgctggttttgctgaatcatgattaa

SEQ ID NO: 336472 - DNA, 216 bp, Pseudomonas aeruginosa
atggaagtggaagaaatcaaggctcaagaccttcgcgcggcgcccccggtgttgccgtggcgggacttcgcgaactggattggcatgggggaagaccacgaaaccgtccgtggatggattcgtaagggctatctccccgcgcacaagatcggcaagcacgtgatggtcaatgttgcgctcttcacccatcagctgatggaaagggaggagttctga

SEQ ID NO: 336473 - DNA, 213 bp, Pseudomonas aeruginosa
atgcgctacctcgtagagatgtgcaccttccacggcccgacccggcaacgccgctggcatcgcgtccatcagggcatttcccgcgtggaatgccaacgctgggtcgaagagtcggtggctgtcttcccgactgaagaagaagctcgccgctccttcggcctgacccgcgaacgcgcccgccaggtttaccgcatccgtggggtgagggcatga

SEQ ID NO: 336474 - DNA, 291 bp, Pseudomonas aeruginosa
atgaccgccagtccctactacctgcgccaaacccacgccccggactgcgcctgctctgtgtgctggtccgcaaggcaggccatcccattgcacagcccgtcgccgtgtccggactgccggccccctgggctgccctatctggaagatggccgctggctctgccgtccccgttccttctgcgcgaaacacgacccgtcccggcgtccgccgaagtactggcacgttgtgtacgacagcgggaaacccacgccctttgtgcccgtgcgcgaagcattccaactggagggctga

SEQ ID NO: 336475 - DNA, 1269 bp, Pseudomonas aeruginosa
atgagcaaacgtatcgtcgtcaccggcatgggcgcggtcagcccgctgggctgcggagtcgaacccatatggcaacgcctgctggccgggcaatcgggcatcgccacgctcccggcggagctgatcggcgacctgcccatcagcatcggcggccaggtccccgaccgtgcccaggacccgcaggccggcttcgatcccgacctgctgctggccgccaaggaacaacgcaagatggaccgcttcatcctcttcgccctggccgccgcgcaagaggccctggcccaggccggctgggcgccgcagagcgccgaggcgcaggagcgcacggcgaccgtcatcgcctccggggtgggcggcttccatgccatcgccgaagcggtgcggaccaccgacggcaagggaccgcggcgcctgtcgcccttcaccatcccgtcctttctctgcaacatggcggccgcccatgtgtcgatccgccatggcttcaagggaccgctgggcgccccggtgaccgcctgcgcggcgggcgtgcaggccatcggcgacgcggcgcggatgatccgcgcgggagaggtcgacgtggcgctctgcggcggcgcggaagcgaccatccaccgggtaagcctggccggcttcgccgccgcgcgcgccctgtccagcgatttcaacgacagccccgagcgcgcctcgcgccccttcgaccaggcccgcgacggcttcgtcatgggcgaaggcgccggcctactggtcatcgaggaactggagcacgccctggcgcgcggcgccaggcccatcgccgagctggtgggttacggcaccagcgccgacgcctaccacatgaccgccgggccggaagatggcagcggcgcccgccgggccatgcagcaggcgctgcgccaggccggcgtggaagcggccgcggtgcagcacctgaatgcccacgccacctccacccaggtaggcgacaagggcgaactggccgccatcaaggccgtgttcggcaccggcagcgggctcgccatcagcgcgaccaaatccgccaccggccacctcctgggcgccgccggcggcatcgaggcgatcttcacggtcctggcactgcgcgaccagctcgcccccgccacgctcaacctggaaacgcccgacaccgacgccgagggcctcgacctggttcgcggcgaagcccggcgctggccgatggaacacgcgctgtccaatggcttcggcttcggcggggtgaatgccagcctgttgttccggcgctgggtgtag

SEQ ID NO: 336476 - DNA, 1122 bp, Pseudomonas aeruginosa
atgcaacgtatcggtgacttagcctctgctctcctaagtagacacgcttcattatcactggaggatatgtcaggactaattttagagcacaaagataagtatgggtgtgacgaatcacatatcccctggattcttcggtgctttgtagcaaaagggatgataataccaactttaaagaagggtagtgtcacgctaactcttgctccgacttacaaggcacgcgagaatcagcgaaaattttccgcgacaattgctggcgagctagaatcactaagtcaacgagtcaggtatataattgatcacggaccaaccgtaggaacataccgagaaaatctacttcagaactctctgcgaaagcatttgccggagcgatatcacatagcaacgggttttatatacggacttaagaaacaaatcgatctcttgatatatgatcgaattgattatgcccccttatttcgcgagggcgatctggtaatagtaccccaagagtcagtgcgagcagttatcgaagtcaaaactaatttgacgactgacaacctccgctcagcacttgagtgcctgcatttagtttcattatttgatgacaagcaaccgccatttttcaaaggcatatttgcgtttgaaagcgatcttgccaaagataaattatataaaacgattgctgacttctacacaaactatcacgctcaggctcaaggcgcccctggagagttgatatgctcaccttttcagcacttaacttgcatgtgcgtagataaaaaagctttcgccttcaccaaatacagacgcaacgaaaatcaaagactgacgccacacctatactcaaagcagagcgtaactgaactcgaaagtcagtccagctttttcatacaaagcttactgtcatatttaaaacatggcggaatgaaaccttttaaaatagattacatggaccaaatgcttggcgaggacacctatacaactaaaattaaggatctcaggcatggagacgatagctggggagcatacttcgcagtcgatgaaggggatgaagatcaggtatacattgatgaaatggagagtttgattttatcagctcaaaactggattgaagggtatgataactttggagcagcctga

SEQ ID NO: 336477 - DNA, 1509 bp, Pseudomonas aeruginosa
atgacaatgcaaggatcgtccgagcagatcgtatcattgacgcctgagcaggttcaggccattcgcaaacgctggcatcaaagctcttcttttataggatatccagatgccgagcgtgatacggctcaagataagtggttcgacaatttgctagtacgaccagattggtttgatagcgcaacgtccacaacggtaacagtcgctgtggctcgaaagggcgccgggaagtccgccgttcgccttacgagcattgcgggtcgaaaagcagattctcaaacaataattgtagaggcctcagcggacgagcttgcttcgttacacgctgaacgtctggcgaaggcagccgaacgtggatacggcgcagttgccgattggatgcagatttatgcagacatgatttgcaggcggctcgcacatgaaatgagtgggcgtttactcacgagtgatgacgatattgcattacgcgcttgggctaccaccaagggcataaccgagcgagacttcggagaacgtatagcagacgtaattaaaacacttgtcccttgggcaaagagtattgccgcggaaaacgtagcgcaagaaaagaatagtaccgagagaattgcccgcgttgcacaagcaattaacttcgctctatatgtagacgactttgacaatttacaagaggcgggcggtgctacgagcattcgattaattcgagacgccatagaggcggcagatcgaatcactcacaataatacaaatgccgaagttcatctctttatgcgacaagatctgtggctaaatataaatcccggctggcattatgctgataaggtgagtggtgtcgtccatcttaattgggacgtgagcgatttaaggaaatggactgcaaacagattgcgttttgcgattgcagcagcgctcggatgtgaaataaaaaaaattcgcgtgcccttcgatgaaatgtggcatgtgttctttacgccagaagtcacgctaaagaataaatcgacaagtgattcatttagttattttgtccgtcgctcgatgtatactccgcggagcctcagggctatgatcaagttcgcactcgacggatcagaaagactgccggttactgacttagagattcaagatgcggagtggatttactccatcgatcagctcgaattcttgaaaaccgaatttggtgggctttgtgtcgggctggatatttgtctgcaatcttttactggaaaacctctcgagtggattgcctcagatttatacaaacatctccgaggcctgatcgggaatggtcaagtaaaactccataaaggcgtctcctacggtgaggacgatatcgcgctcgcgcgctttttatatcggatcggattcatggagattcggtaccccgaagatgatcgatacgaagtgcgtgatgtaatgcgtcatccagatcattggaagagtgtgagaacggacgacgctgtaagatgggccgttcgaagcgcgttcttcaatggcttaaagtcgcaccgctcctaa

SEQ ID NO: 336478 - DNA, 1029 bp, Pseudomonas aeruginosa
atgcagcgccacctctggatcatgggcggggaaaccggcccactcctgttcgcggtccaggcacaggcaggacagcccgtcgggaatcggcagtcggtcgagcaggtggctctgggtcagcagcaggtgcgcgcggctgtcctgcatcatgtacagcaggcgttcgcgcgggtactcgatgtccaggggcacgtaggcgccgccggacttcagcacggcgaggaaggcaatcatgatttccgcactgcgctgcatggcgatcgccacccgcacctcgggaccgacgccgcgggcgatcagcgcatgtgccaggcgattggcccggctgtccagctcggcgaagctcagcacctggtcgtcgaacagcaccgccggcgcgtccggggccaggcgtgcgcgctccgccacccgctggtggatcagcggcgaagcggggaagcccgactcgctgcggttccacagcgaatcgatcagcgcgcgctcctcggcatccagcaggctcagctcgaccagagtccgttcggcgttgtcgacgaagccttcgagcaagttcagcaggtgccggtccaactgctcgaccgcggcatcggaaaacgcctgacggtcatagctgtattgcagcgacagactgtcgccgacgcccagggcgacggtcagcgggtagttggtctgttcatgattgctcaccgggccgaagcgcacgccgcctggcgaccccttttccagggcttcggccacagggtagttctcgaataccagcaggctgtcgaacagcgcctcgccgagcccggcccaacgctggatctcgaacagcggcgtgtgctcctgctcgcgcagcgccaggctgcgcgcctgcacctcctgcaaccagtcggtgaggcgcatgcccggttgcggtgtggcgaccaccggcagggtattgatgaacaggccgatctgcctttcgatcccggccagttcggcgggacggccggcgacggtggcgccgaagaccaccgtatcctgcccggtgtagcgttgcagcagtag

SEQ ID NO: 336479 - DNA, 135 bp, Pseudomonas aeruginosa
atgatgccgcacaccaccgaaccgagcaggaagggctgccagaggctggacagctcctggctgatccattcccaggtgagatggtccggcagggtgcgcggcggcacctgcatcaaccaggcgcccagcttgtag

SEQ ID NO: 336480 - DNA, 831 bp, Pseudomonas aeruginosa
atggatgaacaactgctcggcgcccttcttgtcctccatgcggatctcgttgaagttggccggcgtgccgcccttgctcgaacggctcttggtgccgctctgggtagcgttcgccggcagctcgtagggcaccgtctgctcggcgttgtagacccgcccggtgatgatcggccggtccgggtcgccttcgaggaagctgacgatcacttcctggccgatccgcgggatctggatcgagccccagttcttccccgcccaggcctgggagacgcgcatccagcaggagctgttctcgttggactggtcgtggcggtcccagtggaaatgcaccttcacccggccgtactggtcggtccagatctcctcgcccttgggcccgaccaccaccgcagtctgcgggccacggacgatcggcagcggagtggtcggcaaggggcggtaggcctggccggcatcgatgcagtccagctcgctctcgaactgcgcgccgaccccgccgccgccggtctcgtagagttcctggaccacccggtactcggcgccgaccaccaggtactcgcggttctggtcctcgcgcgggtagccgctgagcttgaacaggtggcccgaacccaggccgcgggcgcggccgcgcaggcgcacccgttcgtagcgcgcctgcaaggcttcgatgcgggtccgcgcgtactgctcgccgtcctggctctgcacgtattcgccggggtagtcgtacagcgggtagtcggccgccgcgtgcgagcgggcgatgttcgaacgcacctccaggcgcgcgccgggacgctggaagtcgtagtcgttgaggctcagtga

SEQ ID NO: 336481 - DNA, 267 bp, Pseudomonas aeruginosa; identical to SEQ ID NO: 330012

SEQ ID NO: 336482 - DNA, 957 bp, Pseudomonas aeruginosa
atgaaagttctgtttctggtccagaaagagcagcgcgcgatcctggatcgcctgtacgacggcatcgccgcccactgcgagtgcgatacccgctggctgagcagcgaggagcaggccgacctgcgcggctacttccgcaagcacgtggatgtctcgcgctacgaccgcatcctgttcttcctccgcttcaagaaggaaatgcgccaggtccgcttcatccgcagcgtgcccaacctggtgatcctcgagcacgatgcctaccagaactacattccctgcaagtacaccggcaagttcagcgcccattaccggcgcctgccctgggcacgggtgatcagttcgggccatacggtcagcgaacgcctgcgccaggagggattcgacgcggtattcgtgcccaagggctacgaccagaccctgttgcatgacctgggcctggcgcgcgatatcgagctgggtttcgtcggcagtaccggcagcgtggcctacagtggacgcaaggcgctgctcgacgagttgggcggagtggagaacctgctggtgaccaagaccaagtccggcgaggagtacctgcgcacgctcaaccgcatccgtttcttcgtcagcgcggatgtcggcatgggcgaatacatgatcaagaatttcgaggcgatggcctgcggttgcgtactgctggcctacgaccagggcgagcgggaaaacgaggccttgggtttccgggacatggagaatatcgtgctgtatcgctcggtggcggacatccaggaaaagctcgcgatcctgcgcctcgacacggccctcgccgagcggatcgcgcgaagcggccaggcgctggccatcgaacgattcagcttcgccgctgtcggtcagagtatcgtcgaggccatgcggcccgcgttgcgcgagccggagcgtcccggatggctggagaagacctggcgacgtatttttacctga

SEQ ID NO: 336483 - DNA, 1419 bp, Pseudomonas aeruginosa
atgagcgcacgcaagcagcagttgctcaagcgtcatcgacgcaacaagcggatcggcctactggttgcgctgctggcattgctggccgtcggtctgctggtcagcccctggttgttgccgatcctcctcatggccctgtgggtcgcccacgaagcctggttcgccgatcacctgttctattcgccgggcgaggactaccgctaccgtttcgctgaaggggtcgagtcgctgccggtacgcctggcggatggccgtctgcgagtcgacggcgagctgcgcgaaggcgatacgctggtgcttggcatcggcgtgcgcgctggctggctggggcgcttcctcgaaccctcggtgctgctggaaggtggcgcagagaccgatgcccaggctttcgaacgtggggtgaacggcttgcgctacctgaacctgacgggactggccgggccgctgggcgagggccggattcgcctgcgcggccggcattgccggctggtcggcgaaccgaccctgtggcgtgcgcgccatcccgactaccgtgaccggcgggtgatggtcatcgctccgcatgccgacgacgccgagctggccgccttcggcctctacagccaggcacgcgaggcctggatcgtgaccctgaccgccggcgagatcgaaaccgagcattaccgccgcatgggcctcgacggaatagctgcggcgcgcctgaagggccgcctgcgcgcctgggatagccaggccgtgccggcgtggggtggggtgccggccgagcgctgcgtgcaactgggttatttctgcctgcaattgcctgccatgcaggcgaacccgggcgaggtggtgccgtcccgtgaggccgatctcgccgatatccgtccgttccgccagttcaaccgcctgcgcctggccagcgatgccgacggtctgtcgacctggaacaatctgctggccgatctccgcgagctgatcctgctggcacgtcccgaggttatcgtcctgcctcatccgcatttcgatccgcacccggaccatgtccgcgcccaggaggccgtgcgcgaggcgctccaggggctggactggcagccgcaggcattgttgcactatgccaatcacctgcacgacaacgatcgctggccgatgggcgatgcgcacatgggggtcagcctgccgccgctgaccgaagaatgctcgccgttgctgccatggacgctggcgctggagcgcacgcgccaggtggacaaggccatggccttgggcatgatgcacgacctgcaacccaggccgccgttcaagcgccgtctgcgccgccgtctgcagggctggctcgccgggcgtcgctggccggcatacggcgaggacgagttcatgcgcaaggcggtgcgtcggcacgagttgttctgggtggagacgctggacggggaggcatga

SEQ ID NO: 336484 - DNA, 1254 bp, Pseudomonas aeruginosa
gtggttcgggccggcgcaatagtcgcccagggcctcggcagtgtagcggcccatgaagatcgcgccggcatggcggatctccggcagccagctttccggatcggccaccgacagctccaggtgttccggggcgatgcggttggcgaccgcacaggcctgggcctggtcggcgacctggatcagcgcgccgcgcccctccagggaggtgcggatgatctcggcgcgctccatggtcggcagcaggcgagcgatgctgtccgcgacgcggtccaggaacgccgcgtccggactgaccaggatcgactgggcgtcttcgtcgtgttcggcctgggagaacaggtccatggcgatccagtcgggatcggtctggccgtcgcagaccacgaggatttccgagggaccggcgatcatgtcgatgccgacctggccgaacacgtgacgcttggcggtggccacgtagatgttgccggggccgacgatcttgtccacccgcggcacgctttcggtgccgtaggccaacgcggccacggcctgtgccccgccgatggtgaagacacggtcgacgccggcgatgcaggcggcggcgaggacgatctcgttgatctcaccgcgcggggtcggtacgaccatgaccacttcggacaccccggcgaccttggccgggatcgcgttcatcagcaccgaggacgggtaggacgccttgccgcccggcacatagagcccggcgcggtccagcggggtgacctgctggccgagcaccgtgccgtcggcctcggtgtagcgccaggaaccctgcttctgcttctcgtggtagctgcgcacgcgctcggcggcgacttccagggcttcgcgctgggctacggtgatacgggtgagagccagctccaggcgctcgcgcggcaggatcaggtcggccatcgaggcggcctggagaccgtcgaagcgctgggtgaactcgaccacggcggcgtcgccacggctgcgtacggcggcgatgatgtcgaggacgcgctggttgaccgaatcgtcggagacactttcccagctcagcagatgatccagatgacgcccgaagtccggatcagcggcattgagtcgacggatagcgaagggagcggtcatagcgagcctcttttatggatggcgttgtctcgggcgccgctagactaccaagcccaccgtgcgggcacccgagaaaatttggctatgacacggataggcaggtgcggcgcggagccgcacgggtatcagtga

SEQ ID NO: 336485 - DNA, 786 bp, Pseudomonas aeruginosa
atgagcgcgcgaatcccttccggcggccaggccgccaccggcgtcggcgcggcggaggtcagttgggtcggcctgctggtgatcttctgcctcggcatcaacctgcgaccgatcctcaccggcatcggcccgctgctcgaggaaatcaccgccggcaccggtctcggcttccagggcgcgtcgctgctgacggtgttgccggtgctctgcatgggcctggtggcgctgttgctgccctggctcgggcgctggctggccgagcaccgcggcatcgtctgcggactgctggccatcgccgcagcctgcctctggcgcctggaactggatagcgggctggcgctgatcgccagcgccgcgctggccggcagcggcgtggcgatcatccaggcgctggtaccgggcgtggtcaagcgctggttcccgaggcgggtcccggcggcgatgggcctctactcggcctcgctgatggccggcggcggaaccgcggcggtgctcagcccgcggatcgccgaacacttctccaactggcaggccggcctcggcgcctgggccgtaccggccctgctggcgctgctgctgtggatgttcgcgcggccaagggaggtgctgccgagcgctggcgaggggccggtccggcacttcttcggcaatcgccgtggctggctgctggcggtgtatttcgggctgatcaacggcggctacaccagcatggtggcctggttgccggtgtactaccgccagctcggctggagcgcccaggacagcgcgggctggtcgggatcatga

SEQ ID NO: 336486 - DNA, 1341 bp, Pseudomonas aeruginosa
atgcacaccttgcagcaactgcgcagcggcgaactggccggcgccacgcgcctggacctgtcctgcggcctgcgcgagttcccccgggaaatcttcgagctggccgactccctggaggtgctcaacctcagcggcaacgccctggacagcctgccggacgacctcgggcggctgcatcgtctcaaggtgctgttctgttccgccaacgacttcgacgaattgccggcggcggtgggcgactgtccggcgctgagcatggtcggcttcaagtccaaccgcatcgagcgggtgccggccgcggccctgccgccggcgttgcgctggctgatcctcaccgacaaccggattgccacgctgcccgaggaactgggtcgccggccgttgcagaagctgatgctggccggcaaccgcctggaggccttgcccgagagcatggccgcttgcgaaggcctggaactgctgcggatcgccgccaaccgtttccagcgcctgccggcctggctggcgacgctgccgcgcctggcctggctggcttacgccggcaacccgttgtgccgcctgccggcgctggccgacagcggcatcgccgcgctggactggagcgagctgagcctggaagggctgatcggcgaaggagcctccggggtcatccatcgcgccggctggcgccagccggacggctcgacgcgcacggtggcgctgaagctgttcaagggcgaagtgaccagcgatggcacccctgccagcgagatggccgcctgcctggcggcggggcgccatgcgcaattgatcgaggtgctcggccggctcgccgggcatccgcaagggcgcgacgggctggtgctggagctgctcgacgacgcctatcgcaacctggcggggccgccgagcctggagtcctgtacccgcgacgtctatccgccgggactgcgcttcgagctggccacggcgctgcgcctggcggcctcgctcgccgggttgatggcccatctgcatggacgcggcatcagccatggcgacttctatgcgcataacatcctctggcgcgaggatggcgcctgcctgctgggcgatttcggcgccgcgtcctttctcccggacgacgccgtgctcgccggcgccctgcggcgcctggaagtacgtgccttcgcctgcctgctggaagagttgctcgagcgcagcgaggcgccgccggggcaggcctcgctacgtgcggcgctggtcgagttgcagcgacgttgcgcgctgccacgggtgagcgagcggccggacttcggcgagatccaggcgatcttgcgcgaccttgccgctcgcagccaggcgtttcctcaagttcgatga

SEQ ID NO: 336487 - DNA, 276 bp, Pseudomonas aeruginosa
atgcgtcagaccctgagcctgttcctgcttctctgcctgctcgtcggccaggcctgtgccgacgagcgcgtgaccctgcgcctggccgaccagaagggcaacatgcgcgcccagttggaggctgccggcgcgctggacgacctgacctacgacatccgctggttcgaattccccgccgccgccccctcgccgaagcactcaatgccggtgcggtggatgccggcatcatcggcgacgcgccattgctcttcgccctggccgccggtgcccggctga

SEQ ID NO: 336488 - DNA, 1584 bp, Pseudomonas aeruginosa
atgagccagatcgccgtacgcaccttccacgatatccgcgccgctctcctcgcccgccgggagctggcgctgctcgacgtgcgcgaggaggacccgttcgcccaggcccatcccctgttcgccgccaacctgccgctgtccaggctggaactggagatccatgcccgggtgccgcgccgcgacacgccgattaccgtctacgacgacggcgaaggcctggcgccggtcgccgcgcaacgcctccacgacctcggctacagcgacgtggccttgctcgatggcggcctgtccggttggcgcaacgccggcggcgagctgttcagggatgtgaacgtgccgagcaaggccttcggcgaactggtggaggccgagcgccacacgccatcgctggccgcggaggaagtacaggctttgctcgacgccagggccgacgcggtgatcctggatgcccgtcgtttcgacgaataccagaccatgagtatccccggcggcatcagcgtgcccggcgccgaactggtgctgcgcgtcgccgaactggcgccggacccgcgcacccgggtgatagtcaactgtgccgggcgcactcgtagcatcatcggtacccagtcgctgctcaacgccggcatccccaacccggtggcggcattacgcaacggcaccatcggctggacgctggccggtcagcaactggaacacggccagacgcgacgcttcggtgcgatctcccaggacactcgcaaggccgccgcccagcgcgcccgtgccgtcgccgaccgcgccggcgtcgaacgcctcgacctggccggtctggcccaatggcaggacgagcacgaccgcaccacctacctgctcgacgtacgcacgcccgaggaatacgaagccggtcacctgcctggctcccgctccacgcccggtggccagctggttcaggaaaccgaccatgtcgccagcgtgcgcggcgcgcgcctggtactggtggacgacgatggcgtacgcgccaacatgagcgcctcctggctagcccagatgggctggcaggtcgcggtactggacggactctccgacgccgacttaagcgagagaggcgcctggagcgcgccgctgccgaggcaaccccgggccgacaccatcgacccgaccaccctcgccgactggctgggcgaaccgggcacccgggtgctcgacttcaccgccagcgccaactatgcgaaacgccacatccccggcgccgcctgggtattgcgcagccagttgaagcaggcactggaacggctgggcacggccgagcgctacgtactcacctgcggcagcagcctgctggcgcgcttcgccgtggcggaagtccaggcactcagcggcaagccggtgttccttctcgacggcggcaccagcgcctgggtcgccgcgggcctgccaacggaagacggcgaaagcctgttggcgtcgccgcgcatcgaccgctaccgccgcccctacgaaggtaccgacaatccgcgcgaagcgatgcagggctacctggactgggagttcggcctggtggaacaactcggtcgcgacggaacccacggcttcttcgtgatctga

SEQ ID NO: 336489 - DNA, 303 bp, Pseudomonas aeruginosa
atggccaagaccaacgcccagcgccagcgggagaaacgccagcgacagcgagaggccggcatccccgagcgcaagcttccatccccgccggcgatcgacgctgctttcgaacggatccagtcggtcggcgatttcgaggactggcgagaagcgttctcgacgcttctactcaacgcctcagccctgcccgatgccgatctcatgcctcttctcgtcgtgtcgcgacacgaatacacacccagcgaaaacgtgtcgcgacaactaatcgccgccggtctctccgtagccgacgacgaacagtaa

SEQ ID NO: 336490 - DNA, 378 bp, Pseudomonas aeruginosa
atgagcacttttgccgtgttcggcatgacgcgagacgtagcgctcgccatggccaagaaagaagtgaagtcggtacgcaagacaccgctcggggatgagcatgttccgatgagcgaatggctcgccgcagtcgagcggaaggccgacaacatcatgaccggaaccaaggtcgtccagttgagccaactcctggatacgccggacttctgccatcagctcatcgaactcgcgcggaagacgctggaatgccgagacatgcagatccgcgccagggtccagctttggaatgacgacggagcgccagtcctgaccaagaagcgcaagcacaaggtcgagtggcagcagttcggccgccacccagggagagcagcagcatga

SEQ ID NO: 336491 - DNA, 1308 bp, Pseudomonas aeruginosa
atgacgctcaaagaggctggcgtttctttgattgattgtgatcatcggacgccgccagcacttgaggaaggctatccgtatattgccattccacagctgaaaaatggacatatcacccttgagggcgttcgcaggatatcccgagagaattacatcgaatggaccaaaaagctcaagcctcaagctaacgacgtcattgttgttcgccgatgtaactctggtcaaagtgcccatgtgcctgcggaactagagtgtgcgataggtcagaacttggtggtgctccgggctaatggtgagcatgtactgccagagtttttgcgttggttagtgcaagggcccgactggtggagtcaagtatcaaaattcatcaacgttggtgcagtgttcgatagcttgcgctgtcgagatattcctaactttgagttgtttgtgcctccgttagtagaccaggcaggcatagccagttttctaggtgctctcgacgatcgcatcaccctgctacgcgaaaccaacgctaccctggaagctgtcgcccaggcgctgttcaaatcctggttcgtcgatttcgaccccgtgcgcgccaaggctgaaggccgccagccggaaggcatggacgccgctaccgccgccctgttccccgatagcttcgaagagtctgagcaggggctggtgccgaagggatggggctgcggcgcattagctgacctagcccttctgaaccctgagtcctggacaggcaagacgcggcccgaatcagtggcttatatcgacttggctaatgctaaagacaacacgattgccgagattacaaattacctttttgacgacgcgcctagccgggcacgtcgagtattgcgtaatggcgacacaattatcggcactgttcgccccggtaatcgatcatttgcatttatcgctaatgcaactgataaccttaccggaagcactggatttgcagttttgaggccgaaaaatatagaaaatactgagtttgtgtacttggcggcaactttagatgccaatattgatcacctaactcatgttgctgatggaggcgcttacccagcggtacgaccagagatagtggctgacctatctacggtattgcctacttcccagacactgcaggcatttcacgaggtcgctaagccagtctttgcgagcattgcggagaatcatgctcaagcccaaaccctcacccagctccgcgacaccctcctgccccgactgatttccggccaactgcgtttgccggaagctgaagctttggctgcgggtggcgcgcgagtgggcgctggtgcgaattga

SEQ ID NO: 336492 - DNA, 951 bp, Pseudomonas aeruginosa
atgtccgtgaccgatgccagtttcccgatcatcaactggtcgaaggcgatgccttcgttgcgccagctgatgtatttcgcctgtgtcgccgagtacggcagcatcggccaggccgccgaggtgctgcacgtttcgcagccgtcgctgtcgcggcagatccaggcgctcgaagtgcacatcggcgaggcgctgttcgtccgcggtccggccggggtgagcctgaccgaggtgggcagggtggtgcattgccgcgcggtgaagatcatcgccgaggccaaggcgctgacccgcgacatcggcgacggcgacgaccgccagttgcacatcggtttcagccgctacctcgatcccggctggtccggcgagctggcccggcagttgaaggaagcgcgggtgtgcagcgccgtttcgccatcctgggcgccatcgctggacctgctcagcctggtccgcgagtcgtccctggacgcggcgatcatcggcgcgccgccgaaggtggtgcgcgaatacgagctgatggagatcggcagctacgagcacgtcatcgccctgtcggaaaccctgcaccggcgactggcgcccgactggtcgctgaacgacctgatcggcgagccgctgctggtaccgaaggactcgctgtttcccgcctacagccagttcatgaacgatgcgatggatgccgctgccttcgcgccccggcgcagcgtgcggccgaacgacctgagcattctcctggcccaggtcgccagcggcgacggcttcgccttcctgccgttgtcgctgaccaagttcgcctatccgggggtggccttcaccgccttgccggcggcggtcaacgaaggtttccgcctgccggtggggctggcggtgtcgccgacttcgcggcttcgcgccagcgacgcccagttcgaatgcttcgtcgagaccgcgcggcgggtcgccgccggttga

SEQ ID NO: 336493 - DNA, 1407 bp, Pseudomonas aeruginosa
atgaacgacccccagggcttcgaggccatctcgcgccgcgaacagggcctgcaacggcggctctcggccgcgcagatgagcatgatcgccatcggcggcgccatcggcaccggcctgttcatgggcagcgccttcgccatcggtttcgcaggccccagcgtcctgctcagctacgccatcggcgcgctgatcaccctgctgctgatgggctgcctggcggaaatgaccgtggcccatgccacccccggctcgttcggcgccttcgccgagcactacgtcggcccgctggccgggttcctggtgcgctacgcctactgggcggccatcgtcctggcggtgggcaccgaggtcacggcggtggccatgtacatgaagtactggttcgccggtatcccggaatgggtctggatcatctccttctcgaccctgctgatcggcctgaacgccagcagcgtgaaagccttcggcaacttcgaatactgcttctcgacactgaagatcgccgccatcgtcgccttcatcctgctcggcgcctacctggtgttcggctccgccaacccggcctacggcgtgcacaactacagcgcccacggcggcttcttcccgcacggcctgaaaggcatgtggatcgccgtggtggtgtcgatcttcagttatctcagcgtggagatgatcgcggtcgccgccgccgaggccgaacatccggaacaggcggtgaggtcggcgttccgctcgaccatcgtgcgcctggtggtgttctacctgctgaccctggcgctgatgctcgccatcgtcccctgggaccaggccgggcagagccagagcccgttcgtcacggtgatgcaggcgatcggcctgcccggcgccaccggggtgatgaacttcgtggtgctggtggccgcgctgtcggcgatgaacagccagctctacatcaccacccggatgatgttcagcctgtcgcgcgcggggcacgcgccgaagggcctcggcgaactgagccgccagggcgtgccgctgaacgcgctgctgctgtcgagcgtcggtatcgccctggcgaccctgctcaacctggtctaccccgagcagtccttcaccctgatgatggcggtgtcgatgttcggcgccctcttcacctggctgatgatcttcttcacccacctctgcttccgccgccaccgcgcccgccacggcggcgcgccgctggccttccgcatgcgcctggcgccctggtcgacattgctcggcctggcgctgatggcggcgatcctggtcaccaccttcttcaccgaggcgttccgcatgaccctggtcttcggcgtgccgttcctcgcgctgctcagcgcactctacctggtcttcgtccgcaagcccggcagggattgtccgatagaacgggcaacgccctag

SEQ ID NO: 336494 - DNA, 1947 bp, Pseudomonas aeruginosa
atggccgtcagcagctatctggatattcgcgccatcgaacaggttcctctgcgcgagcgcgggctggccgccaatacctatgcagccctgcagcattgcgcgttggcgaacgcggaggccccggcgctcagcttcgtgctggatgctcggcggcaccagcgtacccacgactggagctatgccgagctgttcgccgacatcacccgggcagcgaacgccttccacgaactcggcatagggccgggcgatgtggtcgcctttctgctgccgaaccttccggaaacccacttcacaatctggggcggcgaggcggccggtatcgtcatggcaatcaaccccctgctcgaggcgccgcagatcgccgagctgctgcgcgcggcgagggccaagttggtggtgactttgtcaccgaccccgggcagcgacctatgggaaaaactggccagccagctggatagcctgcccgatgtgcgggatgtggtctgggccaatatggccccctatgtcccgatgcttccggccctggccctgcgcggcatggccctgcgtgagcgacttcggcagcgccggtggcgcatccatgacctgcgcgcgctgatgcgtcgtcaaccgggcaatcgcctgatcagcggccgacagattcgcgcggacgagccctcctcgtatttctgcacaggcggaaccaccggcctgccgaagatcgccatgcgcacccacggatcggaggtcttcaacgcctgggcgatggcggccaacatgcaaccacgcaagaagggccaggtcatcttctgcggcctgccgctgtttcatgtgaacgggcagctggtcaccgggctgatgccctggacccagggtgaccgggtgatcataggcaccccgcagggctaccgcggcgaaggcgtgatcgcgaacttctgggccatggtccagcacttcggcatcaacttcttttccggcgtgcccaccgtgtactccgcgctactgcagcaaccggtggccggccacaacatctctagcctgcaatacgccctgtgtggtgcagcgccgatgccggtagagctgttccgtgagttcgaacagcggatcggcgtgcgcatcctcgagggctatggcctgaccgagggcgcctgcgtgtcgtccaccaacccaccgggcggcgagcggcggatcggctccatcggcctgcgtctggcctaccaggacatgcgcgcgatcattctcgacgacgccggcaactaccagcgcgacgcgcaaacggacgaggttggggtcatcgccattcgcggcccgaacgtcttcgcgggctacctggagcctatgcacaacaaaggcctatggatcgatatcagggaccagcgctggctcaacaccggcgatctgggtcgccaggacgcgcaaggctacttttggctcacggggcgcaagaaggagctgatcatccgcggcggccacaacattgatcccaagcagatcgaggaagccttgcaggcgcatccggcggtggcactggtcgcagccgtgggcagtccggacgcgcatgccggcgaggtaccggtcgcctatgtgcagctgaatccgggtgcgagctgcaacccgcaggcattgcaggccttcgccacccagcacatcgccgaacgggccgcagtgccgaagcgtattgagatcctcgatgcactgccggtgacgccggtgggcaagatcttcaagccagccctgcagcagcgtgaaatcgcccgggtggtacgccaggaagccgcggcactcggtctcgccgatctcgccatagaggtcgtccaggacgcccgccgcgggctgctcgcccagatctccgctggcacacaccaagtatctctggctcaggccctggggcgttatagcttccagatcgaatggttcgattccccctcaggagaccaaccgatgcccagaccgaacgccatcagctaa

SEQ ID NO: 336495 - DNA, 1092 bp, Pseudomonas aeruginosa; identical to SEQ ID NO: 324657

SEQ ID NO: 336496 - DNA, 477 bp, Pseudomonas aeruginosa
atgaacgccaacaacaaagcgctaccagaaacaacagatgtattgatcgtgggcaatggtccggtgggtgcagcattagctgcgctgctcggccgttatggcgtacagacccttgtgatcgacaaggtccatgacgtcctgctgatgccccgcgccattgccctcgacaacgaggcactgcgtatcctgcagctggccggcctggcggaagacgccttcgagaaaatagtgatccccgaagtgcgcatgcactgccccatggtcggccagttcggccgcgccaacactgcgggcagcctcgacggccaccccaagctggtgaccttctaccagcccgacctggaaggtgcgctgcgcgtccagtctcggcgcttcgccaacgtggcgagccgcgggggggtgggagctggaaagtctgcagcaggacgacgacggcgtgctcgcccggctgcgcagcgaactcggccaaagccatag

SEQ ID NO: 336497 - DNA, 1182 bp, Pseudomonas aeruginosa
atgttcgtattgcgtaccggcctccagggcaatagcaaaacacttaacacgatcaaggaagtggatacgaaggcggcaaaggagggaagggtcgtctattaccacaatatccgggagttcaagccggatcatccggctatcaaggcgcagtgggttgagtttgaccatccgcaggaatggttcaagttgccgcagaacagcattatcgtgatcgatgaggcgcagacgttctttcgaactcggccgcagggctcgaaagtgccggagtatgccagcgccctggagacgatgcgccattcggggcatgaggtgcatgcgattacgcagagtccaacgctgatcgatcaccatatgcgtgacttgtgcaactgtcatatccattattttcgaggcggcggcgggcctgttgtaaagcgtttcgagttccagaaagttcagatggatgtgaataagaagtacgtgtttcctgatggtgaaaccagccggatcaccatcgataagacgtatttcggctgctacaagtctgtggccgatggtgctgagcaccatttcaagttcaagccgccgaaggcgctgttcgtgctggtcgtcgtcgccctggtggtgggttacctcggctacggggtctatgagcgtcgtatcacgtcgcatgaggcgtctaccgagtcgaccgcaggggctgaggcggtcattccgcaggcggattcgcaggccgttcctgcggctgatgtagcgccggtgctgaccgctcaggagtatcttgatctgcgcacgcctcgggtgcctgacgtgccaagctccgcgccgatctacgacgagttgaccaagccggtgacgtatcccaagccgttctgtctgtcgtccagggacgaagaactggtgcggcgcaatgcgctgaaaatgtccctgggctatcgcgacggtcggctgtacggttgccgctgcaacagtcagcaaggcacgcggatgctgatcagcttcgaggcgtgtatgaactatgtggagaacggggcgttcgatccggcgattcctgatcgcgttgtaggcgcaggcgggttcgggccaggcgagggacgagccggtacgatcccgcaggcgccgaccgctcgaccggttgagtcggtcagtcagactcgcgtcactgtggtgcctgataacagccgcttacctcgcacgttgtaa

SEQ ID NO: 336498 - DNA, 312 bp, Pseudomonas aeruginosa
atgccaatgtttgttgcgttgttttcgttcttgagttcgattgccggtccgttggtggccaaggtgctgatatcgctgggtattggcgcggtcacttatacgggcattagtctgatgattagccaggtcaagacgtatgcggtctccatgtttggaagcgtcggcgcggactatgcggcgatcctggggcttgccaaagttgatgtggctttgaatatcgtctttgcggcggttgttgcgcgtgcggtgatttctggtatggataaggcgagcggcagcattaccaaactcggtagtgtcaagggtaattaa

SEQ ID NO: 336499 - DNA, 1317 bp, Pseudomonas aeruginosa
atgaaaaagcttataggcggtgcgactcttttgttgttttcggcggtttgccatgccgctgattactcctgggcttatggcggtgctacgtttccttctgctgatgcggcgtgtaactcttacttcctgaccgtaaaacttagtgttaactcggttaatcgttattcggtcaagatgcaatcgcctacgacggctttgtgttcggtatatgttcctatcggaagtgcagagggcgtttattcgtcgataaacttgaatcgcaagggtgattcttgtccgaatggcggaacgtatgatgcgacaacgggaagttgcattacgcctccagagtctgatccgtgtagagaaaaagcagggcaacctacgtcctggtcgttgttgcgacccgatttaaatggcatggggccgattgagtatttgtgtcagaacggttgccgtgtgacgtatgggtcggcgacgtgtggtccgatgaattccgatccgaccaagggtttttgttccggtactggcacgtttacgggccagcagtgccagccgactgatgaggcgacgggcggcagcaaccccgatcccaaccctgatccgccggaccagccagacccgcctgataagcctgatgagcatggctgcgttcctccggcccaatggtccggtacgacgtgcgtcatgcctcctaaagagcctggggacggtggcgacggtggcggggagggcggtgatggcggtagtggtggcggcggtaataacggcggtggcgatggtggcggagacggtggaaacaacggcggtggcgacggtactggcggtggtgatggctccggtaacggcgatggatcgggcgatggtggcggcaccggtggtggtgataagccgggcgaggaagagggtaagtgtgacccggccaaggaccccagttgcaagccttcgagtgtgacgggtgagagttgcgatgcggacctctcttgtgaaggcgacgcgattcagtgcgcgattctcaaacagcagaagaaacaaacttgtgcgtgggattacgacaaggctaaagccactatccaggctgaaatcttgaaggatgaatacaagctcaagagttcatcgatcgatacgggcaagttgttcagtgatggcacaagtgctagtcgatggcttccggctgcgtgtccagcgccgaaagttatttctctgcgtcttgctcccagtcagacgtttagttgggagccggagtgtcagatggcaacttcgttagcaccgattattgttgggctggcttcggtgttcttcgcggtttatgtcggtcgatccttgggagggtcttga

SEQ ID NO: 336500 - DNA, 1320 bp, Pseudomonas aeruginosa
atggctcgcacaacggctccccttaccgacagcgcctgccgcactgcaaaggctcgcgaacgtgagtacaagctttttgacggcgatggcctttacctgctcgtgaagcccaacggtcgcaaaggctggcggctcaggtacgtgaagcccgatggtcgcgagggcctgacctcactcggcaattacccggtggtcgggctggctgacgctcgccacaagcgcttcgagctcaaacagcagctcgccaacggcattgaccccatccaatccaagcagcaggccaaggtgcaagccgtaatcaatggccgtaccttcgaaagcgttgcgctcgattggtatgccgggatggtgcccaaatgggcgccgggccacgccaagactgtactcagccggttgaagactcatgtattccctttgctcggtgccagagcaatcgttgagttggacacccacgacctcatgcagccactggaagccgtgacgaagcgcggcaccatcgacgtggcgctcaggatcaagaactacctacaaagcatcatgcgcgaagccaaacggctgcggctgatcacggcgaacccagcccacgacctcgatgggtcgatcaaaacaccacgggtgacacatcgacccgcactacccttatcgcggttgcctgagctacaggcgcgtatcgacggctacaaaggtcgcccgctcacgcgcctcacggtgatgctgtctttgcatgtattcgtacgctccagtgagctgcgtttcgcccgctggaatgagttcgacctcaagagaggtatctgggagatacccgacactcgcccagccctcgacggcgtgcctttttccacaaggggtacaaagatggccggggatattcacgttgtacccttatcgccacaggcagtggccttgcttgagcagattcacgcgatcaccggcaagttcgacctggtgttcgcgggggatgccaaaccgtggaaaccgatgtccgaaaacacggtgaatgccgctctcaggacgatgggctacgacaccaaggtggatatctgcggacacggcttccgagccatggcgtgcagtgcgctggtcgagtccgggctttggtcggagacggctatcgagcggcagatgagccacaaggaacgcaacaacgtgcgcgccgcctacacccacaaggccgagttcctcgaagagcgccggatgatcatgacctggtggagccggtttctggaggcaaaccgcgaggaccatgtgaccccgcacgagtttgccaagcagacgggcgagaacgtcacccgccttcgcagtgccaagaaaaccgagtag

SEQ ID NO: 336501 - DNA, 981 bp, Pseudomonas aeruginosa
atggcattggtgggtaggcatgacggccgtaattttgggtacggcagacaattgagctacgcagggccgcaggcactgaaggacatgttcggcggcggtcattacggcacggtcaaggcgcacactgatcggtggcaggcattcgtgaagtggtgccgctccgaacaggggcccggtatcaatgatgcgcggcagattgatcggaaggtgctgtccgattatgcggcgcatctgcgcgaggtggttaggcgcggtgacctcgctatcagcaccgcacaaaatcggctatccagcgttaacaggaccatggcagcgcttcgcggtgatcagtacgtgaagttgcccagcccgagcaaggcgttgggtatgcagcgcaccggggttcgccactcggtacctcagggccaagaccgcgaacaggttaagcagatcgttgatgctctttgcgaccaacaacaactacgggccgccgcgatcgttctgctggcgcgagccaccggcatgcgcctgcgtgaggccgttttggctgacctgccacggttaaatcgtgaggctcgagacattggcaagatcaacattcaggatggcaccaaaggcggccgagctggcgcctcagcgccacgatggattgcggtggaccaccatattcaagacgcacttgggtttgcacggcaggtgtcgcctgcgagtagccgcaacctgattgcgccagatgaaagctatctgaatgtcctgcaggaaatcatccgcccagcgcgagacgtcctgcatgcatacaacctcaaaggcttccatgagctacgagcggcgtacgcatgtgagcgctatgagcaaatcacccaacaccgcgcgcctatcaacggcagtcaatgttgccaggtagataggaatcttgaccgtgaggcccgaaggcaaatcagctatgagctggggcacggtcgcattgacgtagttgccgcgtacattggaggtcggtcatga

SEQ ID NO: 336502 - DNA, 786 bp, Pseudomonas aeruginosa
atgccgatttcgctagaatcttacgaccatccaagcctctgccatgggcaagtctggacaatcacggacgaaaatttactcgccgagcagatcgcgcgggtagctttaggtcagtctaggcatgtacaaaaaattatagccggagcgaatattggaccgcccgcatcgagggccagtgccgctcaaggtgctatagagttactttctgttcctgttgatggcgatccctggcatagagatggttggatcttccaagtgatatcgtggatggctgcccaaaaggctaatccgagcgtacttatccggccacctcaaatgattcatgccttgaagggattcgatgggctctgtcttgagttgagtgagggtgaagttactgcagccactatatttgaagataaagcaacggatgattcgagaacaaccattcgtgatttggtttggcctgaattcagattgctcgatcaaggagatcgggaaaatgttttagttgcagaggttgttgccttactggaaaccagtagagatgtagaccctgacatcgcaattgaaaacataatatggaaaaacgccagacactatcgagttagcataacagttggcaaacaccactccacggccgccggacggctaaagcttttcaagggttacgatgaagttattgacggaaacgtaagtaagcgaggaggggaaatactctacctagaaaacttgcgtccctggatggcttcactagctgacaaatcaattgcccacatcaaaactttggtggctgctcatgtttga

SEQ ID NO: 336503 - DNA, 3312 bp, Pseudomonas aeruginosa
atgtttgataacgatactgtagaacttattaacagagctcccgaattggatgggctagaccttgctgagctaccaaaacaactgactgaggcctacgcttcgatagtatctgctcgtatttgtttacgtgaaggaacggaacagtcaggattacctgacgacttgatagaaataatcaagcaaatgacacgtctcgctttctccctcgaagcaatagtctccgcttccgaagatgcagaaaaccggatggccgcagcattcgtcgccggctccgctcatcacgtaatattgcttgctcaagagttaatgccaaaaaacattaaatctagcacattgagtgcatacggagtctcccctgaagtttctgcaaccttgctattcctgattgcagaggcaagctctgacgctgccgaaacagcaaagaaaattatcgtgagcggcgaagactctattgaggcatctgtacttaaagcaatttatcatttggcgaacggaagtctattaaaaatacttgctacgcgcgtcccgagcccagacaaatttcaaagcactgacagcctagggcaggctgttgagtcactgtactatatgctattgcatgggatccgggcgctggcggcatcattgctagggtctactgacgagcatgatttattagaccatgactcaaaaattatttttaatcgagtaaagggattatgcgtcgatgaaattgatgagttagtcggtctgggagatcacccagtccacaacgtatttcccggcccgctacatttagcatccctattggcgatggtcgccgaccatcttattccatccagcattataaatacagaccctcccaaaggtatagatgcagcaaaatggtttgatatgaagcaaagcatagcttcagccaggccgtatctatggagaaatcatcggcaggcgatatcttcaggttatctagaaacagggatgtcttctgtaataagtttccctactggagctggaaaatctacgctttccgagctgaagattgcgacagctctactacgcaacatgaaagtggtatttttggcgccaacactttcattggtagaccagacgactagggcgttagctaatacattcccaaatgcagaggttcatcgagaaattctagatgagttattatttgatctggagaatgactcactcccagcaatttcggtcatgacacctgaaagatgcttagcgatgctgagctttaaccctgacatattttcaagtgtagggttattagtatttgacgagtgccatttactgcacccaagggatgcggatcacagccggcgctcgatagactcaatgctttgcctactaaactttacatcggtagcacctaaagctgatttgcttttactatcggcaatgatgaagaattcagaagagattgcagattgggtgtctgagctaactagcagaccctgcttaccattggcgctaacatggaagcccacccgtcaagtaagaggatgcgtagtttacgctggcgatgaaatcaccaaactcaagcaacgcttaaaactcgtgcgatcccaggtaaaaaatgtaaatgcgcctgccccactcaaacgagaattgcttgtacagccatttggcttcttctgtttaaatcagacatggcactcggcgagccgtaaagattacgcattaataccagtacttagcgagactgttaatttatcaacaggtaccgcttcagaaggaaacaactggtatttaacacccaatgggaatcaagtatccgcaacgattgccacctccacggccaggcaaaaaatcaaaactttgatcttcacacaaactataccactcgccaatagcgcagctaaaaaaatctcagatgacctcgaatcatcaaactgcatcctgacagacgaagagttgcaccttttccagacggtagtcgatgagtttgggggggaggagcatgtctatatcaaagtttcgcaagaaggtcgactactatcctctagtacatgccatcatggacttttgctttctatggagcgacatttgcacgaatcgctattcaaacgaacagatggcttgaatgttttagtggcgacatcgactctagcacagggaatgaacctcccaagtgaagtggtaattattagtggtgatagtagatttgatcaagaagccgatgctatgcaacgcttggaggctcacgaacttttaaatgcagcgggacgtgccggcagagccggcgacagttcctatggatttgtattagtagtgcctagcaaagttgtccattttgataacaacactagccagatccataaccactggatggacttaagatcgatattttctcaaagcgatcaatgtttggttatcgatgaccctctcacgtcaattctcgaccaaatacacagcggcgcactacctctccctaacttgccaagctatttcttaagcaggttaccggtcgattatggcgaagaccaagaaggacgaaactcattagctcgcgcgacgatagaacgctctttctctgctttccgagcaagaaaaaaaggtgatcaagaatgggtaaaatcaagaatagaatcggcaatattgtcaagaaattcgaatatagacacctcacaacccgccacttgggttgatcgcctagcagcagcatcaggtatatcgacagcgatcattcgagagcttggcgaaccgctttctaataacattaatcactcggctaccacagacgcttggtatcaatggtttcgcgactggctaaagcgccgccccgccctaatcccaactctgataagaaaggagaccttggaagtatttttgggcagcgactataagaagcttaaggatgacgcctcaagaggtacgcatgcctgtgacataatatttccattattggagctttggatgaccggtcatacgctagctagtatggaggaatcgactggcactccgattaatagagttggcaggtgtgaattcgctagagagtttgttttgaggatcgtccctgaactttcttatatatttggtcttcctaatcagattttcaatgcaatcacagtcgatagaggcgaggataccgagtcacctgtcggccttaactgcttagccttgtgtgttaaggaaggcttaaacagcgtagaaaaagtcgctcttcgcgaagtaagcaagaagcgcttagccagaagagaattacatcgtaagtatcaaaaaatcgagagctatgcgggcatacttaaagaaggtgaaaactttggcgacgtagtgaaccgtattactcaggccctagccttcgtgaatttctaa

SEQ ID NO: 336504 - DNA, 1200 bp, Pseudomonas aeruginosa
atgaagtcggttgaagagcagctggcgctgatccagcgcggtgcagacgagatcctggtagaggcggaactggtggccaagctgaagcgtggccagcccttgcggatcaaggccggcttcgacccgaccgctcccgatctgcatcttggccataccgtgcttattaataagctgcgccagttccaggacctggggcatcaggtgatcttcctcatcggcgacttcactgggatgattggtgaccccagtgggaaaagtgttacccgtcctcccctgacgcgcgagcaggttctggagaatgcggagacgtacaagtcccaggtcttcaagatcctcgatccggccaagaccgaagtagccttcaattccacctggatggaccaactgaccccggctgacttcattcgtcttgcctctcagtacaccgttgcgcggatgctggagcgtgatgactttagcaagcgctatgccagcaatcagcccatcgctatccatgagttcctctatccgctggtccagggctatgactccgtcgcgctgaaggcggacgtcgagttgggtggcaccgaccagaagttcaacctgctgatggggcgcgagctgcagcgtgcctatggccaggaggcccaggtgatcctgaccatgccgttgctggaagggctggatggcgtgaagaagatgtccaagtcgctgggcaactatattggtatccaggaagcgccgggtgtcatgtacagcaagctggtctccattcctgacacgctgatgtggcgttacttcgaactgctcagcttccgttccctggatgagatcgatagcttccgcaaggacgtcgaggcgggcgccaacccgcgtgacatcaagatcaagctggccgaggagatcgtcgcccgcttccatggcgaggaggcggcggcgagcgcacacaagtcggccggcaatcgcctgaaggatggcgagctgccggaagacctgccggagatcgagctgtcgtcccccgaggatatgcccgttgcctctgtccttaataaggcggggttggtgaagaatgcggctgcggctcgcgatctcctgggtgccggcagcgtcaaggtggatgggcaggtcgtcgaccgcaccttcatgctggcgctgggtgagacccgtgtgttccaggcagggaagaaggctttcgcgcgcatcacgctgaaggctgaataa

SEQ ID NO: 336505 - DNA, 204 bp, Pseudomonas aeruginosa
gtgatcatcgacggtcaggtggatggcgacatccatgccatcgaacgcctggagctgggggcccaggcccgggtgaagggcaatcttcactatgggctgatcgaaaccgccatgggggcccagatcgagggccgcctgtgcccgatgaccgaggccagtccgcgcccgctggaactgcctgccagcgtggaaactgtggattag

SEQ ID NO: 336506 - DNA, 921 bp, Pseudomonas aeruginosa
atgtccatcccaacctacgaccagttcattgaaccgatcctgcgctacctggccgccacgcccgaaggcgcgacagcacgtgacgcccatgaagccgctgctgatgcgctgaacctgtcggaagctcagcgccaagagctaattgccagcggccaggccacctacaaaaaccgtgcaggttgggcccatgaccgcctcaagcgcgccggcctgtccagcagcgccaaacgtgggtactggaagctgactgacgcaggtattgcctatgccacccagcaccctgccccgctaactgcagataaggtcgaacagctcgccatcggctttatggacgtgaaattcaagagcacgaccgacgccatccccctcgatgggcaagaacagcctgcgccgacactcagctcagccactgttagccctgacgaccgcctggagcaggctctacgtgaactacgcgaggcaacagctgcagacctgctggatagccttctgcaagtcagccccaaccgctttgaggtcatcgtgctggacgtgctgcatagccttggctatggagctagccgcaacgatctacagcgtataggcggcagcggtgatggtggtatcgacggtgtgatctcactcgacaagctcggcctggaaaaggtctacgtccaggctaaacgctggcaaggcaccgttgggcggccagaactgcaagccttctatggcgctctcgccggacagaaagccaagcgtggcgtgtttattaccacctcaggctttacagcacaggcgatcgacttctcccgttccgtagaaggcatggtgctggtagatggcagtcggttggtcaacctgatgatggatcatgaggtgggagtgacgtcgcgcctactaaaattgccgaagctggatagcgactacttcgatgaggaatag

SEQ ID NO: 336507 - DNA, 1635 bp, Pseudomonas aeruginosa
atgacagaacaagaccagaagcaactgggtaggaccctctgggcgattgccgaccaattacgtggatcgatgaacgcggatgacttccgcgactacatgctgtccttcctcttcctgcgttatctctcggataactatgaacaggcggccaagcgggagctggggccggattatccggacattgcaccagacgtgatggagcagaccgaagccacgacaccgcttcaaatctggtacgaagagaacgccagcgacgtggcggcgttcgagaagcagatgcgccgtaaggtgcactatgtgatcaagcccgattacctgtggggcaacatcgttcagttggccaagacccagagcgacaagctgctcgataccctgcaatgggggttcaagtacatcgagaacgattccttccagagcaatttccagggcttgttctcggaaattaaccttgcttccgacaagctgggtcgtcagtacacggaacgcaacgacaagctgtgttcgatcatctcagagctggcgcgcggtatgtcgctgttctccaccgacactgacacgcttggtgatgcctacgagtacctgattggtcaattcgcggcaggctcaggcaagaaggcaggcgagttctacacgccgcagcagatctcgaacatcctttcggccatcgtgacactcgatagtcaggcgcccgagaccggcctacgcaagcagctagagagcgtcttcgactttgcctgtgggtccggttcgctattgctcaatatccggcaccgcatgaaagacgctggcggcagtatcggcaaaatctacggccaggaatacaacgtcaccacctacaacctggcgcgcatgaacatgctgctgcacggggtgaaggacaccgagttcgagatttaccacggcgacacgttgaccaacgcctgggacttcctgcgcgagaccaatccggcgaaaaaaccgcagtttgacgcagtggtggctaatccgccgttcagctatcggtgggacccgagcgactccatcagtgaagacatgcgcttcaagaaccacggggtggcacccaagagcgcggcggactttgccttcctgctgcacgggctgcactacctcaaggaagatggcgtgatggccattatcctgccgcacggtgtgctgttccgtggcggtgcggaggaacgcattcgccgcaagctgctgcaggatggacacatcgacaccgtaattgggctgccggccaatctgttttattcaacgggtatcccggtctgcatcctggtgctgaaaaagtgcaagagatcggacgatgtgctgtttatcaacgcggccgagcacttcgagaagggtaggcgtcagaaccagctgacagaccggcatatcgagaaaattatcgagacctacgtgcaacgccccgaagaagtgccgcgctatgcgcgacgggtacgcatgcaggagatcgagaagaacgatttcaacctcaatatctcgcgctacgtcagcacggctgtggccgatgaagagatagacctgtcggccgtgcatgccgagctcgttgcactggatcggaagctcaagacggccaccgataagcacaatgagttccttaaggagcttgggctgccaccgctgccttactga

SEQ ID NO: 336508 - DNA, 228 bp, Pseudomonas aeruginosa
atgagcttctggcgccagaatgtggaccagatcatcggcagcaatggctttccgttactcacatatgctggcaaggtgagccacacacaaatggagcgcgcctccaccgcgctttatctcgattttgaccaacgccgtaagcaggaagagtcccgtctggccgatgcgcaagacgatgccgaactgaaggcgctggaaagcaccctgaagaaacgtcggaaaccatga

SEQ ID NO: 336509 - DNA, 786 bp, Pseudomonas aeruginosa
atgagcgaactgatcctctataccaccgaagacggtcgcagccatatcaagctgcgggccaaggatcaaacggtctggctctcgcagcgcgagatggctgagttgttcgacgtcagtacggacaatgtcagcctgcacctgaaaaatatctttgaagatggcgagctgatcccctcggcaactaccgaggaatcctcgatagttcaaaccgagggcgcgcgtcgggtacagcgtccactcaagctctacaacctggacgccattctggccgttggctaccgagtgcgctcgccacgtggcgtgcagttccgccgctgggccagcacgatactcaaggaatatctgctcaagggctttgtgctggatgacgagcgtttgaagaatccggatggccgcccggactacttcgacgagatgcttgagcgtatccgtgacatccgtgcctcggagaaacgcttctatcagaaggtgcgcgacctgtttgtgctcagtgttgactacgacaagactgatcaggccacgcagaccttctttgccacggtgcagaatctgctgctctacgcagtgacggagcagacggcggccgagctggtgacggcgcgcgccaatcccgacgacgcccacttcggcctgttgcattggcagggtaccaaggtgcgtaagcaggacatcctgatcgccaagaactacctgagcgccgacgagatcgacacgctgaatcgcctcgtagtgatctttctggaaccgccgagctacgcaccaaacgacgcgaggaaatccgcatga

SEQ ID NO: 336510 - DNA, 1089 bp, Pseudomonas aeruginosa
atgacgctggacgaaatcgccacgacactgcgtgatgacgctggacgtatcatgctagcgtacgccttcaacgcgactggcaaaacacaactctccgtggcctacaaaaacgccactaagcaagaagacggcaaccacaccggggtctactacaacgcctacagcgaagacctttttgtttgggacaacgatgaaccgaacgatggggccaatgtccggctgagcatactacccagcagcctcagcaagttccacaccttgctgaccgaagacaacatccgagacaagctcaaggcctacaagccgaagttcggatttgcgcttaatctttatgaggatgacccggagaagggaattgagtcggtttcattctttattccaaatcagaacctagatttgccgcagcaatccataaagatttcgcggggtgaggaacgaatcttcgtctggtgtttctttctcgcacttttcgaggtcgaaggttgggccgacaagcaatcgagtcacttcttcatcgatgacccggtgtccagtctcgacgatcacaatatcttcattacagccgcgacactatttgatctcatcgagagtcagttcgaaaatcggaagatcatcgtcaccactcaccacattggcctgttctcgatcctaagtgactggctcagtaagggtgagaaaagtagcaagttcaagaggcagacaaagcactatgtcctcagttcgaagtccggagagctcaagctggagaaatgcgaaaacgatgtcttcttgtaccacctgcgattgctacaagagctgtccaccgcccacaaagccaatgatatccgggcatatcacttcgcgatgctccgacaggttttggagaatgtggcatcgtttctcggcgtcggtcaatttgggtatgtactgaatcagattgggatcaccgagcccaatcgcgtggcagacatcgtcaatgccttgtcacataagcgggtgtactactacgagtcggatattgttgttcaagataaccgcgatattttcgatgtcgtcatgagtgggctcttggtgaagtacaacttcgttctgcatgcggataaggcatga

SEQ ID NO: 336511 - DNA, 1275 bp, Pseudomonas aeruginosa
atggggaaggacgggaaaacagcgttgatgccgaagttacggtttccggagttccgatttaggcctggctgggaaagcactcagcttggtgacgcttcaactcaggtcacagagcgcgtaggtgagcgaaaactgacacccgtgagtatttccgcaggtattggctttgtccctcaggtagagaagttcggaagggacatctctggagatcaatattcgctctacacattggttcgcgatggtgacttcgtttacaacaagggaaattccctgaaatttcctcaggggtgcgtctatcaactacgtggatggggtgaagtcgccgcccccaatgtgttcatcagctttcggctcaaggaaggcttcgtcgccgagtactttctgtactgttttgagaagaacatacatggcgttcagctaaagcggcatataaccagcggtgcccgaagcaatggccttctaaatgtcagcaaagatcagttttatggaattagcattcccttgccgcttccagacgagcaacaaaagatcgccgattgcctgacttcgctggacgagctgatgaccgcgcaggggcggaaagttgaggctttgaagacctacaagcgcggcctgatgcagcagctcttccccggcgacggcgaaaccctcccccgcctccgctttcccgagtttcgcgatgcgccggactggaaaagcgaacagctcgatgctttggcgaagagaggctctggacacacaccgaacaaatcgttcgccagctactacaacggcggaatcaagtggatttcgcttgctgactcgcagcggctagataaagggctgatctcacagacagcgacagagatttcccagcagggtctcgacaactcgtctgctgtccttcatccagctggctcggtggttctaagccgtgatgcgggtgttggaaagagcgccgtcatggaagtgccaatggcagtcagccagcactttattgtttggacctgccatgagaagcgattgtcgaactggttcttgtactacgtgctgcaaagaatgaagcctgtgttcgaacgcatcgcaacgggaagtaccatcaagacgattggtgtcccattcttcagagatatgagcgtgatggttccttctctccctgagcagcagcgaattgcggagacttttttctccctcgacacccagatcacagtcgaggaagacaaacttgcagcccttaagactcacaagaagggactcatgcagcagcttttaccgtctttagaggacaccaaatga

SEQ ID NO: 336512 - DNA, 3033 bp, Pseudomonas aeruginosa
atgaacatgaccgaataccagatcgagcagggcctactggccaagctcggtgacctcaagtacagctatcgccccgaaatccgcgaccgcgctgggctcgaagccaactttcgtgaaaagttccagcagctcaaccgcgtcaatctcaccgatgaggagttttcgcgcctgctggaagagattgttactcccgacgtgttcactgccgcgcaaacgctgcgtacgcgcaatagctttattcgcgaagatggcacaccgctgaactataccctcgtcaatatcgaagactggtgcaaaaacagctttgaggttgtaaaccagctgcgaatcaataccgacaacagccaccaccgttttgacgtcatcctgctcatcaacggtgtgccggtcgtacagattgagctgaagacactggggattaacccccgccgcgcgattgaacagatcgtcgagtataagaacgaccccggcaacggtttcacgcgtaccttgctgtgcttcatgcaggtgtttgtcgtcagcaatcgtgattccacctattactttgctaacaacaacgcccggcacttcagcttcaatgccgacgagcgcttcctgcccatctaccagtacgccaaacccgataacaccaaaatcaacgggcttgaagatttcgccgatgcagtccttgccaagtgcacgcttggccagatgatcagccgttacatggtgttggtggccagcgagcagaaactgctgatgatgcggccctaccagatctacgccgtgaaaaacatcgttaagtgcatcgaagaaaacagaggcaacggctacatctggcacaccaccggcagcggcaagactctgaccagcttcaaggcttccacgctgctcaaagctaacccgaacattgagaaatgcctgttcgtggtcgaccgcaaagacctcgatcgccaaacccgcgaagaattcaaccgcttccaggaaggctgcgtcgagagcaataccaacaccggcgagctagttcgccgcttgttatcggatgacgcagccgacaaggtcatcgtctgcactatccagaagctaggcctggcgctggacgaaaacagcatgcgcaacaagaatcgtgagaaacgtgggcttatcacctattctgaccagctcgaagcgctacgcgacaagcgcatcgtcttcattttcgatgaatgccatcgctcgcagtttggtgagaaccaccagaccatcaaggaattcttccccaaggcccagctcttcggctttaccggcacgccgatctttccgagaaactcgttgatcaagcagatcacgggtgaagagcaaacgctcaagaccacggaagaccttttccagcagtgcctgcacgaatacaccatcacccacgcgattgaagatcgcaatgtcctgaagtttcacgtcgattacttcaagcccgatggcaagaatccgcccaaacagggcgagaagatcgccaagcgtgccatcgtcgaagccatcctcgccaagcacgatgccgccaccggtgcgcgtaagttcaacgccgttttcgccacggcctcgatcaacgacgccatcgagtatcaccgcctgttcgatgaagttcaggcggagaagcaacaggccaatgacagcttcgtgccgcttaatatcgccgcagtgttctcaccacccagcgatgtcagtgccgatgtacgccagcttcaggaagacctgccgaccgagctggcagacaatcaacaggaaccggatgccaagaaagccgcgctgaccgccatcatcaccagctataacgccctttttggcaccaaccaccgcatcgaggaattcgacctctactaccaggatgtacagcaacgcattaaagaccagcaatggcccgatgccgacctgcgcaaggccaatcccggcgctgcgcaacacaagatcgacatcaccatcgttgtcgacatgttgctaacaggcttcgacagcaagtacctcaacactctctatgtcgacaagaatctcaaacaccacgggctgatccaggccttcagccgcaccaaccgtgtgctcaacgagaccaagccctatggccacatcctcgacttccgtggtcagcaggattcggtagatgctgccatcggcctcttctcgggcgccaaggccgacgaagcacgcgaaatctggctggtcgacaaggctcccgtggtcatcgaaaagctgcaagaagccaagttcgcgctacagagtttcatgcaggcacacggtctttccggcaaacccgaagacgtcgccaaactcatgggcgacgaagcccgcattggcttcatcaaagcgttcaaggatgtgcagaaactacaaactcagctcgatcagtacaccgatctcacacccgagcaggcagcaaccgtccggaccatcttgccgccggacgaactcaacgccttccgcggccagtacttggaaaccgccaagcgcttgcgcgatgaacgcgcgagcgtgggcaaccacgtaggcgagggcagtaacgaagacttggcgcagctcgatttcgagttcgtgctgtttgcctccgcaactattgattacgactacatcatgaagctcatcgccgacttctccaccaagaagcccggcaaggcctccatgagccgcgaacaactggcgagcctgatcgcgggcgacgccaagttcatcgacgagcgtgacgacatcaccgaatacgtgatgagccttaaggcgggcgaaggcctggacgagcgtgcgatccgcgccggctaccagcaattcaaggccttgaaggccgcgcgtgtgctaactcagctcgccgcccgccacggcctgcccacagcctctctgcagagttttgtggacggtgtgttggagcgccgcatcttcgacggggagcaactcaccgagctgctcgccccgctagagcttggctggaaggcgcgtacgcagaaggaactggctctgatgagtgaactggtgccgctattgaagcaccgcgccggaggtcgggagatttcgggccttcaggcctacgaggattaa

SEQ ID NO: 336513 - DNA, 192 bp, Pseudomonas aeruginosa
atgtcacgcctgaaggacgaaaccctttctatccgcacctccgctgaaatcaagcagcttctgcgcttggcggctgatcgtgaacgccgttcagtggcgtcgatggtcgagattttggtgctggagtacgcgcgcaatcatgacctgagtctggatcacccatgcggagagccccctaaggcgcatgcttga

SEQ ID NO: 336514 - DNA, 1080 bp, Pseudomonas aeruginosa
gtgagccccaaccgacgcctcaacgacttcctgaaagccctggagggcaagatcggccgggcaaacgcgctgcgggagctggtcgaatgctgcaaggtcgccggccgctaccccggtaccctccaattcgacaataccgtgcccggctggagcgccctcttctgcggcatcctcacgctcggactgatgaccatcgtcttctacgccgacggccagtacctcgctccgatcgccaaggttctcaacctgcacctgcgcgacgcgcagtttgcagcggtcgtgtcggccgtcatcgtcgccggcatcggcatcggttgccttggcgtcatggcctcgcgaaaccaccaggtgtatgagctggccgacgccatttccttcaaggctgccctcgcccacaacgggctcacttctgaccagtccccgcgtgagatgactctggaccggctaagccagagcttcggcgactatgcacgaggcaattactcacgtgagattcgggcggcctacaccggccatttcgcccgcgacggcatccggttggacttcagctactaccagctgcactacgtgaacaggcgcgtggaggtctccaccgacagtaagggcaagaccaccacccggacggtctacgaccactacgaccgctattcactggtcatccccttcaagtgggtacgcgaagtcagcctgcgcagcgacagccaggatgtcatcgaccgcgacttcgaataccgcaccaaccatccccacttcgagagccagttccacctcagcgccagcagccagctcaaggcagccaaattcgccaaaccgaccgtggtgctgatcctggacgaactcggccgcagcctgaaccgcgtgaacctcgaattcgacgccaacggcctgctctgcatcagcttctccgacagcgatttgctcgactacgagaagccagcggccagcctgttgcagccagcagagctggcgcaggcgatcagcgaggacatggccatgcccaaactgcgcgcactgcttggccgcgtgcagtcgctgtccaatgccaccgacaacaacttcgcccaaccccaatccgcctga

SEQ ID NO: 336515 - DNA, 570 bp, Pseudomonas aeruginosa
atgagcaacgcaatcatctggaccctcggggtcggcgctgtactcgccctgatcgtcatcggcatctacaacggcatcatcgcccgcgccaacgcggccaagcgttcctgggcggacgtgatcacctacgagcgcggcaaggccaaggtgctcggccccatcaccgaaatgctggccaagtacgccgattacgagagcggcctgctgaaaaagatcaccagcctgcgcgagcagttggccacgctcaaggacgacaccagcgcggatgatctggtcaaagtgcagtcggcggcggccgaggtcatgaaggcggtcaagctcaccgtcgagaactaccccgacctgaaagcgaaccagctctacagccaggtcatggccgagatcgccgatcagcaagaaaacgtgaatggcgcggtggccatcttcaacctcaacgtcgagctgcacaacaacgggatcgagcagttccccggctctctggtgaacagcttgttcaacaagcgccagccgatcactcccttcaacgacacggcagctcaggcacagttcgactaccaaccgaacctgtga

SEQ ID NO: 336516 - DNA, 468 bp, Pseudomonas aeruginosa
atgatcaaacgctccgcgcttcttgccactgttctcgccactgctgccctcggcgggtgcgccagcctggacgactactcgaaggcaactaccagccgcacggtgggctactggcagggcagtcagcactgcgtcaccgagaacagcggcgcgcagcagatcgttggcctgaagctcgaaaaggacgtgatgccgctggtagccaacggcattctctacgtcgagcgcaccatgcccggctggcaggaacctgcgcgcgtctggatgcaggtcaccgccgaatcctccttcggcggcaaagccatcatcaccggtaagcaggtgctcaagcaggagggtccggtgtactggtcggtagccaactgggaagccaccttcctcgacgacgacagccttcagatcagcgcgtgcggctccaacctggttctcaagcgccagcagaacagcgccaccgtcggcagcctctga

SEQ ID NO: 336517 - DNA, 975 bp, Pseudomonas aeruginosa
atgagcgaacaggacacgttactggccgagcaggcacggattgacctctacaacgaggcctcactcaacccagacccgatggcagcaggcggcgcggagccgctcggcttttcgcttggttcgtccaagtcgatcaaggcggtagccaatggcgactcctggttcgactacctgcccggttgggacatcatcaagtccctcaagtccaagggctatgccatcaagaactttggtacgggcggggacacgctggagaacatgctctacgggaatagctacgaccggagctgggagcgtgaactgcctgagcacgccgaagtacgggccacggtcgcgaatctcaagccgaagttctttctcttctctgggggcggtaatgacatcgccgggcccgagctggcagcctacctaaaccacgcagatgcgggccttgggggtggtgatctgcgcttggggtacctcgactacatgatggatacggtgttcttcgagtactacaagtacatggttaaaaccatcacgcagtcgcacagcgacgtgcacattttgatccacggctacgctcggccgctgattacgggccttggggtggtgaacatcgttggcggctggcatttcatcggcccatggctgcggccggcgctgaccagcaaaggtattgttgatcctgccaggcaataccgggcggtggccacgatcatcgagaagctcaacgacatgctcgcccgcgtcgcggcgctctacccaaacgtgcactacattcggctgctggacgacatcaagcccaggcactggatcaacgagctgcacctgaccaaggagggatatgacgtggtgggagggatgttcgactcggtgatgcaggggcttatggatacccaggagaaggccgacctcgccaacgccaagaaggacctcgacaacttccttgctggccaggatcagcaggttatggaggccgctggcttcaagtaa

SEQ ID NO: 336518 - DNA, 681 bp, Pseudomonas aeruginosa
atgaaccatggtgaactctgcgaactggcgaagaagtggttgctgcgccagaacagcaagggtggacacggttgccacaccgcactgtcggagtgcaggtcgggctggggaggcgagatgccagatgccatcggctaccgcgctgcaacgtcggtgaccgagacggtggttgtcgaggtcaaggtatcgagggcggacttcctggcggacgcgaagaaaccacaccgcgcccccggcaaggggatggggatttaccggtacttcatgtgcccggcaggtctcatcaaccccgaggaagtgcctgagcgctgggggctgctgtgggtccacgaccgtggcaggatcgaggcgaagctcggcccggttgccctgtcgaacaactgtggcacttttgaagagctggcgctgccctggaggcacgagcgggagatcgagcgtgaacagtggctgctcgtgcgagtgatgagcagaatcgccgaccctgacaagttgaggaaaagtctcaacgatggcctcaaagagcaggcgaggctggcgggcatttgcaaccagcaggccgaagaactccgccgccttcgcgatgagagagtgcaggcgtcctgggcgaatactccagacgaactgaaaaccgcaactccccgcaagatcggcaacactcctgaggtcgatgccggcatgtaa

SEQ ID NO: 336519 - DNA, 240 bp, Pseudomonas aeruginosa
atgcacattctgaagaagttggcccaggtcgtggtcttcccgttgctcaccctgataggcattggtgctgcaatcctcgtcaacaactggggctgctcggtcgaggtggaagttgtgaacctggtccacgcggcatccatcctgctcgtcatgggcggagctttcggcagcggcgtcctttccaccgaagctctgtctgcgacgactgtgcagaagaacctggagtccgccaaacaatga

SEQ ID NO: 336520 - DNA, 579 bp, Pseudomonas aeruginosa
atgcgggaagccgagatcaagcgtgcactgaaggatcagctggagaccgaggccggcggacgcctgccgttcctggaagaagtccagatcaatggcggtgagattcgagcggacctcgtgcaggtgcaggacatgcattgctacgagatcaagagcgcaggcgacacgctgaaccgcttgatcggtcaaggctcgcggtatgcccgtgtcttcgagctggtcacgctggtacttgcggagcgccatctgaagaaggccataccgatgctccccacctggtggggcgtggtcatcattccgggcgaggcggcacaagattttcagcacctgcgccgcgccacgcccaatgttcggcaagaggccgagacgctggcgaccctgttgaaccgggatgaagccctcgcggtactggccgaaatcggggctacgagggggtacagaagcaagagcctgtaccaaatacagaacgcgctcgctgagatgcttcctctacctgaactgaagtcgcaggtgcgccagcgcctcctcatccgatgcgggcaggcaccagccgaactgccccttttttcttcgatgtaa

SEQ ID NO: 336521 - DNA, 552 bp, Pseudomonas aeruginosa
atgccccgtaaagccgaagtcatcagatggctgcgtactgaactcaaaacgcccgagctggggtatctcggccgggcagagctgtacgcggaagcggctgcaaaggggctgtccaatccggagatcgcgactgcggccgacgtaacggcgcaagccgttgagcagtccctgctgctggccggtgcgagcgctgaactgaagaacttcgtcagtgccgggcgtattgctccgtcaaacgccgtacagatcgttcgtttctgtcgcaagcacccagatcacgacccggttgccatcgcccgcgcggcgatagttgcagcccgcgtcgagggaaaggaaaaggcatcgaacaagcacctgcctgcctacgtgcgggcaccgggtacggcgtccgcaattgagttgcgcgcatcactcgtgccgctcgccgaaaccatcgcgaagctcttggccagcaagggccgccgtgatttgaagctgccgatcacgcgcgaccaggctgaccagctgctgcaattgctgaagcccattgccggctctgatcaagagcagtga

SEQ ID NO: 336522 - DNA, 825 bp, Pseudomonas aeruginosa
atggaagaaacaaactcgaacccccccaaaaaaattggacgcccttccgagatcaccgacgcccaggtgatcgaagcgggcctcaagctcaaggcgcaaggcgtgaccgtcaatgcgtcaaacctgcgaaaggaggtcaagggtggcgcaaaggaccgcctcttccagatttgggaggactacctgaacaaacagcagctgcccgacgaggtgagcgctgtcatagagcagctgctcaaggacaaccaggtctacctcaacaagctcgtgcgcgagaccttcagcgcgtgtgagcgcgtcgcggccagccggtacaccgctcaggaggccgcaatgctccagcagtgcgctgagctgaagcaggaggtgcaggattccgacgtgctgatccaggagcttgaagatcaactccagcaggagcgcgagctgcggcagaaagtcgagggggagttggcagctgcactagctgtgatcaagcagcatgccggcgaagtgaaagcgatccagctggcccgagacgacgttcaacatcgactcgatgctgccaacgaggtgatagccgatctacgtaccgaggtaggcggtctgaaagaggcgcgctcgactgaccaggagaccatcagatctctgcggcaagacaaccgcgatatcaaactctcgctggacgccgtgtgcgatgttggccatcaacagaagtcagagatcgcccgcctcaccgagaaggtgaaagggttagagaaacaggtgaccgacaaggagcgcttgcttgttcaatccaggacggagaattcgcggctaactcagctgctggcgcgcaacgggtga

SEQ ID NO: 336523 - DNA, 432 bp, Pseudomonas aeruginosa
gtgattcgagtgagcacaaacagagacgcaacccgccaagctctgcccatccttcgcgatggtgatgtgtccgcctacctgcgcgacggcacgctgccgccgggtgtttccttcgaaggtgtgccggctgacaaagtggtccgaaatcggggtttctggttggtgccgaagtaccaggcgcacaaggtggcctgcatgttcctggtatcgaccgatagcccgcgcatgaacgatgacggtctggaggcgatccgcgagccaatcttctgctacttctccgagaagtcagcgcagcactacctggggcatcgccgagcaggaggcgaggatgaagacggtatgcaggtgctggctcctatcctagatggccagttccccgacatccagatcgactgccttacgtttgtcggcaaagtcatcagcgccaaatag

SEQ ID NO: 336524 - DNA, 585 bp, Pseudomonas aeruginosa
atgaaaagcaccaatctcgcactggtaccaactgaatcccgcccttcgagcatgaaagatcgcctgctcgacgccatgtcaggctcgttcaagcgcctcttcaccgaagcgccggatgcgagcccgcactctcccggcggtaccgctccgaaggttggcgcatacggcaaaccgatctactacctgagagacggcactgtgcttcatagctgttcggtcaagatgaaggaccttcgcctacgtcgtaagctcactcaaaacgcagtagagctgagctgcccggcgctgggcttggccgtttacgtgtcttccacggcccgattccataccggaaacaccgatggccgcgctggtaccgctgcggttcgcgtggtggtctacgaccatgagggcctggctccgactcaaactgaggtggtggcaagcccgtctcaactgctggaagcacttcaccgcgtgctggtgatgacgtacaacggactgtcgcgcgagtacaacctcgccggcttccgtcaggagtggttatgcttatgctccgagcgcccggacctgatcccgaacattccgctggcgttgggtgcttga

SEQ ID NO: 336525 - DNA, 1839 bp, Pseudomonas aeruginosa
atgaacgagacccaccccccttatcgtcgcaagaagcctctcacaggctatgtcgtcaagaacattggcatgaaccgtggacggccccgaatctggcttcaggactatgaggtcagcaagtccggccttaagcccggtgaccggtacgagatcaccatgcgcggcggctcagtcatcctcaccgccaacccagatggctcccgcgttgtcagcgccaagaagctccgtcgccccggcgagccagaagtcccggtgatcgacatcaactcctcccaggcactggcgctcttcgaggacatgccggccattcgcatggtccagttcgacggcgaaatacacctgctgccgctggcgaccgaactgaggaagaaggagcgtctctcgcggctgcgcaacaagatggccgccggcaaggaactggacgttggctcgctctcccacggcggcggcttcatgtctcacgcggtgcatgaaggactcggcaacacaggcatcgggagcaatctgcggtttgccaatgaaattcgcaacgacctggttgagcacacttctcgtgcgaacgatatctggcgcgatacaaccgttcctattgttgctccgatgcaagagtttgcctttgacgaggctgctgctgcccacctaccacgggtcgatcttctcgaaatcgggatgccctgtagtggagcgtctgtcgcggggcgcgccaagcgaaagacctcaatgcccgaagagcaccctgacgttggccatctcgtggtgggagcgcttgcgattgtggcccgcagcaatgcggcagtagtgctgattgagtgcgtcgtgccgtacgccagttcggcctcagccgccatccttcgcaatcacatgagggatttcggttacgaggtccatgaagcgatcctggaaggcagcgagttcaacgcactagaaaaccgtaagcgctggttcatggtggccgtgactgaaggcatgcacttcgactgggacatgcttcaacgccccgaaaaacgcgaaatgcgactgggcgacgtgctggacgatatccccattgactccccgctgtggagcgccatggacggcctgaaagagaaggaagttcgcgacatcgctgccggcaagcacttcatgatgcaaatcttcaacgccgagtccacgcacatcgggactgtaggcaagggctaccagaaaaaccgcagcacagagccaaaaattcaggctgagcacgacccaaagctgcttcgcctccttactccagcagagcacagccgcgtcaagcagcacccggaaagcctcatcaaagggatcagttcgacgctggcgcacgagctactggggcaaggcatcgtccgtggccaaggcgtcgccctcggcgaagccatcggcgagagcatctgtcgctttgcggccgagcaccgcccgaagaccgccgacgagttctacgaggcaataaaggaagagctggagcactctgtggcgctctcggtcgtggagctgcgtgccgcactcgcgaacgtggtctatgaaggccctgtgaccgtgaacgagttgggtgccatcgtgcaggacatcggcaatggcgtcggcatcatccacaagtcgtcggagaccttccagggcgtctcgctgggtgacgttattcgcgtcagctacccaagcaagcgtgccctcccccgagtcgagaacttaacctccaagtcctcacgcgagatatcccaagaactgatggcggcagcgcacgaagcaaacgccgctctccaagctgcacaacagaacctattcggctacgaggagccaactgcgcccgccgtgacacgacgctcagtcccccgcttctctgcatag

SEQ ID NO: 336526 - DNA, 507 bp, Pseudomonas aeruginosa
atgaaaagctccgagcagtcgttaaaaaacgccgcaaacaccatcttcgcgaagttcgtcgtgaaactcgcttccactgagccagttaccgccgccgtgatcaccgcagctgccggcggattgattctggctgcggggggttaccaggagcttgccgacacgacaacccttcttacccaagcaggaccggacgcgctggccgcataccaggctacaacccccaagaccatcactcagattctcggccgcgcactggccggcgacctcccttctcggggactcgccaccatgggcaccggcatctggacggtgctcactgcgccccccgtggcgtacgcggttgcgaagttcgcaaagggcctgtacttcgtgaaggagatggcggagaaggttgaacgagcagaacgtccgcgcggggcaactcgcctcgccgccgacctcgatgccatcgacaatcactaccgacagccggaaaataagggcccttcacctcggggccttcgctag

SEQ ID NO: 336527 - DNA, 285 bp, Pseudomonas aeruginosa
atgcagatcgagctttccacactccagatcgctgccggtctgatactactgcaattcgtcgccacccttctcagttaccagtttcggcgctttgagctatgcatcgcagcctctgcggtgctggtggccttcgtcacgggctctttcctggctccagcgctcaccccaatggccagccgcgcagagatgctgcaaacgtcctttttcatcggcgtggtgatgggctcggcctggtttgccatcgcccatcattcctggaagtgcgtcagcaagcaccgcgactaa

SEQ ID NO: 336528 - DNA, 810 bp, Pseudomonas aeruginosa
atgagggacacattctcgaagcgtcatggcttcgcagctgttgaagaggcagaaatcatcatccgcgaagacgcaccgcaggcgttgcaggagtatctcatccagctcgtttacgagtgcggtctgaagccatcagacctacgtgaaattatctgcaaggccctgaaggtactgcccaacaaacagaactggagcgagcggccgaatatccacgaagagaacgtccggctgctcagcgagtgcaaatggtacaaggtgtatgacgtgatcgagcgtgtcgacgaatacctcgggcgaacgaactaccaaggcgacgtgcaccagcacttcactgatgagctgaacgagtttttgattgagcggggcatcgggtggaagctaacagaaggacgcgtagaagttcgcggcccggagtcgattgaagtgatcctgaggtcggccagagagacggagctacaggccgggcacatgacggctagcaaagagcttaaccaggcgatctccgatctctcgcgacgtccagcgcctgatccaacaggggcgattcagcacgcaatggcttcgctggagtgcgtcgcgaggcagcttaccggtgatcataaagcgactcttgggaagatcatgaacgataaccgcatgctcatcccggcccctttagaccaagcggtgaacaggacttggggatatgcgtcggaatttggacgccacctccaggagggccgtgagccgacgtttgaggaggccgaattggtcgtcgggctgtgcgcgtcgttgagcaactatctgatcaagaaatcgaaggcgcagtga

SEQ ID NO: 336529 - DNA, 246 bp, Pseudomonas aeruginosa
atgacccacgaacaggctatgcagctctaccgcgcttcgattgacccgctcgcctccatccgagagggcctagactggtgggcggcagtaaaagccgagctggagcaagtcatcgcagccaagtcggcttctgctggagcacggatcatcgaatggtggcatcacgactggtcgatggtttccgaccgccccttcgatgcagcaagtcgtatccgcattcatgccaagcaactcaagatcaagtag

SEQ ID NO: 336530 - DNA, 231 bp, Pseudomonas aeruginosa
atgactcagcatgccccgatatccctcgacacgttggttggcctgtatgcagtagcaaccggccaactgtcgcatgtcaacatgggttcgtgccctgacattctggagggtgccatggctcgtgacgatgagtgcccggcctgccagctgctgctggctgccgatgcccagctgcgcgatgccggcgtaagtctgccggatttcgtagcaccgaccgcacccaacaactga

SEQ ID NO: 336531 - DNA, 225 bp, Pseudomonas aeruginosa
atgcctaccagacttgaaagcaagaccgcgaagggcgtagccctgtggatcgatcaggacgcccaaggcctccatcgcctcgactgtgcttggtcgggacgtggcaagcacttcgacgagctgccacgcttttaccgcaccgagcgaggggcgaagcaaggggccgcgctgctgaccggcgagcggcttacctgggtacagccgtctcccggcactacgaactga

SEQ ID NO: 336532 - DNA, 252 bp, Pseudomonas aeruginosa
atgaattaccacgccccgagcaagcaattcaccatcccactggacagcctgaaaagcggcgccgccgtcctgtgctttgcaatcaagatgattcggcaatccgcagggctgccgcttgaaggtggcgaacggcccgtgcaaatgtctgatgcctgccatgccgaacaggcgattctcgacgcatcacggatgctggggattgacctcggtgcggcccgtgcgggacagctggacgttcgaagcgctgactaa

SEQ ID NO: 336533 - DNA, 222 bp, Pseudomonas aeruginosa
atgactatgctgagccctgtaaatctggacgccgatattacgcgtcagcgcctggaggcagcttttatcaggctgcgtcacctgatgcacgacagcagcgatcagaagcgtcagcagtaccacggaatggctcagggcgtgttgatcgccatgcatgcagtcaacctgcttgatgacgccgtattcgactcacgcaccgccgatcttgcttccgagctttaa

SEQ ID NO: 336534 - DNA, 417 bp, Pseudomonas aeruginosa
atggccagcgactccccctttctgaaataccgcgacattctggttcaccagtcttacagcgcggcaggtgccctacaggacttcaccttaagttgctacaacggctctctcgggcagttccgaggcgactccattggcaactttgacaccgagcactttgggattttcctggagctggtgaaccactaccgccggcacggtgaaaacgaccagcattttttggaggtcggcgcggccatctgggagagccgcagggagcggggccgcaaactcctggccgatcttgcagaacatcgcgcaatcaaaccctcggaatatgaggacggatcggagcgcgagtattggcagcaaatggattggctggaacgcgaggctgatcggatgaaagccaaaggctggatcgacgccaccaattga

SEQ ID NO: 336535 - DNA, 615 bp, Pseudomonas aeruginosa
atgagcagtgttgagaaggtagtgcgcatgccgctctacatcggccaggagccactggtggggaattactacgccgccgagtgcacgatctgcgggtgggtcggtagctcgcaagtgctgaccgacgattgccaatgcactcaagatgcgggcgaccggttctgtttgggcgataccgatgagatcggcacagagcgcttgctcgaaatcgtccaggccatgggccggcgtcatggcgagtcgcaaaaggcttacaaccagctccttgagcacactaatgaaaccgaacggtacctggacaacgcggccgagttgctgggcgaaatcgtccagagtggccaggcctacaacgaatgcaccgacaagggcagcgctaccggcctgcgggtcgctgccgtgcttgagtatgtcgcccagttccagcccgaaccgcatcagccggatgcggatgaggaagcctgcgatgacattagcgcttccgccggcgtgcgattcgcggactacaaggaagatgacgagcaccccggcgccgattacacattggccgggccgattgatgaatgcgaaggcctcgacggtaagccgattcagtggaagcccggcgaactgggctag

SEQ ID NO: 336536 - DNA, 306 bp, Pseudomonas aeruginosa
atggacaagctgacgatcaccaacgctgagtggaagacattcaactacgaggactatgagtccggcctgttctggctgctggttgaagcgcccgaggttgatattgatgccgatgacgatggcaggacggtggggcggtacacgggggaagttgtgcggtcagctgtcctggcgactgttgagcaagatcatgacggcctgccctatttcgatgctgtcgattccgtcaattttggccgagtgcctgatgatggcgtggtgacgcattacgccgaagttaaggcccctggctttctgtccaactga

SEQ ID NO: 336537 - DNA, 216 bp, Pseudomonas aeruginosa
atgccccagacaactgcactaaacctcgctcttgaagcgctaaccctggcggctgagtgtggcggcgaaattgatcacgatatctacgtcgaagcaaagcagaaactcgaaaaagtggtgcaacaggttgttgcgtatggcgtggcgatggatagcgcagagcgtccaccagaaggcaacgattacaaccgtctgttgtcgatcctcgaaatctaa

SEQ ID NO: 336538 - DNA, 315 bp, Pseudomonas aeruginosa
atgcatcaatctccgcctgatgtgaaacatgctgatctacatgatgctcaagccgcagctcggcagttcccaaatgatgtatctgtaccgagctgggaggctttggaagcgcttgtaaagggtgactgcgtaaaagtcgggctaggcgagcacggcaagggcagtgaggctttttgggtcgagctggtcgccatcggcccgctccagatgtttggagtaatcgtcaaccagctcaagttcacagccagccacaatcttgcagccggcaacataattatgattcagcgcgataacgtcttcgcgataaccaaatag

SEQ ID NO: 336539 - DNA, 291 bp, Pseudomonas aeruginosa
atggccaacccaaaggtgcgagtctgtgacgttgcggtcagcgtcatgattgagaccggcaatcccagcgtgatgtacggggacgaatggctctgccaccagatcgccaagcggatgggatgggagccggatggcccctggacaactcgccgggttctcgctgctctcgcaaggacaccagggaagctaattgctgggaaggttcggatgccctccgactgttgtgcacgcggacaattggtacgccatttcgagctgccggaaggcatgctgaaaaccaacatcgaatag

SEQ ID NO: 336540 - DNA, 348 bp, Pseudomonas aeruginosa
atgcccatttttgttactcagttgagcaaggaagagattcagcggcgctgggatctagcttcggcagcaaaaaaagccgaactgaggcggtcgctacgtgaccctgaagtttggcttgaacagaccctgagtttgattggggccgcgatcaaagcgttctgtttggtgttggtcgtcaacagtgtgttttgggataagggggtgactgtcccatgggggctgtccttcttcttgtctctcccgattgtcgccctgaatccgtggcaaatgttctggcggtatgtgcccttggatcgcgctagtgcggcgtatcaacgggtaatcgacgaactcaacgagaagttatag

SEQ ID NO: 336541 - DNA, 189 bp, Pseudomonas aeruginosa
atggcgctgttcatcccagaatctgaattggctctcattgggtatcgctggccagacgcgccaaagatcgtgttcgagtgcagtttcgtcgaaagggtcgctctgtggaaagaagggtactcggtggacgcaattcctgttaacgaggccgttaagatgaaggcggaattggataaagttcggaaatag

SEQ ID NO: 336542 - DNA, 255 bp, Pseudomonas aeruginosa
atgacccagcttgagcaaaccatagccgaacgcgcccgtgcccatctggccggcttacaggccttctacgcgaaggccaaggctggcaccgctgtcgaggatgaccgccgcgactaccagcgcaaccatgccgccatggatgccctgttggagttgcgacactggcgagacagcggcatgagcgaggcggggcgtgacgccctgctgtccgtcgagcttgaggcggcgaaggcgctgcgcgactactgcgcataa

SEQ ID NO: 336543 - DNA, 288 bp, Pseudomonas aeruginosa
atgacaatcgtaaaaatgaaaaccgcaaccggcgaaaaagtgaccgtgaaactggcggaaggcgcaggttccggcaaaggcaaaagctttttgcccgaggtggccaagtcgattgagcaggctgctcaagaacgactcaagctcaaccgcgagtatttcgaggaaggctgtgcctgcatccacagttccaagacgctgcaactttgccctaccaacatgcctgacagtgaagcagtcgcgttctacgagcaaaattgcaagtgctcacgcaactacgtcccgagttaa

SEQ ID NO: 336544 - DNA, 246 bp, Pseudomonas aeruginosa
atggcgcaactgattgaggcgctacgcgccaccgccacacagtggcgcaccgcgaacccggaacggcgtggaggcgtggtactgatctggcaaggttcggtgtacggctggaagaactgcctgcgggatgcagctcacgaacagcctggcgcgtatgcggttgacgacgccggacatgttttcatcgccgagggcggcaacgactatgacggcgcaaaggcctgggtcgccgtccccgcaaactga

SEQ ID NO: 336545 - DNA, 306 bp, Pseudomonas aeruginosa
atggacatgaaatttcgcaccgcatccggcgctatcgtcagtgccaaccccttggctgatgccccaacccccgtgagcctggctaatcctgccactgagcgtggcgtaggccaggtggagcccgcgcatcttctgcgcaagcagattgagagcgtgattcgggaatacggtgctgatccagcggaagccgcactggccgtctgcgtcatcctcgacgggaacctgggcttggctgaagacggttacttcgacgacgacgaaaccgtgctcaacgcgatcctggccgccgaccaggctgacgactga

SEQ ID NO: 336546 - DNA, 207 bp, Pseudomonas aeruginosa
atgcccatgatgttgccctggagcgaccacgaacagccggacggaagcatcgaagtacgctgcggtggaatcgcgatgttcaccctcagcaggagcggtgactttggcatgtgggagctgcgccgcgctggtgagcccgaagtcatcgagcgcgaccagtaccgcaacgatctgttttccggcatccaatcgggcaggatcaagtga

SEQ ID NO: 336547 - DNA, 246 bp, Pseudomonas aeruginosa
atgcctctacaccttgacgaagcccagctggaaagcgcgctgacggcagccgtagaccgctgcattcacatcgacgctccccaggagcgcaacaatgccatccgtagagcggcagtcgaggaaggcttccgcctcggggtggaagaagctggcaagctgcgcgatttgctcaaacggcttcaccctcacgtcggtggttgcgattcggtcctctgggacgagttccacgcagcactcaagagttaa

SEQ ID NO: 336548 - DNA, 192 bp, Pseudomonas aeruginosa
atgccaagcatgctgaccgccagtgataaagacaaggcaactgcacggcgctttttggatggctgctacgaggatgctgtgcgcctgcccagccaggcgcagatggagcgcctaattgcgctcggttgggttgagcgggtgccgggcggttatgcggaaaccccagtcttgcgctgtatcgacctgcactga

SEQ ID NO: 336549 - DNA, 435 bp, Pseudomonas aeruginosa
atgtttgatcgcatcaacaaactggtcgccaaggacggatttagcctcctgctctgggacgaccgctacagcaagggtatctgggcaggactaggcatttcccagtccgatgtggataccgtctctagcctctccgaggccggtgatttggacatgatccctgccatggaatatgtcttctcggctgcttggctcccctatgtgactggcgattctgtcgctgatgccttgagccagctggaggcacgactggccacgctccccgaggatcagctaacgcgagactcgctgtggtcttcactcaccagccaggcgatagaggcactgcgcactgcttaccgggaggcccctgactacgggatgctcgatggccgtttgaccaagcttccatcctcctgggcgcaagccgagcaagctgccggacaggccgaatag

SEQ ID NO: 336550 - DNA, 240 bp, Pseudomonas aeruginosa
gtgaatcttccgatttctttgcctgatggctggtcagccgatgctgatgaaaccctcggcgtgatcatcaccgccgtgtccccggaagggcacaaggggtttgtcactgtcagcgaggcgaagcgttctttcgagttgggcatgagtgtggtgcggcagcgcaagcattactccggccggtactggcggaaagagctatacgaggaagctgttgccaccctccaggcagcaatcagttag

SEQ ID NO: 336551 - DNA, 195 bp, Pseudomonas aeruginosa
atgaaccataagcaggccctggcattgcggcagtggatacgggacgtgaacaacctggccgagcggtatggtcacgaggaaatggtcggtaccccggatgatcctgatggtgagtacgtcgagcggtttgaagccggtcaaaccccggccgaagtcatcgccgccgacttcggcgcacagcgcccaaccagctaa

SEQ ID NO: 336552 - DNA, 189 bp, Pseudomonas aeruginosa
atgaaaattgagtttgagaacggagcgaacttcattactgctcgcaaagacaacggcaccgtagagattcgctgtcagttccacctgactgactgccgcgataccgaggcgcttgatgcctttgtgctgcgccacggtggcccggaagcgaccgccgagtatttgaaacagtgctaccgcaaccagtga

SEQ ID NO: 336553 - DNA, 231 bp, Pseudomonas aeruginosa
atgaacaaggcacgtcgcaagcaactggccgagattgccgagcaactgcaagagttgcgtgaccgcatcgagcagttgcaggaagaagaacaggaaggcttcgacaatctgcccgaaggcctgcaacaaggcgagcgcggccaggtaatggagcaagccaccgagcagatgggcaccgccctggactcgatagacgaagccgtgcaggccctggaagaagcccaggcgtga

SEQ ID NO: 336554 - DNA, 276 bp, Pseudomonas aeruginosa
atggctgatgattcaaaaccgcagttcccccgaggggatgtgcgccgcctgctgcggcttgctctggctatggctgagcttgagcgtccgacgcttaacgccctggctgccgagacaggccatcacaagcaaaccatcctcgatgacattccccggctgcgcgagcagctgggcgttcaggtggagaaagagggtgccgagtacaggcttgtggattgggggccggtggtcaaaaaggcagggataaaaaagctcttgcaaggtcagatgagctga

SEQ ID NO: 336555 - DNA, 1053 bp, Pseudomonas aeruginosa
atgaaaatttcgagactctgctggtgcatcagtttggcaagcctgttgggcggttgctccacgcaccaggtcgatccccccgaactggacgctgcaccacaattcgtgaaggcggacggcaccacatacagagatgagtggaagccggtcgatatctcgctttaccagcctggccggccctccgtgcagcagccgacggattcatcaagtgtggtcgtccaggatggtcctcaagctgactacctgtacaaggcctcccagtacgctcgcgagcaaggcgatccttctgctgcactaggctacctcaggcaggcagccgaggccggaagttcccaagcccactacgatctggctcgcatgctgactgccggcgaaggcgtacccaagaatcccgttgaagcaagcgcccacctggatgaggcggcgcgcctcggaaatgctgaagcggtgcgagttctcggttggatgagcctgcggggcgataacgggcccatggatcaggctgggggcgtcgcaatgctggagactgctgcaacaacaagcgtgcgggcacagcgtgagttgggaatgctgtacgccgacttctaccagccacatctaagcgacccggagcgcgcggcaggctacttggctgctgcatatcaggctggcgacgaagaagcggctctctactacggaaagctactggtgcgcgaagggaagccgttggaggctgtgataccgctttcctttgctgcggagatgggtaacgtcaaagcggtacaggtactccgtacgctagacggtaccggagcggtcgctgctgcttcggctgatctaaagccgaggtcagatgacgcagaggcgatgtacgagaaaggcagcgcaatattgctcggtatgccgagtcgagcaaatgaggctgaggcctatgcgtggttttcgctagcagctgatcgcggccaccaattggccggggcggagctagcaaacttggcgggggtaaagtttgaacatgatgcaattgatccgggatggttggaccgagagaagcttaggctactgagcccttga

SEQ ID NO: 336556 - DNA, 273 bp, Pseudomonas aeruginosa
gtgaacaaaacagaactcactcaggccatcgccgagaaagctgacatttccaccgctgccgccggccgagcactgaacgctctcatcgagaccgttacctccagcctgaagtccggtcagcctgtgaccctcgtaggcttcggcacattcgaggtgcgtgaacgcgctgctcgcaccggccgcaacccacaaaccgggagaaccatccagatcgaagctgcaaaacacccggccttcaagccgggcaaaggcctcaaggtcgcggtgaactga

SEQ ID NO: 336557 - DNA, 264 bp, Pseudomonas aeruginosa
gtgaacatcacacagctcagagagacaatacagtccgcctatcgcgacctgttctacggcctggcaggggctgcaccgccggaagactcccaagacaacttacttgtgccgtgcgtttcattggggcgtgcgcagggcgtgatggatttgaccagcatgcacctggtgtcgaacattgagatttacggtgatacaggatcagcgatgcgggtgaccggcgcgatcctgattcatctattggccttgacggaagcctacatgtag

SEQ ID NO: 336558 - DNA, 996 bp, Pseudomonas aeruginosa
atgggtcagtccctcaacgccccttttccgaaaaaatttaagccgatcttcaactactgccccgtaatcgtcagcaccaactacaagggcggcgtgggaaaaaccctcagctcccgcgtccttggccaaggcattgccgaccccaatttcgcgtggttcgcacaagacaaaccggttctcatcctcgactttgacccgcagggcaacacatccatgcgctggggtctccttgagcccgttccggacgatccttacggatcgctcaaacctgtcccacatcctgagctgatggccgaagagcccaactacagctccgtctgtgatccgtggctgggaatcatcgaagctgctcgcgagggccgcgctttcgacaacgcaatgttcagcccagtgccgtatcgcaccagcaaccccatgattcaggtgttgccggccgatgagcgcctcatgcgtgaagctcagcaactgagcaagaactacgtgccgttcctgggccagatgctgctgaactggttgcgcagtccggaagtcgccacgaagtactctgcggtcataatcgacactgcgccgtcaaaatccaacttgattgacgccgcgctgaccgctgccactcacgtctacatcccgttcgtacccgagccgcaatctgccgagggcgttctatcgatcatcgcctacgtgagccgcttcgctcagatgcgcgctgcacacgatccgctgcatctgatcggcttgctgccgaacatggttcggcgtacgcagctgcataacaactacttgcgcgccctcgaaaacgaagtggtcggcaagtacatgatgactgtccgcctgaacgaccgtatcacctacgctgagaccgactctgctgatggtctgccggaggctgtaaccgaccttggcaatagcaatatcgccgtcgaggcaaagcagttcatccgttacgtcctggagcgcgtgtgcgagacctccgcctccaacttcccgagggttgcatga

SEQ ID NO: 336559 - DNA, 1170 bp, Pseudomonas aeruginosa
atgatggccggcgaaatcgcaccccaaacttcgagccgtcgcaaggtcgtccagcccaacttcagtaacagcgcgcatgcacaggtcgcgaagtcaggcattaccgcagcttttggtggtgcagaactggggcctgatcacgtgccggttgcaggcgagcgctacgatccagaatatcctcttcgccgactgaaaccgtcgccaaagaaccctcgccgcctcacccttgatgctgctggtgtaacggcggaaaccatcgagctgaatcgaaagcgtcccgatgaaggacctcatgagtggattgcacgctgtgacgcctacctgagaaccctcaaggaacaaggcgaaaccgatgactccattgccgtttggcaggggctcttcgacaccgctctttcgatcctcatgcgcggcctgcttcaaccgattgtggccacaccgtcggatgtaatcattgccggtgagcgtcgctggacaagctgcttgctggccggccttgatacctcccgcgtactcatccggccgatggatgaagatgtccaggtcatcaaccgtctgctcgaaaacatccttcgcgccaacctgaacgtagctgaaacctgcgcgggtgttcgtgagttggtgaaggtagctacaggcaaaccactcggccctgagaacatcgacgtaaccgccgatctgatccagagtctgatgtcttgcaagcagacgcaggcctactactacttggcgatctgtgaactccctgacggggatgagcaactcgaaaggcttctgacgggctattacaccagtttgcgcacggcttaccaggacaccgcccagtacacccgtgatctcaaacgtgctgctctacttggctcgactccacccaagccaaacacagaacagaccggacagcagcagggagcgcaggctccgcagccgcgcaaaccagctgccccggccgtcaagatgccggttcctggccggaaaagtggcgcggtgatcatcagcgctctggccagcatcaaacagctccccgagaaagccagcgacgctcttcaaactctggagaaggagtgggactccctcactgacaagaaacgtcgcgacaagcttgggcaggctcttgcggcgatcatggatggcctgtcggtcctcgactcagaacaagaaggtaacgcgtga

SEQ ID NO: 336560 - DNA, 414 bp, Pseudomonas aeruginosa
atgattccagcaagtagtcgtcgggtggtcagccgcccggttgctgcaccggcaaccttggctacaactacctaccaggtttggctcaccgcagagcagactgtcgcggtgaatcaggccttggataggttcggaaatgcgtgggccgaatgggtcaagaaggctattgagcgcctgaagcgtgagaccgattctgagcttcatgacatcctcggcggtatcaagcgcaccaaccgcgagggcaaagagaacatgtcattcaggctctacactgcaacgcttgatgaggtgaagagtctcgccgccaagtacgactccagcgtccagaccgtgctcagtaccgcattcttcatgcaggctcttgcgccaatgattgatttgcccgattcggacgggactgttgccgctcactga

SEQ ID NO: 336561 - DNA, 396 bp, Pseudomonas aeruginosa
atgttggacagtgccctgcaatccgagcttgccagcttgctggcggacctggactcggccgcagtcgaatgcgacggcactacacgcctgcatcgagctggtatcgactacacacccttcgaaggaagcttcgagttcaaggggcgggtggtgcaccctcacttctggattgaggtcggtgacctggtgatcgactatcgggcgcgaatgtggctgcgcgacgatccggaggtggcctacggggttttcccgcgcgactccatcgaagggcggtacaaggggagagtctgcaactccatccagcccctatcgaagctcctggagcaaatcctgagcatgccgctgccagatgagattcaggcggcactcaagaagaagtcagggatgggcatgtga

SEQ ID NO: 336562 - DNA, 408 bp, Pseudomonas aeruginosa
atgttgaaccgagaacaaatcttggcgatgcccgagagtgagtacatgtctcccgtgcagctggattacttcaagcagatgcttcaagaccgcctgtgcgaagcccgtgcccggatcgccgatctccaatcgcaattgcgcagtgtggacgttgagccggacatcaccgatcaggccacggtggaagaggagcgcagccgcaccctcaacgccatcaatcgcctgcaagagagcgtccgcaagaccatggccgccctcgatctcatcgctgacggcgagtacggctactgccaggacaccggggtgccggtgggccttgagcgtctgctgatcgcgccggagtcgattctctgcactgatgcgcagagcgttcaggaacatcgtcagcgcttcgtccgcgcagcataa

SEQ ID NO: 336563 - DNA, 738 bp, Pseudomonas aeruginosa
atgagcagtagccatcttccagtgatcctggacgccctgaacaaaaaaaccgctgagctgtgcgcaatctgcgccacagccgctggagaccctgcccgaagtgtagtgatgggggtggagctggagagggagctgccgggcgtcatccgcgcactccgatcagctgatgctctgatcatcggggccagctcggtttccagcagcagcgcagagctttgcctgtcggtagtttctgctttggaagctgccaagggcctcgctgctcgtgcgttggcgctggactgcgtaccgggcgacgtgaccctcgactacgccgaagcggctctggctgacatcgacagggcggtgagtcgtggtgaaggcatgctgagcaccgtcctgcattccgctttccgcgaagacggtgactcgtgcgcgcacctctggcccatcgttgcagcgattgctcatagccttgaagaggttggcgagtctccgctggtaagcgccttctactacgggctgctggacgtagaggacgccttcacattgtccaatcttctgacccagatggttgagcaatgcctgccgcttttcttcaactccaatccctggcagaaaaagggctttggcaagcttcttttccaactccactcgggcgaggtagctgccctcggtggtacctctcccttcacctgcgaacagtacattgccgccgtggccataccgccctgcgacgaactgaagctcgccgtctga

SEQ ID NO: 336564 - DNA, 510 bp, Pseudomonas aeruginosa
atgccgaactccttacgtctcttctcctacactgcccccaccgaaatccgctgcgctgtggcagcgcccaacagaacgagcgcggcgaagctactaggcaccaccgcagaaacgctcaaagttcgtggcaaagagcacgagcgagcagaccatgcccccgacgaagacattgctgggctccagctcgcagaggcgaaccctcagaaggttttcatcaaaaagaacggcgagtgggaggagctgccagagaaaaaactgcacctgcttctgtcccagcgccagctcacggccaagggcaattcgaaccgtcagatcctggatgcgcccatgagcacgcattcaatccgcacggatgacgagacgtggcttcgatttatcgctatcggcggtggcgtgactttccgtgactgggtgaacgaagagttcgcccggcaagctgcaaaagatccagccgagatggaccggaaactcagagaagctcggaagaaggccggctccaaatcccgctaa

SEQ ID NO: 336565 - DNA, 192 bp, Pseudomonas aeruginosa
atgaacagcatcacctcgaaagaagcgtgggacttggagccgggtgacgtgatccgctgccaggaagacaactgtacccgccaggtgcagagcacgttcaagacggacgaccaggtgcatgtcgaatacaccgatgggtttggtgaaagctacgccccctccgatgtgatcggcctcgataccttcgactga

SEQ ID NO: 336566 - DNA, 159 bp, Pseudomonas aeruginosa
atgacccgtaaattgctcatgaatctccagggtatgacgttcaccgaacagcaggcccgcgactattacggcagtcgctttgaaatcgccgagctggtatgggtgaccgtcgatgaagatggccaagtggtcgaaggcaagtccgacgactgcgcataa

SEQ ID NO: 336567 - DNA, 228 bp, Pseudomonas aeruginosa
atgcagacgacttacatcgggcaagacgagttcattcagcgcggtggccggattttcaggatcaccgaacagagcgccgatgctgcaactagcgccgagtgggctgatggtgtcctggctcgcgagaacgtccagtttcccaatggccgcatgtcacatgaggtggccaacgaggtgttggagaaggccgaggacacgctgctggactttctctgcgtcacagcctga

SEQ ID NO: 336568 - DNA, 486 bp, Pseudomonas aeruginosa
atgaccacgcaaacggaagcctcggagtttttgccattcgatttcgtctatgcaggccgccgcgtcctgaaaggcgacaaggccggcgcggagattttccgtatcgtcgatgggcggattgcagacagcttcgtattcgcggccaagtcactgaaagggcgggtcatcggcggggtgtatcgcggcgctgagttctccaacaaccaggctcgcggcttgggcgcggttgagttcgttcatcgctggaaagatcaaggcgcctgcattgactggcaggctcgcgacgaagcgttcgaaactgaacaacgacgctccaggctggaagccgatgcgaagaaggtcaacgagatagaggccattatgctgcccctgcgcaagctgtatgcgtcgtactcgcggcagtatgaccacgccgggaaagaggccctggagcaagcggtattgcgggcgcttcgctcgcctccgcgaaaaactgaatccgagtag

SEQ ID NO: 336569 - DNA, 342 bp, Pseudomonas aeruginosa
atgagcaaaaagccagtcgcatggatgaaggtttacgacccagcaggcaattacgttgcatcgtgcgttgccgccgaagcgggtgcagcgctgatggccatgtacggcgacggcgctgaaattcgcaatggccactcgaagaaaaacgccatctggcgtgaaggctttgagcagcaacccgctggggatagctacgactttgttgcgatgctgatcgcagatcgcaccactggcaaagacacgccgctatcggccgaggaacagcgccgctccgatagcgctcaagcggcgcttgaacagaccagggcgacggtgcgccgaatgctcgccagccagccatag

SEQ ID NO: 336570 - DNA, 207 bp, Pseudomonas aeruginosa
atgcccatgcttgagccctggagcaatcacgatcaaccggacggcagcatcgaggtgcgtcgtgaaggcgaattgcacttcaccttggtttgggttcaggccatcggtcaatgggagttgcgccgggctggagagtccgaagtgatcgagcgcgaccagtaccggaacgacctcttttccgccatccaatcggggcggatcaagtaa

SEQ ID NO: 336571 - DNA, 327 bp, Pseudomonas aeruginosa
atgatcaatcagcaagagaaaagcgtgggattcatccagctccagtttttcgacagcacgaccgatcaggttgtctgcctgggaggtgctgggtttgttaccaaagccgaggatgatgcggcatgggctaacgttccggtcttcgagggtgaatcagccttcatggctgaccgactggatgcagaaggggacattgtggacgagaagccggtctctgctgaaacctgcgagaagctgatggggcgtcctatcgcatcgctgatcagcgagggccgtgcccaactcaaggcttatctcgaaagcctgccttccgtagcaacagcctga

SEQ ID NO: 336572 - DNA, 207 bp, Pseudomonas aeruginosa
atgaccaccaccccccaagcacgcgcgcaagagcggatcaaacgagttggtgatgcgaagtccgagcacgacgctgatcaccacgaatcggaagccatgggctacatggctgcgttgcgcgacgaaggcctgctgcccgagtgcgagcacgtccgcctgatgaatgcgcttcgcgccgagcgcatggcatggcgcaagtccgcctga

SEQ ID NO: 336573 - DNA, 165 bp, Pseudomonas aeruginosa
gtgcccaaacacttcttgccgagcagccccggcctggtaatggccgtcgagggcggcaaggcgaagatgcagcacttcgctcgcggtcagctcgggacaaaaaccacggtctccgtccagcgcatgcacaagcacagcaccggcttgcagctggtcagcgaatag

SEQ ID NO: 336574 - DNA, 246 bp, Pseudomonas aeruginosa
atgccgctttatagcgctgtcgacgagggctacgaggttgaggtttaccgcacgctcaaggcggcatgcgaagcccatgccgacgcccgcttgtttgtcgtgcccgaggatgagttcgacgacgaagcatccgaggttcccgctacggctgcggcaatcaggaaggccctgcgcgcccagggcgaagtgcgcatttccgacgatggtgggcgtgactggaaatacaagatcacgcggcacgactga

SEQ ID NO: 336575 - DNA, 195 bp, Pseudomonas aeruginosa
atgaaccgtcagcaggctttggcattgcgccagtggattcgagaactaaaccaactgggggtgcggtacggctacgaagacatggccggcccccccgacgatcctgacgctgagtatgtcgagcgctttgatgctggcgaaacacccgcccaggtgatcgccgcagacttcggcgatcaacaaccgatttgttag

SEQ ID NO: 336576 - DNA, 240 bp, Pseudomonas aeruginosa
atgaccacgatcacccaaaccggttttctcgggcagttgcagcaggtagcgccctgtccgcgttgtggtgcgttggaaggctggtacgagaagcgcgtgtgcaagtatctccagatgttcgaggccaatggcgagtcctacgaggcttcgaacatggagcgtgtgcgcgggggtgatcgccggtactgcatgggttgccacaaggacataaccgaccaaatcaagatggtcgaaaattga

SEQ ID NO: 336577 - DNA, 384 bp, Pseudomonas aeruginosa
atgcaaaccatcaccgctacgcaagaactgacagccgctgatcgggagagacttcgccgtatcaagaaaactgccgcctttgaagattggcgtcagcggttgcgcccgaacgaccgtctcccacggggccgcttcttcagaggcaaaaaggctgggtccagcatttttttcatggacgagttttggcaggccaacgccggaaagccttacgacctcggccaattcaaacccttcgagactgtcatgttttgtcagccgccaggcgttcgcgttacccctgagtcgctggcacgattcaaggttatggaaggtatcgaaaccccatcccccggcgctcgcgcattcttggcctcgattgaaggtcagaccgacaagcccgaatag

SEQ ID NO: 336578 - DNA, 315 bp, Pseudomonas aeruginosa
atgaaagacgacgaccaagcgacgttcgtgattcaggagccagtgctgttcagcggcaagggcaagacgccgattgcagatgcgctcgcgttggctcaaatgcaggaagtagtggcgctggccaaaatcattgctaccgagcgtacaagtgaacagcatccggtggctaatttggcattgcgcgccttcgataaggggatcgctgggcgtgacttcgatgaggcgttgaaagctgccgtggccgaagggttgatagctctgacccccgattgcggcccaaaacagctcggtgtcttcaagcttggcgttaggtag

SEQ ID NO: 336579 - DNA, 123 bp, Pseudomonas aeruginosa
atggccaagttgaacatctacagcatgaaccttgacggtacgcataacttgctgcttggcgcgtcgaaccgggccgctgccgctgagatgatcggcacgaccgtttacatgctgcgcacttga

SEQ ID NO: 336580 - DNA, 417 bp, Pseudomonas aeruginosa
atgatcagctcacccaaggccttggacctcctacagatcggctcaagcatgccgcaattcagcctcgtgcaagccgccgacgagctggccaagaaggttgccgctggtaccatctacatcgagaccttctgtgacgtgtggttctcctacctcgccgaaatcgcaaccgcctatcactcggacctcaagagcgcagcagatgccatatcttcggcgtctgttggtagcggcaaggctgtccgcatcaactccatgacggagctggagaaggcacagaagctccgcgagcttgccggtgcgcgccgctttagcatccccctctttgcctccctcgcgctcgactacagcatcaccctcgggcagctcgaaaaggcacagacagcattccagcagccttctgctgtaacctctcgatag

SEQ ID NO: 336581 - DNA, 3321 bp, Pseudomonas aeruginosa
atgaccgatatcatccttgccggcgagcaagaagacagccccaagttcgaacgcattcagcgcttcgctgatatcgcgccgggggtctatgtgcgctgcacaacggcaatgccggatgagctgatccctgagggtgaggtgctgcccatcgagtccatcgactacgtggacaaccagcctcacaccatccgcctgcgcgcgcatccgcgccattacggcagccaagacacccgtaacgtcaaagacaagggctggaatttgaccacccatgacttccgcgtccaggtgttcatcgatcacttcatggagatcagctacaccgaggccatggcgatccgggcagcagaggtcgcagagcaacaaagcaaaaccagtgaccttcagcaggaaatcgtcgatacccagaacgaccctctgaaattgcagcgtgccatcgcccagaccttggaggaagagcgaaaggccaaaggagagcctgatccgaccaccctaccggcgctaaccgatggcctgcctccgctcacccttggcagcgcgttgcagcggggcgtgtcggaaaccggaatcatgcagttgacccacatggcccagcaccaggtgaaggttcagtctgcccacgcaacgtggctgacgaagaagaccaaggagctggagaaagccgtgaatgccattctcccctactactcggagcaagccgccattgcgctcgccaccgcgaaggggaaaaccgatttcgtggcggatgttattgacggcctcaagtcgctggaactgttcatcggtacgggcgtgattgtccgccgaatcgcgaccggccagcatgcggcaaaggacattcctctctccattgctcagcgcaaactgatcatgacggaggagatgagcgtcttcgccgatgtcactgaaaacaccgattaccgctctctcggccgtttcatggagctgtgcgagagtgagcctgccctgctcgaccaaatcttcccttccgaacgcgccctcgtttgcatgtgcgcaacccgtggcgatttgcgctacgaaggcgcacatccctacgctgccctcgtggacaaccttgagaatgccaaggtgttcctgctcgcgcgaaacggcggtaatgcatggctgatcagttcgcctgttgagtcccatctcggtaccgctcggctcttcccaaccaaggatgaaactgaccgcgtattccgtggattcgacggcacccaaatcaccttcgaaagcctgaagtacaccaccaggctgtcgaagtttgagcgccaggccctgcactacaaacgcctcctgatcctggttgccggtcttgaccaccgcgaaaagctgttcggtgagttccatgacgaggtggacagcctgaagctcgtgagcatggagttccaggagcgttacatgcgcttcatccaggacgacgatgaagctgccttgctgccgggtcgcgagcgcccgatgccagttcttcagtggatggccaaacagaatcgcctgctcacgcccggcgcacgcgttttcggtatgtgggcggatattgagtccaacgagcgcgcctgccccggcggcagcaaggttagcggccgggtgaccgacaagcccagcgtaaaaatcgccttcaagggggacaaaggtcctgctgtcgagatattcaaagttagaggcgattccatccgcaaggtaaaggcgtacccacgccgcttctacaagggacgggacgacattttcgacgagtccctgaagacgccctacctggtgctcgatgccatcgaaccggaagaactgaagttctacatccacgaccgcgcctcacgggtggactgcgcggattacatcggcctgttcaaggccgcgttgcgatttgtcgaatccgagcgcgccgaagaaaagccttcccgtactgctatgctcgacgacatcgtcgaggcaaatatcgttccaactgatcgcgctgtggaagccctatcgcacgctattcgcctctggcgctcggccaataatgggcagcccctacctagcgtcgaagacgccggatcgaagagctggaacaccatcctcgacaccgtttacctgatcgagcacgctgccagcacacaactggaacgcgtgatcgcattctgcgacgaacgccagttgactcccgtccgcctctccgttaccgggaaagctcaactcgtgctgtacgtagaaccccgtgcggaagagcgcgacgaccgcctcactccccatgcctggctgcatcgaattgtcctgcgactgggcaagcgctcaatcaccgaactttcccgatcctgggagatgcttccggtattcgatccaaccgagcacgccatcaagtcgttgggcgacgaagagcactggacaaaggtccgctcaggcttcactgacctcaaacagaaacgcgctctgttcgaagtctgcgaggctggtctcagccaactgaaggggctcattgcgagcccgaattcggcagcacagttcgctgacgactacctgcgcttccgtgacaacctgaaggtggtctatggccaagttccgcaagctgccgccgtgttccccgttgggctatatgtgaccactgatcgcggggttcttcgcgccggagtaatccacctcggccacagtgaggcggcgttcgttgctcatgacttgcttgcaccacctatccagagggcctttgccaagcaggaactcgccagctacgcgcataaaaaatcgcgcgcgctgcaactcgctcttcattcggacaagcgcctcctgatgcgtgatctgaagctcgccatcttgacccgcaagggaaccctttcgctgggcgggcaaccgttcatccgtgatttcggtgggtttgagcatgttaatggcaactccccctccagaaggttgtgcgctgcccttgagcgggataagcgtgatggcgcacgggcatggcttgccggtggactcggcgaagataaggccgatcagctggactcgattttcccagcagagttgagctgcgacgatagcgactggtcgttcgtggcccgacacacacgccaaccgaaaagcaaagacatctcaaccgaggagtggctaaagtacgccccttgccccgagttcttcacgctgaaaaagggcatccccagcagcattacgctgaacggctactacgatcaatcggctgtacgagtgtgcttcacagttcaagagcgtgaagaggcaatcgcaagtctgttggctgaaaacccggaactcgtaactccgacagagctaccccctcgcctctcccaactcgcgggcggagaccaaatccttctgccgcaggagttcgcgccagcatga

SEQ ID NO: 336582 - DNA, 327 bp, Pseudomonas aeruginosa
atgggaagctggtcgaggcagctgcgctaccgtaggccacctcagtgctatactggtttgcccccgctccggccatgcctccatgaacacgacgctgaagatcgccacagagcactgggaattcgtcgccccactgcttacgccgcgaaatgtgaggctgactacgacgagctggtcgcggccctggatgagctgctgggcgagatcaagggcgacggcgaccatccgctgggcggccttgccgcgtgcatggggaccgtgatcagcgcctatgatcaggtgcactatccgctgctaacaacacctggttccgggcacagcctctga

SEQ ID NO: 336583 - DNA, 237 bp, Pseudomonas aeruginosa
atggcgtcgtggtaccactacctgccgactaaacgctgtatgctggcgagcatcaggggccgggaagccgacgccatgacgatagcgccgcaactcacgcccctcggggaaagtgaccttatgcagttccatgacatccgcgtgagccgcgaattcttcttctccatcggccaggagttggacagcggcaagtactacgtgtcctttccggtcagcaacggactgatcgactactag

SEQ ID NO: 336584 - DNA, 534 bp, Pseudomonas aeruginosa
atgtcaaattcccaacatgtagagaagcccgccactgccccccgcgccaaacgaattgtcgcaaaggcagcggccaaaccggctcccccgaaggcaaaggccaaaacacctgtccaggtgcttttcggcgggcgcaacgctgataccccccttttggtgttcaggtacacccaggagggcgttgaactgagcgcggtcaaggaaatgctttctcactcctcgctctataccaagatcgacctgctggtgaccatcaccggcaactctctgcgaactgcccagaggatgttgagcaggagcaagtgcgaggctatccgactcaacccgcagcagagcaccgtagccttccagtacgcccaggtgcttgaacatgcgacgcatgcgttcggctctcaggagctagcggaggactggttgcgcaagccgagcaagttccttgacgggcttgtgcctctggacatgatcgcgaatgcgcaagggttccaggccgttgaagactatctggaacggatggttatgggggtataccagtga

SEQ ID NO: 336585 - DNA, 306 bp, Pseudomonas aeruginosa
ttggatgtcgttccctacgtcctgactcgcttcgagatactcgatccaaacctgatcaaggtcgttcagccggaggatgtccccaacaccaactggctggtaccggcgcagccctctccaaaccagcaaacctttggcgacgagcttttggagaaacaccccttcgtgctcatcccgtccgcagtgtccaagaactcctggaatttgctggtcagctgcaatctcgcgcaaggccactacaagcgggtatcccaggagcgattcggtctcgatagccggctagtaacgggctccaggcaccgctga

SEQ ID NO: 336586 - DNA, 570 bp, Pseudomonas aeruginosa
atgaaatccgtcctcagcccactggccctgcaagcgctcaagaaggctcgcctggctggccggcacaccccagtgccgcgcccaaaaaccaacagccgcacagccgacaagttcctcattcgtggctatgaagagctgttcaacgaggttgctggcatggccagtcacgaggggagaagtatcaactccgaggtcgtggcggcgatattcgatgctctgcaagggcatgtgaggtccaaggccatgctgcacgtgctgaagcggcatcttggaagcgagatttcgcggagcgcattggatgctctgcctatgttccggatcgaacaatgcaaagtccccaagctgttctatgttcgccttccggacaatgtgcgcgacacgctcaaggatcgtgttctgggccgcatcaaggaggaaggtcgctacgtgtcgatgaacgagtggacggtgaaagcagttgccgaatgggtccagattcgccgcgagcaatacgcgctcctgagtgcggccatcgccgtcggcggcgatcttgcagcggttttgccggagctgaatgacgaaacagcctag

SEQ ID NO: 336587 - DNA, 570 bp, Pseudomonas aeruginosa
ttgttcgaagtagctcggagcccccgtacccatctggctgcgctgattattgtgctggcgctgctcacctcccagtttatttcccgtgaggtggcacacttcgtgggcatgggcggaattgtcgtgctgttcaccgaaatccttcggcatggatcgctaattcgcgtcacaggccttccgctggcccgtggatgcgcgattctgacaggcggggtaggggtggtagttgtcgccaaccatcttggcctggttggcagagggcttggggcgctcgccgtgtttgcgatgctgctgctcacctcgttcggcgtgctggcgcgccaaatctaccagcttcggtggttcagtcatcccgcgccggttgccgcgctcatcgtgctgtccgccagcattcactgggagttgatcttccagccttcgatcagtgtgtattccaaggggccgcgtggctcagtggagtggccgcaggttggggccgactttgccggcatcttgctggcctacatcgccctccggaaggtccggatgcgcgagggtggcgaaaggcccacttcgaacactgcgatttga

SEQ ID NO: 336588 - DNA, 192 bp, Pseudomonas aeruginosa
atgcccaccaacgccaccccttctcgcgcgttagctcttgaaatcgtcgcaaacctgatcgagaccgatcccgagtttttcaggcagctccagggcgagccgggcaaagtaggtgagcgcagcgcgacatctgatgaattgcgggcgagcgccagcaagctacgggatttagaaagcgccggacctcagtga

SEQ ID NO: 336589 - DNA, 498 bp, Pseudomonas aeruginosa
atgaaaaagcttcagcctgaagagcgcgcacagctcgtcgaggagatcgtcaaacgcaacgcggcggggctcgacaccatcgggacctccatccgccgactgcggctcgaagtcaccgggcttgatcaagagaccttcgcggccatgtgtaagatgtccaccaagagcctgtacgagctggagagcgggaagtcgaatccgaagctcagcaccctagaggctgtgctgcggctctttggtgttcgaatgggcatggtgatggccgtcaaggacaggtctgctgacatcaccgtcggctccaaagttggtgtggtccgaactggcggccctgtcgcagtcgcggcccggccgatggccaatatgtcgccgctggccagctcctacgtggcggccggcccgaagcgtgggaaaagccctacggcggccaaagcgaagaagttggtgtcgaagccggcatcgccacgagcgcagaagaacaatcaagaaaagcgaaaatga

SEQ ID NO: 336590 - DNA, 1170 bp, Pseudomonas aeruginosa
atggaagatcgctgcgaactggccctgagcgtcaatctcccgctgaactgggaccaccatgacggcaaagggtacccggcattcctctacgacatcattccatctggtgctgccaaagactcactcgaacagcgctacgggcgtctcaagcccgaaggcgtggaaatgggactgtaccttctcaaacgcttcacgccggcccctatcggacatctgcgcatcaaagagtcggtggaagggctacaggcggatcggaacgaggctttcgcgcgcgccgaggttgtgggcaggactaacgagtttctggagtacgcctacgaaacgggcgctgcattgggcggcgcaaccggagccaacgggcaagcccctaagctggtgatgactgaagcccacgacggggctctgtacgctgatgcgatgcttcccgatgaccaggcgcgccgtcactggttgatcaagttcgcgcgtaatcgaggcggcgagcgcgacaaagacatcctgcgagcagagtttcatttctacaaggcggttgctgccctcgggcttgatacggttcctactgatggtttggcgctcgaagaggctgtgaagccaagcctctggatgcctcgatttgaccgtcgtgtcgtggatggcatggtggagcgggtgccgctggaatcggtgtactcgatttgcggcatcaccggttacgcgcaacctatggctcacgtcgaagtggttgaccgattggtagctctatggaacgagaacggccagcaggaagaggtcgatgacctggtgttcgagtatgtgcggcgcgatcttctgaaccgaattcttgggaatacggataaccacgggcgcaacacgtcgatcattcgcgagcgtggcaggttccgcttggctccgatctatgacctcgcgccaatgatcctggatgaagaaggcgtcacacggacgacgaagtgggcggcggagcgcaagggattatccaactggaacgacaactgcgctgagctaggcgcgtttactgacccagatgttctgctgcaacggttgatgggagcggccgaggaactccgcgcattgcccgatctgctgatcgatgctcctgaagcgattcggaatgcagcgcctctgccagtgaataacctggataagcgactcgctgagtggggactgcgatga

SEQ ID NO: 336591 - DNA, 1236 bp, Pseudomonas aeruginosa
ttgcacgaggcgagaatcctttttggccgcaacggcgagctgaagcagagcatcgacgccttcagcatcagtagcccagagcactaccgcaacctctggcccctggtcactcccaccgaccctccgcgcatggtttgctgggtcagccccgttttccaaggcgacgaatgcaagcggcgcagccacttccgcatcctccggaaggccctcaacccagttgtcctcttccgcgacgaggaagctgcccggatcaaggcgagcgaaagcgcgatccatcgtaccgctaaggaaatgcttgcggccgaactgcaacgccgcatcgactccggccttggactgccgtgggcattcaagcacgaatcagccggcgggctgcccatggttggtaaccttctgctcggcgcgcgcgaagtggtggtcgagcatcgcatcgctaccgcaccaccactcaatacaacctaccggctcgatgttgcgatacttggcgacgtagttctgcgcaaccggattttgctcggtggcctggaggtagaaaataagcatgccttcgacggcagaaaggcgctggccggaaaaagcggtgggtatccgttgatcaccatcgacgtgagcgagatgacgctcgatgagatcaccccggcttgggctgctcgggtactcagtgaaactagccgaacagcgctacacggagcgcggaaaacgttcgtgtacctcaacccccttctctaccccctgtacgcgcagattccctcggaaatcgcgcgccatgctgcgcgccaccagttcgtcgtcttcgcgccggatgacaacttggagaaggccaagaagaacatcacccacgcttcacgcgcgctcaccttggagcaagaggtgaacgttcagatgatccgcgccgtaaacgaccagtgcgcggtccgcatccgaaaccttggacacatcgtggggaaggactggaaggagcacaatgcaggagcctgccttctcgtttcgctcaataggcctcagtccccgctcgacctgaaccgccacctgatgcaccaattccttgcgctttatctcgcaggctggggcaatgccttggttggttacaggtggcgagacggcgcgctggtggacgaggatgacaaccgagacctctgggtagaagggttcaaaggggtcatgtacaccactcttcccaagcgactcgccatgccccttaggcgctacatcgaagcgctgtcttcgctcagctga

SEQ ID NO: 336592 - DNA, 309 bp, Pseudomonas aeruginosa
atgaatacggcacgtgagattttcgacctgatctgcaagtccatagagaatacgtgcgcgcagaaaaacctcctgctgacgtgtgatgaagcggtcaggttggggatggccggaggcgatacgtcccggatgaacctgtcctacaactacacctatgacgaccaggccggcggtgtagtcgggcttcacatccgctcagttgatccgggcggacccggccagaacatccctgatattaaccgccttacggtgaccatcacccagcacggcaaggagtgcggtcgcttccacggcgagtacgacgactag

SEQ ID NO: 336593 - DNA, 762 bp, Pseudomonas aeruginosa
atggccgaatttttctaccagataaagagacaacgacacgctgacgaaccggaaggtatgttcggttcgcaatggcattggccaccagagttcagcgggatcgtagaggctgaaacgaaaaaagaagccaaggtgatggttgatgaaatctacggcctgactttccctcagagggtcctggagaaggacctgcctcagcaacccttcttgctgcacctccagctcatccctgatgaccccaacaactacctccgaaagcgactatcgccgcaagagtgcgaagagtgtggtagtacgttcgacatgattaccaagttcaactcgccattttgctcctacaagggcgagcgctggtgttcggacaagtgccacaccaaggggcgggatcgcgagcgcctggagttcagggtcgcgggcaagggccttgttccgcccgtgatttaccaggtacggcaagtctccacaggcaagctctacgttggtcagaccaagcaacccttcaccttccgatggtggcagcacatcaccgcaccaactggctccaagttccacgatgccattcgagaggcccctaagaccgactgggaattccgggtgctggagatcatcaagccgcccgaggggcataaggatgtccaagcatacatgaacgagcgcgaacgcttctggattgaggagttgcaggccctgactcacggtttcaatacggtcctgcctgctggcgatagccttcaggaagagatgctgatggaagccgtttga

SEQ ID NO: 336594 - DNA, 765 bp, Pseudomonas aeruginosa
atgatcgaaagccattcactgagcgcggtactgaagcttgcgagcgcaaccgctgagcaatacctggctcaggccggcgggcagcccctgaagaacttcatgggcgtgcaggttgccgagcagcttaaggcccacatcccgctatttcggccgggagacttgatgctcatcatcatgcgagagcttgaaaaggaatcccgtggaacccccgagcactcgccgacattgacagtgctctctggcctcgatgagtcaatgcgagtgttcgccggccaactgctctcctgggagaggccacagcagctggacaacctggagaaggccaggcgctgcctcaatgagctgatcaagtacacgccgcaaaccatccactccgaggcgatgatcgacctcgtgtacgggctcaactccactatgaaggcgatgtgggccccgatgcagcgtggagcatcgcacctggtggccaacgaggagggtgaagcgctggtcaagctcgcggagggcgtggagcacgtccacgacgacaatgatcttgcctgcctcttcagcaaactgcgcagagacgccattgccagttacctgctctccgaagacgaaagcgccggccaactcgcatatgagatgtggcaggtagatcgggacatcatgcaaggcgaattccagcagacttacgtcaagttcatgcagggggagctggcgcgcctcaactatgaatacacctctagtgagtccgccaagccggcaagtaggcctcgccatagatag

SEQ ID NO: 336595 - DNA, 783 bp, Pseudomonas aeruginosa
atgcccgcgctgaacatcgatcaccagagcctcttcgtttcctcactcatctcgcgctacgactgtggccaccattacatgcgcgaccgcctgctgagcgcgtacggcccgacatcgagcgccataggcactgaggaagaccgccaggcgatcaaagtccgccttgcccaggacttcgagcagggcgagaagcgcaacgctgtattccaggctcagtacgaattcgtcaccggtcagctcgacggccagctccagttcgtatgccagcaaatggatggagaacgcttggctgccgaatacgacagctacgcggagttcgaagaggactggctcacgctgaaccactacgacctggccgacgaagagcccactgaggacgagatggaagttgccctggaagacctcagcaaatgctacgaggtccttacgctgccatcggcaacctacgacctcgtgatggctcgttaccggtcgatcctggacgaaaaccccaccagcgctctcctgattggccagggcatggcggctgtgctggtggccgatccagacggcacctcctacgtcatcggcgtccatctggaggaggatggttcggtctcacagcatgaggtcgaacacggcggttttgacttcgacgctcggtcgttcagcgacgccggcagctgggatagttgcagcgtggaagagacggtcctgaccttcctccgccccgaactgctgccgcttcagtggctctcccaagcccaagagaccaaacccacttcttcaccacgcatggggtaa

SEQ ID NO: 336596 - DNA, 477 bp, Pseudomonas aeruginosa
atgctggatgaaggcataacccccgtcgtcctagtggtcggcaccaacagcggggcgctggacactggcggtaaccaactgatgcgccatgtctcggcgtactacatttcggtcgatctggccggcgagaccaccagcctcaaaaacttcctcgccggaaacggcgtctatgtctttcgctcctccgaggctgcctacaacgcgtcacagtgcaccgaaggcatcacaggcagttgcctggtcgttccatccgaacagcttgtagggatcgcggacacttaccccatcgcaatcactgagaatccgggtgatctgcacgtacctcatcctgggttcaacccatttgaagggcgcaaagtaacggatgctcagatcgaatttgccaaggccgtttccgagagtctgaatttccccgtcgccgactgggcccaacagcttcaacctaccggccctcgggttacctcgccccgcctgtga

SEQ ID NO: 336597 - DNA, 273 bp, Pseudomonas aeruginosa
atgaccagcaaagccccttggattatctgcccgacctgcaatggcgacggctcgcattcccgcgcgctgggtgcgttcacgatgagtgagttccaggatcagttttccccggatgagcagggtgcatattttgccggcgagtacgattcgccctgccagacctgcggtacggcaggcaagattcgcgctgatgacgaacatgcagcgcaccagcacgagcagcagatttggcaggaccgtggcttcaacgacgcaggcgagccgctgttctaa

SEQ ID NO: 336598 - DNA, 297 bp, Pseudomonas aeruginosa
atggagaggattgagctaactgactacgtgatccaccgaggcgataccggagagggcggtggcgacggtgtggcgctgatctggttggggcctacctgcgagataccgcgagacgccgtagtcactgccgcaggcgggaggcctgcccgcctctgtatccagggcaaagaattggagattgcactgctcggctttgaccctgagtgctacgcgctggcgcgggagaaagggctgcatgtcatctggcagacccgctcagggggtgtcgagagtttccggcttcccccgaagttctga

SEQ ID NO: 336599 - DNA, 1371 bp, Pseudomonas aeruginosa
atgaacttggccaagttccttggtagtgggaccacctacgcccacacgtcaaagtcgagcgtgttgagcaaagtggcgacggcaattgtcgcttcgctggcgcttgctgccggggcgcaagctgctgaccgcgcctcgctggtgacagagcttcagccccctcgtgacatgatctcgaccttctaccagaacctggcggctcctagctcaaggaaccttgtaattgtctcgtcgttgtcggcggacatgaaccgcatactggcttcaatgcccccttcattcgccaaactctacgaggcgcaggcggaagccgcgcacacgacagctgacgccgccggcttcctgaaggcgatgcagcatagtgcggaggaggccttcaactaccgactgagcggcagggcgatcattcgagatcagcagacactgtgcttcgtgaacgcggcggaagccgtaaacgagcgggtgcacaacaccccgcgcgggcagtcgtacgtggtgatggagcagaatcgcgcacttcccaccctgcattcggctgatgatgcgatgttcttctcgacgatccacgagttgtaccactgcgcggcgagccagcagttcgcctacgcgggtaaacaggcgttcggtcccgacggcgagtactacggcatggccgtggacgaaatgctggccgatctggcggtggtgctgaactacgcggcggccgacggttcgttctacagcgggatggcgacgattcgcggcatgcgcgcgaccgcgctcgccgacatcgagcacaacactgaggacatgctcgactacgtgctggagcgcctggatgcgtcgcagtttcatgggaagcagagcggcgagatcatggcgatggtgaatgacatcgcgcatgaactgaacccactgcgcaaccaggatctgaaagaccggtacagcgtgtctgctgtcgagaaggtagttctggccaaccggatgtttggcgacaacgaagcgctctccaaaaagactgtcgaggtcgccaaggcgatccacggcaagttggatgcggtgatgccaaaggcgcgggcgatgaagctcatcgacgccgtggtcacgctgaatgtgaagaacgcatctctgcaccgagaactcggcatggaaggcttcaagcaggtggggctgatctccaaggctctgcacgtcgagctgcccgtctatcagcaagctcgcgcggcagtcttcgacgcgtcgatctcggatggcctcagcaccacctcgccctggatggctgacgctcagttgaaggcggggaaccggttcacgcctctgttcgttgagcacgttcaacggatggagcagcagcaagggcagcagtccaagccgacccttggcatgcgatag

SEQ ID NO: 336600 - DNA, 924 bp, Pseudomonas aeruginosa
atggctacgtgcgaattgtttcgtgaggcatttgggtccgacaaagatgcgcgccgcgaggcatggaaagtactgaatcgagaggggatcgaccgtctcatcatcaaactgggcggcgcgcaagaaggggaggcacggctctcgttgcagcaagcaattgacggcgtgtatttccccctggcggatgcgcaggacctggggaggctcgctgaggcctttgtaaaaagcgggattccaaatcgccggaaaatcgccgcgagtattacggcgaatttttggccttgttctgaattcgacgggatagaggaagcccgtcgcgtagctagggccagcgggttccgaatcccgacgcggttcggttttggcgaacgtattaccgatgacgcgatcagctacctggtggagcattgggctgattttgaaatcgttgatcccgcttacggtcttctggacttcagttgggagcatctttcgctagatggattctcgcgcctcgccgtgacgatggtcagcgatcccgagatcgctgaagtcctcggagatagtagggttatgcttgcgtccagcagtgttgagggcatgagcgcgctcgggcttgcgtgcctgttggacgcaatcgagccggggaatatcccgaatttaatccgctgcttagctgtctccaggtgggtggtaagacacctgcgtgcgggcactcacgcgaccttggggaaggtcgagatgtttggacttgatcggcttcagcgtgagctggaacccagtcgagggaacatcgtcgttgacaatgttcaaggcatcatccgacggttcttcgcgggagaggacatccgagatgagttgcgccgagcgattcctctccagcctggaggccggctacccactctcgctgaacagcagaaggccgagatggagattctccaatga

SEQ ID NO: 336601 - DNA, 246 bp, Pseudomonas aeruginosa
atgacaggggccggcatttacgatggagacgtgctgatcgttgatcgagcagctaaggcctcccccggcaaagtcgttgtcgcagtggttggagccgaatttcttgtgaaacggctggcccaggatgcgagcggccgtctctacctgcacgcggacaaccccagccacaaaccgatcaccctcgccgacgatgaaatactggaagtctggggagtgtgccgctggaacctgcactgtttggactga

SEQ ID NO: 336602 - DNA, 1266 bp, Pseudomonas aeruginosa
atggcgtatgcactagccgactgcaacgcgttctacgtcaacgcgcacacgctctttatgccttggctgcgcgaccgagcagtctgcgtggcgtcgaacaacgatgggtgcgttgtgtccaggaacgatcccgccaaggctctgggcatcaagatgggagcgcctgtcttccagctcaaagagctgatggagcgcggggagctgaccgtgttctcatccaacttcgaactttaccagtccctgagcaaccgcgtgatggcaacactggaagagctgagccctcgattatccgtttacagcgtggatgaggccttcgccgatctgtccgggctccccaatccatacctctggggcgtcaatgcacgcgataccatcatgcagcgactgggcctgcctatcggcgtgggtatcgcacccacgctcaccctcgccaagctggcgaattgggccgccaagaagtggaagcggcgtaccggctgtgtggttgaaatgctctgtccggacaaacgcgagaaactgctgcgctacgcccctgttgaggaggtatggggaattggtctacgcctggctgagcgcctgcgcagagatatgcagatcgataccgcgtggaaactcgccgcagcagaccccaagacgcttcgtcggcacttcaacgtgaacgtcgagcgaacagcgcgggagctgacgggaatgcgatgcttcccgttcggcacgtccgggcccgagtgcaagcagatgatcgcctgcacccggtcgttcgggaatcgggtaaccacccgcgagggccttcagcaggccgtggctgcgttcgttgcgaatgcggcagccaagctgcgtcagcaaggcagcgccgccaactgcatgcaagtgttcgcgcgaacctcgctcttctcccaggacatgccatactcacgctcggccatcgtagagatgccctacccttgcgccgacacccgcgacctcaccagtgctgcgatgggcgcactagagtccatctataagccaggcgttgccttcgccaaggccggcgtgattctgagccagttctccgacgccaccggctggactcccgacctcttcggcgcagcgccgcgcccgcaaagcgaagcggtcatgaaggtcatggacgctatcaatgcgcgtcaagggcgcggcacgatcaagcttgctcgcgataccagcactggagactggatcatgcagaggcgcttcctcacgccagcctacacgacgcgctgggacggtctgcctcgggccaacagctga

SEQ ID NO: 336603 - DNA, 756 bp, Pseudomonas aeruginosa
atgacgacgactggaactgttcggccggccgaggccgccgacctgccgctcattcaagagtggctaaagtatgaggttcgcgacgggctcggattcatcaacaactggaacctgatccaagaagcttgcgccgagcaacagatgactgtctacgtcactgaagagggcccggtcggattcatcacgcaaagcatctcgtacggcacgatcctacaaacgaaaagcagctgccaacggcaaggcattgggcgggcattggtcgagcatgccatcagcgctgaagaagcgttgaacaatgccgtcctcatggtgcagtgtgaacccaaaggctccgtatctttctggtcagccatgggattcgaagggcatcgggaagccaactacaccgacgccgtctacatgcaccgcctgtcatctcgggtgaacccggacgtgcaaggcgatgacttgcatcttgtgacgatcaccgtttatcccgaatcggcgctatacgccaacaagcagattcctgaccgcgtgcattacgttatggggaagttcaacccagacgcccgaaccgtaaccttgacccgccgcatatctatcgcgaacgagtctgctctcgacgacccggtgattgagattaactgggaagggttcgaaatctacaagggcaaggctaaacatgacggggccgctgctgccggcattcaatccacccccaacggctatgggtggtatctggatatcatcgaaatcgacggacaagctgaatga

SEQ ID NO: 336604 - DNA, 1125 bp, Pseudomonas aeruginosa
atgccaatagaagacgcacgcgaaaccatcaccttccccgatttgccatgggagcttcggtgggaactgatcaaagaatctgtcgccgccgccggctttacaatggagcaggtggcaaagcgatcaggccttacctccgttgcgagaacaaagacaacccgcttcccggcagcgcaggaggctatagcttctgtgctaggtgtttccccggccgcgctgtttcccgagcgctacagcgttgaatggaacgtggcgctccagctcgaagttgagcgcgcgttgcctggccttcgtggcgagaacgtcggagaccgtatccgcgcggatcgcgaggctgcatcgttcgaatactggcggtccgtacctgttgatctaaacgatgttccgtccgaccaagctgaacgcttgcggtgggtgaaggggaaactccgagagagaggcttccgaatcgttgacttggctcacgggctcgctgtgaagcggtcggcgatcaacaatctggcgttagtctggtacagcgacattcaggctcgtcttgctgagtgcctcggtgtgctacctcaggcgatctggccggagaggtacggcgtttctggtgagccgctggctaccggtaaggttgcattggctatgcccagtactcaggtcgtcccttaccggatagacctcacagcgggcctctggttgcctgcccaggcgcttgaaggattacccggccttccggtcacaaaagacatgatcatggcgcgtgcgcgcgccgcaggctggcagacgcggcaacgtgttggtgtcgatgaggtttctttcgcctcgttgccggcagttaccaagctgttcctgacgggcgctgagggcggccaggcggagccagaccctgctggaggccggcaacgaaggctcgacatgaatgctcagattgcgtgcaacgaccatccgacccacagctttgatcagactgtgcaagtccgcgtgtacggaacaagcgcgcatcttagtatcgtgaagtccgatccgtgtttgaatcgtatcgaaagcctgacttcagtcgagatgtcgcctacagagttgcgggcggctgctaccgccctgatcaaggccgcccagatgctggaagtaggacggtag

SEQ ID NO: 336605 - DNA, 180 bp, Pseudomonas aeruginosa
atgacgcctgaactgcaaggctggctgaatgcgaacctggcccccaaggttcccgctgcgtacgttgaccccgagcaactggcgctgcaagcggaaatgcgtgcccgtggcgtacgcttccttccggcgcaggtagagcgccgtgtcctgcgagcctaccgccagcgcgtagccggctga

SEQ ID NO: 336606 - DNA, 567 bp, Pseudomonas aeruginosa
atgaacaagtccttccagacccccatgatccgactctgcgatcacgaagacaacgtttctaccggatatggcaagcgaactcgcagtttggatcgcaccgaagcccgtcgcactctgtgcgtcgcctgtgcggaacgcctccactcactgaaaaccacacctcatttgggcttctaccgtgtcgaacctgtcatcatgcgcggaacgccgaacaaagcttcctgggcaacctccatccgccgcgaattgctgcgcaggtatggcccagtcatggctcatctatcccagatggttgacgaccccctcgccagggttgccctcaaagtctacgaaatgctgttctgcattccttcggccgatttctggatcgacgcccgcaatcacaagttcgaaggtttctggctagtcttcgaggtacaggacttgatgcgttcgcatgaaatgatgggtcagaagtacagtgctcattcctgctatggtttctggcgcagctacaatcgacatgcgatcagtaaagctcgcttggaactcgccactgtagaactgccaactgtagcgcaaggctga

SEQ ID NO: 336607 - DNA, 375 bp, Pseudomonas aeruginosa
atgaagaagtgcattctgggtgtaatagttgcgatcatcgacgcggcctcggctgacacctgttcggccgccccggtggtgatcaatagcaagatgtacatcagcgacgtcgaaaatccgatgaggattgaaacaggggcggatatcgagtgccgtaagctcgggcaaatggtaacggtgcatcccggcggcagcgtaatcatccagggcggcaatgtcgttcgcggcgaagatggcagcaagcgttgccgtgatgcgggcgatgagcaagatgaggacagcgagggtagcaaacagggaggtgtgcctgacttgcaggaagagaagtcatccctcccttcctaccagactggaccctctcagatatggaactga

SEQ ID NO: 336608 - DNA, 1614 bp, Pseudomonas aeruginosa
atgtccttgatcgcctctccagtcgtactggggaaaacgaaacacgccgagctgagcgccgctcgcgatctggcggagcgctacggtgacactgaccgtgtgctcgacaccaccacactcggcataccggcactgaacgacctgatgaacgcggcgaagaaggcgaaggatattcggactgttcgcgcgcttgagtcgattctgctcgggcgaaaggggaagttcgatcagttggtgccgaacttcagcagcttccacgacgtgttgctccagtacctgaagcatgaggctatcaacggttggctgtacgggctgcacagggacggattctactacccctatctggttaccaagctccagttccatggggagaacaagcgcgactgtgagccggcctccgttgacatttggatgtcctactacggaaggtcatcaggcggccggactcagctacagacgcgcaagcttacgttccgaccgcagagcgtggttcgaaagcgcatctcggacgtgctcgccgatgtcggtttcttcaaggaaaccccgcagctggccgagcggcacgatgcgacaatggagcgctatttctcgaccgtgcagaacgctttcgcaatccagttcaggttcaccgggacaaccttccagtacgaaacgagcgaccggggccgtgagcgtgcggagatggcccgccgtaaggtgatccacgatctcgacgcggacagccgcgatgccttcaacgctgaagctgagagccctctgcttggcgctgaggcctgcgccaaaatgccggttcacccggtggtgtacgtcttcgatctcggctcacacgaatggtactgggtccatagcgatacccttacggcctacgagtacgacaacagcttacgcggtaagctgatccttccgaagtcgcaccgcgacctgctcgatgtattgacgacggacctgggtgcttttgtcgatgacttcgttgaagggaaagcggcggggaatatcattctgtgtaagggagatcctggcctcggtaaaacgcttacggccgaggtgtacgcagagcttacccagaaggcactgtatcgcatccattcgggtcaactaggtacgaccccttctgagatcgaaagagggctggcagaggtttttcgcttgaccaagcgctggggggtagtagcgttgctggatgaatgcgatgtattcgtcgcaaagcgcgggaatgacctggtgcagaatgcggtagtcgctgagttcctccgaaccacagagtactttgatggcatcctcttcctgaacaccaatcgtcccggcgacatcgacccggcatttatatctcggtgcgctgctatcatcgaatacaagtacccgacaccggatgaccttcgctcgatctggaaggttatggccgagcagtttggtacgagcctcgactcatccctcctggatgaactgttgctgatgttcccgagaatcgctgctcgggacgtgaagaatctgttccgcttggcgctgcgagtagcagctcgtgagcaggccccgctatcggcggatgtattcaggcaggtcgctgtattcaggggcctatcagcccttcgggacgaagagcaggtggaggcatga

SEQ ID NO: 336609 - DNA, 477 bp, Pseudomonas aeruginosa
gtgctgcctctgtgcgggccgcaccatcaaaagatcgagccgggtgtgctcgcgatccatggcgacaaaccctcctgggagagtcgctacggcaagcagatcgatctggtggtccagctcatggccgagattggtgagccttacacgcggccagaggatcgcgagaagccagtgcgaaagccacgggcggcccgtgccaagcctgcggccgaaaaggcagttgcacgacccaaagccgcatgtccgaagcggaaaaaacttcccctcactccgcagcagttggagtggattgagggccagaagcagctgaagaaggaccgcgcggcagcgtccaaggctgagtacgaagaagccaaccgtgagcgcatcgaagcttcgaaggaccgcgcaaagaaatatgcccgcgacgttcgccagcgtctctccaatgaacgcaaggcgaagcgcaaagaacagaagcggagcaaggccgcgtaa

SEQ ID NO: 336610 - DNA, 672 bp, Pseudomonas aeruginosa
atgcagagcatccaccttccatccagccgagccttgcagctatcgtccgaactgattgcgacactgcccgtaggacttgctggtttgtacaatccatgggctgagcgttgcctctacgacgctgagggcaacgggccagagcagaggctggagcgattagcccagcacctggactgctcgccgcgcttcgtcatgttaggcgaggcaccgggctatgccggctgccgttataccggcgtcgcattcacgtccgaacgcctggtgatggatggagcagtaccccgcgtatcacgttcgcctggacgactgacaacgcgccaactccgattttctgagccctccgcaaccatggtctgggacaccctgtaccagttgggggagggcttcgctgagcaggttgttctctggaacgccttgcaactgcacccgttcaagcccgagaagggcccccactccaatcgtgagcccgagccggctgaactggtacacggtcgcgcgtcagcgattctcctcaggcaagccttccccgatgccaagttcgtagcgattggccgaaaggcagaattgatgctggctcaagcggggattgtgtcggatgcggcgattcgtcatccgtctaacggcggcaagccagagtttgtggaggggatgcggcggttggctggccagtag

SEQ ID NO: 336611 - DNA, 402 bp, Pseudomonas aeruginosa
atgacctgcatgactggcgtacccaattccgccctgaactccggcgaaggtgcgaataggccggtgaaggagctgctttacgtgcagttctccggacggttcgaaatcctcgttccgaagattcgcggtaccggctacctgaagactccgctcggtcatcacgagaatgacctttctgcactgggcgggaatctcggcttcgacctgatggggctggacggggcgctggaggtatatggtcccggcatgtctagcctgtcccgtcgcgatgtggaaagggtgatggtggagctaatccctgcgctcgttcggtactacaaaatgcctgcgcggatggtttctctcgccgaattcaggcgactccacccgattaaagctacggatgccaattacggtggctga

SEQ ID NO: 336612 - DNA, 201 bp, Pseudomonas aeruginosa
atgcaccctgagatcatcagccacttcaccctgatcatcgggatcatcctccttcttgtcgcagtcactgcccggaaggggtttgcccacaagatcgccaaaaaaccgaagggcacacgccacgcaatccaaggcctgctcgctcttgcagtactcaccgcaggggccctgatctatcacggctccagcctctcgaactga

SEQ ID NO: 336613 - DNA, 435 bp, Pseudomonas aeruginosa
atgcaatcgacaacagctttggagcagagcctgctcagccagatcgaacagcacatggccgaggtagccgaactggctcgctacctgaaagtccccttggatgacgccaaggaagttcttttcatcgcacaaggctccctcgacgctgcggaggctttgcgccctcacctgtcggccgaaaccgctgcggccatcgacgctcacaagaccaactatgcgaaacagcgtgagctgatcttcgacgcatccgtggacgcttcgaaccttgttctgaagatgctggacagaggcgaaattgaggacgaaggcggcttccttcactgctggatgtatggcgaattcgattcgatcaggcgcgagtggcccgatctggattccgacattttcgttggccccgactcgcagttgaagctgccgctccgagaccccgcctaa

SEQ ID NO: 336614 - DNA, 264 bp, Pseudomonas aeruginosa
atgcacaaacaacttgtcgcccatgcaggcctcatgatcatgaccctgatcgccagtgccaatgcgggcgctgttcaacgccagtacatccagagcgtcagcgaaatcaagcccggccagtgcatctacaagaacgccgttttcacccaaggcgagatgaagaaggccctcaaggacaccaccatggtctgcaccatggttgatggccgcagcatctggatcaagatcgacgaggacgatctcgccctcaaaaccggtgcgtga

SEQ ID NO: 336615 - DNA, 393 bp, Pseudomonas aeruginosa
atggccactccagcgaatgattcgccacacatcgacaaaccgccggtagcgacacttgcccagctcggactggccagtgcgaatttcggcttcgtattcgccccaaagtactgcgcaatggacgatgggctggactgtccaggtggcgtttggcacctctttgagaagcggccggtttacgacccggtgcgatactgctgggtatcggatggactggagtgggaagccggcggcgatgacaccgacgaccttaccgacacccccgaatttcagcggtgggtgaagcccggcttctcgctgatagagatcgtcgaaaccaacgaaaaatgccccattttccatccgcttgcatacatgacggctagcgaacgcgcggtttacaaagtgacttga

SEQ ID NO: 336616 - DNA, 219 bp, Pseudomonas aeruginosa
atgctacttggcgggataccagtcgttgtcttttctgacggcagcgaacagttcctggatgactccgcagagccttgccttgcctactcaccgcgcctgatgtcgggtgagcttgaagccttttgccgggcgaacatttccaggtacgaggcgttcaatgcagagcatggcgacaccaggctcaagaccgaacgcatccctattgaaccgttctggtag

SEQ ID NO: 336617 - DNA, 312 bp, Pseudomonas aeruginosa
atgacgctcatgacccacaagcaaatgctcaatgccgtccgatgggtttacctcaaagccgtccttctcagaaccgttgggtacctcattctgagcatcgcagccctgccgttggccgtcttcgcttatgcgaagaaccctgacggcatctgggtaactcttttcgggatgatctggctgttcctgacaaccaccgccatctactcactgatcaaaggctcggttgagacctacaggtatggagcaaagactgacgactttattcgccggttctacagcgcccttgtagaagccggcgacattcgcccctga

SEQ ID NO: 336618 - DNA, 633 bp, Pseudomonas aeruginosa
atgaagaaattcaccgccctcgccatcatcctcgccgccctggctggcttctgccatgcagcgatcgctgaactcccttcactcccgaccaagacgtggcacgtgagcgtgaaggctcccggcaaggcaaaggaagaccgcgtagtcgatgaccgctatctaatcacctacagcagtcgccttgttgagttcgaaggcaaactccccggcgcctcggtaaaagccctgcctgccgatggcagcggcttcaaggtactttcccgtccgtcgttcagcgctggcgacaaccagccggtgtgggtaaccgaccagcaggagatcagcattccgcaggaaaccgtctccggcaacactcgaacgctccgctcggttcccgtctcgctgggcatcgtgatcatggtcgatccagtcgtgcctgatcgcagccagccggatacggtcctgactcggctttacctcaatcacaccgaactggccgataacaaagacgacggcaagccaatcaccgccaacccccacgcggaagataagctgaaggtgggcgacaagcagctcattacctggtccatgaacggtcacaactacggtctggagcttcagctcacctcgatcaccgacaacatcaagtcgtga

SEQ ID NO: 336619 - DNA, 969 bp, Pseudomonas aeruginosa
atgcgcagacgggtcaacgattcgtcgtccaggtcacgctgccctaccagaagcagggaagccttgaccttctctgcaaatccatccgggtcgagcgtcttgaggcgatcagcgaccgtgatctcttggcagagggcggacggaactggacggtattcgcttccaactggggtgacctccatggcagagcgggctaccccgtggtcgccaccccatccgtatgggtcatcgaattcgccttggcctgatcacaggactgcactaaggagccaactcatgtgcaaccgacttgtattccgcatctaccaatccggtgctgtgcacgttgttgcagccccctcccgccggcacgcagcgatgctgctgggcatttcgtcgcacctgctcaagaaacatggctctgaggtctgctacggagcagagtacgaccaagccatgagtgagcccggagccgtgttcatgcgacccgaggaaggcgaatggatgcgcaagctgtcttcgaagaagtcgatgaccctgcccactcggggcggctatcgacaagccgccgggggcagacagctgctgggcgaatcagtggcgcagcagatgaccattcggctctccgataagcatcatgaggactactgcgctctcggtgggaccacgtggcttcgcggcctactggcgaagcccgaacaggatggtccgcatatttcctcccaggtgcggccgagacagccgatgcgagcacgctcgatccgcctgagtaatgaggatcgggaacgttacaaggcgcgaggcggcgcggtctggctcagaaaacaaatcgaccaggcggttgcagaacggagcaagcttgagatcggaaccacgcccgatcacaaggcttcgggtataccggacacatccgccagggcatcacaagcgaagaatcttcgcgagggtgagcttggcgagagagccaaaaggcttggtgtcgcggcctaa

SEQ ID NO: 336620 - DNA, 1026 bp, Pseudomonas aeruginosa
atgaccgcagctgaacagaaaatcgctacttccttccgcgcctacgaagaacaacaaagcgccctcaaaaaggctggtgctgccaatgctgttcaggttggccgtggccgtatccactccgttcgcgcagtggatatcgtggtttatcccgagcgcaacatccgccccatcgatcgtaagaccgttgagtcctacaagcagaagttccgtgacggcctgaccccgccggcggtcgatgcgaagatggaagaaggccgcatcaccctggtccatggctaccaccgcaccatcgccgcgcaagaactggctaaagaagacccggatactttcggcgatctgatgctcgacctgcgcgagttccgtggaaactcggcagatgccatcttcctgatgttcgatgctcaggacagtctcgctgttgatccggtagcacgtgcggatggctacttccgtctgagcaaccaactcaaactgtctctctcccagatcgctgaacgtctgccgatgatcaacggcaagcgcccgagcgccgaacacgtacgcatcacgctgttcctggtcaaggccgaagaggaggtcaagcaagccatccgcgaagaccgcatcgctgcctcgaccgtgatcgacctgatcaaggaagaagagcaaggtggccgcaaacacgttgaagtcgtgcgcgagatgctggccaacgcggaagctgtcggcaagaccaaggcgagcaacaagcaccgtacgccggccgctccgcgtgcttcgagcgcgccccgcctgaagatgcgcgaggtgtctactgcgcttacctccctgcgcggcgtctccagtaccatccgcgactcgctgaaggcagccaaggtcgaagacggtgcaagcgaagtcatggtcccggtcaatctgcctgcgtccaagctcatcgagctgctggaccttctggacaaggccgctccggttgagccggaaaccaaggacgagaaccagaccgacatgttccaggaaggcaaaggcaagggtcagggcagcaagtaa

SEQ ID NO: 336621 - DNA, 303 bp, Pseudomonas aeruginosa
atgtgctttgcgccccgcttcagcaaagtgatccgtaccaccccgcctggggtggtctccaccatcgccgcccagatggccttcccacccatcaccctctgcatacgagttgagggaaccagttgggtgaccagcgcgcgcaacgtcaaggtatttggcagcgcaggtctcgttgtctgggactaccaggtgtccttcgaagacgacgtggtgctgctggtaagcgcatgcgatgccgccaaggcagcagaaagcgcaagagccgtccgtgcccgccttgatgccatgagcatcgcggcgtag

SEQ ID NO: 336622 - DNA, 297 bp, Pseudomonas aeruginosa
atgcatgcgtggctctaccggaacttgccaaaggcctggagtcgttggtggtccgcacgtctgatcgcttctaccgcctgctcgaagtggcttcacgctgggaacccggatttcacgtggtggcagatagtgaagcgcaacagtctggcccttgctctcttctgctccagcggtcctttgccggtcggcatcaggcagcgaaaggtagccctgtcattgaaacacctcacaatgagaggaagtgacatgcgctcgaatctggaaaccttcggcaacccggaagagaagcagagctaa

SEQ ID NO: 336623 - DNA, 756 bp, Pseudomonas aeruginosa
atgactcaggatcacctctttcctaaggcattggtgacgcccggccagcgcaaggtctccctgatcctgcaccgagttgatccgaactaccgtggtcggcagggatcatttctcgcccagaatggcgtcaccaaggcaacgctctgtgctgaatgcaataaccgcgtcctcggtacggagctggacccagcactgatcgaggcatacgccatagcagcggaggcgctcgactccaagcgctaccccgtcgcgcagaccctctacctccagggcatcaatctcaatagggttgcccgcgcggtggccgggcatttgctcgccctggacgaatcgaccagcgcgcgccacaccttcacccggcgtttgaggcggttcgtgctcaagcccaatgaacctctacaccccgatctgcgcttccacatgtggctgtaccctttcaggcggcagggcatgctgaaggacctcaaccatgttgtgttcggagctggctacgatcccatgtggatttcggccttcaagacttacccgctagcgttcgcctttagcaccgagatggagaacccagccttcaggctgccaggtgtcatggacttgaccccttatgtgaccactgacgtagagggacgcttcaacatcaagctccagacgagaccgctggttgacatcaactggcccttcgcagctcaccccaacggtgggattttcaccggggcgaacaacagcctcacaaccgcgctattccgaaaaaaaccatag

SEQ ID NO: 336624 - DNA, 255 bp, Pseudomonas aeruginosa
atgattgtcgagctttccttgcggacgttcgatgtgctgagcgagcatggcaaggcgctggccaggctcgaacacggccgctatctcgtaatggacagtacgcagggggtattggtacccaccgatggcaaggtagaaggaagcatcctattcggattggttctcggaggacttgctggacgtttcgaaaggcagggcgaggagatggttctcatcaccaaagttggccgtttcaagctgcgaaagctctgctag

SEQ ID NO: 336625 - DNA, 276 bp, Pseudomonas aeruginosa
atggggcccattcagggctggtatctgctcaaggaactgggctgcaacgtttctccgctcaccaggccatcaagtaaggccactgtgggggagttcctacgttcggccgatcctgggaaggtctatatcctgagcctcagggatcactggatggcggttgtgcgtgggcaggtttgggacaaggcccgtacacgggccgctcgcaaggttgtgcatttcattgaggtctactccgtagaacgcgctgctgaagacctgcgggcagccagtatctag

SEQ ID NO: 336626 - DNA, 204 bp, Pseudomonas aeruginosa
atgcttaccaaagaacaacttcgagaagagcttgagcgccagactgcgcgcttcgagcaagagcagggcggagaagtggtcaagtacgcggcagttctgccgacggaaaagcggccctggaagaagcgccggagtttgcgtgacaaggcctttgaagccgagatcgagaaaatcgaaaaggaacgccaggcggcggccgagtag

SEQ ID NO: 336627 - DNA, 333 bp, Pseudomonas aeruginosa
atggactcgtctaaacgaagcaagcggctgccccacatcaaagtgccatgccaagattgtccgtttcgcaaggacaccctggagagctggttgggtgagccacgcatgcgtgaaatccttgccgctgattctttcgtgtgccacaagaaaacggacatgcaatgtgctgggcacatgctgatcaatggcgacgcaaacggttttatacgtttggctgagcgacttggaattcagcttgatttgtccggcagagaactggtgtttgatactcaggccgaatgcatcaagcatcaccgccaccacagtttcaaccacagcaatacgaacgactga

SEQ ID NO: 336628 - DNA, 348 bp, Pseudomonas aeruginosa
atgaccaatgccagccaagcaccggacgccggagcgatctttgacctcaatgggcagcagtaccgcgtcaccggttggctggctgaagtgccggcttccgcgtcgaaaccggctgcatggatggctgaaattctcgaaggcctgagcggcaccctggacatggctccccggtaccgctggtgccaccgtgaagaggcgacccacgtagcgggttatggcgttgccgggtgtgtagttccggtgaccagcatcaaggtgaccgggacagtggactggtctgctgagcagctccaggaagcgcgcgctatcgccgagcagttggctgagcagggtgagctgatcgtctga

SEQ ID NO: 336629 - DNA, 798 bp, Pseudomonas aeruginosa
atgaccgacaccgatttcatttgggatgcagccttccactccggcatgtccagcgtcagcgacctgcgcggagccatcatggccaaggtccctgttggtgttgtcgccaccgcactgaccctcaccatggtgcttcgcaccatccccaactacattcgcgacggcggcaaggtgtttgtcgattccggggccttcaatgccttccgtctcggcctgccggtagactggggaaaggtcgtgatgacctacgacaggctaaccgactccgatgaggacctttcgggcctgagcatcgtctgcccggatgtgattggggaccaagatgcaaccgtggcgctctggcgagcccacgcagacgacgttgagcgctgggtcggacgcggcgctcgtgtcattgtaccgctccaggttggaacgctgtcggccggcgaactactggaggaggccaaacgcatcttcggcactccgcgtctctgcgctggtatcccgagcaaccttgaggcgatgggcccagaagactgcgcaacgcttcagcatgacgacttccatctactgggccgcgtggtggtaacccctgagctgggtgaaaagctcaaggcaattctcgccaacaatccgaacgcgacactgacctccgatgctaactggatgcgctctcggctgaagaagatcagccaggccctgagtgacacccaaaggcccgagttcggacccggaatggtaagcgagactcgacgctcgcaggctctggctaacgttctgatgaaggaagcctacgcaagccgggcggtccgctga

SEQ ID NO: 336630 - DNA, 801 bp, Pseudomonas aeruginosa
atgagcgaacgtgcaccgtggggagacttccctcccgtgcttcgcaatggagagctggggagcttgaagcttcagccggaatacgaggcggcaaagggcggcgaccgagcggcagcattggcaatggtgagccgcctggttacccatgagttcttggaccaaatgcgagagcaactggccgggcgcaagccggtactggtaccggtgcttgcagtagagcaaggagggctgaacaaaatcccgctagccttcgcgcgggtcgtcggccaccacctcgggctccctgttgcaacagagatcggcatgcgcgagaaggtgggtcggaccaactctggctcagatcaccgactggtggcgtgcccctccttcgccggagaagtcgaggcaggacaggaatacgtcatcctggatgacacggtgtcgatgggggggacactcgcggctctgcgaggcttcatcgaaaacagaggcggcaatgtgatcctcgctgccgcaatgaccgctcacgaaggagccctctcactggcggtcaaacagcgcatgctggattcaatcctggccaaacacggcccggaaatgggacaactctgccaggaggaacttggctatgacctctcactactcacccaaggcgaagccggtcacttccgtgcagctgcctctgttgaagcaatgcgacttcgacttcatgatgcgcgagatgcggcgcgacagcgaatggatgcggcatcagctgatgcaacagaacagcagtcgttgaacacagcgccagcgccaaagcccggcccgcgcatgggctag

SEQ ID NO: 336631 - DNA, 552 bp, Pseudomonas aeruginosa
atgctttgcccctccgccgccaaggtggttggattcatcgacgaactcggcctgctcgcgggtatcgaacccaacgtttccggctgggcagggccctgccgtatcgtcgaaggcaaactgctcgcctctcccgagtgccctgcctccactctgctccatgagctggcgcatatcgccatcgtaccaagtcggtaccgttacctcttgaacgacaacatctcaatcggagtgcgcagggcattcgagctagctgcacccttgatggacgacccggacagtgccttctcccgcgcgatgatcaatatgggcgattgcgaagcaactgcttgggcgtgggctgcggggacgcacctcgggattacgcccgagcaaatcatccaggacgaggagtacgatcacggcgggcaggatatccgcctggcactcaaattcaattcgtacctcggcattaacggattggcccacgcgggtttctgctgcgtacgcaccagcaagcacttcacgaagcaaaagcctgctttcccaaagcttgcgttctggctccagaagtaa

SEQ ID NO: 336632 - DNA, 519 bp, Pseudomonas aeruginosa
atgcgccggtcggccagaatctcgctcaccttcgcgctcatcgtcggccccacatcgcagcttctgctagcgggcgacgcaacaagcattgcgaacccggcgctcagcgccaatgtcaaggctgcccgaacaggctgcgcgcagcccggcgaagtggcagtgaacccagccggcaagatcatgaaatgccaaggcggcctgtggacgatccaaggaatctccgacgttgagtacgtccagatcaatgccaacccacaggctaacgaaattggccaaattaaagtcctctctgcgctctgccccgccggaaagcgcgtgataggtggcggctgccgatacttcagcggcaacaccttcgagagcggccagaacctcgtgcaggacttcccggtgatggatttatcgggatggcaatgcgcttacggccctctaaacaatcacgccgcggccccctaccagagcggtggcgtgtggcaccccgccgcgatgtctgtccatgcctactgcggatacttctaa

SEQ ID NO: 336633 - DNA, 435 bp, Pseudomonas aeruginosa
atgagtgattcataccagttcatgcgccgggagcgcgtgactttgaccaaggacgggttacgcgagaagtacgaagacgcgccgctttacaaggggcgtaccggacgcgtcgtgaacaaccgccaagtcccgaaatcagccaactcccaagaacaccaggtgtacgtgaaggtgcgttggaacgcgcgagatggtgaagatgagttcctgtccgaagagctggagtcccaccttcagatcgacgtgcccatgacgaagcggctatcgcgggagcaattcatgggcatcatggaggagaagaactgggataagcgctctctcggccatcgttgggggtacaagtccattcgccgcgttgaccagttgatcaatgacgaaaagcgcccggcgtacttcgacgatgcactgatgaatctgcctatcctcaaggactga

SEQ ID NO: 336634 - DNA, 603 bp, Pseudomonas aeruginosa
atgatcagcaataccaatcctgagtcggcctccgccacccaagccattcgccattcgccgatcaatcctgttcgtgcggatgtggtcggggaagctgtcacgatggagcagggggcaagcctggtggatcgcctcttgccgttcgacctcgacgaatgtgagctggtgagcccgctcgcgcacatgctttccgtgccattaaatcagcgtgatgcggaagttgcggcatccttcgttcgctggctcggcacgaacaatggtcgtgggtatcttcacgagagccaagccttggtggccaagcatcgctccaatgcattcttgattgcctggacgctggagaaccgacgctttcaagggagccgcaccattgagcaagtgctcgcgccgccccgcactatcgtaacggctcctgcctcgctcgaacgccttcgcgttggtgatctagtgattacggatgccgactgcgaggtgatagagaacatcgctgaatggctgggctcttcaaagggccaactgttcttgaaagaggttgagcgcgaaatcgtctcccgtctgaaaaaacagcgtgtcgatgtccacgtgaaaggaacaactgatgagtga

SEQ ID NO: 336635 - DNA, 444 bp, Pseudomonas aeruginosa
atggccgacaagtaccactgtggcgtttcctcgctcgccatggttaccgggctgagttatcaggaggcgagggaggccttcatcaggcttggcctgggcgctcgacgcaagagtaaggttgccttctccacggtacccgccgaactgctgatggcggtaatggcgcagggactggttgtagagcagaagagctggaagggctgggccagtttcaacggccttggcatcctgggggtgggcgatccatggaattaccgtaagggtcgctggcactgggtcgttgccttccgtcatccggaattcggagcggttgtttttgacccgtggtatgagctgccggcattcgagaggaatgcccctgctggctatcattggagcgccaccgcgtaccagccgcgcaggccctggttgcaggtcgagcagcggtttcctctagctctataa

SEQ ID NO: 336636 - DNA, 312 bp, Pseudomonas aeruginosa
atgagcgaaatcgatccgctttaccgtggtgtcaacctcggtgagccagtgcacccttacctcaaggcaggctggaggaagccggaagcgcccgaaggattcccgcactgcgtagctatgctcgcgccaactcgcaacgagggcgaagaaaaattcacgcctcagtggcacatcgacttcttcaatctggaaaagggcgagttcgcgtcgcaccagtttgggatcgaaatcgagtatccgtggccgtggatcgaaggattcaagcccggtcgtgatgactgggacgctattggcatccctcatctctgctga

SEQ ID NO: 336637 - DNA, 450 bp, Pseudomonas aeruginosa
atgtcgtttaacgggaaagttctcttcgtgttcgctctggctatgtcgtgtctgctgggcatgaacgtggctcgcctttgggaggccatgagcccgacgcacgcaaatcctgctgttctcggtctcctgatcgtcatatgcagcacgatcctttgctgggttggtgcgcacttcatgcgtcaccaagcaccgaaagcggcccgcgacggagcggcaaatgtcgcggtggtgacgatggccccggacctcgatgaggcgctacgggttgatcacatctgcccggagtgcaaagggccggccgtcaccctcaagaacctgatgcacagtttcagagaccagggggatggagccgcaacggttgaatgtgcgggttgcggggtaaagcttgtgatcgtccaaacaggttcgcgaactgccgagctgcgtgtcgccggcaggcgcgccaagtaa

SEQ ID NO: 336638 - DNA, 1086 bp, Pseudomonas aeruginosa
atgaccgagcagcaacatcccacgagccagatgtacaccgagatcgagcaggctttcgacttcttcaacgccgagctgttcggtggcgagctgaagcactgcatcctcacgcttcagcgctcgcacgagagcttcggctacttttcgcgcgagcggtttgtgaagagcgacggaagcaacgagatggtctcggagatcgcgctgaacccctcgttcttcgcaattcactctatcgagttcacgctgagtgttctgtgccgagagatggtgagtctccatcagctccaggtgggggagcctggccggcgacggtacaagaacaagcagtgggccgacatgatggaagaaatcggcctcatgccttccgataccggcaagccgggtgggaaacgagtgggggaaaaggtcaaccattacgtcatcagcggcggcaagttcgatgaggcatgcaagaagctggttgtcgatgagttcaggctttcctggtatgaccgctacccgccgatgcccgaagcgaacgttctggacgctgaggacggcggggagcaacaagctccggcagcgggccttaccgccgactcggctccgtcaccttctggtcccgatcttggcctcctgaccgacacggatgagggggacgatgacgatctcttcaaggcatcgctcatgtcccggcaggaagcacccatggatggttcagacgccgagagccaccctgagggcgcagctcccgatgtcgctggtgcagcacagaacctgagtggccagaagttgcccgagcagccggccatgaagacgttcgacaatcctggccttgatgcactcaagagcctgggcgtcgaagtgcaggccgcaaagaaaccaccatcacgcgcgcgctacggctgcccttcctgcgacgttctggtctggggtaagcctgggctgcgattccgctgtctgaactgcacggcggagccggagatgcttaggaacgatgctggcgctccgcccccaaccccactgccggaaacaggtaccgacgcggaagtcggacaggagcctgtccttgaaaatgaacctgcattagagcttgagggagcgtga

SEQ ID NO: 336639 - DNA, 1425 bp, Pseudomonas aeruginosa
atgcttcgggacgatcttcacttccgtggtcaataccaaccagtagtgccgggtcagttccgcgtgatgcgaagcgatcacggcgtgctgcttgtggatcgtgcgggctatgacccccggaccactctcaggtgggaagctgaggcgcacgactcagccgtcgcggatgtggttctcacggccttctggcaggccgccacctaccttgcacagcgccctgaattcaatcttgggtgcttgctgcctgagcagttcaagcaagttgccgcagaccgtgctgggcgcgcgttcagcgatggacgggaagccccatccgcagttgagcatggtctggcctacgccggctggatggcctgtcttccggcacagatggccgtcgccgccatgattgacgacgaactggtcccggattgcgagggtgccctccaggcgcaactcttcttgcaggcctgcgcacacaacggcaattcgcgcctgttgcctgccgcgctcgatctgcgcgacggctcggcaacatctttctctcttgaatcgctggatacgcaaccggatcaggctcgccgagcccagctcgcttcgaggcgctataccggccttgcggtgaaggcgctcctgggcagccacggtggtatcgatcacacggctgtgtcgcgcctgcaagacagcctgaactacccggttggctccattgccgacaaaccagctgtggccctggtgctcgataccaacaccggtcacgtccgggcatgcgttgccaccccgagcggtgaccgtagcttgatcgaagcggggagtccgttgggtgtgatcgtcaatcaggcgtacgccacgggccagaagtctgtcgaagggctctcgaaggagcgggcgcatgaggtcggcctgttcgctgccactgtggcatacgagcgcgccagagctggctccgttgaacctgtcgcggaagcactggtggagaccagtgctcacttcactaccttcaacccagtcacgttggtgaaaacgtatctggcattggatgaaggccaagacacagcggagactcccgtaatccattacaccgaccgagagatcagcctgaatttgaaccgcgccggactggaaagcctggctgctgtgatcgcgggcttagggcctgtgctcgctcaaagtatccctatgggcgaaaccattgcgcgagcgttcggtgctcaactcatgcccaaggacggtatgcagtacagggacaaccccgtggtctatatggcgctggaacctggatatgcaggtcgcgactgggttcctgatggctacccagagcctgtagtcggcggcccactcaaattcgcccaacatgtcgatcagcagtacgacatgcccgtacaggaaaacatgtggcctgaggcggaagccgtccgggtgaaatccggcccgaccatgcgctga

SEQ ID NO: 336640 - DNA, 375 bp, Pseudomonas aeruginosa
ttgtcccatcagacgcagaaggaatccgccatgtcccgctacaagctcctgggtattaacgacgacaagtccttctgtgaatgctgcggcaagaagggcctgaaaaaagtggtgtggattgaagacaccgaaactggtgagattcgccacttcggtaccaactgcgccatgagtccggccaaaggaatgtacctggacgcagagatcaaggcggaagtacgccgtctggactttatcgttcagaatcgccacaagctcgcccatcgggcgtaccgccagcgcggcgggaagtacctcccgcacccgacccgttcggggacctgggtaaatgctgatccagccctgtaccaagcatgctacgaggccgccgcctga

SEQ ID NO: 336641 - DNA, 195 bp, Pseudomonas aeruginosa
atgaaaaaggtaaaaccttccaccgaaagccatctggcgcgctatgagcgcatcgtgaaggctgcgttggtgatgaccgaagcggagaaggaacagctcgccaaatgggaagctgagtatgtgaaaggtgatggcgagttcggcacgacggattggcctggttggccccaagtgatcgcccgaatcacccattga

SEQ ID NO: 336642 - DNA, 276 bp, Pseudomonas aeruginosa
atgagcatctacgacgaaatcgccagcgtgatcgcacgtgtgcgagcagcgccacagtctggcgactgtgagcgcgacctggtgcacgatgttccccgtggcatcgttcgcctgtgcgaggcggtgaccgacaagatggttgccatgggcgcgacagccgtcaccgttgcggaagtgatccggctggaggcaacctgcactgggagcgactactggcataagctccccttgcgttgcagcttccgcgttcaggaagcgctgagcgtcgctcgataa

SEQ ID NO: 336643 - DNA, 171 bp, Pseudomonas aeruginosa
atgagcaaggtactggcagcgttccgcgcagttgtgagccgcaggaaagctgagacgcacagcaacaccagcatcgcagggggcctctatctccagtgcggccattccgtacgagttacaggttgggacgcctaccacgctgagaagaaacgctgcaaaaagtgcctgtag

SEQ ID NO: 336644 - DNA, 495 bp, Pseudomonas aeruginosa
atggaagccgcctcgaatacttcgcgcgagcgtgtagcgttgagtcaggccgatatcgaagcgctggcagagctgcctgcaactggctggtttggtgtcgcacacctgccgatcaaccgtcccagttaccgatgtgagcgcctggagcaagctggttgcttggtcacccgcgtggtgggtgtctatccctttttctcgcgggaatatcgagtggttcctgaggcggtaaccgctgccggactgaaggctcgctcggtcaagctttcggccggagaagcggccctgttcgacactatcatcgagcactattacccagagccgcaggtcgggaccttctactacgtcgatccgcatgagctgcgcgccgcacgcgggctctgccagaagctgctcgcgaccctggagcagggtgaggatggggcgaagctggcctttacctcgcgcggcgcagatgtgttctatgcctacaaagctcagcgaggcgcgcggaaatga

SEQ ID NO: 336645 - DNA, 363 bp, Pseudomonas aeruginosa
atgaaaactcttttcacttatatctcggtccttctgacggttgtttcctattgtccggtggccatctcgtccccggctcataatgtaccgcttccccagtgcgcaaaggatgctgcgcgcgaggctggcgctgaacaacgtctctttgaagccgttattgcctacgaatttggaataaagaccgacagggttccctgcgacttctaccgggtgtccgctgagcgcttggcgctcctggttgatcatagctctggtgatcggtggaaagcggttgctcagtggctggggaagcctgagggcagtgtgaccgtgctgaaggtgcgttctctctttgagtccggcgacgaaatctaccgggagtga

SEQ ID NO: 336646 - DNA, 426 bp, Pseudomonas aeruginosa
atgggctatcgagacacgcgctccgactggccgaacactccccgcgaagttatggcggacgaaatcgacaaccttcagttcgaagtcgatagccttcagaaggcccaaaagaccctttccgccgttctggagctgtgtcaaacggccggtttcgctggcgacagcactctgctggagttcctccagaacagcctgaacctgcctggctacgcggtcgcccaaaaccttcgcaaataccgcgaggcgcgcggctggcaccccaacgttgcagccgaccacctcagcaagttgtgcggcctttcggtcggcggcgctgattggtcttcgtgggagggtgggtcggaatttccgggtgcgagcttcgctgatcacctggccgaactgtttagtgcagaccctaaagaattcttggtcaagcgcacgtaa

SEQ ID NO: 336647 - DNA, 450 bp, Pseudomonas aeruginosa
atgcgcatcgaaatcaccaacgtcgaatccaacctcagttctccttctgctcaggtgagctacatcctgaacggacaccgccgctcgatcagctggggcgaactcgacatgctgggtgaggatcggctgaagcgcgctgatcgcgagcagaccggcgagcaatgcctgctggcgcaagctgctctgatgctccgtgctcgcaagatggagcgtggcgagcaggacagcgagtggtgggcgggcctgaatatcgaccagaccatcaccactggtgacggtaccagcgtgcgccgctctgcccgcgtgtggttcgacaatggcgattctctcgtaaccactgtcaacggtaccgaggtcagcatccgtagctactacgtcggtcagtcgttcaacctgggcaacggcgaccacgactgcattactaccggccgcgctgtcgaattcctgtaa

SEQ ID NO: 336648 - DNA, 1155 bp, Pseudomonas aeruginosa
atgcatctgcgctttctacggatagcggcgaccagctgtgcggttctattaagcactctgttgccggcaaccagctctcaggccttcggcgggccgattgcatcgcttggctttgacgtgaaagctgggctcgactcggcaaccatcaatttcctcaacaactacccggccacagtccgcgaagaggcggtgaaaggtgccaaccagattttgaatagggctgacgaatccgtatccaagattttcgaccagagtcgcgacctggtgcttttggccaaagatgttgcggtctgcgctggcgtcactctggaaaccgttggcgtaggcacttttcggaggatgttcggcatccacccaaattggaccgaacggctgaaggagttcgtagctgacatccaggacgaggcgactctgaccagcacgccggccgttctgtacaagcagtacgtcgatgccgacaacagaggacgtgatgcctactgccttacccaccaaggcgatcttgaccaggaaggcattatgaacctccgcaagcagatcaagacgactgcgcttatgtggcagagacttgagccctattgcgcgaatgtgcgcgagtgctatgcgctcgtgtctgccacagtcgatgcagctgtacagggcgcagcgaaacaggacctcaaacgcatcgacgcagcagatcggctggccaagatcaaaaggccacccgagcctcagcgctccgttttctccagtaacttcgacctgaggacgtacgagctggcgctgttggcgctactgtcgattcacgatgaccttatccgtgcttctgaactgagggtcgccgccggcaccgttgagaaaaacaagctcgacaaccagcttgccacgaacgaagccaagctaaacctcctcgaacacgacaagaacaagatcgccgcttgcaatgaggcctacaaggtagctgggtggtttgatgctgctggcgcgcagctgaaggtggtcgagggatatgaggtgctgacggcagatgaactgaacgcgttggccgagaaggtaaagaaccagtcccagcgccgagcacgggtggccgccttcagcatggacggagtgatcaacaatggaaaaggatgcaggctgctcattatccgcgacccgcatccagggcctgtttaa

SEQ ID NO: 336649 - DNA, 297 bp, Pseudomonas aeruginosa
atggccgttcagggtgagggcggttgtaagctcatcgtcacgactgaggtcaccaacgatggcctggaggagttctccgccggctccggcgggatgccaccaaccaccaagaatcctgccgccaatgtgttgccgcgactgctcacgtgtaagggcttcaacaaggcactcatggtggaaagcaacctctctcgcgcccgcgcccatgttggctcctcggcggagtccaccctggaattcatcgtgatccagccgatcaggaagactgcttcggacgacctggcctccaataactga

SEQ ID NO: 336650 - DNA, 279 bp, Pseudomonas aeruginosa
atggcagatcaggtccggtcagaaattcgtgtagccaagctcagccatccctgcatggccacgcattggttcgagcagagcggcttgggtcagcaggacctcgatcctgtcgagtgggcgtcggtgcttcatgcgcgatccgcgaatgggcagatcgagcccggccagcagtatctctaccaggtgaatcgggacagcgaaaacgcccttgtggtgttcaaggctcgcctggagatgaatgccatctgccgccgatacggcctttaccctgaatcgtag

SEQ ID NO: 336651 - DNA, 702 bp, Pseudomonas aeruginosa
atggctgaccgcaccacattgccttttctcggccccgtttcgatctactcgtgcagcgggcgcgaagatcgggtgcacattggcgcgccgaatccctccagagacgctgaagcgcgcggctgggggtggactgttgctcatgctgccctgacacgcctggacaatgcgcaggcggctctggacgctgctgcgatccagagggccgaggcgttctgtgtcgccgctcattgcgccgtcggccagacgcgcaagggcggcaccaccccgtactggcatcatccgtttgaggttcgtgatcttctgctcaaacacgtgccgagcgcgtctcaagagatgctgatcgcggcgctactgcacgacgtgatcgaggatactgccgtcagcgccgaaaccgtggcccagcttttcggcgatgagatagccgccctggttgtcgagctgaccagcgtctcgcgtaaagaagacggcgcgcgggccgtgcggaaggagatcgaccgccagcacacggcgaaggcctcggcggcagcgaagacgatcaagctcgccgatgtgatctgcaacgtaagcactgtggagcaggttgaccccgatttcgcccggacgtacatccccgagaagcgcaagctccttgaggtgcttgtggaaggtgacgccacgctctacgcagtcgcggcggagctgctgaacaagatcggtagctga

SEQ ID NO: 336652 - DNA, 972 bp, Pseudomonas aeruginosa
gtgagtcgaatcgaagcgaagctggagcactggcggccgatggagagccagtcgaaactgtcctacgaaaactacctgctgccgatggggtggaaaaagccgcgcctggccgtgctgactgggatgttcgatccgttcgacgatgccttcccggtcgagcagctggaccgcctgctctcggtgatcctggcatgcgctgtgttcgacaaccgcccccacactttccagatcgctacccggttcccggagcgtatgcgcgagtacttcgctgcccgctctccggccgagcacctcaaggcctgggccattgctggcgacaaggccatccactgtgacgatggcgatgtcttcttcagcgagtacgtctgcggccagacctgccacgactgggacgacgacggtggcaacagctcaggaagtgagtacaagccgtggggctacaccgataagcttttcccgctgcccaatctgtggctcggtgtggtggtgcagaaccaggctgacgcggataaccgccttcccgttctgttcgaaacgccggccgctatccgctgggcccatgcctcgccgctgatcggctcggttgacctgaccaagctggcgcatgcacggctcgactgggttgtggccgctggtgaggtcggtccgcatgcgcgcccggtgaaccctcagtgggtgcgctcgcttcgcgatcagtgcgccagcgccagcgtcccgttcaatttcgagcgctggggcgagtgggctgccgccgaagaagtcggcccggaccacatggcgttcatgaaggcgcagcggaggtacgccgagggccagctcggtcaggtgcactgtttccccgaggtgcatgtggcccgtgtcggccgacgcgtcgccgggcgctcgctcgacggtcaaacccatgacgccttccccgaaggctacctgatcacttcgcccagcagatcgaccgctggcgcggtactggcctga

SEQ ID NO: 336653 - DNA, 441 bp, Pseudomonas aeruginosa
atgaccggtaccgcagttccttctgctgtcgccgggaaagaggccgtgtcacgcgagcaaatggaaaagctgtaccgagcagcacagtgcgccggccagctgagctttgccggtgtagtcgaggccgcagtcgcgcgactgtccagccgtcctccgatcattggctggcactggcaggcggtgtttcgcggagaggtggtcaatagcggtgtgatctggagcgaggatcagccgcagctgaccgacaccgttccgggcgtgaccttcgagtaccggcccctttacggcgaaccggtatttccccccgcaaccgctgaactggtggccgttgccggaaagattctcggtcttctgaagggtgagcacaccagtgtgtctgcgctggaaatgtgggccctggaagaagcactgaaaccattcaacgaacagagcgagggataa

SEQ ID NO: 336654 - DNA, 672 bp, Pseudomonas aeruginosa
atgacgaaaagctatggagaaatggctgcggaagtgggccgggcgcgcagcgaacgtgaagaaatccgcgatgcagccgaggctgctcggggcatgtctttcaaggctgacgccctcagttctccgctcggcgtcttctcctctaaggccacgccggcagcggtgctgaaggtgctggatgattacgatgatcaggaggcacggttcgggcgtctggcccagatcgtcctgtgcgctgcccacgagctgggtctgcctgaagacgcttcccctcaagctgttgtcgatgcaatcgattcgctccagcgccagctcgcgcaggccaggaagaagcaagcaaccgccgccgctgtggttgcggccctccctgctaaggctgctgcccgcacttctgctgaaaacgtcagcgacgtgctccaggcactggcctctctcacagcgcccggcacgtcggcagctccccagaccacgctggtcgatgagatcgagatgttcgaaacggcaatgcgcctccaatgggcaccctcccacggcccgctgaccgaatcgctttttgcccgcaagcctgacggcgaatacgttcaaacaaccacccgagagtgcctcaagtcttggctgctggcgcgaggcctgtccccggccggggctgcgtccgagggcggcgaacaatga

SEQ ID NO: 336655 - DNA, 231 bp, Pseudomonas aeruginosa
atggctcagcggctcggcaagattcagaaggcactggtgcagtggatcaccgaatccgggtacacctacatcggagccggcactactgcccatcaacggtatggactcggcgggcgcgatctcgaagagatcgacaggtcgctcgatgcccttgttgctcggggcatcatcaagcgctggaagcccaacttttacagcttgcccgactttgagaaggagacgttgaaatga

SEQ ID NO: 336656 - DNA, 261 bp, Pseudomonas aeruginosa
atggacgcggcagcaatcacacgctcggaactcatcgccaagctcgccaacctgcaacccgagcgccaatggggagagtgccagcagggcgattacgcccactacgccgaacttgccgcccccgaggtcctgatctgctttagcagcggggaccacgatctgagtgacgggctgcttgatccctactccaccttctacggccaaccgtgcactgggcaagcaggaccggccaccacgtggctcatgagccaggttctttga

SEQ ID NO: 336657 - DNA, 294 bp, Pseudomonas aeruginosa
atgcccgccagccaagttcttcaattccaggaagtcatcgagcactatcaccgcctgctagttgccaaccccggcaaagcactggtgattctggcgggtggcaacgctgccgtgcttcaggatgatgtggtctacggggctcccacctttgccaatggcacagtggacaaggataatctttacgagttggatatcgacgttttcgacgttgagcgaggctgttggtgcgacgagagtcctatagaggggtgggcccgcatcaacaagccaacattcatcgacctgaccgcctag

SEQ ID NO: 336658 - DNA, 669 bp, Pseudomonas aeruginosa
atgcaggcaaacgcaactgcccaaccagcccagaatcggagctggggcgaatcagcccagttcagccaaagaccgtggactgcttgccatagggcgggaaggacggagaagaccaaccccagtgccggcacagcaagcgccagcaaaccgcagaggatcagggtgctgcgggtggaatcagcaatggccacgcgcaccttggttttcgatttactcaaagggacctctctccggggcagatcggcacaggcgaccgcccgatggtttctactgttggtcctggaacccaggatgctcaagatcgaccgtcaaactgctttcggacgaatcctggccctcatatttccgcgcccaggctcttcgctgggccggcgtccgatctttgcagccacgctcgtggcgtcctcgccatgctttgcacaggccctgcatgtcgcggttcgagatgctgaagagccggtactccgcaccgcagtggcggcaccgggcggacccagtgttgttagccatggcgatcagctcccgccagcgccggcttgttgcacttcagtgtctgcgagggcttgctggaggcgactgagcgcgctcttagggctgtcggccagctccacggcaatacgcttgcagcaggcgaagaagtcgaagaggcgacgctgcgattccggttga

SEQ ID NO: 336659 - DNA, 660 bp, Pseudomonas aeruginosa
atgctggccaagcagaagagggcggcgatgatgagtgacgtgcgccgtttcaacctcccgttcgcccagcccggcgacgtgcaagatgcgcccgatggtgccttcgtcatggcggaggcctacctcgctctgctcgcacagaacgaagccttgctcgaacgcaatgcgatcctggaacagcaggcgcagcacaactacgagttcacccaagcggcgctacaggaggtctacctcgtgcgcgctgtgcttcaccctggcggacccgagcgagatgcgttcgaggttgcctatgcggccgagcaggctgaagcctccggccggccagtcaccgctgacgatatcgccaagctccgtgtcggcgacggctacggagagccgcgtgactacctggaagggcgctggcatggctggcaggcccgttcgaacgcagtgcctgaggtcggcttcaaggcaatccaatctgctcaggagcgagctgtagcggccaaggcgctgctcgaagcatctcaaccggaatcgcagcgtcgcctcttcgacttcttcgcctgctgcaagcgtattgccgtggagctggccgacagccctaagagcgcgctcagtcgcctccagcaagccctcgcagacactgaagtgcaacaagccggcgctggcgggagctga

SEQ ID NO: 336660 - DNA, 915 bp, Pseudomonas aeruginosa
atgcaaaagccccttgttgaatccccttcggtatccgcactcgttgatctgctggacggtctgaaacgggtggccgtcgatttcgctgaccagttgcccgcagccttctccagccgctttcaacagctggtcgatgaaggcctggacggggccgccaaggctcgttacgaatcccatgtccgtgcggcgggggatgttcctgaaggtgcggttatcgactgggaagcacctgaggtgattgcgcaggttggtaccgtgaggaggttgttggcaggctacttgggtgccaagcccataaccgtgaccggtaacgtccggaagttcacgcccgagacaaatgaggctggcgcgaaaccctccaactcggttgtcgtaaccggtttccagctcgtagatgccctcaacttcatcgcgccggacaggactcgtgaacagctggcccgtgatgtcgtgatcgagtaccgggacaagagccccgacaatcctgagggcggcctctacgcctacgaccttgaatacccggaagagggcagcatcccgctggagggtaccgaggtggatgtcgtactccccgaaggccagcccgactggggcatcttcgccggttacctgctcgacaaatgcgagcgcgagacggtgaccgaggaaaacctccagtattgggtggctgccatgctcaaggacccgagctacggcccgcaattccgccgggaggtcggtccccaccagtctgtggtaaacctggatcgctacgaaaaaccgttcgttgaaggtcgcaagctgatcgatgagattgccgagcattttgccgcatgcgggaacgacgaatggtgcgcgcgcctcgacgtgtacctgaaggctaacccagagcctggcgatgctggccaagcagaagagggcggcgatgatgagtga

SEQ ID NO: 336661 - DNA, 510 bp, Pseudomonas aeruginosa
atgactgagcaccaggacaagctggttgtggaagggcagggcgaggaagaactccgcgccagcttcgaaaagaaggtcatggccatggagcacacgccgttcggcttcctcggcgaagactacctgcggcgcaccgctgacggggaatacgccgatgagtacgtgtacggcctctgggcgggccgtcacatctggggtgaggcgctggccaacgaccagcagaagtaccaggccgaactctacgatgaggtctggaacgaggcccgccaactgggcttcggcaacgtcgtcatggccctcagtgcgctgaaggaactccgcgccgactctgccctcgtcgccttgctcaccgagtcgcgctccgccgtggcgctcgatgtcggtcgttggaacaacactcccgccaccaagcgccagcgttcggcgtttgtcgagtcgaacctgctccagcgcctggacgcccgacttgctgcgctgggtgtagccgctcatacgcccagcgccagctga

SEQ ID NO: 336662 - DNA, 333 bp, Pseudomonas aeruginosa
atgctcttcgaggaacgctatcaggcgatcctgcgcaagatcgagcgcgagatgatcaaggtcacccgcgaatacaagaaccccgatgagaaggacgtttacgcccccgacggcgtggtcagctatggccatcgccgcgtggcaaaggacggctctattcgcgttgcccaccagaagtggcagaacgatctgctgaaaccgctcgccgggcgcatcgtcggcttctgcgtaaccgagtattggattccctctctcgacatctactggcgcgggtaccccgatggggagcacctgttccggattcacagccaagaggaaaaggacgatgactga

SEQ ID NO: 336663 - DNA, 369 bp, Pseudomonas aeruginosa
atgtgcgactaccaacgcggtacctgggaatgcaggggtgacggctacctctgggacgcagacagtgatggctgggacccggacgatacctccgatccctgcccggcctgcaacaccgagctgtacctgaccgccgcgaaagaagaagcggagtcgtgcagcttcttcgtaaacgggatggactccggtaccggcgaagatatctggcggcggaagctggcgtgtgccattgatgccaaccgggatgaggcggagcgcgttcagctcgcgctgggacccgtccacgcattggtcgctgactcgaccgcacctggtggcttcatcgtcagcgtgaacaacccaccgcaagccccggcgctgccgcagtga

SEQ ID NO: 336664 - DNA, 312 bp, Pseudomonas aeruginosa
atggttgatgtccaaagagtgaccctatccgaccacggtcaggatttcaccgagtggtacgtgcgcaacggcatcgtcatcgactgccagccatgccaggggcgcgtctgggtggggacgcgactcacatcgcctgcgatccccggccaagcgatctattacacctcttcagcgattgggaaagagctgatcctggactatccagcgcaggccgttgaaacgctcagcgcggaggaggctgctgaggtcgagcgtcacgggctgaagtgggcgcagatcaagggcatccccgtagccgacctggggctctga

SEQ ID NO: 336665 - DNA, 630 bp, Pseudomonas aeruginosa
atgaacttcggtcctcccgatccctgccctgagaaggtcgaagcactggccgcaggcatcgcgaagcgcggtgagagctgggagagtgctcgcgaaagggcaaagtggttgttgaatgcggtgcacctgtgcgcaccctgcgactactgtgaccctgaggacctggccataaacaagcgtccgcagggctggagcgatgacgcggaatcgtacgatcagtgtctgacctgccgtagttcctgggacctcatagttgagccgcccgagcctcgacgcgtagctgccgcaaagcctccccttgggcctggggatcgaccgtgccgaggttgcggagcgccagctgtgccgtacggcaagttctgtcctcgatgctatggcgcatggcttcacccagatgggctgcccatggagccgggcgatcctgatgacccttactgtgagttcaacgcggaagccgatgcctacatgctggatcagaaaatgccttggtttcttgaagcccagaactcggttccacggcctgtgcagaagcccgcagtggaatacatcgaaccggctgagcggcaagagctgaagttgccgtgcgaatgcggaaagggagacgcaatatggttgatgtccaaagagtga

SEQ ID NO: 336666 - DNA, 270 bp, Pseudomonas aeruginosa
atgactttgatgatcgacgcgacagacttgaaagaacaacttgcggcctccgaccgcgctcacaaggccctgtcgcaggcccgtgagcggtggctagacctgcaagttaagctattcgctattccgcccgcgccagcggatgttaccgcgtgcaatgaacagcagcgcgtcgtggatgaggccaaggctcattacgagtactgcctgggatacgtggctgcctcgctgcgttttgccatcctccaggccgagaaccgccaaaccgcatga

SEQ ID NO: 336667 - DNA, 273 bp, Pseudomonas aeruginosa
atgcctagtgtttttttagtgatggccacggccattctgactaagccgccgatccctttacgagtcttcaaagaccgcgctcaggcggagaaatggcaagccgatctgatcgcctaccatataagcccgcccgacatgccggtcggtgatgatgcgggtagctggaaggattacgacgcgcggatagaggcatggcgcagtgctcatccggcgggtaccgaagcatcgcactaccaacgtttcggggtgtacgaagtccccggcgaaacctga

SEQ ID NO: 336668 - DNA, 198 bp, Pseudomonas aeruginosa
atggaacgcgatctgtacctcctgcatgccatcaccgccctggaaaaaattgcggcggcttcgaacgatttcttccaggcgcggaaggttggcttgcaactggttattccttctgaggtggaacttgcatacgtgagaaagcacggcgaggatgggaaagggtttatttacaagcttcgcggcgacgttaacctctga

SEQ ID NO: 336669 - DNA, 177 bp, Pseudomonas aeruginosa
atgactgagcaagtccccgagcaacgaccgctgcttccgatcactctgactccagaagctcgcgggtatctggaccagttccgcgcagccctggccgcgacggcggccattgatgatccctaccgcgaccccgagcgcgcccgcgagcggtttgcggcctggcatgaggtgcagtaa

SEQ ID NO: 336670 - DNA, 264 bp, Pseudomonas aeruginosa
gtgaagatcaagcgcaaccaactggagcaggccggcgagtacctgcgcggcacctgcaagagcatcggcgaggccatcgacgccctggagctgggcgacgacgtggacgaaagccagctggaagccgacttgctggaggtcgataccgaattgtgcgtgcattgcagctggtggcatgaggtgtgcgaactgcaatacagcgaggaacacggtggcggcctgtgtgagcagtgctgcgatgagctgggcgtcgagttcgactga

SEQ ID NO: 336671 - DNA, 213 bp, Pseudomonas aeruginosa
atgcaaagcattcgcaacgccctgctatccctgcgcgtctggctcgatacctggcgtagcggctggcacatgatcgaggtctcgcgcggccgcttctatgtgcgctatccagacggcgagcgctcgcagccgttctactacggcaccgcccgagactatgccgagatgtttggcggcaagatcgtgcatcgcgcgactggtcgcgagctgtga

SEQ ID NO: 336672 - DNA, 246 bp, Pseudomonas aeruginosa
atgtgtaccgagcaagcccagccccaatccatccgtccgcgcatcgtgcgccgctactacttcggcatgacaagccacgttgagcttgagtgtggccaccacaaggatgagcgcgagcagtgggccggcgccgacgtgacacctggcgaggtcgcccgctgctttgactgcgagatggtcgccgccggcctgatgccgagcgctgaacagatggacgcgttccaccgcgagcatggcaccgcgtga

SEQ ID NO: 336673 - DNA, 315 bp, Pseudomonas aeruginosa
gtgtccaagcactttcttccgaccggccccggcctctactgggcacaactcttcgacggtgaagaggtcgagctggccctgttgaaggtgaagctctacccggacgcgacaatcgaagacggagtgatcgtcgagcacgttgagaaaccgggctggcagttcgagatgcctgccgtggccaacgacgtaatcgtgtcccccgttcagatgcgctaccgcgagttctacggtctggccggggaaaagcagccgcaggtcaaagtccgctggaaggggccgcttcggaggccgagttttaaagcgtggaccgagtag

SEQ ID NO: 336674 - DNA, 348 bp, Pseudomonas aeruginosa
atgaacaatgcgatgaaagcagccctccaggatttccgcgcttgcgctgagaacgctccgtcgggcacctacatggaagccaagcaactgtcggaggttatcggcaatacctgcgacgacctcatcaaggaggtccgcgcaatgggtctccgggctgataactgcgacctgatcttcgcggttgaggctgcgatctacgattatgtgaagcgctcgaatccggactctggcctgttccctactgccgaaggtttcggcgcttctatggacaccgaagctcgtgcgcgggttaacgaaaacgccgagcgcgaccgcgacttcctcctcaacattcagaagtcctcctga

SEQ ID NO: 336675 - DNA, 270 bp, Pseudomonas aeruginosa
atgcgtaccgccaaattcagcgagttgaccaaaaagcaattcacgccgcaaagctggaaactcttcctggaagccaagcagcaaggtcatgcgtacgctgtcctcatcgacttcaagagtgagcgcagggtaggcctgaaggtgattcccagacaagatggcacccctttcgagtttcgggcggcctataccgaaaacagttgcctcaccatcggttcgaacgaggccttcgcctcgctcgggtacttgatcgtcgatatgaacgcctga

SEQ ID NO: 336676 - DNA, 801 bp, Pseudomonas aeruginosa
atggactttcagcagcgtatggttttcggcgatgagatcgatgctcgggcctctttcgaggctgagcttgaccagttgatcgccagcggtgcgctgtttgtcgcgaaccattccggcggcaaagattcgcaagtccaattgatccgcctccttgagcgtgtaccagcaagtcagttggtggttgtccatgcttcgctgggcccgatggagtggccgggtgccctggagctggctcgcgatcaggctcaagccgccggcctgcccttcatcgtcgccaaagccggcaagactctgctggaaatggttgaacgccgctttgaaagccggcccgaggtacccagctggccatccgcatccactcgccaatgcaccagcgacttgaagcgtgggcctatccaacgggaagtgagacgctacgccaaggccaacggcttcaagaccatcgtgaactgcctgggtttgcgtgctcaggaatcgcccggccgcgccaagcgtgcagccttcagccgcatgggcatcagcaactcggtgttgacctggtacgagtggctgcctgtccatgacatgcgcaccgatgaggttttcgaagccattgctgcggccggacagcaaccccattacgcttatgcactgggcaatgatcggctcagctgtgtgttctgcatcatggcctcgaagtcggatttgcggaatggccggactgagcacccggagttgttccagcagtacgtcgcgcttgaacagcgcactggctacacgatgcacatgaaccgcatcccacttattgagctggcggcctga

SEQ ID NO: 336677 - DNA, 183 bp, Pseudomonas aeruginosa
atggttactcaacgtgaacgtgctcgcacggcaatcgtgttgctggagacgatccaaatgctggccgagcagctcagtgccgaaggccaaagcgaaagtctcagcaagctttccgaacagatcgtgaagaagtgccaggcggagtcgaaggttcaacttcgccggtacgatctcttcaagtag

SEQ ID NO: 336678 - DNA, 291 bp, Pseudomonas aeruginosa
ttgagagtacttggtgtaaaactgcacttcccaacgcgtagcgggtggattgtggtggcggtcatgaccctggtctgctccgtgcttacgctgcttgcatctatgtcggaggccttcccggtccagccccttcgcaccaccttggctgctgccgtgggcggcagcatcgcggcaatgtgcggatgctccatccccgactacggattccgcgccgtgatcctcacggtggtattcagcgccagcatggtgggtctatgcatcgggatcatgcgtctcatcggtacggcctag

SEQ ID NO: 336679 - DNA, 735 bp, Pseudomonas aeruginosa
ttggagctggccggcgccgggcagttcgctgatgtgctcaacagccagcatatgggcgactttctggccctctgcacgccccaagccgtcctcgatctgctggcgcgtgcgcaggcggcagaagaggccgtcgcgaaggccgagcgtgagcgtgatctgctgggccagctgctcggggaatgcgtggcggcggccgggattacccgcccggacgccgaactttccggcccgcagctgctgatgttcggcgaggacctgaagcgtgacctggaacagtcccgctatgacgaaatcgctatcccggccggctggaccatcaagcaggaaggcaaccgccttgtcgtgcagcaccacctggatggggcaggctatgccgccgagaaggaaggcccgtccgggatcgccgaggcggttctcttccggctcgcttccgacctaatcagtcggcaggcggaggctgatgaggtcttggggcagatcggggccttgcgagcagctgacgcacgcctgaaggctgcacaggaccgggttgcagagctgactgccatcgccttccccaaggacgctctcattaccgtgcgtatcggtactgatcgacagatgccctgcaccgtgagattccacgttaccgggcgtgatgctggcgatctgcgttgcatgccggagcgtgggaagcgaactcgcgccagcatgcgttctattcactggtcccagattttgtctgttgcggcgtaa

SEQ ID NO: 336680 - DNA, 609 bp, Pseudomonas aeruginosa
atgaacaaggaactcaacgagatactgtccacggctgctgtggattaccgtgcccgtggtgatgaagctgcggctctgcgcatcgaaaacatcctctccaccctcccggcggagcggagcgccagcagtgcaccagcaggtgccgtggtacttgccaccaccaaccaacacgagtgggagaaagctctggcgtcctacaccgcccgattcgaccgcaaagtttctgtcgtcggagcgagcgagcaccaggatcaatacgtcttcggctgggttgaccgcgcgaagaaaggcgagtccccggtcactgccgcttgttcctccaatgccgctgaattgctgcgcctggtcgaattgctcggtgcggttgctggcgctgccgcgcgcgccgccgatgagagctgggaccagttcgacgaaggcggtaagccctgtcaggccctgaagccccgcgactaccgacagctgaccgatgcgctggaagagtgtgacggggagccggacctggatgatggcaaggaccgcgccggttggttggtggtgctggacaggctgcgggagttactcacgccggaaactgcgaagcccgcgccagcacgccgtgccctatga

SEQ ID NO: 336681 - DNA, 345 bp, Pseudomonas aeruginosa
atgactgaatccgcaccggacgcctacctctacgaacgcgcatccggtatcggcggcccaacgctgaagccgcagagtgaacggctcgacctgactccggaactgcaagcggaaggctggaccgaggccatgctctaccgcgttgcgagcgctcaggtcgtggtggcgcgtgccgatcttgaaatcgtcctgcaagcctttggcgaggggcccgacatcatgcagtcgagaacgagccatgccgttgctcgacttcgcgcgctcgttcgggcgaatcctccttcgtcggctgaccagcgccagcaggtgagcgccagcgacgctgattcttctactgcaatctag

SEQ ID NO: 336682 - DNA, 1842 bp, Pseudomonas aeruginosa
atgaataatgccctccatgacctgctggcgactgccaccgctgactaccgcgcccgtggtgatctgaacacggcggatcgcttcgaggcgttcatcgccgggcaggatgctgagaacgctgccctggatgaacgcctgcgggcggccggcatgttcagcgttgccgaggtgctcaatggcgtgcctatcgactccttcatgaagcatgctgatgtatccgacctggagaccttctcccagtggctggagatgaagcgtgctgagtgcctgcggcttcatgcgcgcttggaactcggcgaccgcaaggacgatgagctgcacgagagcgtgctggcccaaatgggtgttcttgctgaggtgcacgtcaacttcaaggccgccatcgccggccagcaatacctgacccaggatgctcctcaggtagtcggctcgttgctgctgggcggcgcggacggcgacgaactgggtgacatcgatctccagctcgacatgcctgctgtggaggcgttgcaggcccaactggtgcaaggtgctgacgacgttgccgtgaaggtgatgacggtccacgagcacagccgccggtacaacaaccaagcactccagctgggcgctgcactggccagaattcacgagctggaacagacgctgagtgcagcacgtgatgtgtctcaactggtagctcccgaggtcctggccgggccagccacgcaccttacctggacgctcgaccataccccggcggagatgagacggccggttgtgctgctcgatgctggagcctacgaagcgttcctggctgatcaccatcagtccgtcaccgtgttgaaggcggacaaggaagactgggcccggcgttggaaatccgcgacagagtatggtgcgcgcctggaggaaactcgcgattccctgaaatcccgcgttgccgagctggaaagcgccatggcccgcgagcaggagggtaaggacctggccgccctgcgtgcagggcttcctgacggtcacggccattgccagatgaccgtgtggtggaagaacggcaattccgcggtggacctgcctatcaatcgtgaccagtacgtacagatgctccgcatcctgaatgacgacgtggccggccttgcagctgggttccaagctgcggttttccctgttgcgcaggctccggaggcgcatccggctgtggtgcagctgctgcgcagtctcgtagaaggcgaggtgggtcattggacgtgcagcaagctggacgatggccagggtaccgataccaccgacggccggaactggctggctgctcgcgagtttgtccggggcctgcccggcaccttgcagcagccccagttgccgcgcagcgttcgtgcgtggttcgacgccaagcttgcccatgtcaatgccgtgaatgcttacaacagccgattggccttcgtgcgcgagcacatgcctttcggcaccagcgtcgatcccgaataccagatcatggaggccgctgaacgtaatgcccgcaatttgatcgtcccgatgtacgaggagctgcgtggtctcgtcgtagagggcgagcagccgggtgcgactccacacgacaatgctgtgcgagggctggcgggatttgctttcgagctgatcaagggcgcgctcgatggcggcaactacgacggtggcgaaatccaggaaagcgcggagcggcacggtgtgctcgcgaaacaggtgatgaacaagccgtgtgcaggtcctgacggtaactgcccgtgcgcgtggagtacttcgtttcccaccgagtgctaccgcatcaaccaggaagtactggccttgatcggccgcgagtcggagaagaccagccatgactga

SEQ ID NO: 336683 - DNA, 843 bp, Pseudomonas aeruginosa
gtgtccttcgacgaaacgctcaaccactacatgtgcggcgcttccggcagcttgcatgcacgtgattcctatcagctgctttgggcggcatggcaggtgcgcgtcgctcaggagcgcgcctatgctgcggagctgaagctctcggcctccgactacgcatacgattctgcccgtgcccacgaccgactgctggcgcgcgagctggatgaactcctgaatggagacgctggtgcagccaaacaggccagcctcagtgacctcgtttcgcaggtggcgagcgtggtacaggctaccggccgccctctgctagtaccgcagcaaccagttgggtttgtcgatcatgccggcttggcagggctgtcgtctggcaactacgcggcgatctctgtaggcgttcgcactgctgaccgcaccgttcccctcttcactggtccggtccgccaggcgggggagggggcgccgagaaagatcgccgttcgcctccagcatcccgccagtgagccgcgcggctgctccagtttgctcaactaccacgagcccacgcgccagcaactgatcgccgccggcatcccgctcaacaagcacagccacgatcccatcgtgagccacggcatgatcgaatgccgtaccgcagccgatggtgtcatcgagtacgtctgggcggagacgcaggcggcgttgctggacaagtccatcttgccgcgtgtcgttgggccggactcggagcggcacgcgccagcacagcagcacctggttgaatgcgatgcctgccccactagcagcggctgcgtcgatacctgcatgaaagcgccgaccaaacgggagccctccgcgaatgaataa

SEQ ID NO: 336684 - DNA, 147 bp, Pseudomonas aeruginosa
atgaataaggaaatcttcgggctgctggtgaccgccgctggcgattaccgtgctcagggcaatgagcactcagcaactgatatcgaacgcgccctgtattcctatcgcgaacaggagccgcagattagccgggaggcattcgagtaa

SEQ ID NO: 336685 - DNA, 444 bp, Pseudomonas aeruginosa
atgagcaaggaactccacgatttgctggccactgccgctgccgactatcgcgcgcggggtgatctggctgctgctgaccagttcgactcgattctcgcctcgcaggtatctgcgcatgaagatgcgctgcgcaaagagaacgaagcactgcgcatctgctacggcgatcagcaaaataagcgtcttgccgctgagcttgagctgaatgagctgaagatcgagcacggctccatccaagcgagggtcgcggagtttgaagccaatctgctccgctccgccgaaggcaccgacatccttggcggcgtgatctccagcattgagaagcatggcaactactcggccgagagcactgtcgtcgtcctgcgccaggcgctgggatgcttcaaccgctcttctccggtctctgatgcaccagtgaaaggagaggtatcgcgcgatgaataa

SEQ ID NO: 336686 - DNA, 324 bp, Pseudomonas aeruginosa
atgatgggcaagatcaccttcaagcccgcagggggcgaactccacgtgccgggcagcgtcacctatatccgcgagtggtacatcctgcgcgatggcatcgaggtcgggaccattgaggccatcattcgtgatctcaaccaagacctcgccaaccccggctactcggtgactgtgaccgccacagcaaagggtttggaaaattccttccaccgcaattcgaacaccttcagcaaccgctccatccgcgtagcgcgctcgaaccgcagctcctatgtgcgggctgctaagcaatgggcccagaaggggatggcgcggaccaactga

SEQ ID NO: 336687 - DNA, 480 bp, Pseudomonas aeruginosa
atgacctaccagagcatcatcaaagcctatcgcgcactgctggcagccaaccccggcaagggccttttcgtcaacgaatcctctatcgctgtactggtggacggggtacttggctttctctgtggccgcatgggcgacgtgcctgatatggaaaccttcttggagatcgaagacgacctctggtgccccaatagcgagtgctgggaaggcgatgccggcgatttcaccgtctcagaggcaatccatgctccggtgttcgtgaacctggaaaacggcagcctgagcggccccgtgaagaatctctgggggaccgaagagatggtcttgcgtcctgagactgctcgcgcagtgaagaccatgattgaaaccgtgaagcgccgcgcggcagagctgaagtgcgatttcggtctctatgcgcgcatcacgcacaagggcgaacagatcgtttctgcctacctctacaaatgggtgggccaatga

SEQ ID NO: 336688 - DNA, 177 bp, Pseudomonas aeruginosa
atgacctacaccatgctcctgaccattcacgaggaagccaagcagcgcgcgggcaacgattcccttcccgctgacgtgcgccagcgcagccaggaaacggttgatctctgctgtcagcgcattgcgcaggaagggctcactctccagcaactgcgcgacctcgcagccgccgaataa

SEQ ID NO: 336689 - DNA, 219 bp, Pseudomonas aeruginosa
atgagcctgatggaaaacgtttcccccgtttacgaagaagaagatggccacctcgttgaagcggtcgccagcaccctcatggccgagttccttcatctggagcagcttgaagaaggggtgaccattcgcgtccttgcagagcgcggcgatccgcgtgcggtgaagtgcgtcaccaccgctggcgtcttggtgaactacctgcgcgaggagctggcgtga

SEQ ID NO: 336690 - DNA, 189 bp, Pseudomonas aeruginosa
atgcgacttttcatcgaagggaacaacgcacagcgaggctatgcgatctcgcgcgagtggagcgacaaggagtgcgctgcacttccgccggccacggctgaggacctgaagcctgtgcgctacgccaccagcgtgcgccacgccaaggcgcttgtgggccgctggaatcgtcgtcacgcgacgcactga

SEQ ID NO: 336691 - DNA, 393 bp, Pseudomonas aeruginosa
atgaaccggacgaacttcaaggggatgcgagcgatggcagcagggcgagcgaagaagggtggtgaggtaggcctgaatggcgagttctaccaaggagggtccttcctgccgagcactcgtctgccgaagcgcagcgccagcaaggcggccacctgcattcgtgtgtcgctggtggagcctggtgtgcgccaagaagtgccggatgggaagcgggcgatcttccagcagatcagcgcattcgtgagcaaccggccagatggatcgttgttcatcctgcctcacctggactcggctgattgtacgtgctgggaggcctacggcccctacgagcacatccaggaactggttactcagtacaacagcggcgcgcgcttcgttgacgcgggattctga

SEQ ID NO: 336692 - DNA, 414 bp, Pseudomonas aeruginosa
atggacatgtaccgcaagttcgccatccgcaaagctgaaatgaccgaggcctcgatcagcgaggtctccgcgaacctctcttccaatctggtgagcgtgcgcatcctggaggatcaggacaaacgctcaaccatgcagatgttcctctaccagaaggaggccgcgaacttccacaagaagctgggtgacgccctggcggcgatctccggcgagcctactgccgctgagcagctggagtgggtccttgagcacaacccagagttcaacgacggcagcctgacgatccacctgggcccgctggcggctcaacgcgccggcttcggggcgcggggcgggcgctacatcgcgaagggcgctacccgaaaggcctgcatcgtcagcgccatgaaaggtgatttgaccttcaccagctga

SEQ ID NO: 336693 - DNA, 312 bp, Pseudomonas aeruginosa
atgagcaaggaatcgctgatccgcgagatcaagaactacagcaccggtttcctgcgtaacgcgggctctatgcagcgtcgtatcaacgacctggccgacatcgagcatgcagcacaagaggcacgtgaggccctggaagctgcgatggacgatctggatgaacagcgccagcccatcgggttcggctactacaagggcggcaaaccgttcttctctgaatccgaagagtacgcagatcgcagcagcacgtgcgagatcacaccgctttttgatgaacaggacaaggccgcattcctggccggcacgcgataa

SEQ ID NO: 336694 - DNA, 207 bp, Pseudomonas aeruginosa
atgaaacgtaacgtggtcacccaaaacaccaacaccagccccaccagtttcgccactgctgcgcgcggccggagctacatctaccggctggactgcggccacaccttgaccggcgattaccgccgcctgcgcaaggggttgaaggtgcacccgaagactctggattgcgcccagtgcgaccagtccggcccgcttcatcgcttctga

SEQ ID NO: 336695 - DNA, 186 bp, Pseudomonas aeruginosa
atgtcgaagaagcccgccaccgtgatccgcaacgccatgaagggtctcttcatgaaaagcgtcatggctgagaaaggctggacgaaggaagaggctgaacagcacctggtgggctggctgaactgtggtcgtgccgtgtccttggccgactacttcgatgagctgcacggtagcgtatgccgctga

SEQ ID NO: 336696 - DNA, 189 bp, Pseudomonas aeruginosa
atgcagaccgcagccgtacccagcctcaactcggttaccgcagtgatcgccatcgccaaagtacaggctgcctaccgctgctccgatctggaggcaattaccaagatgcaggccgctgctgccagggatggcgacgaagcctctctggaggtcctgtgcgacatcaaatcgctgctgctcggcctctga

SEQ ID NO: 336697 - DNA, 687 bp, Pseudomonas aeruginosa
atgttcgatatccccgcctgccgtaactctggtgccgagcggctgctgaggccatttgagcgtcccgttcacatgctccggttcgatccccacagcatcaatgacgacaacggggaggtatctctcagaaaccacctctggaaccccaccgagggcttccacttcaagtactccttgcggttgcagccggcgatgaagcctcacgaggtaaaggaggctcacggcctcggccgcatgtcgttggagctgacgctaggggacttccgcgcgctgcactccatgctccagcgagtgaaggggctgcatgagaagcacctctcgggagagctggcggagaagggccatttcaagatcgtcagtgtgggggacaggttcaccttcagcaccacctacacgttgagcaacctgtttggcggacaggtgagggagggcaagctcgaaccgatggaaagaccttcagtgaacgctctctgcacgggctttcaggtatcggtaagcgtcggtgcggacctcatcaactgcggtgatttctctatgcctgatgccgtcgctggaatgcttggcttcgtccttgaggctgagcggctgatatgcgtcatcgatggccaaggggagagcgagcttcaaggcttgcaggctctgccggcccagcgggaaaagcagcctcggctcaagctggtcaagtaa

SEQ ID NO: 336698 - DNA, 780 bp, Pseudomonas aeruginosa
atgctctccggtggcgtggatgacccaatcatcatcggcaccacgctggacgccagcggcatctgggatgggttccaccgggtagccatctccatggtgcgcggggaaccggtaccggcaatcatcggggtgccgcatcatctggccaacctcgcaacagctgaggccaagcacctaccgcccatgctcgtgcatgcatccgctatggggcacgaccttctcctactcgcactggatgagatcaagcgccagcggccagacctcgctgaacctctgcacaagcagtttgccggagtcgcctacttctacgatgacgcacctggtcggctcggtgagctggcgcgcgcggcgatccggctgtctgaaggtgcctatgccatcaaggccattaccaccaagtacggcggtgatctcgcgggcctccagctggccaatgaggcaggtcaagccgccctgttctcaccggatgcatctgagcctgggcggtaccgcgccagcttcttcgactctggcggcttctacggccacgtcaccagagattcctacccggtactgctgaaggaagtcttcggcgatgggtaccagatagaggcaccggggacgttcgagcgctacagcctcctccacagcttcgaacgcggcaatgccgtggcgtccgtggtgcagagcgtcaacgccgaaacgatgtcgtgggcgcgggcacgcgagcacctggaccagatcatcaaccattacgccttgccgtcatcggggaagaagtccccggcaccgagcatgtaa

SEQ ID NO: 336699 - DNA, 720 bp, Pseudomonas aeruginosa
atgaacgattcactctttgaggcagcgccagctccagtccatcccgacatggagcaattcatcgccaacccattcacctctacgaagagcgcctacatcaaggtcagcgccgtcatcagccgcctggagaaggaggccaacgaaggttgcggcctcttctttgagctttacgaatctcggctcattggtgcattgcgtagcgtggcggaaaagctcagccctaaagaccgcgaagtctttgagcgcggtgcgcgggctatggggctgaaattcgatgacgaagctatttctgcggctcaaggcgcctgtgcggaaatggatcgtgaaatgcgcctcttccaagggttggacgaagacgaagattacgaagcgttagcgctctatgaagacatgcctgagcttgatagggcgtttgggtttatcgaatcggcggcacaggaagggtgggcaattacagagtgccctgatagcgaacatggccgctggcaggtgcagaaaatcgaccgtcccgaagaatactccaggccccacgggtatccgatcccccaacttgagaccgatgagctggcttggctgattgtgctgggaggcgaaaagattcatcacgaggccgctcgaaacttcatcgaagtgcataacccagccttgtggcggcaaatggaacagtaccgcgaaaaccttctgcaaccgctacagcgcagccgattccccggcctataa

SEQ ID NO: 336700 - DNA, 1413 bp, Pseudomonas aeruginosa
atgtccgtaaagccgcgatacacccatgccaagttcacccatcacgacaccgttatgtcccggctgggttgggcgcaccgccataggtccaacaccccggcaattccccgccacgacgctaccagcaaggggatgctcgacgtgacccttttcgtgcccgagttcatcgctcccgaggccaagtccctgcgccagcagattgaggacgcagtgcagcaggtgctggccaacggaaatgtcggggccctagaagtgatgtcggtaccgaatcattggctgaccaatgccaactggcacctcggcgagaaggttgacgtacgcggtgcccacatccgctcccacgacgttgagggtggaaagttcacgggtatccataacgacagctatgccaatcacgacaacggcctgcgcctgggcgtggtggaggcatgtcaccggaatacctttcgcggcaccgtggaatacctcgaccccgcgtccgggcatgtcatctcccagcagctggaagaaaccttccgggccccggaggatgtcatgcaggcggtcgttcgttggcatgagcagcgaaatgctcagctggatgccggtacctgggaaagccagctgaaaagggaagggtgggcctacgcgagcgctgacggtatgcgcatcaaacaagaccctcaactcggcggcatcatcgatcaagccatcagcgacaagaagtggttcgtaatcttccaccacgaaggcctgccgcaggttgatgacttcgacacggccggtgaggcgcatgcctacttcgaccgcaatatggccggccagctggcgcaggacattgtggagttcgccgacaagtttggcgtcaatcaggatcaggtcatcgcggcctatcaggatcaggtggtccgcaactatggcggcagcgagcgtgcgcaagaggttgtgaagctggctcacgatcagctgggcggcctcaacaataccgaggacctgctgcgccattgcctggaatccggcatgagcgcgaatgacctggccggggctatctggggtgtcagtgactggccgaaagtccgcgccagctatgcgcgcaccgattcggaaatcgaagccgtatgggaggccgccggctatgggatcagcgataccggtggcggcagtagggcggccatgaaagtcgtcggtggcgttgagttctggttgaccgactacagcgaaacagaaacccccaatcctgacttcgctctgatcgcgggagcgtacgtgccggatacctgcgattggctgaacttctcgcgggatgttgcaaacctcgccgatgcagaagcacagatggaagagtgggccacccagcttcaggatgccctccacgaagcctacggcgagagtgcagcgccagctccgaaaccctctcgcggaccgtcgatgtga

SEQ ID NO: 336701 - DNA, 1038 bp, Pseudomonas aeruginosa
atggaaaacctctgcgtagagcctctggtccctgattttcgcgacggcatgtttgaggtccgcctcgctcacgattacgtcatcagccagctgaacgtgtgccagagcttcaccaaatgggtgaagctcaacagtgatcgcctggagccggatgctcaggctgctctccgtggattccatctcgccagacaggaatacctcgggatggtcagcgacaagcactccagcttccccgccgggcagttccgcaactacgttgccaatctgagcgccagaatgaggcgtacctacgatggcgatatccagggtaatgacggaatcgcagagcactgcgctcaggctgcaaaccaccagatcaaacacctgtcccgcgaggttccggtctcggaggcgatacaagccctcgttcagcttgggcttgagccactgtcgcgccttatcgacctggcctacgaatcccagctgcaagtcatggcatctctcgcatggaagcattgtcttgccgctcccgcgttcatcgtcgatgcgaaggtcggcaggatcacggccgaagagttcgcgccagctgctggtcgttggctcgccgcccccggcaacgatgtgcttcagcatctgccagaggtcacgctcgatgtaggacgctctctgttgcacaacctggtggacgtgggccgcgatccccaaggcggtatcgctcgaccattcgctgattatccagccggcacccaagctgcgattcccctggtcagagtggttgccgtgtgccccaacctggttgttgagcctgcattccctcaggacctcctgccactggtgaaggagcgaatcgccctcatgccgttggcacaccgctccgagttcattcgaaccggggtcccctatgtgatcgaaatgcacggcgagtacgactttgccgagggtgagcgcgatctctaccgcttcgccaccgagaccgagaccacgaattacatcttcaccgctgaagcgatggccgaagaggccggtaatcgctcccgccacggcatgcgcattcgttga

SEQ ID NO: 336702 - DNA, 486 bp, Pseudomonas aeruginosa
atgtaccggatcacccgcaacctgccgctgcgccccatcgcgctccccggcgacgccgccaacaacacgccgttccttgagcgctacgctctagcccgcaatccttacttcggtgtgttcattcaccggtacctcggtaacgaccagggtccgtacatgaacaaccagcgcgggaataccttggtgattcgaatctgcggcagctgggttgagcgccgcttggcgatgaacggtatctcttttgagcgcaaagcccctcgctttagccgccttccgcataaccagttcctgtccctgtcttcagtacgccctgaatcctgggcgttggtcatccgtggccgacgtgtagccgagcgcactgatgtgatcgacgggatcattgaagggcaggcgaacttggtcaccggtcaatcatccacggatgactggcacaggcagcaggggagggcaccgcgtgccccgctgtatcacggaatcaaatgctaa

SEQ ID NO: 336703 - DNA, 708 bp, Pseudomonas aeruginosa
atggtcaaaatagtcgagtttcaggaacgcgccgccgagcgcttggagggcttccgcagcaatgcgaaggccctgccaagcctcgtgtacgcgcgttacctactcgcgccgaccagtggtgtcgccaaacgcatacgcggcatggatttcgcactgcgaaaaaatcggcagcacatcatgcatgcgcagcacagggcaacctgtattgacgtgctgaaccttctgatttcgcgcatggatatccgttcacggcaatgcctgtatgtgaacccgcgattcggtatacggcgcaatatctatgtaccggagattgcgcgcctcctgaaagtatgcgagcgcacggtcacccgagcccttggctcccttgaacgtgccggctaccttcttcgcactgcgacggccaagggcatgaagatgttcttgtccctcaagctgctccgcgagctgaacatctccctcatgtacgagcgcctgagcaaccagctcaaagggctcgacaagaaggcccagtacgaagccagcaataagggcaagaagcctagcgcgccgaagcaacctggtcagggtccgagcaccccgcacacccccgctgaacagcccgtgacgaatcccggcgctcccaaggagcgcactgaagaatcgctgaatatcggcaacaacttccttgcgcaactgcgcggccgacgaaaacggccaccgccagggtag

SEQ ID NO: 336704 - DNA, 921 bp, Pseudomonas aeruginosa
atgaaaggacacacccacttccgaagcatccagttcgacaaccactttggcatccgcgatgaagcagtcatccgtgaagctgaagcaattctcaccacactcgccacgatgaaaggcttgccggatggtgacttcggtcaagagcatttcaaagcggtgcacaagcacctgttgggcgacatgtacccgtgggcgggaaattttcgcactgcggaaattcaagtcggcaaccagtacgcaaaggcaacgcctcacggcaccatcgacctggagacgaaacgagtcctgaaacagcttcaaagcgaacagccgggagacctgagcaaggtcgagtttgcggacaagatggccatgtattacaagcgcctctacgccatcagtcctttccctgacggtaatgctcgtgctgcgcgagcgttcctggacaagttcgccgataagcacgagatgcagatcaagtggcaggatgtgccggcagaagctttccatgccgctgtagatcgatctttgaacggcgaccatgaagccctgaagcaactcttccgagtgatgactgacttcaaggacctggctgacctgtacacaacaactgccgtggagcagaagatcgccgagatcgcgaggcaagttggtctacctcctgaacgcatgccatctacggcgcttatcggcaccagccaagctgacatccaaaagatggctcacttcagtcagcaggtgattaccaaagaccttgagcagtacgccaaaggagggccgactgttcgcgattgggacaaaacctcggtaacgcatgagatacagcagaccgttggggatcgacagtccaaccgggcgatcctgagtgataccctggccaagctgcaatctggttcaggcgcggcaggtactggtacccggatcaggggaccaggcatgtag

SEQ ID NO: 336705 - DNA, 210 bp, Pseudomonas aeruginosa
atgagtaacaaccacaagcaagcaatgaacaatctggagaacctccagcgctctcttggcagcaacgcgctgtcgggcgtttcagttaccagcgaacgagggcaggaagtactggcgaacctaatcgctgaagcaaccgcgcccgatttcgatgccgatgtcgcgcgtgaccaggcacttaaatccctcggtctgagcctcggacgctaa

SEQ ID NO: 336706 - DNA, 1950 bp, Pseudomonas aeruginosa
atgaatgcagccgtgcccacacagcagtctgtgatcaccgtaaagctggtcaagcgcgccgggaaccgagcaaccaactccagcccttcaccagattctgatcccgatttttcgcactgcgaaaaattggcgacctccattcatgctgagcggcttgtacttgcgtttcgtgcgcacctgccgctgaccggttcatgcctgacagatacctcccctcttgaagattgggtcgcccagttgcgggtatcaggcctggacctccagttcgcatctgccgctatcccctctcgggatgcaacagatcgctacatgaatgcccatgggctgaaccttcagcaagagcctttggcatcctgggctgtgtgggggctgaaagcatggatcgaagactacaagctttctctaagccatctggctatccggcttgatcaaggttttcacgatgcgattacggagtgcgaccggctgggcgcttctgctcccctctccacgtgggtgaaggtttggtcgcagatcggggtaacccaagcgatcacgtacacccttcttggccgtgggaatgcgcatatctccaccgatttttcgcagtgcgaaaaaaaggatcaggctgacccgcttttgcaggtggcggtgttgctgccttacatgcgcggcgataagcaccactatattctctctgggcatatcgttcgtgcgtccgggcagtatcgttaccggtaccagttgaagaacaaggatgctgtgccaccgctcgatctggcgaacctgctgagcgaccatcgactgcaccaggtgaactgcgacatctccatgttgccgtttggccttttttcgcagtgcgaaaaaacaggacatgggcgcgtggccttggaagggttaggcaacctttctgagttccacgtcatgggggtgaatatccgtcctacgggttttcgaccggcactttcgcttcagctagaggtccttgacgtagttgatcctgccgacctcaaccggtttgtaaactcgccttcggcgtcggatgcagcgcagcaccggatgcccgcaatcgagccgccaacctggatggtcgattatgcagatagctcaaggcatgacagctcacttcctgctggtgtaaagctggcacggccggcgtcggcgatatcttcatgctggaatcactggctgatgtcttgccgtgaacaaacactgggcagggttcttactgacagagtttttcgcactgcgaaaaatcctgatggcgtgacggtcatgttcggtaccgcagagagattcttcatgcggacaccgcgctctaacgttcatgctagggaatgcgattacagagcagtttctctatatcgcttcccaatcgctgccctggtcaaacaccttgcccagcaagaagcagaccttgcgataagccttcaaggcgatctcgcggtcgcagaatgtgcctccgccttaaagctgtgcgcagcatcattggccgcgtttctagcaaggcccgaggcatgtctcagcaccctcctccgctgggtcatttttgactgcattgccggggtcattgatcaagctgggttcaggtaccaggtagctctgcaaggccacggttacgctttggccgccctccccttttgggacttgaccactgacggccaagcttcgactgcacgaatttacggataccgcgtcgtcggtcagaacctggcggaacgggttttaggcgatgcgctgctacgcgatatcgcgccttcattcttcatgaccccagctgaagcgatcagctatcgagaccgtgcggccgatgtgattggaagttcagctaacggtttcattgattcgctccaatccgttcacggacacctacacgcaactacagattttcgcactgcgaaaaatagagcagagcatgcgctcgcgcgcgccctactccactcgacctccaagggagaacgccatgagtaa

SEQ ID NO: 336707 - DNA, 2103 bp, Pseudomonas aeruginosa
atggaccaaacggaagtccgaatcacccaatcgcccccacggctgttccagcccaccatccgcagccacctggcgttcaccgcgctcagcgcgctggtgctgctggtcatgttcagcctgctgcgcctggccttgctgatctacaaccgcgaactgatcggcgcgaccccggcgagcaccttcctcgaggcgttcggcaacggcgtgcgtttcgacctgcgggtcgtcgtctatgccgtggcgccgctggtactgtcgttgttcgcggtacgcgcgatggccgctcgcggcctgttccgtacatggttgacgctgttcgccagcatcaccctgttcctcggcgtactcgaactggacttctaccgcgagttccaccagcgcctgaacagcctggtcttccagtacatgtcggaagacccgaagaccgtcatgagcatgctctggtacggcttcccggtggtccgctacctgctggcctgggccttcgccacctgggtgctgtaccgggtgttcaaggccatcgacctggcgacccgcccgagccagcgcaagccgcgcgaagacagcgtgatcgcccggccgagcgctgccgcgccctggtacgtgcgcggcgtggtgctgttcctctgcgtgctggtctgcgtcctcgccgcccgcggcaccctgcgccagggcccgccgctgcgctggggcgatgccttcaccaccgaatccatgttcgccaaccaactgggcctgaacggcaccctgaccctggtcaaggcggccaaggagcgcttctccgaagaccgcgcgaacatctggaaggccaccctggacgacaaggtcgccctggagaccacccggcagatgttgctgacccccaacgacaagctggtggacgccgatgaggccgcggtgcgccgcgagttcaccccgccggcggcgaataccctgccgatccgcaacgtggtggtggtcctgctggaaagcttcgccggccactatgtcggcgccctgggcgcgccgggcaacatcacgccgtatttcgacaagttgtcgaaggaaggcctgctgttcacccagttcttctccaacggcacccatacccaccagggcatgttcgccaccatggcctgcttccccaacctgccgggcttcgaatacctgatgcaaaccccggagggcggccacaagttctccggcctgccgcagttgctcagcgcccgccagtacgaggacgtctacgtctacaacggcgatttcgcctgggacaaccagtccggcttcttcagcaaccagggcatgaccaccttcatcggccgcaacgactatgtcgacccggtgttctccgatccgacctggggcgtctccgaccaggacatgttcgcccgtggcaacgaggaactggacaagctggcgagcaccggcaagccgttctatgcgctgttgcagagcctctccaaccacgttccctatgcgttgccgaaggacctgccggtggagcgcgtgaccggctacggttcgctcgacgagcacctgaccgccatgcgctattccgactgggcgctgggccagttcttcgagaaggcgaagaagtcgccgtactacaaggacacccttttcgtggtggtcggcgaccatggcttcggcagccccgagcagctcaccgagatggacctgcaccgcttcaacgtgccgctgctgctgatcgcccccggcatccaggagaagttcggtacccacctgccgaccgtcggtacccaggtcgacatcgtgccgaccatcatgggcctgctcggcggcgagaccgtccaccagtgctggggccgcgacctgctgaacctgccggaaggcgacaagggcttcggcgtgatcaagccgtcgggcagcgagcagaacgtcgccatcgtctccggcaaccgcatcctggtgcggccgaaggacggtgacgtgcgcgtctacgattaccagctgggcggcgatgccaaggcggtgatcaccaaggacgtgccggaccaggccgagctgcagaagaagctggagtcgttcatccagaccgcgaccaagagcctgctggagaataccgcgggcgtggtacatgggatcccggacaaggactga

SEQ ID NO: 336708 - DNA, 399 bp, Pseudomonas aeruginosa
atgcaaacccccggcgaccgcctgctggcacgtctgctggcatcgagcgggagccggccactgccgctggccgatctcgcgcgcctgctcgatgccgtgcaggggcgcatccaggtcgccagcgcagccgaaagccatgcggcgcgcctgcaggtgcgactgccccagctcggcgccgtggaggtgcaggtcctgcatggccatggccagttgcaggtcgagatcagtgccagccccggcagcctggcgttgctccagcaagcccgtggcgagttgctcgaacgcctgcaacggctgcatccggaacaaccggtgcaactcaccttcaaccagcagcaggacagcggccagcgctcgcggcaacgtcgctacctgtatgaagagtggcaagccgaatga

SEQ ID NO: 336709 - DNA, 1428 bp, Pseudomonas aeruginosa
atgagcatcgaaaactcatcaattctccggggccaaggcctattacggaccttcgaggcctccttcccagagggcgtagcaagcgatggtgagaacctgatggggtggttggatcagaaagtttccgagggcggcctgtcgtacgaaacggccctttcgtacaagcgatggattgggtcagcactggaggcggccgggcatccggcagctgacgcaatccgcaaatggcggtcgtcgccccagcctcagagtggcgggcagcagatggagcagatgcagctgggcaggctcgaaagcacaaaccagttgcgcgcgaagagtctgctggagagcttcacggagcaaaccgggaaggcggttgggtccgatggggccaatttgcttgagtggatgaacaagcactgcaattcaggctcttggtcgccaaccagtgcaaattgctataggaggtggctcgccgggtactttgagtcgttaggacatccagcagcggtttacctcagggcgtggattccacccaacggtgcggagcaggccctagtggccgatcaagaggacgcgcgggctctcgccctctccgatctcgatgtgtcagaaaccaacgagagctactacgcctacctcggatcggacagcatgaaacttctgctgcggcagttggttgagccagtaaagagttccgggaggcccagatacgacaacggcgaagagatcgcactcttcatggtcgtgactgcgatgacggggctccggcctggggagtggccgagcgcgcggctccttgaaaccttccacgaccccgaaacacggctgaccctgggcccagtcctcgaagtcagaacgctgaaacaatccaataggcgtgaggacaaccccctcaaagcaaaaaggcacctactcctggacagatggccccttgaacagatcgagcagctgaaggtgtttctggcagtggtgaatgaggttctgtcggcggagggggaagagggattcaggctgtacttgaagcgcaacagagagcagctccgccgcgcatggaagcgcctggtcaagcaatcaggggaagccatgggccccggcggggaaagtcagggtgatatgaccgtgaccttctacacatgccggcatattttcgcggaagaggtccgtcgggcgcagacgtatacccggtttgagcttgcagcgatgatggggcattcccttctcacaaatcaggccttctacggaccaagggatgccaccatgcctcgggggttcgacttcacattgccgaggccatggccaggcgatgctgaggatattcagcggtgggactatcaggtaaatccgttcaggatgaaggccggacaaggcgacatgttccggcagtctggccatgaagagggacacgaccaagagaagtcgctggacaggttcttcttgcgctga

SEQ ID NO: 336710 - DNA, 735 bp, Pseudomonas aeruginosa
atggagaggccccctgaacttgttgaactgcaaaacctgcgcgggcaaaaagacgacgtgagcaatgcgttagaaggcgagggtgggcttcgctacaaagcgatccgccaagaaggtctacgcattggtgcgctggcaggactggcccagcgctacgggatgatcatgaagtacctggacgccactgagtcgaagctgaacgtaaccttcagcttcaacggctttgtccgggatagccggctgttgatcccagcagtgatcgaaaccccgaatcagttcattcgtgaccctgaaacaggaaaggtcaccgaggttcgtcagcagatcaccattggcgaggaagccagggtggtcagcgtcgttccgacttggcgcgattacctgtaccaagagtacgggatgcccgagcgcccgcattcctccatgctccctaggaccgatgctgaggttaaagcttgggaggatgcgttatcgactggatggaaagctggcgtcagtcaggcggacgatatctataacgaccgtctggcgcagctcacgatggctgttgaagggaggcacctttatcagaccttggagcagaagcacctgatgagccctgctgcactaaaggtcgagtccaaccaagttacctttaacggccggaccatgaacgttggcgagatcatctacaccatcggcaacgacacgaacttcactccgagcagctcgtggaggccggtgtggagcaggtag

SEQ ID NO: 336711 - DNA, 1197 bp, Pseudomonas aeruginosa
gtggagcaggtagtcgagaaggtagtaattggcgcaaacaaggcgcttgcagctccggcttttcctgaagcggagatgctccaaattgaagacttgaacgcgatgcttgcgtactgcatggacaacggcgtggaagacctcgttttgctgtgcggtatgccgtgggccatcaagtggtcgggcagggtgatcattcaggggcagcgtgcgctctttaaagaagagttggacaccttgctggagaagatgacccggaacaccaacagttccctcgacatctatcgatgctcggacgccgacttcatctatgtgatgcagcgcttttcaaagaagtatcggttccgcgtcaacgtcaccgcgacccttgatgcgaaaggagctggtcgtggattgcactttgtcattcgtccagcaaatccaagaatcctgactttcgatgacctgaacgttcatccggaaattcgtcgtattgctaggccacagaacgggatcgtcattgtcacggggccaacgggctccggcaagacaacccttcttgactcgactctgcacgcacaggcgaccgacccgctcggaaagcacattcttgttttcggcgctccggtagaaggcgacctcaattcgattccaaataaaactgccatcatcggccagtcgaacatcggttcggaatcgtatgggaatgacttgaagaccttcaaggatgcggttcggaacagcctgcggcgacaccctgatatcgtctacttcaccgaagcgcgggaccgggagaccatcgaaggtgccgtcctggtctcccagaccgggcacctttgctacacgaccacgcacactccatcagtccatatgactcttccacgtatgggggacgagttcggcggaagcgaccgtgtgcgtgtgctcaaaaaccttgctgaaaacaccagggccatcattcaccaacgcctgcttcccacaccaacaggtgtgggccgatctcctgttgtgtcgttcctggagttcactgccgacatccgtgcccaactgatgcgggctcctgtcgatgacatggccgaaatgatcttccggttcacgcgtgagcgcggcctcgatctgctaaccgacgccaaaagtcagttggcggccaagaagatcagcgaagaatcctacgaaggtattcggcaagaactggagatggaaggtcatggagctgtttga

SEQ ID NO: 336712 - DNA, 303 bp, Pseudomonas aeruginosa
atggagctgtttgatcggaacgggaagaaggctctctccgcccatgcttcgaagcagagcaagatcgacttcaaaattttcacggcccactccagtgcgatggtgcccttcggaatgatcctgatttacccatcgtggctgactttcaagatcgcggtcacttccaccttggtcctcgttctccttgaacggaggggatggactcttgggctggcagttaagcgcatccggtccaaattggccggcaagtccaggcacgcaatgacacgccaacgattcaatcgccgcatgcggctcaagtga

SEQ ID NO: 336713 - DNA, 1068 bp, Pseudomonas aeruginosa
atggccaacgagaaacaagcagcaaaagctcagcccaagatgactccctcgtattttgtggatgacaacggatttgcctatcacaagtccgcttacttcgacgcggctggaaaaatcgaatgccagaaacgcgcaagtgttgtggttgtaggcagcaacttcagcagcgccgctggtactgcggtgaatcgttacttgacggaaggtacggagtacagttgccccagcgcatcggctgacgccatcgacatccgcaatggagactatccgctttcggcggccaaccgcgtcctggtcaaccatgccatgtcgaaggctgatttcatcggtaaaccagtgaagctgggcgttaccctaccatttcgggacttctatacccccgacggcgcgatcaacgaagcgcgccgggccgcagtgtcgaaaaatttctccatcaaggtcgatgtcgtcggttccgaggctcagcctcaaatcgaggctgtccatgtttgggcggaggggatcagcgccttcttcgactgggcattgcgttctgatggatcagccaaccctcagtttgaggaaatggaagactcgccgatggcagtgatcgatatcggtgggcagaccactgacatcgtttctcttctgtacgacggtaaagagctggtgattgacaacaagcgttccgaaaccaaggagattggcgttctggacgcaattaaagcagtgcaaactcgtgtttcgcagagccttgccgtgaaacaagggggcaccagctccatgtacgaccagattccgctgcaagtcgctgaacgcattctccagaccggcaaagggcgcattggtgccgacgagcaggatttctctgatctgcgtaaccaggtcctgcgcgaacattccgagatgatcctcgccttcatcaagtcgaagctgggcaatctcaacaactacccgattctctacttcatcggcggtggagcaattgtcttcaaggatgtattgaagtctccgaacgcacagtttggtgatgagttctccaatgctcgtggcgcgctgaagtacatgcgctacatcgcggccgtgtaa

SEQ ID NO: 336714 - DNA, 852 bp, Pseudomonas aeruginosa
atgacctacaaaaagtgcaatgaagtgcttgagggagtgttcaaggattcgctcaatgctgcacccgaatcgcatgtagttgtgccgtggggtgtgtccctgaatggtgtgggtcgattcgctgcggttgctgccatcggagctggcatggtcggcgtcgccaagaatcagagcggcaagtacaagctgtactacggtgccaagggagcaggcaactggctgttcgagatttggccgctctggaaatctgcatcggtgtttagtctgtacgctgctgtgtggaatgttgtgcgcctttctggcatccaaggcatgcaggtaggcggcatggtgataatggctttgcttggactggcactgttcggcgggcgtgctgtgaatttccgcaaacactaccccgcagctgtgattgcaggttcgcgtggctatgcctcgggtctggtgccgagcttgcttggtgttgcgatggcagttggtagcgcgctggcggcttacgcgtttacccaaggcatgaagatgggtagctcggcagcattcaactacatggggattgctggcaatttgaaggagcttgctcggtactttgtgttggtgctgccaatggtccttgctgtggcattcattgctcagaccgcattgaaccttttcagcatagaggccatggtaagggttgttagctcccgcgcagacttcactcggaaccttcgcggtgcagctgaggtttcaggcctccgtggactgtacgaagacaagtttggaaaacgtgctggtggcaacgtgtttgcaactctggtcttcggcgtgattctcgcaggtttggccctctggccgctgggctatgtcactgtctga

SEQ ID NO: 336715 - DNA, 912 bp, Pseudomonas aeruginosa
atgtaccggaactcggatgatgatctgatcctaaacatgcagtactacggatcggctcttagcacctttgctgagtcagcatattgggcaaaaattcttgttacctcactcgttaaggctggtgcagatacagccattaagggggctgactcagccaacaatgccttcttcggactgggtaacgtgtttgcacctgccacctacccgacaatgttcacagcttcattccttgggtatgcgatggagggcctatcagacttccttgggacacttctcatcccattggtaatcgtcggctttacccttgctgttgttctccctgctatccctcttgttcagtggctggccggtgttatcagttggatgcttttctacacggagtgcttgttggtatcgccaatgtggctttctgcgcacggcaccgcagagaaagaaggctggggctctgaacatacccgtcaaggttatatgctcatgatcggtttgtacctcaaccctattcttcgggtcgcaggtttttcggcgatcttcatgtgcatgaagcccgtcggcacattggcgggcataatgtttgactacatgaacggcgtcgtagtgacagggtttaccttcctgttcatcactattggtgcattggttttgagcgcagctttctgctactcggcattcgttcgaattttcagcctcccgtctgagcttttcgagcgcggacttcgctggatcaacggcggccaggaagttacaggcgactcggagagtgagaagaccactcggaactatgtggcagcgttctcgaccaagagcgaacacagcgcgcaagaggcaggtagaaacctcatgcgcggcggcgctcccggagggaatcgaaacgattccactccaccaggcacgccgggcgtgccgcgcagataa

SEQ ID NO: 336716 - DNA, 1302 bp, Pseudomonas aeruginosa
atgaagaggctgaaactgttattgcttcttctaagcctgcctttgattggtttcgcgagccctgcggtggaccaaggcctgctgaatggggctaaccaatcaacacaggcactttcaactttcaacacaacgacagacctgggcgcgcaaatcctgtattggatcgcctatggaactaccactccgtcttggggcagcgtttctctgatgtccaccgtgtcctacacgatgaacatcatcgccctcatcgttatggcttggctgatggtcatcgggggtgcgactttcgtaattcaaactgcgaacaagggcagccccggcgggcaggtgatcagttctttttggatgcctatccgcatcgctacagcaaccatcttgctgatccctcttccatcaggtttcagcactctccagtacggcgtcatcacaatcgctgaaaaggggaactcgcacgccaactacgttgtggcccatgtgattgactacctctacgactacggtgtctatcgctcgccggccttagagagcggcggaagccaaatcactacctggctgatgaacgaactgtgcatgcagtacatcaacagttacaccggcacgaacacagtcacctacgacttgcaaaccgtgaccgtgccaactggcgctgatggcaccaactcggtcgtccttcagtacaagtacaacgagtcgaagaacaatcctaccgcttcaaacccccgcatcaattattgcggagcagtctccttctcgatccccaacatccaaggcgttgaaggtttctttgctgacaaaggagacacaacagccgcaaagaccgctggcccggcccttgtcacggctgaaatggccaaggtagtcgagaaaaccagggtaaaggtcgcaaggattgcgaccaccttgctccatgatcaggaagccctgaaaaatcttcaggcatacgggcagagccagcagagtgcctttgaacgggccaggagcgaggttgccggggtcgtccaaggtactggggcggacctcgcagctgtcatccgggaatatgacgctgacactcgccaagtgataacgtccgtagtgaacaacctcaacgcccaaaagacgctggctgggtcgggcaaggcgagtgttgggtcatgggctgaacagatcaaatcagcaggctggcctgcttatggcgctatgttctggacggtaaacgtcaatcagagcgaaatcaataaactcgcctcatccctcaagatcatcgtcaccccccctccccggatacggagtggagtaaggatgaccgattcgttgaggtag

SEQ ID NO: 336717 - DNA, 258 bp, Pseudomonas aeruginosa
atggcttatccgactgaggtcctggagaagagctgtcgcaaccacaagctggtcatgtacatgatgacccctctcttgctgtggtccctcatcgggctcatccggggcgtcgcctacctcattcgcttcaacacgttcacgccgtgggtcggctacagcgcccccctagcgatattcgcagcgggtcgcatgtacctgagctaccaatcacgaaaagcgcaaatgcgcgagcttcaagcgcgagggccgagggcatga

SEQ ID NO: 336718 - DNA, 474 bp, Pseudomonas aeruginosa
gtggagcatgcaaacaggcttgaagcctctgttgtcgcgcagtattgggagtcggtcagcgtcgcccttgccaacctgttacggctcatggactcgcgagaggactgggtgccggaggatgacaacgagtacctgcgggagatcgagcggcttgccgacctgatcggtgacacccagttcgcaggccagttggcgaagcctgaaaactctgcggttatcgcggagctgctttgcacactcgactccagccgatcaatgcgtttgctccagatgatcgatcgtcgtcagcctggtttcgtgacacgcatggcgttggcctttaagcagatcggcggcatcggtgaggtgcacgcaaatctcttctatgagcggctgtcgatcatcaaccggacccagctcactcaaaccattttttcgaaggagcgggctgagcgaatcgctgaagacctgcccctactcatggaggacatgtga

SEQ ID NO: 336719 - DNA, 600 bp, Pseudomonas aeruginosa
atgcagaacttaagggtgctgctgggggcaatcctgctcatcgttcctctgttcgcttcggctgcatcggatatcgactgtgacatcgatacttcgatgcaaaccgcacttgggaacttaaacaaagcaactactgcgcagattaaaaacaccgtcggaaaggcaatcgaaagtgcaccgcaggttaaaaaggcaagttgtctatctgtactggatgatcttgaccagttaatgcggatgcggattccgtctgtcggtggggcgatatcaggaattctgactaaagtacgagacatggcatgcaatatggccaacagctatttacagagcatggttgaccgagcttctgtcagtgttggcgacccctatggagttgtcggtgtgagcgttggtgcaacgactggtcagggaggctctagcattgagcagtacgacattacgaccgtagtcggggaggcggccatgaacgcagggaaaaatgtaattcaaggacaggcaaaccaagtccttaataccatgccttccgggcctgcaaaccgcactccgagaatcgaagactccgtaaatacagcagtgaatggtgcgctcaatgggctttaa

SEQ ID NO: 336720 - DNA, 867 bp, Pseudomonas aeruginosa
atgcgcaacaaccaaaccatcgagatggttgctgagcagcaaaggcaaaggacccaaaacgaaagggacatgaacgtaggtctgggggcgaagccacgacctgcgtgcggtcagtcagccgccgccgctatccgtggagcagcaaacgcggctgccgttaaaacaaggtcgatcctcggccaggcttccaacagctacaacatgaggtcgaaggggctcgcgccaggtgagtcgaggaaggagtactccattcagcaggttatcgagaagatggatgagccaacattcgatgccggcaaaatcatcatggagcgcgaaccccttgatccgaccgataccaaggctttccaagagcatatccagaacgccttgatgataacgaacccatttccagctgaacttccaagccaagaagaggttgagcgtattaaaaagtcgggttcacaaggtgagcgtgaagcactggctcaagcacttgctatgtcgaaaaggcagcaagttgctcaatacgttgtgattaaagatattgaggccaacactaagcgcattgacccgaacggcctaaagtacatgcttgaagatatcatgccgttcctgtcggatgaggaaaaggcaaaactcaacgggaagattagctcaaatcagttgaatgagcttctcgcaacataccgggtgcgttcgccgctttgggtgaaaaatctgacaacgagtgcatctgctcttggagtgcaaaaggaattagcccttcaaggagccgaaatactgaaccagctctacatgcttaatacgaacataattgaattgtccaaaattaatagcatgagtgaggctcgtggtgcttcccaaggtgggatggtaacgcgatga

SEQ ID NO: 336721 - DNA, 414 bp, Pseudomonas aeruginosa
atggaaggtctcttctggggactccgaagcttcatcgcccatcacatcagccagcgactcggcaatatccggagtaacgccgtcacccgccgggccggggttcgcgttcaatttcgccgcttcttcggcgtccaattcaacgaaatcacccaactctttggattcaatctcaccagtcggttcttctacgttggactcgatcttggggccttcttctttgctcagcgcttcttgatagctttggaagtgatcgccatccgtaggtgcattgaggcctctgtcgaagtcatccatgtcatgatcgctcaaaacagagtcgccgatctcaggttcggcgcgcccgacctcgtcaccgaagaacaagtccgattgttgttcggcttcatggtaaagactctcgtcgcccaatactga

SEQ ID NO: 336722 - DNA, 498 bp, Pseudomonas aeruginosa
atgatccacgactaccgcttcaatacggcgcgtgcagagttcgatcaatcctttgccgcgttcagtagccagaccaaaacactccaggaagatggcctcgccgtcctggccaccctcgacgatgaactgaagcgggcggaggtactggagcagttcctggaacaggacggtaaccgagaaaaactgggtgctgtctatgacgcaatcaccgacatggagattaaagccaaacggcttgcgaaggccggcattcgggcggggcatgacgaggcggatgtttacaaaatgaccggcgaacggatcagccgctatctcaatgacaacgagaagttcctcaaagccgttgagcaaaatggcaagtccctcgcggatcgccttggcgattctgtagtgagccttttggagatgctcaagaacgcgatggccaagttcgcggagttcttccttcccagccaacaggaacagcaggctccggcaagcagtcctcgcctgggttga

SEQ ID NO: 336723 - DNA, 4476 bp, Pseudomonas aeruginosa
atgggtgaagtacagcttccgtcgatctggggagaacactctcaggcggtttttgagccagtcattgtgcgaggacgactggtcaccgtcttgatggacgttccggccgaatggaatgagaagctcctttcgttggactttaagcgatctggagcttcctgggtgcgcatcggagcgatggcccaagctgagtatcagttcctatcccccgaaatttcgcttgtcgcaatgcgggcggatcgagcgttcgattccacgaacgacgatcactatgaagccccagtgccagtcgatttagctgacgcggttcttcacctctggcagcgacagcgctctgccattggtacggcgttgctgatagagcaaggagagcaattcaccgatggagctatctggtcaaccatcgagacactgctcgatggtggccgcactcctgccgtcgatactctgctccgactgtccgcttcaaagctcgcctccctaggaaggcttacccctgaagccgaagcttacgccaaggcagcatcacaggaacttgaggtccatatgcccacggctatggtcgtcggcaagttacttgtagccaagggggaagccgtttcctggacagaaggaggagcgcataaggaaggccgtgctgcgtcagatttgaagtctggtgatcggggcttctgggcgtacgacggcgctccaatctatgtgggaggctacacggctcatccacccgtttggatcgctgccgaaaatctccggacatctccccctgcgcccgctattcaaaatgctctccagcctgaggcgttggttgaggttgcccaagaagtggtggccccccttgcgatccaaggcacgcaagaagattttcaactgctggagcagtactgcctcagtctgatgaaccgcgatcctgtaatgaactggaacggcgggcagcatccttttgtccagaatttggagaatgcggggaagggcgagagcgctgaacgattcagaagctttttcagcggcatcgcagcgaacctgaccagaaagaccgctgagcattttgagggtatccctcttgagttcaggttgtgcatcagtcgagaggcatcctctgacggcaaccaggtgatccgctacggggtcaccatcaacgttaaaggcgtgccggggtatctcgctgcggaacagaatcccgcatttgtcttcctggaagatgacttcgaaacgccgcctgcttcccagcctcttaggacgctcgatttctccaaggctgacgaggcatatcagttgctttcgagccggcggaaggtcttcctcgatgccgcgaagagctattcggctgcgcttggagaagtcggggttattattccgtcactcctgctggatcagcagctgcctgctttctggaagagcctctccgctcagctggaaggccaggtaacggaggcggcgttgcttgatgtcctagcagcaacgtacaaggctcgcccgtacctcgatatcgactttctgcgtcggcgatctggaacacctgtcttcgaggggagtgctcgtgcattcgacgcggatgatggtgggcgattcgaaattcagatcacgcaatccagcctgattggtatcaccttggctgatgcgtccaggcacatatcgggtgccgtgggtgaagactggctggcggaatccaagcctgacctcaaaaaggttgaggcctacttggtctcccttgaggcacgaggcgcgaaactcccgactgaaatcgcggcaaagcttccaagccagaagatcgataaaactgtctcgttcggcattgcgcactacttggaccgtgatgaggcggtcagtgcctataacgatctgcttgaggcattggcacctcaggtggcaagccatcaagcgtcagagcttgaacatctacgcaaatcggcaacctccgcagaccttgcagacagattccgtcaagttcccgagaagctgaagcaaatgccgaaagccgagctggaagcgaggatcaaggctgagctgcacaagaaccttgggccgttcggcaaataccccgagaccaggcaaaaaaggattgtggagtgggttgtaggagcgctccgcgaaggcggcgtacagggtgtagtcgttgccggggcgaagcagcactactggtatgacaaggttcagtttacggcggaaatgcttagccaatcccgtgaagccgagatgggttttgctctcgcaaactacatggacaggcttcggggccgcaaacaaggctgctacatcgatggcgtgagcatcgccgatcccgatcttgcagcacatgtcaacggcgagggccccactacattttccaaagagaaatcatccgaaggggtatatagcgatacgggagtggtcgctggctttgcagcgaaagacatccggggtcttgggcggtcggtgctgcttgagcatgcgagcctcatgaacgatggccagaaaaccaagtacctcacgaaggacctcatctggccgaggaagtccctgctagagcttcgtgaaaaggtgactgatgttaaatcggcgttcttttacgatctgatttggcgcagcttgccgaaggcacccaaatcaaatgcgtgggcacatgtccaagcattcatcagtctggttgccggtctcagatcggaccttgatgaagctgtgttgaaacccttcacatcatcctctggtgagagcttccattcgcttgccgttaaggccctagacgaacttttcgctgagccaggtgtgaagcgattctatggcggggaaaggctaaaagcgtatggcacaaggttcgatagtttcagttcggtcctaagccacgaccaactcatgagagaggcaagcgaagccgactggtcccaagtggtaaaggacagggagcgagcgaagcccaagcctgtaagcaaccgtgtgacccgcaacgaaatcgtccggatcggtccggactatcgaaacggccagtctgtgacaccggaggacttcattcgaaccttcgggttcagtggcgtggagtacgggaactacacctcccttgccgagcgtgagaagaacctcaatttcgcgtacgactccatgatggactttgtacggattcttggctgggagccgatgctcctgagcctgggaggtaggctggggctctgctttggttcgcgagggcacggcggtaggagtgcgccgaacgctcacttcgagccagctaacatggcaatcaacctgaccaggatgcgtggtgatggttgcctcgctcacgagtactttcatgcaatcgccaatcactttggcaagatcgcaaccggggcagggaccgacttgctggacagcttcgcatctccgctcatgtatcctggagcagttccgcctgtaaccccgatgggcaggctgcgtgctgaagttctttccgggttccataacttgatcgtggcaatcatgcgcgcgccgggggactcagcagatgcagacgatctgtcgcagtacactcgccgtagctcaatgcttgcatcagcaatcgctgccgacgagaaaaaggacaagtactggtctttgccgtcggagatgtttgcgcgcgctatggaggtttggttcaagcagaggcttgattcagcacaggagcagaatgactacctcgtagccgattccaaagccgctacgggaggtgtgtaccctacgaccgagcacatggaccggatcagcgtctacgcagaccgctgggtctctgccatccaggctgaaatgcaggtcgtgaaccacaactatctcggtcaggtcagcatgccggttctcttctcgcagcagggagccaagtcccccatgtcccgagcggacctgttcgagctggccgatgcggagcttactaggctgttcgggcgcatgcggccaggcctttcggttcacgaattcgctgacgcctctgccggatattacgatctggcagcgcaccttctggcactgaatccagggcgtgcggatcgtggcaccttctatcacgaggcatggcatgcggcccacgcaactctgctccggacggatgagcagctgctactggctgaggttttcaagccaggcactcccctcgtagaccagcttgaggctgtgcttcgcgatgagggcatgtacagcgccctggatgatctttcactaggcactctagaaatccaggcatacgccttccagatgtgggagctggggaaattcaccttcggcaatgagagcggggaggggagtttcaatcgagttgacgagttcatctcaggtgtcgagtgttgcgcggacctgctcggcggtgctcaagcagcccagaggctcttcgagcgttttcgtagcggtgaattaggggtccgcgaaccgaaggtaaccctccagcaggagatgtctcttgtcgatgccgaatgggatgacgggaacctgttggtatggaacgttcaacttgaatccggcgcaccatctcggccgccatcgagaggaatgcagatgtaa

SEQ ID NO: 336724 - DNA, 1170 bp, Pseudomonas aeruginosa
atgagtgagaatgtggtcaacaatcggacaggctttagcggcaaggcggtggccttgattgctctcgctactgttgccggctcgctgggcggcaactggttctggtcagctagatcgaacgaaaagcccccagctgatctgggagctaccagcgccgccaatggatgcgttgccctggcaaccgaacagcaagccaagacgctcctgggtcgtctcttcccggagtcgaacctgatcaactttgagcccttaaagctggctgaaggctcttgtcttcttgaggttgacatggaggcagtaaaggggcgcaaagacactcgcggctttgtctacgtactcccggacggtgagcggttcttgaatggcccactcatggacaagcgaagcaagctgggacttcaggcggatgcagcgcagcaaccgagcgccgaggaaatccgggcagccattcaggcatccgcccaagaactggcttacaaatctggcgctatcggcaatgcaaacgatctccgagcgcggccccctgccagtcccggcactgacctatcgcacgaaatgcagaattcgcaacctcagcccgtgaagagcattggtgaataccggcaagaggcgctgacaacgatcaagtccctgccacaactggttaccggtgttggccagcacgacgtttatgcactggttgatccgctctgttcgcagtgctctgcactcttcaagcaaagtgaagacctgacaagccagtatgggattcgctggcactggattcccgtgcacaccagcgaaagtggctgggtaatgtcggctcatctgctccagatggcagccacgaacccggcgcaagccattgccgacatgcgaagcatgttcaatggtgaatggacggccgccaagcaggaggcagctcttcacgctctcacccccgatgactattcgaagtcccagcaggcactcgcattcctgatcaagtacggcacatccggcgggcaaaccaggactcctttcgtggcgttcctgaagcccaacaacgaactcgaactgatcggtggaaaacccctgatggaagactgggcggcgctggaaccagccgcagcaccaccaatcagctccccggttgaatccgcccccagccaggcgaagatcaacctgccggagataccagcagcacaatga

SEQ ID NO: 336725 - DNA, 273 bp, Pseudomonas aeruginosa
atgcagctcggtaaatacatcagttcgctaccccgaggtcagcgccaggagttccgcgagaagcttgccaaagcgcactgcgtttcggtcggccttgtgcgcatgtgggagaacagtcctgcgcccgaaaactgggatgcagagaaggtttcgaagcagagcaggaagcatccgcctgagattttgaaagtcgaaatcaccgaacaactgacaggcggagcggtgcaccggagcgatctgcggcctgactgcttcaagcggagtgagacctaa

SEQ ID NO: 336726 - DNA, 750 bp, Pseudomonas aeruginosa
atgactacgatggaagccccgccgaagcagaagaagtcggcagcatctaagcctgcgacagagaagaaagccccgaaaagcctgctgtctcaggagcagctggaagcgatcatggactcatatgggttggatcgcctgctggtgtccgcttactacgcaatgagcgagtcggttttcaaaaaccgtctgatcatcgggtccttcatcgcgctcggtatcagtctcgttttcaatatcgtgcaatataatcacaccccagagcctaaagtacttcactgcacctcagatggtcgctgcgtgccgatcccgacgatggatcaacctctgtacagcgacaaggaaatcctgagctggtccgagcagtgcgtgcgcgacgtatacgacctcgcgtatacgaactggacgactcggctgcaaaacaacacaggctgcctttccgacgcatcacgcaagtcgtttgtggattcactgaagaaaattggcgtcgtcgattacctgaacactgagtaccagggcgtcctctacgcgacgactcagcaatcggtgctgcgtcaatccaccttcgatagcgaaaagggctactaccagtgggtggtggacgttccgtaccgtctcgcaatcgacgggaagcgaaagggcagcatggacctgaaaatgaccatgctcattcgccgtgtcgggatgaatgtccgggataagggcatatggaccgaaacctacatggtcaaccctcgtgatgggggtcgctaa

SEQ ID NO: 336727 - DNA, 993 bp, Pseudomonas aeruginosa
atgagaatccaggcgttctgctatggcctcctggcgctgtcccttgttgcagtggccgacgaagcatccgagcaaccgaaagaacccattgaggctcgtgctgatagcgttcttcaggcaagtcccgaggcgatactgcgtatccggggcaaacttcaaaagttcgcgactgcgaagaatgctcctattcaagcggactacgaagaagacattccgcaggacaccctggaccttgaggaaatctttgacgtaaatcttgagccggatagtccaccgcctaagatttttatcagtaaatatcaaagctcggctgtgagtttcattgatgcatatggaaacccttggccaatccgcagcaccagtaccttcatgggtgaccagatcgaaatcctcaaggcaattccgagtgacgaaaagcgggatgactctgaaaagaaaggggagaaaagttctggcaaccctagcataaacgatcctcaggcaggctcgtttaccgttactgcgttgaaacaaggtgttgttgggaacatgacggtttatctctatagcaacccgacgcccgtgaccattcttcttgtggctaagccagccatgtatcaccgcttagccactattcggataggggatgttggtccgcagaccaataccggcgatatgtacaagaataccggcgttgcccttggcacgccaacagacatggatttaaaccacgcactatatggtgtgtcgccggatggaacagagcagatggttgttgaaggcggggagggccaagcctggctaaaaggcgacttcctctacttgcggactccgcttgcagtgttctcacctgagattcttggtgcatcacctgggaacggacgatatcgcgcctataaacttgtcaaaacgacaacagttatggccacgaacagtgaaggttcaacagttaagctgaagatcatgcgccacccggcgaccgaaatttataaccaaacaacatttaaacgctga

SEQ ID NO: 336728 - DNA, 1275 bp, Pseudomonas aeruginosa
atgtcagatgtacgtgatgaggagtttgctgacattcgcgtaggtgcggatcagcgtatcggtggcggacaggcttttgaacaagttgacagcgtgcgtggtgccggtgctgtcaaggggatttttaacaaagacaacaagacccgtttagttgctgtctttggggtaggcgctgtgctgattggggcgactatctactacggcttcttttccggccctccccagttgaaaggtatagccggtgaaacatcatcggccgcgcgtgtaagtggctcttcgcaggtcgggcagcagacaagccaattcgagcgtgaagctgcaaatgaatacaacactaaggttctagaagaacagcagcagaatggcgatccacaggcgcatccgattgtgctcaccgatccttctgacgagagggtgaaggatgcaaacccgttcaagcccgctactaatttagtcaacccgaacaaagtatccgaaacagggggagttgagtacgctgcaccgacaaatcagcgtcaggctgacgctcaggcccaggcaaataatcaggcccagatggatcaagtgcttcagcagttggtggcaagcgaggctgaagttccgaaatcgaaggttgtttcctggagttactccagttcttcaacaggcaactctgatgagggaatggaagctattcctactgagagtacatcggcaggcaacgcgggcccggtgaagagcaaatgtgaaaagattgagcgcggcggggcaatgtcgatagctactgctgactttgctgtaaacagcgatgttggcggccccatctcgctaactcttcgcagcggtaaggctcgtggccggcagttgattggccagttcgagaggaaagacaagtggcttcggattgagctgaataagatgctctctgaggatatggaccctgttcctgtcaaagctattggtttggacatggaaaccacaatgagtggcgttgaaggcgatctcgatagccacattatgtaccgttatgggtggtggggccttggagcagtgctttcagctgtaggtaaagctgcggagaacaacgcaaacgagcaggttattgtctctgacggcgctgtagtgacctcagcccagcaggattcttcacgtgaattaaagatggcacttggttccttgggtcaggaccttggtgacgccttcaaagaccggataaaccggccaatcactgtgtcgttaaaagttaatgagcaggttggcgtctatttccttgatgacgtttgcgcgtctaattga

SEQ ID NO: 336729 - DNA, 1533 bp, Pseudomonas aeruginosa
atgtctgaactttcgtatgagcaacataaaacaggcgatcagagtgttcatcaactggatggcgactttgacttccaggacattgaagagcttagcggcactacggcaaatccttttggtactggtgccggcctggcggataatgaactgaaccttgatctgcacgaagaggaggttgaagagagtccccgtcgaccatcagcccctagtttcaatgatgaagaagatgcggtcgaggcgagcccgaagaaagcaaatacaacgctatggatcattctaaccagtgctgctgtttcgcttccacttgtatgcggccttttatacttcggtatgaaggtgttatcacctgctccctcgcaacaggtggcggcaattccagccctttctcaagcggcaccttcggttgatgaggtgcggatcgatacaggcgctgttggtttcgcgcagcctggcaaagaggacggcgtagcccccgaggctaaacccctggcacaacaagtcagccagcatgcagagcagcctcttcacaccggggatggagttgatcaggcgatcttgggctcgaatatgcccagtggccacgttcctccaaatgacttggttgtgacccaaggagtccagcaaagcagcgaacctgccgcagcagctccaggaagcgaacctgtccagagtgtggttacaggcgaagaggcggagtacgacaaagcgctcgactccctgaacggagtaaacgtgccggtcggtgccgttcgaatcgaccccacagcaattcagcgccagttgacggagcagcaggtcggaaagctggagagcaaccttcaaggcgttcagcaggacttgggtgcaatgaaaagcctagtccgcgacatgcaaaacaacatggcctctctgcatcaaagcatcgaggcgaatcagggtaagcaggctgctattgaagggcaacttgccaagctagctgaagcaatgactgcggcaaacaatcagcaagcagcggccgacgctcaacgcacgaaggagatggaatcgctgcgagcagcaatcgctggcatccaagatcgcgctgcaaaggccgaagttgcatctcgcgcctcgacccgcgccgaagccaatcagcgtgccaatattcaagatgcccccgagaaactcgcacctgcacctgcgaagaagcctgcaccacaggttgctgatgttcggacaccccagaccgctcctgtccagaacgtagcaaacgcgaaaccggcatacaccatgccggtaacaccgccgcagccttcccaggtagctgtgcaaagccggcaccctgctcctgagacttcatctgttcctaaccagtgctcgggttctaaggcggtcgtatctggtatctggcgcgtaaagggagtcaacggcacttctgcctatatcgttcgtagtgaggacaatacagggctttatcttcggtcaaacactccggtccccggcttcggggtcgttgttgggttcgatccaagtagccgttcggtttgtactacctctggcctgatcaggaggtaa

SEQ ID NO: 336730 - DNA, 420 bp, Pseudomonas aeruginosa
atgctccagaaaatcaaagttattcgtgaagtttacgacaacctctccatttacgcgttcgtgaagtacaccaccagccgggtcgcacaaatgttcggcctgatggcagtggcaggcgctgctcacgccggtcagaaaatttccggcatgaccaacggatggaccactgaactcggcgcgggcgttacgtttttccttctgtgcctagccgctttcggcatcgtcctgaccaccgtcgctgcggtatccgcgatcttcgctaagaagaaccaggagccgctgaagtggcaaggctgggcgttgggtctcggcccggcagctgtgatcatgccggtgatcattttcgccgttgccgggtctttgggcggtggcggcggcaacgcctctagtacctttaacaagctcggcatccagaactaa

SEQ ID NO: 336731 - DNA, 705 bp, Pseudomonas aeruginosa
atgaccttcgagttccagttgagcacagttgacaaccccgatttgtacgggcgctatatccttaactggcatcgaaacgagaaactttacgtcgatggcttgaaggttctcgaacgtcatcgcttcacttgcaaattctgcggtttcaaaagcaggccaagttcccaggtcccgcatggccatatggtgcccattgactggaggaataactcaaacatcagtgtccatggtgagggagagtgcgtttgtccattttgcgccagtgttctggggataaactggtcagtagaaaagcagaagctgggtggcaaggaaatgccaagtccaggtgtgttgattttctgtccccaccttacgcagattgaggttaaccgcttagcgttgcatgtgacctctcttatttcatcccgcagggttggtacgaccccatcaaccctggagtccgcagcgcgagatgtggacgcgattatggtttcattaaatcaggaacttggtgctgagcttccaatttacaaggcaaatgatggtgattttgcacgcgctctttccatgttggcagttccactctatgaacaacgtaagcaccttctatcccacgttcgctggtggccggcagtaagtttttggcaggagcagggtgtttactggaataaagcgttttacgaaccgttgagcaagacgctctcaaagccggagtttgtataa

SEQ ID NO: 336732 - DNA, 1374 bp, Pseudomonas aeruginosa
atgattacccctcaagctatcggtgttgcgctttacaacgactcaaatccgcttagcactgagggaaactttgcctgccgtttccgtggggagcccttcaaattcaagtcggctgctgatctggacgcgaatacattatgggtgaccaatgcgtcatacaccgccctcacagaagctggcctgcgcctgaaaccgaacattgcattcgatagctattttagaacaagtgtcgatcagttgattgttgaactcggcttgggtctatcttcagaccgagttcaagagtcaaatgttgagcagcaggttgcggtacttgcagagatacttggatcatctgctgaaatgttcagattgcaacttggtattccggatttcccggcggaatctcttatgtcttccgtgggtcagatgttcggttttcaagaagctccgtcgcgctcagtcatttctgacatttcagaaagagctattcaatcttatactgcatgcgcacgagagcgcaggcactcaaacaacgcagttgtgtttaatttttgggtccctcgttatcgctgggctgtgaagatgctcaatagcccagtcccgatcaataccaacttagttcagttgaatgctgctcaacttcccgacaatggtgcggatgcactaactgtggttgagtgggctgaggaaactaatcttccgttgttcgcaaaggttaacgtccgttccttagagcaggtaattggcagtctcatgaattacggtgctggtgcgcagcatatgcggtccgaagcacggggttcacaggaatatgattccagaaactttcgagaatggtgcgccttacctgagctgaaagttcttgcacaggtgggtgaggttgagcttcaacagattgtagttgccggggaatggcaacggacaaggctaggactgcacaacagcaaggtatcaagcgtctcctattcatacggcctggtaagtgagaacatctgggttgggcaaactcgtaatcgcaacggaaagctttcgaggtcactctcgacctcttggttgcaatccattgatcgtatggaatgtttgcaaattgctgaatatttgtttaagcaaggctttgaggtaatcacttacggttttggtcgtataaaggtcgtatgccctatttcagtgagggcctctgtcccaggtattgcaaaaaaactgggactgctttacccggcttggctggatggtgtgcagcatctgccatatgaaaaatcgccggaatctgtaatgcaagccatgatcaatacccgcgactataaatccttaattcgcgcaaatgagttggttatgcaagagatggttgaggctctgagagtgagggctccgaataatgcaaaccatcgctga

SEQ ID NO: 336733 - DNA, 3129 bp, Pseudomonas aeruginosa
gtgggctcatttacttttgccgataaaattcttgacaccatcgatgacgttcgcaggggtattaatggttggctgaaggctgaccatacgcaatatttcccgatagcgactgcgcacaacaaaaatgtgcttgcgctgaacaacggcagccttctcagcgtaatacgcattcacggttacatggggcagtacactcggcatcagtttcatgaacttcgccacgagtgggctcggtttgcacaaacaaatgcgaatgacaagtcggcgagtggcttcgatctcttctggtcgtatgaatacgaccctgaaggtatggaggattacaccctagctgccaagcaacagcagattattgccgctgcacgtagaggtatgagaatcgcagacatttgcgaggaggatgccaaaatctatgggcagtcgtgcgcgcgtgagacccaactcttgatggtcgtaacgcatgtggactcgttgccaaaagcagaccggaagagggcttatagcgccgctgttgaagatagaaagacccaggttaaggctattggatcagcacgtcgaggcattggcctgcgcgcgctcgacgctatccacgagcaacaggtcaacaaggtgcttaccttcctggagggcgcaaagttcggctacgacgctgatcgtctcgacagctatgcatcgctttgggcaatgcgtcactctctcattccatcaacaacgtcgaaggcatggaaggccaagctgagaccggccgacatgcgtctgcggcctaccgatgaagtgactgagtactcaaggaaaaacacgacaaaggacaaagctgctcctgattggacagctttgatgccgccgcgcatatccgatcagctggttcccgatcatgtgctcgatctcggtagctatgttgtcgtgcaggatcgaatttatgcacctttgtacgttactgagctggcaacggaccctgagcccatagatatcgtacttcgcatgttctatcagcgccgccttcccgtgcgtatcgtgttcagccttcagtcgaatcatgcacaagcaaattactggaataggctcttcgctggtgtgttcagtttcatgtctacctccaacaggcagatcagcacggcggataatgcacaaaaggcctatgttgaaggtaatggtgctctctacgggtacggcatttcggtaaccacctggagcaaggttgagcagttttttgacaaggaaactggtcgtcaacttatcagtactgctgaaattcagcgtagggcgcatgatgtcgagacgctgcttcagcagtggggcgggcagcagctatcgtctgtttttggttgctctgtagaggcagcattcagtgcgtcgccgggctatatgatgcctccccaggctcctctggccccacaggttgaatatgatgtcctaacacaattgcctctcatgaggcccgcaaccctctggcggcccgaaaatgctatttggactcgtactgaagacggcgtactgatgccgttccagccgatgagttcaaggcaaagttccatgattcaaatcatcatgggcggcatgggcttcggtaagtcaaactggattgcagagcatattaactactttgcgactagcccggagtttaaggaaatgccatatatccgtggcatggactttggtgctagttccagcggcgtaatcgatatgattcggtcgtcgttagctgaaggccagaagcatgaagccatgtttgagtatttctcaaacaatggggacatggttaagtgtcttggtgacacgagattgcagtgtcgctatcccctggcggatcacaagagtttcctggttaacttcttcttgatcgtttgcggagatgagttgatagaatcggctggtctccaaaatattctgaccctgctcgatgtaggtatcaatcgtgcttatgagaggcgggacccacgcatagctgatagcgatgttcctgtttaccgggaatcgatcgcagctcctgaagtgcgcgaatgcatcgaaaagcacggccttcagttggatgaagattcaaactactgggaggttgttgatgcgctgattgaggttggtctgcgggagggcgaccagtcagctatgcgggctgcaaaaattgcccagcgtgactgctcgcctctattgcgcgactttatcgttggtattacggaaatggagcctcagttcaaagacgttccgactatcaacggagtgtcgtttgttaaggccgttaccgcagcaattgcaaacgcaaaccgccttttcccctgttttgccgggaaaaccaacatcgacatttcagagtcgagagtgtgcgttttcgacatgagccgcgtttttggtcgtgataccggaccaggtgctgattggaggcggagtgctttctttgctgccgcaatgcggctcctgacagaggacctgttcatcagcctcaacgaaacggggcaagagttgacgctctcgcagtcggaaatggggatcaccgatgcgactctggcctggcacctgcgctatctggagcggcaggatcagatcaaaaaggtgttctgggccgacgagattcaccgtatcggcgtgatcaagggcgctttcaacctacttgatagcatgaccttcgaggcacggaaatacgttgttggtctgctgttgggtacccaaatgccccacatgttccctgaaaacgtactttcccttgcgaccagcatactgatttttggcgccaaccaatcgtcgaaaattgctgagaatatgcagaaactgtttgaccttacggacgatgaacggcaaattgttgagagcatcacaaaacccaacgcgacgaaaggcgcggaggtcttcgcaatccaccgagtggataagcgggtccagcgtctgaagcttcacttcgtcattgggggcatcaaaagatgggcctacgctacagaagggaacgaacgcgagctgcgccggattctatatgaacgcggacctagcactgattgggcgcgcaaggtgctagcacagagagtcccaagcctcactgccgagcttgctaggcgtaaggagaagagcgacgaattggtcgagatcgatctcataaacgatatcgccgacgagttgctctcaatgcacattggaaatgattag

SEQ ID NO: 336734 - DNA, 330 bp, Pseudomonas aeruginosa
atgctgttgactgagtacctggtggggcggcgcgaggtgggggacaagcaagaggtgctttgcttggtcgtggactcgatactacccaaagacctcaaggccggccgtgccgagatcgttcggaaaatgaatcggcaggacctgatcctggagttcgtgagcgataatgaaccagtggaatggttcgccttccctgacttgccgcaagacgtaatcgagctgctcagcgccggcaagcaaatacctgttgttgataccagtgacgagaccttcgtcatggcttcgatttctggcggcaccgatccgaatccgcttcttgcacaaggctga

SEQ ID NO: 336735 - DNA, 843 bp, Pseudomonas aeruginosa
atggatttctcagaccccgccatcgatgtagccgcgcggcttgaggcactggccggggccttgaggtctgttcgggagcttgcgccctcacacgttatccgaggtgttttttacgacgcctcgggtaacgagatcgactgtgatccttcggataggttcgccactgcccttgccacctggaactccgccgacgacagtgagaatgggactgttctccgctttcctggtctggtcgaattgacgccgaaactcatgacggctgtaaccaggctcaacgcctgcaagcgcgatcttgaggctactgtcgaattctggcagagcggcgacgaagggctcagtgctcggcagatgcgaaaccactacgcaagcgccggctacgcgcgcattcatcccctgcaaacctggagacaggtcgttcagctcgcttcgcgaatggttgaccagcccctggccagtgtaggttttaccgtccagcagaggggcaacagcagcgaagagatcagcctgcaagacgctatcaccagactattgaatgccaatgcctacgacctggtagaccgactggaaagcgacaagattcctgataccgcaaaaattaagtggtacgaaccggtaggtgctcacattcgagcaaacgttgtctggggggcaaaggagagcgcagttcgcgatcaattccacgcttcattaccgctctgcgtcggcgcgggtggatggccaacaaagcgcgtccgctttaacgctccaaaggaaaaagcccaggccattcgtagggatagtcaaggggcagcgcctcgctaccccctccccttccgatctggagctttcattcaagtagcataa

SEQ ID NO: 336736 - DNA, 663 bp, Pseudomonas aeruginosa
atgcgcggaaaatccccgttggagaacctgctcccccctgaattggcgatgttctccgagcccattctgctgaacggtgcgcacatcaagcgactcaccgatacacagcaattacacactactgaaattggcctcggactgggggtgaacaccgccgggctttataccaaattcggcaatcccgatcccgtgaagagcagtgtcgctatcctgctccgcttgtacgcggcgttccccgagcttctgccgaaggtgcatctgccagacgttgacgacttcatggccaagatcatggccatcgacccggactttaagaagtctcacctcggaccattgctcggcctggagactaactcgtcgttccgactccacaaggggtttgatgaagcaagccagaccgccaagatgcttgtctatctcatcaacaggctcatcgacatggaccctgaaaattggtgggtcgttcgcgacaccatccagatcgaggcggaagcatcaggcattgaacctgccaagagcgtgtggaccaagggcggatggagccgtaatcgcgtcaagaaagaaggcatcgtcacgaagaaagcccccgttcgcaaaacggcttcatccccgacagcaaaagcaccaaaacgagtcgcgaagcctaagcaaactcaggagtaa

SEQ ID NO: 336737 - DNA, 597 bp, Pseudomonas aeruginosa
atgtctcaggtcaatctcaccacggtggctgtctataagggcgacgccgaacatatgccgcttgacactgagctaccactgtcagggatcgacaggtattttccgccgctgaccttcccctcgaagggcatcacgtgcttgtacgggcatcgaaacccagcccttgtttacctgcaccagtacgcggctctggccaagcaagattcggcagcagtggatgtcactgttgagatcgaaacgtggcttcgccagaaagttgatttttctgatgcggcagactcaggcctcaaggtcacccggttcctctcggtagcgcgtgcgaagaaggaaattactgactacatcgataagcattggcttgagctgaccaagaagtacggtttgccggccgaagatttccccaggaccccaaccaagtacccgcacctgctcgacgagatcatcactcttgagcctttcaagcatcttgcggtgatcgcgtacaccgtcgaaaccccgcaggtcgggcagttccaagtggcgaccatttttgacctcgatgcaattacattgtgcgatggtggcgctttcttgcagaacgtcgatctgacgtactag

SEQ ID NO: 336738 - DNA, 990 bp, Pseudomonas aeruginosa
atggtcaaaggcaggcgtctactaccggactacaaggttccaaacacctattccgagcacgttgagttcgactactcagcccagctccatcactacgcccttggcgcaagactgcgcggcatccagattgacggcctggtgctagccaagctcgacctgtccccggcaactgctgaagaccttgtgcagaagcttgagggcgcttcactcgaagaaatcgaaagggtagggcggctaatcgcggaagctgacctcccaggcttccgggtggtcgcgcaggtaatcgagcagagcaagagcatgtacgtggatatcctcgccaccggcaagctgtactgggaggactttgttctgcagggcgttattccgaagcaggttgtgaagccgccacttccagtaagtgaagaacagctctcagcaataggtgccctggaaactcaatacgccaagctgggcgcagccaaaggcatgctcgaacgcgagcagaagaacgtcgctgcacttctcacggctgccatctcaggcattgatgcagagaatttctccacccctcatggcctggtcatcccgaaagtggccgaggctgtaaaagaagacgaactgatcgctgccgcgatggagtgtggtgcggaggagtcggatttgaccgaggcggcggggtactccgaacaagctctgctcgatgaaatcaagcgacttggtggcgacatcgacaaccccgccctgctcgccaccaagctgtcggcagcgaaggctgaagacttccttcgtagcaacgacatccccaccgaggagttcaagaccagaactcagggcatccggctttccacaaggtcagacgctaaaaggatgacagagcagttcgcccaggaagcaagcgacatgctcgacgggtgggtgggcggaaccgcagatgctgaccttgctgacgacaatttcttggaggaggggcctgcccggtcttccagaaccacgatgaaaccgcgctag

SEQ ID NO: 336739 - DNA, 1767 bp, Pseudomonas aeruginosa
atggctggtcaagtagaagacctcaaaaagacgcttgccgcttcactccggggatcgccagcgagcaacaagatggtcggcaagaagtacgtgatggtgctgaccgaaaagctgatggtgagcaggtcagacccggacagcttctatgtcgtcggggttcgtcaggataccgatgagagggtcacgttccagggcaagcgcctacgctctggtcagactctccctgagcccggcgcaatggtccgcttcgacaagattgaagagcggaagcagttcaacaccgcctttgcgcagttgaagcatttcaacgctgagtacttccatgcttacggaaagcagggattcgccgtaaaggcggtggcaagtcctcgggagcccaggatgcagaacggcatgctcggggctaccacgctgctattcgataccgaagtaaattgcttcaccttcaacgccggccagcattacgacaggattgaggaattcgtcgcggcaatgcttcgcccgtggcatttcaaaaggcagagcggcacaacacacgacatggttggtaaacccatctggagcaagaacgccaaccttggtatcaccccgtctgtgatgattcgagtggatggtgtgcctggtagtcggatcatttacggtctcggcgctgtgctcgggagtgacaatgcctaccgactccccacaatggaagagatcgtccaaaaaatcaggtcggacaaaaacttctccgatttcatgcatgtgattcaaggcgcaggtaaagagcaactcggccaggtacacatgacgattgttcccggagccgctgtccgcgtcggtcgtgagagcgttcaggacgagcagtatctgggcactccgcggtcctacgtgtgggaaaaccgcgaggcacgtaacgatccaaccaaacccgcgtcctggcgcggctacaaagagtcatgggtccaccttcagcgtaacgttgatggccggatgatggttgttgattgccatcccgtttctggcgcacgtctgagtggcgcgcttccggttacccgcagtgaaaaggagctgcaagagcgtttagccagagcggctgtggagcagagcagggagcaacagaaggtcgcttctgagcagcgtgcacttagccaaaatcagccgcagccgcagccgcagcccacgccaacctcaaccccggtagctgggcggcagcctgtccaggctccagctgcccgcgaaccggccccggcgcaaaagtcgcagccgcaaaatgttgttcaccccgatcctcggccgcacgcgctcgaacctgagggcagtcattacccggaccgtagtgagcctccggccgcagacgactatcaggaccttcacgccgggggggattccgtcgcccccaattacgaagaattcgaatcctatgcagccgcagaggtggatcgggaaacggccgaagtcagctcccaggtcgaggaggcttcctatcagactgaacacgatcccgtcgccgacgacagcgtaatccacgaacaaccgctggcgtccgtgcagcctggtgatgatgaattcgacgagcaattcctccgtgatttggaggcaattgaatccatgcagagcggcgctaacgcatcgcaaacagatgcggtcgagcctttccacgaggattacctccgagagatcgagcgacttgccgtgcaggtggtcgaagagaagcgcatgcaggcggctgaacgccagatcgaaaatcgtaaggccggcctgagcggcctgcctcggatgggttga

SEQ ID NO: 336740 - DNA, 180 bp, Pseudomonas aeruginosa
atgagtgcgttattcgccccagccaatgggcgcgaccagtactcattcttaaagccggtttcccgcgcgaaccccaacgactccagcaccgctgtgttctggttgatgcctgagcccatgacaaccaacttgtgccccgtcacggccgccgagcggaccacgatcaatcgcatgttgtag

SEQ ID NO: 336741 - DNA, 399 bp, Pseudomonas aeruginosa
atgcaagcgagccaaaaacccaacgcgatgcacctctcgaacgatccgatgctgacaatggacttcgaagccatgctgttgccggagctggagcagatgccccattgggcgcagacctaccatcagatgctgatggagctggaccccgcgcggctgatgcagctttcatcgagcggggaattgctgaagcatctgatgagccaccacgaccagatggtggagctggagctggagctgatgcgcgagtggaagctcaagcacccagcgaaggagaaccaaacgatgcaggaagcagccggcaggaaccagcaagcgaagatgcacgccaaggaagtgattcgcgaggacatggagaacagcatccgcctgtacgcgctggagacgagccagaaagcgtag

SEQ ID NO: 336742 - DNA, 1659 bp, Pseudomonas aeruginosa
atggactacctgagaacaggagagctggtcgtacgccggaacgaccaggatcactccttcaacatcaaccaatacttcatcgacaaccccgacaacgtatttggtcggttcactgttgaatccagtgctttcggaccgaaactggctgtgcgcatgcgagcagactccgccttgggtggcgtctacagaccgatggccgttattagcaagcagctggaagggaggatcgagaccctgccagaaggcttgagagatcgagcgggctggcagtacgcccagactgcggcgaagcctcgcaacaaagctcaggtcgcggagcagcctgatagcagctttgagcttgaggaatacctcggctatgtgggcgactacaccgtggtggatggccaaattgtcgagatcatcgacttggtgcataccttcgacgatgagggtgtgcgcaacggccagaagtacatcgcaaaccccgtgagcttcaaacgtgagcgtgatcgagagatcactgaggactacattcctgttcgtgatgccgcgcggagcctcatgcgggcccaggttcaagctgacgatgaagagctggcagctgtccaggcgcaggctcgtgaggcctacgaagctttcgttgggaagcatggcccactgaaccatcccggcgtcactcgcgtcgtgatcgacgatgccggcgtagccgaggcacttgcgctggaagtctgggacgacgaaaacgagactctgatcaaaatcgccgactcgctcaccaagcgagttgtcctgcggcctgcgtcaccgactccgagcacacctgtagaagcgatgtacgtctcccttgaccagaagggtagggtggatttcgcgttcatggccgcgtgcattggccaatctcagcaggagcttaaagcagcattgctcggtaccgaagtattcgaaaatccccagacgggcgaatacgaaccggccttcctgtacctcagtggcaacgttgtagacaagctgaatcaagcgcgagttgcagcagtcaccgacgaccgctggctaaccaatgtccaggctttggaaggcgtacagccggctcacatcccctttggtgacatcactattcgactgggggccaactggattccggaagaatcaatccgagagttcaccgccgagatatttggcggtcgtgagctggaggtgagcgagtttcgcgccatgtaccaccacggcatcggcgagtggacggtcacggtcagtgactcattcaagtcccactacggtgtccagcgaaacgagatgtggggttcgaagtacctcagctacgaaggactgctggaacgcttgctgaacaactcccgcccaacgcacacgatgaagcagcccaacggcaaaaccgtcgtggacgatgaggccactatggaatcgagggccaagcaggacgagatcaacgaccagttccacacgtgggttgcttcatcccccgaacgggccgaacggttcgctgaactctacaacgaggcctgcaacctattcgttacgcctgtcttcgatggaagccgccttaccttcccaggtttgaatcccgcatggggcgtcgcaccaggctaccgctgtggcgatgcagctgctcggctacaactgcatggccgcgcatccggtcggtgcagggaagacctttga

SEQ ID NO: 336743 - DNA, 2646 bp, Pseudomonas aeruginosa
atgcagctgctcggctacaactgcatggccgcgcatccggtcggtgcagggaagacctttgagatggtagccggcgcgctgaagatgaagcaggtcgggatggtaaacaaaccggcgattgccgtaccgaaccacatgctcgctcagatgaccagagacgcaaagcacatgttcccaggtgcttcgattctcatgatcagcaaggaagacttggccggcgcgaatcgcaagcgcttcctggcgattgctcggaacaatgactgggatttgatcgtttgcacgcactcgatcctgaatggaatccggccgccgcttgaggtcatggttgctgagtacgacaacgagatcgcgaccatcgagcagagcattgccatctgcgacacgaagcgcgtggaacgacgcctgctggcgcggaagaaaactgtcgaaagccaacgcgacgacatgatcagtgctttcgaagaggaagacacggccaagggcattctcacaatcgaccagaccggcattgacctcctgaatctggacgaagcccacctctacaaaaatctagagctgaactcttctttgaatgtgctgggggtcaccactggcggctccgcacgtgcgagcaacctgtggggtttgtcccagtacttccgctcgcaccatgggaagagctttggtttgaacgagttcactggcacgcctatcgcaaactcgatgtgtgaactctatgtccacaacaagtacttgaggcccgagcttcttgagcaaatgggcatctggcatttcgatgagtgggcaaatcgattcggctctgtggtgactgcccttgaagcgctgccggaggggaccggtttccgtgtgaacgaacggttcgccaagttcgtcaacgcccctgaaatgcttcgtctgttccgcacctttgccgatgtgcgcactgccgaagagctgaacctgccaaggcccaagctcacaaccattgtcgaggctgtcgagcagaccgaatggcagaagcacttcatgaagcacctttccatccgcgccatggctgtgcgaggcaagggcgggaacggcaagaaagtggaccccagcgaagacaacatgctggccatcgcaaccgccggacgaaaggcttcgacatcaatgcgcttggtcgccgaggacctgccggatgaatccgcgcggaagatcgaaacggcaacaaaaaacatccttgctgagtaccagcagaccatggaagtgcgtggagcacagctggtcttcatggatatcgggacaccaagcaaaaatcgagattactcctgctaccaggagctgaaagacaaactgatagcgggcggaatcccagctcgggaaattgccttcatccatgacgcgaaaacagatgacgagaaggccgctcttttcgcgcgagtgcgctccggggattgccgcgttcttatcgggtcaaccgaaaaaatgggggtcggcaccaacgtccaggagcggctgtgcgcgctgcacaacatcgactgcccttggcgtcctgaccagatagcccagcggattgggcgtcttgcgcgccggggcaacaagtactttaccgatgtgcgggagtacaggtattcaactgtggactcgttcgatctcttcatgtgggaaacgaacaaacgcaaggcacagttcatcagccaggcaatggcgaacccaaccagcgcgggtcgcgaaatcgtcgaagagatggaccttggattcgccgaagtcatggccgtgacgacgggcaatccaaagatcaaggagaaggtcgaacttgatgaccaggtgagtaagcttgatcgcaagtacaaagcttggctgaacgagtcgttggcgcgtacctccgcgatgcggcgtttgtccgggcaggtttcagacctggagagaaggctggcgctggtgaaacaggccatcgcgttgatgggcgcgagcaaggcgcgcggaatcgaagtcaagggtgcggttcacggcctccaagacggctcgactacttggttctacgcgacaccggtaggggaagccatcgaaagtaggttcgctcccgctgaaatcgcaaccatgcgaaacaacgaagagttcgttccactcaacatcaagatcggcaacctggagatggttgtaacacgcgcacgtaactatgccactgagaccatagtaggtcgtgagccttcaatggtcgcggcagtgattgacggggtgccactcccattcctgcggttctcaccaagcaaagatgcgaagcataccggcaccagtatgcggaagtggttgaagctcgacacgctggatgttgaagagcaactgggccacaagagggaccagctggattacctcaagtcccagcccggcctctcggacacctggccacacgaaggagaactgaaagaccttcgtgagcgcaagcgcgcgcttgatgcatggtttgcgagccaggttgaggaagctgctccagagttcgacccctttgaagcagctctggctgaataccgcgcagaacgaggagtgagtcagcgtctcgattccgaagtggcggacaaggatttggacccagaggatgaccttcgctttgattcggagcgggtcgtgcaggaggttgcacagaatgatattcagcgatacaggaaagttagcgctcctggcctgtaa

SEQ ID NO: 336744 - DNA, 429 bp, Pseudomonas aeruginosa
atgacggagagtgaccccgccgtggtatccctcaacgaggccgccatgcgggtcgcgcgcgcagctgagcaagccgcgcttgctcaaagcgtcggctacaagcggaacggtgtgaccgaggaatatcagatcgatctgagcaaggttcctccggaaatgcgtgaaccactgctcctggagaacggattcaatggcgaactggagactttcctgaagtctctggcgggtgctgtgggttggcagcctccggtgatattggggacgcgcccgaccaccccgctacagatcagcatgaccgagcagcgccgcccccctgtcctgtgggtcgctgacgccggctatcaggctggagctatggccgatgtgagcatcaatagctcgctccgccagatcattgtccgctacaagcagcctcagggggctcactga

SEQ ID NO: 336745 - DNA, 246 bp, Pseudomonas aeruginosa
atgagtgccaagccccctttccgtaaaaccatcgctatgccgatcctggacgacatcgatcagaagatggtcgatgagcttcgttctgtcggcgaagacagcgcaaagaaggctcaggagctggcgcggaacaatatgcgactgggcttcattattcgtcagctgttctccggaacggaggattcgaaccacatggccgccttgcttcgcggctacatcgaaagctctgaaggagcgccactgtga

SEQ ID NO: 336746 - DNA, 1038 bp, Pseudomonas aeruginosa
gtgacagcagtcatcaagtcacttgttccaggcgctgcaatgctgatgctcgcagtaagtgcccatgcaggcttctatatcgaaggctcgcccacgctatcaacagagcggaccagcatgggccgctatcagccatacgagtcgagcgctgacgcccgattcaggcaaccgacagcatcgatgcagccgaagcaggcccgttatgcggacgcagagttgctggtcgatcttgcctacaagcccgtgacccaaatcggaaccggacgcgctgaagtggtcgatggctttgccgacgacgtgccgttcacagctgcgatgtccatgatcgtgccaaccggctggcagatttacaaaagcaaagccctcgacgaaaaggccgtacccaagatggttggctattcgggcgggaagccttggcctgatgttctcgggcaagtcgcagagcgctatgccctccagttcaacatcgactggaaccagcggacaatcatgattaacaagggtcgcgagagcgcccttttccaggcaagccggatcaaagtcattccagagccgccgagggctgttgccgcgcctgtaccgcgtccgggtatggcaggtgcgtcctccaccataacgtccgctgtcgccacagctgcgccatctgctgctcccatttcaacaaggagtgccgtggcaaaaggcactagccaaccagataaatctattgcctcgaaacccgttacggcgaacacagccccggcggcaccgaaagccgaacccattcctacgaagccgctcccgccacctatgccggtagaagtggctttggacgtattgcctggaacgctgcgcgggaatctggaacgcctttccgccaagcaggggtggagcccaccggcatggcagatcgacgccgattacaggatcgatgcgggttacaccctgcgagggaaaaccttcgaggaggtgattgccaagttgctcctgctgcatcccgtttatgcggatatcaggcaggccgagcgaaaagtttacgtgaccggagaggttaaataa

SEQ ID NO: 336747 - DNA, 1860 bp, Pseudomonas aeruginosa
atgaaaatcaaatacgccctggtggcattggccgtggcgctctccgtgtctgggtgcacaaccaagatcggtgacggccccaaagcacgccagctcaacaaggagctggagcagtggaagctggacatggaaaagccgcgcgaatcgcgggtccagatcaccaatattccccaagccggccgccgaatcgaactagaaaagcaccagtggctaaaggcgatccgcgtgacccttgctttcgaccgcaaggagacgatcacagcggccgcaattgcccaggccctgaaagggaagggcatcaacgtgatgccgaccctgccgctggatgggtatgtctacaacggatatggcatcaccaacctcgacggtgaaacggcgctgcgtgtgttattcgggcctatggggctcgactacaacatcgacgacgacggcaagtatgtggcagtcgtgccgagccgctcccgcaccttctacctgaagttcggcaataaagacgtcaagtacaccagcggttccatgaccggcaacgttggtggcggcggtaccagtggcagttccggtggcacaagcactggcggccaaactggcggcatgaatggccagggcggtctatcaaccggtgtaacaactgggttggacaccggtaaaggcgagataagcatcaactacaaattctgggatgacatccggaaagaaatggacgagatgctgacccagtgcgtgccgacctacagcgcaccgtcggtatccacagcgtcgatttcaagcatgcctcctttgcctcccgagatgggcggcgttggtgggatgccgggtgtgatgccatcgccgatgcaagtgcaggcggttcaacaagcacaagccagtgctgcaccgagtagctcgggcggccaggtgtgcagcaatcagaaggtgggcacttactcgataaacccagcgaccggtgcgatcaccgttcaggcaccgcattgggttaccgagcccattgcgaactacctgcaaaccgtcaagaacgacaacaacgtcaccctcgtgtacgagggcatgctgatctcggtgaccacgagcaaagagaacagcgagggtatcgacctccagggcttcgccagtttcgcctcgggcaagtggggcatggtggtatcgaacaacgccttgggcggtgtaacggtcagcccagtaattcctggtggcaatgcaccgaccgtgacccccggctcggacaccgttgccaatagcttcctcgggttcaagaagatgcagggaaacccggcccaggccttccttgcataccttgaggctaatggtgaattcaccatcaagcaaaagccgcgtgttgcttccacaaacggtatgcctggcgagttcgcccagtacgacacgatctacgtcaaccaggtgaaccagaacaccagctcgggcaatagcggatcagctgctgtgggtacgagcaaccagctgctgcctttcaaggtcggctcgttgctccggatcgttccgttctatgactcggagactggcattgtccgcagcccgatcacgttctcccagtcagtgaaaacaggtgatttcaaaagcacccagtacatcactggtgcagacggtgagatcagtcagattccgagcgttatcccccagatcagggatagcaactacgccggggaggtgctgatgaaggatggcgacatgatcatcctcgggggacaagcatctgaacagtccgattccagtggctctggcatgccgggctataacgccgatggaaacttcctgtccggctttatggggcaaaagcaacacaaaaaccaagttagtacctactacttggcgttgaccctcaaagtacatgacggcaacaaataa

SEQ ID NO: 336748 - DNA, 1032 bp, Pseudomonas aeruginosa
atgaacagtaaacgccaagccggctttacgcttatcgagctgatggtggtcatcgccattttcggtgtgattctctacatctccgggccgctgattaactctgcattcatgttctatgaagctgcaaagcgaaatgaagtggtgtatgacaaccaggagatcgccggggcgctactgagtttcgctaggaatagcaatggcgggcgactgccggcaccctataccggtggaagcataaactccggggtttataatccggccgatgtaacggcaacaggtactgctctaacgtccgaactgagaaattctggtgtgccggtgtcgcagataaacacagatagtactgcaacgaagaatgttaaggtttacaggcgagtagctggactcacctacaacgttcctctttactttgttactggaagtcaggtttcgctgacctacgatgttggagcgcttgtccaaacagagtgcggccaggcctctgcatgcaatactggtacgccaggtgattctgccgcattaaccgctgccaacatcggcacatgggttgagtcgggagctgactatggcgcagtggtattcagcacactaccagcccagaaagacatgcttgctttaacaactggccgactcaataggcttgctgatcgtctttcctctgagttttacactcgccaacgtttggcagcggcaaacagcacaacaaacttctttcctctaccaacaaatgctggcgctctgaactacgcaggtcgaaatcctgtaactaatatgggttgccataatgggtggtatccgctgaatagcgctctcgtaaacattcttgcgcagattggcttggatcaagctgagtatggtgtgactgcatggggaggaagtattgaatattgccaggactatgatccgaccgctgtaggtacgggtactgcaaatgtgccgccgcattacgcagcgctgcgcgtgaacaagaatctgtcagcctccgctgcaccgactggtgtggctggttcagatgtcgttattaccttctga

SEQ ID NO: 336749 - DNA, 594 bp, Pseudomonas aeruginosa
atgattaagaaacggggccaagcaggctttactttgatcgagatgatggttgttattgcagtcgtcggcgtcttgatcctcatcgtcgcttcgtcgatgcggggtagcagcgattcggcgaacgccacagcgattcggtccagtgccaaaaccctggcgaccgccatcggttatctcaacaccacgctcgggaccggcctgagcgcaacagccaacgcgctgcccaaatctggcttgaacatgatggatgtcatcatgactggcgaagactcggtgagcgcaaccttcctgaacgcataccgtcaacagaagatgcgtccactggaaagtgaataccgcgtgatccagcgcgcatccggtaccactccaggcacctatcaactggtcacctatccaatcaccttcgtagcgtgcacgaccggtaaagtctgcatccaatatcagaatgttccgtctgagactgttggtgaactggcgacccgttcaggcatcaccaacttcaacgccgctactgcgaaaacgaccggcgctgtccgctatacggcagctgatggccagggttatcacactgtgaccatggaagcgacgccgtaa

SEQ ID NO: 336750 - DNA, 792 bp, Pseudomonas aeruginosa
atgctgccattctttgcgctgtccattggggcttttgtcttgttctgcgtcatggcggccatgccgcccatggaacgaatctttcatgcatatgacaacaagatcaagtcagagcggataagtgtgataggtggagcagtaaggtctcgttatctagagaacccagcaggtggcttaatcgcccctgctgatctagcgcttattcctggctacgagtacttggactcctataaggctgaaatatttcaaaccggtaacgcgcaaaacattaatgattcagtatggcgctttagcaggtttgcaatatggttcccttcaaccggaatggacattgatccggctacctacctggatgcggcaaataattcttgtgggacaggcacttttgcggctgcaacaagttggtgcggtaattcacaaagcttatgggcaaagtacgaaactcggattgagaatggctcattgctgatgggcgagaaagcccgtttggtcaaagtggtttctaagttctatagacgatatagcgctgacagaaagttcaccagtttggctaatggttcatacgcgactttggcttcactgaccggctatgccggagttgcgactggctgcaccggagtacgcacctatgatggaattccatttacttgcgatgaactcttcaacgcttggggtgtgcctatagtcgtcaaccaggttaccgccaagcgcattgcgctggttaatcggaccggtgtgattaactcaaatggccagccggtacggttggcagaagaagctgctttggaataa

SEQ ID NO: 336751 - DNA, 1905 bp, Pseudomonas aeruginosa
atgaacgcagtcagcggccagccgaacattaagccctaccttgataagtggagatttgacgagtccgcgccgaattgcatcaaattgcatgctgcgcgttgcgcgcagtataagggtctcaaagtagggcagattgttatcgcactggagttggcacctaaagaggatgtggagcggtgtattgcaatgccaatgcctgttggcaccaaaaccttggattggctgcgtacgaacggtgtcagaaacatcacgctccgcaaagatgaaatcctctgtataagcaatggcgatgcttatatgagcgaacactgtccggagatgacggttcacagtgttgttgccgagatggaggatgggacaaacaagcagcgcctcttggaagagaactcgcggcatggatttatacctttgtcatatggccagcgccaagtattgctgtttaatgaccacgacaagtacctagaattcaaaactggcgataagcacgcccgtgatcaacttgaattcgtcaagcaattaaagaaaagcggtgggaatcctcgccttgatgagtttctttgggtcgtaggttctgatgctgcgtcaagtgaatacaggaaaggtctgtcatccgacaatggtgatgatgatggattctcagcttctcagtacattacagaactgacagcaaaagagagcgtagtccttgataagtttgtaaacatcattaaccagggccttgctcaggagtgtaacgacgtggctttggagccacatcgtgagcaaaataaaacctttgtttatttcaggcagtaccagcgattagttaagacaaatatcgaattgtcaggtagcgaaagagatgacctaattcgggttcttgccacacgaagtaaggcaaacaagggcatgggtaaaattacccagccacgggatggtaacctgattttcactggaaagaacggttcggcattcttgcgcctgagttttattccattggaaaactccaaaggagagtcaatttcagtatccattcgtctgttacctcgggacgagaaggttatctccctggagaaactgaatatcccagagccaattacagaaatcctgaagttttgcgcaacgcgtagtcgcgggctctttttggtctgcggcccgacaaactcaggtaagtcaacaactgtcggcgggatgctgtgccataacaatgatgtattcagtacatcgctgaagagaatgtctattgaacaaccagtagagcggttcctgccaaataccgaccacgtggatgtgtcacagttgcggtttgagcataaaggaactgataacttcttcgaagctcttcgcgcattccttcggcatgaccctgacgtgatcaacgttggtgaaattcgagacacccagtcctgcggagtgacggtggatgctgcaaacaccggccacttggttacggcaacgacccacgccaatgatcctgttatgggattccgccgccttgccagtttcctcccgccgcaacggatattcgatctggttagcgtacttatgggtatcctcgcgcagcggcttgtgaagtgcgtttgtaagaagtgtaaagtagaaaaggaatttgatgagaagtcgagaaagctgctcaggttgtgggcaaagaacaacggcgttgccctccctgaagaaagtctgccagaaacgtatgtgacggccaaaaaaggcggctgtaaagaatgcgttgatggttactcatcaatgcggccgatccatgggcttctcctgatgaatcctgaaatcagggcgcttcttctttcaaaggatgaaaatgattggatgaaagctcaagctctcagtgatcaagagttctctcttttcaatgctgcatttgagttgtttaaagctcataaaattgaccttgaaaccttgatgctgtga

SEQ ID NO: 336752 - DNA, 975 bp, Pseudomonas aeruginosa
atggtgccgaaatggagaacacaattctttgcagcatcgaagcttgtgagcaacaagggtcttgctttccatgtcgcagttaaatctatctttggtcctaatgagctttctgccatccgtgcgggagaagaatcaggaaagctttttgaggttttcgaccagttgtgggagtctgcaaagacccagcagcaaatcaacaaacttatgaggggtatccttcccccatttgcagtaatgtttggtgctctggtgatttctattgcctttttcctgatccttgtgccgaccttgataagaaatatggccggcacggttaggtcttttgagccaagctttgctgtacgcgccgccctgcaatgccaggagtgggtaataactaacgcgtcaactctttctgttagcttggctctctttgctttcgtggtcgctggcctcttgtcttctcctaatttcagagagtcagccggccaacttctcgtacgagtgtgcattagattcgagccttttggcattgcgtatgcgaacctgaaattcggcttcgtttcgaagtaccttgaaattgtatcgattgccggcgtgcctgcggacgagcgtctagttatcgtttatgggcttatcccagagccaatcaggcaggcgttcgatagatttaaagccgaagtaattgccaaaggccttaagggcgcggcaagcggtatcagagatgatgaatctgacccaagaacatctttggtgcagtggcccccatatttccgtttagcactttttcagtcgcatgaaacaggcatgtgggatgagccaatgcgcgagtacggcatcgttctagttgaggacgggcaagaacggctggaagctatcattaaactcatgatgcgcttcgctattctgggtgccggtttgttacttcttatccctgtttccctcgtgtacggaaccatgggtgaaatccttattctccgtatgcgccagctctaa

SEQ ID NO: 336753 - DNA, 1212 bp, Pseudomonas aeruginosa
atgtcaacccgcttcgtttcttcccaagatgaattgttcgaacttattagtgacaaccgtcgggaggctatattcgttggtggcgatctggtctatgtgacaatcgacaaggagcgcctgaattctggtgacttggatgttggcgagtatgttgttcagccgccaagattggctgctcgtggaaagatttatgattccagcagtcgagctaacatgtatcttggtattcgcaaagaatgcattcagtacctcattgattacaagggctcggtctacttcctagccgaccagtatctggcctatggcctttctcttcgttcaaacactattgttgttggtggtggcgaaattggtcatggcgcttataatcttgaaatatttatctttactggccagcgcctggtagctactcaagagcgaaactgttcgctcagcctaaatgagcttgaactgatattcagtcaaattcgccttgactaccctgagcatattatccattggtgttcgccgcttcctgatccgccgttatgctcgttcacgaacgattctgagctttttgtagaggttgaatctacgcctctcaataacccggtaaaaaagaaaatacaccagaagcaagtcaagcaggaggagtcgtatggactcttgccggcaattgggatggtgtcatttttcgcagttgttttctgcgcagcagttggtatcccttggtcaggcataagctctgagcgtcaggaatacaaaaatgaaattaaggggtttgagcaagtttacagtaatagctcccactcccttgatcttctccggcatcgcaagtcctttttggatcaacaaccctcacattttcaaaggatgcaggttactgaccatttgcttacgcaaatctctaggttgggaggggttgtaatcaagaaagtagcagttttcgatgaggctgatcaggaagctaccctaaacagtctcgggactagcacaacatcacgagtggattttaaagttgaaataatggtccctgtggagtcagatcaatcagcgcgtgaccaggcagagccgatcttggcgcaactcaaccattccactggcatgaacttcatgctaaccgaccatgccggagtacatgagaaaagaggggagaaatcatatcctttttggatttataggttgagcggcacaattaactctcctgaggcggaggttggacatggtaactaa

SEQ ID NO: 336754 - DNA, 315 bp, Pseudomonas aeruginosa
atgctcgttgactgctacgaagatgggaagtcggtgcgccgtctggttcgcctagccaacgtcatcatcagcgacaagcatgctttttccgcttgggtggaagcctacaagctcaaaggcatccagctcgatttctatcgcccgattggccaggtaaatggctatgacgtatggggtgtagtgatctggcaccacaaaacgttgctgaacgttcagcctgtcgagatgggcatcgccgttcctgaaaagaatcctccaaccaccgtcgtgaaccagatatttgctggttactattggaacaaggcaaagggctga

SEQ ID NO: 336755 - DNA, 360 bp, Pseudomonas aeruginosa
atggtcgaaggcggccgaaatgggatggccaacctgaactcaaatgggtcccgcgattacggcgttgcgcagatcaactctgcatggctgccgaagaccaaggaggttggtgtgactgccgacgaccttcagcacaatgcgtgcaagaacctatggacggccggatggatcatgcggcgctgtctcaacaagttcggcaactcgttctggcatggggtcggttgctatcacacaggtgaaaacccgaagtctcctgatcagcttgagcgtcagcgttcctacgccaggaaggtttacaactccatcgttcgcatcaacggacccttcaatcagtggttgatcagcggagtagcacaatga

SEQ ID NO: 336756 - DNA, 261 bp, Pseudomonas aeruginosa
atgaaaaccaaggccggcgcaatcttcgcgtcgcttttcttcgcagcatcggttgccatggctgaagacggaaagtccagctcgggcggttcagacggcatcatgacgggagacgccgcaaaagcatgcaacatgatgctgtgcctgagcgatccatctggcaaaggcttgcccgagtgcaagaaaccgctggatgactactacgacatgaagccaaagaagcgcccgaagtttctgaaaaaatgcccgatggtgaaatga

SEQ ID NO: 336757 - DNA, 1875 bp, Pseudomonas aeruginosa
atgacgctgaagctgctgatcaaggcggggcttgcccccgcttgggactttgacgcaagcgtacccagaagcttgagcttcgccgcgaaaatcatcgagccaacctgcctgaggcttggcttcaagtacccacggattgtcgccgacattttcctcggctttatcgatagggttaagggtgatctcaagactccggccgaggtttttgcccagggcgactgggaccagaagtacagctggttcgtggagatgttcgatcactatgagaacgtcagaaagaagcgcggtgtgcgctttttctccgatctcatctatgaccccatcaagatcattgaggaaaacccgaaagctgctgctgcggtagctaacaggtatcgccacatcatcctcgacgagtttcaagacatttgtgaggctcagtaccggctggttaagtacactgccggcactcgggctcgaatcatggtcgttggtgatgacgaccagacgatctacatgtggcgtggcgctcagccgaattacatcctcaccgacttccaacgggacttccctgagtgcaaggtctatcggctaaccaagacctggcggtatggccatgtgctgagcatggctgcgaactatgtcatctcacacaacaccatccgcgcgccgaagctctgcatttcaggcgacgacacaccagataccgtggtcaacatggacttcgaggactccgaagggagtacattcaccaagatcgtgaccgattgggttaaggagggaaggaggctatctgatatcgcagtgctgttcaggacatactctcgcagtggcctctatcagttcctcttgctccaagaggggattccgttccggatggagggtggcgatgacgcgaatgtactcgacaaccgctggatttcgtcgattctcgggtggatgtaccttgcggcggggtacatagcagagcggccctttgctggtgagccggacattggttctatcctggaacttcgcacattgcttctggctcctagcctcggcctgtccagggacggcttagacgaactttcgaagcaagtactcatgtacccgaatgacatggatggttttgttaaatttgttcaaaccggtcttaaagggactgaagggcaccttagcgagaagattctcaaacgcggcaagatgtggaagaagatcagatcacttagggatcagaagcatcagatcaacgcgttcaatctggccgagcagctgatcctcgcactagaggttaaagaatctatctacaaaggtgccaagacagaagacgaggcggaagagcagtgggccgtagtcgaagccttcatctcatacatcaagtcaaattcaaaggactccctagtcgatttcctcaaacatattggcgatctgaagtcattttcagataaggcgaaaggggcaactgatgccgtcgatatgatgagcatccataggtcaaaaggcctggagtggccatgcgtgatcatgcccggtctcaatcagggaggcttcccttacaaacctcgcaagaagctccccgaggaacaagaagacctgcgcatccaagatgagcgcaggcttttctatgttgccatgactcgtgccgttcagttcctccacatgctgtgtccccccgatgcggctttgatccaatggcatcgcgcaggtaagtccggcgttccgccacatatggactacagcccatcaatcgctagtcaattcctttatgaaagtaatcttgtcctttcaaaattaatctcggtttcgattaaaaaagacgttccgggtttgaaagcaggcaatcctgaggtatataacgaataccttcgacagctaggtataaatcgagcagttcaaaaactggaatcagcttaa

SEQ ID NO: 336758 - DNA, 366 bp, Pseudomonas aeruginosa
atggcgaatctcatccacgaatacctcgaactggtcgcgaagcgtaatgctctcgacgctcaaatcgccgcaatcgaagcgaatcccgaatttgcgcaacagcgcgagttcaacgacaagctccaggctctgatgcaagactacggcaagaacgctaaccaggttttctccatcctcgatccgagtcgcagccaagcctcaccgcgtgctgagcgtgcaaaacggaccttcaagaagaaggtctacaccaatcctcaaaccggacagcaggtgcaccgcgctggcggtcccttcccctcgctgttgaagtcttggatggatgctcatggcaaggaagaagtagagagctgggccaaagaggtctga

SEQ ID NO: 336759 - DNA, 2649 bp, Pseudomonas aeruginosa
atggataacccccagcagtttgccattaagaccgaccggattattgttgatcccagaacagttctacaaaagtgctgggatggcctcgcataccctgcaattcctttggcatgggccgttattagcacaataattactgcattttgggcaggctttattccgttcgcgttttttgtttttggatttctctggctagcagtcgtgagcaagccagacactctgccaatacacctgcctattgatgcggacaagatcgacaaaaatgatccaaagccaggagagaactcaggctactacaatgcgcgtggaagtttcttcattggaaggattaggaagctaggttttgaagtctgggttaacttcaaagctcttactcaacacttcctgatctttggaactacaggtgccggtaaaaccgagagcctagtaagttacatcgtcaactttctcgcggtcggctctggcgtggcgtttcaagacgccaaggccgcgcctaaagcaatgttgcagctggcaacattctgtcgaatatttgcccgtgactgcgagttcagagtaacgaactacattactggtctctcagcgaaaaaacgcgatccagctgagcgcgtatctaacgatgccgctgtattcgcaactggtaacgccgagtcgaacaccaaccttcttgtgtctttaatgcccccatcgtccggagacaacaagatatttggcgaacgtgctgttgccctagttgcggcggagatgcccgcactaaccgatttacgtgagcttgggaaacttcaaatcgacccaggcgttattcgccgttacatgtccttcaaggcttttgcgagccttttccgtgacaacaatatcagcaagcgaagtcgagatgcattgcaggcttatcttgaaagcttgcctggctacgatgaaaagaaagacatcaacgatcaacctgaagaggtaacaaggcagttcggtttcgcccaagcctacttcacacgatctctagcttcgctgtctgacacctatggccatatttacttagttgggcagggagagattgactaccaggatgctgttctaaacggccgaattttgctaactcttctgccgagtatggaaaagtctggtgaagaactagcaaaccttggcaagatcgttctgaccgcgactaagaatggcatggttgttggccttggcaccgtctttgaaggtagcgttgatgatatcgttcacaaccttcccacgaactcggaaattccctatggcatcatgaacgatgaaaatgcctacatgctgattgagggtcaagaaatcatgaacgcgcaggcgcgtggtcttggcttcggcatcttcactggcacgcaggacgcgcccggcatgctgcttaacattgagaagacaactaaacaaatcttctcaaactccgcgtttaagcaatttatgtatattgacgacaaggacacaactgaccttgcagtcgatcttgcaggtgaagctagcttccttatccgaaatcagtacgagcgtatcggagacatgggcaaccattacgcaggacccaatgcatcgctcgacaaaaagaatatattgacgcctgaaatgatcaagcagcagaagcttggtcaggcgtatgtaacttatcaaggcaagatgcacgcgatgcaggtattcaaccatggcatccaggagaagcacaaagacccacgcttcaagtacatctcgcactggtactcgtgccggcttgcgaaggttaaagttccaacagaacaggaaatggctgacctgatcaagatggaccctcgccctgagtggagaagcctcgctgatctactcactgataacgcgcagacaatgcagagggacatgacatgctacttccagtcccaacttgctgtccaaaaaatcgctcaacagtacgcggcaaatagcgagatgttcgacatgacggctgagatttttgccgcacgttcgatgctcgcggaacagatcgagcccgccaccgggctacttggcaccatcgtcaaactcgctccgcgcacgccggcagactcactgaaagtcctggttgagatcgcgcaaacgagcacaagcgggatggttgcgcttcaaaatatggccaacgaggctgacctcgactccattctcgccgcagaggccgccggcatctcgtcagctgggcttccagaagacgacgctgctgggaaatcctctactggtggaagtacaggcggcatgcaaccgaaatcaacgcccaccaaggccccagacagccccctggatgcgttcttggagacggatgagccattgccgcacccagcgcccaaacctaatgctgccgctgagattgcagctcaagtgatggctgaacacccaattgcgccgccacgcccaatgactgacgttgccatggccgtagagaagaaccttgatctgatgccctggatgagttcgcaggtcgaatacgacacggttcgccactccctaatccaggctcagatcgtcttgacaggcgacacgcagacgctagccgagcaatcagctgacgctgaccttgcggagatggcatcgacgatgcagtaccctaaaactaaatacgcgccagatgagaactctcgcgctcgtgttcgcagcgtgctccagagctggacgaaagattga

SEQ ID NO: 336760 - DNA, 1425 bp, Pseudomonas aeruginosa
atgagtagcacgagagaaacgtccccaggacaagactttgtaatgttcgtttctctgggatcaatgttgatcttcgggggatggtttatagcccgcgaaccggttatgtgggtgagtttctacgcttcatattatttaatgaaggcatatattcatttgcccttcttaatgaccaagacagaatacgcgtcacttgtatctgcctacaacgcaattcccaatattgatcctacgaaattcggcattgcgtcgctaatgcagctatgggaataccatggttatgtatggcggtggcttatgatgcccttacttctgttcttcggatggaagacaaataagctcaccgtaagatacaaatacaggcgtgaaatcaagtctgtttatgaccttatcgaaattcaagcgaagcacttccctgctagcgccatcgtgcgcggaaaagatttgcttgcgatgcatccgaagaaaggcccttgggcgacatacgaccttcctctggacttcgctctcgaccatcagatgctttatgcatcagtaaaggccgtaactgctgacgatcagattgatgaaaagactatggttcctattccggcgttcacaccggaccagaagctccagccttttcctatcaagcgaaaggaaatgaacattccgtcgcatcagtatgttctttttaacgcaaaaaaagcgacagaggccttcactgcacagttaggccctctatgggctggccctgaaaagcttcctcctctactcaaagcactctacgcaatattcatcactcagggcgctggcgaccaggcggaagcctacaaaatggcaagccaaatcgccttcacctgggtagagggggaagtagatgatcagggaaatgtgaagactccgcacagggcaaacacctcgggcgttgacgaactcattaagaaacacgggaaacatcccaggattactgaaatcgtcaatcgccatgctcatacgtacaacgttctggttgagttgcttgcttgggcgcgcacaaaaggccgattgtacaactcaatcttcggctgggtccggccagtaaaccgaacgctcttttttgcaatcatcgatcaaggggctcagtgtccattctgggagtccgcaggactctgggcacacgcacaaattgagcgtcggagcaataagcgcattgtccagccaatggtagccggtgcagttatcgccatgagggacgttatgtcccgagagcactggattgatccgggggaatattctgaggagttccaacggaacttggtcctcaaggcaaacgcattgcttgaagctgagcaggaaaagcaacgtcagagcaagaaagcaccagggccgcctccccgcgcacagaaaactacaccgacccgcccaaatgcaaatgccgggcggcaagaagatggtgaaccataa

SEQ ID NO: 336761 - DNA, 1062 bp, Pseudomonas aeruginosa
atgtcctcagactcccgagcccccgctaacatccaagcctcccctctggaagactggatcgctaacgcgcagcatgccccatccgtcttctctgatgaggacctggaagaacggcttcgcgtagcagcttcaatgtcgggcgcacgtcctagctcgcaagcgccctcgcacagcgcgctgctggaaaatctgtccaaagcgataggtcatagcgaatacgacaaccaaactgatgttgcagtccgcgcagcagccaacggcgtcaaggtacttgcccccctgctcacggccatcgtgaagtgggtccctgccgagaactcagaacagatcaccggactcatggggcaggtactgagccgcctcaaggacgactcggccgaagtcatcaaggcatttggtgttgacccccttgacgcaccggcctggctgtcgagtcaggtcagtggaatgctgatgccgatcatggtgagcgctgttgatcgcaacaacggtgcaatcttcgatcccgatgacagccgctatctcacgccgatcctgcgcctggccaatgaagccaaagaggctgggcttgcttctcccctacagccgatttcaactgagtggcaactcatacaggctctctccagcgcaactgcggcagtcctgactgagtaccatgccttcaactacttccacgaggaagccgagtcggttgcgagcacagtaagcgacttccttcaggatcgagtggtgtacggcacgctggctgaactgacgaaccagtgggggctgaatgaacgtgagcgggcatatctcggctgctctcttctaacccaagccggcaacatgcttgccagctgctggactagcgagtccagcaatgccatggagaacctcaaacagcagacaccggacgttcgaaacgatgcccttgtgaacggatatccactcgattttatcttcgacgcattcgagcgggtttaccgtggcgttgaactgagccagttgagcgctctgcgctccctgatgcctcatcgcgaacgtgtgaaccaggagccgagcaatgcgccgggcatgcgttaa

SEQ ID NO: 336762 - DNA, 603 bp, Pseudomonas aeruginosa
atggttcaatcaagaattcaagagcagttgaccgtagatcgcctcgtcggctttctcgaactggctgctgtaaagcacggagcccgatatttttccatccgtgatgagtacctgccattgtcggctgcccttgatccttgcggccccgtcgcgatcaccgtcgtgggtcatgccgccgtactggcccagatggttgacccagacaaaccgctggcagtcgagaccttcccattcatggccagcgacaacccggacgctccactcggccgggaaatcacgtaccgcaggaatgccttgtccccagctcgcgctctctttctcgtggattccgcgttggagcatgccatttgcgtcgggatgaagtcccttggctactcaccaagcgaatgggacgcgctcgacgatgagcagaaagcggttcccctggagccctacttcgacgacctgcgggacaactggcttttcgatgatcttcagcgagccagcccggctgatttggtgctcaagtgcccagaactgttcaaccgctcggcgcttgagttgcgcatggcatcgcaagatcaggaggtaaggaatgtcctcagactcccgagcccccgctaa

SEQ ID NO: 336763 - DNA, 714 bp, Pseudomonas aeruginosa
atgctttgtgcaaacctcagtcaatacgatcaggcagccgatacgatgattcggctgcttccgctcgtgctcggcgacgacacgattcgtggtgtcctgaagcacctcgacgcaggccattccgagttacgcttggaggtaaagctccgcgatctcgggtgtgctgtggagatggagtgggactcggcgctggacgccttcaagacgcgtgttgacgggatgtctgccggcctgattctgggagacgagcttcgcggttccctcggaaaaccagtccccaacaactacaagacctgctctgtgcggttgtccgcagagcttgatatctggaggcgtggagtcgttgatctcgataggggagaggtcctggcatatacggcaattccagggttggccacgctcggggccagcgcgttcctcactgataccgctgcactcgatggtgcggtcagtcttgatgaagaaggtatcgacgcacttcatctggaattgcaggagtttgacccaggccgcgctcttttcaggcttggcatgactgatacacgccgcctccaagaccgcctcagctctcctgaagactcagacccggagcttgccccggcacctgccaggtcgccggccatggagaagctggaggagttgcttagtctcgtggcagatcaccacgaatcctatggtcctccgaccccggccccgtcaaaggggttgcgatga

SEQ ID NO: 336764 - DNA, 687 bp, Pseudomonas aeruginosa
atgagttggaagcgtgccgccacgcttcctggcatcgagctggtcaaatgggttgccttgcttttgatggtgggcgatcacacgaatgcctatcttgcgaaatactccatcccctacctctatgagcttggccggattgccttccccctgttcgcgctgatttttgccttcaatctcgcgcgtcccggtgtaatcgaatctggtgcaattgctcgcgccgcgatgcggcttgcagtgattggggttgtctcgcttctgcccatctactgcatagaggggcggccgggcggcatcatgccgatcaacatcatgtttacgttgctgctggggctgatttgcatttggggagcgcttgagcagaaagccgcccccttgtttcttgcgatagtgggcctggttctgttcggtgggtttgtggagtacttctggccaggctgcctgctagtgccattggcgttttggtggttccgcacacgatctgtctcagcaggcatcgcagtgtcagttggggtagcgagtttggtttggataaacgggaatcactgggctctactcgcgatcccgatcttcttcgtactgggttcccttcaggtgcgaatccctcgaataaaatggttcttctacgccttttacccgcttcacttgggactgatcgccgccttacaacacgtcatcccagcaccatag

SEQ ID NO: 336765 - DNA, 1380 bp, Pseudomonas aeruginosa
atgacggatagcaaaccccttggtgacgctgccgagcgcgcgatccagaaccagttgaaagctctccagatcgcgaacggctacttcaatgctcaccttcaggatcaagaagccgtggagttcctgaaggcgcgcaaggccgacagcctagcgatccggcgtttcaagcttgggtatgctccgaacaactggcgcggcctttgtgaccactacagcaaggcgaccatcgcccacgcggcacacgacgctggccttctgtccaagcaagccaactcaaaccgctacctggacttcttcaggggccggctgatgttccccatccactcccttgacgggaggatagtcggttacggtgggcgaattgtcgttcaggagcctgacccggagaagaaggcccccaagttcatcaacacgcctgaaactgccctttttgacaaaggcagcatgctctacggcctgtacgaacatcagaacctgatccggtccaccagagaagcaaccctcgtagagggttacatggacgtgatcacgacatcgatcaatggccatgacacgactgtcgccccgatgggcaccgccttcactgatgcccagctacgtctgctccaaatgctgggtgtccgccggctattcatctgcctggatggcgatggcgctggccaggctgctgccgcgcgcacgctgaacgtgatcatgcagagctacgatccttcgatggagatcagggtcgtaacccttcccgataaccatgaccctgactccttcatccgggagttcggcggcaatgctttcgcgcagcagaagcaagcagccacaagcctggccgattacatccactccctgctgatcaagggcattcccgagaagccatgcctggaagacaaggcgctttatctgcacaggcttgaaacctacacagagcatgcgtgcggggagcttctggaacaactcatcgctcaggcatccgagtactcgggccttccaccgcacgtaatcggtgatgagtcagtccagcgccgccgaatgtctgcttttgctcactaccaccctctggttgggctagctgctcgctggatgatgttcgacgatcaccgcctgcaaattgctggaaagttccgcaccatacagtcacaggatgaagggttgatggagctggggcagatggccaaggaaatcttggccaacgaaacacccacaaccacgctgaacaacttcgccttagcgcatggcgagctgaatgcgcatgagttcgctgagctgcaacgccactgggctacttggtacaagcccaaagtcatgaaccatcacctggacaacatccgcaacaacccaaacgacgaagtaagccgccgagcgcttcgatctatggtgctgggatga

SEQ ID NO: 336766 - DNA, 513 bp, Pseudomonas aeruginosa
atgatcaacacaatcgcgtctcgcaccctactcctcctcggcctgctgctgtgccctatctgggccatcgctcagccggtttccctcagcgttgccttcgaaggtgtgggcgatggggacacgatctacgtgcgggatactgatcgccagatcagctacagggtgcgatttgcgatgatcgatgccccagagaaaactcaggaatacggacctgaatccaaggcgtcgctcgtccagttgctgaggggagccggccagcttcacctggacgtgtactccaaggaccgctatgggaggctggtcgccatcgtcaaagacgaacgcggccggaacatcaacctccttcaggtaacccaaggggcggcatgggtctattaccggtacgcctcagcacctgaatacgccgacatgatcaatgcattcagcaacgccgagcgcaacgcccagatgcgccggatgggcctatggtcctcccctaccccgcttgagccgtggaaattccggaggcagtga

SEQ ID NO: 336767 - DNA, 447 bp, Pseudomonas aeruginosa
atgggtgagaaaggaagccgaatgcacgtcctggccggcgctgcgatgacaatggatggtcttgcaatccagcctcaaggcgcacgcttcaccctcttatccgatctggtggcagacgtgctgcatgaagttgcgagcatcaagcgagttgcttgggcgtccgtcggcggagtaccggtcttggtgccggtggcgcagggtagggtggcagtcaaagtgcccggcgaatccgatcttcatgcagtggaggtgccggtgcttgtcgcgggtcttctgatctgcatttttgctctggagtacggagtgtttaccgacgcgggcaccaagagagcaggcgtagcggctgagattcagcagctcaagtacggctatcttgcgctgctgaagcattggtgcgagcagcagagtgaaaccatggccggctcggtcctggagcttgttgaatga

SEQ ID NO: 336768 - DNA, 882 bp, Pseudomonas aeruginosa
atgagccgtagctcgaacctgcgccgctcgttaggggcgatgctcgaccgtttgggcctagatgatccattacgcccgcgagccacgcgcaccatgctcgctaaccgggtgttctatctcggggttctgatggagaaggttggccatgccgatcttgctgttggccagcgtgtattggtctgccgtgccagtggcgagtacctgttcgcgatgcagcggaggcccgttgcgctgcgagcgtccacagttgctcttggcaaagaaatggaccttcagcgcggtatccagcagctggagctgaagggcatccattttggcctcagcccaacgttccgcctggcggcgcgcaagatccttcacgatcctggtttcgctgagatgcttctggctctgggcgtcaaaagcgaccagtgcgtgctgttgaaagagcttgccaggataactgtcggtgaatatgttcagggcttgtgctcccattcaccgctgcgcatgcaagccgagcgctcgggaaggctgtctgtcgccgaggaccgcgaactgacccggcaatggcgaggatggctcgcatgcgagaagaaggcagaagcaacgcgctcgctttctgattgggctcgacatggattcgccgttggagtcgatggcagcatgccttatctgttccgctcgaacgatggcctgaccttcactgtgaccgcccaagacgacgcagactcacttcctggtatcaatgaccatgggcggctgtcggtgttcgtggatcgagatcacaagtacgttggcgggtaccgcgacttctgcggccttcctgatcttgagcgacagatcgtagcgtgggcgcgtgagctgaagtcccagtttttgaagggacccggttcgcggtga

SEQ ID NO: 336769 - DNA, 1176 bp, Pseudomonas aeruginosa
atgtggatcatcactcacgacaagcagcatgtacgcgagctttccgccgctgaacgcagccttgtggtccgccacactgaaggttcgttgactcgaaccgagcaggctgatgctgcgtcgctgcttcgcgaaatccgcaagaaatcgtattggcttggctgcgactgtgtttcgaaatccatgccgatcatgaacattgccctgcgggataccgggacgttggtggtccgcaacaatgcgagtggtcccgcccacgatccggcttgtccgttgctcaagcaggaaaccgacaagagttctggtgctgcccggaccgagtacgtcgctcgtgttcaacctgaaggcgtcctgtccctgcataaggactttccctcagattccaccagtccaggcaagactcctactgggacaggctcggtatcgactgggaagagaaagaagctcttgtccttgctgttgacagtcatggaatccgctggccttcacgagttcgatccgggcaacgaaaaagacctatcagcgcagtttcagcgcttccgcgaggccctttggcgcttcagtttggccccccgcgttcctgttcagtcttacagcgacacaaggattgaccgcaggcgtgttgtctcgctttcgatgaatctcaaagagtcgagttcgtttggacaccaccgcaaatacgggctaatggcggatgtggtgtctggtaccgcatcccggaaaatttcactcctggacggatcagaactcgactttttcggccatatagagcgctggactgacgcgcctggtcccttgatggcccttgcaacactcaccacgcaatcagcccgaccgaacttcttcgaactgggccacgtggcaacaatccctgtgctcagcaacaagacgctgctgccggtcagcgacggtgccgagcgagcgcacgtggagtccctgctcgatcttcttcgttggctctatggtaagaaggtccgagtcattctgcgccggccattgttcgcagatagtcattttattgatcttcaaggccgtgggcggcagttgtcggtagacttgtcctcgggcttggtaccaggtgccccgccctccccctcgttcctatcgctggacgagttcgaaggtgatatggacctcctgaagagaaaagtcagcgggttcttccgaaaggacacttga

SEQ ID NO: 336770 - DNA, 978 bp, Pseudomonas aeruginosa
atggtgcacgacgaccgaattttgccaatcgtgagcggtgatcagcctattatcagcgcgatcactccggacatgatcagcgaagtgttcaatgccttcatggtggggtttgcgcccagctctcaggtcacctacagatactgcctgagcgtgatcgctgaagacctcggcttccctcccggcgtacctgttgagcgtcagccgtggcacaccatgacagccaatggcctcgctatcgctatggcgtcctggccgggagccgggctcgcaaaaaaaaccgttcagctctatgtgcacgccgtacgaggattcgcccgcgcgttgatgctgaaaggcttgctaccagcacacgagtacctgctgctacgcgagatgaagccgcccaagggggccaaccgtgttggccgtgggcgtgctgtagagaatcagtaccgcgaccagttgctgaaggattgcatccaggacgagcgtcctcatggggtgcgagatgctgccatgatcgcgacgctcttcggctccggtatgcggcgtgccgaacttgccggcatgcgtctggaaaacctgaaccttgaggaaggcagcgtcgtcgttaccgtgaaaggcggcgatcaggtcatcaagtacattacgagctgggcccttccctacctccgagactgggtggaactgaggctggagaaaacgaaactctacaaggctcccatcttcagcaagatcagcaagagcggcctgatcgggcccgatcagctgaccggccgtggtgtgttctatctgctggagcagcgttgcaagaaagccgggctccccttcctcatcaggccgcacgatgccagaaggacgatgggcaccatgctcatcgaggagcacgatgtgctgcttgcgcaaaaggtactggggcatgccgacctgagtaccacgcgcatctatgacatgcgcgcggaaagggccatcaaaaacgtgatgaagaccctcaaatga

SEQ ID NO: 336771 - DNA, 516 bp, Pseudomonas aeruginosa
atggatgcactaaacaagtacctagaggcaacccaggatcacttaggtgttggtggccagcgctacggcggcgggttcgtcgccatcgtcgctaatcggtcggtcgtcgagtttctatttgagaagctggatgggggcgacttcgacggaacagaagctcaacattttctttgggagaatcccctcttcccgtccgctcatggttccacgccgcaagatgccctcgctaagctgaatggcaaaatcgagcgtctctacgatttttatcgtggagatgacaggggcaagttagtggcggccagacggttttcgctgaaggcgcaatacgacgctgatcagggcgaagagcgtgactggtatgacgttcagtgggtggatgtcgttcgtgatcttcagacgagcgaggcctatttctacgaggcttcgaaagacggttgcgggtatagtgaaaagcgcgacctgaacgcgctgataactttcaaatatgaaggccagttcgccttcctgagggactga

SEQ ID NO: 336772 - DNA, 309 bp, Pseudomonas aeruginosa
atggatgcgaagcatcagactttgcggaactactacctggacaagggacttgttgcgggtcgtgtggcgattgctttgctctggattaacggtgcctggccctacggggccggatgcaccgtcagacttacaccaggaccgtcaggtttccgcaacatcctcatcgagtcggagcttggctctctcgaactccaagcggtagacgaagcgagcgcccagttagtcgagagcgagggtatgtacgtcatccatcaggaccctgagacagggcgctcgtttgagtccaagctttccttgaagggtgcctga

SEQ ID NO: 336773 - DNA, 14508 bp, Pseudomonas aeruginosa
atgagcagcatcgcctccatccttcgtcatgcagaatttgtcgaacgcctggaggcccgctcaggtgaaaccctgttctggaacccggccaccggcctgaaggttgccctcggctccatcgaccggaccgacagagatacgctcgcgtccttcgggtggattgccaccgagccgaaggagaccaccagcatcctggccttgctgcgcctgcgctggccgaagctggaatctcttcatcctgaccatctgggacgccacctcacggcaatctctgccaccgaggcgctggaggcggtaccggaacaggagcgtgggcgtgtcgcacgctggctcattgcacgcgggcgcgcgatgggcattcccggcatggcggaggccatcctggatagcggcgtagcgattcgttccgcagcctcggccgcgccgaccatggacaatccgacccgatacttcatcggcgccgacggccgattcgcctatagcaccagcggcaacgaagtggacgggtacaagctggtcgcacacgatgcgcaaggcagcggcttcacctcgcgggaggatgtctcgtttgaagccctgctgaccccaagctccgaatggtctcccttggactgggagtcggcggcagcgctggccaccgccaccgaggtcgatcagaacaccttcgcgagccacccgagcctcaccagctcgtcgggcatccttcatcgcctggctgagcgctcgccggacgccgtggctcagctggcttcggtggagaagggcggtctgcgatacctgctgggggagcaccaccagcagctgcggagtaggttcctcgacgccccgcgcccggcatggatcaatcagatttgcgatcagcacaacctcgcagcggagcccatggataacctccgccggctggtcgatgcgtggatcgcgctgcgcacaacggatgaagaggcgaaggagttcgtccttccagcaatccgggatactcgcccagagctggctgcctgggatgatgagcgcttgctgggcctgctccgggaatcctttgcccaagtcatcaccaacgcccgcagaagccaaggattcaagccgcaacccatggccttgcgtggtaaagcgccagcaaagaccgaccttcagcctgatagcgtcagggccatcctcaacgctcactacggtgcctcggtggtctccaccctggaagaagccggacgcctcaacatcctcaaatccgccaacgacctgccagccgctatccgtgctgtacatagcgccgaggacctggacctcatcagcggtctttcagtcaatggcgaagtcaccctgatcagcaacatgctggtaccggaaacggttgctggagtgttcctgcatgaagtgggtgagcacgccggtctcgctcgcatgcttggccgcgactacgggcgagtagtcgcccagttcgaccagctgctgcaacagcaggacccctatgcgacatgggcggcgatgcgcgttcccgcttccaccaagcgccacaacatcccgtcggagcgtctggcttacctggtagagcgcgtagccaatgacgctgctccacgtgccggcggcgatgcaggctacgcattgggtcaggagtgcttggccaacttgcgcacctggttgttccgctcgcctacgttccgttggctggagaacgcgggggcgatggacgacttcacgctgagccccaaggacatcgcggctcttgcccgtgaggccgtcaacttctacgcgaactccgtgacgccaggtgtcgcacccgagaagaaccaatggaaggatcagctcggccacgcccagctggaccagctcttcgcggccaccaccgaacagcgcattgacctgctcaacgtaatggagccggcggaaaccctcggctacctctacagcctgaccattctgggcgcaccatccgccttggaaaccatcgagcacttcaagccgacactcgcggaaatcgccgcaggagaacttcaaggcgatctgcgcgtgctggccggggaaattctggcggaagccaatgcactcagcactcgaaacagcctgggagcgcaggtggagcgcgctggtttcgcgatgtgggtagacggcacagccgaaccggcgagcgccaagctcaatctcctgtccaagtcgccggagcatgccggtgagtggcagttgaccaattaccacgcgtcggtaggtgcactgtcctcacagcggttcagcgaccctatggacgcctttgtcctggcccacaacagctcctttgtcgtgagtgacaacgaagcgccagctgtcctgcggcagtgggcagcaactcggtcgccggccacgctcctcgacaaccccacattccgcgagtggttcggtgcgagtcaggtcgtggatgagcagggcctgccgctgatgctctaccacggcacgggggcgagcttcgaacagttcagcgcggaccaccaccgctcggtactcaacagcaagtaccaaggtgatgccttccacttcacccaaagcagtgaagttgcgtcgaagtatgcagatgcttcgcgcaatcactttatcaagaaggagcagattttcgccgctgtggagcgtgaattctccggccctctctcggacctcttccgcatggtggttgagggcggcatggaagcaacagcggaagtatccgttgaggtcatgcgttcctggaacaccgcagctgaagcttatggaatcgacttctacgacttgctcgaactgggtcgttatgtcgaaggctcgcgcttcaactacaaccacaacgacaatgaactgttcaatctcttcagcggctaccgccactacctcccagaggaagtccgcgacatagccgttgcactgaagctcgacgacgtgctgccaaaccagaacgtgatacccgtcttcctgcgcgcggagaatgtcctcttcaccgaggatcgcgaggccgcacgcaacgctcagaaggatggctacgacggcttttgctattcgggcccggattgcgtcgatggcgtgccggagtgggctgtcttctcacctgaccagatcaggaacgcgatcactccgctggagacccagcgccagcccaagcaaggcttttttgcggccaaagggcccacggtacaagaatctcttgtcacatggtcggcgggaactcacgtcctgacgaaggacggaaacttgcagcccgttgttcgaggcgatcacctgaatccccctaccgatggccaggccgtctactctgtgctcgggacatcggccgccggcaacgacaacggcccggtttatctgtccatcagcaacccgtggattccactctcgcgcgatgagctgaccaaccgtgaactcctgctcgcaaagcgccccggtggattcgccggctggttgcgggagaagggctacgacggcattcaggtgggcccatttgccgacggcgaggccgcctcctgggtcatcctggatgaagcgcaggctcgaaccgcaccacaggcgcaggcgcgcgctgaactcaacgccgagtcgaacttcgagacttggttcgccggctccatgatcaaggcacccaacggagaaccgttggtttgctaccacggcactgacagcgacttcgcggagttcgccgagggcgtttcgtacttcagcccgcgctgggactatggccatgtgatgaacaaggcattcgtcctgccagtcttcctgtcggtgaaaaacccgtactgggcctccaccgcgtccgaaatcgagttcatccaccctgaccgtctggcacaactcaaagccgaaggctacgacgccatgatctgggcgaagcgcgacaacctgatgcgtggcgcgtcggggtggggcgatgacaaatctcagatcgcggtcttctacccggagcagatcaagtctgctgtcggcaatcggggcaccttcagtgcgctgagcgccaacatcctgctcgaacaggcattgccgcgcgatgtcgcgttcagcaattggtttggggacagtaaggtcgtagaccaggacggcaagcctctggtggtctatcacggctcgccgaatggagaattcaccgagttcgacacctggccgatgttcttcaccgacaacgccgaggccgctcgtggctatgcggaaggtcggtacgccagagatgataacgacacagctcagcctgttgtcgtcgatgccttcctgagtctccagaacccacgcgtctacaccgaagctgagctgcatgagcttcttccgggtgatgacggcaccgtcgagtggggtgacttcgataacctcgcggaccaacttgaaaatgaagggtatgacggtgtaatcgttcgtggcacctatgactacatgggcggcacgggcgataacgtaaagcgtggccggtatgatcagtttgtcgccttcaggtcctcccagatcaaaagtgcctcgaaaaatcgtgggacctttgacccggccagccagaatatcctcctgacccaggctcaaacacgcgaggcagcattcaatagctggttcgaaggcagcaaggcagtcgatgccgagggcgctccactgctgatgtaccacggcacccgttccgacttcagtgcctttggcaacgtcggcggaaggttcgaggcatccaagggcttctacttcacgacatctgccgatagggcctccctgtacgccgacagcgctgccaacctggccgagggttggaatcctgcatctccgttcgcgcgtgcgccggagcagggggccaacgtcatgccggtgcacctccagatgcgtaacccgctggtcattacccaaaccgaaggtttcagcagcgcagaagatatcctcgacgccaacggcggggagatggtggcggaggccgagcgccagggctacgacggcatcttgttcaagcgcgagaagggtgacgaatacgatcaggtcagtgccgtggtatttcgcccggagcagatcaagagcgccatcggcaaccgtggaaacttcgacccctccagcgcgaacatcctgcaccgcgattcggtaacggttgctgacgctttcaaccaatggtttgaagggagcccagtcgttgatgccagcggcaaaccgttggtcatgtaccacggcacccgctctgctgatcacctcaccgaattcaacctgggccttatcgatggcgtgggccgtaccggcgaccagtacggcactgccgcctatttcacctccgactccgccgacgcatcccgcttcgcggctcttcagggaggtgaaggcggagcagtgctcccggtctacatcagcggtaatgtcctcaacctggacggcccgctgactgccgaacagcagcaacgtctctccctcttcgccagcgcggtgatgctgcccagcgacaaggcccgattcgctttcggccgtacgtcgcgtcgcttcaccagcaccaaggaagcccagtctttcttcgagcgccagcgctcagtctgggagcgcgtcggcgatggaatggaccgcgccctcccggtggtggacacggaaggcgaagagttcgtcatccactacaccgacttcgatgccctgccgcgcatccagacgggggaagaggctcgcgtactgttcagcgccatcggatgggacaatgtgcttgccgccggttttgacggtgtgatgatgacccgtgaaagcggggccaagtgggttgcgatgcacaacccccacggcacagtgaagtctgtattcaatctcggcaccttcgagcggagcagcgccgatatccgtcacgaagcggcgctgcctcgcgaacaggccttctccaactggtttggcagcagtgctgcggtggatgaagctggcaagcccctcgttctctaccacggtaccgcgaagtcgttcgatgagttcgccgacctttgggatacacctatcggcggccagaacttcggtcgcaaggacttctggcactacctgaccccaaacccggaggaggcatcgtactacgcggtcaacgctgacaagcgcaacatgtacctgtacagccagccgaacagtgcgcgggcaaacgttatgccggtctatgccagcatccagaccccgatggtcgttgttccggacgaaacccttccggacttcgacggcatcagttggttcgacatgaaccgcgcagcaatgcgggcggtttacctggaagagccgtacgacggcatcatcatcaagaaccgggacggcagcattgcagccgtggcaaccgaatatccttcgatgatcaagagcgtgttcaatcgcgggaccttcgacgggtacagcgacaacatcctctacagcttcgcgggcgagaacgcgctgaccagcccggccggcatgctcgccgaggccaagcttctccaacagaacggtgccacgcccgaggtgatcctcgccgccactggatggtcgctcgctctcgacggaaaatggcgcttcgaaattgatgacagccaggctgagctgatcaatctgcgtgaaggcgagggcggctacatgtggcgggctgcaccgctgggtgaagtactccaccatccgcagctattcgcggcatacccccgtctggccatgctggacgcgaatatcaccatcgatcccgcctgccagcagccgagcggcaagttcaataccggcactccggccaccgaggagtactttgccatctcgcccgaactgaccgtaattgcgggcaccgtcggtgaggcgttgaaagagatggtccatgaaattcagcacgcaattcaggagggcgagggcttcgctctgggcggcaatccttcccagtttggagagcttgatgagacctcccgccagtacttcaaggcggtggtagacatcgacgaactcgcgcgcgagaacggggtttcaccggtcgtcttcgctgaggcaacggcgctgattcagccacccggcctcgccgaccgcgttgccaccatcgtccagaatggcgactgggaacgctccgtgcgctacgcaatcgaagccctgctccacccgcacgagcgttacaagcgccttgccggcgagatcgaggctcgcagcgccgcagcccgcatgctgcttaccgaagagcaacgcagagccattctcccaagcgaaacagaagatcgctcgtcggatcaggccatcatcacgtggggcaaaggtaagtttgacctgaccggcagactaatggccgacgtgggcacggagcctgcggcgaccatagccattccagttgtcgtggcggacgctatctctgaaaacgcagccgcgacggcaaaaggactcgacatgtccactgaagccaggcttcagcgcgcacgcgatcagggcttcgacaccagcaaggtctggcatcacggttcagagaaggcaggcttcaccgcgttcaacaccgacggcgaaggcaagactgctggtaccggcgctttcttcacatcgcagtccaacgtcgcacgcacgaacagcggtacgcggaaggacgccaaggtcttccagccggaagagcttttcgagaaccctgacattgccggcggtgacatcgaagtcgaacgggagtgggttgtcttcgactcacacggccgagtagtcgagcgcttcgacctggacagctacccgtcggcggccgacgtgatcaacggcaacgacctggaagaaggccactccgttgagcaacgctacacggtgtacgttgaaggcgagagcgaaggcgaggacctcacgcgcgaggaggcgattgaagcgctgcgtggcgcgagcctcaaggagccgggtaactacgaggtatttatccgggcgaaggatatctggaccatcgactgggagggccgtagctggagcgacgggcctactgaaaccgtctggaatgcttacgacgacggggatgtggttgatacctgctactcccagaaggagcttgctgccttcagggagacgtacgccgactgcgagatcgtagaagagcagaacatcattgccgacaacactgacgacgcggctcgaatagcgcgccagatgggctgtgacgctgccttgatcctcaatgtggacgacaacggccggcacggttcaggcggcgacacttccgatgtgctggtggtcttcgacagcgccaacattcgcctgacgaccgccgctttcgaccctgagcactccagctctgacgatatccggctgcgctctgaaaaggcggccagtaaccaccaggtgcagacgcaggccttcaggcagtggttcggcgacagcgttgcagcagcgaacggcgcaccgctagtctgctaccacgggaccggccaggacttcagcagcttcggtagtgacttcaactgggtctcaacttcacccgatctggcgaacgaatacgccgagatgcgtggcgaactgtacgacctgcaaccggcagtcatgccggtgtacatccgagctgaacgtccatttgacgccgaccttacgccatctcacggcagggtcatcgactacatccgtgaagccatccgccaagctaaggccgctggaaggccggtagatatggaggcagcccaaaccgcgctcgacaagattcttgattgtgcgtatcgcgaggaatctgggccgcactatgcgcgccacaacctttggaacgcggcttcgatgtactttggcaaggatggcgcggccgagatcaagggtcttctgcgtacccttggcttcgattcaatcaaactgaccgagcagggccagctgacctacggcgcgctcgatcctcaacagctgaagtctgccatcgcgaacagcggcgaattcgacctggccagtgacgatattcgctatcagatggcctaccacggcacacccttcgaagttgaccagttccgtctggacaagatcaacaccggagagggtaatcagtcattcggctgggggctctacttcacggagacgaaggcggtggctgagttctatcgcaacactctcaccgtcgagcgcggcttcagctacaagacagagacaggcctgactcgcgaagaagtgcttcagcgcgttgcggaggattaccctcgcgagtttctggatggaatcacgcgcccgacaggtgtagctgaccggatcatggatcagatcatctacgccccagaagaaactgggatgcctcgtcagtacaaacccggcactgagcgcgcggccatgtacaaggaactgagccgcgtgatcggccgcaatcctgccgccggcaacctctaccaggttgagctgccggaggacgcagcattcctgttctgggacaaaccacttgaggcgcaatcggagcttgtccaagccgccttcaagaacggctatggtcatttcggtcgctttgctggcatgaccggtggcgcagcctacagaacccttgcgatggagatgggttccaggcaagtgtcgctgatgctcaacagcctgggcattcgtggcaccaaatacctggaccaacagcatcgcggggcaggcgagggtagtcacaacttcgtcatctgggacgaatccgcaattcgtatcactgctgccaatgccgaacaggcttctgcgttgaagcacagcgaggtttcgcccgaggacgctcctatcttcttcagccagttgcaggagcagctgaaaggcatccccgcgcgcctgttcaggaccggctcgcagttcaagcagtggctcaatgcgaacctggccaagctcggcgtgaagcgcgaagaactgttctggacgggtatcaacgaatggcttgatgctcagccgggacagatcaccaaagctcaggtactcgaatacctggaagcgaatggggtccagattgaagaagtttggcaccacgacaactacctgatcaccgaacactggacagcagccaaaagggcagttgaactcgcgcgagagagaggcaagccagccagcgatattgcagcgctccagagcgaagctgaccggctgggcgatctggtcgcctaccaagcgcagcatggcgaccatacgttgcctggtggaaccaactatcgcgagctgctgcttaccctgccgtctgttcccgttccgaccctcccgctggccgatctgccggaccagtacgaggttgtcgaactggcgagtggagcgtttggcatccagccggtcaaccctgcaattaggaacatcttccaccggaagcagtggccaactcgtgaagctgctgtatccgatgcagtgaaagccctcaactccgagcgcgaacagctcgctcttgaggatcacgaagacatggtgttctcaaccgaccactgggagttcacctccaacgtcctggcgcacatccgcatgaatgagcgcagcgacgaaacgggagccaaagtcctcttcgtggaagaaatccaatccgactggggacaggagggcaaagcagaaggcttcggtctacagcagatttggagcatcaagcgcgcggatgggtccttctcccgtttcacctcggacaagggctacgcagagacggaagtcgcgaactttggcggaagcttcacgccggcaggatttgaaggcgtccccaatggcccattcgtcaccgataccaaggcctgggtcaccctcgctctgaaacgagtcctgcggtacgcagcggacaatggcttcgagaagattgccttcatcaacggccagcaggcagttgatcggttcggccttgagaatcctgttggccgaatcgagtacacccgccatgcagcaaccggcatgttcagcgtgaaggtgttcggtatcgaggaagatggcgttggcgggctatgggctcctacgcgtccggtaagtgccgaggaagtggcggccaaaatggggcaggcggtgctcgaccgaatgcttgctggtgaaggcgaaatcagaagtacgagcgagcgcagcgtctatacgctcgtgggtgacttcggtatctcgatgggcggagaaggcatgaagaccttctacgacgaaatcgtaccgcaggtactccgcgacctcatgaaaagacttggcgctgcaccagcgcaatccatgaagctggataccaacatcggggacggtgctgcccagatgagtattgatgtcccgagatcagcaacactgccgatgccactcttcagcatggccgagaccaagcgggcggctgacttcagtacttggtcggcgggcacctacgcagttgacgacgcaggcgagcccctgcttgttttccggggccagcacgggatcagcgacgacgtgttccactcgcgcctgggcagcctctccttcggcgatctgtccgcagcttacacgtatgcaacccaccccaataaccgcagtgataaggcagagcgttcgcgcgtgattccggcctacctctccatccccaacccggtgatcgtgtccaaggatgatccgttcatttccttcagcctgatcgccgaccagcttgggatcgaacgtgcagtcgtaatggctcgtgaactcgcgccgcacatcgaccaatacagctacatggaagagcagggcaccactgtcgccgagctgctcgcagccgacctggaggcggtgcgtactctcgacgccgacgcctatctggtcttcgactcgccgaagtacgtggagtggttcaaggaagcagggttcgatggggcgatccacctcggcaacggcgagacagccggctcggtggaatacaaggtcttttctccggaccaagtacttcatgcagacccggtagcaccagagaccttcctcaacgaaggcaacgtagagcttccatcaggtatggtcgctggcctggccccggagactgttttcgcattgcggaattcgggccccactgtagctccgcaggcaaccctccaattcagcggctctacggagagcgcaaaccaattcgcgcttgagcgccgtggctcttcccgtgcacgtcccattgcctatggtctgccgttcgctgactcgaaatcggtagcccaacacttccgtagcagagccaaacgtggcaactctctgtccacctttgccggtacggttctgaccgcagctacagtgaaaagccttcgcgaggcgcagggcactgcgccagctctcaaagccttccttcagcagcacgggcgggcactcgtgcgcggtgaaaacgcagttcagctactgcgcggtttcattgactccactcgcgcgcgcattgaagaacttgaacaagcccagcacgccagctccacaagcgagggatatcgtgaggctgtcgaaacactcgcggctgaacagaaaagagcattggcatggctcatcacccatgctcatgacttctcgacgacagatgaggtccaagcaatcggcgcaccgctgcatacagactacctcgactgggacaccgccctgacggcgcagagcccgcaggttcaggcggcactggcgaaaaccgggtttgatggtcacttcgaggtctatgacatcgaagcccctgagtctcgggaggtattcaacagccgcatagaggcgcagcactaccgaggccagctggaggcgttggggatcgaggcgaagcttgaggaccagttcccggatgatcatcccgtcaccaccggccgtggtgtataccgagccctctcgatgatcctgggtggcgatcaacatgcaagccagcacctgcaactgctcggagtaccaggaattcgacacctgaccgatcagggcaacacggcttatgtggtcttccacgccggccttgagcaggacgaagtacaacctacccccagccttctttcatcgcagcagggcacagcacgggcgcaacttcgacttccgctcagttcggtggaaggggtgagcgtcggcatgggccttcatcgcgcccgtactgagcttgccagagaggcagggcagcagcgcctgcgcgcgaaggaacgtcacgcggaactaagcgcgcggctggactggtgccgaggcatcccgaacatcgatcctcgcgttgtgcaaggtaccgagcaaggcattgcagctgctcaggcgcttcgcgcttcgcttgcgagttggaaggtaccctccaccagcaatacgatgccgtgggatcagcccatcggcaaagtgctggccgagaagatcaacaccatcgttcgcgtcgatgctgagaagctgcatggccagcaggcgttctactacctggccgacacactcggctcaaacgccaaggcacaggcagcgctcaagcgagccgggatcatcggcgcgcatgaagcagactcccttgtgctgtgggatggtgccagcaagtcgctcgctgaggcgatcaatgccggcgcagagctggaacgcttccacatcgcctaccacgggagttcccagcagatcgagcagttctccctcaaacatgtgggcgagggggagggcgcacaggcttacgggtacgggctgtacttcacccagcgcaagaccgtcgccggcaagtaccaaggcaaccagctcactcacgcgcactggtacgaggatcggctgtacaagtccgccgaggacatggcgaatgcagtagcccccgagatcgcttccaagcatccagaactggctggtgacgtggacggaatcaacgcgcttgaatcagccattcgccggacaatccatgcagcttgctacagcagccaggagcgctatgaggcgcgtctcgcagcgcttgatgatgctacccgtgacgtgtgcatgcatgtggtcaacggcatcctgccggtggacgcagagcagaagggccgcttcttcctcatgccacctggtggggctcgcgcgctgaatgccatgaccgaggctgaacgcacgggattggcagagatcacgcaatgcgtgaactggaagctcaaaccggacatgagcgaagacgatatgcaggcggctttgcagaaatcgctcatgcatgcatgtgatgagacgctctggatcacccagttggcgaagatcgagcagaggcttgttgataagccggatgacgcttacctgctgtccaggaagggggacctcctcgccgggcagcggatggcgcagatggcacaggcatgtgtacgagctgccagccctctcagggtagaaaagccccttggcttcggtgctgtgtaccttgtggatatcagcatccaacccagtcagtatctgcgcttggaccttccgttccagcagcaatccggcgttgtgcagaaagggctcaaggccacctgtgatgattcccggcttgaaaagagcaagcgcacagccttgctcgcggctatcgaagcaaacgacaacggagcgatgctacatggcgctatcgccggccgatgccgggaaagcattcctgttgccgcgcaggtggacgatgagatcaaagcctcgcaggtgcttctcgatgcaggaattgaagggattcagtatcctgatggggagatgaacatcagcggccaaggcttcaacttcgtcgtgttcgacgatgcacgtattcaggttcttggccataccaaccgtcaggtcacgtctgagtttgatgaggtgccggtctatgactgggctgataccgaggccctggagctggcccagctcaacagagtgaccttgcgctga

SEQ ID NO: 336774 - DNA, 669 bp, Pseudomonas aeruginosa
atgcggttccttcaactcgcagttgatgggaacagaatctctcctgaaagcgtgcgagttctccccattcaggttgagcgcggccagaccgccgtaaccgccgaggaagccattggggttggtgctgaccccgaaaactggaacatggtccgggtcgccctctccattgccggcaattcaagcatcggcccggtcgttgataactacgactggaccggtacccgccaggaattccaggaaggccagcacctgcgcgacgcaatgaagcgcggccagtcactgggcatgcgaaacccttcgttcttcacgcataacgaaggtgcaggccacatcatcaacgcggccaaccacatccagaacgtacgccggcagttcaacccctcactgcggactgccgagctgatcgccaccagtgtgcaagacgccgttttggagctggacgtgccgagtctctcgcacgagcgcgccttgttctatctcacccagatcaaaagcgcctttgccagcctgcaagtcgagcgtctgcatgaagctcaaacccttggccgagctgaagctgaggacgcccgtgtagctcaagaccagatcgaccatttgagtgagcacgaccagaactacgaggccgcccccgagcctccccgcaagccttccggcccccgcctgcactga

SEQ ID NO: 336775 - DNA, 1779 bp, Pseudomonas aeruginosa
atgggcgcacagtcagtcgatgggtaccaggcaatcatccctggcaagatagtggtttcccggtccaaagctggggaggtctcggttgaaaaagccgtctacctcggtgacaccctcacctggcaaaccatacccaccgatagcgccgaagccgctgtccctgtagccgcattcgagcgcgcgatggaggcagtccacgagtacggtatcccacaggcctaccgtccgacgactgtcgccaactgggctgccaaccaggcggcgttcttcagcctcatgggcgaatcccatgagaacgctatccgtctcggatggcgctcagcgatctccatcgcccatatgcctgagcaccaagccttcaaggaactgggtgagcgcggcctcgaaaccgacaaggtgcaatggcaacgtgctgaacgcatgttggccaatgctgagcggttcggcatagcccacggtgcgcgcgccgtgctggtgggtctgcgcgatggcttcagccctgctggcaacatggccaccctggacgaccagatggatgctctgtctgaccagttccccgcgctggaagcccgatccctcggcgctgcaatgctacccagacgccccggcgcttccctgcgtttggccgcgcagacgggcgatgtcgagcaaacatccatccacgcccaacacgtcactgtgcactccgtagactccgaggaagaacgcctgcgcaccgtcgcagcctgccgtaaggcactgggagcactctccgggaatacctcctaccagatggccgggatcaccattgagcgtgaaggggagcaggcggtcgcctacgtcagcgctccgcttcgcgcctcactcgccagaaccgcagcggatggccagatcgacgctccctgtgcaatcgcgcgcttgcccgcacagcactcccgccgcgatctcatcattgccgtgcgggatttcctggccgacaacgccattcacgttggacaggccatcaacacgcttgcagccaagctgaatgttccagccggccacgaggtggtgtttccggacatccagtccgacatccgcttcaacctcatcatgaacggaaatgacatctcgctgcgtgttcgtcccaccgaccgggaccgcaccgacatgggggcgctgaacgtcgagttgcgcatcttcaccgacagcccgcacgcgcacctcttcatgaagcagggcgaccccaccaatttccgtggcgtcgatttcgtcccagaaggagccaccttcccgagggccccgaactactccatcctcatcgaccagatcgcaaagaccttcaacgaggcggtccccattgcgctcgccaaggccggtgtgacagcgagtgccggcgctgaagtcgagttcgatgaagacgccgaagacttcgtgatcagccttgtggccagcaagtacaccgaagccgacctggatgccggcgaggccggtgagacggaggaactgatcgagtccgaagcgcatagccttcgcgatctgaagcgcctgatgcgggatcgcggtatctcgcttatgcaggaagaccagtccgtctcgtccggcgcgaccttcgtctcccaaagccccgatgagaatcgggcctacttcgaagacggtgtgcacacctactaccggctcacgctggagaaagttcgcggcgtacaggccacccctgaagatgccgctgaattcgctgaccgtttcaacatcaaacacgcgcatgagcatgcaatccatgctccgaacgagaagcgcggcccagcaatgcgcatgggttaa

SEQ ID NO: 336776 - DNA, 198 bp, Pseudomonas aeruginosa
atgtcagatgaaaagcacctggaagcccttctcgccaccggcaggtggggagggcggggcgcgggctgcatcgtggtttcgaagaacaccggccgcgttcttctgccgctgcgttcggatgaagttctggagccgggtacctggggcaccttcggcagcacgagcaccccgaggatgccgccctgcgtgagctggtag

SEQ ID NO: 336777 - DNA, 1839 bp, Pseudomonas aeruginosa
atggatcgctacatcaagaacccgaacagccagaccgtcaccgaaaaatggtcgggcacctatcacagccttgcaggcctgtatgccgcccccgctatcggatacgtgcccgagcacagtggttatcttgccggcgtccggcggcaggatgtgcagggcactgccaccgtcgaatacggagaacgtctctacatcgaccgcgacgccgccatggccgcagcagagactgccgcaatcgcagcgattcgtcccttcgaggtgaccgcgcacaggatcaagagcctgcggccgggtgatcatgtcctgatgggaagccttcacggcacccgcgtcgcgaatgcaactggccttgccaacgtgtatgaggtcgtcggcggtgccacggccgagatgggtccggtcgttcgttaccggggtggcagcttcgctactgtcgatccgatggagatcgacgccgagggcttcctcgtcagcgacgatctgcgcaacatcggcatcatcgctttcagtcccttccatggcgtcaccgctaccgacccgaactggatgctgaagcggctgctcgaagccgtggtccagccggagatgttgaaggagggggatcaggttctcatccggacggagcaagatgagttcggggtggctgaagtccagcgcgtcgccggccagggctacgggctcaagctcatggcatcgcaggcggaaggtcattccctgccgagcatcatggttgctgatctgcatggccagatcgaaggcgtcgggcgaatcgtctgcgcctctaccacccgcttcgcgcccgaagagggacgtgacgcgctgatgcacctcgcctacgacagcgacaacagcacctggatcggcgcgggcaacggcattccgctgaatgaactggtacccgaatcgctgtacaagcccgcgcgcttcgccttcaacgtcaacccacaggtgctgtctgctctatcacgtcatgacaccgtgatctatcgaggcctgccgcaccaagtcaaccatctggacggcagcaccattggcctgtactgcccgctcacccagcaaaccgtgcaggtccaccgcgacggcaagtcacttgacggcgctggtcatcggatcgaggcggtactgcaagccacctacggcaacctcacccattacgccgtttcacacgcgtacaaggaagcactggcgaaagggcaactgatcgacgaagcgatgctcgacaccgagctgtctgccctgcgcgacgctcagcgcggcgactcgattgccctctacaccccggccggtaggatgatcagcgcgcaagtctcccggccggctggcggcctctcgaagaacaccgttcttgtcgtaaccactgatccgggtgagccgcaacggtcgctcaacgtgagcctcaccaccggggcttgcctggaatcggactcaacattcgccggccgattcaacttcatcccgcgcgggcgtactccacgggaggtcttcagcaccgttgccgcttcggtcagtgatgtcaacgaaacggtccattacctgagccacatgaactccttcctgcgcgactgcggcttcgacgcccacggccgagccgtcagcgacctggccgggatggatggacgtgttgagctgtacgtggacctggatcagatgacgctcaaggttcgctcctccttccaggacctcaagcaggagtacgtgatggacctgtactccgatgaggcgcgctcgcgcctcgaccagctgcaagcggagttccccgcgttctcccaaggcatggccggccaccgatacaacgtggcggaagcgccatccacccgcgttcgcgcgatgtcgatgtag

SEQ ID NO: 336778 - DNA, 1491 bp, Pseudomonas aeruginosa
atgccaagcaacctacgcccagctgatgcgaaagtcgtgcagtacggccagttccactacctggaccacatgcgctatcagcccctcgtcgccgaactgacctcggggctcggcttcaagggcgcggtcgagatcgagggccattgcatggactggattccggacggctatctgctggattacgccgatccagttttccagacgcgtgaggaagccttgaaggcagccaacgcgatgctgatcgagcggctgaacatcctggacgtgtcgcccgagcgcctgaagttccatctcaaccagggcacccgcgtcatcctcgctccggtaggcccacgcatcgacatgtcggcgctggccatcgcaaccgtgacctccctccagccgaagatggggttttgcattggcttcgatgaggacgccgatgagtacccaccggagtacacccttaccaaagatggccgcctggacgccgaagacatggcgcatctgggcatcgtcggtatcgtcaccacacccggcgaccgcgccaagatcgaggccacgttcaaggaacaccacgcacatctgcaaagccttcaaccgccgtcggtgaccttcgtcgctcacgaacagatgttcgggctcgcccacaaccacagcatcgtgatcatcaatgacaagtcctacgtgctcaaggcgcaggacggtcactacatcgccgaaggcgagccgcaagacctgcgcttcgacgatgacctgcgcccggtcagtcataccggtcacatcgcagccattgcgctcgcgcagggccggccgatgaagcctgccgaactggacgcggcctggaccgagcacagccgcgtcaacggcgtatggtcggacccgatcatcaataccgacctgcatgcgctctaccacgccccggcgggtaccgaaatttccctgctcaacgcggccggtgcagtcttccgagcggtcatcatcgacgctgaagtgcccatggcaggcgctccggccatccggttggacgatggagagggcaacgcccgtaacacccgcatcagcaccagcaccggtctggtcgaaggtgccgagcatctggtcttcggcggactgcaccacgtcactgaccacagcctgccgccccagcaggtattcgacctggccggccgatacctggaagacgacgacgaagccgttctgtaccgccagcacctgatgggcgtactcaacgaaatgggcgctgacttcatggggcaggttccgatcagcaacatggacaacgatcccagcacgctgcaagtctgcctgcgcaactcctacctgatcctgagcgacttcccgagcaccgggcaagtctgccactacgacctgtaccagaccgccagccaggacctgctgcggcgcatttccacgccccaggtcgaaccgctgattgcgcatctggacgcctacctgacgccggcccccagcgccagcaaccaatccacttccgttcgcctgggcatgtaa

SEQ ID NO: 336779 - DNA, 1776 bp, Pseudomonas aeruginosa
atgaacgcgcacaacaacgtcaaattcagcatgacccccttcgtgatcggcaaacgctcggtccaacctcaggtggtcgccagagacggcaagttcttcccggccatctccgaatcggtcgatggctatgcccccgattccttggccatcagccagccgtgcgattccccccaggaagcccttgctgctgccatcaccctcagcgttcgccaactcgatccgctcatggtcaaccgcaaccgcctcgaagaactcgtgcccggcgaccgcgtgctcaccgccgttgcctcggtaccggatgccgaacttccattccagtcccaccacgagatggtggtcttcaaagccgccgagggcgatcagggcccggttctcgtcttcccggacgacgttgaaggcaacctgcctcacccggtctcattcgacggcttcatcgccgagcccgccgctgagttctacaaggtcttcgccgtcctgcctcagaacgaaacgctcaccagctcgaccgagaatctggtctatcagtcctgtgtgaccgaccccatcccggccggcgcggtgttcgtgttcacgaacaaagccggtgaaagcgccgtctaccagatcgatcatgtcggccccaacggctacatcgcagtgccctacagcgccgagacacccagcgaagagaacgcaatcgagttggacttcagcggtgttgccctggatggctccggccgcgccactcgcctcgccacgctgataccagacccggccaacgccgccaacgtcctcaagcacctgcattccagcaccgagttttcggcgcgtgcgctgtctgccggcgaacaagctgcacgcatcgtcttctcggatcaccccggcgatctccagaacctggtaccgggcacgctggccatgctcgccggcgaggcctgcaagatcgtcaccactaccaacccggatatcgtgtgcgtccagaagggcaagaaagacctgttcttcgaccgcaagggcaacggtctcaccgagccggatcgtaagatcgacgccatcggcttcgtcgtctccggcagcgtcacccccgccggggcagaacacgccttcgccaacgcggacagtcatcagctcatggtcagccggccgatgatcgacacctcgctcgaagcgctgcgcgacgccaaacgcggcgatcacctggtgctctccaccgggccacaaggcaagaagtgggatgcgcgggtcattcgccaggaaagcgtctaccacccggacaagatgctggtactgatcgagagcccagacccggttgagcgccgcatcgtcggcattgatccgctcaccggcatggttgactgcgaaggcctgaatttcctggcacgggtcgagcacaccaccgctggctcgactcccgccgaactcttgcgtgaccaccttctacacaacgaggccgcgcgcgatgaaatggactggcgtctggacctgacgcgcgaaatgcggccacacgtcacgccaggcgcggcccgtgtcgatttcaccaaccgcgagaagaccggaaccggccggatcaagctcaacttgcgcgatcagaccgtgagcatcgaccacgccgacggcgctggccacaaggtcttcgaactgtacagccgcgatgcccatatcgcactgcaaggctgcggcacctctgtctacgccgacctgctcgaccgcaaggttttcgatgtgctcgacgctcggcacaaggcagcccgcgccgccgaaaaccaacaccatacgtccaccatgcggctcggctga

SEQ ID NO: 336780 - DNA, 570 bp, Pseudomonas aeruginosa
atgagcgatgaagcgaaaaaagccgagatggagattccggcgcagccaggtacgttcaccacgtacgagatgagggagatgcttttccagcatgtcctgtccaatctcgacacctatcaggccagcgtcggcatggatgacattcgtcacctgatgaaagtcatgcactgcgtcgaagatttcgtgatggaagtcgccaggaaagtcatggtgaaccgggctcagctttcgcctcttcccagtttccaaggaatcattcaacccgatcccatgaatgatccaaatgacacccaggaatacgaaatgcggtaccgggtagtggagcaagtcgttggccagctaccccatcgggatgaggtctactcgtttgaggaggcgaccaaggaattcggcaagaactttgtcgaaacgtactggggagccctaggagagcgttgcccgcactcgatgatgctgcctggcaacaaggaaatctttttcaccgtttcccggcaaccggttcagtctctcaagcagcaaatggaccaggacagcactgctcttcctacccgatccccgagacttggttga

SEQ ID NO: 336781 - DNA, 1617 bp, Pseudomonas aeruginosa
atgagccagcccaagccgatccgcaacgtcctctacatcatgtgcgaccaactgcgtcgcgattacctgtcctgctacggccatccctatctgcacacgccgaacatcgaccgcctggccgcggagggcgtgcgcttcgcccgtgcctatacccagggcaccatctgcgggccgtcgcggatgtcctcgtacaccgggcgctacgtcagcagccaccaggtggcctggaacgcggtgccgctgccgctggaggagctgaccctgggcgactacctgcgcgccgcgggagtccgcaccgcgctggtcggcaagacccacgccacggccaacctggaaggcatgcggcggctcggcatcgatccggctagcgcgcgcggcgcggccctcgccgaagccggcttcgagccctacgaccgcaatgacggggtctacccggatgacccggccttcgccgacaagcgcgaaagcgcgccctacacccactacctgcggcgcctcggcttcaccggcgacaacccctggcacgactgggccaactccgccgccggcgccgacggggaaatcctcagcggctggcggatgcgccatgccggattgccgacacgcttgccggaggcgcacagcgagaccgcctataccacccgtcgcgccatggatttcatcgacgagcagggcgagcgtccctggtgcctgcacctgtcctacatcaagccgcactggccctacatcgcgccggcgccgtaccacgcgctgtaccgcgccgaccaggtgctcccggcgctacgcgcggcgcccggcgaagaaagcgaccacccggtgtaccgcgccttccgcgaacatcgcgagagcctcaatttctcccgcgaagacgtgcgccggcaggtgatacctacctacatggggctgatccgccaggtcgacgaccagctcggccggctcttccagcacatgcgcgccagcgggcgctgggacgataccctgatcgtcttcaccagtgaccatggcgatttcctcggcgaccacggcctgggcgagaaggagttcctcctcgagtcggcggtgggcgtgccgttgctgatccgcgatccgcgccccgaggcggacgccacccgcggccgggtggaggaggcgctggtgcagtccatcgacgtactgccgagcatcctcgaagccttcgccgtcgagcccgccagccatcgcatcgagggccgttcgctgctgcccttcgtccatggcgcgccgccggcggactggcgccgctacgccatcgccgagtacgactacgccttccaggcgccggcgcgggagcgcctgggccgacccatcgatgcctgccgcatgtacatggtgcgcagcgagcgctggaagtacatcgcctacgacggcttccgcgcccaactgttcgaccttgccagcgaccccggcgaattgcgcgacctcggcgccgacccggcgcatgcggcggtgcgcgaggcccatgccgggatgctgttcgactggctgcgcgggctgaagcggcggactaccatcagcaacgcggagatcgacctgcgcggccaggcgttccgctacggcgagccggaaggcgggcgcctggtaccgatcggtctctggtga

SEQ ID NO: 336782 - DNA, 411 bp, Pseudomonas aeruginosa
atggaactgacgctgcggcacaacccgatgctcgacgacgccgactgcgaggcgatcctggcgatccacgcggcggtcggctgggaccggcgcatgccgcctaccgagctacgcacgctgtaccagcattccgggtattccctgctggccgaacgcgacggccgcctggtcggcctgctgcgcgccgaggaagaaacaccgattcgcgtctggctggcggaaatcgccgtgctgcccggcgcacagagcagcggcgtcggcgcagccctgctgcggcgcttcgccgaggatcaccgcggcgcctacctgttcaccgacgccaccctcggtaccgaagccttcttccgccgccacggcatccacatccagcaggtgctggagaaaaccctgcgcgatcagagcggcacgtag

SEQ ID NO: 336783 - DNA, 708 bp, Pseudomonas aeruginosa
gtgaatttcagcgcggggctgttcgaccgggtgatcaaccccttctacggcgcaccgcagtcgatctactccgaccatttccaatgggacgacggcgtcaccggacgcatgtcctacaaactggaggtgccgccgctgcaaccgtcgctggcctcggtgctgctcggcggcttcggcagcgacaacgccctgcgcatggaacagctaccgcataccaacatgatgctcgccctgctccgcgacggcttccacccggacagcgcggagggctcggtcggcctgcgcggcgacgacaccccggtgctcgactaccggatgaccgactacacctgggacggtatccgccgtgccttccataccatggcggagatccagttcgccgccggcgcccgggaagtgcggccggtgcacagcgacgcgcgtagcgcgaagaacctgcaggaggcgcgcgggatcatcgacggcctgcgcctggagatctatcgcacgcgcctgggcagcgcccacgtcatgggcggctgcgccatgggcgaagacccggccgtggcggtggccgacagcctcggccgccatcaccacctgcggaacctgtcgatccacgacggctcgctgttccccaccagcatcggcgccaacccgcagctctcggtctacggtcttaccgcgcaactggccagcgcgctggccgaacgcctggccagggcctga

SEQ ID NO: 336784 - DNA, 471 bp, Pseudomonas aeruginosa
ttggccgaccccgcggaggtgtccgtcgctgagctgcaggcgcgggtcgtcgccctcgaagaagagcggcacaagttgcagcggatcaaccaggcgctgatcggacgcatcgagtcgagcgctgcgcagagcgacgaggcctacggtgccttccagtattccgtggtgttggccgagcaggtccgcgagcgcaccgacgcgctgagccagacgatgctcgaactgaaggccagcaaccagttgctcagcgacgctcgcctgcgtgccgagaccgcccaccagcatctgctcgacgctatcgaaagcatctccgacgccttcgtcctgttcgatccgcagcaacgcatcgtgttgttcaacgagcgcttccgcgcgctgtggatcgacagccgggcgcggatcggtcctggcatgcgtcgcgccgaactgcaccggctggcgcgtagcggcgggctgatcgtcgaggagtag

SEQ ID NO: 336785 - DNA, 651 bp, Pseudomonas aeruginosa
atgctaagtgaagttgaaataaaggccttggtacttcaggagtttttgcgccaagggaggattttggcgaattctctagtttttaatgagatgaaccttgcgggtaaagtaagaaggttggatctggcgtatgtaacgaataatgagatggtggcaattgaaattaagagtgagcgagactctctatttaggctgcctgggcagttggatgaatattctaagtattttgatcgaatagttgtagtggctgcgtctaaatttgtaagccaaataatttcgatggttgactcgtcagttgaaatttttgaggtttctcaggaaggattaaaagtctgtcggcgaggaaaaaaggttgcctcagtaaagaaggagtcgtatgttgagttaatgacaaaaagagaggttttgattttggctaaaatggttggtatacggacttctgatcttccgatgtatgagctaaaggttgaagttctagataggattggaaagttatctaaggagaaagttaaagctgttctgcttcatgggtttgagaagaggttctcgttatcatctaataggtttttcaaaaaagttctggaatgtcagcgtgtggtttctgaggatgttgcgctgttaagtccatatgcgccgatgagagtgggttag

SEQ ID NO: 336786 - DNA, 1128 bp, Pseudomonas aeruginosa
atgcaaaatatttttatttatcgtagctacatccctatccttgcaattagcccagcagaaatgactgctgtggagcagttgccggataaagaaaaagatcaactacttccccttttccctcttaggggatgggttggctcccatcgtctaagaaacactctagcaagaatttcagaggctattaacgaacgcccctggattgcagacatagatgaaaaatttctaagtgaaaacaaaatattcctctttacgggaaaacatccagaaaccccaatatatcaagagctaaaagacctactaaatccgaataatgcgtatgaaaactggtgcgagttcattaagaaaaatgaaaatacaattccgtgcataagacatgaaactcttgaaggcattgacgagcaaatacgaaaactcagagacttaaaccgcgggatagttttcagaatatctccagacgaacataacctatctaaacacgaacatataatacactccctgcggtcaaacgaaataaaaaacatcttaataatttacgacctaggagcaattgatcaaaacttcagagagaggcaatcaatccttgaaaagtttatgcagcttgccaaagaaaatattaaagaaatagcaatatccgtgagtgcatcttcattcccatcaggatttgcaggccaaagggaaggggaaaactctatatatgagaggattctattcaactcgatagagtcgaaaaaaatttattcgccattaatttactccgacagaggcagtgcacgtgctagcaagcaagatggaggttccggaaccccaccgcctcgaattgactatccaatgaaaaaagattggaagtttgtacgtcgcgaaattgatgatgacgcccccggctctaaagaaagaaggagggcagcctatatagagattgcgaaagaagtagtctcagccgattattggctcccaaatctcagattatggggaacacaacaaatcgaactcactgcagaagaaaatacctttggcatatttagcgctcaaaaggcaactgccgcaaggataaacattcatatttttgttcaactacattacaacagcgtaccagaagaaatagacactgatgaagagtgggtggactaa

SEQ ID NO: 336787 - DNA, 189 bp, Pseudomonas aeruginosa
atgtgccctgcctccgattaccagttgccgggatgggtccgccgcgccagcgtgccgcccgcggcggggccggaaggcgaacgggaaggcgcctcggggaccagcgcgccgtcgcgcaccggccgcgaacggaaggcacccggcgcgcgctccggcgacatgccgcccgatgacagtctggcctgttga

SEQ ID NO: 336788 - DNA, 141 bp, Pseudomonas aeruginosa
atgttttttcttgcggtgggattaccgctggggggggcaagggggagtgcctgcctttgcgaaaattcgatgagggcccgcgtggcctccgaacagaaggtcatcggtttcgagcccaaccaaagatatgtggccaattga

SEQ ID NO: 336789 - DNA, 267 bp, Pseudomonas aeruginosa
atgctgtctgccgtacggcgctacaagtcgatgctctccagcgccctggcgcgttgtttcccgcgtaccaccgcctacctgcaggccgagcgcgaggctcgcgaagccttgttgcagccggccaaggcccgctccaggaagaacgccgcgaaggctccggccaaggccgccggcaagcctgcgaagggcgccgttcgggggccccacgcaagcccgctgccgcctcgcggcgcgcgccgcagggaatctatccggctgccgcactga

SEQ ID NO: 336790 - DNA, 2424 bp, Pseudomonas aeruginosa
atgaggcgcgccagcctgcatatgttgctctgccagttcgccatggccctgggcctgctcctgagcctgggcagcgaggcctgggccgccaggccggctccgcaggcggccgtcgacctggaagcgccgcccgccctggccgaggacgccagcctcgaccagctcaacgcgcaactcgacctgatccgccagcgcgttaccgccgacgccagcgacgacctcctcgccgagttgcgccagagcgcgctgcaagtccagcgccaggccgacgccctgctcgcgctacgggtggccgacatcgagcggctcgacgatcagttgaaagtgatcggcccgccgcagcccgacgaggcggaaagcctcgccgcccagcgccaggccctgacccggcagaagaacgccctgctcgatgacgaacgccaggccacccagctcggccagtcgtcccgcgacctggcggcacagatcgtcaacctgcgccgcagcctgttcaactcgcagatcagcagccgcgcggcgacaccgttcagcccgagcttctggtcgaccctgatccgtcccaccgacgacgacctgcgccggctggacaagctgaaggcggaggccctggtcgccttcgacagcgccatcgcgcccggacaccgctgggccttcgccggaaccctgctggccaccgtgctggtctggagcttcggccgccgcctgctggagcgcatgcttacctgggcgatgatccgctggctgccggaaggccgcctgcggcgcagcgccctggccctggcggtcgggctggcgaccatcctgaccatcgtcggcgcggtgtcgctgatgcgctggggcctggaaagcaacgccagcctgagccccgacatggccagcctgaccgatcaactggtgagcctggcgaccttctgcgccttcatcgccggcctcggccgcgccctgctgatgctgccgcgaccatcctggcggctgccggcgatcccggacaggatcgccagcgccctcggcccgttcccggcgatcctcgcggtggcgctgatgctggtggccaccgaggaacggatcaacagcgtcaccggcaccagcctggccctgaccgtcgccctcaacggcctgaccgcgctggtcaccgcgctgatcttcgccgccgccctgctgcgctaccaccatgtgcggcgcaagcacgacctggagcggccaggcgggatcgccgggctgatccccttcgtcgcctcggtatggatcgcggcgatcctcctcgccctgttcaccggctacctctcgctggcctacttcctcaccggcaagctgctgtggatcagcgtgatcgcggccaccacctacctgctgatcgctttcttcggcgacatctgcgaaaccctgctctcgcccaagcatcccagcggcctggcgctggccaatgcgctcggcctgtcgccgcgccaccaggcccaggccagcacggtgctggccggggtcggccgcaccctgctgctgctcaccgcgctgctgctggccttccttccggtcggctcgagccccagcgaactgctgcagggcttcgcccaactgggcgaaagcagcaagaccctgggcaacctgaacatcgtcccgcaggacatcctggtcgccctgatgctgttcgtcggcggcctgttcgccctgcgcatcgtcaagcgctggctgagcgagcggttgctgccggaaaccaacatggacgccggcatgcgcgcctcgctggtgaccctggtcggctacctcggcttcgtgctcctggcgatgctggtgatgtccaccctgcgcatcaacctgaccagcctgacctgggtggtcagcgccctctcggtaggcatcggcttcggcctgcaggccatcgtgcagaacttcatttccggcctgatcctgctgaccgagcggccggtgaaggtcggcgactgggtcagcctgggcggggtcgagggcgatatccggcggatcaacgtgcgcgccaccgagatccagatgggcgaccgctccacggtgatcgtgccgaactcgcagttcatctcccagaccgtgcgcaacgtgaccatgggcaatgccctcggggtggtcggggtgaacctgaccctgccgctggacaccgacgcgatgaaggtccgcgaactgctcctgcaggccttcgccgaacacccggcgatcctcgacgcaccggcgccctcggtgacgttcaaggatctcgccagcaacggcctggtgctcaacgccagcggcttcgtcaacagcccgcgttcggtggccggcgcgcgcagcgacctgctcttcaccatcctcgaccgcttgcgcagcgaaggcatcgcgctgtcctcgccacagagcctgctgatgatccaggatggcggcccggccagcgccgcgcctgcgcccgcgacgcccgattga

SEQ ID NO: 336791 - DNA, 867 bp, Pseudomonas aeruginosa
atgagtcgagtcacgcgcgtccgcgaagaatacgaaatccagctcgaacccctgctggaggtccccctggagcggcgcctgcccctgggccagcgtctctggcaacagggctggctgcgcaaggggctgatcctggcgctgctggcgctggcctgggagctggcggcgcgggtccagggcaacgacctgctgctgccaggcttcctgcagacggccagggccctcggcgagggcctggccagcggcgaactgccggccaaggcggggatctccctgctggtgctgttcaagggctacctgctggggatcgtcctggccttcgttctgaccagcctggcggtctccacgcagttgggccgcgacctgctcggcaccctcacagcgatgttcaacccgctgccggcgatcgcgctgctgccgctggcgctgctctggttcggcctgggccagaacagcctgatcttcgtgctggtgcattcggtgctctgggcgctggcgctgaacacctatgccggtttcctcggtgtctcggagaccctgcgcatggcagggcgcaactacggcctgcgtggcctgcgcttcgtcctgctgatcctggtgccggcggcgctgccgtcgattctcgccgggctgaagatcggctgggccttcgcctggcgcacgctgatcgccgcggaactggtgttcggcgcgagcagcggcaagggcgggctcggctggtacattttccagaaccgcaacgagctgtacaccgacaaggtattcgccggcctggccgtggtggtgctgatcggcctgctggtggagaacctggttttcggcagcatcgagcgcctcacggtgaagcgctggggagtgcaacgctag

SEQ ID NO: 336792 - DNA, 1821 bp, Pseudomonas aeruginosa
atggtgcaggaggtgcacgatagctggaagtacagcaactcggggttgggggctgcgccgtcactggccattgccatcgttgcagctgcttacctcggcccggtgtatggcgcaatggccagcaacctcgccattggcaccatcaacaatggcggtgaccttggcaaggggctgcaacaggccaccagcgctgacagtctgaaagggtacgccatcgcagcggccacggcttatctcgtcagcccgcagttggacaaggcattcggcgtatccagtgacaacatcaacaaagtcaccaaaggattcaagctcagcacagttgagggaatcggtggatttgctgcctacagcattgcccaaggctttgctcaatcggtcatgcagcaggccgcctatggcggcagctacatcgacaacctcggtaatgccatggcaggtcaggcgcgcaacctgggaatggcggtaggtttcaatttcattggcgactcggtcaaataccctgatggcagcccgccgaaaatcatggctcacgccctgatgggaggtctgctggccgaagcctccggcagtgacttcaagactggagcggcggccgctggtgccaacgaggccatgatcaacctccttgggaaaatggtaggtggcgatcaaaacctcgaactgatggcctcgcaactcgttggcgtagccgcggcaagtgcggtcaatggcgatgtgagtctgggcgccgagatcgccaaaagcgggacggcgtacaaccggcagctacacccagatgaaatcaaattcgcatcggatgtggagcgcgtcaaacgttatgcccaggaaaatgggctgagcgaggacaccgcccgcaaagagcttctcagcacggccgccatgatggtggacaatggctggaaccaggccttggccggcacagacatcaacgctgcccgggctgctcagtatctgcgtacggagctgggcacaggcccggacagcaatctcttccaggtgacccaggctgactactacaacgagcgggtggggctgacggcgctattcaagaacaaggaggccctgaccagcgttctggaaaacatagccctagcgaatcccgcgagctatacgagggaccccgcgaaccgtgcggaagtgctgaatgccaaaggtgaaggtagccaagcgggctttgggctggcactggaagggatcgtcagcgcgccttcaaaaactgccttgtggttgatgggtgcgctaacctgttcaagctgtgcggagcgggatatccagaacgcttggaactcggttgcctcgttacctgaagacatccgtatgaaaggctatctggatgccttgcacaccatgcaaggccagggtgccagcgtggtgcgggacaacgccgcgagttcgactgcattgggagttgaggttgggctggccattgatggagggttggcaggggcaggtaagggcgtcgttacggatggtccgaaaggaatacttacactgaaagattttcctgatgtctctaccaagataagccagaagcagcttcgccatattgctggaacacagcagcttgaggcacggggaggcggtggtttcttaaacagtgtctctgatgctcaaaaagtgcttgatgcctaccataccggccaagtgaaaatcctagggagaaatgctcagggattcccagtagtcaagtttgagggcgttactggaactaacgttaatctcggtgttggtataactgatcaggcaaccaatgtatttattatcaagggcacaaagagtccaagtattgtccctacaaatccaaactggagtcccaaatga

SEQ ID NO: 336793 - DNA, 702 bp, Pseudomonas aeruginosa
atgcctaggcaagggcgagtggttttaccgaattatccgcttcacgtggtccagcggggacacaatcggcaagtggtattcgccgaggacgaggactaccagcgttacctctccgatctacgggacctcaaggatgcctttggtatcaaggtctacgcattttgcctgatgaccaaccatgtccatctgctcttggcgcctggtgattcgctgtctggcttggcgcaactgatgaaaacgctggcggcgcgcacgacacgatatcggaatcgcttggagggccgttccggaacgttgtgggaaagtcgctataaatcgagtgtcgtacagagcgatgcctacctgctggcgtgttgccggtacatcgaactgaaccctgttcgggcgcggatggtggacgatgtggcggcctatccctggtcaagttatgggctgcgggcggattggttgaaggagccaaactggttggatatggattcctgcttcattgagctaggtcagacggccgaagagagatatcggcgatacgtaacgttcatgaaagaggcgataccggccgaggaattgaggctgattcgcgaggcggttcagcgtggacaactgacgggcaatcaacggttcgtggacgagatcgagcgggtagccggggtgagaatagagcggcgtgggcaagggcggccgagattagagcagggaaaataa

SEQ ID NO: 336794 - DNA, 207 bp, Pseudomonas aeruginosa
atggatttcgtcttcgacgcgctcagcactgggcgacggatcaaatgcctgacggtggtcgatgacttcaccaaggagtcggttggcatcctggtggagcacggtatcagcggttttcgtgtcacacgggcgctggacgagatggcacggttgcgcggctacccgaaggcgatccgcaccccccgagttcaccggcaaggcgcttga

SEQ ID NO: 336795 - DNA, 165 bp, Pseudomonas aeruginosa; identical to SEQ ID NO: 322555

SEQ ID NO: 336796 - DNA, 1152 bp, Pseudomonas aeruginosa
atgcaacgaacgccagccatgcgtgcactggttccggccctgctggtcgcgatttcggccctttccgggtgcggaaaaagcgaggcgccgccgccggcgcaaacgccggaggtcgggatcgtgaccctggaagcgcagacggtgaccctgaataccgagctgccgggccggaccaatgcgttccgcatcgccgaggtgcgtccccaggtgaacggcatcatcctcaagcgcctgttcaaggaaggcagcgacgtcaaggccgggcagcagctctaccagatcgaccccgccacctacgaggccgactaccagagcgcccaggccaacctggcttcgacccaggagcaggcccagcgctacaagctgctggtcgccgaccaggccgtgagcaagcagcagtacgccgacgccaatgccgcctacctgcagtccaaggcggcggtggagcaggcgcggatcaacctgcgctacaccaaggtgctgtcgccgatctccggccgcatcggccgttccgcggtgaccgaaggcgccctggtgaccaacggccaggccaacgcgatggccaccgtgcaacagctcgacccgatctacgtcgacgtcacccagccgtccaccgccctgctgcgcctgcgccgcgaactggccagcggccagttggagcgcgccggcgacaacgcggcgaaggtctccctgacgctggaggacggtagccaatacccgctggaaggtcgcctcgaattctccgaggtttccgtcgacgaaggcaccggctcggtcaccatccgcgccgtgttccccaacccgaacaacgagctgctgcccggcatgttcgttcacgcgcagttgcaggaaggcgtcaagcagaaggccatcctcgctccgcagcaaggcgtgacccgcgacctcaagggccaggctaccgcgctggtggtgaacgcgcagaacaaggtcgagctgcgggtgatcaaggccgaccgggtgatcggcgacaaatggctggttaccgaaggcctgaacgccggcgacaagatcattaccgaaggcctgcagttcgtgcagccgggtgtcgaggtgaagaccgtgccggcgaagaatgtcgcgtccgcgcagaaggccgacgccgctccggcgaaaaccgacagcaagggctga

SEQ ID NO: 336797 - DNA, 180 bp, Pseudomonas aeruginosa
atgccggcggaaaacagcgacagcatcgccgccttcctcgcccgcacgcccggcgcccgcgaactggaccttcccggcccctggggcatgaaacagccccacggccgccagttgctgccgcaggtggagggccacgatggcttctactatgccaagctgatcaagatatccgcccgttga

SEQ ID NO: 336798 - DNA, 1026 bp, Pseudomonas aeruginosa; identical to SEQ ID NO: 319194

SEQ ID NO: 336799 - DNA, 525 bp, Pseudomonas aeruginosa
atgaactcatccgtatccgcactgaccaccctttcgccgaacgtccaggccgtcgccctgcccagcgccaccgcccgtaccgccctggaacgcctgcccagcccgctcgaactcaaggcccgccagccgttgccgctggagctggccagccaggtcgccgccagccgcgacgccatccgcgccatcctcgacggcgacgacccgcgcctgctggtggtagtcggtccctgttcgatccacgatccccgctccgccctcgaatacgccgaacgcctcgccgcgctgagcgacgaactcgacggccagttgctcctggtgatgcgcgcctacgtggaaaagccacgcaccacggtgggctggaagggcctcgcctacgacccgcacctggatggcagcgacgacatggccgccggcctggcgctatcccggcaactgatgctggacatgctgcgcctcggcctgccgctggccaccgaactcctgcaaccgctggccgccggctacttcgacgacctgctgagctag

SEQ ID NO: 336800 - DNA, 1377 bp, Pseudomonas aeruginosa
gtgaaggcgctgaagatcaccttgctggccatagtcgggctgctcctcgcgctgctcctgggactcgctgcgctgctcggcacccagaccggcagcgcctggctgctcggccgcgtgccgggcctgcaggtcagcggcttcgagggtcgcctcggtggcgcctggcaggcacagcgactgtcctgggcgcaggacggtacgcaactggtcgtcgagcggccggaactgcgctggtcgccggcctgcctggcggggctgcgcctgtgcctgcagcgggtggccgccgaacgggtcgcgctggacctgccgccgagcggcgacagcgccgacagcgggccgatcagcctgccgacgctgaaactgccgctgagcatcgagctcggcgaagtggcggtcggcagcttcctgctcgacggcaaccagcaggtcgccgaactcaagctggcggcccattggctggccgatggcctgcacatcgactcgctgacggcgcggggcttcggcctggacctggcgctccaggggcgcttgcagccgagcggcgactggcccttgcaggccgaagccacgctcggcctgcccgctcccgaaggcaagccgtggaagctggccgtccaggtcggcggtgagctgcagcaggcgctgaccctgaaaggccgcagcagcggttacctggacggcagcctggaaggacagttgcaggcgctggcggaaaacctgccggcacgattgctgatccgcgccgacggtttcaagggtgcggccggactaccggacaccttgaccctgaatgccatccagctcgatgccggcggcgatctcaagagcggttacctgatccgcggtggcgccagcctgccgggcgagggcggggcggtggcgttgagcctggacgggcgggtcgacgcccagggcgcggatatccgccaactgcgcctggacgctggcggcgagcagcgcctggagctggtcggacgcctggactggcgcgaaagcctggccgccgacgcgaccctggactggaaggatttcccctggctgcgcctgtatccgctggcggagccgccgccggtgacgctgaagaccttcaaggcggaagtgcattaccaggaccagcgctacctgggcaatttcagcgcggcggcgagcggtccggcgggcgacttcacgctggccagcccggtgtccggcgacctcgtccagctcaacctgccgtcgctgcagctccgcgccgggcaaggccaggccgaggggcgggtgacgttgcgtttcgacaatggcgtggcttgggataccgccctgcagctcagcgaactgaacccggcttactgggtcgccgagctgccgggttcactggccggtcccttgcgtagctag

SEQ ID NO: 336801 - DNA, 339 bp, Pseudomonas aeruginosa
atgcagttgaaacgatcgaatggtacctcgctgaaaatccacaggggctcgtctgaatgcgttcgattccacttgaaatttgtacgctgcaagctctcgctcaagcatttgcacgtgggtttttgcgccgcctcgctggcgatactgatgccagtgaatgacttcgtgctccaagtcgctcacgagagcatcatagtcccaatagaacgccggcttgtagaaggtgataattcgtccctgagtaaccgcaccagtgtatggttcaatcccgccatcactgtttacgtaaaactgatccttatagtagatatcattcgccatatagcctcgatctactga

SEQ ID NO: 336802 - DNA, 1104 bp, Pseudomonas aeruginosa; identical to SEQ ID NO: 320707

SEQ ID NO: 336803 - DNA, 642 bp, Pseudomonas aeruginosa; identical to SEQ ID NO: 320900

SEQ ID NO: 336804 - DNA, 2841 bp, Pseudomonas aeruginosa; identical to SEQ ID NO: 323035

SEQ ID NO: 336805 - DNA, 282 bp, Pseudomonas aeruginosa; identical to SEQ ID NO: 321497

SEQ ID NO: 336806 - DNA, 966 bp, Pseudomonas aeruginosa; identical to SEQ ID NO: 321498

SEQ ID NO: 336807 - DNA, 855 bp, Pseudomonas aeruginosa; identical to SEQ ID NO: 321499

SEQ ID NO: 336808 - DNA, 798 bp, Pseudomonas aeruginosa; identical to SEQ ID NO: 321500

SEQ ID NO: 336809 - DNA, 1407 bp, Pseudomonas aeruginosa; identical to SEQ ID NO: 321501

SEQ ID NO: 336810 - DNA, 510 bp, Pseudomonas aeruginosa; identical to SEQ ID NO: 323104

SEQ ID NO: 336811 - DNA, 588 bp, Pseudomonas aeruginosa
atgcgtgtgttgatcctgctcctgatgctcctgctgccgggcctgtcccaggcgcaaccgggcgacgacctgttcgcgccgcgcggcgcgacgcagacggatttcctgccggtggagaaagccttccgcttcacctgggagcgcctcgacgacggccaggtgcaactgcgctggcagatcgcgccgggctactacctgtaccagaagcgcctgcgtttcgacggactcgacccggccttgcagccgcagttgccgcccggcgaaagccacagcgacgagttcttcggcgagtcgcaggtctatcgccagagcctggaactgaccctgccggcggccgccgccggacaactgcgcctgggctggcagggctgcgccgatgccggcctgtgctatccgccgcagagccaggcgctcgacctgggcggtaccggccctgccgccgccgggacgagcggcgaagtcgccgaggaccagggcctggccggcagcctgcaggccggcaacctggcctggagcctgttgctgttcttcggcctcggcctgctgctggcgttcgctccctgttcgctgtctcttatacacatctga

SEQ ID NO: 336812 - DNA, 435 bp, Pseudomonas aeruginosa
atgaacatgtttgcaacccaaggcggcgtcgtcgaactgtgggtcaccaagaccgacacctatacctcgaccaagaccggggaaatctacgcctcggtccaatccatcgccccgatcccggaaggcgcccgtggcaacgccaagggattcgagatcagcgaatacaacatcgagccgaccctgctggacgccatcgtcttcgaaggccagccggtgctctgcaagttcgccagcgtggtccgcccgacccaagaccgtttcggccggatcaccaatacccaggtccttgtggatctgctggccgtgggcggcaagccgatggcgccgaccgcccaagccccggcccgcccgcaagcacagtcccaagccccgcgcccggcccagcagccgcagggccaggacaaacaagacaagtccccggacgccaaggcgtaa

SEQ ID NO: 336813 - DNA, 246 bp, Pseudomonas aeruginosa
atgcctgccctccgctccctgatcgctacacttttcctcggcctctgccttgccagtccgccgctcctcgcccagtccgagccgccctcggccgaagccgtccagcaaagcctcgacaagctggccgaacgcaagctcgccgaagccgaccagaaggtcgtcaaggccagactcgaacagaccctcaagttcctcgccgcgcgcgacgaagcgctgcagagcctggaagacctgaaaagcgcctga

SEQ ID NO: 336814 - DNA, 186 bp, Pseudomonas aeruginosa
atgagcgcaaccctcgacgactcgggcttctcagccctgcagcccaaagaccgtccctacaaggtaagtgccggcgccagcctcttcctggaggtgaatccccacggttcgaaactgtggcgactcaaatacctagtgagagggactgagaaaggggtggcgctcggcacctatccaacgatgtag

SEQ ID NO: 336815 - DNA, 507 bp, Pseudomonas aeruginosa
atggaaatgctgaaattcggcaaatttgctgcgctggctctggccatggctgtggctgtgggttgctcctccaagggcggcgatgcttccggtgaaggtgccaatggcggcgtcgacccgaacgcaggctatggcgccaacagcggtgccgttgacggcagcctgagcgacgaagccgctctgcgtgcgatcaccaccttctacttcgagtacgacagctccgacctgaagccggaagccatgcgcgctctggacgtacacgcgaaagacctgaaaggcagcggtcagcgcgtagtgctggaaggccacaccgacgaacgcggcacccgcgagtacaacatggctctgggcgagcgtcgtgccaaggccgttcagcgctacctggtgctgcagggcgtttcgccggcccagctggaactggtttcctacggtaaagagcgtccggtcgccaccggccacgacgagcagtcttgggctcagaaccgtcgcgtcgagctgaagaagtaa

SEQ ID NO: 336816 - DNA, 1299 bp, Pseudomonas aeruginosa
gtgagtaccctgattcgcattgcgctgttcgccctggccctggtggcaggtgctgcgcaggctgccgacccgctggtgatctccagcggtaacgaccgtgccattcccatcgccgtggtgccgttcggcttccaggggggcaacgtgttgccggaagacatgtccaatatcatcggcaacgacctgcgcaactccggctacttcgagccgctgccccggcagaacatgatcagccagccggcgcaggccagcgaagtgatcttccgtgactggaaggcagttggcgtcaactacgtgatggtcggcaacatcgtgcctgccggcggacgcctgcaggtgcagtacgcattgttcgatgtcggcaccgagcagcaggtcctgaccggcagcgtgaccggcagcaccgatcagctccgcgacatgtcgcactacatcgccgaccagtcgttcgagaagctcaccggtatcaagggcgcgttctccaccaagatgctctatgtcaccgccgagcgtttctcggtcgacaacacccgctacaccttgcagcgctccgactacgacggcgcccgcccggtgaccctgctgcagtcgcgcgagcccatcgtgtcgccgcgcttctcgcccgatggccgacgtatcgcctatgtctccttcgaacagaagcgcccgcgtatcttcatccagtacgtcgatactggccgtcgtgagcagatcaccaatttcgagggcctgaatggcgctccggcattctcccctgacggcaaccgcctggccttcgtcctgtcgcgcgacggcaacccggaaatctacgtcatggaccttggcagccgcgccctgcgccgcctgaccaacaacctggcgatcgataccgaacccttctggggcaaggacggctctaccctgtacttcacctcggaccgtggcggcaagccgcagatctacaagatgaacgtgaacagcggtgccgtggaccgggtaaccttcatcggcaactacaacgccaacccgaaactctcggccgacgagaagaccctggtaatggttcaccgccagcagggctacaccaacttccagatcgccgcccaggacctccagcgcggcaatctgcgggtgctgtcgaacaccactctggacgattcgcccactgttgcgcccaatggcaccatgctaatctacgccacccgccagcaggaccggggcgtgctgatgctcgtatccatcaacggacgcgtacggatacctctccctaccgctcagggcgatgtgcgcgagccttcctggtccccttacctgaactga

SEQ ID NO: 336817 - DNA, 1785 bp, Pseudomonas aeruginosa
atgagcgccgtcattactcaagccctggtcgatctggagcgcgcccttcgcgccgccccacgcgggcagcgcgtagagattgcccagtcgacggcccagcggctcgacatgtcactcgccacgctttaccgcaagctgagggaggtcaccgcagacagcaagccccgcaaacgccggagtgacgccggcaccagtgccctgagccgggaagatgccctgaccatcagtagcgcgctgatggagagtgcgcgccgcaacgaaaagcgcctgtatagcctggaggatgcggtggaagcgctacgggccagcaagatgatccgggcggacgtcgttgacgaggacacgggcgagattcggccgctgtccatcagtgcgatatccagggctctctacagcttcggggttcatccccagcaattgctgcagcctgctccggtaacggagctgggcagctgccaccccaaccacgtttggcagatcgatgcctcgctgtgtgttctttattaccttaagcccggcgccgacgagcacggtaacggcctgcgcgtcatggagcatgaccagttctacaagaacaagccgaagaacgtggcccgcatcgcctccaaccgggtctggtcgtacgagatcaccgagcacgccagtggctggatctacctgaagtacgtcatgggggccgagagcggcgagaacctgtgtgatgtgctgatcgacgccatgcaggagcgcggtggcaacgacgttctgcacggcgtgccgaagattctgatgatggacccaggttctgccaacacctcggccatggccaggaacctttgccgtgcgctgcgcatccgcgtcatcgttcacaagcccggtgccgcgcgggtgactggccaggtggagaacgcccggaacctcatcgagcgcaagttcgaggcgggactgcgcttccagcctgtcgccgatctggacgaactgaacgctgccgccaagacctggcgcacgtggttcaacgccgcgaagaagcactcccgccatgggatgacccgctcggaggcctggatgcgcatccgtgagcaccagttggtgaaagcgcccagcgtcgaagtatgccgccagttggcaatcgccgagccggagagccgcaaggtcactaacaagctgcgcgtcagcttccagggaaccgaatacgatgtctcggtcgtacctggcgtgatgatcggcgagaagctgatgatcacccgcaacccctggcagagcgatgccgcccaggcgatcactttcgaccaggacggccatgaagtcttccacgtcattccgaggatcgagaaggacaagttcggcttctacgtgcgcgcccccatgatcggcgaggagttccggccgcatgcggagacgcctgcacagaaggctcgcaaggaagcggcccgcctggccatgggcgtcgatagcgatgccgaagagcaggctgcacgcaaggccaaggccattccgttcggcgggagactcaagccctaccagcatatcgaagacgcccagttgccgaccttcatgccacgcaagggcagcgagctgcagctcgacgtgacgttgcccaccgtcgagagcaagccactgagtcacccggcagccgccaagatcctccgggcgcggctggatggcgtctggagtcccgagtcgatgctctggctcaagtccaaccaccccgacggggtactggaggatcagctcgacagcatcgtcgagcagttgcaggcggcgcccagccggcccgcgctgcgcgttgtgggaggtaactcgtaa

SEQ ID NO: 336818 - DNA, 357 bp, Pseudomonas aeruginosa
atgcctgctcgtgcgaacacgttcgccttcaaaacgacggttttggttcctgaaaaggtggaagcacggcagtactacggctacctgttcacttatggccagccggggtttgctacttgcaatcacactcaatggctgatcgatggccgccgtgctcccgaaattcagacgacgtactcacgttccggcgagctggaatactttgagctgaccaaacctgaagccatgctcccaatcttggcggcagctaaaaaagttgaattcaaagtttgtggcgtggaaggcgagatcagttcaagcgatctcgatggaattcgagaggttctggaccgcgccaagcaggacatgccgcgttaa

SEQ ID NO: 336819 - DNA, 369 bp, Pseudomonas aeruginosa
atgaagcgtgatatggatgtgatacggcagatactgctagcgctggatgaagacggaatactcctgctcacaggagtggatggcatggacaaagatgttttttgcttccacgcgcaactgctacttgaagcgggcttagccgaaggtgcgctggggtcgaagaacagaggatatccggcaagcgcacagctctggcgtctgacctgggaaggtttcgattttgccgcgaccattcgtgaggacacgctgtggaagaaggccaaggacgtcattctgaagccctcggcctcttggtcattcgggcttttgcgcgagtacctgaaaaccgagatggcccggaagctccccggtcttgagcagattctgtaa

SEQ ID NO: 336820 - DNA, 1416 bp, Pseudomonas aeruginosa
atgaacgcccggcgtgaactgctgcaacgttaccggcgggcctggacgcaggcctggcacaaccgccagacgatggaggcaccggcgcgcctgccgcacgaagtacagttcctgccggcggccctgtcgcttcaggagcaacccgtcaaccctctggcgcgccacatcaaatgggcgatcatggcgttcctcgcgcttgccgtactctgggcttgcctgggcgagattgatgtggttgccagtgcccagggcaaagtcgtccccagtggcaaaaccaaggtcatccagcccagagaagtggccgtggtcaaggcgatccatgtctatgacgggcagcaggtaaaagccggcgacctcctggtggaactcgacggcagccagacaactgccgacgtcgagcgactcaagagcgacctgatggccgcgcaggtggacagtgcacgagccaccgttttgctggaggcgatcgagggcggccaggaaccggcctcgatcgcatcgcgactacctcaggccaacgaggagcagcaacgcgccgcacaggtctggatgcaagggcagtacctggaactacgcagcaatatcaatcaggcgcaagccgttatcgaacagcgaagtgcggaaatccaggcagccctgtccatgatcgcctctctacgcaagaccttgcccatcgccgaacaactggcccaggactacaagcgtctgctggcacgcaatttcgttgccaagcatgcctggctggaaaaggagcagtcacgcctcgaccaggaacgggaactcgcagtgcaacaggcgaagctgctggagcttcaggcctcccgtcgggaggctgaacaacgccgtgaaagcattattgcccagacccggcgcacgatgctcgatctgcagcatgagtcccagcagaaatccgcagccttgacacaagaactgctcaaggctgaacaacgggaccgtttgactcgcctgaccgcgccggtcgacggcacggtgcagcaactggcaatccatacccaaggcggggtggtcaccgaggcccagcccctgatggccatcgttcccaaggaccagccggtggaagtggaagcgatgctggagaacaaggacataggcttcgtgggaccagggcaggaagtggaaatcaaggtggaaaccttcacgttcaccaagtatggcgtcatccacggcaccgtcctgagcgtttccgaagatgccatcgaagatgagaaaagaggtttgctttatggcctgcgcatacagctcgcgcagaatcatatacgcgtaggtgatcgggaggttcccttgacaccgggaatggcggtgagcgcggaagtgaagacggataaacggaaagtcattgagtacttcctgagtccgctgaagcagtatgtggacgaaagtttaggcgaaagatag

SEQ ID NO: 336821 - DNA, 2157 bp, Pseudomonas aeruginosa
atgcgtgaagactctcctgaaaacaagacggttgagcctccggccctcgacagtggcttggcctgcctggtcatgctggcacgctttcatcaggtggccgcctcacccgagcagttggctcatgagttcatcccaactggcggggagttcggcactcccgagcttctgctggcagcgcgcaagcttgggctgaaagcccggtcggtacgcagtcggccggaccgactggcgcgcacaccgcttccggcgattgcccgaggtaacgacaatggatatttcatcattgcacgtatcgatcaaggaaaggcgctgatccaggatcctttgctgcaacgcccagagatactgaccttagaggcgctggaaaaccgctggagtggcgaactcgtgctgcttcgctcggaagcatcgcagtcagccgagctttcccgattcgacttcacttggtttattccagccatcgtcaaataccgcaaggtgctgggcgaagtcctggtggcctcctttgtgctgcagatattcgccttgctgacacctttgttcttccaggtagtgatggacaaggtgctggtccatcgcggtctgtccaccctggacgttctcgccataggcctgctcggcctcatgctgttcgaaagtctgctgagcggcttgcgtagttatgtctttgcccatactgccagtcgtatcgacgtggaactgggagcgcggctgttccgtcacttgctgaatctgccattggcctactttcaggcccgccgggtgggcgactcggtggcacgcgtgcgggagctggagaacattcgcagcttcctgaccggcaatgccatcaccctgctgctcgacgtgctgttttccgtggtgttcatcgtcgtgatgttcttctacagcggctggctcacattggtagtgctgctgtccttgcccttatatttcggactctctctgttgattacccccgtgctgcgagcccgggtacaggaaagcttcaatcgcggcgcggaaaaccaggcctttctggtcgagaccatcaacggcatcgatacggtcaaggccatggcagtggaaccgcagaccatgcggaaatgggacaaccaactggcgagctacgtggcggccggcttcaagacccagaccctgtcgaccttcgccaacgagggcgtatcactgattggcaagctggtgacggtagccaccttgtggctgggggctcgccttgtcatagaaggacaactgacggtaggacagctgatcgccttcaacatgttggccgggcgagtcgcccaaccaatcatgcgtctagcccaactgtggaccaactttcagcagaccggcgtctcggttcaacgtctgggagacatcctcaatagccagaccgaactgtcccaggcgacgcgcagtagcttgccacctttgaagggacggatcgagttcgaccaagtgcactttcgttatcgctcggatggatccgaagtgctgcgcggcatcaatcttgccgtccaggccggagaggtgatcggtatcgtcggtcgctccgggtccggcaagagtacgctgactcggttgctccagcgcctgtacgtcccagagcgcggacgcgtgctggtcgacggcatggacctggcgctggctgacgtatcctcgttgcgtcggcagatcggcgtggtgctgcaggataacctgctgttcaatcgcagcattcgagaaaacattgctctgaccgatcccggcgcaccgatcgaggtcgtgatccaggctgcgcgtttggccggcgctcatgagtttattctcgaactgcccgagggctacgacaccctggtgggagagcacggctcctccctttccggaggacagcgacagcgcatcgccattgcccgcgcgctgatcggcaaccctcgggttctaatcctcgacgaagcgaccagcgccctggattacgagtccgaacgagtcatccaacagaatatgaaagccatctgccagggacgctcggtaatcatcatcgcgcaccgtctaagcgccgtgcgcgatgcccaccggatcatcgtgatggaccgtgggcaaatcgtggaacagggcacgcattccgaactgctgagccaccaggccgggcactactctcggttgtatcgcctacagcaaggggacgccgcatga

SEQ ID NO: 336822 - DNA, 1227 bp, Pseudomonas aeruginosa
atgaacctccttttgatccaccagaattttccaggccagttccgctacatcgctcaggacctgtcaaggtctcaactgcatcgagtcttggctatcggaagagatagcgctccaggccttccgggagttcctctggtgcgctatcgacctgcacgggaatcagccccacagacgcatggctatctgaaatccttcgaagatgcggtcctgcatggacagcaggtcgctcggctgctattgaatctgcgcagtaaagggtatcgaccggatgtcatattggcccatcccggttggggggagtcgcttttcgccaaagacatatacccccacgtaccgctgatccatttctgtgaatactactaccacgccaaaggagccgatgcggacttcgatccacaattccctcttggcctggacgatgcctcgcgtttacgcctgcgtaacagccagcatctgcttaatctcgaacaatgcgatctgggcatcacccctacacactggcagcactcgctgcacccttcgatctatcacgacaagatccgtgtggcgcacgagggaatcccctcggatgagttgcttcccgatccccaggcgaacctcacgcttcccgatgggcggacactcagggcgggacagcccgtggtgacctatgtggcgcgcaaccttgagccccatcggggcttccatagcttcatgcgggcgcttccggcaattctggcagggcatccgcaggcgcaggtggtggtggtggggggagatcagtccagctacagcccccgccccaaggatgcccccaactggcggaacaaattgctgtcggaagtggagatcgatgcccgcagggttcactttcttggcaaagtcccctactccgtccaccggaaagtgcttcagatttcagcggcccatgtgtatctgacataccccttcgtattgtcgtggtcgctgcttgaagccatggctactggctgtgccatcgtaggatccgatacggcgcccgtccgtgaggtcattcgcgatggcatcaacggccatctggtggacttctttgcgcctgatgctatcgccgcacaagtactcgccctcctcgctgccccccagaagcaaaccggacttcgcaaggaagcacgcctgaccgcgcaacgctacagcgtcagcaacggcttgcgggcttatcaccaactgctggcggacgccatggcgctatctgctcctacaccggcctga

SEQ ID NO: 336823 - DNA, 837 bp, Pseudomonas aeruginosa
atgcaaggagccaaatctcttggccgaaagcagataacgtcttgtcattggaacattccaactttcgaatacagggtaaacaaggaagagggcgtatatgttctgctcgagggcgaactgaccgtccaggacatcgattccactttttgcctggcgcctggcgagttgcttttcgtccgccgcggaagctatgtcgtaagtaccaagggaaaggacagccgaatactctggattccattatctgcccagtttctacaaggcttcgtccagcgcttcggcgcgctgttgagcgaagtcgagcgttgcgacgagcccgtgccgggcatcatcgcgttcgctgccacgcctctgttggccggttgcgtcaaggggttgaaggaattgcttgtgcatgagcatccgccgatgctcgcctgcctgaagatcgaggagttgctgatgctcttcgcgttcagtccgcaggggccgctgctgatgtcggtcctgcggcaactgagcaaccggcatgtcgagcgtctgcagctattcatggagaagcactacctcaacgagtggaagctgtccgacttctcccgcgagttcggcatggggctgaccaccttcaaggagctgttcggcagtgtctacggggtttcgccgcgcgcctggatcagcgagcggagaatcctctatgcccatcagttgctgctcaacagcgacatgagcatcgtcgacatcgccatggaggcgggcttttccagtcagtcctatttcacccagagctatcgccgccgtttcggctgcacaccgagccgctcgcggcaggggaaggacgaatgccgggctaaaaataactga

SEQ ID NO: 336824 - DNA, 126 bp, Pseudomonas aeruginosa
atgatcaaacgtaacctcaacgacctcctgtccttcgttgccgtcgcccgcgagggcaccttcacccggggtcatgccgagataaggggaaaattcattcatttggaatgtaagccattgctctga

SEQ ID NO: 336825 - DNA, 618 bp, Pseudomonas aeruginosa
atggcatccctcgaacgtaccgcctaccctgtattgtcgcgctcctattcgagggccgagcttcagcgtgaattcagcttctccgaggaagaagtcacgtgggtcaaaagtcgctctaatgcagcattccgactgaatctcgctgttctgttcaagacttttcaggtactccgatactttccagaaatcgctgaagtgccggagccagttgtcgatttcatccgcacacaaataggtctacgcagcaaggttgcgctatcaccctacaagtggatgcagctttaccgccatatgagtgccgttcgggaaaaacttggggttcgaccgttctacggctcggatggtcaagacatagcatccacgcatgcacagttgatggctcccctcctcgaacagcgcgctgacattattaatgcgatcattgacgagttgctgcgccaaaactacgagctgcccgcctattcgaccttgaatgacctagcagaagccgctcgtgcagaagcacaagagaaaatcttcaaccttgtggtagccagagctccaatcaaggtgatctataagctaagggatcttctcgacacgaatcgccccgggtttcaaggaggccgattggtttaa

SEQ ID NO: 336826 - DNA, 834 bp, Pseudomonas aeruginosa
gtgagaaaaatcatcggcctcgcagcgaaagcgagatcaggaaaggacacaggtgccgctttcctgatggagcatccggaggtagccagctatgccctggcgaatccgctgaaggctggatgtcagtcactgttcgggttatcgaattctcaaacctgggatgataccgcaaaggaggtgcggctggaggcgtggggcatgtctccccgtgaattcttccagcgcgttggcactgagtggatgcgtgacagccacgatcccctccactggctgaagcgtgccgaccgtgcgatcaaccaccctcctctgccgcctcgtcagctgacagatgcagaagcgaacgcctctgaaacgccgttcatgcgtgctgctcaagagatcttcggcttcagcgatgagcagatctggtccgaggccaagatcgaaaccgacagtttctggtgcatctcaccagaggccgcgatcgccctcataaagaagctggcaatccaggacttccctgacttcgccgccagacgcgagcgtcacgtgagggtaacctgctcggaaaaacctactcgcttcgaactcaacctcgacggcaaagaagtcatcatcatcaaggatattcgcttcgagaatgaagccaagtacatccgagatttgggtggggagatctggcatatcgtccgagacgacgcgaccaagatcaaagtccactcatcggaggcaggcattgccgttgcgagcggcgacatcgttattcacaacaacggaacccttgcagattatcgtcagagaattgaggaagcctgggcttcgttgaaagctcgcagcgccactgggaatgagtaa

SEQ ID NO: 336827 - DNA, 663 bp, Pseudomonas aeruginosa
gtgaacagccgattcatcccagcaaccgacagcgtatatgagctagccccgtcaacggattcacagcccatcccctgcgactaccagggccaccctttctgggacaggcagtctccgctctgcttgtccctgcacctgatcttcgtcaagtactcagctacgcaccgcaggctttcgggctacgcgctgcgtcaggctatcaagctctttttcgacttcgccaaagatttcaacgagcgaaaccccgagagcctacgcctcaatcatctgacagatatcagcgcagaagtattcaacaatttccgcacttacctcctcatcaatggggaaaagaaaaataacgccaacaagctgaaatcagcaatcacactggtctctaaagaaaccgatcttttgccccagattcatctttctgcgatcacaggcacggccgctaaaagtacgcccccaatcacgggtgagacatatgaaatgctcgttggcgcgctttgtacgcacgttgactcactctatgagaagctggctttccgggaaaaggtagcagcagccgagccgtacctattcgaagatgtcattcagacttacaccccaaatcacaccagagagaacatcttcaaatgggcacagtatgtagtggtcaacccatcccggacagtgggttga

SEQ ID NO: 336828 - DNA, 1008 bp, Pseudomonas aeruginosa
atgagcatccttgtaacgggcggtgccggttacatcggatcccacacctgcgtcgaactccttcgggccggccacgaagttgctgttttcgacaacttcagcaacagtcacccagaagcactcaaccgggtcgagcaaatcacagggcgtaagccgattctggtacagggcgatattcgcgaccagttggccatcgaatcggccttgcggcaacaccagtgtcaggccgtcattcatttcgccgggttgaaggcggttggcgagtctgttgaaaaaccgcttctctactacgacaacaatgtcgtcggcacccaccgccttcttgcagccatgcagaactgcggtgtcactaccctggttttcagctcttccgcaaccgtctatggagagccccaaagcttgcccctgacggaagaccacccactgtcggccaccaacccctacgggcgcagcaagctggtcatcgaagacatgctgcgggatgtgtatcgcgcccatcccgattggcgcattgccatcctgcgctacttcaacccggtgggcgcgcatgagagcgggctgatcggcgaagacccacaaggcacacccaacaaccttatgccctatgtggcccaagtggccgtgggtcggcgggaatttctcaacgtctggggcaacgactaccccacgccggatggcactggcgtgcgcgactacattcatgtggtcgatctggcggcgggtcaccttaaggcgcttgaagcgcttaatcgaccacagtgcatggccgtgaacctgggcactggcgtgggctacagcgtgctcgatgtcgtcaaagctttcgaagccgccagcggcaagcctgtcccttatcgcatcggtccgcgcagaccgggcgatgtggcggcctgttattccgatccgcgcctggcgattcagctattgggctggaaagccgagcgtgacttggccgccatgtgtcaagaccactggctctggcagaaacacaatccgcagggatacgtatga

SEQ ID NO: 336829 - DNA, 819 bp, Pseudomonas aeruginosa
atgcggagcttctcagtctcaccaatcgaaatgtttgccagcctctggcgcaaccgcgaacttatcaaggcctcggccaagcgcgaagtactggggcgctatcgcggctctgtcatgggcatcttgtggtccttcttcaatccattgttaatgctcgcggtatacaccatcgtttttagcgtggttttccaggcgagatggggtggtggcaccggttcaaaaacagaattcgctgtcgtgctatttgctgggttgttgatgttcaatctatttgcggaatgcataaaccgatcgccgagtttgatcctttccaacgtcaactacgtaaagaaggttgtattcccgctagaaatactgccggctgtcacgctgctgtccgcgatgttccatgcgctaatcagccttggtgtgtggtttctggcctatggcctgttttttggcataccgcatctgacagtattgctttttccgttgattgttctgccatttgtgatgttcattatgggcttgagttggagcctggcctcgttgggcgtttatctgcgtgacgtgtcgcaaatcatcggcgtggtgacttctgtactgatgttcatgagccccattttttatccggtcagtgcgttgcctgaaaactaccgccaccttctttacctcaacccactgacacccgtcatcgaaatgacacgcgatgtgctctattggggaaggatccctgatatccagttgctaggcgcatactggattgcaaccgttgtgattgcatggttgggttttgcttggttccagaagacgaggaaaggttttgccgatgtcctctga

SEQ ID NO: 336830 - DNA, 1398 bp, Pseudomonas aeruginosa
atgtcctctgaaattgccatcaaggtcgagaacctcagcaagtgttatcagatctacgaccaaccgcgtgacaggctcaaacagttcgtgcttccacgaatgcagcaattgattgggaggccaccaagtcagtattatcgcgagttctgggcattaaaagatgtttcgttcgatgtcaagaagggtgaatcggttggcatcattggacgcaatgggagtggtaagagtaccttgctgcagatcatcacagggacgctagcgccaacatccggctcaaccacgaccaatggtcgcatcgccgcccttctggagctcggttcaggctttaacccggaatttaccggccgcgagaatgtttaccttaatggcgcattgctaggtttttccgccgatcagataaacgaaaagttcgatgccatcgctgccttcgccgatatcggcgagcacttggaccagccggttaaaacctactccagcggcatgctggttaggcttgcttttgctgttcaagtgcaggtggagcctgaaatccttatcgtggacgaagcgcttgccgtgggcgacgcactgtttcagaaacgctgcttccagcgcatcgaaaaactggtatccgacggaacaacactgctgtttgtgtcgcacgaccaagaaagtgtgcgtaccctgaccaatcgtgccttgctcctgaacaaggggcgatccatcgaatgggggctgtcctcggaggtcgtgctgagttaccgcaaattgcttcacgatgaagaagcagcgtactttgccagtctcaccaaaaacctggttgagcgggcggcacaagcccccctccccagcgatccgcctgcggctgaacctgacgcacctgtcgccgctcctgcaaatgctatgcccggcatgggtgcccgttcagaccggctttcatttggcgatggtgaagtcaagatcatcaaggtcgaaacactgggttcggatgatcaaccctgctccttgttctaccccggtgagcgattacgcatccgtgtgacctgcgaatctttcgcaagcattgacaagcttaatgttgctatccgcttgagaaacaaagagggggtcaagatttactcttggggcaccctaaaccaagacatgaccaatcgtgccaaaaatatgaatgcgccgattttttgggtgcagcggttcgatgcgggtaaccggttccaagtgttgctggagtgcgattgcgcgctaggcgagaacctttatgaagtgcaggcatccgtttcttatgaagagactatgaattatttatctcaacgaatgttgcattgggtcgatgaagccgcctttttccaggtgtcgatcaagcgcgatgaatacttctttggcggtgtgatggatttaagaatgagcgcaacatggtga

SEQ ID NO: 336831 - DNA, 1857 bp, Pseudomonas aeruginosa
atggacatgcttcgcgaagtcggcgagcgctccgatgcccatgtcgcgcgctatctgtgggccgaaaaatatgtgcgccaaggcgacagagttttggatgctgcctgtggcctagggtatggtagctacgctttggctgaactgagcaaggcttcaaagataacgggcgttgacggtagcgactacggtgtcgactacgcccgtgagaatttctgttcgctttctccgaagctggatttcttcgcgggctacctgcctgagtgtcttgcaaagtaccccgatggccacttcgatgtaatcgtttcgttcgaaacgctagagcatgtcgagcaccctgaagcgcttttgacggaatttcatcgtctcctttcgccgggtgggcgtattgtcgtcagcgtgcccaacgattggagcgacgaaacgggcgaagacccgaatcctttccatctgcatgtctataccctagacaagctgcgagcgcagatcaagcaacacttcattcccgaagcgctgttccagcagatcgccagtggttgcaagacgacctcggcctggaattcctggcaacgcatgcccagaacgttacggagcgtaccaatcgacaccaacagcccgccacctagcgagtggtggctcatggtcggcatgaaagaccctgtttcaaactctattccctaccgggaaagtgtctacggctattctgcgccgccagccaacctgctgcaattcgagcgcgactacaagaacccatggctggtgcgatccctactcgagttccatttccgcgcaacaaatagcgacgtgctgcaccaggttgcccagcgggtgctcgcgcaggaaaacgcctcgatctcagcagacaagggggctgctcttgctgtattgggatatcagattctcgccaatgatttagcgaccagtgctgatgtggaacaatttattgcggagatagatccctatgtcactgccccgcacaaaattccgcatttgcagcgcttctatgtttctttggcttatctaaaagccagactactcgtgaagattggcaaattcgacactgcgcttgccgtgctcaatcaggtcgcaaactcagacctatcgatattcagccccaccttgggaactaaggtggtgaacgcggcttttgaagctggccttatgcttgctggccgcggtgacatcgttgcggcgcgagacagttggaagctcggcgtagagcgcgcctatgccttgctctcatctgaacttgaagagtttgtcggagacatcaataacccgcatgagtttccaacgatagatgccgtggaattcctggattctgctgtgcgctgcatcaaggcactgcggatcacctctgacaatagtttcgttccgctgtcgcgcttacatgagctgacgcgggaaaactggaagggaatgctggaagagcgctggtcggcgatgcagtcaatggaggcgctgatccgcgagcgggatgaggccatctccgggcaggcgcgaatgctggaagagcgctggtcggcgatgcagtcaatggaggcgctgatccgcgagcgggatgaggccatctccgggcaggcgcgaatgctggaagagcgctggtcggcgatgcagtcaatggaggcgctgatccgcgagcgggatgaggccatctccgggcaggcgcgaatgctggaagagcgctggtcggcgatgcagtcaatggaggcgctgatccgcgagcgggatgaggccatcatcgagcagcagaagttgcttgaaaaacgtcccactgtgaccgaagcaatgcgcgtgctgctttccgcagtccgggcgtcgttccagcatcgcgttggacgtgttttagggaaaaaatag

SEQ ID NO: 336832 - DNA, 1278 bp, Pseudomonas aeruginosa
gtgaattcattgaaacacatttcgaacggcgcactagcgaagtccaactacgatctttttcctgaacttgcgaccactcttttgtacttcatagagaagcttcacgaagcgctcgttaagcagggggtggagcaagtttatttcctctcgcgcgaagggcagccgcttaaacggatgttcgacttataccagaataaggtgagcggtagcatcgagtcacactacctcgaagtgtcgcgccgatcgaccctgctgccatcgcttaagtcccttgcagaagaaggcttcgagactctttttcggcaataccgccgtatctcgctgttcgagttcttgtccagcctgggactggaagcacaaatgaggaggattgcgcttgcacttggtttaccggaaagcgctgaagttacccgcgaagaggattttccgacaagccaaaccttcagtgcactcaaagcgctcccgctattccaagatctgtacgagtcagagcggttagcacgccgccgcgccttcgtcgcgtatctcgaagaactgtcgggcggaacactgccggccaggctatccatcgtcgatgtcggatggaaaggcacgatacaggacaatcttttcgcgttgctgtgccgtaatggtgacacgtctgtgcaagcggtgactggctattacatcgggctggtagctgcaggtgcagctagttctaaaaacgacaagcatggtctgttgttttcatcggtggcgggggtttcgccgaagtttcacgtcttcaatgaaaatcgggcactttttgaagtcgtgctcgctgcagatcacggctcgatagtgagctacgagaccacatcagacgggcacgcaaaggcggttcgcggcgaatttgaagaaggtgaaatgttggcccgcgaggtgttcccggttcagcgccaactcttcgaacatttcgagcggctcttgaatgagattcatgtccttggcaaggttcgaatgcttcgctttaacaaagtggttcgggcgcacgcgcgaatggttttcaacccgacgccgcgcgaaagaacgtggttctcatcggtgtttcatgtagagaactatggcgtattcgaacgttcgcacttcgccgccccggaaagccgacctgggccgattcagcgcctgcgttttcttaagcaggtgctgaaacggcgcgatgtcggcgccctcggtttttggccttggagcacgctttatgaacggggtggtgccctcccggctgcaatttacgcggcaattcgacgtttgcagagctga

SEQ ID NO: 336833 - DNA, 1230 bp, Pseudomonas aeruginosa
gtgaataaaaaaagaatctgctttctggtcggctcgatggccattagtggtggcacctacgtaatcgtccagcatgctgcttacctgcacgaccaaggttacgacgttaccttagcggtacaggaaccattcacagcacaaacgctggcctggcacgatcaggcctctcgattgcgttgtgtgccgatagacgcagccaagggcgaaacgtttgacctagtcattgcaacttggtggaagacggcgttggaactgcgtcacttcaattcgccgcgctacgcgtacttcgtgcagtcgattgagtcgcgcttttacccagcatccgaaggcccgctaagggcgctggtggatagcacttatcgcctccccgttgcttatgtcactgaggcaacgtggattcgtgatcacctcaaaacaacctatggtcatgatgctgcgttggtccgtaacggtatccgcaaagatgtctatcggacaacggggccggtcatttcgccgcgtaatcgcaagcaccagccgcgcgttttggtcgaaggacattttggtgtctcgttcaagaacaccgcgttgggggtgcgtctggcccgcgaggcgggtgcgaaagacatctggctgctgaccggcacgccggtcaaatgggtgccgggcgtttcgcgggtgttttcgcgggtgccgatgaaagttacgcctgatatctaccggtcctgcgatattctggttaagttgagcaccgtcgaaggcatgtttggtccaccactggagatcttccactgcggcgggacggccattgtgttcgacgtcaccggacatgatgagtacattgtcgatggacaaaatgcctgtgtggtgcatcgtggcgacatggatggtgtcgtcacaacgcttcgtcgcctcttgaatgatcggaccgagcttgctcggttgcaggctggtgcgctaaagacggccgaggcttgggtctcgtgggacgcatcgtcgtcagcgtttagaaactgggtggacgtatcgctggatggaccgactgtcgacagaacagctatcggcgaattctgcgataaagccttctctgagtacgtgagagatgagcagcagcgtctagccaatattccccgagtaccccggcaccgtcttagcgcgatggcctcgcgctttccggctccgctgctgcgcacgctcaagcagttcgaagctgcttgggaagtgttgttcggacccagggaagtccgctga

SEQ ID NO: 336834 - DNA, 2055 bp, Pseudomonas aeruginosa
atgtacaagattagaaccattgatgtttgggacacgctgttgagacgggactgtcaccctgaatgcatcaaactggcgacagctcatcatctcctctttggctggcgtgatcagatcaagcctgattttcgagatggctgggttttgtatagggcacgcctagaagcggaacgcacgctcgctgtgcaagccaaggctggaggcaaagacgacgaatatgagatcaccgaggtcctagcgcagtggttcgctgccatatttgccgacactgtgccaccggatttgccaaatcgcttggcggagttcgagctcagcgttgaaattgatcgatcctttgcagattccgatatcgttgagttcttacgctcccacgaagcagagaaaacgattttcttgtctgacttctatatgagcggtgaaatgctgcgccgcctgctttcagcaaaggggctgaacacgctggttaccgaaggcatgtcttcgtgcgatgtgggtcttaataaacggtccggccagatttttcgacacgttcattcgatccacgctatctcacctcaagagcatatgcacatcggcgacaacgaatggtccgatgtgtcgtcaccgcgtgcgctcggcgtgcatgccctacattacctgcccgaatcggcgcatgccgaacgcttggcgcgtgaacgtttgttttcttccagagaagtactgtttgagcatattcgtggagagtgcttggctcttgcccaaaacgagagcgaaggttttcctgcaaaacaggccgcagctctctctctgggtgtccaagccgcgcccttgtttatcggattcgcgttatggatagccgaacaggccgttcttcataagcttgaccggctgtatttcttcacccgtgaaggtgaatttttccacaaggtttttagcaccctatttccgcagggtcgactgtttggccacgatttgccaccagccgatatcctcgaggtgagtcggttgagcacgttcgcgccgtcgatgagagacgcatccattcaggaaatgtcccggatatggtctttgtttaaagtccaaagcgtttccggtttgtttaccactttgggtgtggatattgggatgttttctaagcttctcgacaagctgggcctgaaagaatcggatgtcatcaccgatcctgagagcaacccggaactgcgtcggctattcgaaacgcctgcgttcgctgaggccgtagagaattcattggcatcccaggccagcttattgcaaagttacttgaaacagagtggcgtgtatgactgtaatcgggtcggtatcatcgatatcggctggcgcggcaccattcaggacaatatttcattgtttgtacctgatgtacatttctatgggatgtacttggggctgcgtcgcgtcatcaatgtgcagcctggcaacgcctccaaggaggcgtacgtggcagatgaaaatacgtctagcgcgtcaaattcactttttacgaacttcgccgcaatggagttgctctgcaattcaccgcgcggaagtgtagtctggtacagcttggatgatgggcatgcaaaagcacagcgccatgtcgatagagaagagaatgcggcttacgacgagtttgtgaagccattccaagagggtgtgctgcttgcggcgaagcactggcagtcatatctcgagcgctatgtagtttccagtagtgaattacacacggtggccttgcacgtctgggataagctgcgcagaacacctgaacatggcctcgtggaggcttacttgcgtacgccacagcaagacatatttggctacggtgaaatcttcagcagaaaccaatacccttcgttgagtaccattttcctgtcgcccattttggccgcgagaaggcgggagttaatcgagttcatccgacgagttcagtggtcagaagccatcgaaaacgccaaggagatcggcccgatccatcgcactgtattgctccttgcatttcgagccgcccacttggttaaacgcgcagcattgaaggcgagactcgttaagcggagtaagaatgcgcagatgtga

SEQ ID NO: 336835 - DNA, 912 bp, Pseudomonas aeruginosa
atgcgcagatgtgacattgtcattgtcaactacaacgctggcaatctgctcgccgactgcgtgcagtctgttttagccgaaggcgcttgccatgtgtttgttgtagacaacgattcgcacgacgacagccttgcccatttgtccgcatcaatcagcgatgcgcgcgtcaccatcatccgtaatggccagaacctggggtttgcggccgcttgcaatattggtgctcgcgcttccaacgccagcaccctgttgttcctcaacccagacagtgtgcttgccgagggtagcttgcggcgcatgatggacgtactggaaagcgactcttcaatcggtatggtgggtgggctgctgtgtaacccggatggctctgagcagccgggtgggcgccgagtctttcccacgcccaggcgtgcattcatgcgggccttcggcttgtcgcacctgggcaagtggtttcccgctctgttctctgattttttgctccataaggagccgctaccgcttgcacccacccccgtggaggccatttctggtgcctgcatgttggtgaagcgcgaggccgtggaggatgtagggctgtgggacgaaggctattttctgcactgcgaggacctggactggtgcatgcggtttcggctgaacaattggcgtgtggtcttcgtcccggatgccagggtgatccacgtgtggggagcttgtagccggagtagaccgttttttgtggagtggcacaagcaccacggcatgcttcgcttctacaacaagttcttcagaaagcagtacccgggtccgctttggtggctggttgtattgggtgtctggttgcgctttggcttggtgtccacgtacttcgctgcgcggttggcattggcgcaaataaagggtgcgctcagaggaggcgtgcgtgcctga

SEQ ID NO: 336836 - DNA, 879 bp, Pseudomonas aeruginosa
gtgcctgatcagaaggtcggcgtcctgggggcaagtagtctcgttggtggctgtctcctagcgcagctggaggagatggggtggggtgctgtcgccttcagtcgtgaaaaacgggtggagaatcaaggtggcgctgtcgactggaggcagctagctgcgcctggcaccataggcaccgacattgcgagcaccatcagtcactggatttgcgttgcccccatctgggtgttgccggattattttccgctcatcgaggcgagtggcgcgcggcgggtggtggcgctgtcttccaccagccgtttcacgaaagtcggctctggcgatacggcagagaacgccatcgcggcaaagctgattgatgcggaggcgcgagtgcaggcgtgggctgagggccgaggtatcgagtgggtggttttgcggcccacgttgatttatggccaggggcgggacaagaacatcagcgagatggcgcgctttatccgccgctttggtttttttccattgctcggttccgcacagggcctgcgccaacccatccatgccgaggatgtggcggcggcttgcgtggcggctttgcagacacccggggcggctaaccgggcctataacctctcgggtggcgaaacgctggcttaccgcgagatggtggcgcgcgtgtttgcggcgctgggccgcccggcgcgtttggtgactgtgccgctgtgggccttccgcctggcggtggccatgctgcggcgcttgccgcgttatcggcactggtcggcggccatggccgagcgcatgaaccgggacctggtgttcgaccacgcagaggcagcacgggattttggcttcaagcccaggggttttgcgctggtagcggaggatttgccgcgatga

SEQ ID NO: 336837 - DNA, 1083 bp, Pseudomonas aeruginosa
atgagcctgttggtgaccctgttggtcttgctcgcgacgaccgccctgctggcctggggcgtggcggcgtgggtgcttcgccgtgccgaggcgctgcgcctagtgcaaatgcccaatcaccgctcatcgcatgactgcccaaccccgaatggcggcggtctgggcattgtggtggctggcagccttgccggtatcgccttggtgctgctctctggctggatggtcggtgggttgttgctcgggctcgctgccgtgctggctgccgtggggttgcgcgacgatatggcgcacctgccggctcgggtgcgcttcggcgtgcaggtggtggtttgcgcaggggggctgattgcgctgggtgatttgcccgcattggccttgagcggtgggctggcgtttcaggtgactggctgggtgctgtttgggctgttgctgctggctggcgtgtggtggatcaacctgttcaatttcatggacggtatcgacggcattgccgggatgcaggctatcttcatgttgctggccggtgcggcgatggcgatgtgggccgacccgcaggcggttcacagccccgtttggatgctaatgctgtgcgtggcagcggcaacggtgggttttttgctgctcaactggccgcccgccaaaatcttcatgggcgatgtgggcagcacctggctggcgttcatggtgttcgcgctggcgctgctttccgttcaagccggttggttgaattacgctgtctggctggtgctagcggctgtttttgtgaccgatgcaaccgtcacgctgctcacccgcatgctgcgcggggaacgttggtacgaagcgcatcgcagccatgcctaccaacgtttgtcccggcggtggcatggtggccgcaaggcggggcatcgcgcggtgaccttgctcgtggttgcagtcaacgggctgtggctcgcgccttgggcctgggcgtgtgtgcaatggccggccgtgtcggtggcgtttgtggtggctgcctatttgccgttggtgttggcggcgttgtggttggggggcggcaggcccgactcttggttgcccgacgatcagcgcgtgagaagctaa

SEQ ID NO: 336838 - DNA, 1977 bp, Pseudomonas aeruginosa
atgccgctgacaaaactggcgcttcccttgctggccctgccacgctccgccaagcgcgcggtagcgctggccgtggatgtcagcttgatcgtcctgacggtgtggattgcgttttacctgcgtctggatgagtgggtgcgtttatcaggcgaaggcttattccagcccatgtgggcgatagcagcgtcgtggctcatcgccttgccgctgttcatcacgcatgggttttaccgggtgatcttccgttactcgggcacggcggcgatgcagatggtgctgcgggcctttgccctatatggtctgctgtatgcgtcggtggtgacggccatcgggctgcctggtgtgccgcgtagtgtgggcatcatccaacccttgcttctgctgttggcagtaggcgcctcgcgcgcgctggcgcgctattggttgggcggcctgtaccagaacatttttcagcgaatgaacttgcccaaggcggtgatctacggtgcggggcaagcaggccggcaattggcacaggcgatggcccacggccatgagatgcgggtcgtggcctttttggatgacgacgatcgcctgcataggcatgtactgaatggtttgccgatacacagcccgatggacttgcaggggctggttgagacgcaagacgtgcgcactgtgttgctggccatgcctagtgtctcgcgccgccgccgtaacgagatcctgagccagattcgcaacgcacacgtggcggtgcgcactttgcccagcgtgaccgatctggcccagggcaaggtgagcatttcggacttgcacgagctggatatcgacgacctgctcggccgcgagccggtggcacccaaccacatcctgctggccaaaaacatcaccggcaaagtggtgctggtgaccggagcgggcggctccattggcagcgagctgtgccgccagatcctggcggtgaaccccgccaagctgttgctgatcgaacagagcgagttcgccctgtacgcgattcaccaggagctggaagaaaaactggctgggctggacggtgccacgccaccggtgctggtgcccctgctggcctcggtgcaggacgacgaccgtatgcgcgagatcatgtccacctggcacccggacacggtgtaccacgccgccgcctacaagcacgtgccgctggtcgagcacaacccggccgccggcatcaagaacaacgctctgggtacgctgcgcaccgcccaggcggccgcagaaaacggcgtgagcgactttgtgctcatcagcaccgacaaggccgtgcgccctaccaacgtgatgggcgccagcaagcgcctggccgaaatggcgctgcaggcccttgctgccacccaggccggcggcatgggcgtgacgggcagcacgaggttcagcatggtgcgctttggcaatgtactggggtcgtccggctcggtggtgcccaaattccgccagcagatccgcgacggcgggcccatcaccctgacgcacccggaagtcacgcgctacttcatgaccatcccggaagcggctcagctcgtcatccaggccggcgccatggcaaaaggcggagacgtgttcgtgctcgacatgggccagcccgtgaaaatcatggacctggcgcggcgcatggtcgaactctcgggcctgacggtaaaagacgagcaacaccccgacggcgacatcgaaatcgccgtgaccggcctgcgccccggcgaaaagctctacgaggaactgctgatcggcgacaaccccaagcccaccgtgcacccccgcatcatgaaggcccacgaggagttcattccctgggctgagttcgaggccaagctcaccgccctggaaatggccctgaacgtgaacgacgtgggagtgatccgcctgatgatgcagcaactggtggccggctacatccccagcgacgacattgtcgactgggtgtacttggagcaagaggctgaagcaaaggcgattgcatga

SEQ ID NO: 336839 - DNA, 609 bp, Pseudomonas aeruginosa
atgaagaccaatgttcatcacttggttggttggaagttgttttgcgcgaagtgtcgcgagggggaggacaggttttgcccggcagctaccagaaggcaactcaaccgcttctacgcaaggtatcgcttggctgcgcactttgaagccgtgcatgcatatgggtacagcgaaaaggccttgcgcggctacaccgctggactgcgtttgctggcggcttacagtgccgccgaactgcttggcgaagccattgggatcaacgtcgcatcttggaagatccccgattccgccttggcggcagcgttgcgaaaagtcctgcttcgaccttctgcggattccacaggactgttcgcacaagaagggttgcgaaaaaagctccagctgttcatggacggtgatattgacatccgcattcctgccacagccttacgcgtcatggtggcccacggaagtttcacgccgacaggaacggactccctgacaaaggcgggtgccgaagcgctacagcgactgtctgatgttttactgcacgagtgcgagcggcgttttggcgcctggcttcatgagatgcttgcgaagcgtgatgaggccgcattgtcagccattttctag

SEQ ID NO: 336840 - DNA, 327 bp, Pseudomonas aeruginosa
atggtaaacgactcgttgaatacagcacgtaccgcggctgaattcatagtacagctgctggagcgttcagcaggtgtaaaggttgaaggggacctgaggcagaccttgatttcaatactgcaggatctgcccgaaggagcgaatgtgcgcgatctgcaaaatgcagttcttggcatcgagactgagcaggtcaagccgttgcttgacgcgctcgatcagatggccaacgccacgttgcgcccccaagatgagtattggcaattgttcaaagctggcgaactaatccagctggatgctggcgagccccgcgtcctgaatcttgcataa

SEQ ID NO: 336841 - DNA, 462 bp, Pseudomonas aeruginosa
atgatcgaacgtaaaaccaagcgtattcgccagaagggcttcaccctgatcgagctggccatcgtgctgggggtcatcgcgatcctgactgccttcttcctgccgggcatgctcaaggcgcgtgaagactccaagctgagcactgcgatcactcaactgcagaaggacttccccggggctatcgcccgccaggtgagccgcaccaacacctgcagcacgaccaccatcactgcagccaagctgaaggaacgcggactgcccgatctgactgtctggaacactgcctggaccgttgatgctgtcaccagcaaccaggtgaccatcagctacaccctcgacagcaccgataccaatgctgcagctgacctcgctacagcgttgaaccagagcaacaacatcgtgaagaactccgcaacagcgacgggcaacaccaaggtgacagtggcataccgctgcaactaa

SEQ ID NO: 336842 - DNA, 1758 bp, Pseudomonas aeruginosa
atgagcaataacatccaggggattcaacgcaagatcctgcggaatctggtggaggcggggaaaatcacccaacaacaagccgatacgcagccagtctctgaagtcatcgagcaagttgttcccgacatcctccgcgtctgcaaggacgacgaagcagttgcccatgcgatcggcaaggcgctcggtcgtgaagtcttcttcgagctggaggaagggctttcgattacccagggcccggaaggggaaccgtggttcatttacggcaacaccatctacatggccaatccgttccacaaacggatgcacgagcgtgccacggggttcgccaggaccaacaatattcaccagccgaaggttggggttgtgagcttgactcgcctggaagcgatcaaggccatcgaaacggaagatgacgatagcgcggtccatgacagcgagcagctaaaggcccgtgcgacacagcgagtggaagatttggtgcgcgaggcggccaagctcaatgcctcggatatccatcttcagcctacccaaggtgatcaggtccaggtcaggttgcgaatcgacggcgaacttctgactcggaagctctacacgtccaagattcacgaggccatttgccgagtgatcatcgagaacaactgcggcctcaccctagagctgaacgcagcccaggatgggaaatttgatttcgcggtctcagcccacaagaaaatcaacctgcgggttagcacacttccggtcaccaaaggctcggagagcacccccaaggtcgttgttcgtcttttgggtaacgacacgagtttggcgaatctggacagactgggcatgtcacccgaaaacaaggcgatgctccgtcgactgggtgaggcccccaatggattgattattgtcacaggccctactggctcaggtaagaccactaccctcaatgcgatgctcctggacatctatggccaggacccgaaccggaactaccacaccatcgaagagccggtagagatccagcatgagggcatgtcgcacaccgaatgcggtaagcacttgtcctttgctaccgcactccgtgcgttgctacgacaagaccccgacgtgatcttgcttggcgagatccgtgacaacgagaccgccgagtacgctttcaaagctggccaaacaggtcacctggtcttgaccaccttgcacaccaacaatgcccacgagtcgctggatcgcctcggccgaatggacattccgacagacatcatcgctaccaatacgcaagccatcatggcccagcgactggtacgcagcctctgcaagaactgcagagtcgaatatctcttcagatctgatgaaaagcgcttcgccttgtatggctcgaacccggtgtttggtggcaacggtgaactcaagctttatcgagcaaaccccaaaggttgtcaggtgtgtaacaacggatcgcatcaatctggcggcttgaaagggcggcgcggtgtcatcgaggtgcttgagcttacgccggaaattcaggaggccattttgaatggaatctcccccagcttactgagacgctcccaaatcgcagaagggaccttcaaggacctctgggacgatggtttgcgcttggtgttcgaaggtgtgattgggttcgagcagctcgagaaagagctacggccgtacctctccgaccgagtcggtgccccgaagaatcgtcaggagaaagcgggttttcgccccgtccgcgaatccggcacttcgtccttggttgcacagctttaa

SEQ ID NO: 336843 - DNA, 516 bp, Pseudomonas aeruginosa
gtgcttagccttgtcttcatcatcgtcagggacgcttttctgagaggggccaggctggacgggaccgcctggtgcagtctgtccatttggtccgctcatccccaacgtaggctggtcgagcatgaacggtgcggcattggggatgactgggttttgaccgaacgggaggtcagctttatcggatttactgcctgccttgcgcacctctttacccagagtagcgatgtctgttacgcccagtggagagccactttcgtccacaatgaagccggcatccgacattttcttgtaggagtcagccatttcagcctgaagtttcagctgatcgcgcttgtactccatgtcaccaatttttcggctgcggtcacgatgagtgtcagcatcgtccgcatctgcgaaagcatagatagggagcacaaactgagttgccaaaagagtgcctatgacaagatttttcataatcacgtacccacgaccacaaagttaagtttcatcactccgttcgcaatggagtaa

SEQ ID NO: 336844 - DNA, 5766 bp, Pseudomonas aeruginosa
atgcccaagaatgtccacgcggcacatctttcctggattcggcccccgatcatcaagagcgtcgagatcgccaaggcgtctatcgacacctacttcaaaaaacatgctgatctacagaatcctcctcaaggggcacaggctgaatggtttgccaaccagaagaaggcgatggccgatgccttccgcaacgtcagtgaacacgtagagttgattcactctgcgctgactgtttgcgatagccccggaggctcggctttatcggttgaaatgcgggtagtctgcaccagtgtccaagaaaaactcctcgaagaggagaaggtggcccccgcaattcttgccatgatgtccggcatgatcatgctgccaaactatctgaagatggtcattgatggagcccctgatgctcctggcatcctctccaggcagatcaatgaaatccgtgaggtcaggggcgttcccttgcttgtcgaggacagtctccccccaagcatgctctcattcgagtttgttgatcctccccgcaagattcataacgttgacgatgcccggcagcaggaggtcttctcgacctcatctcgtcgcttccagacagccttcagttcctacattgggacccagaacaaaggcgcgctggcggacatgcgccaggtcctccgagaactccaggaagtttctcataagccggaagtgggcgacttctggtgggttggtgagtgtctactcgaggcacttgccatcgggggccttcgtagtggcggtaacaccgtctcccaggttcgcatgctgtctgtcgcggttcagaaaatcggtctaggtggtgaagaagccgccctggaagtcctgggtatcgatcgcttcaagtcgttgctctacgtactgagcctaagttcaaaaagcacgcctagcatcgaagccgcgttgagggttttcaatgtcgggaagtcagtcgacaccgactcgctggcaaagcttcagagcaagctcgaatctactgaggctacaaccattgctgacgtcgtcctggagctgaagcctcttctggatgcagccatggtctctctggggcgggccctgggggcacgctctgacgacatcttcagtgtccagctgtctgcatatagcgcggcgatgcgttcagtagcgaacgtgttctatatggtgggcgaggatgagcttgcaggggttgccaataagtccatcgcactcgtggctggcaaggaaggtatttctgccatcgctgccgaggtggtagacgatctgaagtcttacatcctctacctcgacgagcgcatcaatctcatcaatgaaaatgacgcgacaaaggcactgaacattgagggtgtcggtgccgacgttctggacacactcgtctcagaatgtttgatcgaagtggtgaagactcgtcgttccgtttcggttcacgtagaaagtggcattggccaggatgaactgaaggacggacttgcatctctcgtcaatactgctgcggccttgaagttttcgggagcagaacaggttggtgatttgctcggtgcagtctgctctgggatggtaggtctcctagataatgcggaactcacgtacagcccggagttggatctgctggcgaaagccttggtggcgattgagatgtacctcgaagccatcaaatccaaacttgaacctgatcccgaaaacctgacgaaggcagctgaagctctccgcgaactcgggatagatttcactgaggtggctccggtaaccaccaacgaacttttgattaaatttgaggcagcccaggaagaggtacgcgaagacgatgatccgttcctcaccgagcttttcgagctgaggagcgtcttcgaagatagcttcacgagcctcgacctgcgtagtcgttcgtccattgagcaactctacaaggctgcagaccgcctctccatggccgcccgtatgcacggtcatgagtcgttcggaaagatcgccagtggtgttgctgccttcagcaaaggcgtaacaaaccgagccctcaaagaggatttcgaccatgcggaggagcatgacttgctgcgctccggcgtggagatgtgcctccgctgcatggatgaatactctctcaggaacaaggtctccttgtttgtgaaagatgtggccgatgcactcatggctaaagctgatccggaaatgcagttggcatacacgtctcatccagagataccggcatcgtctactaacgcaactcatcagcctgcagtccagaacaagctcgagcaagtcgttgccgagccggatgcagtaatactggcccatgagcaagaacgggaaatgcccgagggcgtcgatccggtcctgatcgatatcttccgtcaggagttcaccgagcaatacgcagcaatgagtgcgtatctcaaaagcgggcgaaaagacgtcaacgaagcgttttgccgtgtcgctcatacccttcatgggatttcgtccagtgctgattgcctcccgcttgcaagtgcatttgcagccctagagactcgcctgttccagttgagaagtgaagaggccgaactgctccagggtgatgtagaagccctcctggatttcctggcagatgctgaacgtttccagcaagctttcccttggaagactgaaactcccgcacttcactcctggctagaggttgtccaggcattggggtgcggggcggaagaggctgagtacgttgaggtcgctcaggtcactccagtttcgcatgctaaaccggaaccggatgctccgcaggaaagtcatcagccggaaaatttgaacccagtttcgcatgctaaaccgggaaactctgaaagcgatgatgtacaagagtccaccaccaagcatgcgcagcagccttctgccccgccggcgattgaatacaacccggagatggctgagttctatattgaagaagccgaggaagttctccctcagcttcagctgaacgtagaccgctggatgggccagatggatgaccatgacctggttaccaccatcaagcggcagatgcatactctgaagggcgctgcagctatggcagaggcagcttcgatcagagagattacccattacatggaaagcctcttcgagagtctttccctgagcatcattcctgcatcagatgactgcgccaggctggtcgagtatgttttggtcgcattggatcaaatgactagcgcgatgcgtcgcgctgtcgggtacgaagttccctcggccttgatccgttgcgttgaagctgcagtccagcataatcgagtggatcttggccttcttgctcaagagccctgcacagccggcgaggtcctccttcaagatatccagctagagaaggtggccacccaagatgccagggccgaaaccctagaagcttgtgaagcacaatctatcgcagagcttgaagaagaaacgcctaagactgaagagttcgagcaaggcatcgtccatcctcagggtgaggaaatctctttggcggaggaagagtcaggacacaaaaagactcgtcgcaggtctcgaggaaaaggtggtgcaaaacgtcacgcggcccgtatggcagctcacgctcaacccgctcaggaagacagtctggtggtgtcctcggagccggaagactcagtcgaggtcgagagtccagctttgcccgccgtcccggaagctacccccgaagagtctggcaagtcagtgccggcacctgtagcaattcccgaactcgttgaagtcccaccgtcaatttctgccgttactgtacaagagcaggaagtacaccatgagccagagcggcaaagcagaactcttcgcgagtcggtcgaaggcataacctctaaatctgccccaaccaagcctgtcagcagctcggtgattcgcgagatcctggcgaaagcccatgactccatccacggtgtcggcagcaaacgtcgaagcggtggctcggaaaaaatcaaagtggatcagcgactactggacactgcagtcgagcagtccagcgagctgaccgcagcccgatatcgccaacaggcgctgcatgccgagttgatgatgatcgtaactatcattcgggagaagctcgaggcgcaacagttgaaccacatgaagttcaccagcgccctgcgtcttcacacaaaccaacccgttccaaccgccttggcccatcaatcggcaggtgattttcagcttgagcgattcaatgatctttcagctctcaatgtgaccatgggggctcaactggcccagaccatccaagacgtcgaggaaatgttcgcacagggcaagctgatcaaagactcctaccgtcaacaggcggggctcatcagcagcctgcaacgagatcttctcgatagccgcctggtaccgttccaaaacattcgtccagccctgaccaacctcatcgagcgtgagtcttcaaaactagggaagaaagtagacaccgttttcaccggtggcgacgtaatcgtggacaaagtcatgctcgatgctgtgcgtgatccactggtccacctactcaacaatgctctcgaccatggtatcgagcctgaagcacagcggattgctcaagggaaatccgcgcatggcagcttggaggtaaacgtctgccgacgagctaagaacatcgtcatcactgtcaaggacgatggcaaaggcatcgataccacgatgatcaaggctaaggcactggagaaaggcatcatcaggcaggatgatcaactgaccgaatcggatctcctgagactcatcactcacaatgggttctctactgcagcaaaagtctctcagctgtccggccgcggtgttggtatggacattgtcgctacgacggtagaaagcatgggcggccggctggtaattgacagcaaggtaggctggggtacgaccttcactttggaaatgccattcactatcggctcgaaccgagctctcatctgccgtacgggcagtcaatggtttgcgattcccagctacaccatgtaccagatcatccagtgctcccgagccgatctggaaaaacagcggttggagaaggggaaagcggtacttcatcacgaaggaaagtccttcgaggttgtgcatctggccgacctacttgcaatgcctgagatgcgttccactcacgatttggaccaggaggtcctggtcattctgtgtcaacaaggcgaaatggctattggtattgaggtcgacagcactgattcaatgcccgagatccacatcaggaagctggacggcatcctttccaaagtgcgcgggatcattggcgagacagagatgcaagacggttcgccggtcttcgtcatcgatgtcatggagctggtgaggctcaacctcaagcggacagacaccggcttcaaggttcggcaaaaccgtgtcaagtctgtgaaacgagatctcaaaccggtctgcctcgtcgttgacgatgctacgagttatcgcaagctgttgcagaagcacttcgaggctcgtgggtatacggtcattactgcccgcgacgggcaggacgcaatggacatgctccctctcgagagactccccgaaatcgtcatggtggacatggaaatgcctcgaatgactggcttggaactcacaaaggcactgcgagcccgggctgaattcaatgaggtaccaatcatcatgctcaccactcgcacaaatctcgaggacgaggccctgcgagctggcgtaaacgtttatctgaacaagccgtgcgacagcatcgcgctcgataacgcgattgcagaagttcgcccagatcaagcattgcaagggtcagctgcatga

SEQ ID NO: 336845 - DNA, 354 bp, Pseudomonas aeruginosa
atgagtaatttgagcctgcctctgtacggtgctgagatcgaggcttttggagttcttggcaccttcatcggcgccgacttgatggatgatggcgatctccacttcactctgaaaatgccggaatccaatgtgcgattggcccacagttacgcggtggccgaagatcagttctgcctagtcgtgggagcaagtctgatccaggtgtcgaagaagaactgcgtatggcgcagctcacctggctttgatgtgactgatgatgagggattcattgcgtttcgcgtcgatcggcatgtacgtgcggcggtaacagtaatgaaatttcaacgagccatctctcgtctcaataggatctga

SEQ ID NO: 336846 - DNA, 696 bp, Pseudomonas aeruginosa
atgtcggccgagccatcccccgcacaaacaattggcagagctcgtgaatttggggctctagcccccttaaaccgcaagaagattcgcgctcagtttgggttggtggacgtggtcactgcagaccatgtccgtagggctactgccctactgctcgagcgtattcaggactactacacagttgtccagtacaccggacctggctacgtatatggccgcgcggacagtgagtggccgtccgccctctacgcaacaccagagttcaattccatggaaggggaatggagccataaggaaatgtctcctactcatccgacttgtacctcagagcggctgttcaatgaagcgggatggctttgcctcgacactgcttgtcgggttggggtgtatgaaatgtgcctcgaggtccctgaggccaagatggtcttggagcaggcccgatatgcaatcctgagcatgtgcaatgatcgcgcattatcagagacggactggagaagctcacgacgcaggatcggtacccgagggatacgcaaattgctcgagcgattgggctcggtacttcacctcgtcaacattgggatagggtcagtcagaccggttgttatggctccaggttcgacgcttgccggtctcaaacacattaccgactggtcgatgggttctgagccaggtcgaatgactggccacgttagttggtag

SEQ ID NO: 336847 - DNA, 705 bp, Pseudomonas aeruginosa; identical to SEQ ID NO: 333972

SEQ ID NO: 336848 - DNA, 2421 bp, Pseudomonas aeruginosa
ttgccgtcccagtattcacacaacacagacgatctcacaccggtcgacgcattgcccggatggaaaaagacactgggtggggtgctggctcttggcatggacctcctcaacgctcggcacgactcctcttgggatgagggctatcgagcaggtgaagcgtatggcagtgaacagaaagccaaatcccaaagccaatcccacgcggtaagcactaccaccggaccgcttgagattcgcgacctaagagagcgttccattactgctccgcgaattgaccaggtactcatagatgacgacaggctggtcgtttccacaggccttttggagacaatgcagcgagatgctgcatccctcctgccggcggatctgcagccgacacccgggcagtggaaagccatcgctaccagttctcgagctctgttggtgtccggccagggcggtaccgggaaatcgttcaccttggcgatgcgggcgctctatctgcacaagtacctgatgcagccactttcctcgatcagggttgttgtggattgcaaagaggtgaaagaggaattcgctaaacgactccattggatgtttcggcgatggagcatcgaatgctcggaagcagatattcagggatgcatcactactccagcagctgcagccctggaacttgtgaactcccttataggttgggagaacgtacggccattcgaagtgagggtaaattccgatgtcttcgaaatcaggccattcgacaccaggctgtcatcggcccagacctctctccttcggaccacgcatagcaagctctatcgcagtaatccccgatacgccgaactggttgtggggttgtttcgccagtccatgctcttggagccgttggaagttgatcaccccgacgtggttaagcgtgcagcgatagggtggaagttgagccagcacgatcaagacctttgcgagaaagtcgagacgttatggaaggaagctggtgcttggcccttggacgggataaagcccggtcgtcacaaggtggtggtacgcggctgcgaattcagtcttcatggcttcgtcccgcggctagatgcttttgttctgcttggtttcgatcgcaccgaggatcgttatctgacccgtgggccgggaatcaagctcgaggtatacaaggagtgtgagatcaagaaaacgctactccaggcctacctcgacaagcccgtgatccatctggacagctatcaggacgccaagcagatggttgcgacgctaaaagccttgcccactactgctcccgacttcggatacagactccgcggcgaaccagcacatgttccactggtggaagcgttctaccaagtagcaacgctggtggagaacctcgggatgggtgtcccccaggccgtaggtaaactcaacttccttcaaaacgacccggatgcgctgttcttcgaaggtcttgggcacttctggttgggttttgaaggcgacctgctcgcgaacgacccgcccctaatgacaatcaatcgactcctggaccttttctctgagcggcacggggcgaacttgaagcggcttcctgcggccgcgttgaaccgattccgacatctcctgcttgacgatgcacaggatacgagcgcccccactgcagacttcctacggggcatcctttcggagttcaaacgtcgagcgatctcgcacagagattccgatcttctgccctcaacattcactctcgccggcgatcccgtccaggcttcattcgcaacccaggggagttcaagccaagggcttcgccatttcgacactgaattcagggtttcaaaccctacgcgcgtaatcctccaggatggcttcagagggcaccagcacctcatcgatgcagcgttcagcgtggtgcggaatcaggtggacgtcggaaggcagtcaactgccctcatcgccccaaccaaacagtcacctgtggaaattcatagcttcgactctcatgtcctgatccggctactgcaggaggccgtagaaggaggaggggatgtgttggtcttggtggactcaattgcgtcgtaccagatggcagaagctgcagtggcctccctggtgggccagatcgatggagcgagatataagggcaagatcaagatccgacctttccaacgtgctcgccctgcggtggcagaaacggtcatcctcgcgggtaacttcaccactcgacctcgatccgactttcgcaatcaactattcaacctggcgggaaggtgggccgaaagcggaacgaaccactacgacgcgctactggatcaagagattcaacgtttggtgcacacaggtatcaccagggcacggactcgttgctactggctggtcccctctgtcgactccagcgccccagaatccgcagttggggtgtcgcctgcgttgagcaacgtcatagtcgacaaacgctag

SEQ ID NO: 336849 - DNA, 564 bp, Pseudomonas aeruginosa
atgaaatactccgaccttatcgatctccccaagcctggcacctacaacatcgggttgggctccgcgaaaaactcggacatgctcaaatacttcgggcatcccgtcctcgatgggaagtatgaccccaaggggaaatgcatgagcccgaatgacccagaattccagaagagggttgcttcacggaaggtagggccgtttagagcaacaggacttctgccggccttggactcgttgaagtccatcttcgagcgggtggagcgggaggtgccagacctatatcccttgctcaggaacaacggcatgctttgttctcgctacaccaggatcaagggaaaaattggtccggggatctcgaaccactcgtggggaacagcactggacatgttcatcgaaggggatacggagaagcagggagacaacaaggttcagcgtgggctcctgatcctggccaactacttcaacgcggccggctggtattggggagctgcattccctacagaagatgggatgcatgaggtgtccagaggcttgctcgcccaatggaaaaaggatgggctgatctga

SEQ ID NO: 336850 - DNA, 288 bp, Pseudomonas aeruginosa
atgcccaggctgcacaacaacaaggtgcagcagaaccaggcagagcgaaagaaattggcggattggttccgcgcgttggcccagcatattgaaggaaacgaaattgagcgtgaacctcttgctgccacggtagtcctgaccagcgccgccggcgacgaggttctaaccgtcggctatgacggaaatccgcaggtttgccgacggcaggccggttctgcagcgcatcgtttcaataacctcggcggttacacccgcagaggtggaaatttcttcgacaggctcaaatag

SEQ ID NO: 336851 - DNA, 456 bp, Pseudomonas aeruginosa
atgatactggtattgctcatctgcatttggctgcactccaggggctcgatgaccatctaccaggactataccgacgccctctggacaacgatgaccccaatcctcggagtaggggcttatttcctcgtgaagtggctggagttctcctcagagatcgccgcttggtcagccttgcttttgctggcgttgatgagtgtccagatcctcattcagacctaccgcagcaacggcccatccctgtatttcctgctctcgctctacgcgaaggttgtcctgttcacgctctacctgctcctaatgggccttttgctgcttggcgggacaacaaaggcggaccgtcgccggcggcgtggatgggcaatcgctgcaagcgcattgtttgccttctttaccgcctggatgtgccgtaaccggcagttttcacacattgacgactacctcgccggccggacatag

SEQ ID NO: 336852 - DNA, 1596 bp, Pseudomonas aeruginosa
atgcgaatcaatcaaccactcagcggccgcgaacgcagtttcccagcagaacagcacctcatttccgccaccgatacccgcgggatcatcacgtactgcaacgacgagttcgccgagatcagcggatttacccgcgaggaattggtcggcagcccgcacaacctagtgcgtcacccggatatgccgcctgccgtgttcgctcatatgtgggactacctaaaatccggacgcagctggatgggcatcgtcaagaaccgctgcaagaacggcgatcactattgggtcagcgcctatgtcacgcccatccaggaaaacggccgggtcgtcggctacgagtcggtgcgcagcaaacccaacagcgagcaggtgcgccgtgccgaagcgctctacgcgcgcctgaaccaggggcgcccggccatcggccgtggcgaagcattcgcgcaactggcacgcttcttcgtgctgccgctgctcggtgtagtgagcggcgcggcgctctggagcctggaattgcccggcacggcgctctggagcctggaattgcccggcacggcgttgctgctgaccttagtcctgcttgggctgcagggttttgccagcctgcacaactccagccagctgctcggccgggctcgtgcagtagcgccaaaaacattcgacagcccgctggtggcccgcacctacagcgatgcctccgggccaatggcgctgctgcacctggcactgatcagcgaggatgcacggattcgcacggcgctttgccgcctgggagatttcgccgaccagaccgccgccctggccaaggaaaacggccgcctcaacgagcaggccgaacgtgccctgcaggcccagcgcaatgaagctgaccaggccgccacggcgatgcacgagatggccgcgtcgatcaatcaggtcgccagccacgtccagcaaaccgctcaggaagcacgtcaggccagtgaactggctatggccggcgcccagcagtcgcagcaaagccgccaggtcatcgagcaactggcgcagactgtcgatggcatcggccaatcggtgcagtcactggccgatgaaaccgcttccatccagcaagccgccagcatgatccacgcgattgccgagcagaccaacctgctggccctgaatgccgccatcgaagcagcccgcgccggtgagcagggccgtggctttgccgtagtggccgacgaagtgcgcgccctggcctccaagacccgccagtctaccgacgtcatccagggcatcatcacggacctgcataaggaaaccgaacgtgccttgagcgtcgctcgcgccggcagcgaggaagcgcgtaacggcgtggcgcgggtagcgcaaaccgaacaatcgctgcaaggcatcagccagaccgtcgacaatatccaccagatggccgagcaaatggccgctgctgccgaacagcagagcctggtcgccgaggatattgcccggcagatcaactcgatttcgcaggccaccaacgacaatgccgaagtcaccggcaatagcgcgcgcctaggcagccagctacagtccactgcaggctccctgcacgcgctggtcgagcgtttcaacagttaa

SEQ ID NO: 336853 - DNA, 333 bp, Pseudomonas aeruginosa
atgccgtcctacatccagttgaagcgagcggactgcaagctccgagaaagtcatacccgttacccggccagtcccgaccctctgctgcagggcatcaagttgcaccttggtcatggccaggacgagagggcggtaagaggtgaggcagtcgatgagacgctcgatcatgaacgtctttcccgttccggcgagagcctggaggtgaaagtcctcatccagttccgacttaaagacgcggaatgcccgggcctgttggggggcgagggtgaaggactttccagctgcgtcaacaaacctctcggtaaatggattcaaggcctctgcatggtgtga

SEQ ID NO: 336854 - DNA, 261 bp, Pseudomonas aeruginosa
atgaagcttctggctttattgatgtgcatgagccctgtattggtttttgcgggatcaaacgattgctaccgaatcaaggaaaaagactcggaaagctattgcctggcggtaaccagtggtaacacttcgaagtgttacagcatcaagaacaaagacacagagaagttatgtttggccgaggttagaggtaatgcttcttcctgctacagcatcagagacaaggacactaagagcctatgtcttgcaaaggtgaggaaataa

SEQ ID NO: 336855 - DNA, 372 bp, Pseudomonas aeruginosa
atgagtacatctagcatccaggcactggccagcacctgggcacaactcgccaaagatgtgggattcccagccaactacgacggcacgtcaacgccagaaacacatcgggcctgcagagtaatccaagagtggattcgagaacacatcgtcgccaccaacgacatgcgtctgttcggcctgctgcacctactggagcaggcgtctctgcgcatggagcaagtgctgtggccggaagactatgagcgaatgacccgcgaggtcgaggaagctctccgtgaggcccacgcccccaaccccaagtcctacacccacgaagaagttatgcaggcgatgcaggaacgcatcgaccagacacgagacaaaccatgttga

SEQ ID NO: 336856 - DNA, 327 bp, Pseudomonas aeruginosa; identical to SEQ ID NO: 336095

SEQ ID NO: 336857 - DNA, 576 bp, Pseudomonas aeruginosa
atgctgattgggtacgtacgcatctccaccgacgatcaactgctggacctgcaacgcgatgcgatggccaaggcggggtgcgagcgagtgttcgaagacactgccagcggcgccaaggccgatcgggtcggcctggccgcgcttctcgccaatctacggcggggcgacacggtggtggtctggcggctggaccggcttggccgctcgatcaaggacctgatctacctggtcgagcaattggaggatgccggcgtgggtctgaagagcctgcaggagaacatcgacaccacatccaccggagggcgtttggttttccacctctttgccgcgctggccgagttcgagcgcaacctgatccgtgaacgcacccatgcgggactatctgcagcacgtgctcgcggtcggctgggcggccgcaaaaagcgcctggatcccgccaaacgcaaagtcgccctgaagctctatcacgagcgccaatacaccgtggtggagatctgccggatgatgggaatcggccgctcgacgctctacaactacatcaccgaggcggaacggaatgcccgccagcaggcgtaa

SEQ ID NO: 336858 - DNA, 885 bp, Pseudomonas aeruginosa
atgctcgcgcacgtagaaattgcttataaacatttaaggaggggacaaagggacaccgatgattcggcattcactgatgcagtgtatagaacaaatcaagcattcgaaggtggcctcaaagaggcttacggtgttctagccaagaaaagccttgataaaacgcgagtatttgatattgagcagttctttagcaaatctaatgtcttcaggaagagagtgctggatcaatttacgaactacagacaggagtggagaaacccatctactcatgatcacaaattggacttcagcgagagtgaagctttcctcgctatcgtgtcagtaacagcgttctcttgccttcttgttgacgagatggccttacagcttgcacgcgaccgtgaacaggagtccgcaaaactattggcgcggacgataaaaagcaagttaaattttgtggagggggatctttgggggcgtgttactgaggcccttaaatcgtattttactctccgtcccgtggatgagttggaaagtaactcgtatcctcagtggctagggtcagtagcgggttttttgtccgctatctttcctaatgcagaagtgctgtctgaatctccaattggcgggggaaaacggaagatttttgcagacgtcctagtgaagagtggtggtcagtcagtagttgtggagatcaagaatagattaaatatacgcacatacgaatcgatgctaattcagcttgagagcgtgatcgccagttccggacatcgagacggtatcgttttctatctcccaaccatggttacttctgggcacgtatttgaacaagatagacttttcaacggcggagaaggccgtctcaaagtgctcagcgcggtacccctaaaaacgcgtttggagtga

SEQ ID NO: 336859 - DNA, 942 bp, Pseudomonas aeruginosa
atgtcgactttggatatatatagcaagcgcgcaccgaatgaaggcttagctcgcatcgacttattgctgcgtaatatcagcagcaaagagctcaagaaaagagtcaaagagtttaacgatgactatagaaatttagccatcaaaaacatctatgagagaattaaagatgtcatcatgatctcgatagggcctatgcgagcgggtgcgttctccgcgcaagaaaaagaatattttcccggtggaatttttcaccgtgcgcgaatttggagttcggaattcaaagacctttcggaatcagagttctgggcgccccccgacgatcgcgtaaaataccacggtcgtgtcaatcggccatctcaagggttactatatacctctgagggtcaaatacctacaaaatttgccgaggttcgagtcaagcccgaatccaatgtgcttctgatggcttatcaatctaaagaagcgctcactgtggcaacggtgggcaataaattttataccggcctggcgtcagatactaagaaaaaactctccatcattcggaagtttatcaaccaaaacttattagctgctggcgaaggcgcctaccttttcagcagcgaatttaccaactcaatgttaaatttcagccctgatggttgggcatacccatctacggtttaccaaggcggtgagaatgtgtgtttccgccccgaatctcaacacaagcttgagttactcgagatttttgcattcaaggctaaagagagtgggctaagggtgcctgtagggtatttcctacggcaggaagatggatcctataaatatcacgcagaggccgaagcggcagctgcacgtttcactaaatttatgataaggcaccggagagtttgcgcatcgaatgaccgttctaccttggagcagaggactactataaacacgccggtcaggttaatcccctag

SEQ ID NO: 336860 - DNA, 417 bp, Pseudomonas aeruginosa
atgggggttgaaatggacctattcctcgcggggctgaaggagatcgccgccgcttcgtcgcagctcaccacatgggcgctggccatgctcggtggctcggtagctgtcgttattggatcgtcacattacagccctgtcggccggggatggcgtagcttctactttctcctaaccctaacctggatcttcttgctggtatccgtgcaggcgggcaatgaactctcgcgtagttacctggctgcgctgtttaccaagggcgcggtccaagatagggcgttcaatcagattaacgccgacttccaggctcaactggattacctattctacggggtcatcgcgttttcactttggctcacagcttatcttttttggtgggtgctgtttcgcgacgttgaccgcggtgagggtgatgcatga

SEQ ID NO: 336861 - DNA, 1479 bp, Pseudomonas aeruginosa
ttgtcgcacctaaacttggcaaccctgcttaacgcgctagcacgcaaccggcagactctggtctctgagggggagttgacgctctctgcttcgagcctatcagcgaacgttgcgattgaactggcagaagctacagtggctgctggttggccgctcagcatttttgaccagcagggaaatgagtacgagctcaacgaagtcgaagatgacttcgccccatttcgattggagcttcaaaagtctgtgtcgtcagctaatggtgatctgttcctagtcactgaggctggcttcaagaaatatctcgagaaagggcacgcctcaacgacatggcgcctgctaggcctgagccatccgttctgctgtcgatcgagagcgttcttgagatgggaggatgaactgagttttgaggttggacttccgtcaaagcctcccagactgctggtaaaggagtcttcttcagtccgaaccgttcctgaagatgtactgccttggcttctgctagacggtcagatgcttgatgccgccaatcctttccatgcgttatggatggtgcacgctttcgatgcgcttagtcgttgtattgcgaacgagatcgatccatcgggctcgaccttgcttttcaaggggccaccaaagctgaagcttgcgtttgatcctagtctcaaaatagatgcttcacctataacactggagcgcctcttgattctccaagaggctgccggatgggtgtatgacaatcctagagaggcagaaaccaagcacatcctactctcagctgaaattgctcgctcagggcgtgctgatggggaggtggtttcatactttggcgagcatctggaggccgccctagaatctgcgaagattgcctatcagatggcaatttccgatatcgcaaaggacaccctgaagtccttgggagaccttcgtaaggccgtaactgacgagacctcgaaagctaccgacgcaacgcggcaggcggtcactgctattgcgactgcccttactgtgggtttgggtattgtagctgcacgcttaagcgtgcagatcaacccgtatctcattactgccgctgtgctcgtggcgttcacctatacgctgatcagtgtgttctctggatggaaattcattcgtattcaacatgcactacgggaggaatggcagccaaagctttacagatttctggcagctgcagagttcgacaagatggtcaggcggcccattgctcgtgcagagcgcgtcttcaatggggttgcagttgtgggtctggcggtgttgctctcaatggtaattgcagtgagccatttcgccttcacccgagtggatccgccgcttagcggaaaggacgatggtgccacgccgttgcagagtccttcttcctctccagcatcgtccgccccaaagcaacaagaatctgagggcaatcgctctcgagaagagcaaccagacggttggccatctctgattacagcttccctatga

SEQ ID NO: 336862 - DNA, 1053 bp, Pseudomonas aeruginosa
atgagcttttttacggatgaagaacaggcctcgctgaccattaaacgaatgatccttcacgtggttggcaacaaggatttcctggccatgcccgagcgagcgctggaggaggagagcttcttcaaagagaaaatcctcgatacggctgccgcgccagtattcatgtttaagaatcattcaagcactaagcagcagctggaaaccatagctaacggcgaggcaacgtttgagcgaggagcccaggctctagcattgaacttcaacaacaaacatgttggggggagtgctgatggggtattgtgcatgttcgaactcgctgtcgacgatcccgatgtcaccatcttcagcttgatcaagtatgactataagctagcgcttgagcaggatgatgctcagccagcgaatgcattgcgacgtatcctgactgccctcgtcgacgacaagaaggctattcagaagacagccttgattcgcatagtgaatggtattgccagccaggacgtatccgccactgacaggacaaagcagggcccggatattgccgattacttcgctgactttcttgctgtcacgcgaagcatttcggacaccgagctcagcgaaataactaggaagctgctgaggagtaccctgcaagcctgtaagaaagacctgccgagcgaggacgtacctaaggctatcaaagtggcccagggtgttttaggcagacgaatgaagatcgatgaagatgcaatcgtcgaagctgtgctcgttgctgctaactctcctgtggatgagaaggtagcaacccgtttagagagggaaacacgcaggcgggttaagagcagcaagcttcatgaactcagcttcaaacccgaccgaaagattcttcgacaaccctacatgcgcaaaatcatgacggttgaaggtgtgacaattctcttccctgacaaggaggacaatcccaatgtgacggtgattgaccttgagggtgataagaagacgatcattgtcgagaccaacaaggtcacggagaatagcgttgtcgcacctaaacttggcaaccctgcttaa

SEQ ID NO: 336863 - DNA, 393 bp, Pseudomonas aeruginosa
atggtgctcgataccatgtcaaccaagctgcttaaaaccctcgcggcggtagccgcactcgcctcgctcgcagcttgttcgtcgaagtacgaaccgcgcgaaacgatcatcgaggagcaggccaagcctattaagcccctctacgcccccaaaaccgaactcgagcgccgcgcttacgaggaaggcgtcacacaggtcctcacagatctgaagggaaagatgcgtgcacgcgatcggttcacctgggacccgccgatcattcagtgcggtgttgatattcctgcacgggtgcaaaacggaatgctggtcccgggccacaaggaatgcgtccagatcgctccaggtcgctggaccgaagaagcaccaacctatctgccggtattgggaaattaa

SEQ ID NO: 336864 - DNA, 1548 bp, Pseudomonas aeruginosa
atgaatttcaaaaaacccaaaaaaccggtgctgatcgaggccgcgctattccttctggagcatcaatctcgggaggacgtgattctcgagccgtggcgggaggccctgcgccggctacaggcaggggacgtggagtctgccgcagaggtcgctgccagggcctaccacaatggggcctcattggaggaccgccgcgtggtgatcgacttgatctcccaggtggccatcgaaaacaagactcatggtcactggtttgagtcgcttctgctgttggctgcagaaggtgggctcagcagttgcgcatacaacgttgggctcctgatcctcgaacgtgccaagacggcaaacgaccatgctttggcccatcgttattttacccaggcagctacaaacgcgaccgacgcggcgacgaaagcctccgccctggtcaactcatgcgaaccaatccgcgacggcctgatcaccgggaggccggactggcaacgagcagtcgatatctacgagcaggccgctgagttgaacctcgcggtcggcatgttcaacgcgggcaacgtttcctgctggctaaaggacaaaggccagttcgcctatgcggcccgggcagtgaaatggttcactcatctgatcaacagggtggataccggtggcaccttcgtcgatctcggaggggatgccgaggttcaccaggtctaccaaatggccaagagccgactggctgaactgcacgcattgaatcaggttgaggttgtcgatgttgatctcatccttgccgcggccaaggccgaacctgactcggaacgtgcagcatggctgcttagccgcgcctacgaattccgactccgcagtaccgcggtgcaggcaaaacctgccgcctgggagaactggctgtcagtgctttcgctgttggggtgggagctagatgccgaacccgttcctatggacctcggccctggcagcggtgactcccgcgtgcttacgttcaagcgtgatcaaggtgctccccttgcccttgcggtggttgacctagacgaaatcgagaacaacggtggcgtctataggctggtcaaactggcgaataatgttaaggctgtacacccgggcccatgcctcaccattggagcaaaagggcttttcgtgcagatcgataaggctgatggccacagctcctacacagtgttcgtgtcgacaaactctgaaggagttatctcgctgatccccatctggccaggagccacaaccgatgacgttgccaagctagtcgatgtgcagggccccaagtacgcagcgaataacacggatgagggaaacaccatcgcgatactggtcaatgcccttggcacgggcacacctgtagacgggaaatcctttccagaggcgatctacgtgaatgtcggaggcttcttcaactcgcccgtcttaacggtggagcaagcaaggagcctgggctgcgagttgccagctaaagacctagccgacgccctggcaggcgtgaaagcctacttccgagaaaacgcacaacgtcagcgcaggtacctgggccatcagtaa

SEQ ID NO: 336865 - DNA, 666 bp, Pseudomonas aeruginosa
atgaacgctgcactctcaccactcactgatcacatgatcttcagccgtttcgaaatcgagcgctgcatccgcgtcgtttatgaggacgaggagacattgctgcccatcgatgggcgacaaaatgagaaacatctgagactggtcgcagatcatgatgagttgctgctcgagcacccatcactgcatctgctggagtcggcaaccatcagggggcctctcgcgctgctggcgcatgaggaatcggacgagcacgtggcagcgttgtacaacgaggacgattcgatcgcctactccaccggcgaatatggcggcgttcgttggcgcgtgctcggattcaccaagaattgtgatgccccgaccatcatggcctcaggcaactgcgaagcatcgataggccggatcgcctcctcacttcaagccctactgccgtcggtaggcgagaaggataaggcgatcgtacaccaaacctatgtcgctacgacgaaggggggagagatagagtacggatacaccttcaagggtgcgccggatagtgaagacagcctgtttgaccttgtcctcggagtcgttccagcggacaagcaagaaagcattcaaaccgaattccaacgccatgaatgggctgcgcgggcgatctcccgtgcggctgaatcggcactcggataa

SEQ ID NO: 336866 - DNA, 513 bp, Pseudomonas aeruginosa
atgctccgcgccataccgttccgtgcccccttcaaactggccctcacattcgtgtttctcaccactccgttatttgcccatgccggcggcactgccgcggccgcggccatagcgagtgctgcggctgcagcacactccgataaggagcctctggtcgctggacaatcattcggcgctacgggctacctgtttgttgatggggtgggctattcaggtggccggatggtgtattgcccggcttctgtggggttcgtcaaaccagaagacatgttccggtcgaagaacaagatcaccaaaggagtctgtcagtcgatcgcgggtgacttacctgctgttcctgcccaagacttcattgatgaagttttgggtaaaggtgaggcgacagtcgtcagtgttgcaccggtgctcgcccagtacggtcctccatatggagtgatttattacaaggacaacggcaacgaggagagcacgagggagaatctgaggaagaggaccaaagttacctacgaatga

SEQ ID NO: 336867 - DNA, 153 bp, Pseudomonas aeruginosa
gtgttcctacgccaactgttcttgaaattcaccctgttcttcagcctcatcatgctagggcatctgctcatcccaaaggaggtggcagaaaccctggtaaatggtgcctggcgttacatcctgtgttttgccgggggagcatgcggactctga

SEQ ID NO: 336868 - DNA, 123 bp, Pseudomonas aeruginosa
atgatgctcatggttcgccaccactattactacattgccggcgctaggctcgagggcgcggtcgaccacgagtacatcgttccggtgcactccgatcccaacaagatcgtcggtgtcgactag

SEQ ID NO: 336869 - DNA, 1083 bp, Pseudomonas aeruginosa
atgaggctggtgttcgcaacaaaagaccttgctgtagcgggtcgatcattcgaaggtttccctctgttggttggcgccgacggttggccagtggagccggcgcaatctttcctttggcacacgctagtcgagtcaggtgaggcactcagtgctctgacgtgggaggcctatggacgccgtctgttcgactacttcgccttcctcgaggccaatggtctggcctggaatgaggagagtcaggcagatggcctgagcgtcctgtcgcggtatagagactggtcgagcggtgagttggaactagatcccagcactctgaacaagcgactgaacctaattgtgaggttctaccaatgggccaagcagcgtgatctgatcgcagcgctgccctttggcgagcgaagggtcagagcgactccgcattccggcttcctcagtcacgtagctcgtcctaacgccgagagtacgaagccctcagtgatggtgcgagagcgtaagcgattgaccaaattcctgaccaaagatcaggctaaggtttgcctcgccctcgatgccgatccaagtcaccggatcttgttccatctgatggttcgcactggtcttcgctcctgcgaggcgcgcactttccctttcaagtacgtctttaatcctcggctgaagaagggcctccgccctgggcaaatgatcagcgtggctctcgagccatcggacatgcatctcaagtacggccgccctcgaacaattgacgtgccttggtcgctgatggaggaaatgtggtcgtacacgcttcatgagcgcgaagtacggaaagcggccggcaacgggcgcgccacggccttggtgctgacaagggaggggcggcagtacacgaaagactccatcgtcgacgtgatgaaggcgtatgagcgcaagtgcggattttatgttagggcccacatgcttcgtcatacctatgggacttatacccttcttgccctgaggaaaagccgagactttaaaggagagccattgctctatgtccgagacaggatgggacactccgatgaatcgccccgggtttcaaggaggccgattggtttaagttga

SEQ ID NO: 336870 - DNA, 192 bp, Pseudomonas aeruginosa
gtggcctaccccgcgcgcggccaggggcccgaccagcagggccgcgaccgctacgagtgccaccgctgggcggtgggcgagagcggcttcgacccggcgggggcgacctacgcgccggccgccgaggtcgccaacggctaccgccgggccatggccgcctgcctgagcgggcgcggctacagcgtcaactga

SEQ ID NO: 336871 - DNA, 228 bp, Pseudomonas aeruginosa
atgcttcgcttgatcattttcgctgtactcggcctcaccttctatctcggccgcttcaagagtgactggctgtacgccatgttcgatcaggacatgtccgctgacccggatcgaattttcggtctgctggcgaccatggggatcggtgcccttttccttctcatcctcatgttcgttgcgggctgcatggctgtcagtcagcgaagcgccgtcgaccaagaacagtag

SEQ ID NO: 336872 - DNA, 300 bp, Pseudomonas aeruginosa
atgagtcacctgaatgaaaagcagtgcgagctcgcggccaagctaaaggcagatgggttcacgctgatggtggaatccaaaccggaagttgggaagcgagttgaggcagtccgcatcttccagcctcgcggtttcggtggagtcatcctgcgtactgtgcgcaagatcgttccaatcacacggatggcggaatatagctacaccgacaccctcaataatgaagccgggctggttgaaagcgacttcgacggctggcgtgagctgcagacctactcggagcaatccgtacccacccactga

SEQ ID NO: 336873 - DNA, 384 bp, Pseudomonas aeruginosa
atgaccacgaagcccgactacgacggcaaccacatcaagaatcaatgctcacattgcaatgcaagcggtcaaggttcggccgaagcaaatgagaatgcgacagccaaagccttggatctttacgtccgagttggcctcggacaactggagcgtctcaccgagttgctacgggatggaattctgcccatggccggacttgatccgactcgaccgcgccaggaggcatctgtcgaggtgatccaacgtttcgatgccttgatgctggaagcgaaacgcctcctcggctatccggcaccgggaagccacggcatccaccacccccacgtacaccagactgtcaaaacagcccgggcggtgcagcgccagcaggaacagacacaatga

SEQ ID NO: 336874 - DNA, 327 bp, Pseudomonas aeruginosa
atgagccagccaactcccaccatcttcccttgcgacatcgaaaccaacctgcaggacctgggggttcagccaggctggttcgttcgttacggctgctgctccatctggttcgaggtcctgcaagtgttccagaactcggttgtatgcgttgcccgagatcctgcgaaagggactgagctggcgctcgtgggagaattctatagcgccattaacgaattctgcgacggtaacccaggccattacaggcactggatcgacaaggatcgccggaagagcttccgggataagttctttcctgagtccgacaagatcgttacccaatattga

SEQ ID NO: 336875 - DNA, 729 bp, Pseudomonas aeruginosa
atgaaaacgctggatcttcaaggcaatctgctcaacctgtacgtggccctggcaatgggcggcttcgatgagtcctccggcagctgggcaccattcgactattgggaaggcacgattcgatatcgagatgaggagttcagtcccctcactgacatcgccacaatttggcctgaggtactgcgtctccgactttcgactcactgcgacgatgatgggctctggacaatatcgttacctgggcagcccccctctgctatgagggcagttgatcaaccggcaggtgaatcccaagctttccgcgtcgcagaccctattcacggttactgcctggccatcgtttggaatcagttcggtcccgaggttccggacgtatttgagtcgtcatgggcaggctgtgtccctctggagcactacaatgttccgctcgacaccccggtggactttgacggggttgtgcagcctttgcaggtgcagaaagcagcggagatgctgcgcacatcgcccccagaagccagccagaccggcccgctgattcaagcagcccacgtcctgggagtccaaatagtccagatcaaaccccaagagcctgggcgtcgctggtcgatccaggtgggcaacagggctgatagtcagatcctggcttcagctctcaccgctgctggtattgctgcagaagctgcctctcaccattccttccatgcggtgtacttcgagtacgggcaagactag

SEQ ID NO: 336876 - DNA, 231 bp, Pseudomonas aeruginosa
gtggtaactatcccgaacgccgaatatgccgacctcatcgctcaacgcgatgctgcaaccagcgccctggaggccctgcagaagagcttctgcctggaggaggttggtgatgacacttccgagcaagctgcagcgaaacagcaggcccgggctgtactgaaagagtacagcaccgccccggaagaaccgcacccggcagccctgtctctggtcgagcaagctcgcacctga

SEQ ID NO: 336877 - DNA, 291 bp, Pseudomonas aeruginosa
atggaacagctgactatcgatgggaagccggtcgagaagaccatcagccttcgttgcttccaggttgacgaccatgactactacgccgcggtagatgaggacgaggcccgccgcctgcactgcgacctcaacgagctcgaatcttcggatgtcgacagctgcaccgaggttatcggcgaactgctcgacaaaccctggcaagaagaagaccagccgggcgtcgttgttggcacgcttcgtcaatggcttgccgaggccaaagaacctgcctggctggccggtaccgagtaa

SEQ ID NO: 336878 - DNA, 780 bp, Pseudomonas aeruginosa
atggccaaggacattgacgtacagacggatctcctgcgcgaaacagttggctggcttcccagccgaggtgtgggaggcattcttcgggaccggatcgaatccctgctgcgtgcctgcaaagtgctcactggtactgccgaagctccgaacagccaagtcgcttctcatgccggattccgccgggcgttggcttgggagcaggcattcgaacgtctccgcagccagttggacaagaacagtccgaaggacaaggttctggatgaacttcagcaactgatggagcaacgccttcgcgacttaccggctggaactggcgaacaagccgacgtcgttggctggctgacccctcacgacccagcgtgcatccgctggaaggaaggcatcaccagaggcgacctggtggatggggccgcattgatgacggtacttcaacatgagcgtatctgcggtgccggccaggaagacctgcagctgactgtgaatgagggggtgcatttgctcgaggagtggattcaggtatcccacagccacgacgaagttcaagcctcactttcggtcgcgagccgagagtacatcgaccgcgcgccggcggttaagtccccaaaaccgaggttggatgcagtagaggtgggttccattcagcgagccctggaggtcatcaactggatttcatgccggtcggacatcgcgccaaaggacatgagccggcttgaacgctccagcgcggaactgacggcattgctggccacgcttccccaggcagaagccctgcctgcctga

SEQ ID NO: 336879 - DNA, 528 bp, Pseudomonas aeruginosa
atgagcaataccctgactttggcccgggaccgagccaatgccttcgcccggctccacctgcaggagtgtgcagctgagttgatgtcctggaaagaaacctcactcctccccaccgatggtcgcatccgagaattggccaagctgtgtgccgagttcaccgggccggtcgcatcgctgggcgttgcagaggcaacggtatatagcgtcgcacttcaagcactgaccggacctcagtctgaggtccgccgcttttcgatcgacaccgacgggaacggagcctttgcagaagtggtgcttgccgaggactacgaacatgccgtcttggccaggcagtccgcagaagttgagcgcgaccaatacaaaaccgagatccagaggctgaaagatcaggctcccgttgcgttcatgttcaggggggccgatggccgtcttcgtatggatgcctgccgccacaaaccaagtgaagacgggtgggaaggcgtgttcggagaaccccggccagcccctactccactcccgacaatctga

SEQ ID NO: 336880 - DNA, 756 bp, Pseudomonas aeruginosa
atgaccacttcccttaccgacttcttccctgaaaactcgaaatggagcccgcccgagagcttcatcaaggaatcccggcccatccaccaggtgaaaaaactcatcatcaaaggtgcagttgatgtcgtgttctttcgcgatcaaaccccgcgcctagtagtggcaggggaaacgaaagaagccgtcgagcgcgttcataccaccctggcgggcgacaagctggtcatcgagcaggaaggcaacgtgatcatcgccggaggtggaagcatcaacatttccggcaacggaaacatcgtggtcggccgcgacatccgtatcaacggcgtgcaaatgcagttcaacggcccggtgggctccatcgacatcaaaggtgcctcgattggtaccggccgcgttctggttgccatcagcctgccgatcgcccctcgtgttcgggtaaagggcagcggcgacatcactctctacggtctgcagcaggatgagttcgaagcgagtgtccagggctcgggcgatgtgactgtgcaaggcacagtacagagccttgaagtcgaggttgcaggttccggcgacgtcgacgcccgtgaacttactgcggcaacggtggacctgagcgttgccggatcgggtgacatcagcgcctatgccagtcagtcggcccgcgcccgggtggcaggctctggcgacatcgtggtgtacgggaaccctgcccaacgcgatcaccgtgtcgccggctccggcaagatcaagttcaagtaa

SEQ ID NO: 336881 - DNA, 255 bp, Pseudomonas aeruginosa
atgacagaacttggattggcgacgttggtcgcgtttctgatatgcgtgccctggtggttcttcgagaactacaagcagcgccctcttagtgagtttcccgacctggagaaactgatgggcaccgtattcccggatgaccttgcagccatccgggcgaaaggctcccttagccgtgcagaacatctccgatacctcaagacccagcacaaggcgctcaaggccgagatcaagcgcaggagtggcttcatcgagtga

SEQ ID NO: 336882 - DNA, 417 bp, Pseudomonas aeruginosa
atgatcctggtcgttaaatcgcagctccagaatccggtgagccaggtagttttcgcaaccctgttgttcttagctgcatggttcctctggcatacggactacatgaccgagcggagcgtaatcgcggtggtagactcgaaatactccaaggaggacagtgaccacgcctccattcgatacaggattcaagccgaaaacctgtttgtctctcgccccgccagcgatgctgtgatgcaacagagcaaggtgggcgacaagcaggtgctgataatgcgcccattcgacatgcgtcccacaccctgggagacaggcttgttcttcatcctcccgactatctgtttgtcggccgggatcagcctgctgctttccattgcgtgcattcgctttttcccactgtgccctaataccccccgatga

SEQ ID NO: 336883 - DNA, 228 bp, Pseudomonas aeruginosa
atggggcattctgagcacttcgagttcgtagactaccgggtaggagcgtgcggtgttgcttacgttgcggcgacccaaccggaaatcagcgcgctggccgtgaaggtcggctactcgggaggttttaagcaggtggtaaaggcctacccaccctgcccatcgacagagacgctgaagaatcgagcgcttcgggaagccctcgaggatgacgacactatcccgtggtga

SEQ ID NO: 336884 - DNA, 477 bp, Pseudomonas aeruginosa
atgagcctcaatccaatgatcatggacgaagccaaaaccgaagttctcagctgcctcgacaacgcgagccggtcaatccacgagtttcacgacgcaccagcgttcatgacctggtgggaacagtacgattctggtgatctcggcctgactcacgaccagaaaatcgacctctactgccagcttcgggttgaggtctacaccttccagggctgcctcgatgagtaccgccgcctactggcggggaaatccggcacggcactgcaaatcggcaactcccagtatgcctacctctgcgccggcggggagctgatcggcttgactgtgcaccggaatagcaccatcgacgaggctgagccttacgacttcgacagcagcgcgttcaatacctgcattgggggctggatggatgaggatttccgccagacgcgcaaatggattgccgagccttattttgtatcggtgtcgactcaattctga

SEQ ID NO: 336885 - DNA, 1245 bp, Pseudomonas aeruginosa
atgattcggctccgcgttaagaacttcggtcctatcggccctggcctggtggaaaatgatggctggattgatttcaagcgcgttaccattttcatcggcaatcaaggcgctggcaaaagtacactggccaagctgtactccaccttcgcgtggatcgaaaaggctgtggttcgtggagattacgagcgtaagtggtttgagcgtaaagggcgtttgaagaaccaatttctgacctatcaccgtctggaaaattatctggaaacgagtgaccgaggagattcggaatttgagtatgagggtgaggcttgtaagatcagttacgccaagagcctcttgagcattgctgagtcctcccgccaatactacaagctacctcaggtaatgtacgttccagcggagcgcaatttcatctcatacgtccgacatcccaaggagctgaagctctcttcggagtcgctgaaggaattcctttcggcgttcgatcaggccaagcagagcttgaaggagtctgtgaagttgcctatcaacgacagcgagattgagtacgataagttaaatgatatcctgaacctcaaggggaaagggcataagctgcggcttactgatgcctccagtggttttcaatctatcgttcccgtgtatctagtgagccagtaccttgccggcaccatacaggatggcggcggggaaagtcagcagtccatgagtgctgaggaaacagaccggttcaaaaaagaagtagcgagtatttttgcaaatttagctctaacggaagagcaaaaacgggccgcgatctccgtgctttcttctcgtttcaataagcaggcgtttatcaacatcgttgaggagccggagcagaatcttttcccatcatcgcagtgggacatactcaaaagcctcttagctttcaacagtcagggtgagtacaaccgtctagtgttaaccacacacagcccctatgtcgtcaattacctcagccttgcgattcagggaaggcatcttcagaagcgtctcattgagcaaaagcgagaggatctactttcctcactttacgacatcgtgcctgaagaggctttgctgcaggccgacgatgtggcgatttatcagtgcaatgagcgcgatggcagtattacccagttgccatgcttcgagggcataccttcagacagtaacctactgaataattggttgcgcgtaggcaacgagttgttcgataagcttttggaactggaagaggctatttaa

SEQ ID NO: 336886 - DNA, 1896 bp, Pseudomonas aeruginosa
atggaactctctaatgcaattaagggggtctccggctctctagttgtagttgatgatgcgctaggaaagcccaactttgaatttatttccgacgaggcacttacatctcaatttaatagaattgacgaagatcaatctgtttttgatgagttggcccagcttttagaagtggatggaagcagtatgagtgctgaggcactcatggctgtggttgagcaaaaactcgagcttctctgggatttttatatttcaggcgatcaccaagaagccttgaatgctttgttttttgatttcaaaagctcatattttgagaagcgtcgacgtgttgatgctctaattgatacactaaataagctttttggggtggccccatcagtattttccgaccttgactctgccagagatgcccttcgcgtatgcgcaatcgcttttgttgactattatgttgatgaaactattgtcagtgctgacgaggctactcagcgacatgttcaggttaaggattatttgtgctctgggtttgaatataatggtgcgcgttggcctaagcttgtttttctcatgtcttccaaactgccagggattgaagggttggcagattttagagcaagaactggtataaaaagcgctttcttttatgccttggacaagagagatcttgaacatgacttcgtctctcggaagttaggtagatgtattgaggaatatttttctgctgtacagctgaataactacttggaaactgttcatcacgtagttgataaggcggcagctcagataggctctgagattgagcgactagagcttcatgacttgactgcattgaagtcactgcgactggacgctgaaagtgagtctgtgcagtcgtatttgacttggctggtttccgaagcattagcggcgaagattcggtcggccattgaattgcaggcttcactaattcccaaagactcaaagtatgttcctattgatgggaagctacttcctcgaagtgttttgtttgagctttattctgatattgctgttgcttcgttctcgcagagcaatgatgctcccatcgtgcttggtgatgttttggagttgctagagagccatgtgtccaacgagcttttgttagttatcgctccggcttgtgacttggcgcggtgttcactaaattatgaggttctttgtgttaagggtatattgcatgatactagtaatagcctttccgagctattaggcaaggcttatgcttttggtaaaggtaaggtggttctaaaacgcatagttcagagtgagcctgtttatagtagaatttctttagatccaaaaaaaatttgcactgttagatatgcagatttacaggattcgaagaagtattcacgtttagcgaggttgtccgaaatgtttgctcaagagattaaggaacttgcgctatcccaggtctctcgagttggcactcctattgatccatcattctctgtggctttgcatgcatttgtcaggttaaaattgaacttgtctagggataatattgtcgagtttcaagcggatctcgctgatgaggatttcgtctcggcagtactggctatgggcagagaagcatctgaagatccagaaagttcagaatcttctagtcttgagaaaacggtattgttctccgctcaatttcaagagtggatgttggatcgccttatcccatatcgagagggggtaagtgagggggtcggtaagctggataatcttataaatctttttggtgataaaggaaatcttcgtgtttcgcttggtgggtctggccttgcaagcttggctaatggttcggttaaaatccgttatgtggatgcggcaagttcagatctagagtttaaatcggcactggaggttcaggtttacccttatttctcagtttga

SEQ ID NO: 336887 - DNA, 1452 bp, Pseudomonas aeruginosa
atgatgctccagtttcaattcaatgaccgtgttgcactcagctcctgcaaccgcctactttatagcggtgctcatctggctgataaagtaagccatgagccaagtcgtagtcggcgacctaaagcatctgaccgtttgcctaggtccgatgaggttgtagctgcattggcaacgctcggcgatttcgaggccaaattttggtggtttaatcgcgggcgcctacagcgagatgaacagctgttgtggaaagaaacgcttcagaaatttgttagaggctggagtggaggattgcttgtatatcgagatgggttccgagtttatccatatggcggaccagctgatgattggctagaccttgatagaaaagctttggctagttcagcctataagttgaacagagcccagattgtgggttatttacgtattaattcctctaataatagtcgtctgcaagatcagactaatcgcgaaggatttagagactgtcctgaaaaagaggcaattaggaggctgttgcggcaggcaataatagctgattgcaaaacttttttggaaagagtcgataaagagaataaaaaggcggatgaagaaacgcttcgcgatatcgatgagcggattgtagatgctagtgctctagctcttagcaatttaagagatctaagtttaagggttcctgatgagtcaaatgctatacaaggtatactagttgaactggcggaggttcaagatgcttggggacgggcaaaagaggctcttgccgctaaggattatgaagtcgagcaatatgctcaccttgctggcgtaggattgatggttgagttattggcgcatgagcttgcacgctcgactgactctgcacttgagattttaggagataaaagatctcctaaagaccctcgtaagctagaggccctagagtcaattttaaagacgctaaataagcgcgtaagaataattgatgagcttagcattcctgggcggcatcgaaaaactatacaagatgtacgctctttggtcgaaatgatgaaagagttctatgagcaaaaaatcgagcggcatggaatagagattgaaatcatcggcggacttaagcaaaaactttctaaaagggtggagaaagggcagattttgcaaataattgataatctgcttaataactcctgctactggttggcaaggcggttgtatagaaaggaccctccaaaaatcacagtagtaatagatccggagtcgggggttttgacccttcaggacaatggtcctggtattccggtggggatcggaaacaaggtgtttgatgctctctactctacgaagcccggaggtggtcgaggtatggggctttttatagcaaaaaaacttgccaaagaaaataatgtgtctcttgaactacttgccccggtggatggtgctcacagagggtttttgctgaattttaaagaggctgtttga

SEQ ID NO: 336888 - DNA, 693 bp, Pseudomonas aeruginosa
atggctagtcgtccagtttttattgctcagggaaaagaagataagctggtcctcgagcgtgagattggttttgcgtggaatcctgggtttgctccaattcagaaaaagaagaatatttctgctatgcattcggcagcagaaaaaatcggattattccccttgttagaagtttcaacaaaatctgagcttgagttgggacgaaggttgagtgcttttaatctaaaaatttctacagatgttggtgagataagtatcgagtctgcatttcaaggtagtaaggtttttaaggctggcgggccgtttactgatatttataaaatggatagtcgctctgcaaaaaaagatgagcggctaaagaattctgggcagttagtcggatttgatttttttggtcaaaaatggccgttgattccgaagactgcattctatgattggctgtatttgtcggctcttcagccgcatcaagattttctgaagagactttttgcttttgctggatttacagatattgagtttaatcctgagaagtcaataaactgccaagctagaacgtgtgctcttttagtttcgctcctgaagttaaatcttttggatgaggctcttaggtctcaggctgattttattatgatggtggcttctgattctttttcgcagaaacactctttggatttgcgtcaacaccagttgttataa

SEQ ID NO: 336889 - DNA, 2112 bp, Pseudomonas aeruginosa
atggatagctttgaacattgccatgaaattaacgaattgattttggctggaaatgaaggtggcgctagaaataaactaataaagctcttggatttctttgaggaaagcggagaaaagtacactcctcttgttaatagcctgatccgacagcttggattgtatccttatctagatgttgaaagcgcatcttggcaggataaatacgtatttgaggcatttaaggtcgatgttggtggcggcagcaggcttaccttacatcgcgagcagtcttacttattgaatagcctcttggatggaaaggatatagcagtaagtgcgcctaccagctttgggaagagctttgtaattgactctttcatttcgattaagaaacccagcaatgtgatgataattgttccgactattgcacttactgacgaaactcggcgaagaattaatagaaagtttggctctgaatataaaatcataaccacgggggagcaggatttgtctgcgaggaatatttttatatttcctcaggagcgtgcaataggttatgttgataagatagaagagctagatgtcctagttattgatgagttctataaagcgagtccagccttcgataaggaaagatcgccagcgttgcttcgagcaattttgaagcttggcaaaaaggcaaggcagcgatattttcttgcgccaaatataagtgatttaagaggcagtatatttaccgaaggtatggacttttatagtctagactttaatacagtatttttggagaagtttgagctttataagaagattggcggagatggaataaagaaaagtattgagctgatatctattctaagagaggcaaaaggtaagactttaatttatgcgggcacctatactaatatcgataaggtgtcgactctaataataggtcattttaggtcgggtgaaaatagaattctactttcgtttagtaaatggttggccgagaactatgatccagcgtggacgctgactagcttagtcactaggggcgttggtattcataatgggcaacttcatcggtccctaagccagattcagattaaactattcgaagatgacgctgcgcttaaaacgataatttcaacttcatcgattattgaaggggtaaacacttccgcagaaaacgttgtgctttggagtaaccttagtggtcaagggcgtgccaagataaaggatttctcttatcgaaatataattggtcgcggcgggcggatgtttaagcacttcatagggaagatttacattctagagcctccgcctgaatccacgagtgcaatgttagaactatctgttcctgatgatctcgttggtgatgcagagatggagaactattctgatgcactttcgcctgagcagattgctaagatcattagctacaaagaggaaatgggtggtatattaggggaggaagtttttcgcagcctgcagcgcgacggtgtgctccaaagtagcaactcatatttggtcatggatattgctaaagatctaaagcttaattctagctcgtggaacgggctcgggtttcttaactctgcaaatccggaaaattgggatagattgttatatcgggttctgaagcttcaaccaggagcttggggcatagagcacacgcgatttgtgggatttgtaaaaattctctctggaaattggagtctttcaatccctgagttgttgagtcggctagaggtgttggatatcggagttgataagttttttgatctagagcgtaaggtgacttttaaactcgcttctctattgggtgatgttaatacaatacagaaggagatatttggtgatgccgctgtcgatgtgtctccatttgtttccaaggtttcacatgcttttcttccgaaggttgtttatcagttggaagaatatggtttgcctaggatgatatctaagaagattaattctgcgcagttgatcgacttcgaaaatgatgggctggatatatatggggctattaaggagctgcagttcattgggtttgaaggtttgtgtaaggaagtgccacttcttggttattttgataaatacatactgaaatacttctttgatggaataagtattggtggtgatttgacctaa

SEQ ID NO: 336890 - DNA, 921 bp, Pseudomonas aeruginosa
atggattttgaagttttagttaatagctcacttcttgaggcttttccgggagatgaatttctatctggaaagaataaaagagtgctgagtttaattaatgactatgaagataagaggtggcgcttcaggaaatttcaggaatttatatggaataatatatccgaaacttcgttatcttatcgagaacgagaaattctaagtggacaacctcagtctactttgattgctgcggccaaaaatttgaggcttacggacaaagagggggatattagtaaaggcagtgagctcgctgagattgtactttatggaatcatgaagcatcaatatgacgctctgccagttgtccctaagatattttacaagcagaatagtcaggacaatgccaagggcgcggatagtgtgcatctagtactagaaggggatgatgatttttccctttggtttggcgaggcaaaattctataacaatatagaggatgcacgtttagctaagataatcgaatctgtgggtaattctttaaatacagataagttaagaaaggagaatagtattataactaatgtctcggatatagattttcttgatcttgatgaaaagctaagggggagaataagaaaggctctctctaacaaagagtctatagactctttgaaatcgaagataaatatccccattttgcttttgcatgagtgcgaagtgaccgctgccgcgcactccgcagatgatgagtacaaagaaaagataatttcctatcatcttgggcgcgcaaagtcttatttcgaaaagcaaatagagagtctttctagtgctattgcctattatgaaaaaatcaagttccatgtgattctttttccggtaccaagcaagtcgattattgttgataagtttgtagaaggtgttgcctattacaaggggcagtga

SEQ ID NO: 336891 - DNA, 708 bp, Pseudomonas aeruginosa
atgggactggatgatcgcgaatggatgcgtcgcgagagtagtgaacgtcagcgagagggctgggcccgtaagtggcctaggaccttccgctggagcgccctgcacttgtttggcggcatgatactgctcacggtgctagcgctgacttggccttcgctccgttctctcgtagatcgtttctctgcctccgcgcctgtcgaaggcagtgttccgtttgcggaaggtcctcaggatcttcctgcacctccccctgaaacagcccagcggccaaccgcgccagaggccccaaatcgccgctcgctgcgcgattgcctgaacggtagcaatgctatcgatgaaaatgtgatccgttgccagaacggtggcgagctgccgcgcgcccgtgctccgcagaaagcgtctgagccccagggcatggtttctcaagaatacctagcgcagtttcaggctgagcgagaccagcgaatagctcggcagggcagtgctcaaaacaccccggagcgtgattctcagtggataaagagatggggtggcggcagcggctatctggctgagtgggttgttgttaacaacgtaattgatggcgcaactgtttgccggaaccaaggctggggctccattgaatatcgggagtgccgaaagggcgcaaaggtacattttcgggagcaatgccgcgcctggaccgctcggattggagccatcaaatga

SEQ ID NO: 336892 - DNA, 1173 bp, Pseudomonas aeruginosa
atgaatccgataacgcttgaacgcgccggactgccctacggggtggccgacgccggggatatcccggcgctcggcaggccggtcgcgagggatgtcgagagtctgcgggtggagcgcctggcggcgccggccgcggcttccgcgagcggcacgggggtggcgctgacgccgccgtccgcagccagccagcagcgcctggagatcgccaatcgtgcggagatcgccagcctggtgcaagcagtgggcgaggatgccggactggcgcggcaggttgtgctggccggcgcttcgacgctgttgtccgccggcctgatgtcgccgcaggcgttcgagattgagctggcgaaaatcaccggcgaagtcgagaaccagcagaagaaactcaagctgaccgaaatcgagcaggcgcgaaagcagaacctgcagaagatggaagacaaccagcagaagatcagggaatcggaagaagccgcgaaagaagcccagaagtccggtctggcagccaaaatctttggttggatcagtgcaatagcttcgatcatcgtcggcgcaatcatggtggcaaccggcgtcggcgcggccgcgggtgcactgatgatcgcgggcggtgtcatgggagtggtctcccagtcggtacagcaggcagccgcggacggattgatcagcaaggaagtgatggaaaagctcggcccggcactgatgggtatcgagatcgccgtcgcgctgctggcggcggtggtcagcttcggcggctcagcggtcggcgggctggccaagctgggcgcgaagatcggcggcaaggcggccgagatgaccgccagcctggcgagcaaggtcgccgacctgggcggcaagttcggcagtttggccggccaatcgctgtcgcactcgctgaaactcggcgtgcaggtttccgacctgaccctggacgtcgccaacggcgcggcccaggccactcattcgggattccaggcgaaagccgcgaaccgccaggccgacgtgcaggaatcgcgtgccgacctgaccaccctgcagggcgtgatcgagcgcctgaaggaagagctgagccgcatgctggaagcattccaggaaatcatggagcggatcttcgccatgctccaggccaagggtgaaaccctgcacaacctgtccagccgaccggcagcgatctga

SEQ ID NO: 336893 - DNA, 252 bp, Pseudomonas aeruginosa
atgcaggatcgccagggcctgggcagcggaacgggccgcaaccagatcgcttatctcgttgtcgttgtacgtccaaccgacaagcggttgatcggccaactctacttccatctgcaggacatcctcagcgccttcaagggctatctccaggagaaccggatcgatatcaggatttgcgttattaactgccgatcgcagcacagctgcgcgttcagcccaatagttggggctgaacgcagagggttctcttaa

SEQ ID NO: 336894 - DNA, 288 bp, Pseudomonas aeruginosa
atgaaacgctttgacgatcgagcaatctgttttcactcgggcaagaagatcagcccgcccatgaacgagcgccgcctctgcgcctgctgcggcttgcgaatcgtgaaaggcttcatagttgagattggacatgtcggcgaggactgcgcaggaatcatcgaacgtcgaaatcgcgacagggacttccatggtggaacggtcaaagacttcgccgagcggtataagcgagcgacgggctggacaatcaaaccagcagttctcaaaacactggaagatcactacccctga

SEQ ID NO: 336895 - DNA, 351 bp, Pseudomonas aeruginosa
gtggatagggagtatgtgggctatgtcatacacgaagctcgcccgaccctgttgcgggtcgatgtggatgagaaactgcctttggtagaggtagaacgcctgctgggccaagtcgagcttgtccgttggaacaacccctatttctggccaagcctcttcgcgaagagagaacttctcccgattcgcaaccacggcaaggatgcagaactgctgataggtgagggtctcggcgattgcgagcaggtgattggcctctgctggctggaagtcgggcttgaagaccaggttggtgaagaagcgggctatgtactccagtttcttccgctcgtgctcctgcttggcggccagtag

SEQ ID NO: 336896 - DNA, 969 bp, Pseudomonas aeruginosa
atgccggcacccggtgcccgggtgctctggaatgcgcttttcaacaagccgagaagcaccgtcccgcggcagcctttacccgtgctcagcccgagccgtgccgaactcgatgcgaccgtcgatggcagtctgttccgcctgggtcattcgaccttgctgctgaaactggccggtagctggtggctgaccgacccggtattttccgagcgcgcctcgccgttgccgttcgccgggccgaagcgtttccatgcgccgccggtggcattggcggatcttccgccgatccgtggggtaattctttcccacgatcactacgaccacctggaccgcgccgcgatcaaggccctggtcccgctcgtcgaactgttcctggcgccgctcggcgtaggcgaccgcctgctggcctggggcgtaccgccaggcaaggtgcgccaactggactggtggcaagatatcgaggctggcggtttgcgcctgaccgccacgccggcacagcacttctcaggccgtgggctacatgatgggaaccgtacgctgtggtgttcctgggtgatcgaaagcgccgaactgaagctgttcttcagcggagacagcggttacttcgatggtttcgccgagatcggccgacgctacggaccgttcgatctgaccatgctggaaaccggcgcctacaacgaacattggccctacgtgcacatgcacccgcagcagaccctccaggctcaccgggatcttggcgggcgctggctgctgccgatccacaacggcaccttcgacctggccatgcatgcctggtacgagccgttcgaacggatactcgaactggccaccgaacacggcgtacgggtttccacgccgatgatgggcgaacggatcgatctgcaagcaccgcatgccggccgacgctggtggcgcgaagtggtcgacagcgaaacgcaggtgcagggttacggctgttgcagaagctag

SEQ ID NO: 336897 - DNA, 195 bp, Pseudomonas aeruginosa
atggaggtcagtctcattaaacagacaggcaacgacgggcacctcattcttctgaagatgcaatgcgatctgtacgtgcttctgttcttctggcgagtcgacctcagctgcagggtgtacccagatcgccagatccacatttggctgaccggcagcgaggatttgttcggggagcataacgttgcagtgtggtag

SEQ ID NO: 336898 - DNA, 258 bp, Pseudomonas aeruginosa
atggaccagatgaaaacagttaatctcccgattactcttcccgatggctggaccgcggaagaagacgcgggctatggagtgataatcaccggcattgctacttgcggatacaagggatatgtgaccgtgagcgagtcggtgcgaggcttcgagctgggtatctccatggtccgacgcaagatggctttttcaggaagatcctggaggaaggacttgttcaccagtgcggtgacagagttgaaaaaggcccttggctaa

SEQ ID NO: 336899 - DNA, 327 bp, Pseudomonas aeruginosa
atgcgaaagctgatcctccacctgaaaggggagtatttcgatgaaatcaaggctggccgcaagcccaaggaatacagactggtcaccccatactgggaaaagcggttggtaggtcgtacctacgatggcatcgagttggcgcgagggtatcctaagcggggcgacgtcgagaaccgactgaccttgccctggctgggatatcaaagggaaacgatcctccaccgccactttggccctcaccctgtagaggtgtttgcgattagcgtcgcaatcgaaccggaacccgagagttccgaggttattggcacagccagcaccgtgcgatag

SEQ ID NO: 336900 - DNA, 972 bp, Pseudomonas aeruginosa
atgagcttcccccggaccatcgaagaagaatgcagggagctgataccgaccctggacaagtcactcaaggaactggccttcctgctggagaaatcgaaagcacatatacggatagatgcccttttccaggtgcctctcaggaagtccccaagagttgataagaatgctgcgattgaaatcgtcgtgccagacggcgaggagggtattgccctcgcgattgaaaccctaacgaccatttggctgaagggggagcaaagtgcgaaggaaacgcttcgctgtcctggcgccattgggctgccccctttggctttggaacgaatccgcgacaccaataggcttcgaatgcatctcttcgacctgatcgagaaggccaagcctgctgagcggaagcggatctggaaagcgaaagagcactacggcatatccagcctgcaggctatgcgggtaaccccgattctgcatgacccccagctgattcgcttctactgggatacgggctcgataacgaagcgatggttggtgcgagacctgatcaaggtctgtgaagacgagcttcatgccacctttggccaccggccatctcgcgacgaggtagttcaaggctcggtggaaagcagcgttctgctttcgcttgaacagcttgagaaattgcctcttgatgaacaggtagcggttcatcgactcggtactccccatatacgggcaagggtgaccgatggtgacattgagccgtacatctgctctgcgccggtgccgttcgtttatgacgtttcctgtgcccggccgctcataaagcctctaaagaactactgcccaatggaagaaaaaaagaagcgctcgatacgagcgcttttggaaccagagcctcgcgtaccgggaatgagcgttcaccagtacgacgtgaagcacagggcttttggggcgtttgaatcacgtagccgtgggcgcaacaagcgagcagcgcaagaatga

SEQ ID NO: 336901 - DNA, 534 bp, Pseudomonas aeruginosa
atgagcatgaacccggacaacgttctgaccctggcactggccaacgacgagctggatcgcttcctcgtcggcgaacccttctacttcctcgaggcccgcagcgacaacgaggagccgcagaacgtcagccaggcgttcgaccagttgctgatgccgtactggcgcgccacccacgatccggacttgcccttccgcttcatcgccgcgctactgaagatcctcgccacctatcccgatcgcaaccgggcgatctacgtcgcccagaactggatctggtactaccgcttctgcctgtcgaagaaacgcgcgaatccgcagggcccctacggtgatctgttcgaggtcgacctcggcgccgtcgcggtcgcgctgaagcggcagctcgaggcgaacaaggacgaactgatccgcgacacccgctgggcgggcgctacctggaacagcagcaacggcctgtggggtccgctcttgcgcacatccacgacggtacgcgacaaactcgacgggccggatttcgttcccgacaccccgtga

SEQ ID NO: 336902 - DNA, 1581 bp, Pseudomonas aeruginosa
atgagcctgttactcggtcccatccttcatttccgcggcatccacaacgatctgtaccaagtctctgctctcgttgtcctggacaaaggtgaccccaaaccgaagcctgagcccacaaactgcgcggtcgataaggtcacccgtatcgcttcgatcccattcggaagtccaacccaggatgtctggagggtagacctatcaacgtctcagaaagctgccaggtctcagcagtgctcctgcagtgtgtcaggaggcagggcgagcttcttcgttcctgcccttggggagtctccgagggttgcctatggctcgtgcaacggattctccgctgataagttccgcaagaaggtgaaggacaggcagaacgaacgctggttcgacatggctgcacgtcacaagatcaagggtaaagaattccatatcctggtcatgggtggagaccaggtttacaccgatgacttgatggtgatacccggagagatgaaggactgggctgatctgtggcatagcaagcaggtagctgcgaaatggtcacgaaagctggaaaagcaggtcgacgaatacttcacccaactctatgtccagcgctggaatcaggccggcccgcgcgagatgctgcagtcgatcccctacgtggccatgtgggacgaccacgacatcaccgatgggtggggctcatatcctcaggacctgcatgagtgcgacgtctaccagaacctcttccggctggcgacgcggtactacagactctttcagcagcagctggcagaggacgaggtccatccctctgcggtacccaaccagagtccacaggcaaaaggattcagccttgcctactctggtctcggcgaggtcgcattcttggttccagatctgcgcagcgaacgccacccggatctacagatagctggcggcttcagcccgacgcaaatcgcttcggagtacacttgggacgccatattcgcttggctggatcagctcgatacctcccagcacaagcacttgatcgtctactccagcttgcctgttgcctacctggatttgaatgccgccgaggtagcactcaatgccttgcccgggcaatgggagcttgaggatgatcttcgtgatcattggcggagcaaaccacaccgtgacgaaaggcagcgattgatcaagcgcttgctgaatttctcggccaaaggcactcgggtgaccattgtgagcggtgacgtccatgtcgctgcggctgccgtaatcgagtcgagccttccgcaacatgggaatggtgcaggagctatcttccaactggtatctaccgggatcgtgcacaccccgcctccagcggtggccgtgtacttcatggagaagttcggggcaggtgaagaggtcatcgagtacggagtgaaggcccgcatgctgccgatcggcttcaaaggccattacttggtaccggaacggaactggctcagccttgagcctgatgggaagggacgaatctgggccaattggcacgtggaggggcatgatcacctgctgacccaggttatcgatccagtcgtcctgcctacagtgctccagcctgtcgttgtgaatcagtag

SEQ ID NO: 336903 - DNA, 666 bp, Pseudomonas aeruginosa
atggccgctatctcgaaccgcagttttatcctacctatactgatggcatgctcgtttgctgccggtttatttttcgggctaatagcgaaaggcctgctaaattcttcaggctgggctgaggccgcttccggaattgctacggtaatggctttgactcttggtgtcgtcacatatatagggtggcataaacaaaaaatcagagaggacgcatactcaacaaagaaactatacatctcaacgcttgttcaaattgaatctactacagtgcaaataggaaacctgctatttaatctcgttcccgaagcaggtatgttggtgcctagtgactctcaagcaaagtccggtttggaaaaggtggttgacaagaataatgagctgaaactccatgcccaatctcttgtttcaattaacagtgagcttggcttttggggcgcctcattgactcaaagctcagccgatgagcacgtcaaattgatgggctcaatagacgagtatttaacatctcttcattatcttcataactgcttggtaaatgtttacgtccacaaaataagcgataatagcattgagcagtggaagataagatttattgaggctaataaggtcatttttggattgtttgattcgaggaagaaaaaaagtatgagtacagtgtttttgaattaa

SEQ ID NO: 336904 - DNA, 633 bp, Pseudomonas aeruginosa
atgagcaaaccacaattatccgaaggcttcggattcatggctgcgccaagaaacgatgaagaacttaattggcaagcccgcttcattaaagaagtggaatcagagaccaccagaggcgcagtactcaacatagtctcatttgtagacgaattgttaatcaagcttcttcgaagctacttcccaaactcccagcatgctgactcactattaagcaaccttgacagctgcatcagctcgataatggacagagcaaacatcgcatacgctctggcactcctaaagaaaaaagagtacgaagcaattaagatagtagcaagagtcaggaatgaattcgcccacaaatgggatggctctggctttgataccggcaaagtcccaaagctaatagaaaaattaccggaagattactttgaacaatttgaggggagcaacaaggcgaaatttaattttgtgtgctcccaattaatacaagaattactggaacgccattactatgcgaccgacctaaattgcagactaccgaaggaatacatgagtatttttgatctcactttagaggagcgtcagcaagtaatgagaaacgaaagaagcttgatatcgatacttcttactagaaacaaaaaaccgtcctga

SEQ ID NO: 336905 - DNA, 750 bp, Pseudomonas aeruginosa
atgggacagcaagacgctcaacaggtctgtttgaacggacaccagatcaccgattcttaccatcggtctcgcgagttccggcaacggcactgttctcagtgtggagctgcaacgatccacaaatgtcaatcgtgtggcaccgagatcaggggcgactaccatgtggatggctttttcgcccttgctgaccccactcccgtcccgacgaattgcgagggatgcggcagtcaattcccatgggcacaaagaaagcaagagctggccgctgctgctggcgaccctagcgccgacgggttcaaactccttgaacacatttgcagcaggtttcacctggtcgctaagcagctccggactcgatacgctgagcgggactcacttatcgtcaacgatgaatacgacgttcaagacctcctgcacgccctcctgaaggttcatttcgatgacattcgacctgaggagtggaccccgagctacgcaggcgccagttcgcgagtcgacttcctgctcaaggaagaacaaatcatcatcgaagtgaaaaaaacgagggaaagcctcaaagccagacacattggcgagcagttgattgtcgacatcgcacgctatcgggcacaccccaattgcaagaggctcctctgctttgtgtacgacccagaagggtgggtcaacaacccttggggcctcgaaaacgatctgaaccgcaaagaagaagactttgaagtcaaagtcatcatcgtgcccaaggggcactag

SEQ ID NO: 336906 - DNA, 549 bp, Pseudomonas aeruginosa
gtggcagtcgcgctcggcggcaaagtgcgaacgctcgccagtagagctgaattctctgctcaatttatgcaaggattcctggagcacaaagcggccaaccctagcgacagtgaccagatggatttctacatcatcgagtttgccgcagaccttgagctgcccgaactcgtgctcactgccgagcaggtcaccgcgttgtctcgtaccaacagtaacgtagctgcactgctcagtacgtgctcagaacggcgtatggcgttggaggaggactcgaagaaattctccggtgcgcgccccggccatttgactgatagacagctcgcggctgcccaagtgatgccttattacttgcgtgaaatgggtaaggcatgcagcgcatcgctgaacgcgctcacagcccttgtgcctgatctgcccaaaatcttgggtccaatcccaggcacggtaggcgagatgatggaagctgaaacgtctgcactgagcgcgagagaacacggcttctacatgaagctgtacagcaaagaagccaatgcctccggccaagactag

SEQ ID NO: 336907 - DNA, 885 bp, Pseudomonas aeruginosa
atgaacctgcaacccaggatcctgtgcgtaatggctgtcgcgagtttggcagtactgtcgggatgtgatgaagcccaagagaaggtgaagcactctgagtcacccgcagcgtctaccccggtcgagaatcaggagcccacgtttgacgatctgaatgcaacgttgattgcaacattccccaacccagaaagaatccagccggcattagcactggatatccttcaacctgaaactgcgtttgggctgtacaacagcctcaggacttgggaagaggacggaaaagatctcgctaaccttcttaaaagctctttaggggagggcggggtcccagttttcaagctgggtcgggagtacagcaatacatctgacgagtttaaaaagcatgatcttgaggtgaaaatccttgcagagacccagcacgaggccgcaaaggttgaaggaaatcggttggttaagttcctaagcgagccaggaaagccagtctctcttgatgttggtaaatataatttcgaagaaaacactttcaagatcgatcattgcttgttttctgacaagcttgagtactcaaaagaggaacggcgatacgctcagaatcttaaaggctctgatcaagagcgttgctattttagaacgacaaatactgagttgaaggtcgggttcacgggcggctcgaaagtcaccttcaagatagaagacctcgacctcgcgaggaaaattgaagggcagagaaaggagctgaaagtcgcagtctatgggtatgttgaatctgttcggcgcgagaaaatcggaggaaaccgggtgaaagagcgttttgtcctaattgctcctcagcgtgttgagcttattgacgtgcatggtcaggtcctagccgagttgactatctaa

SEQ ID NO: 336908 - DNA, 606 bp, Pseudomonas aeruginosa
atgagaatttttggggccgtaggaagaagagtatttagtatatctatgatgctggcgatggctccagcagctgcattggccgatttttgcgacattcttgcaagcaatgcctctgaagcatgtcgcatgaaagcgcgagctggtggctcaagcatccacgacagctggttacggctgaaaccggagcaagcgagccagcctaaaacgggagcaaaagggtactttgtttctggtacgactccagccgttggcacgctaggaactgcggctagtgggaagcagaagctcacagtcgattgctttgcaaataaacgttcaatgcgccttgatgccttaccgtatatgctaggactggctaacggtaaaaatgaagcattcaacctgacgttcagtattgatgctaagccaccgtttactgaaaaatgggctttagactggcatcacgctgagctaagggcgcaggaaggtagtcgtttggcaacagagcttcagcactcgctgaagctgactgtcaagacagaaggtattcttggcaggaagtcagctgttggatacgtattcgatacacaaggatttgacgagatgaattcgggattgtgtcgttag

SEQ ID NO: 336909 - DNA, 2946 bp, Pseudomonas aeruginosa
atggctaaggcaaagccggagatgaaaatgccagaattcatggtatttttacgaacgttagcggtagggtttgtattcgccgagatttggagagcagcgatctatctaggcaagaattttgcaccagtagtgattaattttgatttctggatccaggctctagtcatcttactcatactaggactatgcgttaattacatactgagacgcggtgcagcaaaagacgctgcccggataatttgcagcttccggatagatcttctcttggccttcattgtcggaatttggacaagcgagcttctcacaccgaagctcaaaaaatttcatgacgtgcttcaaaatgcagatccgtactggactccggcgatcctaacaattttatgtgcaaccttgatctcgcccacgctacaccatgtacgagcacggttcaaaaaggacgaagctcaactgcacttcttatctgacgatgagatcgagcaaaacaacgaagatgcattaagatgtaattcgcaggcggaatcatttgccagtgcagtaatggctagcaaggctcatcctggcttggtattcggtattgatggaccttggggggttggcaaaactagcttcataaatctggcagctcgatattgggaaaaaaacgccaaggagctaattgtctgccgatttgaacctcttcgcttcgcctctgagccagatcttacggataggctgattaaggagctttcggcaacaatccaacgagaggtctatgctcctgaattccggccggctgctaatcgatactcacgtctcattaaaggcaaagcggacatttcattcctaggcttcaagcttgcagtcgaaccctcacaagaaacgctcgatgagcttctagatgatattgacgatgtgcttcgccgaataggtcgacgcgttgttatcgttatcgatgatcttgaccgcttggatgctaagactgccaactcggtccttttcgccacgcgtagaacatttaagctatcacaagcaagcttcattctttgttatgacactgaaattctggcaggcgctcaggaggaagcatcgcgcgcgcgcgaattcctagaaaaattcgttactataaagctcagcttgtttgtcgacagctcttcaattcgaaatttcctgacaagggattggcataacgaggaacaaaaatttgcattagtgccatctgacacaatggtgcagctcggctcggtactcagtgagcttgcaatacttctggatggagataacgccgcaagttatttgcctttcgttggtaacctacggaaagtaaaacgcttcgtgaacgctctattaattttgcagatggagcgcagcgagctatcaaggaccgacttcaacaaaaccgacctcatcaatctcatactgctacatttattctatcccggtacattcaggctaatttacgcagaagaaacagagggtcgatcaggccgcttctcactcaagagagacccagactcagataacttcataaactccccagaattctcgggacagctagaaaaagattccgctcaagttttcttacttcgccagctcttcgacacagaaattttagagctgccagcacgcgctgatatagagccctcagtacgcgctagccgcgcatgctttaaccatggcgagtctcggaatctagagaactacctaaaactcattgttagattcgcaaccccagaaccccaagagacgttcgctctgtaccaaaaatccgttgaagaagtaatgaaaggcgaaaaaatctctgccatcctgacttcagataatttcgatttagctgtacatgaacgagcccatgatcagttctggagactgctcgtcaacagctcctctaacttcaacggcactaccgctgaagatgctattaataccctggtcgattacctcccgcgatatgcatcgataggccgtttcgatgggagcttgcggcatagatctatctacgccctcttaaggcttttagatcgagctggctgggggagaacgagcagcaagcgcctagataattccaacgaaaatgtaagtgaaatagctcgccgaatttttggcgaggcagagcacaagaaaaaaggcctaattgaccgacttgctagccctgaccgaggtgccttgggctggaatgatctaatgttatttagacttcaatgttcagcagaccgccggggccaactgtacaaccttcaaaaagccctcatagtatttgattacccggatgcagaaacctcaggagcggtaagtacattggccaccatgggaatgagaagaatatctcaattggtctttgccaaattcaaagccgactatatcgatagaaacatcaacttttacgctgaagttgatgcaattcctgacgaagattttgacacaactggtcttttgcaaatctacaaagacgatcgagaccacaagaacgcaattgttagcaatatacgcgccagtcgctctggcataaaaagcttcgtgatgtaccaattatgcaatcgcaaagaggcaaacggctctggagtaggatgtggttactacgacgagtcaggtgttcaagacaaccatggcatatcaagaatagtagacagttacgtattcaacttttgcttcaaccccaaaattgatgagagcaatgcctaccacttccttgactactgcctttccaacctcagtaactcatatttcgagggaacgcctggtgatggtttcgtagccgccagaagcggcttgatcggatgcttcgacattgagagcttcgcatggtattggagaaagcatggagattttgtacgctacaaggccggagagtctctcacccgtgaagtggtgacttcgaactacgtagctttctactccgacgatttagacggagtattcaaagtccttgacgacattgtcggagagcgagagcctgcggaccttgactaa

SEQ ID NO: 336910 - DNA, 864 bp, Pseudomonas aeruginosa
atgtatggattaaaactgctctgcgctgagcttccaggtaatgaaatagccacttacaaaatactggaacttatagagaccagaaaatacgacgaagcattaacagccgccgaagaaatgcaggcggtgatcaccagctacaaaaccagctcaaccgaagaacaaataaagaataactgcttcatttatgctaggttctttgatctattaaaaagtctcgcctcatactggagaagcttagagtcagagaaataccatgactcttggtgcaggcttcaagatgccctagactgcctacgccaactcaagaaattccacagtgagcaaaacgtcacactctggtatttgactcgacaactgctctcaatagaaaaggcctacccctacaaactcttcaccagctgcggatttatatttgagagatttgagtgcagcatctgcgctcaagatatagatggcgacctttgccctcacatcaaaggcaacctatattccggcgaaatggcaatcgcgactgccaaaaaaataaaaaatttagaccacgtatcactagtcaaaaaacccaagaacaagcgactcgtagttggacatgatgactcaagccagcatttcaacttgttccgaatgctaattgaacagttcgacaccaataaatgctctccattgaagttagctcaagttcagcttgttgaaacaattcgcattgaccccgaccacaaacgagcaccgagaaattccgtatgctattgcgggagcggtaaaaaatacaaaagctgctgtataaaatcagagcgaatgcctcatgttcatatgaatatctctctcggatcattgattgaccactctaaacccacctataactga

SEQ ID NO: 336911 - DNA, 393 bp, Pseudomonas aeruginosa
atgaaaattgaatttctgaccgatcgcaattacgagggttctgttgccgttgaagcaggcccattcaaaaaatggctaaaaatcaaccaccccgaggttgaggtcgtaacaccgcaggatgcgacaatctacgacctccatgactactcatttatcatgccgctagtaaatctagttagtgatatgtctctcccaaactacctagctcttgtagttcagtatctggaaacttacagaagtggccgtctggaaggtgagtccgacgaagtacaaatcagtgccttctatcaagacggaaccacaacgaaagagttcaattttaagggaagcacggacgcgctcaaagccagcatgaaaaaattcgacctaaacaaattcatggaaaacccttga

SEQ ID NO: 336912 - DNA, 267 bp, Pseudomonas aeruginosa
atgaagaagtcccgtttcaccgagacccagatcgtctcgatcctcaagcaggccgacgccggcgtgccggtcaaggacatctgccggcaggccggcatcagcgttccgacctactacaagtggaagtcgaagtacggcggcctggaggcctccgagctgcggcgtgtcaaggacctggaagcggagaacgccaggctcaagcggatgtacgccgagctggcgctcgataacgccgcgatgaaggatctgatcgcaaaaaaactgtag

SEQ ID NO: 336913 - DNA, 825 bp, Pseudomonas aeruginosa
gtgcggtacctggtcgaggtgcacacgcggcccctgagccggtcctgtgattgcgttgggttgtcgcgggcagcgtggtaccagccgccggtgcactggacggtacgggatgccgagatcatcgcggccctggccgaggtggtcgagaatcgcccgagccgcggcttctggaagtgttgcaaggtcctgcgccgtgcgcgtctggactggaaccacaagcgaatctaccgagtgtacaaggcgatgaagctcaatctgcgccgcaaggccaagcagcggctgcccaagcgcgaacgcgtaccgctctacgttcccctgctgcccgatgccgtctggtcagcggatttcatggccgacgcgctggcgtgtggccgccgcttccggaccttcaacgtggtcgacgacttcaaccgcgaggcgctgcacatcgaggtcgacacctcgatctcgtccacgcgcctggtccgcatcttcgagcagctcaagcgcgaccacggcctgccgcaggtcctgcgtaccgacaacggcccggagttcctgggcgaggccttcgtgcagtgggccaagctcaacggcatggccatccggtacatccagcccggcaagcccaaccagaacgcctacatcgaacgcttcaatcggaccttccgcgaggaggtcctggaccagcacctgttcacccgcctcgacgacgtgcgcgaggccgcgtactggtggatgctcgagtacaacgaggagcgtccccacgattcgctcggcgatctgaccccggccgagtaccgccaacgcgtcgccggaagttctacttttgaaatgcctgcttga

SEQ ID NO: 336914 - DNA, 909 bp, Pseudomonas aeruginosa
atgtcagagccacagcgtcgagagcctagattctctgggcatgagtctttcgtgtgtcgctatggatggctacccaagcttcatagcgctattgcattgaacccgctgctgctcaaggacgaagctcaggcgactatcaccttgggcatcggccgtaacatggtgaagtcggttcagttctgggctgaagctttcggggtggtcgagtctagtgagaagggggggctacagcctggtccgctgggacggctgcttcttgccaaagacggatgggacccctacctcgagcaaccagaatcgctttggttactgcactggtggatttcaacgcacgccgatattgctgtctggatgctcgtatttggcagtacagagctttctcgatttgatcgtaagacgcttgttgcgagcttacgcgatcttgctggcagcattgggaagaagcaattggcggattcgaccttagagcagcacgccagtctcttccttcattcttacgcgcgcgaagaatccgcttcagatgacacttcatggtgtccgctgcaagaacttgatttatttgaagaagtctctgctgatgatggtaaaactgtctatttggtaggcaggagtgtgcccttaggactttcgtcgagagttgcccttttttccattgtggactttttggcacggcggaagtccacatcatgtggattgggtgatttggctcatggtgctttcagcccaggtgtcgttttccgtctcgatgaatttcaactcagagctctgttggaaacggttgagcatgagtttgatggggctgttcgctttgtggacactgctgatacccagcgcatcactatgaatcctgcactgctgcctgattggctcgaatgcttattgccggcagaggaaaaatcgaatgtctga

SEQ ID NO: 336915 - DNA, 858 bp, Pseudomonas aeruginosa
atgttgcagttcgatccaaactggcgattttattctccaggcacagtcgggactgacgtcgtcaacgaaataattcaatatgtaataaaccgtgtagcagctgactgcggcagaaaaaaaattttagagacattcaagcgtcgtttcgcacaatctgttggcgctacaacgggcacaagttcgtccgagagctgggcagaaaccgatttagaaaactttatgcgccaatcggcagatcagaatgccgcactgtttgcagaagcacttcatgacggacttttggatattaagtctacgagcgtaaacgcagccattccttcgtgggagtacgtcaataaatacctagttccgtgtggtctcgctatctctccaccaaatctcgttacaacccctgatttcaagccagtttctgtcccgacaaatgtaccatcgcttgatgcaaaagccaatgaagtgatacagaactcacttagcacgtcagagcatctgctggcatcagggaacaatcgcgcagctgtacaagaaatcctttggttgcttgagacgatctcgaccgcttttcgtggaatcgactttccagatgggaacgttaccggaaaatacttttcaaaaataatcactgatttgcgccggctgcatcgtgggcaaacgttggaccgagtaagtgcttggctggaaagcatttatgggtatctctctgcacccgatggtggtggtatccgccacggagctgctctaatggatcatgaggagctgactttgggtgaagctagattatattgcgacctatctcgaagctacatcacgtttcttctacatgagcacacccgactgcaggccgagcgacattgcatttga

SEQ ID NO: 336916 - DNA, 732 bp, Pseudomonas aeruginosa
atgccgaaagttaagttccctagcaattgtgccgaaatcgaaatattcaagttctgcacagaagttgagagccacgcgggcacagataagttactaattgatttctcatcaatgggaaggatcgaaccattctcgatgacctacgtagccaaacacatcagagatttcaacagaaataatcaatctacaaaagtttgctgcagtggacaccaaaataaagaatacgcggcaaatatgggattttttagagcgtttggcttaaagcatggaagagagccgaactgcaaagatggaaacgagcgattcgtaccattcacaattctacgaacccaaaccattgtggatgaggcgcaaaaggaatggaaagttacccaggacataattgaaagacgctcagagcacttagcaaaaatcctgtctagagaagagcacggcaacttggtagatgctttaacctattcaatcagagaggtcatgcgaaacgttatcgagcacagcaagtctcgcagcatagaatactgcgctcaattctggccaacatacaacaaagtagaaattgccatcatcgacaatggaataggattgaggcaatcgctatcaagcaacccctttatccaagttcaatgtgactcggatgccattcagcaggcactaatgccagcaatttccagcaagaatttcaagggagtgataatagacagggcggcggcaaaaactgagtgcaacacctga

SEQ ID NO: 336917 - DNA, 591 bp, Pseudomonas aeruginosa
atgagacgcttgagcatccccaccaccttcctgttaacgctcatcgcatctggctgtacctcccaagtcacacgggagggaaaccccttcgacgagcctcttgcgcgagaaccactccaagcacccgccgcggaacctggtcgcatcctcaaagcatcaccgcggcaagtccctgccgatttgcccgtcgctcagatcaggcagacggctgacatcgaacccgacgttcaggtctaccctgctggtgcagttccgaccccgatttcctctacgccgaacgttccagttgcagtaacaccggcacccgactccggccgtgaggcgctggccgaggcggaaaaggtagctaccaccggtgacacgacggcaatgatcgaactgctggagcaaagcgccttcagggggaacatggatgccctgtaccggctggccaaggtctaccagaacggagaaggagtgccagctaaccctgagctcgcagtggcttatctaaccactgcatccggacttggccatgtcgagtctacccgggtgctggcctgggactatgaatcgccccgggtttcaaggaggccgattggtttaagttga

SEQ ID NO: 336918 - DNA, 489 bp, Pseudomonas aeruginosa
gtgttggagcctcctcaaaacccggggcggttcaacacggacttcgggcgtcggcagagtgacttcaacacactcaaacaggcacccaagaaaccctcgcgcaagcatctggaggtactgatcgaccacctagcctggctagagagtttcgggaaactggatgccatttttgatgggatcgtcgatacgaaaattcgccactttgctgcccaagctgcggcgtcggatgtatctgaactgaaggactgctcgctgccgaagcgttacacgctgatgcttgctttgatctaccgtatgcgggtgcgaacccgagatcacctggccgagatgttcatccgaagaatctccacgatccacaaacgcgccaaggaggagctggagcaaatccaggcacgtcaacgtcagaagttggaacaactggcggccaccttggacggcgtggtgcagattctggttcaagagccggatgacaggaggctggtagcctga

SEQ ID NO: 336919 - DNA, 1896 bp, Pseudomonas aeruginosa
ttgccgctgatctggaggcacttcaagtcccatcgttcactgctgtttcgcctcagccaccttctccagttggagcccaccacccaggatcgctcacttatccaggcgcttcagctcattcaggacagtgagaatctgcaccgtgaatggatcgatgagcatgtcgacttgtcgtttgcatcagatcgctgggtgaagatcgtgcgtcgccctaccagtgaagggccgcctaccaaccgacgttatctggaggtctgcgtgttctcctacctggccagtgaactgcgctcgggtgatctgtgcgtgcagggatcggaatccttcgccgactaccgtaaacagttgctgccttgggaagagtgtctccagcggctaccggcatactgcgagaaggtgggccttcctaccacagcgaaggagtttgtcgcctcgctcaagagccagttggaggaaaccgcgcaacagttagatgacaagttcccttcctgtcgaggggatgtgtcgatcaacgatgcaggcgagccggtactgcggcgggtgatggcgcgggacatcccgccttcagccatctcgctacagacggcgcttatgcagcgtatgccagccaggcacgtgctggacattatggccaacattgagcactggattcagttcacgcggcatttcggaccgatgtccggcaacgagccaaagctcaaagagccggccgagcgctacctgatgacgatcttcgccatgggctgcaatctcggtcccagccaggccgcgcggcatctggccggtaatgtcacaccgcatatgctgtcctataccaatcgccgccacctctcgctggagaaactggacaaggctaatcgcgagttggtggagctctatctgcaacttgacctgcccaagctttggggcgatggcaaagcagtggccgcagacggtacccagttcgacttctatgacgacaacctactggccggctaccacttccgctatcgcaagatgggggccgtggcgtaccgacacgtggccaacaactacattgcagtgttccagcacttcatcccgccaggcatctgggaggcgatctatgtgatagagggactgctcaaagtcagccttagcgtcgagcccgatacggtctactccgacacccagggccagtcggccacagtattcgccttcactcatctcctgggtatcaatctgatgccgcgtatccgcaactggcgcgacctagtgatgtgccgaccggatcgaggcgtatcgtacaagcacataaaccgactgttcaccgacactgccgactggcacctgatcgaaactcactggcaggatctgatgcagattgcgctgtcgatccaggccggcaagatttcctcgcccatgctgctacgtaaacttggctcttacagccggcgcaacaagctctacctcgcagcacagacgctgggcagtgttatccgcacgattttcctgctcaattggattggcagccgagagctgcgccaggaggtcactgcgaacaccaacaagatcgagtcctacaacggcttctccaagtggctctctttcggcggcgatgtaattgccgaaaacgatccggacgagcagcagaaacgtctgcgttacaacgacatggtggcttcgtcggtgattctgcagaacaccgtggacatgatgcgcatcttgcagaaactagcccgcgaagggtggcagtttaccgatgaggacgtgtcctttcttagcccctacctgaccagtaacgtcaagcgtttcggcgagttcaaccttaagctcaaccgaccgccggagccctggatcaaggattcggtattccaacaggctgccggctcgttgcgagtcaactcgaccagtaaggccgcggccgaggaggcaatatga

SEQ ID NO: 336920 - DNA, 345 bp, Pseudomonas aeruginosa
atgattgccccgcccatcgggactcgcatctggatcgtggctggagccaccgacatgcggcgggggttcgatggcctggcggccctggtgcaaacccagcttgaagcggatccattctccggccagatcttcgtgtttcggggacggcgcggtgaccggatcaaattgctgtggtgggatggcgatggcttgtgcctgttctgcaagcggcttgagcaggggcgcttcgtctggccgcaagccaccagcggcagcgtctccttgacgacggcacaactcgcgatgctgttggagggcatcgattggcgccgaccgatacgcaccgcaccggtacgaacggtctga

SEQ ID NO: 336921 - DNA, 1509 bp, Pseudomonas aeruginosa
atgacttgcgcgaccgacttccttcctgacgacatccaggccttgaaagccttggttaccgcccagcgcggggaaatcgagcacctgaaactgatgatcgccaagctgcggcgcatgcagttcggtcggcgttccgagcaactcgatggcatgctcgaccaactgcaactgacgctcgaagagttgcaggtcagccaggccgcattggcctcgccaccaccagcccaatcgcgcccacgtacacccgtacgccgcaagccattgcccgagcatttgccccgtgaaatccacgtccatcgacccgatgcgcagtgcccaggctgtggcggtgaacttcgtcatctgggcgatgacgtggccgaagttctggagtacgtgccggcgcgcttcaaggtgattcgccacgtgcggcccaagttggcctgccgctgctgtgacgggattgtgcaggttcctgcccctagccgcccgattgcccgggggcttgccgggccaggattgttggcccatgtgctggtgtccaaatacgtggatcatctgccgctgtatcggcagtccgaaatctatgcgcgcgagggcgtgtccctagagcgctcgaccatggccgactgggtcggcgaagcgagccggctcttgcagccattggtcagccggttgcgacagcacatcatggccgccaacaaagtccacgccgacgacacgccgatcgccgtgctcgcccccggccagggtaaaaccaagaccggacgcttgtggacgtatgtgcgcgacgagcgccccgcaggtagtagcacgccgccggcggtctggtttgcctactcgccggatcgcaaaggcgagcacccccgagcccatctccggggcttcgccgggacgttgcaagccgatggctatgccggtttcgcgcaactctatgcctcgggcacgattcacgaggcggcatgctgggcacatgctcgacgcaagtttttcgacctgcacaaggcactggcctcgccgattgcggctgaggccctgcaacggattggcgcgctatacgccatcgaggcggaaattcgcggacagccgcccgatcaacgacgcgcagtgcggcagcggcgagccagcccgctgctggcgcacatgcacatctggcttaatcacacgctgacgcaattgccgcccaaatcggcattgagcggtgcgatccactatgccctcgcacgttggcaggcgctgacgcgctactgcgcggatggccgcattgaaatcgacaacaatgccgccgaacgggccctgcgtgcagtcgccctgggtcgcaagaattttctgttcgccggttccgacgcaggcggagaaagagcggcggcgatctacagcctggtcggttcagccaagctcaacgcattgaacccacaggcttatttgacgcacgtgctggagcgcatcgccgactacccaatcaatcagctcgacgacttgctgccctggaatattgctctgcctaccctagaacatgaggccgcttga

SEQ ID NO: 336922 - DNA, 579 bp, Pseudomonas aeruginosa
atgcccaacgtcacccgtttgcccaagccggcgaacgaccgtctcctgcaactgcacatcgaactgacgtggataaaacccgccatctggcgccgggtcgccgtgcccgagcgcatcaccctgagcaaactgcaccaggttattcaggcggtgatgggctggagtgacacccatcttcatgagtttgaaatcgctggcgaaagctacggtattcccgatcccgactggggccctccggtcgtttcggaacagcgcaagccgctgacaaaggtgctgtatgggtcgaaggcgtttcgttacgtctatgactttggcgacaactgggagcaccggatcaagatcgagcggctgttgccggccattgcgtgcccgcatgtgctgtattgcatcgacggcgccaatgccagcccgccggaggatgtcggcggtgcaccgggttacgcggattttctggacgcgcttgccgaccccgaacatcccgaatacttggacatgctcgactggtacggcgataccttcgatcccacggcatttgaccgcgacgacatcaatcagcgtctgaagcggattaaagtctga

SEQ ID NO: 336923 - DNA, 549 bp, Pseudomonas aeruginosa
atgcgggggtttcacctcgccaccgaagcccatgccgtgcgcgaggggctgtatctggcggcggccaatcgctaccggcggcgcatcatcaccttgcgcaccgagctcgaaggcctgatccccacctatggtgatttgatcgccattgcccatgacatgcccagttggggcgcgggcggcgagatcgttgcctgggatgccgacacccacaccgccacgctgtccgagccggtcgcatttgtcgatggacaagaacatgtcatggcattgcgccgccgcgatggcggggtcagcggcccgcatgcggtgatgccgggcagcgatacgcaggaggtggtctttgcggacctgcccgacatccccatcgaaaccggcctgtcggccgagcgcacccatttcgctttcggcgttgccgagcaatggagcttgctggcacgggtgatcgcggtgcgcccgcgtggcgagcagatggaaatcacctgcgtggccgagcactcggctgtgcacagcgccgatggcagtgtcgacagcggcaccgatccaatctga

SEQ ID NO: 336924 - DNA, 291 bp, Pseudomonas aeruginosa
atgaacgaaccccacctgatggatggcatggtggtcatgccccatgacgaatttgaaaccctgctggagcgcgccgctgagcgtggggcgcgtcacgccttgtccgatgtcggcctggatggcccggatgctgcaaacgacatccgcgagctcaggaatctgctcgacgccttcaacgaggccaagaaaaccgccggtctcacgctggtcaagatgctggtcacgggtctcgtgctggccttgctcgccggcaccatcgtcaaaatcaaactgttcggaggcccgcaatga

SEQ ID NO: 336925 - DNA, 906 bp, Pseudomonas aeruginosa
atgacctggttagttatggcacttatggctccactgctgtggagcctttcaaatatcctggacaagctggcagtgatccatcatgcgaatcactggactacatttatatttctcctgagcattggaaatcttctttattctgcgctgatttttcttctctttacaccatctgactttgacacaacctcagcgcttctgaacctgctgtcaggattatgcatttttggaatgtatttcctatacgcaatgccgctgaagtcggtcgatatctctactgcgattgcgcttcatcagttaactcctttgctggtgcttgtcgtatcgatcctcttgcttggctattcgccaacagggattgagctgctcggcattgccttggtttttgtcggggtttactttgctgtggcaatcggcaaagggagaccaggctcgataagtttatcagcagtattgcttctaataggttcagcagtttttggggcggtggctacgctactatacgatcacctgctcctgagtcacagcctgccctcggttcttatgtttaactatgcaggctacggtcttggcgggactctgatgctgctggttccgaaatggcgccattccatcgcaaaggatgtctccgaaatgccaccaaagggctgggcggtgtatgcgctgagcaatctcttcgacgccggtggatacgcgctttttattggcgcattatctgctggtggaaacgttgcggtggtctcggttttggtcagtcttcacccggtatatgtgctagccttaagtcattggctagcaatagttaacccaaagatactcagcgaaaactttagctcgtcggacgcatataagcgcatgagcgccatagtcgtaatcgttgccggcgtaataatgatgaccaagatctga

SEQ ID NO: 336926 - DNA, 915 bp, Pseudomonas aeruginosa
ttgaagaactacatcgaccgccaccgtgacgactacggggtcgagcccatctgccgggtgctgcagatggccccgtcgtgttactggcgccacgcagcccggctgcgtaacccgcaactgcgcagtcaacgcgcccagcgtgacgagtgcttgaaggcggacatccagcgcgtgtggcatgccaactggcaggtctacggggccgataaggtctggctgcagatgaaccgcgagggcatcccggtggcacgttgtactgtggagcgactgatgcgtgccatgggcttgcaaggggctcgccgtggcagggcggtacgtaccaccacgcctgacacatcagcgccgtgcccgctggaccacgtcaaccggcacttcaaggccagccgtcccaacgagctatgggtgtcggacttcacctatgtctccacctggcagggctggctgtatgtggcctttgttgtggacgtgtatgcccggcgcatcgtgggctggcgagtcagccgcagcatgcaaacggacttcgtgctggatgcgctggagcaggcgctgtatgaccgccagccagcagcccatgccttgacgcaccattccgacaggggcagtcaatacgtcagcatccgctacaccgaacggctggaccaggcgggcatacagccctcggtgggcagccggggtgacagctacgacaacgcgctggccgagaccatcaacggtctgtacaaggccgagctgattcaccgccggggaccctggaagaccagggaatccgtggaactggccaccctgcaatgggtgcactggttcaaccatgtccgattgctcacgccgattgggggcatccctccggcagaagctgaggcaaactactggaggcaactagccgtcagcgacacctcggcagaggtgtcaacttaa

SEQ ID NO: 336927 - DNA, 324 bp, Pseudomonas aeruginosa
atgaccaagtcaaacaagttctcacccgaggtccgcgagcgtgccgtacgcatggtgcaggagcaccgagccgactacccttcgctgtgggcagccattgaatcaatagcccccaagattggctgcgtgccgcagaccttgaacgattgggtcaagaaggccgaggtcgacagcggccagcgtgccggtaccaccacgtcagaagcccagcgcatcaaggagctggaacgtgaggtcaaggagctgcgccgggccaacgacatcctgaagacggccagcgcgttttttgcgcaggcggagctcgaccgccgattgaagtcttga

SEQ ID NO: 336928 - DNA, 450 bp, Pseudomonas aeruginosa
atggatgcctgccgttcgatcaacgagatggtcttcgccatgctcttcgtggtcgccgtcggcctgggcccgttcgccggcgtgctggcgctgttcatcagcaccaccggggtgctcgccaagctcttcgccgaggcggtcgaggcgatcgaccccggtccggtcgaaggcgtccgcgccaccggtgccagcgccctgcaggaggtcatcttcggggtcatcccgcaggtcctgccgctgtggatctcctattcgctgtaccgcttcgagtccaacgtgcgttccgccaccgtggtcgggatggtcggcgccggcggcatcggcgtgatcctctgggaggccatccgcggcttccagttcggccagacctgcgccgtgctgatcgtcatcatcgtggtggtgagcctgatcgacgttctgtcacaacgcctgcgcaagctgttcatctga

SEQ ID NO: 336929 - DNA, 273 bp, Pseudomonas aeruginosa
atgtcgatgggcgacagcttccagtgcttgagcggatcgtcgcggcgcgagatgaagcgccgcagttgctcctcgcggctcaccgagaaccagtacttgaacagcaggatgccgctgttgctcagcatgcgctccagctcgggggcctggcgcatgaactccaggtattgcagtggcgaacagaagcccatgacccgctcgacgccggcgcggttgtaccaggagcggtcgaagaagaccatctcgccggcggtgggcaggtgctggatgtag

SEQ ID NO: 336930 - DNA, 240 bp, Pseudomonas aeruginosa; identical to SEQ ID NO: 269213

SEQ ID NO: 336931 - DNA, 894 bp, Pseudomonas aeruginosa
atggatcgctggaccgaatacgaggtttttgtaaagactgctgagctgggtagcctcagcaaggccgcagaggcgctggggctttcgaatgccgcggcaagtcgtcacatggcagcgctggaggatcgactcggagtaaggttgatagagcgcaatacacgacgcctttttgtgaccgagatcggcaagatattttacgaaaaagtcaaatgttctctttccaccatgagtggcgcagtagatgcagttgccgcaagtaaaagtcatccagtgggagtgttgcgggtcactggctcgttatcgttatgcctgaagcatatcattcctttaattccgaaattcaatcagctatatcctgatgtgcgcctagatgttgtggcggagaatcgctattacgacataatcgacgacaatatcgatgtcgccattcgcacaagagggagtgaagcagatacaagcttgatcgttcgccagttgtcgaaaacaaaacgcgtattggcagcatcgcccgagtacttgaagatccatggcttccctcgccaccctactgagctttccggacatccattactgctctacacatatgcggactctccgtatgaaatgacatttcaacgaggcgaagagtcagtcaggattcccaccaagcccgctttcgagtccaacgatggttatctcctacgcgctgctgcacttcagcacatgggagtcctagcgcagcctgtctacgtgattcacgatgacctggtgacgggtcgcttaaccacagttttgtccgactgggaactaccattactggaaataaatctggtttatacctctcgatcgcacctgcctgccaagacgcgagttttcatcgattttctcatgcaagagttccagagtttcatctga

SEQ ID NO: 336932 - DNA, 2610 bp, Pseudomonas aeruginosa
atgtctggaagcaatggatcaaagagaagcaaaccaaccacacgcaagaaagaaaacacatcaagcgctatagagccagatgaaaaaaccctcccactggccatcggaaaattattcgagctaaatgactacaatattgagtacagcaagaaaatccacggcgcagaagttgacatagtcgccactccaaaaaacaatccatttggctcaactatctatatagaagccaccattcaatatgtagacaataccaaatatggaaaggatctaactaaattcactcttgtcagagcatcagaaccagagtgcacgtgcatatgcatttcaacatcgggcttcaccattgacgtcaaagagagagccggacactctagaatcctaactcacacgtacgatgagctattttcaaaattcgaaagattctcgccctatgtcgaaagcatattacaaaatgatcatctaattaaattagcaaattcatacgagcaaccactattcaaagataaaaagggcgaacactctgccaccatatggctgaaaaactggaagacagagcagaccccagaatctaattggcttgttatcttaggagaatatggcacaggcaagacagctctgactcaaaatctacaatacgagtggacaaatgagtacaaactagaccccagccagccaatccctatccgaattgagcttagaaatttcagcagacaatttgactcacgctctttaatccaccatttcttagacaccaatagactgggacatgttccaatagaacacttcttctatttattgcgcaacaaaagaattgtcctaatcttagacggctatgatgaaatggcccaattcttaaatcctcgagagcggcggtcttgcctagccgcactcgcggagttagcagcggaaggcgctaagggcatactaacaagcaggcccaactactttaccgaatccgaagagctaaacgtattcgaagccctatacacaactctcgagcagaaaagataccatctcagcgaaactgataagatatatatagctgaagagaagtcgattgatgaacttctccaaaactacttgatcaacaggaatgacagataccttagagacttaacccccgagcaaacaaaatcactagtaagaagaaatctcgcgaatgacgaagtaggacaaagcatagtcattaccttactggaaaaagtatttcgagaggaaaccacagggcaacgccaatcgctctcaggaaagccggttatcatttcctatttactagaaatacttgaagaccttcgtagctcaaccacaacgcacgagcaggcagatcttagcgaatggcaaatttacaagttaattgtagacaagctcatgcttagagattttcaccgctcgcctggactacgcccagatcaacgacgcgattcgctacagctcttagcggtaaacctttcacgaagagattcaactactgccactgaggaaatgatcacttcgatcattgacaacgtattcaagacagaacttcgccggcttaccgcagaagataggcgccttcgtcgagacgagcttttccaagatatcagaagctcaaccaccttaactagatccgagaacactcaccctagcggctggatattttcacacaactctctgagagaatatcttgtaacagaactaattgtgggaaatgtaataaacgaacaaaacgtagatattaaattcccgatcagcccagtgatgcgaacattcgtatcatctctttctggagaatttgcagaaaaatatctgacttctttaaaaaatctatggacaaaaaagacatccaatagcctcggcgaaataaccacacttagttttgatttattaaagtcacacaaaaatggcttgctcgaaaatctaatctacatttccggagaaagtcagagcaatagaataacactaaagggagcatccttcagcaatatcgaaatctctaaagagtcgacttccagtgaccgactgcaaatagatgcagaaaacagttccttcactgaatccagcttcaactctctggaccttgagaacagcaacttcagttcaagcacactagaccgagtagactttacgaattgcaatttgaacaactgctccttctcaggatccctgatctttgaatgcaacttaacgggagcaagctttgatcaaacagatttcaaagggatcgacagagaggtaaacttcattacacactcaccatctggaaacccgatagttttgaatggtgagcgcgcgataggatatctcaaatatcacggagcaataacagattacattgctccttactacgagctagagcaccatccgaaattccctataatactaaaaatatgtgaaaacattaccgaacaaagaaagagccagctacgcggactaacgcaacgtgggtcggcgcaaagtgacccacgctttgcacgagcattcgtagagcatctgaccaacatcaattttatcaccgtcgatcagaacgacctcgtttccgccactgccgatggaagaaaagaacttccgagactggtggaacacaaaattttgcccgaagaaatcgaaaacttccttagggactataaataa

SEQ ID NO: 336933 - DNA, 474 bp, Pseudomonas aeruginosa
atggatgatgacgtgatcctcgctaaagcccaggagctgctggactctggctccgctagagaggcgcatctcctaatccagcctctgctgaaagcgtctcagccggacgccttgtttctgtattcgacctatagcgtcgacagaaatgaatccaacgaggagttcgagagacggagcattgctctgctgactaaagcgtccactctcggtcatgcaggagcaacctttgtccttgccggttactacgattcaggcgacatggttgtgatggataagtcatatgccgctcagctgtgcaaacgagctgcggacggtggtcatcccaaggccaagctcatccacggcttggacttgttctatggcgctaacggcattcggcaagacaaagctctgggacgtcggctcgtagaggaagcggcccaggaaagtgtcgatggagccttggaacgactccaagaactggactcgcgctga

SEQ ID NO: 336934 - DNA, 1149 bp, Pseudomonas aeruginosa
atgacctccagcagcgtagggaaaggtattgccatctccggcatgttcttcatgctcggactgtgtttcgggagcctcagctcccggatggccacgataaaagacggactccagctttccgacggggtgttcggcagtgcgcttttcgccatgtcggccggggtggtgctttcgttgccggtatccggctggatgatcgcgaagctcggcagcagaaacgttggagtaatggcgattctcacgaacgccgttctgctgtccttggttcccttggcttctagcgtctaccagcttgctgccctgttgttcgtatcggggttctcctatagcgcggtcaatgtgtcgaacaatacccaggcaagcctgtcggaggcgctcagcggaaagaccgagttgccgttcttccacggtatatgggggttggcgggattcgtcggcgccgggttcggggcgttgatgatcgggcaggactttgccttgtccacgcatttcggcgtgatatcggtgatcgccttcctggccgccctggcctgctggcgctttctccacgaccagcctggcgcggagcgggtcgggcgggccttcgcgatgccggacaggaggcttttcaactacgggctgatcgtttttttctcgatggcctgcgaaggcatcatgtacgactggagcgtcgtctatttccaggacgtggtatcggccgagcggcaactggtcggagtcggcttcatggtattcatgggcgccatgactgtcggccggcttctgctgaaccgggtcgccgaccgtttcggtacgcgcagcaccttgcagtggagcggggggctcgccttgatcggcatggtcacgacgattgcctatccgagcctgccggcgtcgatcattggcttctgccttgtcggtctcggcatctgtaccgtcattccgctggtggcgggggccgccgcccgctcctcgagcatggcgccgagttcggctatcgcagccgttctgacgatcggattcctgggcacgttgatcggcccgccgctgatcggctttctctccgaagcgttcggcctacgttatgccttcggcgcgtgcgtggtcctggccatcgggatcatccttcgggcgggaaagataccgcggcaagctccgtcggtcgtttga

SEQ ID NO: 336935 - DNA, 1701 bp, Pseudomonas aeruginosa
atgaacgacagcatccaactgagcggcctgtcccgacagctcgtccaagccaatctactcgacgaaaagaccgccgtgcaggcccaggcgcaggcgcagcgcaacaagctgtcgctggtgacgcacctggtgcagaacaagctggtaagcggcctggccctggccgaattatccgccgagcagttcggtatcgcctactgcgacctgaatagcctggacaaggaaagctttccgcgggacgccatcagcgaaaagctggtccgccagcaccgggtcatccctttgtggcggcgcggcaacaagctcttcgtaggcatctccgatcccgccaaccaccaggccatcaatgatgtccagttcagcaccggcctgacgaccgaagcgattctggtcgaagacgacaagcttggcctggccatcgacaaactgttcgaaagcgctaccgatggtctcacaggcctcgacgatgttgacctcgagggactggatatcggtagcgcggaaaagtccacccaggaggataccagcgcagaagcggacgacgctcctgtagtccgtttcgtcaacaagatgctgctggatgccataaagggtggctcttccgacctgcacttcgagccctacgagaagatctaccgggtgcgcttccgtaccgacggcatgctccacgaagtggccaagccgccgatccagttggccagccgtatttccgcgcgactcaaggtgatggccggcctggacatttccgaacggcgcaaaccgcaggacggacggatcaagatgcgcgtgtcgaagagcaagtccatcgacttccgcgtcaacaccctgccgaccctgtggggcgagaagatcgtgatgcggatcctcgactcctccagcgcgcagatgggcatcgacgtcctgggctacgaggaggatcagaaggaactctacctggccgcactcaagcagccgcaaggcatgatcctggtcaccggccccaccggctcgggcaagacggtatcgctatacaccggcctgaacatcctcaataccaccgacatcaacatttccaccgccgaagacccggtggagatcaacctggaaggcatcaaccaggtcaacgtcaacccgcgccagggcatggacttctcccaggcgctgcgcgccttcctgcgccaggacccggacgtgatcatggtcggcgagatccgcgacctggagaccgccgagatcgccatcaaggcggcgcagaccggacatatggtgatgtccaccctacacaccaacagcgccgccgagaccctgactcgcctgctgaacatgggcgtgccggcgttcaacctggcgacctcggtgaacctgatcatcgcccagcgccttgcgcgaaaactctgttcgcactgcaagaaagaacacgaggtgccgagggaaaccctgcttcacgagggctttccggaagacaagatcggtaccttcaagctttattcgccggtgggctgcgaccattgcaagaacggttacaagggccgcgtcggtatttatgaagtagttaaaaacaccccggccctgcagcggattatcatggaggaaggcaactccatcgagatcgccgagcaagcccgcaaagaaggcttcaacgatctgcgcacctcaggcctgctgaaagccatgcaggggatcaccagcctggaggaagtcaaccgcgtgaccaaggattaa

SEQ ID NO: 336936 - DNA, 378 bp, Pseudomonas aeruginosa
atgtcgcttacgaaatttggcactgccgtcagagagtatcggcaccagttggggctgacgctcagcagtatggcaaccgcactcagcacctcgcccgccttcctcagtgcaatggaaaccggccgcagtaaggtaccgatggagtgggttgagaaaattgcgagctacttcgtcgcgcaaggaaaagacgttcaactgaatcgcctcaaagctatggcgtgtgagtcgaacgacactgtgtcgctgaacggcctgcctgcccaccacaaaatgttgatcgctggctttgccaactccgatcttaaccaggagcaactgtcgaagctcggtactctgctttctgagatttatggggagaaaatcaagaatgacgcctga

SEQ ID NO: 336937 - DNA, 486 bp, Pseudomonas aeruginosa
atgacgcctgagactgacgccgattactgcatgcggggacatcgtgtccccgccttggagcccgctgtgatccgcgacgttgcctatcgagtttgcaagatcatcggcatcaacaaagcatcgtttaagaatgggaaagcagagaaagtagtctctcgcctcgaacatcacggtattcatctcgatgtaatcgaagacgatgaatggatcgatgcgacccgcgcaactgtagaccccagcaagggtatgatctacgtgccgaacaagctctacacggacctgtgtcgagggaaggtcgaggcggtacggatcttcctacatgagatggggcacatcgtactgggacatcgtcctctccttcactttgcggaagagcaggcaacgaagctcgaggattcggaatggcaggctgattacttcgcagacgctgtaatagatctgcttaaactgccgaagagcgaagctcagatagaattcaagttctga

SEQ ID NO: 336938 - DNA, 369 bp, Pseudomonas aeruginosa
gtgatctcggcccgcgtgatttcgatcgcgctggcctgcctggtgctggtcggcctcggcgccgccggcggtgtctggctcggcgcgcggcactaccggccgcagctcgatgctgcgctggcggatctggtcgcctgccgcgccgccaggggaggcctggaggacgcagtggcggagcaggtccggcaggttgccgcgctgcgtctggccgacgagcagcgcgcccgggatgccgcgcaggctgtggatcggggacggcagcaggccgcggagcagtatgccggagcccagcgcctgttgcgtgagcgctccgctggtgatcagtgccaggcagccgaagtggtcatcgatcaggagttggggctatga

SEQ ID NO: 336939 - DNA, 462 bp, Pseudomonas aeruginosa
atggctgcactgaacagcgagctgaagagcttcatcgttcaggctctggcgtgctttgacacgccatcccaggtggtcgaggccgtcaagaacgatttcggaatcgtggtcacccgtcagcaggtggagtcccacgatcccacaaaggctgctggcaaggggctggccaagcgctgggttacgttgtttcacgacacccgaaagcgcttccgtgaggagactgctgaaatccccattgcaaaccgtgcctatcgtctccgcgcgctcggtcggatggctgagcgggccgagggcatgaggaacatgggcctcgccatccagattctggagcaggcagccaaggaggtcggcgatgtctacgtcaaccgccaggcgaaagccgaaggaggaggcgagcaggttccacccacgcgggtagaagtcgagattgtcgacgcgagggtgcgtgatgccgaggcttaa

SEQ ID NO: 336940 - DNA, 315 bp, Pseudomonas aeruginosa
atgaagatgccagagaaggacccgtcattctgggccacggtgctgctcgcgctgcgcgagcaagggctggcgatggggctcgccttcatccttacctggctccgtacccagtacgaggggaaggagccgagcattgttcggcaactgatcgaggcggcccttggcgcgatgctggttatggttgtcggtctcaccgccaaggagtttggctggagccctgcctggcagttttttgccgccggcttcgttggtgtcctcggggtaagcaccgtgcaaaagctgggcgcgcgctgggcggaaaggaaggtgggctga

SEQ ID NO: 336941 - DNA, 255 bp, Pseudomonas aeruginosa
atgaacaagatcaactggacacggaaggcggttaagcagctcagcaagattcacaaggccgaccaggccaagatctacgacgccgcccaagccttggcacatatgccgaacgtccagaacatcaaggccctgtccaatcaccgctacggctaccgcctcagggtcggcaactaccgggtcatgttcgactgggatggagccatcaagatcgtcaacatcgaggaggtcaagaagcgcgatgaacacacctactaa

SEQ ID NO: 336942 - DNA, 327 bp, Pseudomonas aeruginosa
atgaacacacctactaacgttcaaatcatcaacgggccggacggatcgccggccttcgttgtcatcccctacgccgagtacatcaaggaccatcccaaggatgacctggtgcccaacgaagtggtcggctacatggtcaaggaagggctcagccccgccgctgcctggcgcaaacacctcggattgagtcaggctgaagtcgccagccggattggcattactcagccggcctatgcccagcaggagaccgcggcgaagccaagaaaggcgacccgcgaaaaaatcgccgccgccctagggatcgcgccggacctgttggacatatga

SEQ ID NO: 336943 - DNA, 390 bp, Pseudomonas aeruginosa
atgagcagaactcgaacctacgtggacaagctgctgggcgataccgagtatctcctcgaacagtgggggtggtggcgcatggatgggatgggggttcccgggtatgtgtcgccggccgccgctatcatgagccaagccatgccaatgtcgagccccaaggcctaccacgtcactgacgatatggccttggccgtcgaccgggtcattgctcgactcatcgacagggcgccgcaggccggcgacttcgtgtggctctactacggcgcgaagtggccggccctgcgcatcgcgcgtgaacaccagatcggcgaggccaaagtcagggagacattgaagctggctgtagggtgggtcgacagcgccctggagcggttccgcgagagcgcttga

SEQ ID NO: 336944 - DNA, 765 bp, Pseudomonas aeruginosa
atgactgatctggcccccttcggcggccaggccgcaaccatgaccagccgcgagatcgcggatcttgttgggtcgcgtcacgacaatgtacgcgtgaccattgagcgactggccgagcgcggggtgattgctttacctgcaatgcaggaaaagcccaccgctggccgccccactcaggagtacgtcttcaccggcgaccagggcaagcgcgacagcatcatcgtcgtcgcccagctctgcccggagttcaccgcgcggctggtggatcgctggcaggaactggaacagcaggcttcccggccactgaccgccgccgagcaactactggccagcgtgcaactcaccgtcgatctggagcggcggcagcggcagaccgagcagcaggtggcagcgctgaccgaaaccgtcggcgacatggaccgatcgcacccgctgctcgactcgatccccaacggcatggagagcatcaccgctatccggcagcggatagggaagcagtacggacttccgcccagggtgatcgacgcggtggtgcgcgacatgccgcacagcccgcgccccttcgccatggtgcgcagcaagcacgaggaactgaacgcgcgcccctacgcggtctgggcaaaggccgagatcagcagggtgttcgagcgcttcgcgcgcggctgcaccttcgtgacccaacaccgagccacgcacccggatttcggcgccggccgggagcgcttccaaatgcgcggcaccccttcgcaggagatcggcgaatga

SEQ ID NO: 336945 - DNA, 1077 bp, Pseudomonas aeruginosa
atgatcaccccgcgcatcaagccctcgtctttctggcgtcaccagcccggcgctgacctgttcgtgcaagaccaacgccaagccaagctcggcggcttcatcgccaacctggcagcaatggacgaactgatcgacttcgcggccattgccgcccgggtcgacaccgcctgccctcgcgctgaccgtagcaaaggcgggcgcccgccgtaccccaccgaggtgatggtgcggctgctgttcatccagtcgctgtacaacctcagcgacgaggactgcgagtaccaggtgctggaccgcatgagcttccagcacttctgccgcctggacggagcactgcacatccccgatgcgcgcacgctgtggagtttcaagcagcgcttggcccaaggcggtctgggcggccgcgccatcttcgaggcggtgagcctgcagttgcagcagcacggctacatcccgcgcggcgggcagatcgtggatgccagcatcgtgcaggcaccgctcacccaggcgaacaaggacgagcgcgaagcgctcaacgaaggccgcaggcccgagggctggaatgccaagcggctgcagcacaccgaccgcgacgcgcgctggaccaagaagcacggcaagagcttctacggctacaaggtgcacgccaacgcggacgcgcgctacaagctgatccgccgggtcaaggtcacgccggccaatgtcgatgacggccagacgctcaaggaggtgctggaccgcgccaacaccggcgcgcgggtgctggccgaccgaggctacgacgcgcagaccaaccgccagttgctgcaggcccacgggctgcgcgacggcatcgcgcggcgtgccaagcccgggcaggagcggcgcgtgcgactggacgcgcgcaacaaggcgatcaaccgcgtccgcgccagaggcgaacatgtgttcgccggcctcgagcagttgggcggcaagtgcgtgcgggcgatgacgctggcgagaaacgaactggcgatcctgctgaagtgcgcggcgtacaacgccaagcggctggtctggctggtgcgccatgacccgtgcgggtgtgcgcgatga

SEQ ID NO: 336946 - DNA, 1287 bp, Pseudomonas aeruginosa
atggaggccatcgcgaacgaccttgtcgagacaggcttcacggaagggttcgaactctgccatttccgggcgcagcgtggtatgcgcgtggacggctactggttcaatgacgaaggagttctggacctcttcatcgcggacttcgactcccgaaacgagctggcatcgctcaccagaacggaagtggccgcggcattcaagcgtgttgccaacttcttcgaggccagcgccaacaagggcctggccggcgaactggaggtcacatcgccggagtacggccttgccaggcagattgcggatcgcaaggacgccattcggcaggtcaacctggttctcttctccgagcgcacgctcagcgagaaaatccaggcacttcccgatacggaagtggcaggtgttccggttgctcaccacatctgggacatctcacgacttcatcgtcagcgaagctctcgcagccacaaggagccactcgacctcgacttcgagcagatgttcggcaagggcatcgcctgccttcccgcacacctggggaccgatgcctatcaatcctatctcatggtcatgcctgccgaggtgctggcgaccctgtacgaaagattcggagcacgattgcttgagcagaacgtccgtacgttcctgcaggcgcgcggcaatgtgaaccagggaataagggcgacgatcctgaacgaacctgggatgttctttgcctacaacaacgggatcacggctactgcacagagtgtcgagacagggatgacggattccggtctggcgatcacgagggttgtcgatctccagatcgtcaatggtggccagaccacagcatcgctgttccacacacggaagcgggacaaggccgatctttcccagatattcgtccagttgaagctgtccgtcatcgacagcctgcagagcgaaacggtcgttccaaggatatcggagtatgcgaacacccagaatcgggtgaatgccgccgacttcttctcgaaccacccgttccatgtgcggatggaagggttttcccgacggatctgggcacccgcgcagaagggcgcccagcgcgagacgaggtggttctatgagcgcgcacgcggccagtatgccgatgcacagtcgaagctcacacccgcggagcagcgtcgcttcaaggcggagcatcccaagccacaggggcacttctcgaaacctccctcccccttgcagcccgtgagccggcatgatgtcgcccatgatcaccccgcgcatcaagccctcgtctttctggcgtcaccagcccggcgctga

SEQ ID NO: 336947 - DNA, 366 bp, Pseudomonas aeruginosa
atgggacagaccaaccgccgcgcatccgcatggccttcgctggccgtgctgttggccgtgttgctctcggccatgcaacccgccatcgccgacgacaccccggagcgtgagcagctcgccgcgctcgcccgccaactcgacctgatcgaccgcctcgccgagcacgccgcccataccgctccgcaggaacgcgcccgctaccacttcgactacgcccggctgcgcgcggacctgaagcgcgttcgcgccggcctgcaggactacctcgtgccccagcgtgcccagccgcgcgatcccgtcccgctggtcggcgattacgtccgccgtgaccgcgccgacgacgaggacgaggagccatcgccatga

SEQ ID NO: 336948 - DNA, 849 bp, Pseudomonas aeruginosa
gtgccggtggggcggcccctttggatcgaacgctttggcattgccaagagcgtcgaacacggtcacgatttaaaccacgttaaacttaactcatacaacggcttcgagatcagttgccacgagttcaccgcctggggggagctggacgtggaatcgagtgacatcaccgccgaaatccgcatggcggtcctcggcgaatgggtgcctccccaactcgccgacgtgctcgccctgcagcgtgccgaagagccggagacccatgccgtcctggccggatggacagatcccggtcgaggcgcggagctgccaggcgacggcttcgacttcgccttgtcggcggttgcccggcagtggcctggctgggtatgcgagccgctgtggcatgacacgctggcggtcgccgtggccaagcgctcccacctgctggcctaccgtgaagtgccgtgcggggaagtgctcaagcagcccttgatccgtgcgcagtcaacggccggcgagccgtggcgcgcggtggcccagcgtgtcctcggggatgcgctgcaggatcgggagcagctggtcagctctttcgacatcgcgatgacgctcgtgtcagccgggtacggcatcgtcgtcgcgccgtctgcgaggcttgctggctacttgaaccgcagcattgccgcgcggccgctggctggcgcaccgaccgtcgtaatggcttacctcctgcatccccgggcgcgcctgaacgaacccatggcgaggttcatccaacgtgctcgcagcgtgtccggggacctcgtagcacctactgagcaacgtcgtgctctgcggataccactgttactgaaaggccatccggccacgtga

SEQ ID NO: 336949 - DNA, 1020 bp, Pseudomonas aeruginosa
atgaaagcaacctaccgtgccatgcaagtcagtcagcccggcatcctggaactggtggagcgccagacgcccgtgccggggagcggggaagtgctgatcgaggtcgaggcctgtggcatctgtggcgcggacgtcggcgacatcgaacggtcggagcccgtgcagcccccacgagtccccggccatgaagtcgtgggacgcattgccgcgctaggcgccaatacgccctcgatctggcaagtgggacagcgcgtcggcgtaggacgactcggtggctactgcaatgaatgcgtcccatgccgtcagggccgcttccagctgtgccagaaccagcccttcgtcggtgccacatgcgacggcggatacgccgagatgatgctggcccgcgctaccgggctggtgtcgattccggacgagctcaacgcggaagaggccgcaccgatgctctgcgcgggcattgccaccttcaacgcgctgaaaaagtgcggtgcgcaagcgggcgacatcgtggcgatcgtcggaatcggtggcctggggcacatggccctgcaatacgcgcgcaagatgggcttcaaggttgtcgccatcgggcgcgggagcgacatcgcggacgatgcgaaggcgctgggcgcgcatacctacatcgacaccgatcaggacgatcccatggcccatcttcaacgtatgggcggtgcgcacgcgattgtgagtaccatcgggcacgccagcacggtatcggccctcatgcgtggcctggcacctagcggccgcctggtcctgctcggtgccggcaaagatcctctaccgattgcagccgggcagttggtggtcggcgagcggagcgtcgtggggtcgatcaccggatcgccgtacgagaacgagcgcaccctcgatttcagcgtgctggccgacattcgtcctcgaatcgagacgatgccgctggaacaggcaaacgatgcgtatcagcgaatgaaatccggcgacgtcaagttccgcatggtgctgacgatggggcgctag

SEQ ID NO: 336950 - DNA, 1164 bp, Pseudomonas aeruginosa
atgagcatgcaaacggtgcgcgtggcgatcgtcggcggcggcctgagcggtctgtacgcggcttttctgctggagcagcaaggcatccatgactacgtgctgctggaagcccgggatatgttgggcggccgcatcgcatccccctccatcgcgccgtatccgcaggctgcaggcatggccaagcccctggaccggttcgacctgggcccgacctggttctggcccgcgttccagcccgaactggaccgcctgatcggcgatctgggtttgcggcgcttcgagcagttcgaggccggcgacatgctggcggagcgttcgtcgaacgagcctgcgatgcgtatgcgtggatacgccagttcgcccacctccatgcgtttgctcgggggcatgggggagctggtcgatacgttgcgtcgacgggtgaacgcggcacggatcatcaccggtcaggccgtgcgacgcgtgcgcaccacgggttcccatgtcgaagtggaaagcaccgacgctgctggccgtgccacgacctggctcgccgagcacgtgcttctggcggtaccgccccgcctggccgaggccggaatcgagttcacgcctcccttgccgaaagcgctggctcagcaatggcgcgaaacggccacgtggatggccccccacgccaagtaccttgccgtttacgacgccgcgttctggcgcgaacagggcttgtccggcgatgcccgaagcacccacgggccactggtcgagatccacgatgcctccatgcccgggggaagcgcggcgctgttcggcttcttcggcattccggcgcgcacccgcatgaacgttgcggatgaagtactgcgcgcccattgccgcgcgcaactcgcgcgactgttcgggccgcaggcggctcagcccaaagcggaattcctcaaggactgggcgctcgatccgtgcacaaccgtcgcctcggacctggagggggccagccagcacggtggggtgcccacggccagcgccgcatccggtgcctggaatcaccgcctcaccggcatcgccagcgagtggtcgccgcaattccccggttacgtcgccggcgccatcgaggccgcacgcctgggtgtgcagccgctcgccgcgcgagccgacaccccggttacgtccctgatccagacgagaccctga

SEQ ID NO: 336951 - DNA, 669 bp, Pseudomonas aeruginosa
gtgctcatcaacgccgatttcacccgccctgctcttgttacgccccgtgagtaccactgggtgcgctctccccagagcggcgtcgagcgcgtgatgctggatcgcgtgggtgcagagaaggcacgtgcgaccagcatcgtgcggtacgcagccgattcctggttcccgcgccacctgcatcctggtggcgaggagatcctggtcctgtccggtaccttcagcgacgaaagcggaaactatccggccgggtggtacctgcgcaatccgccggggtccagccaccgccccttcagcagcgaaggcgcgatcatcttcgtcaagctcgggcaaatgatgccgggcgatcaccaacgcgtgcgcatcgacagcggtgatccggcgttctggcattcgcgggagggtcgcgagatgtgcccgctgttcgagggcgatgccgagcaggtctacctgcaacgcctgaccccgggcgagaccgtgtccgccgatgccgcagaccgtgccgaactgttggtcctgagcggcgacgtggcggtcgaagggcagcgtcacccgcgcggcacatggatgcgactgcctgccggcgagggtgccgccattgccgccggcgcgagcggcgcgaagctgtacctcaggaccgtgcgccggtccgacatggagcggggagcatga

SEQ ID NO: 336952 - DNA, 345 bp, Pseudomonas aeruginosa
atgatgcaagactggaacagctaccgcgattccctgctggaacgcgtgggtgactttgccaagcaaaaccccgacgcgattcgcggtgtggtcgcgctcgacaacgcgttcaagaagaccggccagctggagccgaagatccacgaactgatcgcgctggcggttgcggtgaccacccgctgcgacggttgcatttccgtgcatacgaaaaacgccgtcgaggcaggcgccaccctggaggaaatctccgaggcgctgggcacggcgatcgcgctgaacgccggcgccgcattgacctactcggcccgcgtcctcgaagcccacgcgcagccgcctgccaggtaa

SEQ ID NO: 336953 - DNA, 291 bp, Pseudomonas aeruginosa
atgagcaatcaattctacctgcagatcaccctcaagatcgccgacgccaaccgccccgcagcagctggggtgtaccagaaatacaaggcgccgttcctcaacaccatcgccggtgcaaagtcgaaggaactactcgtccgcgacgaggacgtgcaggtgctgcacggcttcgacagccgggagaacgcgagcgcctacctgcaaagcgagctgttcacggccgatgtggttgtcagccttcagccgctgctggatgccgcgccggacgtgcgcatctatcaggtcgcgtaa

SEQ ID NO: 336954 - DNA, 912 bp, Pseudomonas aeruginosa
atgaagtctccggtccatctcaatgccctgcgcgccttcgaggccagcgcccggcaccagagcttttctgcggcggcggccgagttgcacgtcacgcccgccgcggtcggccaactcgtgcgcacgctggaggactggttggggacgccgctgtttcatcgcggcaccagcggaaaggcccgcctcgttcccaccgaagccgcagcgcgtgcgctgccggacatccgtgccgggttcgatcgactcgtgatagggctggagcggctcaaggaagaagcgacaagcggcgtgttgaccgtcaccgtcagtcccgccttcgccgccaagtggctgttgccgaggatcgacaggttccaggcgaggtgcccggacacggatgtgcgtctggaaaccagcctcaagccggtcgacttcgtggcccagcgcgtggacatcggcgtgcgctatggcaccggcaactggcccggcctcagcgcggaaaagttgctggacgaggagatctatccggcatgcgcgccagggctgctacgggaccctgggcgcctgcagacaccaggcgacctggcgaaggaaaccctgatcgatgacctgtcgatggagagccatgcgggattcccgtcctggaatgcgtggctgcagcgagccggcgtgaccgacgtgaccgccacgcgcggcatgaagatcaacgactctgcggcggtgctgcaagcggcgatcgaagggcacggcatcgctcttgcgcgtagcgtcatggctcaggaggatctggcggccggccgcctggttcgtctgtttcccgaaatcgaattcccctcggtattggcctactacgtcgtctatcgtcccgaatgctccagccttccgaggctggtggctttccgtgattggctgctcaaagaggccgcgacatag

SEQ ID NO: 336955 - DNA, 270 bp, Pseudomonas aeruginosa
atggccgtatacaccatcaccctcagcgacaccgagcgcggaatagatttctccatgcaaggcccgccgctgcacgactccgaagcatcgaaggtcgcctatgcccttatgcaagcgacgatgtccctcggccaggaactcgcaaagcagaacggagctggtaacggcgtttcctgcgcctgcgacgagtgcctggcgcgccgcgctcgcggcgaagaaccgcagcaggaaatccactacaccaaggccaagaaccgcaccgtccattga

SEQ ID NO: 336956 - DNA, 1776 bp, Pseudomonas aeruginosa
atgaacaccgaggaaaaagagttcctacgggaactatccgccatggcgcagcagctgcgccgcgacatcgaggcgcaacaggtcggcctcgatagctccccggaagctcgggctgagcggcgccgtcgcgtactggtagatcgcgatttcgagttcttcgcgtatacctacttcccgcaccacatccggccgcctgcctcgttgttccatgcgcatttcttcaagcgctttccccagctcatcagcagctccagcggcctcaaggaatggtgggtagctccgcgtggcgaggcgaagtcctcactgctgaccaaggtcgggccgtgctatgtcgttgtccaggggctgctccagcgaccggagattcgggccgaactgggcatgaccggcccggcgccgtacttcgtcgactacatcacgctcctaggcgccgaaacgcgcttgcccaccaagctcctggaagtagtcaagaccgagctactggtaaacgcctccctgtccctggacttccccgaagtctgcggtaagggaagcgtctggaagatcggcgagtttgtttccctctccggggtcaagctggaggccttcggcgctgaacaggcgatccggggcacattccacggcgcgagccgtcccaagctgctcctgggcgatgacctgatcaccgacaaagaggccaagtccccgaccgagcgcaacaaccgatgggactggctggaaaaggctatcgactacctcggcccaccggatggctccgtcaaatatctaggcgtgggcacagtgctgaataaggacgatccgatcagccgagccaaacgcacggtcgggcacctggtccaccacttccgcgctatcgagacgttccccacccacatggacctatgggcacactgcgaagaggtgatgctcaacgacgataagcccgtgatggagcaatacgccgagcgcggtagcgtcgcgcccgatagcgctctgccgtcgtttcagttctaccaggacaaccgtgagcagatggagctgggggccgtcaccagttggccaggtgtccggtcgctctactggctgatgcgtcagcgggcgaagaacaaagccgcgttcgcgaccgagctgcaaggcgacccgcgatccgatgaagacaagacgtttaccaacccgcgcttttgggtcatgcgctccgggcgttggcagatgtttggcgcatgcgacccctctgtcggggcgagcgcacagtctgacccgtcggcgatcatcgtggggggctgggacaccgagaaacaggtacttaacgtcatagaggcggcaatcaagcggcgcgtcccctcgaaactggaagccgacctgatcgcagcgcagagggagtaccagatgcgcgctatcggtttcgagaacaacggggcattcgaaatccagcggcagaacatcgccaaggctgcgctgatgcagcgcgtagcactccctctgatcggcgtcaccagcatggcggaccagtccgttcgaatcgatgccatggagccgttcatcaacgacgcatttgcgccacggattctgttttcgcctggattggtcgccctgctcgacgagctggacagctggccagaaccgcagaccgggcaccactacgacgggctttgtgccttgtcgatcctctggatgatcgccagcactcgcgcaggctcttttgaattcacagcggtgccgaaccgccggaacgccctagaagctggcggccttgacgattcttttgacactggcggccgcttcggcggcgcatggtag

SEQ ID NO: 336957 - DNA, 255 bp, Pseudomonas aeruginosa
atggataaggtggcccatcagtcgctccgctgggacctggagcaagacctttcccacctcgtcgaggacgagcacctggtgcgccaggtcctggacctggtcatgcgccgagtcgtccaggaacaggccgccgaggcagttcgccggcagcgtatcaaccgagacttcaagacgttccggcgccggagcgtgacgccgcccgcatgggcatttcgtgaaccgggcacaagcccacaagttgaacccctgaggtaa

SEQ ID NO: 336958 - DNA, 228 bp, Pseudomonas aeruginosa
atgaaagcgcctcttcggtttctgctgggttgggttgtcttcatcgccctgttcgcgatgttgacgccgattgtcgccgccattttcgagttctgcgcggcgttcccggtgctggccatggtggttgccgtctgcgccctggtggcgttcctggcgttgttcttcgcgttcttccggcgcttcgtgcgctggctcgacgagccgaggagggcgcgcagcgatggataa

SEQ ID NO: 336959 - DNA, 333 bp, Pseudomonas aeruginosa
atgaaacggattttccttctcccccttctccctctcgcgctgggcgcagcaacggtcgacaagacgcgagcgatggccatggccgtacgagcgcaggacgaccaggaggcactggagtggtgcaagaaagccgctcctgacgactatcagtggatcctggaacagtgcatgcagatccgcgccgacagcatcagccaagccgatgacatggtgctccaggagaagctgatgaagcgccttaacgagatcgagcagaccctgacgaagtatcccgagactgagcgccgaaaactcgccctggaacaactccagcgcgaagcacagaccccgtaa

SEQ ID NO: 336960 - DNA, 312 bp, Pseudomonas aeruginosa
atgccgttactgatcggggtactactgcgggccatcggctggtcgctgatcccgttgggctggaagctgctgcgcggcttggggttcaccgctgtggccttcgtcggcgtcaaggcggtgatggatcaggccaaggactacgtattcagcaacctgggtggcgtgcctgcgcagtggcttcaagtcctggggcttctgcaagtggacgtgtgcatcaacatcctgttctccgcgtacatcgcccgcgcagtgctgtggggtatggacaagtctggcggcaagtccggcatgcgctggaccgggccgaagtaa

SEQ ID NO: 336961 - DNA, 231 bp, Pseudomonas aeruginosa
atgaaacaactgaaacaactgttctctatgggcaagcgtgaagccgttatcggtggctcgttgctgatgacgtccggcctttcgatggccgctgagggcgatatcgacaccaccaaggccctggcctatatcgcgggcggtctggttgctgcggcggctgtgaccggcgccatgttcggcttggtggccctgatcggcgcggctaagaaagccatgcgcgcagggacctaa

SEQ ID NO: 336962 - DNA, 255 bp, Pseudomonas aeruginosa; identical to SEQ ID NO: 336957

SEQ ID NO: 336963 - DNA, 228 bp, Pseudomonas aeruginosa; identical to SEQ ID NO: 336958

SEQ ID NO: 336964 - DNA, 1392 bp, Pseudomonas aeruginosa
atgctcgaccgaatccacatgttcatccgcttccgcccggagcacgtccagatgatcggcaagcccgaggctccgacgctggtcgttgacctggagtcgttgggggtgcgcatgcggtcttcgggcggcgtgctcaagcgggaggacggggagggctatgacgtggaggggctttcccatgcctgggaatcgctgccgtcgagctacacgcccatggccttcaaggtgttccatcagtccctgggcaagcgccttgatcctggtgtggagctgaaagcgtctccggccaagctgctccaggggcacaacgtcttcgggccgacctcaatccgcatgggggctgaggtcatgttgaagtggctggctggcacctatccggacctgtattcgaagctcgatgtgctgtcgattgaggtctacgccctggactgcacgttctcggcgcgcatgccgaatgaacagaccgccctccaggtcatccagttcatgcgcggggtcagcaatggccagacccgcaaccggggtgatgactacgagaccacggcctactggggttcgaaagaggggcgtctgcgcaagatcaaggcgtatctgaaagggccggagttccggcgtcagttggacgaaattctcaaggctgctcgcggtgccacggtcgatccggaaccgcgccaggacctggataacgctcatgtccgcgcctggaagctgcacaagcgcgagcgccacatgcccatgtcgagcctttctgctgcgcggacgctgcgggtcatgcaggaccctcggctccaggagttcgcgcggcttcttcttcgcctcgaggcgactgtcatgcatcgctggttggagcggcggaatctgccgacgaacctgtgggagctatgtgactaccaggaggcgcttcgtgaccaggagcgctgtttcattcaggagtgttggagagcggtaactgctgagctgttcgcggcctttgagggtatgaccatgaagcgaatcgacgatgacaaagtgctggccgcactgatcgagaagtacacgaaagtagggaagggcaggtggaccaaggcccgcgccgacaaggcaacgggagcgatcatccctgctgtgttcgtgccgggcaagcccagcgatgcctacgcccggaacctgttccgtacatatcgcagccttaaggactacgggtgggaagagaccatggcgtcgatgaatcgcgccagtttctacaaccacgtgcgtgacctacaggcggccggcatttccaaggcgatgctccagaacctgagtgagtacgacaacacccgcaacgtggtgccgatcctgcggttgctggaggtggatttctcggcgcagtaccccgactggtacgtcgagccgaccgtggaggcagcgtga

SEQ ID NO: 336965 - DNA, 207 bp, Pseudomonas aeruginosa; identical to SEQ ID NO: 324729

SEQ ID NO: 336966 - DNA, 333 bp, Pseudomonas aeruginosa; identical to SEQ ID NO: 336959

SEQ ID NO: 336967 - DNA, 516 bp, Pseudomonas aeruginosa
atgaagtattcctcgatactcctgttgtccctgagtctggtcggtggtaccgccttcgcaggcgacaacacccgcgcggccatcggcggcgccttgggcggggtgttgggttcggtcgtcggcgatgcggtcggcggcagcactggcgccgcgatcggtagcggcatcggtggcgctgcgggcggtgcagtcggcgccggacgcggtaacaagaccgaagcggcgatcggcggcggcctcggtgccgcaggcggcaacgtcatcggccggcagatcggtggcagcaccggtggcctgatcggcgcggccctcggcggcgccggcggcggcgcgctgggcaaccattatggcgacggcaaccgccgctacgacgacgatgacgactaccgcgaccgtcgctactaccgccgcgccggctatcgcgatggctattaccggcatgacaacggccatcactatggccggtacaagaagtggaagcgccataagcatcatcgtcgctactacgacgactga

SEQ ID NO: 336968 - DNA, 2202 bp, Pseudomonas aeruginosa
atgccgccctcttcgctgacacacacgctccgccgcctctgggccctcgacaagttcgcctacagcctgcgggtgttcatcgccttggccggcgccctgctgctgtgctggtggcaggaccgcatcgagctgctgatcccgctgttcctcgggatcatcgccagcgccctggcggagaccgacgacaactggctcggccgcctgcaagcgctgctggtgaccctgctgtgcttcagcgtcgccgccttcgccgtcgagttgctgttcccctatccctggctgttcgtttccgggatggcgctgtcggcgttcggcatgatcctcctcggcgccctgggcgagcgctatgcggcgatcgcctcggcgaccctgatcctctcgatctacaccatgatcggcgtggaccagcgcggcggtgaggtcgccgatgtctggcacgaaccgctgctgctggtggccggggcggcctggtacgggctgctctcagtgctgtggaacgcgctgttctccaaccagccggtgcagcagagtctttcccgcctgtatttcgagctgggcgaatacctgaggatcaagtcgagcctgttcgaaccgttgcgccagctcgacgtggagggccagcgcctcgccctggcacggcagaacggcaaggtggtggtggcgctgaaccaggccaaggagaccattctcaaccgcctcggccatggtcggccgggccccaaggtgagccgctacctgaagctctatttcatcgcccaggacgtccacgagcgcgccagttcctcgcactacccgtacaaccggctggccgaggcgttcttccacagcgacgtgctgttccgctgccagcgcctgctcaaccagcagggcaaggcctgccaggccctggcgcgggctatccgcctgcgccagccgttcgactacgccgaccgcgagctggccctggaagacctccaggcctcgctcgaacacctgcgccagcagagcaacccggcctggaagggcctgctgcgctcgctcggcgccctggccgccaacctcaccacgctggaccgcaagctggccggggcgagcaacccggacgccatcgccgacgaacaggacagcgccctgctcgaccgctcgccgcgcagcctgaaggacgccttcgagcgcctgcgccagcagctcaccccgacctcgctgctgttccgccacggcctgcgcatggccctggcgctgaccgccggctacggcgtgctgcactggatccatccgacccagggctactggatactgctcaccacggtgttcgtctgccagcccaactatggcgcgacccgcctgcgcctggtgcagcggatcctcggtacggtggtcggcctggtggtcggctgggcgctgatcgacctgttccccagcccgctggtgcagtcgctgttcgcggtcgccgccggggtcgccttcttcgccacccgcagcagtcgctataccctggcgacggcggcgatcaccctgctggtgctgttctgcttcaaccaggtcggcgatggctacgggctgatcctgccccgcctgttcgataccttgctgggcagcctgatcgccggcctcgcggtgttcctggtgctgcccgactggcagggccgccggctcaaccgcatgctcgccaacaccctcgcctgcaacagccgctacctgcggcagatcatgcagcagtacgccaccggcaagcgcgacgacctcgactaccgcaccgcccggcgcaacgcgcacaacgccgacgcggcgctctcgaccaccctgtcgaacatgctcctggagcccggccacttcaggaaggacgccgagatcggcttccgcttcctggtcctctcgcacaccctgctcagctatctatccggcctcggcgcgcaccgcgaaagcctgcccgaggacgccagcgacggcctcctggagcgcgccgccgagcggctctccgccagcctcgaggaaatcgccgcgagcctggaacagaaacgcccggtcgccatctacagcgaagaggaggaagcgctggccaaggaactggagcagatgcccgaggacatggacgacagccatcgcctggtacagacccaactggcgcacatctgccgccagctcgccccgctgcgcaccctggccgcgcacttgctgaagaaggaactggccggcgcgcagccgctgccaggccagccctag

SEQ ID NO: 336969 - DNA, 2739 bp, Pseudomonas aeruginosa
atgagcttgcgaatcagcattgctgaacgtcttttgacctggctggatgtcgagcgcctgctcaagcaaaagaccgctttgtggagccagcttcccaacggcgtgcatggcatcgactgttttgcagatggcatggagattcgtgccgttgagccagctgtggttgaagactggttgagcagcgttttcagccaagcttacgaccttgagcgaaatgctatccgtctccgaattgcggaggcgtggtacccggtgcagattatagaagagtcctcagggggagtggcgggggaaagtcagacttatcctctgtggcgggatgtaacttatctcccaacggagatacccgagcagggtgcggatttctctaatccccacacgaagcgttggccggcagtctggagtgcgagcccttacatggtttcattccactcatttaaagggggcgtggggcgtacgactgccttgatgacctacgtggcagcttgtatgaatgaacccagtgcgggtccaaaaaaaatcctcgtgatagatgcggacctggaggctccaggtgttagtttctggttggacgaggtgaatcggccggcagtgtcgttcgtgcaattacttgaggcgcttcattatccgcctgtgagtactgatagtacgttggacttctttgccgaagagctgcgtaaaacctcattgaacgtttcgggtatgcagcgcgaattgttcattttgccggctgccctcaatcttggagagattcaagatatgcccgtggcgcccgagcatttggcccgtcaccctgaaaatccgtggcgtttgtccgatcatctattcgcattaggccagcgtttgggcgtcgatgctgtcttcattgaccttcgagcaggtttaagtgagctggccagtccaattatttttgacccgcgtgtcgaccatttctttgtcaccactgtggcgccgcagtcagtgatgggtatggcagaagtattgcgccgtctacaggcgttcaatagccggcttcccgcagaaaggcgtgataacgctaggcctactgttgtcttgagtctgttgactaaggaactgcgtgaggccgaaagctatgagcgggcgttgcgcatcctcggggaggcttatcctgctgaagatgctctaacctctggcattcaatggttggaagcagagtttttgagcactctaatgtcaattagtacagtccgcgaggccttggatgttttgccaacgtcaagccggctttttgcaggagccagcgaatgggctagcgggctttatgctgagccagatccggtgctggaaagtacgtcgacgacgagcgccgtatcctccaggcaagcactggctacaaaactgcacgatgtctgtaaatcggcgcagtttgcagaaagcgacgctaatgcatcgatactagcgatcgaacccctattaaacttgggtaagcaccatgcgaaggatttaccaaatctgctaatgattggtgccaagggggcaggaaaaactttcacatttcggcagcttgttaggagcggaaaatggagtcgttttttggagcggcttgggtttgacccggccagtattattgaagcatctgtttttcccgccctttggtctagtaacatcgaggatacgccggatggcgagatcaaagccgcgcagggagctgtattggatctgatcaaagtcgacaggagtaatctaaagcgtggttcggacttatctcgcttgatcaaggacgcattagcgcagccgccaggatcctgggaagacttttgggattgtgtcattgcacagcagttgggcgtagtcggtggtcagttgagtgagctgaaccaagaactggttcaaaagtcggaacgggtcattatcgttttcgacggcatagaagatgcctttgaggatgtgacaaatagcgttgcagttgaagctattcaggcgttactgaggttgacaaatcgtttgagtgaactggagaacaggcacattggcgcaataatttttgtgcgcgcggactatgtccaggccactgttcgacagaacctcggccaattgcagcaacgctatcagccgtttcggttgcaatggaatccagaaagctttttgcgattggctttcatgctgagctgtcaggccggtatccatggagatgatcccatatcggccgaatcacttcgtgttgagcagcttaaggataaactggaggggttatgggggaaaaaactcggcagtgagaaatcgaaggaggctcactctgcgcgatgggtttatgctgccttatgtgatttgaaaggtaacgttcaggcgcgtgacttggtgcgtttcctcaagtttgcatcttacaacgagtctgaacgcagtggatcgacgtggcctgatcgtattctctctccggaatcgatgcgaaaagctatcccctcttgcagtcaagagaaggtcagtgaggcaattgcagagattgcacccctcaaggcttggactcaattgttgaagcaacatggcgccagttccctcagggttccattcagtcaagaaggtgtttacctcagcgttgagttgctaggggcactgcaagatattggtgtcatttacgaagaccttgatggcgacttgggcgatgagcgacttttccttccagaaatttatcgttcaggattggggttcgatacatcggcgaccgggcgcccacgtatgcaggcactgctgaaaaagaacatagggaacattcccttatga

SEQ ID NO: 336970 - DNA, 702 bp, Pseudomonas aeruginosa
atgtttatcgcggtcagctcaaccattctgatatcttcgcctaatgtaacgtcggtcgaagcgccttggttcagagcccacctagaagagctaaaggctgcctgcttggcgcagcggggagtgttttccgtgtggagactccgtgctgggaactggacgtatcggttacaaaaaatcatcggcacaataatcagtgagcggtgtatcgcacacccagtgactgtcaatggaggcgcagcacaaattgaatacaggtatgttggcatgagtgcaataccgttcacggatcgtgaattgaagcgggcgtggcgggatctttccgcaattgcttcaccgccacctggcaatgtgcgaaagaacccgcatcgtctcctgctgttctatgccgttgagtgtggtctgaaagcggtttggctgaaacggcagaaccgcacacttttcgaccgggctgacattgagaagaccggccatgatcttcgcgaggttctcaaggagctgaaggtgggaagccatttgtcattgcccccaaatctccagctttttcccatcatgcgaaaccagaaccaagtcccgcgtaacggcgacattagcattctgcatcaagcctggcgctatggtggagaatgcacctcacccactgaccaagattgcgaggttcagttgcagaaggtgctggactggattcaaggagaactcaaatga

SEQ ID NO: 336971 - DNA, 417 bp, Pseudomonas aeruginosa
atgaggcacaggaatttaactgagtatgatatccaggttttgattgacctgattgatggttgggaaggcaagctcacctgggacggcctgtgtgaccgagcagacgaggtgtttggcttccgtccttcaaggcagactctcaactcgcatctggcagtgaaatcggcgttcgatgcgaagaagaaccatgcaaaggcagggccacagccatctaggcgcccatccagtctttcctatgccgagcagaggatacgaaagcttgaaagtgaagtagagcgacacaagtacgagaacgagcgactgatcgagacattcattcgctggcagtacaacgcccagaaacgtgggattaccaaggcgatgctggatgagcatcttcccgtaatcgaccgtgactcttcggagacgaaacgctga

SEQ ID NO: 336972 - DNA, 1992 bp, Pseudomonas aeruginosa
atgacagaagtcttacagtttgtcccaaaagccgaacgggatgcgagaagtaatctcgaagatttcatcaaaatctgtcgggatcgattgactgtattcggtgaggatctcgactggtactctaacgcctggcctaaggtcggtaattttacgatcaagggagctccctccaggggctacactgacgatcagtatctgaattcggatattctgccgtttgctaaagcctatgttcgttatcagcaaggcttgaagccgactaagctaatgaacgagttcaaagccatccgatgcattgaacctgcgctacttgcgacaaaggggagagccgacattaccctggtcgataccactgtaatggatgtcgctgctcaattcgcaagagagtatcacgccactgcgtaccaagcaggctccgctttggccaagctggtcaagtttctgaaccaaagcaagatcgcacttaagcgtattgaatggcgaaatcccatctcaaagccgaaagagatcaatcgcaccgacaaggaaggtcaggagaagcgcgtcaataaactgcctgatgacttgcagttagagggtatggccgagatgtttgcgaatgatctgcatcatcctcgcgaccgcttcactacttccatcttcgcattgttaatgtgcgctccatcgaggatcactgaggttcagcgtctgcccctgaacgtcttgcaccgtgacaaggattcgaagcgcgttgaggtgcttggccttcgcttcttcggcggcaaaggcgccggctgggatatcaaatatgtgccgacatgctttgtggagatcgctgaggaagctgtgcgccggcttaccgagttgtcggcggaggggaggaggctggcacagtggtacgaggagaatccatcaaagttctaccgccatagcgagtgtccagacgttaaggagcatgcgccactgtcagacgaacaggtctgcttggcgctaggtttgggttgggccggtgataagagggtgattcaccagttctttaaaaactacgagccctatcaagactacaagaattcaaaaaagccgctgaccttggcgttccttaacgactactgccattcggagctcccagatggctttccctactttgatgaagagcggaagctcaaatattcggacgctctttgctgctaccgggcgcacgagttccgactagatctcaccaccagccgcgtcaaactttgggttccaggcaagagcctattcacgactgacctgaattacatcgacgggcaggagcgaagcatctggacgcgcaatggctataagaatcctgatgggtcagaggtcaccatgacttcacaccaggtgcgccacctactgaataccgctgcacaacgagggaacctgggccaactcgacattgcgaagtggtctgctcgagcgaatattcatcaaaacgccacgtataaccacatgtccgaggacgagtacgtcaagctctccgagggtgccctgccgaacggggttcttgacaaggtgaagcaaaacgctccggtcaccctggaagatctggatcaggtgggtgatgcaattgctcatgtcacgatcttcggattttgtgtccacgaccactcgatgctgccatgccaaaggcacagggactgtctgaactgcactgagcatgcgtgcatcaagggcgatgttgtgaggctggagcgtcttaaggagcagcgccgcctcacccaggttcaactggacaaggccaaggccgctgatgagtctgggtacttcggcgctgatcgttggagtcagcatcagctcaagacactggagcgactcgaccaactcattgagatcatggaaaacccagagatccgagatgggagcgtcatcatgctcaacaatgatcaggagtacagcccgatgaagcgcgagcttgctgctcgccaaggtacgagccgtttgcctgagcctgagatgccgcttctgggctttgtaatggatgcattctga

SEQ ID NO: 336973 - DNA, 1545 bp, Pseudomonas aeruginosa
atgatcatgggtgaggctgtggaggcactggagccgcttgtactggatggcctccaacacctgggcagcgagcagttctactctcgcgatggctacatggtcgatttgctcgatgataggtggcggctgagcaaggatattgatttgcctattggcgatatctgcaacatctttccaggcgataggtatacccttcgtcaagttctcgcggtctacgcaaggcatagctccccgtcccatgtgcagaatttgctgatgcgatttgcacactatgtcagggcgcttggtggcgctgaactcttctctgccgagtccatcatctcttatcgctccagtttagaaaagccgcgtgcttggtatctgtcaacggtacgggtgcttatgcggcagtgggtacggctagggtatccagggataccggctgaaactcttactttgctcgataatattcggatcgaaggtaatgagaaggggcgtgccgttcagtctcagtgtcccgaagaagggccgttgacagacattgaaatgcagggagtcgttgagtccgccgcccactcttttgccaccaatgcgctaagtctgactgaagcctctttgcttatgacgttcgctatgaccgggcgacggccaagccaggtatctgctctgaagcttaaagacctgatttcgctcggaagtaaatactttatcaattttccgcgtgccaagcagcggaatatggggtggcgctcttcattcaagaaatttgcgataattgaggatctttggttactgcttaatgagcaggcagcctatgttcgggttctattcgcgaaaagccttgataacaacaccattccgaaatatctggatggtgagcttccattgttcccgaacataaacgaggagcttagcctaggtcgagagctagaagtgctgaagtctgatcgcctccatatccggtctagtgaggtctcccgaatagtcgtggaggctggggaaaagatcgatgcggtcagcgaacggactggccagccacttcatctcaatcccaaccgcttccgctatacgctgggtaccaacttggccggagaggggaagggtatttacgtcattgctgaagcgctcgatcactctgatacccagaatgctgttgtctacgttaagaaccttccggagatcgttgagcggatcgataaagccgttgctatgcagttggcgccctatgcccagatttttagaggtgtcgtggttccctctgagaagcacgccgttcgtggcaacgacccttcgagccggatttccaatggcaatggaaatgttggtagttgcggcagtcatggtttctgcggtgcgcttgcaccgcttgcctgttacacctgtgctcacttccagccatggattgatgggccccatgaagaggtcttggacggcctgattcaggaacgtgagcgcattaaagatttaacaggtgatttcaaagtggcatcggcaaatgatcggctgatttacgcagtaagcgatgtgcttcatcgttgtcgggtagcaaagggtaaggttaagtga

SEQ ID NO: 336974 - DNA, 1203 bp, Pseudomonas aeruginosa
atggacatctctacacgcagattcagagggtcaggtggcgagcggttctctgtcttggttgatgaggagggcattcctcttttctatcccaccttgtttgtaacctggacgctgagagcaagctctcatgctgctaacagcatcacgaactctctcaatgcgctgaaagccctctgtgcctgggaggcacgtattggtgtagacctagagtcgaccttcaggcatggcgtgctactcgaccacaaccagatcagggatctgtgcgattttctgcagcgttctctcgagagcgatcagcgcgcaaaggtcactccgatccgcaacaggcctagagtggtggggaccaccgtccactactttcgcataagcactgccgcgcattacctccagttcctagcccgccgtgttgcccctcatcttgctgacgaagtgatcaacaagatggtcgagacgatcagggcgcatcgtccaagcaagcctaataaatccaacacggatagagatgagatccgccttagcgaggatgtggttcacgccattgaagccgccttgcagcccggatcgcctgacaatcctgctactgatggcggcgtgcagcttcgaaatgccctgatgttctttgttcttaagctcacaggcatgcggcgaggtgagcttctcaatctgaggatttcggatatcaacttcgccgacaacacaattgctgtcgtgcgccggccagactcgaacctcgattcccgtaagcatcagcctaccgctaagacgcgcccccgtcgttttcgcgttgttccggccctcatagagaagattgctgcttacgtgaaagatgttcgcaggaaggtgccgggcgctaagaggcatgactacctctttatcacccacaaggcaggccctacccagggcgcgccgctttccattggcgctttcagcaaatggatgggccagatctcggacatcgtcgagaacgccggatttcatgctcacgccctccggcacaattggaactacgagttttctcgtatggcggaagaaaaggggatgagttcggagcaagaggaaaagacccgttcgtattggatgggctggagtgaaacctctggcacggcggccacttacaaccgcaggcacacgaaggagagagctcagcaagcaggccttgagcttcaagagcgctacgtcaaattgaatcaggagagtgaatga

SEQ ID NO: 336975 - DNA, 498 bp, Pseudomonas aeruginosa
gtgacgctccaggcccggctgctgaccaacaccagcgagggccagctcgccccggcgctggccgccaccgacagcctcactctggccgggcgccagggtaagccgtatccgcccggccagttccgaatcaacggcagcgcgtacccgacgaaggtctacggggcgctgtcggtgagctgggcgaagcgcgaccgcatcggccaagctgaccagttgatcgataccactgtcggcaacatcggcccggaagctggggcgacggtgacgctccaggtttacagcggcacgacgctgaagcgcacctatgccggcctcaccagcagcagttggtcctatccactcgccgaggacatggcggatggcccgctccaggacatgcgccttgtcctgcgcagtgcccgcgacggcatcgattcttggcagcagcacgacatcacgattgagcgccacggcctcggtttccggctgggcgaagagctaggaggcgtttccgcatga

SEQ ID NO: 336976 - DNA, 1149 bp, Pseudomonas aeruginosa
atgagtcttacgatggggccgaacaccggcctactgattaacggcgctcccggcgaggggcactataacgacctgatgcgtctgttgcggtgggatgacttcctgcgccagcccgtggtcaagggccgcgtcgccgcgctgccgaccagcggccaggccgagggtgacacttacattttcaccggggccggggcgaaccagaaccgcctggcccgctggtgggcgactggcgcgaccacgcctatttgggagtacatgccgcccaggttgggctggcgggttcaggtcgcgaacgagacgacgccgagcgggcaggtcaagacgtatgagtattccggcacggcgtgggtcgagctggtgggcggtatgtcggacgcgccgagcgacggaaaagcgtatgcccgcgaaagcggcgcgtggacggagctgggatcggccgcgaaatcggcgctcagcgttctgccgttcatgaacctgatgcccgacatgggccgcttcgcgggaaccgcagccaaccctctggctacgatgttcacaacgtcatggagtccaagctcgtttctcaacggctggaacggcgccaccgttgcagatggaggcaagtttgccttcgacaacagcacgaacggcggggccgggccggcgctcaatgcgcgggtgcaggcgctgctcgcggcaatgggccggacgtggacgtcagtgtctcgatacggggtcgagttcttcaccgccgttctgacggcgggatcgcagacaacaactggctcggccggcgcggatggggttacgcggtatctgtgctgttccaacggcagtaagaccgttttcaacgcgggcgcgtgggcgacggtggtcatgtggctgcgtgtcgaaagcggctcggctcatatctcctcggcgccctatacgacccacaagctctggatcaatggcgctgtcgctgcgcctggcgtggtgctgcctgcgaatcaatgggtacatctgcgattctcgatgcagtcatacaacggctatgacaacgcatgcccgtacatatacgcatccgcaggggctcagatcgcgtttgcatgcccggcgtggttcggtggcctcgtcgatccaggcattcacgtcgcacccatcctgaccatcaacggagcaagcgcatga

SEQ ID NO: 336977 - DNA, 288 bp, Pseudomonas aeruginosa
atgatgaagcgggttctctacaaaggggcgttcttcactgagtgggacggcccgctggcagccatcgctgaaactgccggggtgagcctggatgatcttacgttccaccctgacgacgcgctggccgaggtccaggagctgcgccggcaggcataccgggacgaggctgacccgctgcgcttggaggccgagtatgacgccatcgctaccggtacagagccggacctgtcggcctgggtcgcagctgtcaaggcgatcaaagagcgctatccgctcccccagtcctaa

SEQ ID NO: 336978 - DNA, 225 bp, Pseudomonas aeruginosa
atgaacgagatgcttagacggagactgcgggcggagctgctagaggtcggtttcctaaaccagtgctgccttgacctgatggataccatggcgtccgaattcagcctctcgcaggatcagcaggaatgcttcgaacagctgagccggttcctgcgggagggcatcggcaagctgaccgctctgtctgagcgggtggccgatggcgatattgtcgtcctgtgctga

SEQ ID NO: 336979 - DNA, 1290 bp, Pseudomonas aeruginosa
atgaatttgcttgaggacatatcaccggcgagcgcccatgattgtgaagctcgcagcctccaattcgatactctggcgtcaaacggcgcgttggccaagccgatgcatgcgaaagctgttgcgactagctccgccatgcaaacgaagctaattgtcacgggtctcttcgctggtataggaggcctagaagaaggctttcggcaagccgggcacgacagcacgatgctttgtgaatttgacccgctggctcgttacgtcctgaaaaagcacttcccgagcacggaaatcacaaccgacgtcaccgatttgaaagggttgcccgaatgtgacgtgctgacagcgggctttccttgccaggatttaagtcaagtggggcgtcgaagaggcatatccggtccaaactctgggctgattgagtcagtcttctacctgttgaggaagcagaagaccccgccgcgctgggttatacttgaaaacgtaccgtttatgctgagcctggatcgaggtcgtgcaatccgctctattaccagcgagctagaggggatgggctattcctgggcatacaggaccatcgatgcacgtgcatttggtttaccccagcgccgccgccgcgtgattcttatcgcctcgaaaacgcatgaccctagacctgtcctattgggctcggatgcagaggctcccgcccctcggccgcgcggctcacatgcttgcggcttttactggacagaaggtaatacagggctcggatgggctgtggactcggtgccgcctctgaaggggggctcaggcctgcatataccctcaccgccagccatctggttcccacgacgtcgattgatagccactcctgcaattgaagatgcagaacgactccaaggcttcacatctggctggacggatgtctcagaagtagatccgtgtggggcgcgcaaacgatggaaaatggttggcaacgcagtaagtgtgccgatggccaaatggatcgccgaacaactgactctctccaccactgggttcgacatcggcgaaactgaagatctacctattgaggggagctggcctagcgctgcatggggggtggggggcgtacgcagtcgttcgcgcgtttcagaatggccggttgcggtgccaaatgagcacctatccgcgtttctcaaacacaaggtcatgcctttatcgaataaagcaacgtcaggctttctctctaggctcgtcaagagcaacttgcgctacgaggaaaagttccgtactgacctcgcacatcatgccgagaatatcggaaatggttga

SEQ ID NO: 336980 - DNA, 1341 bp, Pseudomonas aeruginosa
atgacagccagcttccaggccctccaagaagacgcagaccgcgtactcaatacagctatagagcatgcgatcttcggagctgcacctcttactatcatcaaatcccctcctggtgcagggaagactttcctagttgaatgtgcctcggcagtggcaaccgataagcctgctatgagggtagtggtggtgacgcctggtgtaagtcagctttatgacgtggtcgatcgccttttgggctatagcctgccccggcttgagctggcgcatgccaagtttcgcagcttgcctgacatactagctgaccgcatcacggcatcgagtggatgggcagcaaccttaaatgttgggccgggagtagttgtaactaatgcacatcttctcgcgagttatctccacgcactggggcccggcacattcgatttaatgatcgtcgatgaggcgtatcaattggctgcgtcggattttatgccgatatcggatcttgcgacgcgaatcatgatggtgggcgaccctggtcagctcaatcctgtaatttccgccgatactagtaaccttgaggtcagcgcacataagattcattggtcagcacctgcctacgtgctagaccgcttccccgagaccccgatatttgagctgccggtgacccggcgcctgttgcctgatacctcaaatatgatccaggcgtccttctatcccgatctgtcattccagtcgattgttgatccctgcgatcggcggctgcgctttgccgtatccggtatggagccggctatcgatcaagctctagatgctattgcccgcggagcgagccttgttgctatcactgttcccggagttgcgcccgctcatgaggaagcagaccttgctgtcgcagcagtaatggcaaaagtggcggaccggctcttggtcagacaggctgagtgggctgggcaaagacgtctaaccgaagccgatatcggctgcattgatccacacgttattgcgggcggtgcgattagcgaccagctccgccaatgtggccgcggtaagattcgtgtcgaaactgtagagcggtggcaaggtctccaaaccccaatctcaattgttcgccacccactttcgctagcgggttcgccgactgcttttgatctagaggccgggcgttggtgtgtatcactgtcgcgtcatcagctcggctgcataattgtagggcgggaatcgattgccagcgtcattcgtgattacgttcatagctgcgataccgtggccgcaggggcgcgggatgcaacatggttgggctatagagctcaccggacgatttggaatgctctagccgagcagggccgcatttttgcgctctaa

SEQ ID NO: 336981 - DNA, 1404 bp, Pseudomonas aeruginosa
atgaacgctttcgacgacacacttcatcgtgttatggctcgtcatatgaatcgggcgctcccaatacgaacctcaagcggtctatcgagcgatccggatgtttcaataggtattgcaacgatcaagatcgtcactgaggagcagattcaggccatagcctacggcccactcgatggcgagccggaagtgattgtgcggttggatccgatcggccgtgatgtaaccgatctggtaccgtttgccagcttcatggaccaaacagctgatcgcgcattagcggcggatggtgctctccgcgtttggattccacactccgtgacgttggaggcgctggacatcctcgggcaccggtactggcagaatcaggccgcacccgatgcggttgtgcgtatgggcaagatctgtcgcatcatcgcgcacgaggccacattccctggacagcaggtcgtcgctgacgccgcttctcttctccaagatcatattgttactggccttgcgccgattgaggaagggcaccttggcgctatgctagcctggcttgatccggctgttcgggatccactcaccgaggctcgggaacgcattcgacttcccgcttcgggcatccttcctaatacgcccgaccaacccgccgatgatcgcgttgaccgtctccgtaaagagctcaaacgggccgcagggcctcataaaaccgttatagaaaaagagatccaagatattctccgtcgttgggttctccgagagtggcagctcctggtcgaggcgcggcgagcctttcttgcgctagatcttcctcccgtacgcttggaagagttacttgaagactcgaccaagcgtatgagctatgcgcttcaaaacggccacttcccagcccgacagccacataaactggccgcgctcctggcgcaaatggaagcaggattagagaaagccgagttggcagccctggaaggtgatcccatcctgcgggaccaagctacgagtgctggtaaagtcgtgctcggcgtcgtaagtgatgtgcgccagccgcgctctggccgagccccctgcgacatagacatcgaatccaaccaaggggttatccgtcttcgtctggacgacaaggtcaaggtggtgggcacgactataaccggtgttgtacgtggggtcttttccactcagtccggtggtacgcgtgtatcgatccaaattaccaatggggttcgccagacgagcagtcttagtgtcggcgctaggttagaggtaatgcgcgcaggctatgggttcgtgaaccttcctgcgctccagctggttaagcaacgccaaccttgggtcttcttcggtgatgtatcgccttgcgtcgcctctggattgccttcaggtcgctctgcgttggagattgcagcaggaattagaaagccatga

SEQ ID NO: 336982 - DNA, 1050 bp, Pseudomonas aeruginosa
atgaccgttaaaggaagtactgcgcttgtccggcttgccggcaacccatcctgcgagatccttggtgccatggtgatgcaggagggatcggaaaagcgattctacgagcggattgttggtaagccgtatgatcgtgagtttggtgagcgccaatcttccaaacggcgtggtacacagtttgagcggaacgtctttgcaggcgatgctaggctgctacgcgaagctttttctccctttctcggtattgatgctgacgagattatcgtcaggaacttgtttgacgattacccaggtactaaagacgactctcgagtggcgcgtttacgcattactcgaggaattttggccgatgcggttgcggggcgaccggtaccgcacattatcgtccagccacaactgctgcttccaacccgtccaggtcctcgtccgtatttcttcattgcgcccgatgtgctggtgcgatcgcccgttgatggtgtctatcttccgggcgatttgaaatcattcatcgtccgtgaaaacgaggtcgctaaaggtgatctggcccgggttcgcttgcagcttggtgcccaagtattagcactgatgcatgagtatcactgcatcgatccaagtatcaccgttggatcgaacggcatgcttatattttccagacccaatggtctaaatcctcacacgccgcgcgtcgaagatcttggcggtgcaattgaagcaatccgtatcggtatcactgcattcctacggcatcgccagcgcattaatgaactgcgggctggggccgagccgttcactgttgcagcagatctctccccgaactttcaggatgcatgcctaacgacgtgcgtcatggcgccatggtgtcgtcagcgagcagcaggccaggcgtccgacatgggggaggtcgccagcaaagtcctcgacaacatgtcgatccaacacgtcatcggacttatgacggggaccatcgagcctgcaaacgatcatgagcggatcgtcgctatccggttgcgcgagctggctgccaagcacaacacggagcaagtggcatga

SEQ ID NO: 336983 - DNA, 765 bp, Pseudomonas aeruginosa
atgagcaaatctactgatgacatcgaccacttaaaggcccaggaagccgaccttgagcgccggcttaacgaggtgcgagagcgccgtgccgaacttgagaagctcatgcggccccgcggtgagaaaaaagcgcggccactgcgcgatatcacgctggatatgcttcaggaggcaaattgcccgctcaactccctactgctggcgagtgtgattcgcccgctgcatggtcggagtattccctcaactcgcttcggcacattgtcgaacgacgaggccagttccttcgactcatctcgggcgcgcccggtctatctctgtcactgcctaacctatgatcaagggcaagcggtaaagcggttctgggcccgttctgattggcctttagcagatcgcatcatgggcccaatgactgggcgcattctgtttttgaagggggcggcttggacgataaatctggcccgcctggttagtgaggggcaaatcgccgctgacaacccggatacattgcaatatgtggcggcggatcaggcgcgtgatgctggctttcccgtccagcgcacaaaattcctctatgacgagtggctggcggtgattgctgcagccctcgacaaacatgaggccgaggaccgcaccctgcgtgaggccgcggcgatggagctggagcagcagctatcagagcgagatcagttgttcggctctcgcaccgggttggtttccttacccggctcaaggagatcctggcggagcacaaacgatgaccgttaa

SEQ ID NO: 336984 - DNA, 948 bp, Pseudomonas aeruginosa
atgcaatattggtgggtgaaccacaataagactgcacggcaggagctggatggaggctatctttggtcgccactgcgtgaggccaatggcgcgcgaagccagttttacgaaaacatgcgagccgccaagcctggtgacgctgtgctctccttttctggtggatttattcgccatgttgggtttgtcttagatttcgcaagcccggcgccgaagcctgacagttttggctctgctggagagaattggtctagcagtggttggttgttgccggtcgagtggagggcattggtcacgcccgttcgccccaaggaccgaatcgcagaactggggccgatgatgccccaaaagtattcgccgattcatcctattacgggaaacggtaatcagaaggcgtatctcgctgaagtcgggcaggcggtgttcgagctgctagttggcctatccgacgccacagagatacctgcggcgatggagcatcgcgccgccatttcggagctgaagcgcatcgatgatgctatagagacccagatcgccgcagatccagatttggactctacaactaagcagcagcttatcctcgcgcgctacggccaaggcttgtttcgagctcgtgtatcggagcttgaaaaggcatgtagattgacaggcgttgaaactccgcggctactgatcgccagtcacataaagccgtggcgactatgcagcagcgctgccgaacgcttggatggtgctaacggcctacttcttgcccctcacgttgaccgcctatttgaccgaggcttgatcagttttagtgatcatggcgaagtcatcgtctcaccgcgcctcgaccgtctagacctcaaacgcctggggctacaggaggcgtgtgagaaaggttgcgccccttttcacccgtgtcaggccgcttatctaggctttcatcgggacaaggttcttttgtcctga

SEQ ID NO: 336985 - DNA, 213 bp, Pseudomonas aeruginosa
atgcgtccgtaccgtggatccgatagcagcttcgaagagatcttggaaaccaagcggctgaatcgtgagcgcctgctccaaatcctcagagaggccccgcccgaggtcatcgaagcggatgctgagcgactccgcgaggcgatgcggaaacgagagggcacgcctaaacggcgtcgactaggtcctcccgcattccacaagccccgtaagtag

SEQ ID NO: 336986 - DNA, 606 bp, Pseudomonas aeruginosa
atgactagggatgccgatgctgatgaagcgtccggggcagagggcatgaagctcgacccccattggtttcacgttttcaagtctatggtggacaacgatctgagaacgcttggcccgtacgccttcgctgtgtactgcgtgatcaagtcgcactgtaggctcgagactggcctggctgagcctggcatcgaaacaatcgcaaagaaggcggagataagtgcccggcaggtgatgcgtgagctgaaaacgctccaagagaatggctacgttagaaaggtccgggtgcggaagcacaacggctatcaccttcaagagcgtctttctgtgttcgacccactgggcgagaaaagggcggtggtcaagctggagtaccagcctgccaagattcaagagctggtgaaggggctcaaagagatgctgcgcacccagcaatttgcgggggccaccattcacatcgagaaggtgcaggttatccagtgcgagaacaacatcgacatccaggtcggggggcgggaagcgctacagcagttgtcccagagcagcccgactttacatcgcgcactcacgtcgctcagggaaaccataaatcggtctcaacgcgagtag

SEQ ID NO: 336987 - DNA, 1857 bp, Pseudomonas aeruginosa
atgaccatgaactcgaacctgcacaagcgcttgttatccgaagtcgacaagctcaagaagctcacagctgaactaggcctgcaggacctcactagcttcgttaccacccagcagcgcaacttcaaccatgggcgcagggagcagaacctcggttcaccgctcaagcagggcatgtacctgctcgccttggccagcagtcagcctgagccgattgagcctaagccgctagatgaggggcgccatgtacagttggttcgccgtttggagtcgatcttccaaaattatggcttggcgtatttccctacggaacaggagtatgcagtcgggcttagctccgagtggcgtcgccagcgcgaaatcgccatgcctgccttcatgcactatttcatggctggattcaaagcatcgagcgggcagatcaaggagtggatcaatacatgctttgctggatttgaaaaggacaccgtcgaagcctttggcctgtctcacgttgacctgctgcggatggccagcttcattgagacggtgatcgaggcgaatgcaagcccggtggtcgatgctgtgcaggccatcgaggcgattcgtcagcaatttcttcatgagttaagcgagggcgcgaaccttcaggaggccgtcgcgcgcgtccgtaaccagccagatctgcgcggccacatcgaagcgttcgagcgtggcagtaccatgttgttcgaggtacagcgtcagcagttgctcgatgagtttggcgtggagatgacgaattgcttgatgcagcactttgtcaccgtccgaggggctgcacctgcgatcacatacatcaccgatagcaaccccatcattgatcgcccgctgctgactgccgatggtgagcgtattttctatctggtaaacaacgcgttctatcaggccatcatcgaaaaactggaaagtcatctgacccaagggcctagcgccgctcgatatttcaaagaacgcgatcggcgtctcgaacacctagcccgcaagcatttgcagaaaatctttccagacacagcgcagttctatgacagcgcgtttgaccgacccgactcgcatggtgagcatgatctggtgatcgtccatggcgcaaatgtctacatcgttgaagcaaaagcgtcatcgcccaaggaaccactacgtgatccctcgaaagctgcgctgaggatccgcgaccatttccgagggcgcaatggtatccagaaagcctacgatcaagccaacgcgttgcggactcgtcttctaaacaatgcatcgagcccgctgtacgacaagaaaggcaatcttttgatagaactgcagcgcgagcagatcgagaacatctattgtatttgtgtgacccgggatgattttggacccgctgccacgaaccttgcgctgatgctcgagaaggagcccgatgccccctatccttgggtcgtgtgcatcaccgaccttgagtatctggtcgatgcgatggtccaccttggccaaggcgtcgaaacgttggacgcctacttggtgcaacgtccactacttcacggcaaggtgatgggcaccgatgaactcgaatatttcggggcgtttctacggcatgcagggttacatgactacattgaggtggaggctgacttcattccgctggatatcaccgaatctgacatcctcgatgatattcacaaatgcattcagaacgctgagccgtatgagctcaatgttgagcctgccaacctgatcccgctggataggcgaaagctctttgggctacagcaaaccgttcgaagccagagcaacgcgatgaagaaaaagaagaaggcgcgacaaaagcgagaccgagcagccaggaaacagagtagatcgcgttga

SEQ ID NO: 336988 - DNA, 2760 bp, Pseudomonas aeruginosa
atgccgaccggcaccggcaaaaccgacaccatgctcggcctgctgattgccgggcgattagctaggactcttgtgctggtgccttctgatgcgttgcgttcccagctggtcgacaaatgtcatgaactgaaaaagttgcgggagattggcgccgtttcggccacagcacttaacccggtggtgcgggcgatcggttcaggactggcggctgacgaggtccaacagctagccgaggccaacgtcatcgtcgccacaccgcaagcgctacagcgcttcgatcagcaggctttggaggctctggctgcgctctgtagtcacctgattatcgatgaagcgcaccatgtggcagccctgacctgggaccgggtaaaaacggcgttcaagaacaagccctgcctgcagtttacggccacgccgttccgtgaggacaaccagccgctggatggcaagatcatctacaactacccgctaaaggatgcccaggtcgatggctacttcaaggcgatcgagttccatccggtgcgcgagtacaacctggaactggccgaccaggtggtggctgacaaggcggtcgagctgttgcgaaacgaccgcgcgcaagggtttaaccacctgctaatggtgcgcgcacggtcacaaaagcgtgccgccgcactgtttgaattgtacaaacagcacgaggatctatcgcccatcctcatccacagcaagataccgaatcgggccaaactgctgggggaaatcgtcgagaagaaatacaagatcatcgtctgtgtggacatgctgggggaaggcttcgacttaccggagctgaagattgcggctatccacgaccagcaccgcagtcccgccgtcaccctgcagtttatcggtcgcctgacacgagtcgatgatacgctcggtgacgccaagttcgtctcgaacatcgccaaccagaaagtcgactaccagatggcggtgctgtacaaggaaagtgccgactggagtgcggtgatccgcgatgtcagccaggacaagatcgcccgcgagatcgagaaagaaacgttcaccgaacagtttcctgaggatgctgatgccgaggacattttcggcttgaaccccaaccccaagatcagtgcgatcgcctaccacgtggagcgtgacgactggagacccgagaaggccaagcacttctcgcaaaagaaagagccgctgcagctcctgtccatcaacggcgaggccgacaccatcatcatggtaacgcggcgcgaaacgcctgtcggctgggcgcaaacgtcgacgattgtggacaccaactggatcctctacctggcgtactaccatgcgcccgacaagacgctgttcgtccactcttccggggatgaatcgcaaaccaaccggttcctgagcctgatcgccaaggatgcccgacgcatcagcggcgagccgaccttccgcaccttgcacggcatcaaacttatgaagctgcagaacgtgggcctgtcgcgcatgcgcaaggacctgcgcttcaccatgcatgtcgggcgcgacatcaataccgtcatcagtgaaatcgagaacggcacggcgaggaagtccaacatcttcgcaaccggctacgaggatggtcagcgcaccaccgttggctgttcgcacaagggaaagatctgggagatgaacgcgtcaagcatcaacgactggatcgagtggtgcaagcgtgcctcgcagaagctcaacgacgcaacgatcaacccctctgacgttttaaaggatgtgattcgctcggaaaagatcgagcaggcctggcccaagggcctgttctattccgattggcctgcgtcgatcctgatcgaaaatgaacagaagatctcgctggtgtacctggctgaggtattcaacctgctggatgtcgaactgggcaagcctcggcgaatcgatgcactgacgctggaggtgcccatcagcgcaacggcaatcgatggcacggagcgccaactgcctaatatcacgatccggctgttggatgacggctgcaaattttcctgcccgggggtcaagatcgtcttcgctgaagagggctcgttcgagcagtacctggataccaaccccttggtgttgctggccgtcgacggttcgatggtcgaaggcaattaccgctacttctcccccaacagtttggacctgaagctgccggtcgccctgatcgaagcctgggattggggcacgactcagattcacagcgagtcgatgcgggcggaccgcaacccggataccgttcaaggattcacctatagccgaatcaaggacgattacacgttcattttcaacgatgatggcgccggtgagatcgccgatctggtggcgatcaaggaaagcaaggacgccatctttgtcgacctgtaccactgcaagtattgccctcagcaagatggcgaggcgcggccgggtgcgcgcgtttccgacgtctacgaggtctgcggccaggcatcacgctcggtgaagtggttgcacacggaagaaaagttcttcaatcgattgttgcatcgctaccagcagtcgttgcctaaaggcttcgacaggatcctcaagggggaacccatggatctggagctactgcgcaacaagtgccatgaccatgagatggtgttccgctttgtgatcgttcaacccggcatttcggcaggcaaagtttctgctgatcagttggccgtgctgggcaccagctacgcgtatatcaagagcatctccggctcggatgtgcgagtcattaccagcgtttga

SEQ ID NO: 336989 - DNA, 1077 bp, Pseudomonas aeruginosa
atggcctttataaaacttggtggaattcctttaaaagcaaaggaccttcccactcacacatggaatgctgatcttgtagagtttgaggggccgctcatcagtttatacagaagcgaacgcggagatgatgtcctctacgtatggcttgactgtacagccacccgtaacagatgggcaataacccctctctcacgcaacgcccttcgcgactaccttacaaagaaaatccctcttcgcgcagtattcgagaaatcaaatgagatcattgttttcgaaacaggcacaactttaaagcggtcaggctttcaattagtaacctgggccaactttccagagcagtacaaaccaaaagaaaactcatacctcacggatcggatagccacaccatccgccttaaggttggtatcagacaataccgaagattattatttgggcctagatggcgaagatctttatgtagaggacttgtctgcgattcaaaagggatttgttcagctttattcctttcactatggcttggagtacatggatcgtgacgcggtaaagcaaaaagtatccgggcatgcagggcaatggaccggcgggatgtcagcagtttggatatttgatgggctaaactctgttataccctcaatccaccggcctcgcgtcggggaacttcgctataactccccggggcatatcaaattaaacttgctgccagagcttgctgctgatgtacagcgcgcagttcagcgggtagtggacccaggtatattctctcttaccgaggcgctctatcaacgtgtatatagctacttcaggaaaagcggcatagcgggatttgaatccgaacgacaagacatcaagcgaaatttaacgcctgaagtcaatgccaccttaaccagcttcgtcattacatatctagaactaatggactggtcaagcagaagtcagatgctgcaagaacttgaggatagccccctagcccaaataagattgctcttcgcttattataggcgtctccggaagctccgaggctttgttgtggagggtcggctggacgtagggaactccagcctagttggcaagccataa

SEQ ID NO: 336990 - DNA, 1275 bp, Pseudomonas aeruginosa
atggaaaacctaaaagttgaatacctcacgataattaattccaaagaaggattttgcaataccacgtcctcttttaacaatttgattcaatcctatggcagcgttgacataaagaataagtacattatttttgacggtgcaaggtttgattatgacgtacagcgaggagaaatccagaataacagccatcttttttatcacgtccgccttggctgtcctagcgacagagatctctccaccttcctgtctttgctgaaatcgattcgaacgattttggccaaagtttccgaaaagccggttgaagtattgtgggatgatgtaagcagcagtttgtcgtacgcggcttatccggtgattcatgaaattgagaacatgatgcgtaagcttatcaccaagtttatgcttacaaaaattggtttgggctggaccaaagaggcggtaccgaaggaagtttccgaatcgattcgaacaaaaaagagctcaactggaaataattacctgttcgagaccgatttcatccaactgtcagactttctgttcagaccttattcaacagcaaactcttctaagctcttggagaaactccgctcagcgctttcagccagcgacataaatatagaagagctcaaggagctggtgccaacctcaaactgggaaagatatttccagcccatcgtaagttgtaagagcgagtatctgcagactcgatgggcaaggctgtatgacctgcgctgcttagtggctcacaataactttatcggccatgaggactttgataacatcctcaaaatatcaggagaagtcaaagagaaactgagcgaggcactgagcaaactcgacagcattcatatgtctgccgagcagaaagaggaagttgcagaaaacattgccactacggtgaacagcactcacgccgaattgattggcatctggatttcaatacagcagttgctcattgaaatagcgatgaacgcgctggatcatgtgcaagcacgcgacctcatcaagaacaagacttctacgcggatgataatcgacaagcttgtcaatcaatctgtgatcacagtggagctcgctcaagagctgataaagctccagctgtcccgagatatcattgtgcacaacgttgatgctgagctaagtgattcggtgttgctaacagcagacgctgctaagcatgaattgattgatgtcttggaaaccttggacggctttcccaacttcactggcttggagaaaacggacccgaagactcccgagccttccgcggcatag

SEQ ID NO: 336991 - DNA, 276 bp, Pseudomonas aeruginosa
atgagtaagctattcgatatggaattgttcttagctggcgtgctgaccggatcgcacgcaacgcggcaacgccatttgcggcaggcgagaatcatccaagctgaaatctccgaacgctggcagcgacagacgccttgggcttggcagaaaaagcacgtggcttggtttcttgagcaccgcctaaatcaacgcagcgattcgacacggtattactatttgctgaccgtgcggctgctcgctcgccgtttacagaaaagatggcgtttcaatcgctga

SEQ ID NO: 336992 - DNA, 981 bp, Pseudomonas aeruginosa
atggcattagtgggtagacgcgatggccgtaatttcggctacggccggcaactgagctacgcagggacgaaggcgctgaaagacatgttcagcggtggccattatggcacggtcaaggcgcactgtgatcggtggcaggcattcgtgaagtggtgccgttccgaacatgggcctagtatcaatgatgcgcggcagattgatcggaaggtgctggccgactatgcggcgtatctgcgcgacgtggttaggcgcggtgaccttgctgtcagcaccgcacaaaaccgcctatctagcgttaacaggactatggcagcacttcgcgcggatcagtgcgtgacattgcccagtccgagcaaagcgttggggatgcagcgtaccggggttcgacagtcggtgcctcagggccaagatcgcgaacagattaaacagatcgtcgatgcgctttgcagtcatcatcagctacgagccgctgcgatcgttctgttggcacgagccgccggtgtgcgcttgcgtgaggccatcttggctgacctgccaaggctaagtcgtgaggctagcgacctaggcaggattaacattcaggatggcaccaaaggcggccgcgccagcgcctcggcaccacgctggattttggtggacgaccatgtccgagctgcacttgggtttgcactgcaggtgtcgcctacgggtagccgcaacctaattgcgcaacacgaaagctacctgagtcttctgcaacaaatcatccgccctgcgcgggacatcctgcatacacacaacctcaaaggcttccatgagctacgagcggcatacgcttgtgagcgctatgagcaaatcacccaacaccgtgcgcctatcaatggcggccacttttgccaggtagataggaatcttgatcgtgaggcccggaagcagatcagctacgagctggggcacggtcggatcgatgtggtcgctgcctacattggaggatgcacatga

SEQ ID NO: 336993 - DNA, 246 bp, Pseudomonas aeruginosa
atgcaaagtatgggcatgagcgaaatggccggaatggaccaggactgctgccaggactcgggcacgatgaacgagcacggcaagaagtcctgcaagaccggccaggagtgcaagaccagcagcctgctccagatcgacgtcctgaaagcctcgttgccccccgccccgaccacggcccccgcgccctacagcgatccgatcctcagccaggccccggccgaacgctggcgacctccctgcgcctga

SEQ ID NO: 336994 - DNA, 1245 bp, Pseudomonas aeruginosa
gtgactcccatccgtatcagttcgggctggatactgctcttcatgctgtccagcctgtccgcacagggtgcctccctttccctggacgacgccctccgattggccgaacgcaacgctccgtcgttgctggcacagaacgaaaaacgcgcggcggccagaagcgccgcgattcccgcgggcgcactgcccgatcccaagctgaaccttggactgcagaacgtccccatcgaaggcgacgatcgcttcaccacaaaccgggacttcatgaccatgcagatggtcggggtcatgcaggaggtgcccaaccgcgacaagcgcaaggcgcgtatggaaaccgcacaggccgccgtcgaacgcgccgatgccgaagccggcgtcgagcgcctgcaggtccgcagcgcatcggcgcaagcctggatcgcggcctatacgctccagcgcaagctggccctgttcgacgacttcttccgcgagaaccgcctgctggccgcctcggtccgcgcacggttggccggcggcggcgccagcgccgtggacgtagtggcgccacgccaggaggcggcgctgctggatgagcgcaaggacgatctcttgcgccagcaggcccaggcccgcgcgacgctcaagcgctggacgggcgaggatgcgcccgatgcgctggacggcgacttcccgcactggacgatcgacgccgcgcactcgcggcaggcgctccgtcggcatccggcactcgccgcctacgacccgatgacccgcgaggccgaggccctggtgcgcgaggccgtggcggagaaaaaaccggactggagctgggagctggactaccagcgtcgtggccgcgagttcggcgacatgatgaccttgcaagtcagcttcgacctgccgctcttcagcgccacccgccaggacccaaagattgccgcacgacgcgcccaggtccggcaactggaagccgagcgcgccgccatgacccgcgagtacgagcagcgactggagtccgacctggcggagtaccgccgcctgcagcgcgcgctcgagcgcagcaccgccaccctgctaccgctggccgaggagaaggtccgcctggccctggccggttaccgcgccggcacgctcgatctcgaacaactgctcggcgcccgccagcaacgggtcgaggcccggctcaggcagatcgacctgcagggctccctggcgcagcttgccgcgcgtctctacttcacctacgaggagggacgcgcatga

SEQ ID NO: 336995 - DNA, 1473 bp, Pseudomonas aeruginosa
atgagccgtttccctgtgaaagcatccgccgcgctggtcctcgccttggctatcggcagcgccggcggctactggtacgcccagcaacgccacgcgccgatgccggaagccccggcgccgggcatggcggaacgcaagccgctctactggtacgacccgatggtcccgcagcagcacttcgatgcgccgggcaagtcgccgttcatggatatgccgctggtgcccaggtacgccgatgagcccgacggcgcaccaggggtcgaggtcgagccaggcatccggcagaacctcggtatgcgcctggccaccgtcagccgcggcaggctcgaccgcacactgcgggtcgtcggcgtgctggcctacgatgagcgcgccgtggcagtgctacaggcccgcgccggcggcttcgtcgagcgcacctacgccctggcgccgggagacgtggtgcaggccggcgcaccgatcgccgatctgctggtcccggaatgggccgccctgcaggaggagttcctcgccctgcgcggcgccgcggagccggccctgcaggaagcggcgcggcaacgcctgcggctggcgggcatgccggccccactcgtcgcgcagatcgtccgcagcggcagggtgcacccggtgatcaccctggccgcgcccatcgccggagcaatccgcgaactggacgtacgcaccggcatgaccctgtcggccggcgcgcccctggcccggatcaatggcctggagcaggtctggctggaagcggcggtcccggagagccaggccagaggactccgccccggccagacggtcgacgcccgcctgccggccttcccggagcgtccgctgagcggcaccctggccagcatcctgccggagaacgacgcgcaaagccgcacgtcgcgcctgcgcatcgaactggccaatgccgacggccggttgcgcccagggatgacggtcgcggtcgatctcgacctacccggtcaggccgatgtgctgcagatccccagcgaagcggtgatccgcaccggcaagcgcgacctggtgatgctcgccggggaacacggacgcttccagccggtggaagtgcgcctgggccaggagaacgacggtcgggtgacggtcctgcatggactcgtcgaaggccagcaggtggtcgcttccggacagttcctgatcgactcggaagccagcctgagaggcatcgcgccgcacaccgcgacggagcccgccgcgatgcggacgacgccgcccgtgcatgaggccgatgggcgcatcgtggccatcacggcggagggattgaccatcagccacggaccgttcgagaccctgggcatgcccggcatgaccatgaccttcgccctcgcccgccccgaactggccgatggcctgaaggtcggcgagcgtatccgcttcggcgtcagccagagcgacgccggcctgctcatcgagcgggtacgccagcaggaggaacggccatga

SEQ ID NO: 336996 - DNA, 333 bp, Pseudomonas aeruginosa
atgaaaacgcgctacctctacgccacactgctcctcgccctgaccttcggggcgcaggcggaaaccatgccgggcatggcgatggaagacatgcagacccagcaggcggccgcaacggccacagcggagggcaccgtcaaggcgatcgccccggatcgcgccagcatcaccgtcgcccacggcgcggtgcccacgcttcgctggccgccgatgacgatgaggttcaagatcaccccggagcagtcgcacggattgaccgtgggagaccgggtgaccttcgacttccgtgtcgacgcgggagcggccagcatcgtcgccatccgcaggcagtga

SEQ ID NO: 336997 - DNA, 1149 bp, Pseudomonas aeruginosa
gtggcgcttgagcagccaggcgaagcggctggccgcggtgggctccagcgggaaggtcggcagcagcttgccggcatagccgaactccgccagcaccacccggccgcgctcgacggtcagcggacaaccgccgtagccgtcgtagcgcagcggcaggccacggccgctgcgcaggccgagaaggttctcggccaccaccacgatctgcttgcgcgccgccgccgcggtcttcgcgttggcggtgccgcagacatcgccgagggcgaagatctcgccatggcggacatgttgcagggtcgccgggtcgacttcgcaccagccggccgcgtcgcccaggccgctggcggcgacgaaggtcggcggcagctgcggcggcaccacgtgcagcaggtcgaagtccttttccgccagattggtgttgccgtcggcgtccttcacctcgaaccagaccttgcgcgccgcgccgtcgaccttcaccaggttggaattgaacgccagctcggccgaatacttgcgcacgtactccatcagcggcggaacgaaatcggcgacaccgaacaacgccgcgccggccaggtcgaactcgacctcgatgtcctgcagcacgccctcccgcagccagtggtcgcaggacaggtacatggccttctgcggcgccccggcgcacttgatcggcatcgccggctgggtgaacagcgccttgccgccgcgcaggccgcgcaccagctcccaggtgtagggcgccaggtcgtagcggtagttggaggtgacgccgttgcgccccagggtctcctccaggccctcgatgcgctcccaggccaggcgcaggccggggcagacgatcaggttgcggtattccaggctgtcgccgccctccagcaacagtcggcgcgcctcggggtcgacccgctcgacgcgggtgcgcaaccactccacgccgggcgggaccagcccggccatcggccgcgcggtgtcgccctgtgcgtaggcgccgccaccgaccagggtccagcccggttggtagtagtgggtgtccgccggctcgatcaggctgatacgcaaccccggcgaacgtttcagcaggctggcgatcacgccgatgccggccgcgccgccgccgatcacggcgatgtcggtggtgagttctga

SEQ ID NO: 336998 - DNA, 624 bp, Pseudomonas aeruginosa
gtgaggtttcgcgccatcgaggcgttggccggtcgttatcccgtagcgccgatgtgccggctgctgcaggtgtcacgcagcggtttctatgcctggcagcaacggcctccctcggcgagagagatggcgaatcggcgtctgagcaaggagatccgcaccatccaccacgaggtgaacgggatctatggccatcgccgcatcaaggccgagttgacggccatggggcatgcgtgcggtcggcaccgggtcgctcgcctgatgcgcgaagccggactgcgagttcgttcgcgcaagcgctggcggctggtctccagcagtcatcatgctctgccgattgccccgaatcatctggatcgccagttcgcctcggatcgcgccaaccggcattgggtctcggacatgacctacgtgcggacagcccaaggctggttgtacttggccgtcgtgctcgatctctattcacgcgccatcgtcggttgggcgatgcaccaccgcatgcagcaggccctggtacacgccgcactagagatggccgtggcacgccgacagccgcaggaagaggtactgctgcactcggatcgtggcagccaaggtggattcaaccggtcgttgcaacacctttga

SEQ ID NO: 336999 - DNA, 294 bp, Pseudomonas aeruginosa
atgacccagaccagacgacgttttcccgaatccttcaaacgcgaagcggtagaccaggtgctttccggcactccgcttcgtcatgtggccgagacgctcgacatcgctgaaagcctgctgggcaaatggaagcgccagtacgaacagcagggtgacgatgcctttccgggtaacggcaagcagcgtggcgaaagcgcggagctgcgtcgcctgcgccagcaactggcccaggtcaccatggagcgcgacgtattaaaaaaggcgctcgccatcttctcgcagcccacgaagtga

SEQ ID NO: 337000 - DNA, 495 bp, Pseudomonas aeruginosa
gtgccaaaactccatgaaatcattgccgaggcccaggctatcaggcgcgcgatggatctctccgacaagaaaggcatcccattgatgcacgatgactttcccatcacgcactgtaaaacggcgtccttactcttggtctatcacgcattagagaaatggccgttctccacactttacggagtcagcggaatcgccaccgaccattacggaaatgagacgatatcccattactggatagagttcgacggattggcgatcgacatcactgcagaccagtacaacattatcgaggacagatacctcaacaaaaagatcatcgacagcagaccctttcaacctgtctcgataggacgtgtcggcactctaccaagctacgaaatattcgaaaacttgcaacgcgatacctacaccctaggcctgaccgaactcgccgaagatttcctggaggatctttgcgacagctatgccgcattgaggctgagccccatttcttga

SEQ ID NO: 337001 - DNA, 402 bp, Pseudomonas aeruginosa
atgcccaacgccgattcagccgcaggcagtcacgccgtaccgcgcgatgacacgctgctgtgttcgcagatgctggcgaacaacgaactgggcgccgtcaccgacgtcgcagccatcgacaaggaggtccgcgctcgtggcgcgctgctgaacgtggatgccgcccaggtcacaggcaaggtcggcatcaacccggcacgctggctggtggacctgatgtcgttctccacgctcccccctacggctctaagggcattggcacgctatatgtgggagaccgcgcctacccgcaactgcaaacgcggatttacggcggtgaacatgcgcgcggcctgctctcatgcactttggccgctcaccagattgtggcatgaacagcgcttggacccgcgcctccagtga

SEQ ID NO: 337002 - DNA, 141 bp, Pseudomonas aeruginosa
atgattcgagtggagttcttacccaaaatcgccgatgtccacaaccgcaagtccctgatctataacaaccgcatcaccctcaaggccatccccgaggcagcctggaactacgtagtcaacggcaaggctgcgctggactga

SEQ ID NO: 337003 - DNA, 4821 bp, Pseudomonas aeruginosa
atgactactctgaacgacatcctctcagccttccgcgacgcggcccgcagcaaccgagaaatgggggataagttcgagcgcctgatcgccgcctacctccttgccgacccgcaattctcggatcgtctggccgacgtgtggctctggtcagagtggccggatcgctcggggatggacgtcggcatcgacctcgtcgctcgagagcggggaactggcgactattgggcgatccagtgcaagttctacgatcctggccacaccctccagaaggccgatatcgactccttcttcacagcttcggggaagcgattcgctacatccgcgggggaacgcttcttctcccatcgcctgatcatctcaaccaccgacaagtggagttctaacgcggagaaggctctcgagaatcagactatcccggtctcccgtctctggttcaaggatcttgccgatagccccgtcgattggagtctcttcgacctagctcgtgtatccgacattcggcttcagaagaagaaggatctgatgcctcaccaggccaccgctatcgagagtgtcctttcgggcttcgagtccgtcgatcgaggcaagctcgtcatggcctgtggcacggggaaaacattcacctctctgcgtctaatggaacaggcgacgccggagaacggcctgattctgttccttgccccgtccatctccctcgtcggacagagtctgcgtgagtggtcagcccaagcggagaagcccttccacgccttcgtcgtctgctcagactcgaaggtcggaaaagacgaggaggacatcagcgcgcacgacctcgcctaccccgcgactacggacactcgcaagatcattcgggcggcctcagtcctgtccaaggatcgccgcaccgtcatcttctcgacctaccagtcgattcaggttgtcgccgacgcccagaagcagggactcggccgattcgatctcatcgtctgcgacgaggctcaccgcaccacgggcctgactctgcccggagagtccccctccgagttcgtgaaagtccaccacgacgagaatgtctccggggccaagcgcctctacatgaccgccaccccgcgcatcttcgccgacgcctcgaaaacgaaggcgaataatgccgacgcggcactgttctcgatggacgacgaggccacctttggccccgagttctatcgcctcggcttcggaaaggccgtcgaactggatctcctatcggaatacaaggtgctcatcgtggccgtccgcgaggcggagatggccaagctggccaataacttcaataacgccttccgtctggacgagaagaaggccatcgacatcaacttcgcgaccaaaatcatcggaagctggaaagggctttccaagcgcggcctcgtttctgtcggagaggacggacaggaggaggctctggtcgaggatgtagccccaatgcgcagggccgtcgccttctcgaagtcgatcaaactatcgaggcaaacaaccgaaatatttaaggatctggtcggcgtctataagcaggctcacgacggcgacgagtccgacggtatggtgcgctgcgacctggaacacgtggacggcacaatgaacgccctcaaacgcaagcaggctctggactggctcaaggccgacgccgagcccggagagtgccgcatcctctccaacgctcgatgcctttccgaaggcatcgatgttccaaccctcgacgccgtcgtctttttcgacacgcgcgagtccatcgtggacatcgtccagtccgtcggccgtgtgatgcgcaaggatcgggaggggcggaagaaatacggctacatcatcctgcccgtgtgcatgccctcggagaaggtcaaggattacaacgcctatatcgacggcgacccgcagtttaagggcatctggaaggtcatcaaggccctccgagctcacgacgagagccttgtggacgaggcagagtttcgccgtcgtatctccgtagtcgatggaggctccggaaaaacgggcgatgagcgcgacggttcgagcgagatgcttcccctcgacttccctgatctgcctatcgacgccatcaacgaggcggtctatgccgccataccgaagaagctcggcgaccgcgaatactggagtgaatgggccaagagcattgccttagtctccgaacgtttgatcgcccgtattgagagcctgctggccagcgacgctgggatggccgacgagttcgaggtcttccttaaaggactcaaggacacgcttaaccccgccgtttcacgctccgaagcggtcgaaatgctggcacagcacatcctgaccctgccggtcttccaagccctcttcgctggaagccatttcccggacaacaacgtcgtcgctaaggcccttcagaaaattgtgtcgaagctcgatgcagcggcgatggcgggggagacggagggtcttgagaagttctaccagaacgtccgcgaacgcataagcctcgccaagagtgacaaatccaagcaggacatcattcgcaacctctacgacacgttcttccacaacgcttttcccaggatggcggagcgcctcgggatcgtctacaccccggtggaactcgtcgacttcattctcaaaagtgcggatgaggctcttcgaacgcacttcggcgagtctctcgacagcgagggcgtccagattctggatcctttcgcagggacggggactttcttcgttcggcttctccagtcggatctaatctctccgtccaatttggagcgaaagttcgaacgcgagcttcatgccaacgaaatcgtgcttcttgcctattacgtcgcgacggtcaacttggagaccgcgttccatctccgaactggtacctatcggcagttcgcaggcatggtgctgacagatacctttcagatgacggaggacggcgatctcgtcgataaggtcgtgcttcctgagaacaatgccaaggcggagcggcagttggcgcagccgattaaagtcatcgtggggaatcccccctattccggccagcaggagagcgagggcgacaacaacaagaacctcgactatccgacgctggacgccagcattcgaaactcctacggcagcctctcctcgtcaaaattggcgaagagcaattacgattcctatatgcgagccattcgctgggctaccgagcgcataacggacaagggcgtcatagccttcgtcacaaacggctcgtttatcgacgccaaaaacatggacggcgttcggaaaagtctggtgagtgacttcagccacctctacgtcttcaacttgcgtgggaaccaatatacgactggagaagtgtctcgcagagaggccggacagatcttcgggtctctgtctcgaacccctattgccataacggtgatggtgaaggacccagcccacgagggaccgtgcaacctttactatcacgatatcggagactatctgccgagagaggagaagctcaagattatcgagagtttcggtagcaccgcctccattccttggaaaaagattgtgcctaacgaggagggggactggatcaatcagcgtgaccctgccttcgagaaatttcttccgttgggcgacaagaacgacgaaggagaccgagcagtgttctccgtgtattcgctgggcgtcgtcaccaatcgagatccgtggacctacggtatgagtcgatcgaggctgacctcgaatgtccatgccatgatagaggcatacgaggagacgagggagcgcttcgtcagtgcgtgcaaagggaagagcaaagatcagtggccagaacccgaggccgtaatcgaggctaatccgaagcgcattagctggacgcgagctttgaaggcagaccttaggcggcacaagcccctctttttcgatgaatcctcggtcgtcgtcggagcgtatcgccccttcaacaagcagtggatgtatttcaacaggcgctgcaacgaaatggtttaccagatgccgcgtctgttcccgacgcctcgacaccggaacgttgtcatatccagcaccggcgtagcggaccgcaagggctactcggcgctcgttgcggaccaagtgccaaatctccacatcacggatacgggccagtgcttccctctctattggttcgaaaaggcggaggaatcggggacgccacagagcgagatgttctccgcatccgagatgcccgacgccgacggctatattcgccgcgacgctatctccgactgggctctagaggcgttccggtctcattacggagatgcaacgatcagcaaggaggacattttctggtgcgtctacggcgttttgcactctcccgaatacaaacgccgattcgcctcggatctcaaaaagatgcttccccgagttccgctcgtggagaacttccgagcattttccgacgcaggtcgaaagcttggcgatttgcatctgacgtacgaaaaggtcgagcctttccctctgacggaggactgctctcgtctggtaatggaaccggacgactatcgggtatcgaagatggtcttcgggaaaaaggatggcaagccggacagaaccgtaatcgttttcaacgcccatctgactctgcgggatgttcctctcgaggcgtacgagtatgtggttaacggtaaatccgccatcgagtggattatggagcgctatcaggtatccgtggacccggcgagcggcatcaaaaacgacccgaacgattggtgcacggagcacggtgatccgcgctacattctggacctgctgaagcgaatcgtccgagtcagcattgaaagccagcgcctcgtgaagagtctcccccctcttaacgaacacattgcctag

SEQ ID NO: 337004 - DNA, 186 bp, Pseudomonas aeruginosa
atggagagcttcttccgttcgctgaaggccgaacgggtatacctgacgcgctatgccagctaccaggaggcgaaagccgacctgttcgactacatccgcttctacaatcaccgccgtcgccactcgacgctgggctatctcagcccgatggagtttgagcggcgaaatacgagcagtagctcttaa

SEQ ID NO: 337005 - DNA, 255 bp, Pseudomonas aeruginosa
atggatctcgaccgtctctacctgccgcattggcagttcagcgagcgccatcagcggctgatcgacgcgccggccgccgcgctgctcgacgcggtggaaggcctgttgcgcttcgacgacccgctggggtgcgccctgcacgaagcgccggcgctaccctgctgcacacggaaacccgggtgttctgccccgatcgcgccagccgcctgcgcttcaccccctactgggtggcgatccgcccggtcagcgggctga

SEQ ID NO: 337006 - DNA, 1128 bp, Pseudomonas aeruginosa
atggatacgccgatcgaacgcgccccgctggctcccgacctgagccaggcccgttacgccgtcgacctcaccggcctggtgccggcggaggtcgccgccgggctgccgccgctgccgccgaaccacttctatttctatccgccggacccgctgctggaaggcgacggcgcaatcaccgcgatcgaggacagcgaccccttcgaccagtacgtctaccgcctgcgccgggtgctctaccagggccgcacgcgctggcagaacgtgctgatcgccgacacctacaactacgaccgcgtgttgatgctcgacggcgcgatccagagcgccgagagcgatgagtcgctgtaccacgagctgctggtgcagccggccatgctcgcccacgacgagccgcgcgacgtactgatcatcggcggcggcgaaggcgccaccctgcgcgaggtgctgtcccatgccagcgtgcggcgggcggtgatggtcgatctcgaccgggagctggtggaactgtgccgtgagcacctgttccagtggcaccagggcgccttcgacgacccgcgctgcgaactgctcgccgaggacggccgggcctatctcgagcgcgacccgtcgctctatgacgtggtcatcatcgacgtcgtcgacatgctcgacaacggcccggcccaggccctctatacccgccagttctacgaactgctgcactcgcggctgcgtccgggcggggtgatcgcggtgcagggcctggagttctcgcacagcgacgacaagccccacgcggccctcgcccgcaccctgcgcagcgtcttcgcccaggttcacagctaccgcgccacggtgccgtcgttcctttcctcctggggcttcctgctggcctccgactggctcgacgcaaaccactggcaggccgatgacatcgaccggcgcatcgaacgcaagctcggcccgctgtggctcgaccacctcgacggcgactacctcaaggcctgcttcgtgatggaccgggaaacccgcttcctgctcgcccagccgggaccggtactggaagacggcgtacccttcgtcgcaccgccggatatcgaggagatcgagttcggcccggcacaattgccggccctggcgaggacctga

SEQ ID NO: 337007 - DNA, 483 bp, Pseudomonas aeruginosa; identical to SEQ ID NO: 321831

SEQ ID NO: 337008 - DNA, 2817 bp, Pseudomonas aeruginosa
atgagcctgccgattccctttctcgagaccgtcgagcggctgataccgcgcgaacgccgcttcgacgacccgctgtcgaccctggccttcggcaccgacgccagtttctaccggttgattcccaagctggtgctgcgcgtcgaaagcgaggacgaggtcgccgcgatcctatccgtcgcctaccgcgagcaggtcccggtgaccttccgcgccgccggcaccagcctctccggccaggccatcagcgactcggtgctgctcgtcctcggcgacaactggaacggccgggaaatccgcgccgacggcgcgcagatccgcctgcagccgggtgtcatcggcgcccaggcgaacgcctggctggcgccgttcggccgcaagatcggtcccgacccggcctcgatcaacgcctgcaagatcggcggcatcgtcgccaacaacgccagcggcatgtgctgcggcaccgcgcagaacagctaccacacccttgccggcctgcgcctgctgctggccgacggcacccgcctggacagcgaggacccggccagcgtcgcggccttccgcgccagccacggcgagctgctggaacggctcgccgaactcggccgcgagacccgcgccaacgccgaactggccgcgaagatccgccacaagtaccggctgaagaacaccaccggcctgtcgctgaacgcgctggtcgactacgacgagccgctggacatcctcacccacctgatggtcggctccgagggcaccctcggcttcatcagcgcggtgacctacgacaccgtcccggaacacccgcacaaggcctcggcgctgctggttttccccacggtggaaacctgctgcacggcggtcgcggtgctcaagcgccagccggtctcggcggtggaactgctcgatcggcgcagcctgcgctcagtggagaacatgcagggcatgccggaatgggtgaagagcctttccgccggtgcctgcgccctgctcatcgagtcccgcgcggcgagccgcacgctgctgcacgaacagctcgggcggatcatggcctccatcgccgaatatccgctggagaagcaggtcgacttcagcgaagacccggcggtctacaaccagctctggcgcatccgcaaggacaccttcccggctgtcggcgcggtgcgcgagaccggcaccacggtgatcatcgaggacgtcaccttccccgtcgaacgactggccgagggagtcaaccgcctgatcgagctgttcgacaagcaccgctacgatgaggcgatcctcttcggccacgcgctggagggcaacctgcacttcgtcttcacccagggcttcgactcgcccgagcagatcgcccgctactcggcgttcatggacgacgtggcgcacctggtggcggtggagtacggcggctcgctgaaggccgagcatggcaccgggcgcaacatggcgccgttcgtcgaactggagtggggcgaggacgcctatcgcttgatgtggcagctcaagcgcctgctcgacccgcgcggcatcctcaacccgggtgtggtcctcagcgacgacccgcagagccacctgaagaacctcaagccgctgccggccgccgacgagatcgtcgacaagtgcatcgagtgcggtttctgcgaaccggtctgcccgtcgcgcggactgaccctcacgccacgccagcgcatcgtcctgtggcgcgacatccaggcgaagaagcgcgccggcgtcgacaccacggcgctggagcgcgactaccgctaccagggcatcgacacctgcgccgccaccggcctatgcgcccagcgctgtcctgtgaacatcaacaccggcgagctgatccgcaagctgcgcggcgccgacgcccgccacgccgaaggcgccacctggctggcgcgcaactttgccggcgccatgcgcgctgcgcgcttcgccctgctcgctgccgacggcgcccggcgcctgcttggcgcgcccctgctggccagcgccagccacagcctcagccaggccagcggcggccgcgtgccgcaatggacgccggcgctgccgcagccggtacgcttggcgccgccgcccgccccgctcgacgacgagcggccacgggtggtctatctcgccgcctgcgtctcgcgcgccatgggcccggccttcggcgacgaagagcgcgagccgctgctggacaagacccgccgtctgctggaaaaggccggctaccaggtggtattcccggataacctggacaacctctgctgcggccagccgttcgcgtccaaggggtatgcgaagcaggccgacgacaagcgcgacgagctgctcgccgccctgctccaggccagccgcggcggcctcgacccgatctactgcgacaccagcccctgcaccctgcgcctgatccagggtctggacgatccgcggctgcagatccacgacccggtgaaattcatccgcagtcacctgctcgatcgcctggagttcatcccgcaggacaaaccggtagcggtgcacgtcacctgcagcacccagcacctcggcgagagccaggcgctgatcgacctggtcggccgctgcacccgcgaggtggtgatcccggaaggcattcactgctgcggcttcgccggcgacaagggcctcaccacgccggaactgaacgctcactccctgcgcagcctgaaggatgccgtgcagttctgcgaggaaggcgtgtccaccagccgtacctgcgagatcggcctcagcgagcacggcgggatcgactaccgcggggtggtctacctggtggaccgggtgacgcaggcgaagggcgcgcctcggtag

SEQ ID NO: 337009 - DNA, 393 bp, Pseudomonas aeruginosa
atgcccggaaccgcggagtggatcgccggcctgtatccggccgccctcggcaccaatcagccgttcaatcctggctgggcactgcgcgcgctggtcacctacgaccgttggctctacgaccgaaaccaggcctccagcgagtgtgatcgctgggcattcgtactgtccgcttacaacggcggccaggggtgggtaaatcgcgaccgtaggctggcctcggcatccggcgccgaccagctggcctggttcgattccgtcgagcgcttcaacgccgggcgctcggccgccaacttccgcgagaaccgcaactacccgcgcctcatcctgcttcgctatgagcggatctacctgcagtggggcgacggcgtgtgcggagagaggtacaccctgtga

SEQ ID NO: 337010 - DNA, 636 bp, Pseudomonas aeruginosa
atgctggtgtcttgctcaccttggccgaacagactcatgagtcctgctgtagccttctgggccagctgctgcgcggcaacgtcggccagcgatcggctgaccgcctgcaggaacgataccgcggcctcctgcagcgacagggtgccatctgcgagaccgcgcagcgcatcctgcatgccgttctcgataccggatcgcagagccaaagtgagctggtcggcggccacgcgggtgttttcgagctgctggcggagatccttcacgcgctcgatcgctgccggatcgccagttgccttggccaactcctccatgcgaggcacaagttgctctacctcgtcggcggtggaccgatgcaggtctagcagttgctgccgcgcggccagttcgctgacgagaccggcctgctgggcggcctggatactcgactcctgccgagactgctcgccgaagatccggtcgacctggtcctggagctgctgcagctcagccttggccttctcgattcccatcagcttgctgaccaggccggcgccttcggtgtcacccgtggcgagcagacgcttctgcaggtcgccgtacttcttctcgatctcggcgccggccgcttcgacggtttggccggtggcccgaaggtag

SEQ ID NO: 337011 - DNA, 1182 bp, Pseudomonas aeruginosa
atgaaccgacctcgaaccgttatccgcttcatcaacgccgcgcatgtcatcgaccacatgttcatgctgatcttccccgccgccgtgctcggcatggccggcagcttcgacctcgactacgccggtctgatcggcctgtcgctgggcggtttcatcgccttcggcgcctgttcgctgccggccggctggctgggcgatacctggagccggcggcggatgatgctgctgttcttcttcggtatcggcgccgccgcactgctcaccgggctggctggcagcgtaccgatgctggtgaccgggctgaccctgatcggggtattcgccgcgatctaccacccggtcggcaccgcgatgctggtggcacacgcggagaaccgcggccgcgagatcggcatcaacggtatgtggggtaacctcggggtcgccttcgccgcgctgcttaccggctttctcaccgcgcacttcggttggcgtgcggcgttcatcctgcccggcggggtggccatcctgctcggcatcggctttttcttctgcgtgcgcgaggagccatcgccgcacctgtcggccaaggccgcggcgcgtggcgaggacagcgagggtctgtcgatgcgccgggtgttcggcgtgctggcgctggtcaccgccaccggcggggtggtgttcaacgccagcaccgtgacctacccgaagctgttccaggagcgcctgagcgacttgctggcgtcgccgcagaccctcggcgtggtggtcagcctggcctatgccttcggcgcggtggcgcaactgatcatgggccgcctgatcgatcgcctgaacctgaagttgccgttcgtcttcctcaccttctgccaggtgccgctgctgctggccctggcctacggccacggcagcgcagtggtactgttcggcgcgctgttcatgttcgcggtgttcggccaggtgacggtgaacgacgcgatggtcgcccacttcgtcgcgccgcagtggcaggcgcgggtcttcgccctgcgctatttcctgtcgttcggtgccagcgcggcggcgatcccgatgatcgcctacctggagccacggcaggggctgctggggttgtacctggtactggcgggcttcgccgcgctgaccttcgccacggcgctggtgtttccgcgtccggcgcgcagcgccgcggtgggcacctga

SEQ ID NO: 337012 - DNA, 1074 bp, Pseudomonas aeruginosa
atgcgccgcctccagcgcgatgcgttcgcgcgccgccaggctctgccggttgagcagttcctccgcgctgcgaatctcggcgctgccgccggcgtaggtcttgccattcagctccacggcctgggccacgatcttcaggtcgccctggctggaggcctgggccaggctcagcttgccgctggcgtcgatgcggatgtcgccgccgctggcggccatgtcgccggccagcttcacccccacgccctgctcggtgccgaccaggcggatcgccccggcgtacatcccgcccagcgccgagctgtcgatcgccagctgcggcttctcgctgccatcggcggcgcgcggcgtggcctgcaggctgtcggcctggacgtcgttgcggccggtgacgatgttgaggttcttcgcgtagagcttggcgttgagcttggcgctgcgggtgatcaggtcgaactgttcgaggttgccgacgttcagttcggcgccttcgacgacgatgtcgccgccgtccacctggaagcgctccaggcgctggccgtccatgatcggcttgccggtggtgagggtcgcgcgcggcgtgttgatgaagccgcagccctggcaggtgatgccatgcgggttggcgacgatcacccgcgccgactgcccggccacctcggtgtagccggccagggtgctgcggttgccgccagtgacctggttgaggatcacctgcgccgcctggcccttgaggttggggttgccgaggatgatcccgccgagctgggtaccctgggtcttgccggtggcgttgttgaggatcagcccgttggcgccgacgttgtagtcgcggaaatggttgttcgacagcccggcgccgttgggcgtggcgatattgacgatgggcacgccgttgcccgcctggcccaggccggtgttgccgccggcggccttgtccagcgccagccccgccgccgcggcgacgatcgggttgaggaacaggatgccggccagggacagggcgatgcactggttcagcgggctgcggatgtccatatcgttactccttggcgggtaggggcccggcgaggttaa

SEQ ID NO: 337013 - DNA, 957 bp, Pseudomonas aeruginosa
atggccaccgaattcggcaccgccgtcaaccacgccgacctggtcgagcgcctggtccagttcctcaccgcgagcccggacctggtcgcagctgggcaggcctacgagaaggttttcgacaacacccttcccgcgtcgggcacggccatcgccgtgcgccaggtgaccctgcgcgcccccggcctgggcggcaccgacagcatcttcatgggcatccagtcctacggcgataccgccctggactactacaacgttcggctcatgggtggcacggcgttcaatcctggagcgatcccgcccggtggcgactactggaccgcgtttgccaactacagcccgcgggtgcaactgctggcctggaaccagccgatgccttattggttcttcgccaacggccgcaggttctggctggtcgtaaaagtctcgacgatctacgagtcggccggcgccggcttcatcctgccaccctgtccgccgtcgcagtatccgtacccgcttgccgtcgtgggctcctaccgtggtgacgttgcaactcgctggtcagacgtcagcgaccggcaccggggcatcagcagcccctatgagcgtagctgctatctccgcgatcccgccgggcgctggctcggtttcactgtcgaaggaggggctgccaacgagtccgactacagcaatcggacgctcctcccgctgggctgcggccgatatgcgggcagcagtgacaccgtggtcaaacaactgcgtgattcgttcgggaagttcccgctcaaagcgctgtcgttcgtcacccgcgaaaccgaggggcgccgctatctgggcgatttcgacggcgccttctacgtgccaacgctcaactccggcgccgaagacgtcatcaccgagaacggagtcgatcacgttgttttccaaaccgcctggcgctcgggcaacccctggctctacgcaatcagaaaggactga

SEQ ID NO: 337014 - DNA, 1209 bp, Pseudomonas aeruginosa
atgctggtagggcttcagcctcccgccgaacggaatggccttggccttgcgtgcggcctgctcttcggcatcggtatcgacgcccatggccagccgggccgcttccttgcgggctttctgcgcaggcgtctccgcatgctgccggaagtcctcgccaatcatgggtgcccgcacgtcgaagccgaactcgtcttcctcgatcctcggaatgacgtggaagacttcatggccgtcctggtcgaaagtgatcgcctgggcggcatcgctttgccaggggttgcgggtgatcatcagcttctcgccgatcatcacgccaggtacgaccgagacgtcgtattcagttccctggaagctgacgcgcagcttgctggtgaccttgcggctctccggctcggcgattgccaactggcggcatacttcgacgctgggcgctttcaccaactggtgctcacggatgcgcatccaggcctccgagcgggtcatcccatggcgggagtgcttcttcgcggcgttgaaccacgcgcgccaggtcttggcggcagcgttcagttcgtccagatcggcgacaggctggaagcgcagtcccgcctcgaacttgcgctcgataaggttccgggcgttctccacctggccagtcacccgcgcggcaccgggcttgtgaacgatgacgcggatgcgcagcgcacggcaaaggttcctggccatggccgaggtgttggcagaacctgggtccatcatcagaatcttcggcacgccgtgcagaatgtcgttgccaccgcgctcctgcatggcgtcgatcagcacatcacacaggttctcgccgctctcggctcccatgacgtacttcaggtaaatccagccactggcgtgctcggtgatctcgtacgaccagacccggttggaggcgatgcgggccacgttcttcggcttgttcttgtagaactggtcatgctccatgacgcgcaggccgttaccgtgctcatcggcgccgggcttgaggtaataaagaacacacagcgaggcatcgatctgccaaacgtggttggggtggcaactgcccagctccgttaccggagcaggctgcagcaattgctggggatgaaccccgaagctgtagagagccctggatatcgcgctgatggacagcggccggatctcgcccgtgtcctcgtcaatgacgtccgcccggatcatcttgctggcccgtag

SEQ ID NO: 337015 - DNA, 726 bp, Pseudomonas aeruginosa
atgaataattcgaatcttgctgctgcgcgtaatttgatacaagttgttaccggggaatggaagtcccgttgcgtctacgtcgctacgcgcctcgggctggccgatctgatcgagagcgggatcgacagcgacgagacgctggccgccgcggtcggttccgatgccgagcgcatccatcgactgatgcgcctgctggtggccttcgagatcttccagggcgatacccgcgacggctacgccaatacccccaccagccacctgctgagggatgtcgagggctccttccgcgacatggtgctgttctacggcgaggagttccacgccgcctggacgcccgcctgcgaggcactgctcagcggtaccccaggcttcgagctggcgttcggcgaagacttctacagctacctcaagcgctgcccggatgccggccggcgcttcctgttggcgatgaaggcgagcaacctggccttccacgagatccccaggctcctggatttccgcgggcgtagcttcgtcgacgtcggtggcggttccggcgaattgaccaaggccatcctgcaggccgagcccagcgcccggggcgtgatgctcgaccgcgagggttccctcggcgtggcccgcgacaacctctccagcctgttggcaggggagcgcgtcagcctggtgggcggcgacatgctgcaagatgtagcgcggcgcgaaatttggcgcggatttgcgcaataa

SEQ ID NO: 337016 - DNA, 225 bp, Pseudomonas aeruginosa; identical to SEQ ID NO: 327671

SEQ ID NO: 337017 - DNA, 288 bp, Pseudomonas aeruginosa; identical to SEQ ID NO: 327670

SEQ ID NO: 337018 - DNA, 1149 bp, Pseudomonas aeruginosa; identical to SEQ ID NO: 327669

SEQ ID NO: 337019 - DNA, 297 bp, Pseudomonas aeruginosa; identical to SEQ ID NO: 324251

SEQ ID NO: 337020 - DNA, 159 bp, Pseudomonas aeruginosa; identical to SEQ ID NO: 324252

SEQ ID NO: 337021 - DNA, 1377 bp, Pseudomonas aeruginosa
atgtcggtaccccagcgtgccgttcagctcactgagccgagcgagttcctcaaggaacatcccgaggtccagttcgtcgacctccttattgcagacatgaatggcgtggttcgcggcaagcggatcgaacgcaacagtctgaacaaagtcttcgaaaaaggtatcaatctccccgcttccctgttcgccctcgatatcaccggctccaccgtagagagtaccggcctgggtctcgacatcggcgacgccgaccggatctgctacccgatccccggcaccctctccatggaaccctggcagaagcgcccgaccgcgcaactgctgatgaccatgcacgaactggaaggcgagccgttcttcgccgacccccgcgaagtcctgcgccaggtggtggccaggttcaccgagatggaactgaccatcgtcgccgccttcgagctggagttctacctgatcgaccaggagaacgtgaacggccggccgcagccgccgcgctcgccgatctccggcaagcgtccgcagtcggtgcaggtgtactccatcgacgacctcgacgaatacgtcgagtgcctccaggacatcatcgacggcgcccgcgcccagggcatcccggccgacgccatcgtcgccgaatccgcaccggcgcagttcgaggtcaacctcaaccacgtcaacgacgccctcaaggcctgcgaccacgcggtgctgctcaagcgcctggtcaagaacatcgcctacgaccacgagatggacaccaccttcatggccaagccctatccgggccaggccgggaacggactgcacgtgcatatctcgctgctcgacaagcacggcaacaacatcttcaccagcgaggatcccgagcagaacgccgcattgcgccatgcgatcggcggtgtgctcgagaccctgccggcctccatggccttcctctgcccgaacgtcaactcctaccgccgcttcggttcgcagttctacgtgccgaacgcgccgagctggggcctggacaaccgcaccgtggccctgcgcgtgcccaccggcagcccggacgcggtacgcctggaacaccgcgtggccggcgccgacgccaacccctacctgctactggcagcggtgctggcaggcgttcatcacgggctgaccaacaaggtcgagccgggcgcgccgatcgaaggcaactcctacgagcagatggagccgagcctgccgaacaacctgcgcgacgccctgcgcgagctggacgaaagcgagatcatggcgaagtacatcgacccgaagtacatcgacatcttcgtcgcctgcaaggaaagcgagctggaggagttcgagcattcgatctccgacctcgagtacaactggtacctgcacaccgtgtga

SEQ ID NO: 337022 - DNA, 675 bp, Pseudomonas aeruginosa
atggctaacctacatcttctggctcctttgaggctagatagccctgcggccttggcgggtgcgtttcgcgtcgtccctttgggcgattttcaagccaacgatggccgccccggcgtagggcagagatggcagcttaatgaggttcgagggcaagccatcgttcaagcgctactgaatcggggtgatgctctggtgatcgattacgagcacaagacgttgcaggcaggtgaagtaaacccggctgccggctggattaagcggatggaaatgcgagtagacgggttatatgccgtggacgttcagtggacagatcaggctaggcaaatgatccggggcgggcactatcggtatatctccccagcccttacttacgatgcggctagtcttgaggtaactgggcttcatagtgtggctctgacaaataaccctgccctcaacggtttaaccgatcttagccttgtagcacttagtgcccttccgccagaacagggtggtaagttcgcaggcttgagcctggagtcccgtgcctatttggagcgcatgataggcgtgccacttgagcaagccgccgctgagttggatattctgaggtacgtcccgctagcgcctgaaggtatttcggatgctgactggcagaagctataccaccagtttgggacgaccttgcttgcgtga

SEQ ID NO: 337023 - DNA, 969 bp, Pseudomonas aeruginosa
atggagcgtcacgccctggctgtataccgtttcgtccaccgcttcgaacgtgtcgtagaaccagacccgagccccggccaagtgcttggccggaacggtatcggcgcagccgcgcgccagggtgacagtaccgctggcgtaattgaccgcatcgacccggacgatttcgtcatccaccacggccgcctggccgacagcgacgtcctccagccggctggcgttcgtcaacgtgacgacgttcggaccggccgccagcggcagctcagcggcgagcaggccggtcgggcaccagtcgccggttccgcgatccacgaacgcgccagaactgccgacgcggtcggtcaaggtgtagctctgcgacaggctggtcggcgcctcggccaaggcggcaaggtacgacgcggacacgtccaggagctgcaagttggccggatcgatcaccccggccagctcgcgatatggcgcctcgatcaaacgccgcacagtgatcgcccgaggcgtccggtcgggtggagtccagcccggtggcggcggtgccacgccggttgtcgccggcagattgaactggtcttggacgaccgtcagggtgatcttgccgtcgccgaggaagttgtcctcgatccggccgaccctgacgacggtttcggggatgccgcgccgtgtcgaacggatgcgaaacggctggccagggttcaggctacgggcgcggcggtcgaatacgcctttatagcgtttcaggccggttgtcttcagacgcatttcccgctcaccgactcgcccggccagctccccggtaggcacgcccaggaactcgacttcctcagacgagcgccgcccctgcgaagcggcgaccgcgttgttgttgacgatgacctggcgctgcgcgccgtcggtctggtcgatgtacttgacgataagctggctcggcgcgagggaggtcgagccggtcttctcctgggtgatctctag

SEQ ID NO: 337024 - DNA, 219 bp, Pseudomonas aeruginosa
gtggctagcaatctcgaagtagtcacccaactgatggagtactcgcgctcaggtccattgatgcaagtgatgattttccaggccctggaccagttcagcagcggcgttctggccagcccggagggttccttgcgcaatgccattgtctcggaagaggcttggagagcttgcgcgaaggaaatccagcagaccctttccaagcacttgctggagcaatga

SEQ ID NO: 337025 - DNA, 252 bp, Pseudomonas aeruginosa
atgccacgcaagggcagcgagctgcagctcgacgtgacactgcccaccgtcgagagcacgccactgagtcacccggcagccgccaagatcctccgggcacgcctggatggcgtctggagtcccgagtcgatgctctggctcaagtccaactaccccgacggggtgctggaggaccagctcgacagcatcgtcgagcagttgcaggcggcgcccagccggcccgcgctgcgcgttgtgggaggtaactcgtaa

SEQ ID NO: 337026 - DNA, 1470 bp, Pseudomonas aeruginosa
atgaacgccgtactcaaaaccgaaatcgccgccatcgaaaccgccgcaccgctggaaatggccgacccgtccaagaacctgattctggttccgctgtcgcagttgctgccgcgccgctccaagcgcaacgcccgcaagatgccgcgcctgtccatccccgaactggccgcgagcattgcccgcatcggcctgctgcaaaacctgatcgtcatcctttccgccgatggcgaggcttacgaagtggtggccggtgatcgccgcctgaccgccttgaagctgctggcgaagaagaagcgcatccccgccgactacgaagtgccgtgcctgctggtgcccgatgcttcggcccgcaccgtcagcctcgcggaaaacctgatgcgcgagcagatgcaccccgccgaccagttcgaggcgttcgccgcgctggtcaaggaaggccggcccatcgaggacattgccgccgacttcggcgtgtccccgctggtggtgcagcgccgcttgaagctggcccacatcgcgccgcgcctgatggccgactatcgcgccggaaccgtcacgctggaacagttgatggccttgaccatcaccgacgaccacgccgcgcaggaagccgcgttctatggtgcgccggaatggcagcgcagcccgtccaagctgcgcgagcgcctgaccgagcgcgaaatcgacgccacgcacgcgctggtgcgcttcgtcgggctggacacctaccggcaggcaggcggcggcatccgccgtgacctgttcgcggaaggcgatgccggaacctacctcaccgataccgcagtgctggaaacgctggtgcgcgacaagctggcaacgctggccgaggacgtgcgcgccgaggggtgggcatgggtggaggccgtgccgcatctggcctacgaggaacggcaggcgttccagaacgccccgcgccatcgtcgcgagccgaccacccgtgaggcccgccgcatcgcctcgctggaaacccgcctcgaaaagatcgacggcgaactggaagaagcctgcgacgccgaggacgaagccaaagccgagaagctggaacagcggcgcgatcaggtggtcggggaactgcaagacgcggaggacgccttacagggctacacccccgaagtgcgcgaggtggccggtgccatcgtcaccatcgaccgcaacggcgaagccgccattcatcgcggcctgctgcgcgaagccgaggccaaggcgctgcgcacgctggaaaagctgcggcgcggtttcgacagcaccgaaggcgaatccgccaacgacgagcacgaggacgccgacgcgcccaaggccgcaagcctggccgatggctcgggctggatgcccgccatcttcaaggccgctggcccgcaggatgccgcgcaggaagaaggctcggagcaggacgccacggaggatgccgaggcaatggcggatgaacccgccgaggcgctggccgcttga

SEQ ID NO: 337027 - DNA, 315 bp, Pseudomonas aeruginosa
gtgatcgcacgcagttcctgcgacggttatgccgtgatgttttccgggggcgagctgtacagcagcgagaccggcgacgagaccctgctggcctaccagaagagcggcctcgccctggccgctggcgaaggcccgctggaggcgccccgagtcgcctcagccgccgctcatgttcatgaagcgcagcacctgcacctcgccggcggcgctgaattcatggcgcgccggcttgcgctggagcgcctcgccgatcgcttccagcaacggtccgtcgtgcagtgggtggcggcgcagcagcgcgcgcaggtcgagtga

SEQ ID NO: 337028 - DNA, 204 bp, Pseudomonas aeruginosa
atgactgatcgggccaaccgccagcacctgctggtatgcgaagcccggtactggctccggcgtggtgtcaccacgccggagaaagtcgccgagctgagagaaacccttaagcggcgaggggaaagcgccgtcgagcagttgatagcggagatgcgccaacagtggcaggcacggacagagtggataggtggtgaagatggctga

SEQ ID NO: 337029 - DNA, 309 bp, Pseudomonas aeruginosa; identical to SEQ ID NO: 327040

SEQ ID NO: 337030 - DNA, 2706 bp, Pseudomonas aeruginosa
atgaacgcagaagattccctcaagctcgcccgccgctttatcgaactacccgttgagaagcgtcgggtcttcctcgaaaccctgcgaggggagggaatcgatttctcgctgttcccgattccggccggcgtgtcttcggccgagcgcgaccgcctgtcctacgcccagcagcgcatgtggttcctctggcacctggagccacagagtggcgcctacaacctgcccagcgcggtgcgcctgaacggaccgctggatcgccaggcgctggagcgcgccttcgccagcctggtgcagcgtcatgaaaccctgcgtacggtgttcccgcgcggcgccgacgacagcctggcgcaggcgcccctgcaacgcccgctggaggttgccttcgaggattgcagcggcctgcccgaggccgagcaggaagcccgcctgcgcgaggaggcgcagcgcgagtcgttgcagccgttcgacctgtgcgaggggccgttgctgcgggtccgcctgatccgcctgggcgaggagcggcatgtgctgctgttgaccctgcatcacatcgtgtccgacggctggtcgatgaacgtgctgatcgaagaattcagtcgtttctacagtgcctatgcgactggcgcggagcccggcctgccggccttgccgatccagtacgccgattacgccctgtggcagcgcagctggctggaggccggtgagcaggagcgccagctggagtactggcgcggcaagctcggcgagcggcatccggtcctggagttgccgaccgaccacccgcgtccggcggttcccagctaccgtggcagccgttacgagttcagcatcgagccggccctggccgaggccctgcgcggcaccgcccgacgccaggggctgaccctgttcatgctgttgctcggcggcttcaatatcctcctgcaacgctatagcgggcagaccgacctgcgggtcggcgtccccatcgccaaccgcaaccgcgccgaggtggaagggctgatcggcctgttcgtcaacacccaggtgctgcgctcggtattcgacggccgcacgtcggtggcgaccctgctggccgggctcaaggacaccgtgcttggcgcccaggcccatcaggatctgccgttcgaacgcctggtcgaggcgttcaaggtcgagcgcagcctgagccacagcccgctgttccaggtgatgtacaaccaccagccgctggtggccgacatcgaggcgctggacagcgtggccggcctgagcttcggccagctcgactggaagagccgtaccacccagttcgacctgagcctggatacctacgagaagggcggtcgcctgtacgccgcgctgacctacgcgaccgacctgttcgaggcgcggaccgtcgagcgcatggcgcggcattggcagaacctgctgcgcggcatgctggaaaacccgcaggccagcgtcgactcgctgccgatgctcgatgccgaggagcgctatcagttgctggaaggctggaacgccactgcggccgagtacccgctgcaacgcggcgtgcaccggttgttcgaggagcaggtcgagcgcacaccgacggcgccggcgctggccttcggcgaggagcgcctggactacgccgagctgaaccgccgggccaaccgcctggcgcatgccctgatcgagcgcggggtcggtgcggaccgcctggtgggcgtggccatggaacgttccatcgagatggtcgtggccctgatggcgatcctcaaggccggcggcgcctacgtgccggtggacccggagtatcccgaggagcgccaggcctacatgctggaggacagcggcgtgcagctgctgctcagccagtcgcacctgaagctgccgctggcgcaaggcgtgcagcggatcgacctggatcgcggtgcgccctggttcgaggattacagtgaggcgaacccggatattcatctcgatggcgagaatcttgcctatgtcatctacacctccggttccaccggcaagcccaagggcgccggcaaccgccattcggcgctgagcaaccgtttgtgctggatgcagcaggcctatgggctgggcgtcggcgacacggtgttgcagaagaccccgttcagcttcgacgtgtcggtctgggagttcttctggccgctgatgagcggggcgcgtttggtggtggccgcgccgggcgaccatcgcgacccggcgaagctggtgaagctgatcaatcgcgaaggggtcgacacgctgcacttcgtgccgtcgatgctgcaggccttcctgcaggatgaagacgtcgcctcctgcaccagcctgaaacgcatcgtttgcagcggcgaggcgctgccggcggacgcgcagcagcaggtgttcgccaagctgccgcaggccggcctctataacctctatggcccgaccgaggcggccatcgacgtcacccactggacctgcgtggaggagggcaaggacgcggtgccgatcggccggccgatcgccaacctggcctgctacatcctcgatggcaacctggagccggtgccggtgggcgtgctcggcgagctgtacctggccggtcggggcctggcccgtggctaccaccagcgtccggggctgactgccgagcgtttcgtcgccagcccgttcgtggctggggagcggatgtaccgcaccggcgatttggcgcgctaccgcgccgacggggtgatcgagtaa

SEQ ID NO: 337031 - DNA, 1581 bp, Pseudomonas aeruginosa
atgtctgccgtttccacctcgttgttgcttttcctcaacctgctgaccccggcccaggccgcccagcccgtgccgctggccgatggccgcatcgagatcgctgccggcgagagccgccagcgctacctcgaccttgcccccggcgagttgcagttgctcgacctggaggtcgaccgcggccgcgtccgtctgcgcgccaccacgcccgacggcaaggcgttgcgcgcgacggagctggccggacgccagtcgctcggcctgcaggccggcgagcgccagggcctgcgcctgaccttcagcgccgacgaagacaccgcactgaccctgatccccacccagcgcctcaccccgcagaccccggcgcttgattcgccggcgccgcagagcccgaccctgcaacgcctgcaggcggagcttgcggaaaagcgccccggcgcgctgaaggcgttctggaagcaggtagcgaagcagggcacgccgctggtggagccgctggatgccgaacgtgtgctggtcaccttcctctggcgccagcagcgtcccggcgacgtgcgcctgctgtggccgaccccggaggtcaacacccgccgcttcgaggccctggccggcagcgacgtgcgctacctgagcctgccgctgcgccgcgacgcgcgggtttcctaccagctcagcgccgacctgccggacctgcaacaggccgatcgcggcaccttgcgcctggcgttgcaggcggcggcgcggccggacccgctgagccgtacgccgtggctcaacagccgcgcgctgccgcgggccgagcaggcctcgctggtgcagctcggcggcgcccctgccgagacctgggaccagccgcgcaaggacgtgccgcgcggcaaggtggagcgcctcggctataccagccaggccctggccaaccagcgccagctcacgctctacacgccgccgggctacgacccagagggccagcgctatccgctgctggtgctgttcgacgaggaccactacgcgcgcgacgtaccgaccccgaccatcctcgacaacctgatcgccgccgggcgcatccgcccgaccctggcagtgattgtcggcaatgtcgacgccagcagccggggccgcgagctgccctgcaacgaggccttcgccgacatgctcgcccacgagctgctgccctggttgcagcagcgctatgcattgagcgaggagcctgccgatcgcgtgctttccggttccagctacggcgggctggcctcgggctgcatcgcctaccgttatccggaacgcttcggcaaggtgctgagcctgtccggctcgttctggtgggggccggacgagcagcagccgcagtggctggtacggcagttcgccgctggcgagcgtttgccgctggtgttcttcctcagttccggcctgctcgaggagcccgaggcggacggcattctcggcagcaaccgcagcctgcgcgcggcgctgcaaggcaagggctacccgctgcactaccgtgagttccccggcggtcacgactacgcggcgtggagcctggagcttgccgaagggttgcaggccttgttgccggcgcattga

SEQ ID NO: 337032 - DNA, 222 bp, Pseudomonas aeruginosa; identical to SEQ ID NO: 323107

SEQ ID NO: 337033 - DNA, 852 bp, Pseudomonas aeruginosa
atgcgatccgacctgcacgaggccaaccggctgtcgtggaacgccgccacccgggcgcacaacagccacaaggccgaccaggccgccttcttccgcaacggcggttccacgctctatcccgaggaactgcaactgctcggccatctcgacggcctgcgcctgctgcatctgcaatgcaacgccggacaggacagcctgagcctggcgcgccttggcgcccgcgtcaccggggtcgacatcgccgacagcgccatcgacttcgcccgccagctgtcccgcgacagcggcatcgccgccgacttccagcgcgacgacatcctccgctggctgcccgtcgccgccacccgtggcgaacgcttcgagcgggtcttcgcctcctacggcacgctggtctggctctccgacctcaagcgctgggccgacggcatcgcccaggtgctggttcccggcgggcgcttcgtcctggtggagttccatcctttcgccctgtacttcgacccacactggcaaccggcctacgactacttcagccgcgagccgatcgccgagagcggcgtcagcgactacgtcgccgagtccggcgccagcctggcgccctccggctaccgcgccggcgtcgagaacttcagcaaccctcatcccagctacgagttccagtggggcctggccgatgtgatcggcgccctgctcggcgccggcctgcaactcgaacggctggaggaatacccctacgccaacggctgggccggcttcgacggcatgcgcgacggcggcggcggacgcatgctgccgcccgccgatcgtccgcgcctgccgctgatgtacggcctcagcgcaaggaaaccacgatga

SEQ ID NO: 337034 - DNA, 540 bp, Pseudomonas aeruginosa
atgaccgaagaacgcctgctgcgccgcgacgaaatccccctggtctgggagatcgaccgcagcgaagtgatcgaacacctgtattccgtcgaggccggccaactggtgctgcgccccgagttctacgacatgcgcggctggccggagggcgaggccgagcattacacgccgatcctgctcgactgcttcgaccgcggcggctggttcctcggcctgttcgaccagggccgcctgatcggcgcggtagtcctcgacccacaccgcctcggccccgagcgcgactggctgcaactgaagttcctccacctcagccacgcctaccgccgccgcggcctcggcgcccacctcttccacctcgccgccacccaggcccgccacctaggcgccagcgcgctctacgtttcggctacgccgtcgcagaacacggtggatttttatatgagactcggatgccggctgtgcatggaaccggatgaggagttgtatcggttggagccggaggatgttcatctggtctatgggttagggggtagcaagtag

SEQ ID NO: 337035 - DNA, 1149 bp, Pseudomonas aeruginosa
atggatgactctggttgtaagcttccagataaaaacggcctcgaaaagggaccgcctccaccagagggctgtgcaggaaatccggttaatatcaccaatggcaacaaataccaagttgaacacgacttaagtattccgatcccgttgacccgttactacaacggcctggacggcttgtggcgacattcgtattctgcgcgtataacacgcaagggtgatggcttcctactctaccgcgaaaacggaaaagcctcggagttcacgggatcgggaaaagatctaacctccatcacagacctgggcaggcttagccggttaccaggaaagtttagctacacctccgaactcaacgaagtgatggagttcgaccagaatggaatactcactaaactcaccaccaaggaaggtcgcaaatatcgtgtagagcgaggcgctaatcttacgattggcgacgagcatggcaacaagctcgttctctcggagggagccaaccatcaactccttcgcgctcagatagggggtatatccattgagtacacatacgacaaggaacagcgactcacatcggtaacacggacagatgggcaatacagcacgaaaacacagtacctctatgacgacccgaggaacataaaactacttacaggcatccaggataacaataatcgccgcttcgccacctgggcctacgacaaccaaggccgcgccatctccagcgaacacgccaacggcgccgaaaaggtctccctcgcctacaacgatgacggctccaccaccgtcaccaacgaatacggcaagcaggccacctaccgcttccaggtgatccagggcatcaaacgcatcgtcgccatcgaaggcgaaccctctcccaactgccccagcagcaattccaccttcacctacgatgaccagggcctgctcaccagcaaacgcgacaacaacggcaacctgaccacctaccagtacaacgcccgtggcctggagacctcgcgcaccgaggccgccggcactgcgcaggcgcgcaccatcacaaccgactggcacccgaccctgttcctcccggtgcaggtcagcgagcccggccggatcacccgctaccagtacgacgccgagggacgcaagaccggcgagaccgtcaccacccgctga

SEQ ID NO: 337036 - DNA, 1068 bp, Pseudomonas aeruginosa
atgagtccgcagttgatcggcgtgctggcagcttcgacgcagggcgatgcggacgccaagagcttgcagacgggagcctgggtggcggggaatgccacccaacacaactacctcagtcattggcaggaggagaagaagcggcaggaggtcgatggctgcaaggacaaacagctctgcaaaaccggaatagaagccaaatgggcaattatttcggcccagcaggatgtcggtatcgtcgtaggtgttggaggaggcatcggtctttcgacagctgaaaccgcagtgggtgtttatgagctggtcaagaactggagggaaacctatgcagctctggagcagttggccacttcgccagagttccggcagcagtttggcgataactacctgaaggggctggaggagcgcgccgcattcttgacccaggcatacgaggatgccggctggcaaggttcggtcacagctggtgtcgagggcggtaggttcgctgcggaacttgttggcgttctgacggcagtgaaaggtggcgcgcagataaccgccaagctgccaacagcagccaagaacctggtcaacgcgattgcggagtcacctgtttccggtagtatgagttcgcagctcggggcagtgggggatttgggtaagctgggtgggggtgcaaaaggaactgctcccactgtaactgccgaagggcgtattggtaactctgtatttaccgacgttaaccaaactgccaggcctgccgctcaagcgaatcccaatcagccgactttgattgcggaccgagtggatgcaaagattgcggctaatggaaaacctcacccgaatggaaatatggcggatgctcatgccgaaattggagttattcagcaagcatataatgcagggaaaaccactggtgcagatatggccttgaaggttgaaggtaaagctgtttgcagctattgccgtggtgatatcgcggcagcggcagaaaaggctggtttgaactctctacagataaacgaagtgactacaggaagaactctatattggaagcctggtatgcggtctttgagggagcttgaatga

SEQ ID NO: 337037 - DNA, 441 bp, Pseudomonas aeruginosa
atgatgctgtccctcgggatgttcgtcttcagcctgcacacgctggcctaccaagagttccagcggcagaccgagtggcgacacgccagcagcagccgcatcggtgcccagccggcgcgccagttcgtcggtcgcggcgacgacacgatcaccctgcccggcgtgctgctgccggagctggccggcagcgcgttgagcctggacgtgctgcggcagatggctgacaccgggtcggcctggcccatggtcgagggcaccggacgcatctacggcctgtgggtgatcgagcgtgtcaccgagacgcggacactcttcttcgccgacggcaccccgcggcggatcgagttctcccttgagctcaaacgcatcgacgacggccgcaccgatctgctcggttcggtcctcggtaccgccggcaacctgctgagacgcatcctgtga

SEQ ID NO: 337038 - DNA, 339 bp, Pseudomonas aeruginosa
gtggtggccgaactggtcgcggcccagcgccaacgctcgccgatgttcgaccagccgctgctggccatgctgggcgacctgggcaagagcgccggcgccatcggtgccctggtgctcggcgccagcgccccagcgcaggccatcacaatcgacaaccgtcccccggtcagctcggcgccagcggcagtcagcatcggcggcgacacctactacatcaccatccaggccggcgcgggcagcgacgccgcagacctgaaacgcacgctcagccaactgctggacgagcgcgaacgcaacaaggcggcgcgcctgcgcgcccgcctgcaggaccgggagtaa

SEQ ID NO: 337039 - DNA, 495 bp, Pseudomonas aeruginosa
atgaatccgctcgaccggctggaaccgctgatcgcccccccgcccatcggctggtggccgccggcgcccggctggtggctgctggccgccctgctgccgttgctcggttgggggctctggcgactgcgccggcacctgccgcggcgcaccatcgccacccgcggcgaagcgccgctggatccgctgcgcgaagcagccctggccgaactggccgcgcttgccaagccctacggcagggcttccgccgggccctggctgcaggccatcaacggcctgctcaagcgggtctgcagggcgcgctggccagatagcggcagccacgccctcagcggccgcgcctggctggcgttcctcgacaaccgttgcccggccgccggcctgacccgctggatgatcctggtggaaggcggctaccgcgccgactgcaccctcgacgacaaggccgtggacggcctcaacgccgccgtcgccacctggattcgcaagcatgtttga

SEQ ID NO: 337040 - DNA, 711 bp, Pseudomonas aeruginosa
atgagcgcgtggcgcgtcttcgcatgtctttccctcgtcagcctgctcgggctgacgggttgtgcggtccatccgccggcccagctctaccagttggacgtcggtgccgccgcagtaccgaaaaaggatggcggtgcggccgtcctgctcggcccggtacaactggccgactatctcaagcgcgatgtgatggtgcagcggcaggccgacggtattctcagcctgtccaccgacgcacgctgggccggcaacctggagaccaatgtcagccagcaactgctgcggcagatgtccagcgagctgggcagcagccgcctggcgctgttcccggaaaaacctggtttcaccccccaggtccaggtgatgctgaccatcagtcgcctcgactccggccccaagcagccggcggtgatcgaggcgcgctggcgcctgctggaccagaagggcgacctgaaggatagccgggtgttccacgaggaagaacggcaccagggcagcatcggcgaccagatccgtgcccagagcgacctgctcaagcgcctggcagcgcagttggccaaggacgtcaagccgatcgccgtggcggccgaggcgccgccgccggcgaccgcgcgcaagccggtggccaagccgaaggccaaggaagaggaaggtcctaaaatgccgctggtggtgccgattcgcaccgatgccgaggtctatcggttctga

SEQ ID NO: 337041 - DNA, 2838 bp, Pseudomonas aeruginosa
atgaagcccctcaaactctcccacgttcctggttgctgggtcagccagactctacccagcggccagggcgaacgccggggtatcgtcaaaatggccattgctaaagaagccgaagatcagcttcaggttcactggttcagtccggagaagaaactggcctatgtcgatgcatctgccgtgcgctcaggctttcaaaatggcatggacgtagtcgacgaaacacctggtagcggtgttcgctcactagggcagggcgtgatcatgcagcaacgtaccttggcgggaagcgagcaagtccttgtcgactttcctgagcgaggcgaacgccattggctgccctatcagtacctgcgtcaggtgaagggcgttaagcatcggtttgtcactgccagtaaaggcgaagcggtcgatgcggaacgcatgcgactgcgcatgctcgcccatgccatcaaggtatggaatgaaaacacgggggccctttctcacctagagattgaaccgctacctcatcagattcacttggtacaccacattatcgcctccggcaactacaactggttgatcgctgacgatgtgggccttgggaaaaccattgagaccggaatgctcctgcatgcgctacggcaacgagacctgatcaaacgcatcttgctggttacccccgccggcctgaccaagcagtggcaggaagagctgtaccacaagttcaagatcgaagactttgaaatctatggtgaggactttttcatcaacgaacctcgccaatggaagatgcacgactgtgtcattggctccatggatcgactcaagcaggagggtcacttggagagcctgctccaggctgagctctgggatctggtgatatttgacgaaggccatcgactcagccgtcgccagtacggccagaagctggacagctctgagcgctatgacctggcgaaaagcctacgtagtcaaaccgagcacatgcttttgctaagtgcgacccctcaccagggcatgcaagacaagtttgtcgcgctgctggaactgcttcgccccgagcgacgcaccgacctcatggctctcaacatcaagccagaaatcctacatgacatggtgttccgcaatcacaaggcggatgtaacggatgcagaagggaacttcatcttccaaggcaaaattaccagtgccttgcaggtgcccagcagtaaggaatccatcgaattcgataaaacccttcaggactatctgcgcaaaggctatgacgcgggtgaagcactggggcgaaccggtaacgccattggtttcgtgatgaccgtctaccgcaagctggcagcctccagcgcggcggctattcaccgggcgttgtgcaaccgccttcagcgcctgctcgacgatgaggccaacggactctcggatgaagagcccagagaccaacgttatctgggtgaatgggaagaacagttcaccagtgatgcccgcgagttcttcgctggtgaagtgcagctgcttaaagacttgattgccgaagcagcagcactgaaagcaaacgacctcaaactaaagctgtttatcgaggacatcatcggcaagatccacgctgccaatgccgatgagaaggtgctgatctttaccgaataccgcaccactcaaaactatctgcgcgaagcacttgctgaccactatggcagcgaccaggtcgagctcatcaatggctccatgcaacatgctgagcgacgcgaggccatcaagcgcttcgaggagcaaggccgctttctgatttcgaccgaagcaggtggggaaggcatcaacctccagagcaaatgccacgtcatggtcaactatgacctgccctggaacccaatgcgcctcgtacaacgcattggccgcctgtatcgctatggccagaaaaagaaggttgttgtgttcaacatccagcaaaccgacagcctggatcagaacatcgtcgacctaatgtatgagcgcatcgacagcgtggttaccgacctcgccgagattcagcggcatgagttcaacgaaggcttgaaggatgaaatcctaggccagctggccgagctaattgacgtagaagacatcctgcaagaggcaacaaaactcggcatagaccgcacccgtgagcgcatcgacgaagcgctgaagcaggcgcgtactgctgctgctaaacaacgagagctgtttgcccatgccgccaccagcgaccccaatgaactgcgcgatgagctcgaaattactgtcgatcatctctacagcttcgtccttgggatgttcgatcaattgggcattgaggtcgctgagcgcagccacaaagagcggcttttgcgtatcagattgtccgagcaggtgatgcgcgacatggggctatccccgaaggcctcgcggcgtatggatgtgaccttggatcgcatgctggcagccaatcgcccagacacccacatgctcgacctcaactccaagctgatgcagtacctgctgggcaaagcctgcgagtacgactttggcggtctggctgcaatgctcaaagcaccagaactagaagagggtgctctgcttggagccatgctgcgctggcaaggccctcagggaaaacggatgcggcaagagtttgtagccattcaggtgaacgatggcaaagccaagctgaaccctgcaaaggccagccaatggctgctgacacctgccgagcacagcccccagagccccgatactgatacctccaaattgctgttcaaagtcgctgaagaaatggctaaccagcgactggctaatgccagtaaccgctatctaatacccgagaatttggactgggcctccgcaggatggacacacatccactag

SEQ ID NO: 337042 - DNA, 213 bp, Pseudomonas aeruginosa
atggaacgtgtacaggtcggatctagtaacctcgcatcaatcggctatgacccgtcaactgaaacactcgaaattgagtttctcaatggtcgcgtctacgaatactacggagtaccagagtctatatataccgacctaatgggtgccagctctcacggaatatatttcagagctcacataatgaactcatttagctatcaaagaacccaataa

SEQ ID NO: 337043 - DNA, 1059 bp, Pseudomonas aeruginosa
  misc_feature (4)..(13): n is a, c, g, or t
atgnnnnnnnnnngccaaaaagcgatttttttagataaaacagtttctgaaaaaataagcagcattaccaccaacaacttcgacggtgtcaacccggataaagttacaagctcaacacctcttccgtacagcataaaaaaaatttggcatgagctatgtttcctagataatgtgaactggaaggataaggaccagacagagcctgcctacgccataaatggtttaggcgactgtgaaagccttatagcaccaaaatttcagcctccggcacctggaaataccccaccatttaaaggcggcgcaggtttaatgaagagacagcttgacttaatgaagtcaagactagcagacacacaatattcatttatgttagagcccggtgaatggggtccaaacaaagatggcgttatagaaaaagatttagacgcacttgttgaagggtggcttggccatgaaaagccaataacaatccttgacttgtcgggaatgccatcttcgcgactcagcctattacttggaactattctagatgtgctgtttgaggtttcgatatggggccgagagatgcaggcaggaatgagaaaaaggccgttactcttagttcttgaagaagcacacagatatctttccaaatctgaaactggtctcgcaaaagaaatggttcagcgaatttctaaagaagggcgtaaattcggtgttggcgcaatgctagtaagccaaaggccctctgaaattgacgaaacaattttatctcaatgcggcacgattatttctttaagaataaacaacaccactgacagaggcatagttaaatccgcaatgtccgaaggtttatctggcatagtagacactctcccaatcctaagaactggcgaagccataattgtaggagaagctgcaaagctacctacacgctgcagatttaacttattaccagacgacaagtatcccaacagtaaagacccatgcgttgcggattcttggaaaaaaccaaaggaagtagaaaactataaagagctaataaatagctggcgttctcaaaccaacaatcaaggatag

SEQ ID NO: 337044 - DNA, 741 bp, Pseudomonas aeruginosa
  misc_feature (711)..(720): n is a, c, g, or t
atgaataattcccctacattgcttggcactattagcgccgtctcaagttcctcggcagttgttgaactcgccgattccgtggagtcaggcatagtcatactggaaggtagaaactatcgagttggccaggttggtagctttgtaaaaatactgcttggatataataacctgtatggcgttatcgccggctccagcgagtcgtctcagttagacgatcaagatggcatccatcttgatcgtcgctggataaaaatcgagctcattggggaaatagttgccggtgagtttgaacgcggcattagcgagtaccctagcataggtaatgaggtacacatagtcgtagacagtgacctgaaaaaaatatttggcaaggacattgatggtcactttaacgtcgggacactttcgagctcagacggcataagcgttagcttggacttagacaaactagttacaaggcattccgctatattcggatcaaccggctcaggaaaatccactagtacagccagcatattgagatccatggtcacagcggcggaaaaaataaacatgccttccgctcgcatactacttatagacatacatggggaataccaatcagccctaggcgacatcgctaatgttttttcagttcttcctgacgctgagaacaagctatacgtgccttactggtgcatatctccgacacacctaatggaatttctatgnnnnnnnnnngccaaaaagcgatttttttag

SEQ ID NO: 337045 - DNA, 1245 bp, Pseudomonas aeruginosa
atgagtgattcgacacataacccggaccagtatatgtttggcttccgtcagctggctagtaacggaaagaagaaaattggtgttcttatgggagcaggcgctccggtaagcattaatatcgggtcctcaaatgacgactggatatcactgatccccaatcttcaaggattaacaaaaaccgttaaagagaaactttctgccaaggaattgaaagtctatcaagatcttgagaaatcaattctcagcccaaacctagagaaagtgctttcaaaaatacgagcccttaatgaagtcattggcgactcaattgtttatggctgtaattcaaccgaattcctagaactatctgaaaaaatatgcaacctaatcagggatgcagtaagcaaagaattgccactagggcaaacaccctactcagagttagtatcttggattaatggcgtaaatagaaaacatggcgtagaggttttcacaacaaactatgacctgctgctagaacaagcactggagcgctctaagacaccgtatttcgatggctttagtggtgcaagagatgctttttttgacccgtcaagcatttctaaaaacgaccttccttcacgatgggtaaggctatggaaacttcatggatctattgggtgggagaaaaacgataaaaatgaaattatcagaatcccacgttccaacaacgcaagcatggtttacccatcacacatcaaatatgatcaaacccaagccgcaccattttcttcattatttgaacggctaagaaatttcattctcgagcctgatagcctattaatttcaactggcttttcattcgctgacgcacacatctcatcacgattactggaaagcttgcaggccaatccctcttcagccctattagcgtttcaattcgggaaactcgaatccgaaacatacataagagatctagcactaaaatgtcccggcataagtgcatactgtaaagatggtgccattatcaatggagtggaagccaagtggagaataggcgcactgccaagtaaaggctggagaaacataagaggcgagtactatagtgaaggaaactttttattgggagactttagtcgactagcgagatttctagcaaccgccggaggcgacttttcaagtaacacaataagagacccgatagacatcgaaactcttattgcagttgccggcgcccaaccagccgaggctgaagaagattcacctgaaggggatcataatgaataa

SEQ ID NO: 337046 - DNA, 510 bp, Pseudomonas aeruginosa
atgtcgcaactgtccttttcctcgttcgatgcctcgctgatggtgcgcgatgcacagggccgctacctgctggcgacggccgaccaaattctggaggccgcacgccaggccatcgagtacaagatgcagcgcggtgcgtcgttcagttcgccggtggcggtcaaggagtacctgagcgccaagttggctggtttcgagcatgaagtcttcgctgtgctgttcttggatacgcagcatcgcctgatcgaatacagcgagcttttccgaggcaccatcgacagtgcatcggtgtatccacgcgagctggtcaaggaggcgctgcggctcaatgcggcagcggtcatcgtttcgcacaaccatccgagcggcaaccccgaaccgagcggcgccgacaaggtactgacccagcggctcagggaggcgctggcgctggtggatgtccgcacgctggatcacatcatcgtggcgggtggcagcaccatatccttcgccgaacgcggtctgatttga

SEQ ID NO: 337047 - DNA, 315 bp, Pseudomonas aeruginosa
atggccaacatcggcaccttcaccgcagacaaagacggcttcaccggcacgcttcgcaccctgacgctcagcgtcaaggtcaagctggttcccaacgacaagggcagcagcgagaacgcccccgacttccgcctccaggccgccggccacgacatcggcgcggcgtggaacaagaccagcgaagccgggcgggaatacaagtccgtgaccctcgacgatccttcattcccggctccggtctatgctcgcctgatcgaaggcgaggacggcacgcacgatctgatctggtcacgcagcaggccgcaagcggcctga

SEQ ID NO: 337048 - DNA, 2157 bp, Pseudomonas aeruginosa
ttgggtcaggatcgaactcttccagaccgacgtgatgtcgaaggccgacaccgcacgcactcgcgccagatatccacctgcgtagatgccggtcacatcgacgctggtggtgccggcacgcggcaggcggatccagttgccgctgtccttcttccattccacgtcgtaggcgacggcgccctccactgccggccagatgatcgtcatggtgctcaccgccagcccctggtcgattgtccagcgcgacgagagcgtgacgctggccggtggctgcacggtggtgaccgggatgatgctgatcgggcgctcctccagccgtgcgccggtatcgatgtggtcgaacttgctcggctcgtactgcaggccgttgatggtccactggccgttgtcgtcacgcttggtgctcatcacccgatagagctggacagccaggtcatcggcgtcgagcgcccagcacagttccggctccggcgcctccgagtaggccgcggtgacggtgacggccttgccgttgaccgactgcaccgtccggccctcggcgcgcccgctcggcaggttgatgatcaggcgatcaccggccttggcttgagtgacgcgatcgagcgttaccacgcggccagcaacagccgagatccggccgccaatctcgcggccggccagcagagagtcagccaccgggatgatgtagcccggcagcggaatccggccttccataccggtggcgaaggtgatggtgcggtcctgcacgctggtcagcaccgcccactttccgcgccgctgcgcctcgctctctcgcgtacagccgatggcagacagctcaaccgggttgtcgccatagcgacgcagcaacggcgcgtcggaatagcccgtcacgtcggtgtcgtagttgttcgccgggttgtcgtagctgaccagggcgcggctatatctggtgcgagccgaggcggcgccgtaggtcatcttcccgtcaatcacattcgcccgggtgaacacgtagtcgaagtcggcagtgcgcggcatgtcggcctgcgacacaagctggccctgcgcccaatagctcatcccccgatagatcgccgcgatatcccgcagcagtgtccatgcctgggagcgcgactgcaggttcagatcacacagaaagcgcggctcctggccgcccttcccgtctggcaccaattggtcgcaatactgggcgatcttgtagagctcccacttgtccaccatccagggcttgatccgcttgcccaggccgaagcgcgcgttggtgctgatgtcgtaggtgatccacgcgggattgttggtccaggcgctcttgaaactgccatcccagacgccggtgtacgtgcgcagctccgggtcgtaggtggtcggcacttggaccttgcgggccttgcactcgacggtgacggccggaatgttgctgaactgctctgcgctgaactcgatgtagagcagagctgtgtttgggtagcgcagcttcgcgtcgatcacctcagtcagaccggcgatcagcatggtgtcggcgatcaagctgctgttctggttcggcgtgatccggcgcacgcgtacctgccagccagtggtcgccgccggcaggtcgatgcgctggctccgctcatagcggctggtggtcttgccgtcgacagcatccagcaacacctgctggtaggcgccgccgtcggtgctgacgtctacggcatactcgatccggtagccgttcacgtccccactgctctcctgcttctgcagggccggccaggcgaagcgcaggcgcacggcggacaactgggtgttggtcaccgaacgcacccacggggtgtcgctgcgcagctccacgttcaccgtggtctcgttctccaccgaggggatgccggggatgtagtcttgatcgacactgccgctgcgccattcccacttcacgttggggaagttgacgttgccgctggcgtccatcagcggggtgttgtccaggtagatatcccggtcagtgggcgtttcagcaaactcgccctcccccaccgccagcaacagcttggcggtggccacggactgcaagctgtcgcgggcgatcgacggctgcttgggcttgctgctgccgcccttgcggccggtgaggtgctgctgaacgtcggcgcccatacgtttctccaggcataa

SEQ ID NO: 337049 - DNA, 837 bp, Pseudomonas aeruginosa
atgaagcggattcccgctgctgcaatgctgtgcctgctcgccctcctggcgggctgttcgaaggtgcctgccggcaacgtcggcgtgatcgtcaacctctacggctccgagaagggcgtggagacgcgcgaggtcggaactgggcgctactgggtaggcgtgaacgaggaactctacctgttccccaccttcacgcagaccgaaacctggggcggcgaggaagcgatcagcttccagaccgttgagggtacgaaggttggcggcgccgtcggcatcacctactcggtatcccccgacaaggtgacgacgctgttccagaagtaccgggcgggaatcgacgaaatcacgaacaagttcctgcggaacatggtgcgcgatgccttcaacgatgttgcctcgaagcttccagtcgagagcgtctatggcgccggtaaggcggacctgctgctggccgtcgagaagcgcgtgcgcgaccaggtggcgcccatcggcatcaacatcgagcgcatctactacgcatccgacctggtcctcccgccgcaggttacgcagagcctgaacgcgaagatccaggccacccagatggccgagcagcgccgtaacgaggtcgcccaagccaaggcagaagccgacaaggaacgcgctcgggcccaaggggaggcggacgcgaagctgaccctggccaccgccgacgcgaaggcgatcgagatccgcgcccaggcgctgcgctcgaaccccgacgtcgtgaccctcaatgccgtcgagaagtgggacggaaagctgcccacctacatggccagcggctccccgcttcccttcatcggcatcagcaaatag

SEQ ID NO: 337050 - DNA, 204 bp, Pseudomonas aeruginosa
atgaatgatttcagtgaagaaaccaggcgagaagtcatgaagttggctgtgcagttggtgacgacttatgtcactagtcaaaaccagatgctggactcccgagaacagtactggttcggcatcgaggaaagagagagcactccacccttgcccgaccttatcgagggagtctaccgtcagctcttgggtatgctgggtaagtga

SEQ ID NO: 337051 - DNA, 195 bp, Pseudomonas aeruginosa; identical to SEQ ID NO: 333000

SEQ ID NO: 337052 - DNA, 2211 bp, Pseudomonas aeruginosa
atgagcgcgaacgttcgtgtcagcatcgtcatgccgacctacaagctggagtacttcgaggacgccctcgacagcgtgctcgggcagacctatccggccctggagctgatcatttgcgacgacagcagcgacgagcggatcgctacgctggtcgagcagaagcgcgcctccgcggcgttcccgatccgctacttccgtaacgagacgcgcctcggcgagctgggcagcacggcgaaaggcatccgcctggcggagggcgagtacgtcaagtttctccacgacgacgacgtgttgcttcccgagtgcgtcgaggcgttggtgggagcgatggagcgcgagccgaacgtggtcctggcctcgtcgcggcggttgcgtatcgacgaggaagggcagccgctgccggacatcctggcgacctgcttcccgttcgctggcgacgtcctgatcgacggtcgcgagctggtctcgttcctcgccgaccacaccatcaacttcatcggtgaacccagttgcctgatggcccggcgcgatgcgctgctgcagatctgcgagcgcctgatgatgctcaacggccgggccatcgactggatcggcgacctggccatgtgcgcgcagttgctacagcgtggcgacctggcgttcctgtcgcggccgctgacccgtttccgcgtctcccgccagcagttcagccagatcgggcgcgaccagcccggtatcggcgagcagggccatgccgacttccgcctggctatccgcgaactgggttggtatcgccaggccgccgacaaccgcttcgtccgggtggcaccgatcacccgcctggacgcccgtgtcttcaagccggtcaacctgctcgccgcgctgaggcgggcggcgggcttcggtagcgtcacgctgtcgacctggctggaggcgcggcggccggatgcggtgcagaaggtgctgatcgatcgattcctgcaggagcagggtggtgggccgcgcttcgcggtgctggtgctcgatgcccacggcgataccgaggccgtggagcgtaccctgcagagcctggagcacgtcaattcgtatccacgtgtcgagagccacctgttcgcgccgctgggcacgagtccgcggaacggagcgatgctcttcgatccagaggtggggccggtgccgacgatcaaccaggcgcttgcccggcttgataccgactggttgctcctggtcgaagcgggtgtcgaattcactgtcagcggcctgctggtggcggcgctggacctgctggcggcaccggagagctgccaggcggtgtacgccgacgaactcatgcgcctggatgacggcgagctgggcgcggcgttgcgcccggacctgaatctcgaccttctgctcagtttccccgccggcctgtcccggcactggttgttccgccgcgagccgctgcttgccacgggcggattcgacgagaccgccggcgaggctttcgagctggcctaccagttgcgtctcgtcgagcagcggggcctgggctgtatcggacacatcagcgagccactgctgtctggcccagcgctgcgcctgcaggacagcaccgccgagcgtgcggcgatcgaaggccacctgcgtgtccgtggctacgcgcaggcgacagtcggaagccggctgccggggcgctacgagctggactacggccacgccgggcaaccgccggtcagcatcctggtgctggccggggagcgcctggcgcagctccagcgttgcgtagaaaccgtgctggagaataccgcctatcccaactacgagatccttctgctggaacagggtggcgaagcggccgacgttcgcgaatggctgctcgccgtcgaaggcatgggtgtcgagcaggtgcgggtgctgcgaggcgatgggcagttgtcccgtggggctctgcgcaacctggcggcgtcccgggcgcgcggcgaattcctgctctggctcgatgccggcagcggcatcctcgacaaggattggctgcagcagttactcaaccatggccagcgtccggaagtcggcgcggtaggcgccaagctcctggcggcggacggacgggtctgccacgccggctggctgctcggtttgtgcggaccggccgggcggccttcgaagggcgttcgcacgaggacgccggttacctgcagcgcctgcaggtggaccagaactactcggcggtggctggcgaatgcctgttga

SEQ ID NO: 337053 - DNA, 195 bp, Pseudomonas aeruginosa
atgaaacgggaggaattcgagaaacgcatggccggcgtattcgacctgtctagctacgtcgatgaccagggcaacattcgatatttcgacagcaacacacaggctgcttgggatggatggcgatgggcgatggtggttttccagccaattgaagcagaacggtatggagagttgaatgagcgacgcacccattga

SEQ ID NO: 337054 - DNA, 333 bp, Pseudomonas aeruginosa
atgaacgaccgcacactactcgaactggcggcgcgggcggcggggattgatccagtcttggctgaaccgatcaatttcagtactggggttgaatattactggaacccgcgtgatgacgacggcgacgcgctgaggctggcggtgaagttgcgcatggagatcgatcacaatcatccagccgacgagagagcatgggtgtcagtgcgcacccaaggtgagcgcacttgcgcagtcgaggagttcgatgatgaaagcctccgcgccgccgccacccgcatggcaatcactcgcgccgccgccgagatcggcaagtctatgggaggtggggagtga

SEQ ID NO: 337055 - DNA, 552 bp, Pseudomonas aeruginosa
atgaccgatatcaacaagctgagggaactggcggtgcgtgctcttccatttgcaccaggggaatggttcgtggagaacggaatcgaccaagtgcgcgattgcgcgaacgatttcgtttgtgagacgggcgaggatgatccgatcaaggcatccttcatcgccgccgccaatccacaagccattctcaagctgattgccgaggtggaacgcctgcgcatcggactaaaaggcgatttcgacctagacgcatggctggaatggacgcgagagaaagaccagatcaaggcggaaattgaggcactgcgcaggttcgccggcgaggcatatcaagtgctcggcgctctggacgccccagagaacgttctggacaacgcttccgatgcggccaatggggtgccactacggcacgaaacactactgccgttcttcgctgaagactatgagtccatgcggaaggacgcagagcggtatcgtttttatcgccaaggctttgtctcccctagcgaacttgacacaaatatcgacgcagccctagaaggagcaacgcaatga

SEQ ID NO: 337056 - DNA, 213 bp, Pseudomonas aeruginosa
atggaactgcatgacggtgacgcgaccttcgtaggttcgttcaacaaagtcggatggactgatgatggtcataagatgaccttcggttttcgtccgccacgcggcgagcagttcgtcatcatgttgctcggttccgccaagaaagacgcaactgacttcgacttagaggcggcgctcaaccgcctaggcttctatcggagggaagagtcatga

SEQ ID NO: 337057 - DNA, 318 bp, Pseudomonas aeruginosa
atggagcaagcaatgagagaagagtttgaagcgtgggtctgggacatttacgaagaaacgctctggtttgacatgaacagagagttcgttctgaagcgcaatggcgacgagtacttcggcaacttcctgaatgatcgatgggaagcctggaaagccagccgcgcggctctgagggtggagttgcctgagcgtcgcgatcctttgaactcgaccggagacgatgagaacccaagatctgccggcttcaacgactgccttgagcgcgtgaccgaagccctccagcaagccggaatcgaggtgaagcatggaactgcatga

SEQ ID NO: 337058 - DNA, 147 bp, Pseudomonas aeruginosa; identical to SEQ ID NO: 332965

SEQ ID NO: 337059 - DNA, 291 bp, Pseudomonas aeruginosa
atgcgcacgaaaaccttccgcccgccgcgccggcacgagatcgccggcctccgctactaccgcactgcctcggcctacaactggctcgggatcacgatggcgcacccgacccgagcaatccagttgctgctcgaacagtgtgagccagacgtgctctcgccgatgttcaacatcgagatcgacgcgatcctgcgtcaggccgatgagtacgcaaagaccggccaggtgctcgagcgcgagcaactgcgcgaaatgctcatgcacctaatcgccaaagcggcgggcgactga

SEQ ID NO: 337060 - DNA, 210 bp, Pseudomonas aeruginosa
atgaccgaaacttccagcgtgctgaccttcgacgacctcaagcgtatcaccggctacgtccggcgggccgacgtggagcgagccctgcacgagcagggcatccgaactttccggggccgcgcaggcccctggaccaccgtggagctgattaaccaggccggcgggctgcagccggcgactcaggagcagtacggcgtcgagattctatga

SEQ ID NO: 337061 - DNA, 207 bp, Pseudomonas aeruginosa
atgactgatcgggccaaccgccagcacctgctggcatgcgaagcccggtactggctccggcgtgggtacaccacgccggagaaagtcgtcgagctgaaagagaccctttacaaaaagcgcggcgaggaggccgtcacccggctgatcgaggaaatgcgcaggcagtggggtagccgccatgagtggcagagggggccggatgaataa

SEQ ID NO: 337062 - DNA, 369 bp, Pseudomonas aeruginosa
gtgaaagcactgagcattcgccaaccatgggcctggctggtcgccaatggccacaaggacatcgagaaccgcgactgggcgaccaacttccgcggccgctttctgatccacgcagccaagggcatgacacgcgacgagtacgaggaggcccacgacttcgccgcgtacaacggcgtgaccatcccagcgccgcacgaactggagcgcggcgggatagtcggcgaggccagcatcatcggctgcgtcgatcgcagcaactcactgtggttcttcggccgatacgggttcgaactggctgacgccaggccactgccgttccagcccatgaagggccaactggggttcttcgaagttgaggtagcgcaatga

SEQ ID NO: 337063 - DNA, 177 bp, Pseudomonas aeruginosa
atgcacgaattgctgaagatgctggacagcccgcgcagcttgctgaatttctcgctggcaattctggttgtcctgactgtgttcttcatgttgaagagcagcgcgcaagctgcttcgcaaccagcctcctccctttccacgtccatggaagcacactcaagggggaagcaaccgtga

SEQ ID NO: 337064 - DNA, 1056 bp, Pseudomonas aeruginosa
atgagcaaacgtcgcagccaccgccgccagcagccagttacagtccagtccgcccaggaaggcgagttcatcccgcgccagggcggccgtgccgaggccttcaccttcggtgacccgatgccggtgctcgacggccggggcatcctcgactatctcgagtgctggtcgaacgggcggtggtacgagccgccgctgtccatggaggggctggccaaggcggtgggatcgagcgtttacctgcagtcgggcctgaagttcaagcgcaacatgctggccaagaccttcatcccgcaccgcctgctcagccgggcgacgttcgagcagttctccctcgactggctgacattcggctcggcatacctcgagcagcctcgctcgcgcctgggcacgcggatgccgctgcaggcgccgctggcgaaatacatacgccgcggcaccgatctggagacgttctaccaggtgcgcagttggaaggatgagcacgaattcgagaagggcagcgtgatccagctgcgcgaggccgacatcaaccaggaaatctacggggtgccggagtggttctgctccctacagagcgctctgctgaacgagtcggccacgctgttccgccgcaagtactacaacaacggcagccacgccggcttcatcctctacatgaccgacgccgcacaaaacgaggaagacatcgacgcgctgcgcacggcgctgaagaccgcgaaggggcctggcaatttccgcaacctgttcgtctatgcgccgaacgggaagaaggagggaatccaactgatcccggtgagcgaggtggcggccaaggacgaattcggctcgatcaagaacatcagccgcgacgaccagctcgccggcctgcgggtctatccgcaactgatgggggtggtgccgcagaacgccggcgggttcggttccatcagcgacgcagcagcggtctgggccagcctggaactggagccaatgcaggcgcgcttgcagcaggtcaatgagttgatcggggaggaggtcgtgaggttcgcgccattcgacgcgcctggggagaagtaa

SEQ ID NO: 337065 - DNA, 852 bp, Pseudomonas aeruginosa
atgagtgccgcgcagcaactgatcccagttcccttctacgaagacacgctggttctggtcgggcaagccaacgagccctatgtggcgatgaaaccggtggtggagaacatgggactcgcctggcaagcccaacatgtgaaattggcggaaaagttcggttcagttatcacgataatcgtgacaactggatctgacggaaaacggtatgacatgacctgcctaccgttgaagaaactccccgcctggctctattcgatcaaccccagcaaggtgaagcccgagctgcgcgagaagatcgtccgctaccagaacgagtgcgacgatgccctatggaactactggactaagggctgcgccgtccgcggcgatgccccgaacaccactcagcgcatcgcactgtcccgccataggctcgccctggccaaggaactctacaagacccgcgatccggctctacggcagaccatccaccagcagttggatgaggtttcccgcgccatgggcctgcctaccccagaaatcgacagcctcggggcggccacgccaactgcaccggatgtgctaaagggcttctggcaggcgctggcgtttctggatagcaagggagtggcgtacaaccattcgcgggcggccaacttgctggcagtgaacttgcctgagttggcccgcctgctgatcgagcacgggcacccactacgcttcgacagcgccctgcgtcaggggctatggctgagcagcgcaccgcgctgcctgcacaagaaccaccccaccaaaagccgtctcgtcgacaaaactgtccgctgttggatatttgccatgcatccaaccgcgaaggagttgtctgaagtatga

SEQ ID NO: 337066 - DNA, 165 bp, Pseudomonas aeruginosa
atgaacagccttcgccacctgctcagccgcctggtgcatacccctgatgaacaggtcctattgctgtactatcgccagcttagccacagcgatcagagcttcattcgtcgaactgtccaagccttggtgcagtgtccggcagtcccaaagggagagaaagaatga

SEQ ID NO: 337067 - DNA, 219 bp, Pseudomonas aeruginosa
atgtccgaaaagcgcccatacggtctgaccgaatacgaccatcttcgcctcaccaacgcacggaacaccctacgcctgttggactatctcgccgcagcccgccaccaagaggccatcgagccggagctgctgagcagtgcattctggctgctggccgaacatctcgaccaagtactcatcagttccgaacaggcacctgccgggagggcgcgcgcatga

SEQ ID NO: 337068 - DNA, 1047 bp, Pseudomonas aeruginosa
atgaagacccaggaagaaattttcgagatcgtaagaacagcacgccaacggatgaaggagctgccatccagaaggctaatcaagtcgaccgatgatggttatgtgcgcgaatacaaccgcatggttggcgatgagggggctaatccagaggagctatggtcagcgatctgcgcgacgcaaagtaagtccacatatcggagaagagtggccgccacaatgcactgttgtcgcgttcagcttcaggaagcattgcggagccaagatgcggcccagcgtgcgggtgatatgggcgccctcagataccaagtggcagtgatcgaagaggtaatcggaatcctgaatattgttgaaaagcacaaagggcagtgccctctggtaaatgcagtaagacggaagtcaaagcgatctgacttgaaatacctgcctggcaattggcgggatcaattgcataagcaacttgaggggagtaagtatgaactggcttatctggtggaggcagtgtcgggatgccgaccaggcgagcttgagaaaggtgtcaaagtgatttgctccaaagagagtgatctgttgaccgtccgcattgacaatggggtcaaggtcaccgaccagaaaggtcagccctggcgcgagatcacttatcggatcgaccagagcccgctggttagggctctctttgaaatctgcagaaatgttgtgtcggacacggaaagcatcgagacggttgtctgcatagagaaaactaccaactggcgtgcagcgttgtcgacggctgggcagaagctgtggtcgagagtgggattcagggtctgcccgtaccacctcagaaatgccgcggccagcgactggaagcgggcagggctgagtgaaggagaaatctcggccgctctaggccactgcgtaaacaagacctccagtaactatgggcagttccagatcggccagaggaccggcggattgagccctgtcgaaatcagagctgcgcgtcctatcatggatactcggactctatctgcccaagtaggccgggccttccgtggtcctaaatga

SEQ ID NO: 337069 - DNA, 255 bp, Pseudomonas aeruginosa
atgccgcgccaggcccgggcggctcttggcccgggcctggccaccagcgccggcagggacgccggaaaacagatccaccgcttaagattaccagtcccaaccttcaaccaactgcagcaaacaacacgctccgcaaattgttcaaataattggcccctgcctaaccggcacagccggctgaacgcggattttctccctgatttcttggtaaatcggcagctgaaccccttcacggacctcgaaagacaccactag

SEQ ID NO: 337070 - DNA, 441 bp, Pseudomonas aeruginosa
atgacggagccagtaacgaatatctcaagccccttgatcaccttggtaagcacaccactagcccaagctgtgccggaggcgctgatcgaggtcgcgctgctcgtctggtatgaccccgatcctctcccctcgctgaagcgcaccctggacgctctggagggtgtcgagttgcgccgcgcgctttacatcctggatcgcctgcgccgctacggcacggcactgaccaagcagcgctaccaagaactgaccgacctggtgtgctccccgcgctgggaccacctaaaagttattttcgtgccaccaccaccgtaccctcgcgggccacttagggtcgaaatacttgccctgggatgggggctggagggtgaaaacgagctcctgaacaccaagacgatcctgtactaccagaccaggcactacgccgccgagcgacgcaagtga

SEQ ID NO: 337071 - DNA, 1341 bp, Pseudomonas aeruginosa
atggccaagattacagaccgccagatgactggcaaaccagggacaagtgacaaatggctgagcgaagtcgccatctggggacatggcagcctagtagctcggatcactcctagcggagagcggctgttctactttcgctataccaatagccgcagcgagcgcgtgaccttccctattggtacatacagccgtgatggcaacgaaggcacgatgacgctagccgaagccggccaacgagcaaaagagcttgctgggctgcacaagtcaggtatcaaggatgtaaaggagcatctcgaagcggaggaggccgcccgaattgcagctcgcgatgccgagcttgcaagaatcgtagctgagaaagcggccatcgaagcagcaaatgctcgacttgctgccaggaaaaccgtcaatgacctattcgaccactgggcaaaggtagacctgattaacctcaaagatggcggcgatgaggttcgccggatgttcaataaggacgtcctaccttttctgggccaactacctctcgatgaagtaaagaaaggccacatcacagaagtgaccgatgcgctgcttgcccgcggcgttaaccggatggccaaaatgatcttcagtcttatgcgccagatgttcaggttcgccgtggaccgcgacttgattgagcacgacccaacagcgagcatccgcaaagcaaaaattggcggcaaggacacagaacgcgacagagttcttagtgaggatgaaatccgaacactggccaagctagcaccagaggccggactgcttccttcaaccgaagcagcaatctggatagccctatcgacctgttgtcgtataggagaactgatgaacgcgcgctgggagaatgtcgacctgaaagcaggcacctggctcattcccagtgaagacagcaagaatggaaaggcgcacaccgtgactctatccgaatttgcaatcgagcaattcgaacgcatcaaggtaatcagcagcaaaagcgagtggtgctaccccaacaccaaagacactgggccagtctgctccaaaactgttacaaagcagcttggagacagacagcgcaaaccagatcaagggaccatgagcaatcgcagcgccaaagcccaagctctcttattaaaaggcgggaagtggactccacatgacctgcgaagaacaggagcaacattaatgacagctctaggtgtattaccagaagtagcagagcgatgccttaaccacactgaggaaaataagataaaaagaacctaccaaagacacagctaccagagtgagatgactgccgcttggcaggcccttggcaaacacctgaaaaaaattataagttaa

SEQ ID NO: 337072 - DNA, 669 bp, Pseudomonas aeruginosa
atgaatatagaagaaaacccaatcgacaaccccttcacaatccgaaagcgcatcaacaacgaactatcagaaatcgtgcccaagctttggccggaagaaacacacagaaccctaaaagaactaatcatccaggcaggccaagaaaaaaaactgacactagccaacgcaaagaaactatggaagtccgacccaataacagaaacaattaaatcaacacccaacaatggaaatacactcttcgaaagctacataatggcaaccctctacaactcaaaaataaaaataaaccaagatgttaatcttggctataatttttcgtgtctggctctttaccacctaggcaagctcgcttggcagctagacattatagaaaaccatgaaagatatcaaaaactatccgcatcaggaggaaaagccaaaagccaaggtacagagttaattaaccaaaaaataatacagcttcttaacacaccaccccaggacggctggacaacgaaaacttcaacagcagatctactcgaaaaagatgtagataaattcatattggaaacaaacttagggaagcatatctacaacacacgagacttcatagagcgagcactccactccaacacaggaataaaggatgcattcaataaaaataaaaaaactagagacacaaaaaaatag

SEQ ID NO: 337073 - DNA, 1464 bp, Pseudomonas aeruginosa
atgaacgaagactatgttcatttggcgcggtcgtatatttcagcagctcaagggcggctggcttttccggaggcgaagactttcgtcgctgcggtcaatgaggcggagaataatgtacaggctcctgctactcttatctacatgtcggcgctttccgcaatgtcacttgctgtgcaatctgtatgtgacttaaaaacaccgtttggtagtgtcattccgacgtctcttatgcttttgattttgggcgactctggtgagcgcaaaagtttcgtcatgaataattttcttaagccatttcgacacattcagcggcgtgagcttttggccgataaagctggtatggatggttttgagttggagttggaaatttggacggctaagaagaaggttttggtcaatcgaattgccaagtcgatggatgaagtggagagggcagagttgatggaggcacttaaggttcttcactcaatgaagccgcttgcccctatgagtatgcagtttgtgtacgaagatgctacctcgcaggctttgttcaagggcttgagtgccggatatccctatgcaggcttagtaaccagtgagggtaaggaaattcttgttgggcgagcctttaatgaccttccaaagcagaactcgctgtggagtggtgatgatgtgacgattgatcgtgtcaatgcagggcgatttgttgtttctggtgcgcgattgacggtggcgattatggttcagggaggcttgtttgatgattatttgaaacggcgaggccaagaggctcgtgcttctggtttgtgggcacgatttcttgttgctaatcctgactccacgcagggtacgcgttttattgaaaatccattgcaaagctggaaggcactagaggtcttcagcaagcgtatcatggaaattaccgaagagggggtggctaactataagctcggccaagaacggaaggtgttgaatttgtcgcgcgaggctactgatgaatgggttaaatttgcgaactttgttgaggggcaaattcgtccgggtggatactttgagcgtgctactgatcacgcctcaaaactggcggaaaatgttgcacgagttgctgctgtggtgagttactttgagtacggtgatgttacagtttctcgtgactgcttgctcgatgcaattgacttttgcatgcgctgctcaattgattttaaggagctttttgtttcttcgactagggaagagcgcgaggcagaaactttgtggctttggttgaatgaaaaattcgatgatggggtaacaaaaatccgtattagtgagctaatgaactctgggcctaatgcaactaggaaaaaggcgcgcctggagctggcgttagattttttgtctgttcgcaagaaaattgaaatttggaaggaagaaggggttaggtatgtaggtgaagcgcctactggcaggagaagggtaaggaagcggattgggaggaattaa

SEQ ID NO: 337074 - DNA, 252 bp, Pseudomonas aeruginosa
atgaaagaagttggtgatagtgagcttcgagtcgttcgactcaagcaattgatcgtgatgatcggtctctcgcgttcgacgatttatgaccgtatgaatcccaaatcccctcggtatgacgattctttcccgcgttctattgggttgggcggtaaagccaaaggttggttcctgcaggatgtcaaagtttggctcggtatgcaggcgcaactgtcgaagggtactgatagtaatttgggggtaaatgaatga

SEQ ID NO: 337075 - DNA, 2064 bp, Pseudomonas aeruginosa
atgatcctgtcccgtagcccctcgacgtacatcgtagcgggagccggtagcggcaagtccacgacgatggtgctgaggttgctggttcttcaccattatctgaaggtaccgcttagcagcataacggtcgtcacctttacccgtgattctcgcttcgactttatcgcaaaggtgatcaaggtattcggcttgtgggacatcccccttgatgaggacgccggcaagagcttcgttcggacgttccactcgcgcattctcgacttcttcaagtggtcgcccgcgtttcagggggcgaaggcgtttgagtttctcagtaaggacccaggagccgaagatgaggagccggaaaatgtcttggatatccggctgaactcacgacagcttgaactgatgaatcggtgttatcagcaccttttcgaaaaccacgagcggtttcgggcgctggtcatcgagcttgtcagccattccgtcagaattggagagccgcttaacccagatgacccgacgcaggccaagcgcatcaggatgctgaagcgttgctcagatcgtgatcaggagacctgtgaagcggtggagtccctgtggcagaaagcgggatattggccgatgcctggggtgagggcagagatcgtgcctctcacgttccgtgctcagaccttccatgcgaatggctatgtagaagaattagaagctctcgtggttctcggccttgatcgcaacgaaggggactcctttacggtcgaatcagggaagacgaagctttcacttgctctgaacatgcggaagatctttttccagctgttttactcagagcgggtattgttcttcagcaattatgaagaagccttgagctctctggagacgctgaaagggaaagtttctgccagtccgaaatttagctaccaagtcaatggagagctcaaaccggctccgattatgcaggcgtttcacagcacggcttctttcctggaaaacgtaggcctcggggtgccggaagccatcaagggtatggcattcaaggaagaggatatcgaagcaaagttcttcgaagcccttggcctcttctggcctgcatttgagcgctttttggcggaacagaacccgcctattttcacctttaacaagatgttcgcgatatacagcgagcgcggcgaggaaaattttaggaaactaccggacagtgtcctgaaaccccagatggttacgttggttgatgagtttcaggattgtggcgccaacaccatcacctggttgcgcggggtgttcgccgagcttcgacggcgcggtacacggcaggattcacctcgcggcgtaatctatccatcgctcatggcggtaggggatgactggcagagcatctatggttggcggggcagctcacccaaattctttcagcagtttacaagctatttcccgtcgcccaacacgctgcccttaatgctgcaacagaatttccgatctcagcagatggtcattgatgctgccgagagcattgtgaagttgacccgctccattgagggcaagcatggcgaagcttcacatccggatgtgaagcagctgaagtttccggtccagctttggacgcgtgatgatgatcgtcttgtgacgctactcgaagaacactacgagagcgggcacgagatcatggtgctctctcgctccagaaacacattggacgaactcacgcaaaagctaggcggagttttgttgcgtgcgaagcgtgacaagcagccgcaccgggtgcgcctgatgacctatcacggttcaaagggtcttgaagcggatgttgtttttctcgtgggggattgcgagcagaaaacgctctcggactatcgaaatcaggcgtatgcccaggccaatctcggaatcgacggcgagcccagagcctatgacgcggcccaggccgaggaggtgatgagactcgcttatgtggcaatcacccgtgcgaagctgcactgctattggttcatggacccggtaaaggccgctagtcaaggactgctcaaagcctcggagcgcatcgataaaagccaactctactttcaggatttcaggcgaggataa

SEQ ID NO: 337076 - DNA, 324 bp, Pseudomonas aeruginosa
atggacagaattcactggtttgctgtctccaaccccgagcagaagcgtttccctgaatggcgacgctccttcggcatcagcgacaacggcaccgtcttcgtgccggcggcaatggctggcgatgattcggagttgcacgtcatgctctgcgcctctgctgacgggcagagcacaacggtgcacctcgatcatcacttcgtacccagcgactggctcaagcgcgagtttcccaagcacttcgagttgatcgagatcatcgaggctcgtgcgcaactcaccttggctgctgcattccagcagcaggaagctcagcgacagggttga

SEQ ID NO: 337077 - DNA, 1929 bp, Pseudomonas aeruginosa
atgcaatcgaaggaagctttggatcaaggttttcgtacagcactaggcggcttcaatgagctgcagaaccagtttttgaacgaggcgttggagcagtactcggtgctaatcaaacagtcgattagtaccgacgcgggcgttattacgaaccagtctctggacatccagcaaggcttcgccgcggaagctcaccataccggctcatataacatcgaggccgcgggtaaaggcgctaacaaccatcgcgccacgatggatgttgggcgccgtaacgaccctgtgaccgacattagaatcaacacacctgaaggttcgaaggattaccagctcaaattttacaaagacgccgagaacagcgctaaagcaatcaatcatgctgattaccaagatgtcggtaaggtcgttcctgaggaacagctaacagatgctcaggctacggcccacaaagaagctgcccgcaaccgtgatacacggcccgatgtcggcaaaaactacgaaaaaacagctgagacgctcgacgactccatccattcggacgaccgccccgacatcaaaagcaagccgcttaaacgtcggggagaaggcagttcagaagagctcgtcaatgagacaaagaaggatgggaaaggccccgaatacgccgataaagaccgcgttagggctgaatttaatcgcatgcagtacgcaaatgctgccaaggctggtgcgatatgcggcgcttcgatcggcgctgcatccgagctactcggcatcctgcgcagcgacgagcctctcaccatagaacaatgctgcgaagcagccgaacgtatcgtgttgagttcccttaaaggtgcggggaacgccatgctcgtgactggtatacagcatttgggccaaaacctgatcgacacggcctcacactctgctcttaagaatgctggaggccatctcgtcaaaggcaacgttgccgccgctgttgccaacattacagtgaatctcgggcagaacatctacaaattctcccaaggcgaaatcgacagcctggagtttggcggctccatgatcagtacaacggtcactgtagtgggtggatcgatggcgtatagcgcgggagcagccactgccaccttcctcggtcagtgggtcgcctctgaaatcgcctccaccaccctcctgggcactacacttggtgcgctgggcccgatcgcattgggtaccgtcttctccattggcttttcctttgccatatcggcgtacgtcgggcatttctcggcggaaggcaaaaagctggcgatgcaggacttgcaagacgcgatggccaagctcaacggcggtacgatcaatctctctcagtatgtggggttggtcgggacgatgtcggagtttaaattcgagtggaaggacatgttgccgttctcgggcagcatctcggttttctccgaataccgcacccgcaaaagccaactcatggctgtgcagaaacaaatcgaatcgcagatttccaaactgcctactcaagaggccgaagcgctttaccagctcaaggctggctaccagcagaaaatactgatgatcgagcaggactatgaacatcagcgacaggaaatcactcgccaggctggcgagcgctaccggatgctcagcaaagacctgaatactcaccttgaaatccagttcctgatgtttacgcccatcaagaacaacctggtcaatcagcgcaaggaagtacagacggccagcattcaggaacgtctcaagcaagcgcgaatagaggcatacagtgaagagcttaagacgctccaacagtcgctcgaacaaactggggtagcgggcggcgatacggaaaagctgacacgcaccatgctgtccaccatcgatatacggctgacccaagtcttgcctcacaagagcccctgggatcaagcctacgaattcttcgtgcagccgtag

SEQ ID NO: 337078 - DNA, 1209 bp, Pseudomonas aeruginosa
atgctaaaaaaactaatccattttctgactaaccgcagcctcgaaaagcatcggcacaaaacgcaatgcatgattgatgagtacgagcgtgaggcggctgcaagccaagcacgcgttcaggcaaaagcggacgcttacaaacatcaaattcaacagctcgccaagctacgccaggaagaactggaaaaatatgtggcgctattaaacgatcacattgagcagacgaccgactacgtggcctacctcgaagagctgccggcagccatgttcctttgcgttgagatctggttgcgcaaaaacatcagcgagcagcgctggaatctggacaaggaaaaagtccaggtcattgtttctaccatcgactacctggatgccctcgctgaggaaatggtgcggttgtcgcgcgagcaggatcggaaagcctggcaaaacatcattgccgatcgcccaccgcggatcagcacggcggcaataatcaaacacaccaaggacttcctgagagatgccaaatcggatgcgaaggagtacgaccgtgccctgcgccgtatcgaaagctataaacgtctactcaggaaacagcaaagcgagctaagaaagtccattgcagcgctgaaggcggaagtggataagcatcgcgaggagcatcgccaggtcaaacagcgggtgaagcagctcaacgaactctgcagtaccaagttcagggagctgcaggaagtattcgagaactattaccaattcactcagaccgactcgcctctcgccaacgaatggatttctcagatgccccatgggggaaatctaaaggaaatccttctgttgatctccgacaccgcgcctatgtgggaggaagcaaaagccaatatctcagacctccatgatcagagaaaacacgtccagtcgcggattgatcaagcctatcaagatcaagagtatgagtcgctagacggttacaaggcagagcggacagggatctacgagtcactgaatcatgccaaggctcgtaaagacgatgtgtttgcgggacggcaagccctctaccagcgccgggatgagatcaagaaactgttgggatggatcaacgagcttcacccgtcgaagatcatcgagcaaatcttccatctacttgcacgcgaagacactgaaatctattggccagccattggcctcgccacaaaaaccgtcaggccaccagcagggagtcgcaagtga

SEQ ID NO: 337079 - DNA, 402 bp, Pseudomonas aeruginosa
gtgacctcatcgaaagccgctgtatcaaaactcagcttttactggcgcagcccgcattccaaagagagctttgtatccatctgcgaagccgtacgcctgggatacaacaccaacgaatcccttctcaaggctttgccgcagttttcgatcaaccgccttgtgcttggcttggatcgattgattgcagccaacatggctcatctcaacatgggcgtgctgaccgtcgacaccgacatgcaaatcgtagaggcgctggcagctggccaagtactggaacttcccttggcagccgagcaactggaacgaaatgccctactgatccacgagattttggcgggtatcggtgttgataaccccgcaggtgccatggtgctcctcaaaccaaaagtcgaggagatctga

SEQ ID NO: 337080 - DNA, 1890 bp, Pseudomonas aeruginosa
atgacagcgaaaaaactatttggccaacctgctccagccagtcccattactcctggctcaccgcctccagacttgatcgatcacattgacgactggctggagtatctcgtgaagctggtcgacatgacggatgatccgatcacgcgcaaaaaatacgagcgccaaatcaaatacgttacgcggtttcgctgtggtgccaactgcaacgtttctcacaatgtcatcctggccaagtactacctggagaaagccactgccatcgatgaagccgcgggcggttacaagccatccgcagcatcaggttctcgaactcgcaacaaggttactactgagttcgctgacgcggggctacacgattcaatggccattgatgcgccaacgccagtgcaaaagtgttatctgacggatacctatgcctactcacagatccagaaagccctggtgtgtgaggacatcttcttcctccagggcccgcccggtaccgggaagaccacggcaatcgttgaaataattcttcaaaccctgcgcagcaaaccggaggcgcggattctcatcacgtcggaaacgcacgttgccgtcgacaacgcgcttgatcgactgaccatgcacctcgacgccggccagatgaagaaggtaatgcgctacccacgcttctcagtatcttcactggaaaacccagcagccactgaagtccaggccctagaccgagccgacaccgcatggcggcaggcgctagctcaggccccggagctcaccgcgcggctttggcagaagctggaatgtgggcgtaaacggggtggagttatagatcttcccaggtggcaggtgcgaaacctggctgaccgccaccagatcatcggcgtgacctgcaatcagctggagcacttcatggacaaggacagcgaaatgttcgacttggccatcgtcgatgaatgctcaaaggcgactatgcccgagtggctgatgtcgctcaccgtagcccgcaaatgtgtattggtgggagaccacaaacagctcccgccaactttctgccaagaagaatccgaagcgctttcggagctcgacgaagcccaagagaagctgatccgagacggcgttatcgagcggatcttcgagaacttcccggagtgcatgaaggggacgctgctaaagcagtaccgtatgctgccagaaatcggcatgttcatctcgaaacacttttataccaatggacttgagcacagccgcaccgtaggaaacggcttgttcgagcatttcgcctggctgacctacgactctaagaattactacgtccccccagagcgaggcaacgagcggaaaactctagttaatcagcgagagatccagatcatcatagatcgcttgggccagatgcatcagcagattggcgaaacaaaagctgcagcgtccaatacccaagcgttccctcgcgcagacatcgattcagatggcgttatgctcgacgccgacggaggttctacccatttaccagaaagagagagaaatgacgattatttcaacaacggaaggtgtttaagcgtagcggtgatcacgccctatcgtgcccaatgcaagcaacttcaacttgctctatccaaactcgatttcagcgagcacctaactatcgaagtagataccgtggatgcctttcagggcaggcaagctgatgtggttttcttttccttcgtgcggactgtcgggcccgctaccttctatgccgatgaccgtcgcataaacgtggctatatctagggcgcgtgattgcgtctacttggtggggagcatcgactacatcaaaagtaagaggataccggcgttgacggcacttgcacggaggccagtgctttccaggctcgacaagctcccaaatagcttacggcagctttcgtga

SEQ ID NO: 337081 - DNA, 1200 bp, Pseudomonas aeruginosa
atgcttttttatgctcagcaggttgataagaaagaagggactgcgggatacagcgtcatacttgataccgctgagcttgccgacacccttgaactggcaaggttgttaggggcatctgaggaagacttagcctcggacaaccctgcctccatgcttcgcttcgattatttgcccgacagctactttggttgccgggagggttcttggtacgagattcccgacacattttgggagggatgggtttatcaggccatcgatcccaccggaccgagcagtgtatttctgcgtggcgagctgtctgtgtcagaggggaaaaagaacttctcacgacacctagtttcgccaatgtttatcgaacgaggcatcgtatctgcatcgtattacccgctttccagcccgagcgagttggcatcggttagtacgactgcgacgctttcggtgatcgactgcgggcacggtaactggaacgagattcgcacggatagcctgcggatcatatacgacgttggcgccagccgcctctacgacgcagcacaagtagagcgtcttgtcgcatcacagggcatcggtacacaaggagttgaggtcaaaatctacatcagccattgggacgtcgatcattatcagtcacttttgaaatttactcacgcagatatgactgtgataacagaggtaacagctcctagtcagctaccagatactgcgacctgtaagcgcattatggctttgctcgatgagcatgagatatcggttcggcttttgcctcctgcgcaacggaatgctccgggacgtacgattaaactgatcgaaatccaacgtgtggggccacttaccgtatttcgtgcaactgcgggtcgatctcgcaaccagagcggtattgttctttgttatgaaggccgtaacaaattagccctactggtcggcgaccaccattatgaaaaaatactgaatgccattcagggccgtttccaatcaacaaaagactgcgtatttgttgcacctcatcacgggggtaatgctggttcgatagacgtcagtgcctggagagcattgttctcgtcattcgagacggtaatttcatgcggggataatgcttgggatcacccattggccgacaacctgaatggtttgagtgcactccaaaataatattgcctcataccgaaccgaccacgatggaactttgcaattcaggctgtga

SEQ ID NO: 337082 - DNA, 1314 bp, Pseudomonas aeruginosa
gtggaaccgtcggagctcaacgcattcttgagagaccccaagcttttggagctgatagagctcaacaaaactgtcgacaatgtttttgaggtgacgacacttctggagaaccaaaattctgaagtgcttgcctggtgtatgaaccccaatgaaggccattcccaaggcgatgggattattaaggacttcctagaagcggcccacgctgcgagcgatggttgcacctatgataaccgcaagttttttgcaaagtggacgccaggaaaaattcgcaccagtagctttggcgcggcattcgttactcgtgagttcagtatcaaaggcaacggaggcaccggcaatggtaggcttgacctatttttggtcgacccagcaaatcagattctggtcgcgattgaaaataaggttaaagcatcgttgacggcacagcagctcgaaaaatatgtgcgcgccgtcaaggagcaaatcagcagtcgtagagtttttgctgattacgacctagctttcgtcgtgctcgaccaggatcttgatgcctacaaggaaaagcagttgctggagttaggtaagcgctgggcccttcttgactatcgctggctagaagcctctgccagcagggccaggttccaacttagccggggtaataactccgcgcagttactggttgcctattgccaaagcgtgactcgttggcaaagcccgatcagcgaaaagatttcggatcttgcagctgatctggttctgactcatcaggctgtgatcagtgcaatgcgccctttgaaatacaagcctctaaataaatggacacccgctacgctacaggggcacctgggcgagttgacattgttcctcgcccagaatcaacatgtgtgtgaaaagctacttagcgtgaggggcgtagccagcctagcgcccttgttgttcaaagctatcccgacgctctcagccgagcgggttgatcagggcactcaatggatctcaataacaccgccagaagccctggagctaatgcgtgatgaagtctggccggtttatatcacgatctaccgggtggccaaggtgtcgaaaccatcgacccccagatacaacgtaaggctggactgggataaaaacgaattcaatgtagaaaaggtcagtgaaacaaaactgcggtttcacttgagtaaaagcttctccgggctggagaaatttgcttcctcgcaaatgcgccgggtcttgttggcggaacatgtaacgccattacaggcgatagagtccgccgcaagaaacatgaaacttctatctttccaaatagccaattgtcccgcgccagattaa

SEQ ID NO: 337083 - DNA, 327 bp, Pseudomonas aeruginosa
atgtcattgcactgcccgagctgcggctctcctcaggtatctacgcacctcaccgccatgcggattgctgccttcatcggcatgctgggcggtgcactgcgtggtgccggtaccatcctgctcactggtccggccattgccagcagcggcctagccaaacctcccaacgtcaacctcaatgccctgtcgtcggccattctcagcggcctggttggtgctgctggtggttgtgcgatgggcgctcagcttggtgaaaaacttgaccgtcatgtgctggcccacaaccactgcctgagctgcggtcaccgcttcaatcaaccggtctga

SEQ ID NO: 337084 - DNA, 498 bp, Pseudomonas aeruginosa
atgaaatttcacaagctcagagccggtgaggtcgccggcagttacctggtggactcgcccgttagcgaaaacgacatcctgcgcatggcccaacagctagccactcagcgactgagtaaaggccgcgcgctgactgatccacacaaagtcagagagcatctacaggtgttgctgcaggatctgccacatgaagtcttcgcggtgttgctgctcgatagcaaacaccgcgtgatcagtttcgaggagctgtttcgcggcaccctcgacgcagccagcgtctatccgcgtgaagtgatcaaaacagtgctcgcgcaaaacgccgcggctgtgatcctggtgcacaaccatccttccggcgatccctctcccagccaggcagatatacgcctgacgcaaacactcaaaaacgccctggccatggtcggcaccaccacgttggatcacttcatcgtggggtcagaaggcatcgtgtcgctggctgaacagggcttgctctaa

SEQ ID NO: 337085 - DNA, 351 bp, Pseudomonas aeruginosa
atgtccacacgctgcttgatctgtgaatcatccgcagtgctgtccaaggaatcggtcggcacgctggtcatgctagccagcgtaataggcggttttatggctgcggcacgacaacagtctgaccaggaggctgcgtcacctgaagtgaagtcaatcaacctagaacaggtgctgggatttatgacagagggaattgaattagcccagcggcaatgggctgggaaccaaccctttctgcaagacacccgccgctatcagttcatgcaacacgactgcatgtgcctgcgttgcggggcgctgtttaaccgtgcatccgaacctgaactcaatcctgactcaggcgttgggtga

SEQ ID NO: 337086 - DNA, 348 bp, Pseudomonas aeruginosa
atgccgaagtctgaagaaacgaacctggccaaagtggtgggcttggcgattgccaggcagcgcatgctgtgcgaactgacccaagagcaggtcgccgagcggctggggattggtggtgaagcggtgtcgcgtatcgagcgtggcatcgtgatgccgaacatcgagcgcctgatgcagtttgctgagatattcggctgtgaggctgcggatctgctgacccaagctagccaccggcctgaagaccaggccgtgcgtatcagccagatgctcaatcaactcacaccgacagatcgtcagttggtgctggagatgatcgagcgtctcacccaacgcctgagtcaggattga

SEQ ID NO: 337087 - DNA, 345 bp, Pseudomonas aeruginosa
atgacacaactgacattcgacgacttggccaccgccaagttgcctcaactcatcagccgcaaagagtcgtttgaggtcgtaggcctcagcggcaagttgatcgaggccgttcgcctggtcgaaagcaagatcgaggtcaccggactgacctgtcgcgtttacaccgtaggacgtgttggcctggcagctggcagttttgcaggaggagtcacgggggcattcggattgctctcggcgaccagcattgctgtgcacaacctgctgaccttcaaccccgattacgagatcgagaagtacccggtgcataaccggatcgtcgttcgctacaagaaaaagaagaagtaa

SEQ ID NO: 337088 - DNA, 609 bp, Pseudomonas aeruginosa
atgaacctgaccacaaaccccaaactgattttcggtcttgctgccacgctgatcactgccgtcacagcgagtaacttcaccacggcccaacagcgtgaggtggactacgttgttggcgagaacgtctttagctgctcaaccacgaaacacagaagcatcggtagctacgactgccgccctgcaggcgaccgtacgccacggatcaaacgcctgcccttcatcgacacccagaccggcaccaagacgctagaggaagtacccggctcgttgaacgtactctgcgaccaatacggctgcgccacgatctcgaatcagcctgggtttccgaagggcacgatggtaggtaaaggagccaacggttacttcatcatcgaatcgggttggtatctgggctacgacagcaatggtcacaccactgcataccgtggagatgtggggccagacagaggcgacgcaccttacgaaccgttggtgaatatcgccaaatacggaacggatgcctgttacgacgacgccgtcaatgctattgagagcagaactggcgcacccttggaggagtactacatgatccgccagattctcgaggaatgcggtctgccgacacagtga

SEQ ID NO: 337089 - DNA, 708 bp, Pseudomonas aeruginosa
atgagtgatcaacccggcctgtcacgaggcggtatgagccccgctggcaaggtcaatcccgtcggtgtgctggagcccaagctcgatccgcaagacaagaatgtgctgtgctcagcaatctgttactgcagcagtacacccaacgtcagccaggacggcaaaaacctcaaacagtcctgtgtcgcccaacgcctcggtgagctcaatgaggtacttcaagggcgcagcccttaccggccggaagtcagctacgacatgaccaagaacccgccgcagcccattctagatagccagacgggcagcagcgctcatggctggataccggggtggataagcaagtattggaatgatgaccctgaacatccgcccttcaaaccgggcaaagggatgattcgccgacctgacgtagtgatcgtaaaagatccgagcaagccgccgacccaggacaatatcaagcaggtggtggagatgaagttcccaccagaccagaagaatcgcgagcaatctgaagcatatgcagctatcgctggggacgagcggaaagtggtggaaatgaaatcaaccgactgcgactgcagccaggaaaaccaacaatctaaggttcctgtcgagcaaatgggttgggccgctgctgctgcaagcgctctgatgtatatcctgacgcgtggccgctcgccacgcccgccgctgccagcacctgcttactga

SEQ ID NO: 337090 - DNA, 1089 bp, Pseudomonas aeruginosa
atggcacaaccattcgacctggccgaggaactagccaagcagcctcacctcctagagatgccgggtaatctgctgatgaaaggtggcccggaggactacgttggggcagtgctttgcgtgcgcggcacgctctacttcagagaggcacacacgcccttggtacgtgaagcgctttgccaatgcttcgacgaattcaagaaggtgtcagaaccgcatctgacttggttgtggcgagaagagccccccaagggtaagccgcttatcacctacaaggacgtgaagccgctgcgggatatgatgcaagagatggatgaagatgatcacctcagcttctcctacaccaatggaaagaaagcacatgatgccggcgcttggctattcgatatctacggcaagcgtggatggcaggccaagatggggaacggcctgagcgttctagagttctcggttccactgctttaccaagaacaagatcccctgatttttcagcagctgttcatgagcttcgcccgtcggctggatcccgagcagggctacgccggcctggccttcaacctttcaccgactcggcgcgatgacaacgaacccaccgaagcctttatggctcaacgcatgcccgggctggatgtaggtaccgcagcactgcttgcgaatcgcccggcgttcaagcaacccaagatcaagtgcatcagttggctgaccttgctcaatcatgaacgcctggagcaagtgggcggcctggacgcgctgcgcggtcaattgccatcgagtcatttcgctttctacaaatgtggcaatggcttggtcattcaagcaggcgcccacccctatcttggcggagatacagacgacccgaggcctgctccctatgtgttgctgaaccatgcgctcaagggggtccgctacgaaaccgtaggctccttgcatggtggctcacatgacggggagttacggttggtgggctggtcggcagatcagtggctcaaacgcctggacgtggatgatggtgatctccctggctggcgagacaaactactcagcagtgagccctatctagacaccaccaacaccctccctgagcgcttgtag

SEQ ID NO: 337091 - DNA, 1581 bp, Pseudomonas aeruginosa
atgagtagagatacttgctttgccacccagggcgagctggccaagctggcctacgatgcattcggcgtacttccccgcaagggctcccgccgtacgagcaaggaagccagtcgcgatggtattgatgaaacacagaagaaggtcattcaaaagcaattggcgaggcttgccgaggaagaaggcggactgctgtcgaatttcgggcaggtgattcaaacgctcagcagcatcctggcagcgtatttgcccagcattcagatcatgagtgctattggcgatccgttcgatgatctgctggaagcatacaaccgcttggttcgcgaagagggcacctatctcagcaaggctgaaaccctccgatacttcatctcgacgaaggcaattcctttgctggtcgtttcgctgaatcagagcctgctcaaacacggaattgcagacctggtgctcgaagtgccggaagacgcattctggtacctgccgacggttactgaagatggccgcctagtaatgccgctggaaaaagtcatgcgctgggtctatgcgcgttgtgatctctcgcagacgcagttccactacccaggcaagaacccgcgaagcgacaacaacatgcttcagcagaatctcgacaacgccatcaagtggacgcggggcgcaaggcttcctgcattacctgccttgtttagaaatttcgaagagtccttcgccgcgctggcgcaaagcgggcgagagatacccaaagagcttcaggccagcatcctcgtggcattaatggttgcccgggtttcaagctacctaacgagggaaattgctgccgcctacggtcatcagtacctcgccgatgcctgcaatcaattccgtgattatgccctgtggatcgccgatgacatcaacgagttcaaggccgtattggaggagcagatgcggcaagaagagtcctctgagatggcccaggctatctggtttgctggctgggatcgctactgggatttcttctatgcgaggctgcgaggcgcagccggtactttccagcagcttcaagaagccgtccttggcgaggatggcattgaagagcttaaaggtcagtacggcccttttgccgtgctctccattcaggatctgattcagcggcactcagcattttcccctccgcacggttttgccgagcttctgtttaaaggttttgacctcaagagttctccagcaacccagctaaatcaaattgacgagtatgccgctcaggtagctgcttacggcctggatgagcaactttgctggatggtgccctggttgcgcggggtctatcactatcgtcgagaggagttcgaggctgccatgccgcacttccaggcagcctttgaaaatgccaagtaccgggcaggtaaaaaccaatacaagctggtgaaccagtacgtcgaggtcgcggcaaaaaatgatgaccgacggggtttcaagaagggaattgaatgggcgcagtacctggacattaaggtgcgttggctgcgtgatgatgagcccaccgaagagaagctggactacgtctgctacatgctgaaaatcgcccggtatgaccaccaaatgtag

SEQ ID NO: 337092 - DNA, 156 bp, Pseudomonas aeruginosa
atgtccaagcaacccagcactaccagccagcagcgtcagcagcacaaccatcgttcggatgcactgaacaataatcgcggtacgtcgggtaccaacccgaccaatgcccacgttcatggcaatcgcggtaaacaactcaaccccaatcagcgctag

SEQ ID NO: 337093 - DNA, 669 bp, Pseudomonas aeruginosa
gtgacccgtcattcagataatccgaatcttcatctgtactgggagaacaccttcgagggcatgccaatcatgtccgagaaaggaccatttattcttgaatatcttgtagccaccaagcgaactatcgagcgggcagtggatcactacccgagggtcttggccttcagggtagacctgcgctttccgcaggatgctgagcttcctgatgacgcttacacgaatgtagttatcagtcgtttcatcgagtccttcaaggccaagatcaggcatgatcgtagccgggcacagggtaggaacccgtgtgcacgggactcgcgagttcgttacgtttgggctcgtgaggttggacgaaacagacgaccgcattatcacttgctagtcctgctaaacagggatgcctactacggcgtaggacggttagtttcaagcagaaccaataatgttcgtcgtatggaagaggcctgggctagcgctttgaggcttccagttgagcaggtatgggggctggtgcacattcctgagcgggctgagtatcggatagaccgatacatccgtactggtgatcatgatgcgctaccagagttgctccaccgggtcagctacctgtgcaaggctgcgacgaaatcttacggcgaccgtcaacgtggattcggtaccagtcgaggctag

SEQ ID NO: 337094 - DNA, 1374 bp, Pseudomonas aeruginosa
ttgaaaaaattctcaccgctgaaggagatggctgttgatgtggtcgaatccggcgtacgcccacgaaaaggcatgctgccctgccatctcggacagaacatcaatttcgatctagaagctctcgcatccttctcctcgcaaaaatggcaacccagggtctatgacgccctagtcgtggccgctgccgttgagttttgtgatcgcactcttacccgcagcacaatgaactgggggcggcgttttgttgtacgcattccagttcatgaccacgaaaaatggtcagaaaatgcagttaccggagcactagtggaggcactgaaccttcttaccggagatgcctggcatttcgagtttcacgctcgaaaagctcccgcagaaccaccagttcaagaccacatgcagttcccatccaacgcggaagcggtcattgcctatagcgatggaatggactcccgtgcggtagccgagctggaaagcaagcgcttaggaaaacgcttggttcgcgtgagagtaggcagcaagcagcacgatatctccaggaaggaacgtctcaaaatcccgttcacggcactcccctattcagtgaagcttgatgaccgcaaaaatactgaaactagcgcccgaagccgcggattcaaatttgctgtcgtatctgcaatggcggcatacctagttgatgcaccagcaaccatcgttcctgaaagcggccaaggcgcactcgcaccggccctccttccagttggtcatggatacgaggactaccgaaaccatccggtcttcaccaagctgatggagcgatttgttaacgcgctactcgactatccgatccaattccaattcccccgtctatggaaaacgaaaggcgaaaccctgcgcgagtttgtcgaaacctgcggtgatggagctggctgggcaactaccagatcttgttggcagcagtcgcgacaaaccgccgttctaggctcacggcgacaatgtggcatttgtgctgcgtgcatcctccgtcgcctaagcgtacatgccgctggcttgaatgaagcgccggagacctacgtgtgggaatcgttgagtgcaacggactttgaagctggagcagcaaaagacttcagcagacaaactcaagccttgcgagaatatgccatcgcaggggtgctccatttcgagcacctttcttctattagggaatccacgcagtacgaactgatcaaacgcctcaggacgaacgagctagctcgtgctttggctgaaacgccacaaacggtggcggagaattttgaccggctcttgcaacaacatgccatggaatggtcagcgtttacgaacgacctgggaccagagtcgtttgtgagaaaatggatagattacgcatcatga

SEQ ID NO: 337095 - DNA, 1170 bp, Pseudomonas aeruginosa
atgaccaaaccaaattacgatctcagcccagtagagctgggtgaacgactgaaggttgcgcgggaaaccgcgaacatcacccaagatgctgccgctaaagcaataggcgtagcacgcaccacgcttgtggccattgagaaagggcaacgtactgcgcggctcgatgaaatccaggcactcagccgctgctatggcgtatctgccaactcgctgctgcgacaggaagccgttcacgtggatcttgttccacgcttccgctcgcttccagataccaatgaggtaggtgtcgagcaagctgcgcggatgctgaacgatctcgtcagagctgaggttgagcttgaaaatgtgctcggtattcagagagcacacaactaccctgcagagaaaactatccttcctggtgatgtccgtaagcaggcggagcacgatgcacaaagcctgcgaaactggctgggacttggcgaaggaccaattcaggacatctttgcgcttttggagctacagctaggcgtgcgagtctatagccgaaaactcgctccaaaagtctctgggctgtttgcttatgacgactccgttggtgcttgcatactaatcaatgccagtcaccgaaaagatcgtcgagcccaaaccagcgctcatgagcttggtcactttattgcgactcggcgccggccagagatctatcaagacgaaaaatatgaaaactcccgcgaggagcgatacgcgaatgctttcgcgagtgcatttcttacgccagcccgggccgtcatggagaaattcaaggagctaaccattggctcaactcatctcactcgcagacacatcatcctgctttccagcttttttggcgtatctcgccaagcgatggtgatgcgccttgaagagctgagtctgactaaaaagggaacctgggactggttcatggataatggcggcattaccgatgagcaagcccgccaggttctgggagatactgtatttgactcaatccctgctgatgttacgcaatcgtcacggctcttcttgctggcgatcgaagcatggaagaaagatctaatcagcgaaggccagatgtcggagatgctgaagcttgatcgcgagagagtacgtgaattgcttgatgaggcagaagaggacgaggtagatgaccttttcaagctgtctcattaa

SEQ ID NO: 337096 - DNA, 645 bp, Pseudomonas aeruginosa
atgaccttttcaagctgtctcattaaccagaggaacgccatcgtcctggatgctagcgtaatcataaatttgctggcgacggatcatgcgaacactatcttgcaagcattagctgtccctctctatgtatctgacaacgtcgtgcgcgagattgagcaaggcgcagtaaatgggcgtccagaaacggcgttactggctgaactgatcagcaacaaagtcttggtagtcaaggagctaacggggttctccctggaggatttctttgggatggtgtccggacatacctcaagctcacttggcgacggtgaagcggcaactttagctctcgcacatagaaatggattctctgccgccattgacgaaaagaaagctacccggatcgccgcggaacgctttgaaatgctgaagctcgtcacaactgtagatatcctagcgtccccccctgtgcaggccgttctgggaaatgaagtgctcgccaccgcgacgttgtatgctcttcagcgcacaagaatgcaagttagagaacaccaatttgactggatagctcagctgattgggagacaaaacgtggacgcatgccaaagcctgaaacgacatgtaagacgaaggatgtcagtccttacggccgccaatagttgcgagtga

SEQ ID NO: 337097 - DNA, 1824 bp, Pseudomonas aeruginosa
atggccatctacggatttgattttggcacgactaacagcctgatctctgtggtcgagggtgaccgctgcattgcatacgtggatgaggacaatggtggttcacctcatccatcggtggtgtgctatgacggcgacgaagtggtcgtcgggcacgaagccaagggtcggctgtccagctccgggctaggggtgattggcaatgtggtgcgctcaccgaaaaccctgctcggaaagcattcggtgcatgtggatggcgtgagccgtagcccgcgacagatggtggccgacatcgtccgctatgtgactggacatgcacgggatgagcggtcgggggattacagtcgcgccgtggtgactatcccggtcgacatgagtggtgaacgccgccgtgacttgcgcgaagcgtttcgcctggcgggtgtaaccatcgatcagtttgtccatgaaccactggcggcgctatacggacatctgcgcggtctgcccgactttgccagcgagatccgtcgcctggatcgccagtacatgctggtgttcgactggggaggcggtacgctcgacctgaccctgtgccaactggtcgatggctatttagtgcagattatcaaccatggctgcagtcacttgggcggtgatgtgatcgatgagtcgattatgcatgaggtggtgcgccgtcactgtgcccagcatgcggctcttgaaggtgtagatgttgcggcggatgcccagaaaaagctgctggcgcgtgcagagagggccaagatcgatctgtctagcctgagccaggcacagatttacgtgcctgattacttccgtaccaaccaggtaggcctcgatcccgaccttgtctatcagttgtctcgcgaggtgctggaggagatcgtcagcggcaagctggccgaggggctagaaatgatcagcagcttgttgggagcggttggattcgaggtctcagatatcagtctgtgtctggccactggtgggatggtaaacatgccgctgatcaagactcgtctgctggaaatgtttgggccgcagcggctgtgtgtatcggaagaggggcaactgatcatttccaagggcgccgcctggattgcccatgatcgggctgatctgctgctggccaagaacgttgagctggcactggcgcgcgatactcgccatgttgcgatcaaggcaggctcagtgatgccccacgaaggtgcgatacagcaatccgaaagactcaatctttactgcaccgatcctcgtgatggcgtggcgaagatccagttggaagtacctgcccgccggcatggcaggcatgtacaggccagtgatccgcgcaacaatctggccagtctcagcgtaaaggtggatgagcggagcggtcgtttattcgagcgtgttgagctggatatgcgggtggatgagaacctgattctgcaggtcgaggtgcgctcgactgttgctaatgatcaggatgcaaccgaaatccataacctagagtttggactgagtcttggagggctggggggtattgggcatcagggggattcagcactaaaaaagcctgaaggccggaggttctgcgagccaaggggcgcgctgttgcttcggtcgaatctggctctgcgtgaggacaagtctctagtacccggcgaatatctgtatgaagtgcagaagatgacaccctacactcgggatgaactcacgccattgcaggtacgggagaatctctactacaccccctgtagcggctgtggacggcggagcaatgatcccttgtgccagtgtgcctctggtgaaactggcaacatccgcagaataatattcgatttttga

SEQ ID NO: 337098 - DNA, 1251 bp, Pseudomonas aeruginosa
atgagtgacaagatgagcaagccgggtagcgtacctgtcatgagccggaaaactggggcgaaagagatgcttcagccggctaggcgtcaggaagtgtcggagctggaggtttcggtagaagttgtacaggccgcgccagttgccagcgaccttgtgccagaaacgctagtagatgaggcccgcgaagcagtagccgaggccactccggatacggtcagcatcttaaagccgaaggacaaggagcagcagaagatcgagagcctggctgatttccttgagcacttttatgctgggaagaccaagtcgaccttgccggaagcaacactgcgcaagctggtgaaaagctcaagaatcgaagagatccggcgctacgagctattggcccttgcagaggagaacgacccgaccctggagaaaagcctcaatctgatgctgctagctgcagacctgaatggttatcggagtatcgaggagcagttacgctactttgccgctgaggtcgggcggcgggtacaggggcagggtaaacgctctctggagtcttggttgccccgaaccacagaggacggattgagccttgaagtcattgctaacgaggtccgggatgccgtgcagaaggtggctgcctctgaggtgtcggcgccggaaaagaagaaggctcagaagcgtctggaatgcggtttttatctggcctgtcagtggcgcctctaccagggtactgctccccgcgagctagtaggtgtgctgcgccgctcgatccttgcaccaaatccgctgcaacgtgagcggagcgatgggctggttcgtctgctagctagccagccgttcggggatgtgccgggcctgacttggctgttggatgatcaggcgcgcatggttcagcaggccgatgctcgggctgatcagctcgagcgcgaactgcgccagttggctgtagacaagagccagactgaagagcagctgaaagcatgcgaggctgagcttgccgacaagactgcccggctagatgagctccaggcacaactgggtgctgcccaggagcagtcgcgcatccaagaagtgcactccaatgatgacctgtcgcgtttgcgtgggcaggttctgcgtgtgctgaatagcgagatgccaatccttcaggacgtcctcattgcgctggaccgggagccgcccaaggtgactgtcgcccgtgagtaccttgggagtgtggtcgagaagttgaacaaggaaatcagtcgaatcaaggacaggtaa

SEQ ID NO: 337099 - DNA, 1104 bp, Pseudomonas aeruginosa
atggcctggtatctgagctttatcgaccctggtaacgctggcggcagcgtcagtattccggagtcgccaccggtggtgctgcagccgatagtctacgagtgtccgcgctgctcggcccatttcgacagtgtccaggcgcgccgtgaccactttttcacggcgcatccataccgtaagccggagctcttgctgtgtgggcagctgttgggtaatagcggaaccgtgattaatgtacctgtccaggccacggattggctgctgggcagttgccacagcgtctctctgaatgggcaaacgatggccccggaagagctgtttcagaggcttgccgagtgtcggcaggggttccatgtcttggagcttggcaatcaggacactactgaacgactcgatttgcgcttctgtattccggagcttgcagagctgcagcgccttgaggacattttcaatacgctttttcttgataacgagctgagtgtcgatgatgtccggcgttttgccgaggcctgcaagtcgctgaagacagccaatgaatacctagagggggtttgccagtatctctacggtgtgttggccaaggatcagcgaggtggtacgcagctgagtcatgctcattacaaggagcgcttcaatcgggcgctggaggccttacgttacgtggacaggccgctggctcggacgatgcgcggcattatcaacttttcgttcaacagcttcgtccaggttactagccaagccgatgcgccagcgctagctgctgcagctagcctttttgcaggctgggctggaaagcctgtgaagggctgtgcgggagtgccgcaggaggctcaagcacgtttgcccgttgatcacgccactgacaggcttttgagctggatggccctgccggataagcgacaggaaggggagttggatgaactgcagcaggtcagtgccagttcgatatggacggcagaagaccgaaccaaggctttagtgctgtggctggaatggggacgtacctaccgatcgacagatgagcttcggcggatggcgcgccgcttgctgaatgatgcggtctttgccggctacgccgagcaggtgctagagagaataaatcaatga

SEQ ID NO: 337100 - DNA, 303 bp, Pseudomonas aeruginosa
atgaaactcctaaacacctacgacgaccgcgacgaagctgaggaagccgccgaaaaactaaccggtgaaaaacgtctggccagcgagcgtgacgctacgattaccatctataacctttttggcataccgagctggggtaacttccaccgccttggtatgtataacctagccgagctaaaggaactgctggatcgccgcccaacatggcaaccaaatgaccagatgaggcatgaagagattctatcggtactgtccagcgtggccaggaattacgagatcgaggtcccagctcactggttttag

SEQ ID NO: 337101 - DNA, 2520 bp, Pseudomonas aeruginosa
atggagagcgcatcggcgctgacctcggccaagatcgacctgctaccgcatcaagtggtgttgacacatcggattgccacggcatctcccaggcgctatctgattgccgatgaggtgggcttgggcaagaccattgaaactgcgcttatcttgcgagagctggctagccgaggcgagttgaatcgcgctctgatggtggtacccgcagggctggtgaacaactggcaccgcgagctgaacgaagtgttcaaccttgatttcgaggttttcggctccgagggtgacatcaccgaccgcaagacgaatgcttttgccaaacacgatcggctgatagccagcatcgacaccctcaaacgcccggcacgtatcaagcgcctgcttgatgccccttgttgggatcttgtggtgttcgacgaagcgcaccatctgacggcacaccgcattgggggcaaggtcaggaagaccgagaactacaaactggctgaggccttgaaggatcattcgcgtgatctgatgctgctgtcggccactccccaccaaggcaatcatttccagttctggatgctggctcagctcctgaatcccacgctctttcgcagccccgaagagatgttggaaaaccgccatcgtctcaatacggtgatgtttcgtcgcactaaggctgatgcctgtcagcctgatggatcgccattgtttgcaaggcgttgggtgcataccgaatctttcctgatgaatcaggcagagcgactgttctacgagaagctgcgtgagtatctggaggacggcttcgacctagcccgccgccagggtaacaaggggcgggccctaggttttttgatggcgatctttcagaagatcgcagcgtccagcttcgcggctgtgcgccgcacgctcaagcgccgcttgcttatgctgaccctgcatgaagcgctgctgcgggacaaagagcttgatattgaaggtcgtgagcgcctgactgaggaagcgcgggcattaattcatgaggagtttggcctgccgcatgacagcatcgggcgaagtgaagtggatcgtgtgctcgccgacctcaaataccgcttggtcaagaagttagatgaggaggccctggaaatggcctccgacccttacggcagcgaatactctgcaacgcacgcagaggaagctgcttctgcagtcgtggagctgcatttgcccgaggagcgcctgcgtatcggcgatttgctcaaggtctttccgctccagcgggaaaccaaagcgcagaagttgctggatggcttgggctatctgtggcggcagaatgccggcgagaagatcgtcatctttgccacctacctcggcacggtcgatctgattgcacgtgagattgagcaggcctatcccggccagggtgtggttgtgctgcgcggcggcgatcacggtgccaagttggcggcagagcggaaattccgtctgaaagatgggccgcgtgtaatggtttgtacagcggccggccgcgaaggcttgaatttgcagttcgcgcgaatcctgttcaatttcgatttgccgtggaatccgatggatgtggaacaacgaattgggcgcatccaccgttatggacaaaatcacacggcacaggtctacaacctggttctgtccgacactatcgaaggacgaattttcctgatgctcgacgagaagctgacggaaattgccaagacagttggtaaggtcgacgaccaaggcaaggttgccgaagacctgcgcgcgcagattcttggccagctatccgagcgtctcaattacgaccgtctttaccaggaagcgttgtccgatcctgaattgaaacgcacacaagtggaactggaagcggcgttgtcgaactcacgcgaggcgcggcaggtggtgtttgatctgttccaagacctcgacggcttcagtcttgatgactacaagccgttctccgacgtgtcgtccagcctggatcggctggtacgtttcctgtcggcagcagtggcggatcgtcagcagcgcctagtcaaaatcgacgacgaaacgtacgaccttgtgacggttgatggcacacgtcgggcacgatttaccttgaaccgcgatacggcaaccagcagcgataacgtggaactgatgggcctggatcatccgctgatacaggaagaatttggacgctggcgcagcgttgcacctgaagatattggcattgcggtttcagggtatgtggacgcgccggttctactttctctctggatggtcgaatcgtccgccggtaacggtgagcgccgtgtcgtccttcaacccattgccgtcaagcaggacggcactcgtgttccggcggtcgagcgacaggcggagcaatacctgaaggcaccggtagccttgccgatgttcgaaccagagcagcgacaggaactattcgcacaagtggttgaacctacactgcagcgggagctcaagcacaagggggccgcgaatggtgatggcagctattcggcggagctgattggttatgttgagatcgtcagctag

SEQ ID NO: 337102 - DNA, 207 bp, Pseudomonas aeruginosa
atgtacggcaccgaccggcacacgacgctcacccacgccgaagaaggcacgaacgtaaccatcatgcgcgaggtcaagaactacgccctgaccgaattcatggtgggagatccgttcgccaggttgaaactgtgtttctatttccacacgtcaatctcaggtaattcgcaaatggaaaagacccgcagctttcgcgccctcgcgtag

SEQ ID NO: 337103 - DNA, 3273 bp, Pseudomonas aeruginosa
atggccactaaaaaagaactactcgcgcaggaagtcgccaaggctgttggggcaggtaaggcggttgcgcttgagaccgtcgacttcaacgatccgaatcgtcccaagacttgcctggaggtggacttcccgatcctgcccgtcaatcaggtggcgatcatcgagggtaatgcgggcaagccgatttaccagatgtcgaagtggtgggcgcgtcgtcgttccagtgttttccgctccatgttgctcgcagcggcgaccaaggccccagaagacaaatcgcacgcagccaagctggtttgggaaaactactacgcgaaccaccagaaaaaaggtgcgtttaagaacctgaaggtggccgatatcttcatgggcggcggcaccacgctggttgaaggctcacgtctcggcatgcagatggttggtaacgacctgaatccggtcgcctggttcgtggtcaagcaagagctggccaacgtcgatttggaggaagtaaagcgccttctcgccgatatcgaggctgaggtcaagccgcagatcatgccgtactactactgcgacggcccagaaggtgaaaaaggtacgtggacgcacctaccaacccagaaggtaatgccagctgatttcgacccactgactattccccgcaacgagcgcaaggactaccactacgaaggcccggagatcatctacaccttttgggccaagcacggcccttgtcaggtgaccggctgcggccaccgaacgccaatcatgaccagccctgtgatggcggtgaaggccctcaccgtcaagcactgggagcacgcttgcggcaaatgtgggggacagttccatattgaagctgacgcagcgcgaatggctgctgatgtaccgctattcgtggcgcctacggagcagccctatgcggtgcttgatcctgtatcgggcgttacctgtcctcactgcggagatattgcagcagccaatatccaccccaaagacggattggctattgccggctcacgcggccagatcaagctgggtaagggtaagaacaagaaggttgaattgagtctgctggtgcatccgcaatggttggccggttcacccaggcaggatgagaataaccacgtctatggtggctcactccaggatgacctggccgcgacctcgcgctggggcagggtgcgtgcctccaagattcgcttgttggaggttcgtggaacattgccggaggaggtgacctgcccggaaaccaaggtcactttttcccccgaaaatggcacggttccaaaaaaatcccactacgcttgcgcagcctgcggcactgtgcaggatgtattgaccaccatcaaggctaccggcaaaaccggcccgatggctggttacgcggttcatggttacgcgccccggcgcgatgaggcgggtaagccctacagcggtcgcttttttgctgcctatgaccagacatacacccagcagtatgaagcggcgttcgtggagtgggaggcacgtaaggagggtgacttaaaagattactggccacgctctgagcttccttacggcttcatgacgcacatgaacaacggggggctaccaaatcatggtttcacgcattggtggacgatgttcaatccacgtcagttgctggtacatgcgcaactactcaaggcaattgttgaaaacggtgactatgactggacggtgagggagtttgtgctcggggcttttcagcaatatttgcgcaatcaaagcctgttcactttatggaatgttcagggtgataagctcgaaccacagtttgcgaataacaactatcacccgaaatcgactgtagttgaaaactgtgtttttccagcattggggcgtggcaactgggcctcaagctccgaaggtattattgaaggccgcgaatgggcgattcagccctgggaagccgtaagcaccgaagcgttgacgcgtcgcgagccactgctggcgaagcaattgagcggaaagagcgaaaaggtctttcccggcgaccctgtgctggacgtggcggtgcatcaaggttcgtccaccgatcttgcccagttggagagtggcagcctagatttggttatcactgatccgccttttggtggcttgctccactactcagaactagcagactttttctatgtctggctgcgcttggttctgaagagcaagtacccagcaattttcggcggagagtacactcccaaatcgctggaggctgtggccaaccgagctagggaaccggaagacccagatggcttttatcagcgactcctgacccaatgttggtgcgaggcacatcgccttttgaagccaggcggcatcctggccttcacttttcaccatagcgcggatgagccttgggtggcggtgctggaatcgctgtttgatgctgggttctacctcgaagcaacgtaccccattcgctccgatgaaacaaagggtgatggggcgaagcctggaacctttggctcacaaaccatcgaatacgacatcattcacgtctgccgcaagcgtaccgaagagcccaagccggttagctggggtcggatgcgccgtgaggtgatggcggatgtgcgccaactgcaggcaatgctggaaaaccacgctaaggagggcttgcctgccgcagaccttcaggtaatccgacgcggcaaggcgttggaatatttctctcgccactacggcaaagtctatgtcgatgaaaaccgcaccatctcggtcagggatgcgctcgtcggtatcaaccaacttattgacgaagacgccgataaagggaaagagcccccgccggtaaatgctgagccgatcacccgtcagtttctgcgcaccttcggtgctgtcagcgagatgaagcgtgaccagttacagaaatttctgcgtggcaccatcactacgcccgatgattttgtgcagcgaggctggtgtagtgaggagaagaaggtgtttacgcgtaccaatcctctcgatttcgccagagcgtggcatgggaagcagaagcacaaactggtttccgatcttgatcaagcactggttctgatcggcgcatgtgtcgacggtagcggtatcaatgcttcggacacgttgaagaacgagaattttactccgcacgttgccctcaagccgttgctggagtggttgcagaagaacggtccagatcaaaccacccgaaatggagcctcgcgtgcggtgtcgatcttcacgacctggcaagccagccaggcacccaagccgcagcaaggatcgctgtttaatgacgatggggagtatgcgtaa

SEQ ID NO: 337104 - DNA, 213 bp, Pseudomonas aeruginosa
atggaggtgctaccgacgttggatgtgggcgaggctgtggtgttgggcgatgccaccctgctgtcgactcgtatcaagatgtcgaagcccaagcacgaaccacgtagtgcaatgatccgcttctggacccgttgggccgccccaacggcacaagtcgatctagttgccgccgtagaaaacatgcgccgccagtcccgcgtacaagaagattaa

SEQ ID NO: 337105 - DNA, 1020 bp, Pseudomonas aeruginosa
atggcactcgatgcagcaatattgcagcgcctaactcaaggttccgcatcggatgcgtggcaattcattattgagcgcacgcttgatatcgcttcacgaccattggccgagagcaacgcaccgggcgaggtcgtcaagcgcgaccgagagatcggagagcttgatctgtttctcgcttccagtggttgggatctgtggcagtgtttcggtcaacccgagatcagcgctgtcgagcgcacttccgatcgtctagctcgttggtgggccgagccgagctatggcaataacgcagcccgtgctgtgctggttctggatgccttgagcttgcgggagctgccttggttgctgcagggcgccaaagagcgcggttttactctgcaaggtgttacagctaccgcctctgagttgcctagtgaaaccaaccaattcgcccgtgcactgggcttggcaagtcgcagtcaattgcaggccaacggaggtggcttagctcacaagctgcaaccggctcagactgagaccatcgatctaccttggaaggactgtgaaagtctggttctcagtgcgtccggggcgaagaactgggtgttctggcatcactggccggatgccaagctgcatgactacggcgcaggccaggggcttgagctgctgaccaaggacgcagcgcagcagctttccagcgaggacttttgggcctttgttgagcgcctggctactgggcggcgcttggtcattacctcggatcacggctacgccgccacgggttacttccccgatgccgatggtgaggtcgctgcccacctcaaacagactttttccagcgggcgtagtaatgctggtaatggtgaccctggccccttcgttcctccggttgctttgcaaattcagagtcctcacgggactcatttgttggctatggggcgaagaaaatggcgtagccaaggcggttacccgactctgacgcacggaggcctctcgctgttggaggtgttgtcgccatttgttgagctgaccaaatag

SEQ ID NO: 337106 - DNA, 2748 bp, Pseudomonas aeruginosa
atgcttggattgactttacgggaagagtttcgaggcaagcgcctcaaagggacagcaatcgagctctccaacgacgcaaatactggtgcgacgcaaattgccgcacagcagtttcttgagatcacctatccgacccatgacctgttaaagggcattgaggccgtaggccctaaccaggggcgcccggtggtagtgatcggggagcgtggtctaggtaagtcccacttgatggctgctctttatcacgccgttaacgatccagtatcgactggggcctggctaaacggatgggctgccacgctaggtgatgcccatgtcagtcagatcgctttgcgcaatggaatgttggtcattggcgagagccttcaccgccagcgctacaaatttttgtgggatttgttgttcgagcgccatcctcgcggcgaatttatcaaaggtaagtgggagggtatgggggcggccaagaccgatatcccatctgacaaactcatcgttgagctcctagagcacacgccaacaatgttgctgctggatgaattccagacctggtacgacggcctgacaaatactaagcagtacccatggaagaactgggcgtttaacttcatccagatcctttcggagattgccaaagagcggccagatttgttggtgctcgtgatctccgtccgtaatggtggcagcgatgcctaccagcaggtacaccgcgttaatcctgtagccattgacttcaaagcggggggcaatgctgagcgcatccagcaggatcggcggcgaatgttgctgcaccgtttgttcgacaaccgtcttcagatagctgacggcactattgagtcattggtcgcccagcacgtctcagaatacttccgcctgcttgatgtgccgccggccgagcaggagcgcaaacgccgcgaattcaccgagtcttggccttatgcaccacacctgttgcgtctgctggaggaacaggtgctgatagccactgacgcgcaggaaacgcgcgacatgattcgtatcctggccaacctttacaagagccgtggcgaagcagtgcctgtgctcaccgccgccgacttccggctggatgacgatgcctcgggcattggcgcgctgttggactcggtgtccaacgagcaccatcgcaccctgcgagaaaaggcacagcacaacatcatctcggtaaccgaggcagtgtacgaccatgcagatcttgcgccgcatttacaagagattgtgggcgcactgtggctgcggtcgattgccgttggcaatcttgccggggccgatccagccacgctgcaggttgacatcacgcgtagcaagccggtagacggtaatgccttccaggttgaactggcgacgattgttgagaacagcttcaacatccatcaggacggcccacgcctggtcttccgtgaggaagaaaacccacgggccaaattgatggcttgtgcccgtaacgacaaactgttcaccgatggctctgatcaggcgcagctggccaagcagattcgctacgtaatcggcggcagcgacgaggtcgcaaaaaacttccgtgtaattgcattgccgagatcctggcagacagacccatggacaccacttgacgaagccgagcagcctgagcgctgggatgaccgtctgcccgtcctggtactaccggaagagccggaaaaaattgatcaggcacttggccgctggctcaaagatcacctgcaaaagcgtcgtaacaccattcgcttcctgctgcccagatctggttccaccaatgcattcctggatcgagatctgctcatcctcgcacgcgctgaaatgaaggcgcaggagtggagcggccagagcccggaatacaaaaaactgcacaaagagttcgaaggcaccctgcgtgaaaaccttaagaggcgctttgaccgtttcgctgtactgcaccgctatgatcaccagagcccattgcaatcccttttcagtgtcgagcatctgaaaaagcaaggagcacaaatccccgaaggtatcgaggaaacgctgaccaacgatcttttcgtgcctgaagacttcgaagacctcgtgctcgaggccgcctcggaaaatgcgccccttggcaagctactgcgcgagctgcaggaaccccgcccggctggccaggactgcatcccctggctgggtgaaaccaccatgaaggagcgcatcctgcgcctatgcgcacgcggcaagatcgccatcaacctgcgtaatttggagcatctgcaaacccacgcaggcgaagacgaggaatcggcgtggcggcgcttgcggcccaaactgtcctacaccgggcgtcaactggatgaagttttcctcatggagccctcggccgtgcccgctaccggcggcactacgccacaggtgccgcaattacccgcagctggaaccggaggcgacatctttggggggggcaccgcttccggtgtacaagaaccgcaccccggtacttcgcccgagccagccccagcacctggcgaaatcttcggtggtactggcagtactaccaaactgcgcatcccgctctccaacccgccaacctcgccgctcaacctgatcggcaagcttgaaggatggggcattggcccagccacgcccgtggcagaggtctcgatcagagtgtctgctggtcaaagcacgcagattaccggtgctcagctcaaggaactgcttaagaagttgccagacggaatgactttcgagttgagtcttgagaaggaggacagctga

SEQ ID NO: 337107 - DNA, 1038 bp, Pseudomonas aeruginosa
atgtgctttgatgcgccagagaattctaaattgtatttggagttttatggagatgtgtctaagcctgacgcgagttatgaggttaaacatcacgccggcgagcactttataactagcaactctgtcgatgtatggaagactttgaagaatcatgttgaagactatgaaaggctttcgattttcaattttttggtgctgttaacaacgtctaatatacgaagtgactctattttttatgggtgggaaaatctagctcctgaggaaagagcacaaaagcttctggcgcatattccgtcagagggggtggagaagttttttaatgctgtaaaaaatgcgccaaaggagcggttgttagatattctaggtagattctcaattatcgaggggcagccaaaggttaaggagaagtgggaactagtgtcgcaacatgcttttctcgcgttggtacctaaagcttatagaaaagatgcggtttcgagtttcatagggtggttagataaggtcgctgtttttaatgaagtgtgggaagtagatataaatgattttagatgcgatgcgcaggtcacgcttgggccgtatgcatctggtgaacttccttttccacaggcttttttggatgagtccgaatgtctggatgaagctggagagttcgtttttattaataaaatgcgtgcggtgggcctgaagcgtaaagatcaggaaatagcgttctcatgttatatgagagctctaagaagtgaagagaagttgttgtttaatgcgcctgctctagttgtgcatttgtctaactatttaaatggagtttcaactttactggagacggtgaaatccaagaattcatatagtctttcagctggggatgcggggacggagaaggcgcacgcctgctcccgatcttcttattttgagtcgctaggtgcaccatttgaacagattaaaggggtttctaatgctgagaaatactatcgcgatgggaagattcatcatttgttaaatgatactgagtttgagtggttgtatcgggaggatgatctgtga

SEQ ID NO: 337108 - DNA, 1926 bp, Pseudomonas aeruginosa
atgaattgcataattaagcggctgattattttgggctgcggtagtcagaaacgagaaataccgttctataaaggcttaaacgtaattacgggtgattcgaagaccggtaaaagtgcgattttagagatagtagactattgtttgttttctagtaggtccactatacctaagggtgtgatagaagactttgcgcagatttttgttttggtccttaatgttaaagggctaaacgtcgtggttgggagatcttcacctaggtatggggattcgagtaaggcttatgttactacggagatatctgaagactttttgaaggaggtcagcaaagagtattttagtaaaattgtggcgcgcccattgaaagaggcacagtatgaattagagtcctatctggggctggcagttaaagataccagaacggacccggaagacagcctccgtagtcatggcagagctagtataaggagcgcaactccacttctatttcagcatcaaaatttaattgccaataagcacagtatcttttatcggtttgatgacttttataagcgaaagaaggcgatagaggactttccagttttaataggttgggaaaagggcgatttctatgttttgcagcgagagcttgagtctcttgaaaaagacctgaaacgtgcaaataaatttaaagctgagctagagagggaggtcggtgagagcgccgaaaagataaggagggtactacaaagttattattcgttcattgggctagtatttcctgatgttgtggagaagtcaaagctcatagaaatgtcaagagcattgcctgattatagctattcggtggattctggttcggagataggacgtcgcctttctgtgatgcttaccaagcggaaagagctagtagttaaacttgatgaggttgaaaggtcattagatattttgaaagaaaactcttctttgggtggcgttcagattggtagttttaacctgtttgaagttaccagcaagcttatttctagcggaggtggggattcatgccctgtgtgtggaagtgttgaccttacgacctcgaaggctatagctgaggttgaagaggctagactggctttgctatcggagttaaagggcgtccaaacctatgttgttgataactctaaagagactgagcggcttcggaaggagagagcagacattcggaggcagatgtcgcttttgaactcggaaattgaaagcctagaaaagcaagactctgaagtaaagctaaagttgtcaatcagagatgccgcctttacccgtaagggaatggctattagtcaagtggagggacttgcagcgggattcgatatggaggccctccaaaaagaaatagccactcttgtttctagaataaaagaggtaaagaagtctcttagtctttaccaggtcgaaggaaagataaaatctgcggaatcgttcttgtcaaagaaaatgactgaaatttgcagtcgtttagattttgaagatgagcttaagcctggtgttcttcgtttttcactaactgattttaatttctggtatgagcataacggagaaaaaatccatctgtcagagatgggcagtggagcaaattggcttgcttgccatctttccctgtttcttgcattgctctttttaaattgcaaggcaaaaaactcttctatcccgagcttcttgatattagatcagccgagtcaggtttactttccaaataaatacggagttttggatggtgaagagggggatctggatgagaatattttacaggtgcggaatattttcaacgttatagtctcagtggttttggaaattgaaaaggaatgcggttttgtgccgcaggtcattgtcatggagcatgcggatgagtctgactttgataattatattttaagacggtggaagaaggacggagaaaaacttatctag

SEQ ID NO: 337109 - DNA, 771 bp, Pseudomonas aeruginosa
atgactatctcagaaaaaaacacatgctcccaccctttgataatagttctaataataataggcatatttgtagcaggctcctatatattcaaattctacaatcatagtatttcagccaacccagaacaatggggacagcttggagactatattggcggaacactaaacccaatcttaagcttcatcacaatcatcctattaataaaaactttaatcattcaaagaatgcaactacgcacctctgaggaagaactagctctaacccgaaaagagctagaaaaaacggctgaagcggcgacaagacaggcaagccattttgagagagagtcaaaattaaaagagcatctagcactcattgacaagctagcaacaagaataaatagaaattttaacgaaaacaagcttgacgatgaaaagtcattacatgagttcaccaacacttactcgctcaataaagataacgcccttataaaaaaacagaagcaatattactctaaaatcggctcaaaaacccaaagagtcgtacaatggataagtagcgatttagaaagactagcacaactaataaaaagctacgaagaaacatccggcatagcagaaaaggaaaaaactaacatctctcccatacctaaattctaccagcaagaatttggagaaatggtttccgctcttcatgcgaacacaatgctaagtgcaaaacttaaagagttctatgcaccagacgcagtccactcccctccccaaaaaataaataacaacccaaacaattaa

SEQ ID NO: 337110 - DNA, 336 bp, Pseudomonas aeruginosa
atgagagcagttgcatccaccatcgtacttttgacgctgtgcggcttcgcatacgcagaagaatccaagcctttagcgactcaggccggcgaggcgacagcgcccatcgcggaggctatcggctcaggattcagccgcatcgttaccgagttcatggcaggtacggatggcatggcaggtgacgccgcaaggaagagcctcaagatgcaggacaaacgcgacagggaagcgaacagaggcgtgcgtaagcccatgaaggaatgcattaagccgggaaatgtcattgacgatgatgtaaaagaatgcatggaaggtattcgaaagaaagaatggtaa

SEQ ID NO: 337111 - DNA, 555 bp, Pseudomonas aeruginosa
atgactcagtcgaagaagaattacattaaggttcatggaaaactgcgcaaggcgattgaggagctagcagaagaggaagattacgacatcgtcctaattgactgcccacccaacttcaatatcgtcacaaaaaacgcaattatcgccagcgaagaaatacttatacctgcaaaacctgattacctttccactctcggcattgactacctgcaacgaagcgttaatcaacttgtaagagagttcaatgagtatgccgagctagatgacgaaacagacaatatcgagccgtatattctcggcgttatcttcacaatgattcagatcactagcggaatgccaatcgccgctcagcgtcagttcatttctcaaaccaaacgactaggcgtcccaaccctggagaattacttcagagaaaacaaaaccatattcgctgacgccccccaagcgttgataccagttgtaatgcaacattactccagcaatactcataccggtatagttaccgagattgaacaggtagtgaacgaattcgacaccatgctggggggtctatga

SEQ ID NO: 337112 - DNA, 1593 bp, Pseudomonas aeruginosa
atgagtgattttcttgaaatgcaaggagacgatccggttcctctaggactcgcgaaaatggaggccagaaatgttgacaatgttcaatctctgataggggttattggtcaatacgcaggggagcgtgttgctacaactagctactggccggggtgggagtcaagagatgtaggcccggtgggcggtggcgtctatgtctggatgccgagcaagccgaaggcttatcacaatgcagggaagtatttcagcccaactgttccatgggacgggagtgagtctacattttctgactacataagcgggtacggggagacagacccatccggtgtaggatgctgggtgctgctggacaagcctggagtctttgatgtcctgcagtggggggcaagaaatgatgcgacagccaatggcgcaaatgatgccgtgattcagccgcttcttgattatgtagagtccgcaataagcggtgggtttggaggggtagtagaatttcctcgtgggaattataggtttacagtgtatttttctgtgcgagatagaacggtattgcgaggggagggaactagcgcaactataattcagttttatggcacaggtacaggtaactgcatcacactagggcctactggccctagacaccctatccatccttccggccactgggtatttggtactcggattgagaatttagcaatttctggagcaaatatttacagagggcttgagcgcgcaatggtgtacacagatggtgcgcatgagcatagcggattgtttaatgttgtggttagggattttgtgtcatggggggtgaattataatacagggaatggcggtcctgcgtcatttagcttctccgatgttgagatgtatggctcggatacttccccttccgcggggacgaaaagaggactcgtatgtcaagcaggtggatccttgattgttgttgataggagcactatcactggaggggcaacgtataggttggatcaagcaattctcatgcttaaagataatctgatagctaatggggttcacgtagaacagtcagcagtaggggtatctcttagtcagactgattcgcaatcgccgaaggttaatgttatttctggggtgacaggcaattcaactgttgcagaactttttgtaatctcgtctgcattcgaaggtagcgttagtgcaagtgggttggtgaatacaagcctgtctgtgacggggttgggtgttattagaaataatcgaactggagaaaggtatgttgatagggcggtctcttcgtataattatgggtttagtgttgagccgggtgcagcgataagccatgggcgtatatctgtaacttcaggggttgcttcggtagttaagtcgactgggaggggatttaccacgacaagaactgcggttggcgttgtgcgagttgtattaagttcgcctatgcctgatgcaaattatgttgtaaattcaacggcaaggtcaactacagggatggtagtagagttttcgccgatcagtactacggtattcgaaattaggacttacagtacctctggtgtcgcgagtgatccaacttctatttggttcgctctgtatgcttga

SEQ ID NO: 337113 - DNA, 1167 bp, Pseudomonas aeruginosa
atgggcagaaagccgcgcaccctgccgaccggcattgaagtcgtccaagggaagtacgtccgcatccggttcacctggaacacccgacgctgcgagacgcttgcatatcccccgacagcgaaagggatcgccgaggccgatcgtctcagaactcaggtagtccaactgatcaagctgggggtgatgaccgaagagaagtacgcggagttcttcccggactcttcttacgtcaaaagtgcgtcgattcccaccttcggcgagtacgcccaaatctggctcgacagcagggaaatcgtcgagacaacacgcagcaactacaagggcacgctcaaccgctactggatgccacatctcgccgaggcgaggattgatcttgtgtcggccgccgatgttcgccgcattgtcgccaataccgaatggagttccgctggtgtgcgccgtaacgctgtcgacaagctttcgagcatcttcaaatcggcgctggcggacggcttgatcaatcgcaatccgtgcgcatcgattgctcggccgcgtctcgcgaaaaagcaggtagatccatacgagcgcgacgacgccgaacggatcatcgggtacctctacgaaacctgtcgcgggctaaccgaaatctatgccgcatggttcgaatttgctttcttcacggggatgcggccggcagaacaggcggtgctgaggtgggcagatattgatatgggcaagcaaactgcccatgtgtggcggggtcgggtgaagggcaaggtctttgagcgcgtgaagaccaaggaagagcggacggtgctgttgaacagcagggcaatgcatgcgctcagggttgccgagcgactgacgaagatgcgtagcgagtatgtgtttgcgccagcagacggagattcatacatcaagtccgacagcacaacgagagactatctgctcaaggccctggcgaagctcaagatcaggcgccgccggcagtacgacactcggcacacctatgcgaccatgtgcctaatggcggggatgaatccggcgttcattgcgaatcagctcggtcatagcgtacaaatgctactgtccacctatgcgaagtggatgaactctgatgccgacagggccgaactcgataagcttgatcggctcgcgattggtacaaaagtggtacacaaggcatag

SEQ ID NO: 337114 - DNA, 324 bp, Pseudomonas aeruginosa
atgggctacccactacccggattgcatatgccctaccagcccccgcaataccgcccgccgcgcaggcacgaaatcgctggcctccgctactaccgaactgcctcggcgtataactggctcggtgtcgccggggctcacccctcgcgcggaatcgaattgctccttgagcggtgtgcccctgacgtgctctcgccgatgttcaacatcgagatcgacgcgatcctgagccaggcagacgagtatgcgcggtctcgcgaagtgctggaccgcgaggtgctgcgcgaaatgctcatgcacctgatttcgaaggccgcgggcgactga

SEQ ID NO: 337115 - DNA, 204 bp, Pseudomonas aeruginosa
atgagcatggagttcatccgcaaggcctatgccgttccatgcaagcgcggtggccaagtcatttaccgagggcgtggcaccgaagagcgagggacaatcacaagcgccaagggcgcccacctcatgatcaagctcgacggcgaaagaaagccaaggaagttccacccgacctgggagttgcagtacctgacggagcaggcatag

SEQ ID NO: 337116 - DNA, 414 bp, Pseudomonas aeruginosa
atggcgagagacgatttcaaactcgaacgagacctcgctcgaaaaaacttctgcgacgagcaggcagcgaattatcagttgcaagcgcacttgaaagcctgcctcggcgaactatcggaactgcgcgcaagggtggtggttgtgccggaacgcctgacgaacggcgacagtatcagcaggatgttgcgcgaaatcggttgcgacggtgacgtcagttaccaccatgcgcgcgaaatttggaacgcctgcatcgacgaactgtcgcgcatcaacggcctgacggtcagcgaggggctgttgcggcgtcttgccaggccggcacaccgttacgatgaggttttcactgtggatcgacatgaggccgccgaagaactccgcgccctgctgagcgagcaggagggagggaagcaatga

SEQ ID NO: 337117 - DNA, 1233 bp, Pseudomonas aeruginosa
atgcctaagctgacgaagaactacatcgacaagatcaccgcgcccgctgacaaggaggcgttccactgggacgactcgctcaaggggttcggcctccgggtcactcctaccggcaagatcacctacatcgtgcaggggcgcgtcaacggcagttcgccccgtatcagcatcggcccgcatggggtcttcaccgtcgatcaagcccgtgatgttgcccgcgagcacctgcgcagcatgcgcatgggcatcgacccccgagccgtcgccaagaaggaagcagcccagcgcgtgaccctccgcgacgtggccgacgcctacaagcgcgaccgccccttgaaggacagcagcaaggccgagattgaacgccatgtgaccacaacctttgaggcatggctcaagaagccgctcagggacatcaaccgcgagatggtcacgaagcgcttcaacgacatcaagaacaaaggcacgcgcggcgatgggccagcccccgcgcaggcgaaccagtcaatggcggtgcttcgcgccctgttcaactacgccatccgcgaataccgcgagccggacgggtcgccagtgctgacggataaccctgtcgatgtgctctataagaagtgggtgccgctcaagccccgcaccagccgcgtgcctgatagcaaggtcggcgcggtgtggtcattcctcatccatgcccgcgaccaagcctacaaccgtgacacgctggcaagcattgacctcgtgatgctgctcatgctcaccggcctgcggattggcgagtgcagcgaactgacatgggacagggtcaaccttgaggaaggctggattcacatacccgacccgaagaacagcaaccccgtttggctaccgctatccacgcaggcggtgcagttgctgaccacgcgccagcgcgtcaagggtagcccgttcgtgttctcgtcctggggcaaggctgggcacatcaaagacccgcgcgacaccatgaagaaggtcagcgaagcagcaggtacgaagatcacgccgcacgacctgcgccgcaccttcacgaccatcggcatcgccaattgcggcattgacttgcacaaggtcgaattgctgacgaaccatgtgcccaagggtgtgaccgcgcgccactaccttgagacgagtcacctgcaatatctcaagcctgaaacgcagcgcatatccgactggatcgagcagcaggcaacggccttaaacgactgttcagaaagttaa

SEQ ID NO: 337118 - DNA, 246 bp, Pseudomonas aeruginosa
atgaccacaatttccgcgctcgacccgaacctgcgcaccaatgacgaagccgccaagcggctcaagatcaagcccaacaccctcgaaatctggcggggtaagggcaaaggcccgaagttcatcaagctgggcgattccaagcaggctcccattcgctatcgggactccgatattgacgagtggctggagcagcaatccttccgcagcaccagcgcctacgcgccgaacgccaaacaagcagtttga

SEQ ID NO: 337119 - DNA, 1119 bp, Pseudomonas aeruginosa
atgtcagaaggcatctccatgttcattcacggcgcgggaaagtatcggcaggacgtggaagcacacttcagctttaacgaatatgcctccgggcaagcgctgacgaaggcagtcgccaacgctccttgctttacccacatagcgggcgagtttggacgcaagctcaaagccatgagcaacggcaaagaccccgcaatgcagagcctgcgctctgtcatgacaaagatctattccaagtccggccctaacgccattgctggcgggatcgactacagcaacaaggataacaacgtcgccagcatcgtcggcgcgtcgtacagcatgataggcgactctacgccgggcaccttccgggaagcattaacctccgacatgatggaggacggctttctatctcgcttcacggtcgtggaatacacaggccagcgcccaccgagaaacccgcattacttcaccgaactgccggacgcatgggcgcaatggttcgcctcgctgacagctcacgcccaactgctcgcatcaaacggaaagcctttgcccgtgcagttcgatgagccagctacggagctattcgatcagttcgaccaggaatgtgacgccgaggtgaatagcactgacgatgaatcacgccgtcagatgtggaaccgcgcacaactaaagtcactacgcatcgcggcgctgctcgcggtagctgataaccacgttcacccgtgcgtcaatgtcgaacacgcccaatgggcgatagacctaattcggcatgacatcgctttattcagcgagcgcctgcgcagtggtgatattggcgagggaagcgacgtatgtgaacgcaagctgctctccatcatgaaggagtatctcgtagaggaaccttctaaggggtacaagattcaccccagcatgcgggcaaattcaatcattccgcgtgcgtatctccagcggcgcaccgcctcgctaccagccttccagaagcacaggtcgggaagcgctaccgctgcacttgaccacgcattgcgcagccttgctgatagcggctacatcatggaagtgaaaaaggatgtattggtagagcagtacagcgaattcggcaaggcgttccgcattttgaagctgccccaatga

SEQ ID NO: 337120 - DNA, 408 bp, Pseudomonas aeruginosa
atgaccgacaagacctacacgaaacgtgagaacgcccgccgcgctggtgttgccgctggggtgcccgccgaactggtagagatcaccgttcacaaaaacggcgatgaggtgcgcttcggctggaaggcgatggaagcaccggcacccgctaccgccgacgctgtgttgaccacaagcaagccgaagaaagcagccccgaaggtggagcgtgtcgagcagaacggcgtgaagcgtccaaaggatggcgggctgtgcgctgcggtttgggcatggctggacgcacacccggacgcaacgatcaaggacgcgaaagccgctgcaccggagaacggctggaacgcgaacaacgtggcctgcgagttttacgcttggcgcaagttcaatggcctgtcacgcgctaccgcataa

SEQ ID NO: 337121 - DNA, 717 bp, Pseudomonas aeruginosa
atgacagacaacattgatccgcgtatcacgccaacactgcaccccgataacgtgaagagcatcgaaggctacgacgagcagaccgcgccgtatctcggcccgaccatgaccgcattcagcaccgcctatgaaggtgtgcgcgctgtgtggtcagcccgagaagctgccgccctcaatccgacctggaatgaggccatgcagatcatccacaccgatgacttcgcgcagaagcatttcaacaaaatctgcaagagcttcgacgtgacccgctcgaatctcgaaaagggtattgcgatgctggagcagcagcttgccgcacctattgaatcgaaggcagcgcaaagcatcagcgccgagattcgttcctacgcgaagaacctgcccaacgagaagcgacacgcatttatccagcaggccattgacgagggtgaccacactaccgtcagcgcactgctgggagcgcctgcatacctgtccggtctcgatgcgaacttccaagctacctatgttcgcttctggaacgagcgcagcgcgccggagattgcccagcgcctcaaagcaatgaagggtgccaagcagatgatcgaagaacgggcaggcttggtcttcaaggagcttgagaaagcagtcggcgcaccaccgcacaaagccgccgcacttcgtcaagccaagacgaatgctgagaaggcgttcgtgctgcaagacctcggtcagtga

SEQ ID NO: 337122 - DNA, 468 bp, Pseudomonas aeruginosa
atgaccgaagtagttcagcctgaatggctcaagggctaccagcccgacaccgcaccgccaccgggcaacccgaaatggcagaagggcatgaagtccccgaaccctgccggtcgcccgaagggcatcagcgacaagcgcgccaagctcgcccagcgcatgctggacgacgcgcaaggcatcgtggatcgaatgattgcccaagcgctagaaggtgacccgcaagcggccaacctgatcctgtcgcgtgtcatgcctgcactgcgcgcacagtccgagaaggtggagtttgatttcgatgcgtctgcatctgtgaccgagcaggcagaagcggtgctgcaagccatctcggaaggcaaggtcgcgcctgatgtaggtaagcagattctggaaggcatctcgaccctctacggcatcaagcaaatcgcagaacttgaatcgcgcttacaagccttggaggacaagcaatga

SEQ ID NO: 337123 - DNA, 198 bp, Pseudomonas aeruginosa
atgagctacacgaccccttatgcgtggttaaagcctcgcagcgctgcgcagatcgcgcaggagaagaaggaactggaaggcgataagcgtctgatcgtcaccacatgctacgaggcgattcttaacagcgacgaaccatctgtccgctggcaagccgcccgactgcttcaacgaattggcccactggaggatcactga

SEQ ID NO: 337124 - DNA, 183 bp, Pseudomonas aeruginosa
atgcgcaatatgcacaccgacccgcgcgagaacgcgccagtcagcacgcccgcaacccctgacgaggtgaagctcattcaccagcaccgcattgaggcacaagcagaccggcaaaccatgtctgacttgaacctgctacgcgcggtcaagctggggcaggcgttgcgcgaactgaaggagtaa

SEQ ID NO: 337125 - DNA, 222 bp, Pseudomonas aeruginosa
atggccgacacgcggggcatgctggcacggttgcgcaagctggagcgctcgcgcggtgctggcgaggaaatgtgcgactggatcagcgagaacttcggcgctgccgttgctgacggtcgcatgtgtcccgctgatggccccgtggtgctgcactgtctgctgaattggatcagcgacggcaccgcgcgaagcggaatcgctggggagggtctgctgcgatga

SEQ ID NO: 337126 - DNA, 354 bp, Pseudomonas aeruginosa
atgagtcaacccgcatggcttgcgaactggcaaccccagccgacgaaccaccgcagcgggccacaggtcgcgcccaagcccaagcccgccccaaacctcaaagcagaagccaacccctatggcttcgtgataccccagcgctggccacaggatggcggcacgcgacgggaaccagtccttgacgttgttttcgatccgccccgtgtggtcaggcatgtcgggtggaagaagtgcatgcgctgcgggaagtggttcttttcggaagacgtggcgcgcttgcgcatgtgcgacgagatgagcgccacaggggttctgggctgtcgcagaaaagacgttgattacgacctgctctag

SEQ ID NO: 337127 - DNA, 276 bp, Pseudomonas aeruginosa
atgcgccgattgttaattaccacgcttgcagcgcttccgttggcggtgttcgccggtacgccgaagacggtcactcttgatgtccagaacatgacctgtggcacatgcccaatcacggtcaagaagtcgctcgaaaaggtcgttggcgtgagcgcggtgaaagttgattacgactcgaagaccgccacggtgacgtatgaccctgacaaggcgcagccgcaggtgctgactacagcgacgacaaacgccggttatccctccacagtgcggaagtga

SEQ ID NO: 337128 - DNA, 348 bp, Pseudomonas aeruginosa
atggcacaactcaccggcaacggctcattgattgcgggtgccttggccgcaatcggtgcctcggtgtgctgcgtcggccctctcgtgctgttgaccctcggcatcggcggtgcatgggtcagcagcctgaccgcacttgagccatatcgaccgatcctcatcggactgacactggtgttcctcgggcttgcgttccgcaagctctatctagtgcctcaggcctgcgcgccagacacgccttgcgttgatgcacgaacgcgcaagcgccagcgactagtgttctggatcgttactgtgctgctcttcgccttgttgtcggtgccgtggctggccccactgttctactga

SEQ ID NO: 337129 - DNA, 627 bp, Pseudomonas aeruginosa
atgcgtacaccactgctatccgcgctgctgctgggcctgctggccctcggcggctgcagcctgccccaacagcaggccggcgcgccgaccgagcagcggctcggcacccaatggggcgaaggcgtcgcctcgccggtcacctcggtggccctacgacgtctatcggagcaaccggtcgatcgccgccaggtgttctacagcgcgagccgcttcgatggacgtgccatcaaggaactgcccctggccaagggccgggtcggcttcgccgtactcgacgaggatggcggcaagttcgacctggtgcagcaccgcagcaccctgcagctccagggtcgtgaaggccagcgctaccgactgtggctgaacaacctcggcagcgcgacctacgaggtggtcgccacggtagacggcctggacgtgctcaacggccagccgggcagcctgaagaaccgcggctatgtgctggaaccgggcgagaacctggtgatcgagggcttccgcaagagcgaacgggaagtggacgctccggccagcggtcgcgaggcgccggccgacggaccgcaggcatttcccgccgacgcccggaacggcggcggctacgcgccgccgccgcgctatcgcgactga

SEQ ID NO: 337130 - DNA, 771 bp, Pseudomonas aeruginosa
atgagccggacctggcgcctgctgctctggccgctgctggtggtggccgcggtgggcgcctcgttcgcctacctggacatggccaccgcaggtcttttcagcggcaagggactgggccagatggccgcctacgccagcgagttcttcccgcccgacctgtccgccccgcacctgcgggcgattggccgcgggctgctggaaaccctggccatgtcggccatcggcaccctgctggcggcgctgctcggcctgctcttcgcgctgccggcggcaggtcgcttcggcgtgccggcgcagagcctggcgcgactcctgctcaatgcgctgcgcgcggtgccggagctggtctggggtgcgctgatggtgctggcggccgggctcgggccgaacgccgggaccctcgccctagccctgcacaccggcggcgtgctcggccggctgttcgccgaagccctggagaacaccccggcgcagcccgccgaggccttgcgcctggccggcagcggacgcctcgcggcattcgcctatggcaccctgccgggggtctggccgcaactggtggcctataccctgtaccgctgggagaacaatatccgcatggccagcgtgctcggcttcgtcggtgccggcgggctcgggcagatgctctatttcagcctgagcctgttccagcaggcccaggccgccacggtgatcctggccatgctggtcctggtgctcggggtcgacagcctgagcgcctgggcgcggcagcgctgggtcagtcaataa

SEQ ID NO: 337131 - DNA, 834 bp, Pseudomonas aeruginosa
atgctgaacgccgcttctccaccgcgcgatcccgccgccctgccgcgcctgctgctgaccctggccgcgttactgctgctctggccggggctgcgcctcagcgaactggatatccccggcctgttcagcggcgacaacgcgcgcaccatgggcggtttcctcgccggcttctggccgctggcgcacgatcccgagttcctcgccctgctcggccgcgcgaccctggaaaccctcgccatcgccaccgccggcatggccctggcctggctcctggcgtttcccgccgcactgctggcgacccgcgccctgtcgctctcggcactgccgcgcggcggcctgccggcctggtgggcacgggcactgcgctggccggtgcgtggcctgctgatcctcctgcgtagcgtgccggaaatcgtctgggcgctgctgttcgtccgcgccgtgggcctggggcccaccgccggggtgctggccatcgccatcacctatgccggcatgctcggcaaggtctacgcggaaatcttcgagtcggtggatccgcgccccacccgcgccctgctgctgggcggcggatcgcggctggcggcgttcgcctacggggtgctgccgaacgccgccggggaaatgatttcctacaccgtctatcgctgggagtgcgcgatccgcgcttcggtggtgatgggcttcgtcggcgccggcggcctcggccagcagatcgacctgtcgctgcggatgttcgccggcggcgaggttgccagcatcctgctgaccttcctcctgctagtcctcctcgccgacctgctgagccgcttcctgcgcgggaggctggcatga

SEQ ID NO: 337132 - DNA, 1830 bp, Pseudomonas aeruginosa
atgcgtcgcctctccttcctgatcctcggcctggccgtgagcctgcccagcttcgccgcgattacccagagccatggttatgcccaattcggcacgctcaagtatccggccaatttccagcacttcgactggaccaatcccgacgcccccaaaggcggcaccttgcgcctgatggcctcgggcagcttcgacacgctcaacccctacaccctgaaaggcaccagcccgatcggcaccggcgatttcctccagtacggcgtcaatgagctgaacgaaccattgatggtgggcaccggcctgtacgacccgtccggcgacgaaccagcctccagctatggcctgatcgcgaagagcgtggaatacgcggaaaaccgcagctgggtggtattcaacctgcggccggaagcacgcttccacgacggcaggccgatcaccgccagcgacgtggccttttcctatcgcaccctggtcaagcaggggcacccgatgtaccgcacctacctgcaggaggtgaagcgggtcgatatcctcacctcccaccgggtgcgtttcgtcctgcggcgctccggcaacccgctgctgatcctgcgcctgggcgagcttccggtgctgccgcagcattactggaaggatcgcgacttccgcgccaccaccttcaccgcgccgctgggcagcggtccctatcgcatcgtcgagatcgatcccgggcgccgcctggtgttcgaacgcgtgaagggctggtggggcgaaaaactgccggtgaaccgcggcaaatacaatttcgaccgggtcgtggtggatttctaccgggacaacggcgtcgccttcgaagccttcaaggccggcgagttcgacttctacatcgagcaccaggcgaagaactggctgaacaactatcgcttccccgcggttctgcgcggcgatgtgatccgcacggaaatcccgcaccagatccccagccagacccaggcgttgttcatgaacacccgtcgcgccgtgttcaaggagcgcgcgctacgccaggcgctgggcgagatgttcgacttcgaatggaccaatcgcgccctcttcagcaattcctacctgcgctcgcgcagctactacccgaacagcgaattcgccgccagcggcgtcccggagggccaggaatggctgtacctgtcgccgtaccgcaagcaattgccggcgcagttgttcaaacagccattcagcctgccgaccaccgaggggcgcggcattccccgtgaaaccctcaggcatgcactcggtctactggccgatgccggctggaagctgtccggcgaccgactgctgaataaaaagggcgaaccgctgcgcttcgaaatcctgctggtcaatccgagcctggagcgtattctccagccctatcgcgaaaacctcgccagcatcggcatcgacgcgcgcctgcgcaccgtcgaccgcgcccaatacaagcagcgcctggaccagttcgactacgacatgatcctcatgaccctgccgcagaccctcagtcccggcctggaacagtggcagtacttccactccagccaggtgaaggtcaagggcagcaagaattacgcgggcatcgccaacccggtggtcgacgccatgctcaaccgcctgctcggcgcccacagccgcgacgaacaggtcgccgccgcgcgcgccctggaccggaccttgctctggcagtactacagcattcccaactggtacctcaattcgcaccgtctggcgtaccgcaaccgcttcgccttcgtcgccaccccgccctacaccctgggcctgcgcgcgtggtggcagaaaaacctggagacgtcccgatga

SEQ ID NO: 337133 - DNA, 243 bp, Pseudomonas aeruginosa
atggcgcaagtcctggctgccgtacccgtcgccggactcgatgccgtattggtggccgttgaactggtactcgaagccggcaccctgagcgccgaacacgtcttgaatgtcgtggcgcggctgacagcgaccgagccaccgccctccgtcgagactcacttgcagctcaaggaagcgcctgtcgcgaacacggcgcgctacgaccgtttacgcggcagcgtcgaggagatccgtcatgcgtga

SEQ ID NO: 337134 - DNA, 183 bp, Pseudomonas aeruginosa
gtgatcctgatggcgccgccgctgatagagcggacggtcgagacccccgcctcactgcgcctgctggcgtatcggtggtatggcgaccatacccgcgcctcggagctgctccgtctgaatccaggcttgcgcacgccgtacaacatcgaggccggcgaggtgctgcgtgcctacgtcgactga

SEQ ID NO: 337135 - DNA, 1065 bp, Pseudomonas aeruginosa
atgtgggacggctggtcggttgaatccgatctgctgacccctgccgatgccttcgagctggagctatacgccaagaagtccgaggcactcccctctgtcctggttgagggagcgccgtgcgtgctgacgctgggcggtgaccgggtgctgaccggacagatcgacgagatcgagcacgacatttcccgtggcggtgtcttcatccggatcaatgggcgagacggtgcggccgcgctggttgattgctcgactccgttcgtgtcgatgcgtgaagcggacctggcggaggtgatcagccaggtcgtaaagccgctcggtatcagcaaggtgaaaatccaagcggccaacgccaagagccgccgccgtatccagatcgagccgggccagtctgcgtgggaggcgctgctccaggtagccgaagcgaacgggctttggccctggatggagccggacggcaccctggtggtgggcggccctgactacacggccgctccggtcgccacgctgatcctccgccgagacggcaatggcaataacgtccagcgcctgtctgtccgccgctccatcgcgaaccgctacagccaggtcaccgtgctcgggcagcatggccagtacagcaacgatggctatgacaccagccggtcgcacctgcgctcccagatcaaggatgacaccctggcgcagcgcggcatcttccgccccaaagtgatcatcgacagctccagcgaaagccaggacatggccaccacccgtgcgcgcaaggtgctggctgatagtcggctggaaggcttcgagattcgcgccatcgtggctggccaccgcgcaggcaatggccaggtctggacgccaggccagcgcatcatggtcaagagtgagcctcacgggctggacggcaccttcttcctgatgtccaggacgctccggctgtcgcgcggcgaaggcgccatcaccgagctgcgcctacgcgaagacaaaatgtgggtcctggacggaaacccaccgaagaagcacaagggcaagtccaacccggactcggccttcattgagcagctgaggaacctatga

SEQ ID NO: 337136 - DNA, 525 bp, Pseudomonas aeruginosa
atgatgcgcgaagccgctgcagctgagcgccgcaacttccgtcaggcgttccgggccgtcgcggcacggaacacccatggcacgctgatcggtgtcgacatgcagggcctggccggggagtctgtgaccggcgagctgttccagcactatggcttcacctcggcgccgctggccggggccgagttcatcgccatcccggtgggcggcaacagcaagcacaccgtggtagttgccagcgaggatggccgatatcggctccaggtcaaagacggcgaggtcgccctctacacggacgaaggcgactacgtgcacatgaagcgcggtcgagtcgtcgaggtggtgaccgagacactcttggtcacggccggcaccaaggtgcgcttcgaaaccccgttaatcgaggcgacgggcaacatcaaggcagacggcgacgtgtccgaccatacccgctcgatgcaagtcgaccgcgacctctacaacgtgcacaagcacggcagcggtccaatccctagtccgcagcagtga

SEQ ID NO: 337137 - DNA, 351 bp, Pseudomonas aeruginosa
atggacgcaggcattgaccccacaacaggcgatttgagcggcaagcgcattagcacgctggccaacgccgtatacatccgcctcatcaccccgctcgggagctggtgggcggatacctcgctggggtcgcgtctgcacgaactccaacgatccaaggacctcagtcgagtcggcgcactggccaaacagtacgccgaggatgcgctcaagccgctgctcgatgacggtcgcgccaaggcaatcgcggtaactgtcgaacagcctcacaacggccgactggagctgcttgttgaggtaaccgatgtcaccggagaccgccaggtcttccgtcatctggtaagggtcatctga

SEQ ID NO: 337138 - DNA, 1071 bp, Pseudomonas aeruginosa
atggcgtattcagtggaaacctacgactccatcctggccggcatcctccgcgatatccgtagcctgctgcccgaggccgacatcggcacggacagtgaccattacgtccgttccgccgcagtggctgcggctattgagggcatttatcagcggctcgcgtggctctaccgccaaatctttccggatacagcggacgcagctgaactgctgcggcatgcggcaaaccgtggactgacgcaaaaggcggcagtctccagcacatccaccattgccgtaagcggggcgccaggcaccgagcttccagaaggctccgcaatccggcacataacgtccggccagctgttcctggtgctcaccagcgccaccctcggtgtggacgggagggcgaccgctcctgttgctgcccagtcggccggcgcagcgcagaacgggctcactggcagtctcagcctggtcagtccaccgctgggaatcgacgccaccgcatccttcacagccccaacagcagggggggaagaccaagagtctgttcaatcgctcttagctcgccttctagagatcatgcggcaaccacctgcaggtggtgccagctacgactacgagcgctgggcgaaggaagtcgatggcgtcgcagacgctctcatcctcccaggacggcgtggtggcggcactgtcgatgtcgtcatcaccgggactactggcgtcccctcggcagaggtaattgcggactgcttgtcgcacatccaggacgtgtgttcggtcattgccgacgtatgggtctacgcgccaaccattcgcgttgtagatgcgttggtccagatcgatctggcttctggctatacgttggcagaggtgcagcaggccgccagcgatgcttatacgtctcttctaggcacgctcaagccgaccgatcaactgaaacggtctcagcttgaggcgatggtcagcaatctgccgggcgttgcagatcgcgtactggtgacaccagcatcgaatgtcgacgcgtcgaccgaccccacccaggtgggctggattcgccccggcgctattacagtcgaggcaatgccgtga

SEQ ID NO: 337139 - DNA, 1212 bp, Pseudomonas aeruginosa
atgcagaagatcagtgatagtactaacacggcaaatgggtccggcgagttcactgaggggaatccgtctggtggtgtcgacgccacgttgattacggccgcgtggctgaacgcgcttcagcgtgaggtcatcaacgtccttgctgctgcaggcttatcgccagtccctgccagtgatgaccagctgcgccaggcgatttccgcgctggtcgccaacatggccaatggcaaggtgaataagaccggcgacaccgtgagtgggacgctgacgctttacaacgggacgactgatgcaccggacctgcgttggaacaacacgatgtggaatgcctacatcgacctgtttcaaaaccagttgcgcctgatcgctgaccagtccggccctgttatttatccgcttgtcttcgatttggtagccaagaccgcgagcatgttcggctataccgtctggaacagcggcaacttcgatcccgccaccaaagccggcaaggccaccacattgggcgggtacggcattaccgatgcctacaccaagaccgaggtgaccagctctctgtccagcaaggctgacaagaccaccactctgggcgggtatggcatcaccgacgcctacaccaagggcgaggccaacacgctgtacaacggcaagctgtcgctcactggcggcgcgctttcgggcgacctgacgctgactaacgggaccgtcacttcgcccaagattcgcttcaacaacaccagctggaacgcttacctcgacctgttcggcagccagttgcggctgtatgcagatcagagcggctccaccagctaccccttggtctttggcctcggcgaccagaccatgtacgcctggggcaacctggtatggaccaacgccaaccggccgaagaacaccgcatcgctgggggccaacggctggtggaaagactctgatacgggtcgccaagaggtttggggccaggccacgctgacggtggcgaacgctgtcggcagcgtcgccgacctggctatctcctttccggcgtccttccccgtcgaggtccacagcgtgtcgtttgcggccgtagccggcaacgctaccgaggtggtcgagaacatcatcggtttctacaacctcaccaccagcggaatggtcatctccgcgaagcgcgtctccggcacccagaccggcgccgaaaccatcgttgtgcattaccgcgccaccgggcgctga

SEQ ID NO: 337140 - DNA, 537 bp, Pseudomonas aeruginosa
atgcagaccatcatgttcctgcacgccacgtccctggcgttctactccaccgccacccacggtccgcgcaccttgctggtgcccgaccctgactggaagccggagcccgacgccgagccagccgaagcgcccctgatcgaggtgcagaaccctgactgccagttgccgccggccgccgagctgatcgagctgagcgcgagccagtacgagcagttggtcaatgcgccgagcctgggcaaggtactagcggtgaagaacggcaagccggtcctggttgatccgcccgccccgtcagctgaccgactcgccgaaactgaacgcacctggcgggattacgtcctggtcgaaaccgatccgctgatagcacgccaccgcgacgagctggaactcgacgccaccagcaccacgctgagccctacccagtaccgtgagcttttggtctatcgagaggccctgcgcgaatggccagaatcgtcgagtttcccgaagagcgatgctcgaccgggtgagcctgtatggctctctcagtatctgtaa

SEQ ID NO: 337141 - DNA, 1302 bp, Pseudomonas aeruginosa
atgccctcagccgatcactcgcgttgcctgacccttgccaacggcctgcgcgtcacgctcatccacgcacccgatgcaagccgtgcggcggcgctgctgcgcatcgcccgtggcagccatgacgaaccgccggccttccccgggcttgcgcacttcatcgagcacctgctgttcctctgtggtgaacgcttcgtcgaggacgagcggctcatgccctgggtgcaggcccgcggcggccgcgtcaacgccagcacccgtgcgcggcagaccgattacttcttcgaggtgccagccgatgccctgggcgacgggttggcgcggctggtggacatgctggcccggccggtcctggatgaaagcgtgcaggtcgccgagcgcgaggtgctcgaagccgagttcctcgctcgtggtcgtgatcccgataccctgatcgacgcggccctggcgctgggcgtggcgccgacgcatccgctggggcgcttcgtggctgggcggcgcgacacactgaaagtggaaagtgtcgagttccagagggcgctgcgtaagttcatccgcgaatgccaggcgagcggggcgctggagctctggttgctgggcccgcaagcactggatgagctggcggcgttggccgagcgtgaagcgggcgtgttcccgccgggcgcagtggccgattgtgccagtgccgaatctctcctgccgctgaccggtcacgagctgaagctccgactgcccggtgcgccgcggctggtcctggcgttcgccctggaagatgtgacgggcgagggtggtgcgacgctggagcagttgcacggctggctggctgacgaggcacctgggtcgctgctggcctgcctgacccggaatggattgggcgacagcgcccgtgttcgcctgagccgtttcgccggcgctcaggcgttgctgcgattcgatttcgagctggccgaggcgtccgccgccgatcaggtggaagccgcgttcctggcctggctggaagcgctgcggaaactgccggcagacggcctcgccgccgcgccggtcgataatgcgatgggcgtgctggagcagttgcaacggcgcgcaggaagcgccgcgccgtcgtcctggatcagccaattggtgacgtcacgcatggtccgtctgctcacatcggaaacggtggtcggcgaatccctgacctgtgccggtttcctcctcgacgttgctgtaagcgcgcggcggatttggcatcgcttggcgaggtatttggcatggcgacctcacctctgctcccgtctattttctcggcggatttggcactag

SEQ ID NO: 337142 - DNA, 927 bp, Pseudomonas aeruginosa
atggcgcgcttcttcaccgcctggggcatcaacccggcaacgttgcgcgccagcaacctgcgcctcccgctgttcctggcacggcgtttctgggacgtggcgcaggagcacagcggggatccggccatcggcctggagctggcgcgccagcccgatccggtgcagttgcaggggctggcctacctgatgcaattgatgccggaccggttcagcgctctgcagcaactgttgtacttctggccgctggtcgccgcgcacatcgaccagcgcatggaagtacagggcgattgcgcgcgcattgtcctgttgcctcaccgcggttactacccggcctggcccgaggtggattactggatgagccggcaactgtggcacctgcgcagcgcgccgggcttgtcgtcgcccgtgcgtgaagtgcgcctgcgccggccggcgccggacgatcccgaagcctggcaccacgtggtgcgggcgccgctgacctttgccgcttcgcgggacgagatggtgctcgacctggcggcactgcaagctccccgtggcgagggcagcaaggccatccgagaggctctggaacagtcgctgatcgagtactcggagcagaccgggacggggtcggagctggagcgcgcctgcgcggaaatccttcacggcctggcggagaatccgacgcaggaggcggttgccctgcgcctgcatctgacctcgcgcacgctgcatcgggcgctgcagcgcgagggctggagtttcaccgctctggtcgaggaacaccggcgactgctggcgcaggacctgctgctgcaggccgatctcagcatcgggcagatcgccgaccggctgggtttcgacgagcagtccagcttcatccgggcgttccgccgctggcacggcacgacgccgggaacctatcgggtggagcggccctga

SEQ ID NO: 337143 - DNA, 1821 bp, Pseudomonas aeruginosa
atgaaccagcttcgccttccccgggggattgcgcgccccagcctgcttgccctctgcgttgccgccggcatcagcccgccggcccaggccgccacctggcagctcaacgacgactggagcgccaccaccaacacgaccctcagcctgggtaccagttgggccctggaaaacccggacaagcacctgctgaccggggccgatgcccgcagcatcggtcgcgagggtagcggcatcaactacaacggcgacgacggcaagctcaactatcgccgcaacgacacgatctccaccctgttcaagggcctgaccgacctcgatgtgcaggacggctcccagggcgtcttcctgcgcttcaagtactggtacgaccaggccatggaggacggcaacggcgatttccagaaattcgatgattcaggctggcaggacctggccaagttcaagggcttcgagaacctggacgcctacgtgtggaaggacttccaggtcgctgaccgcaagctcggcgtgaaggtgggcaagcaggtgctcagctggggcgaggcgctgttcctgcagaacggcatcaacgccatcaacccgctggacgtctcggcgttcaaccgtccgggcgtcgagctcaaggaaggccagctaccggtggagatggtcagcttcaactacgacctggccgactcactgagcctggaaggcttctggcaatacaacttccggccctcggtgctggacggctgcggcaccttcttcagcgccaacgacaacatcgccgaaggctgccaggtggactacatggtctccggcggcaccggcaccactgcccaggccctggcccagggccgctacctgcagcgcagcgccaccgactaccccagcgacaccggtcagtacggcctggccatgcactacgtgatcgaggcactcaacgacgccgacctgggcgtctactacgccaactaccacagccgcacgcccttgattaacggggtaatcgcgcgcaccggcccggtctcggcaacccgcaccaacctcaacagcggcgactacttcaccgtctaccccgaggacatccacctgttcggcctgagcatgagcggcgtggtcggcaccacagcgctgttcggcgaactgagttaccgcccgaacatgccgctgggctacaacccggcagacgtcgtggcgctgctctccgggcaggccaacacgccgatccagcccatgaccggcgccgaactggccagtgccaggggtgacgaagtgcagggttacgtgcggcttccggtctggcagctcagcctgggcgccaccgacacggtgaacaacgtgctgggcgccacgcgcctggcctgggccggcgaagccggggcgaacctgatccagggcatcggcgaggaccgcctcgggcgcgccggctcgttcggacgcacgccgccgaccaacggagtgcagtgcagtgccgcctcagctgcgggtactcccggtggcgtgacggccgggcaactggccgactacaacgccgacaactgcaacaccgacggcctgatggaccacttctcctggggttatcgcctgcgcctggcgctcaattacgaggacctgctgccggcgacggtggtcaccccatcggtgaactggcgccacgatgtccagggctatggcccgaacttccaggaaggccagcaggccgccagcctcgccctgaccttcgactaccgcaacaactactcgctggagctggcctacaacagcttcttcggctccaacgagttttccaccgtcgatgaccgcgacttcgcctccgtcaccctgaaagcgagcttctag

SEQ ID NO: 337144 - DNA, 1347 bp, Pseudomonas aeruginosa
atgagcctcatcctccgcaaacttccgctggcggtcgcgctgctggctgcctgcagcctggcccaggccaagcagaccgacgctgcacaactggacaacacactcacaccgctgggcgccgagcgcgccggcaacgccgacggcagcattcccgcctggaccggcgggctcaaggccggcgctgcggctatcggcgcggacggcgactatgccgaccctttcgccagcgagcagccgctctataccgtcagcaaggccaatctggcgcaatacaaggacgtgctcagcgccggccagcaagcgatgttcgcccgctacccggactaccgcatgcgtgtattccccagccatcgcagtgcggtgattccgcaggcctaccaggacgagtcgcgcaagaacctcacccaggtgagcctggccgatagcggcaacggcctgactggctatcacttcggcgtgcccttcccgcaacccaccgaggcgctggaggtgctgtggaaccacctgacgcgctaccgcggtggctcgatcctgcgcgacttctcctccgccaccgtgcaggccaagggtgactacaccctggtcacctaccgccagctggtcggcttccgcgagaagatcagcgacctcgaccccgaggcgaacctgctcttttacacccgcgtgcagaccaacagcccatcgcgctatgccggtgaagtgacgctggtgcaggagccgatcaaccaggtctccacgccccgcgccgcctggcagtacatccccggccagcgccgtgtgcgccgcgcgcccacggtcgcctacgacaacagcgcacgctacagcttcggccaggtggtctccgacagcgtcgacggtttcaacggtgcgccggatcgctacgactggaagctgatcggcaagcgcgacctgctcgtgggctacaacaccttcgccctggccagcaagaaagccagctacgacgagctgctcaagcccggctacctcaaccccgacctcaaccgctacgagaagcaccgcgtctgggtcatcgaagccacgctcaagcccggcgcgcgccatgtctacggcaagcggcgcttctatatcgacgaggacacctggcagatcatggccagcgacatctacgacaaccgtggcgagctgtggcgcaactacgagtcgttcctgacccagtaccacgacctgcaattgccgatgacggccgtggagaccacctacgacctgatctccgggctctatgcggtgaactacctgaccaacgggatcgaccaccgcgccgagttcggcaagcccgtgaaggaagccgagttcacccctgccgagctcaagcgcctgggcaagtaa

SEQ ID NO: 337145 - DNA, 1392 bp, Pseudomonas aeruginosa
atgccactttccacccgaacccgctggggcctgggcctgaccggcgccgccctgctcgctggtgcctgcgccggctacagcctttaccaacaggcacgcagtaccgccgaagcctatgcattcggctatccgctggtgatcatggagctgaccaagcagtaccaactgggccgtggcgagaccgcggtgaaccagctcaatcaccgcacccgcttccccgatcaccgctccaacagcgtcgttgcacccaacgtcgacacgctctactcgctggcccacctggacctgcgcgccgagcccgtggtgctgagcattccggcctcggcggggcactactacatgatgccgatcctcgatgcctggaccaatgtggtcgccagccccggcacccgcaccctcggcgatgcggccgagcgctacctgatcgtcggccccggctggcaggggaccttgcccgacggcatgcagctgatccgcgtgccaacgcagatgggctggatcatcggccgtttcaagagcagcggcccgcatgactatgccgaggtcaatgcccagcaacggcggttcgacctgcagcccctcagccactggcagaaaaccccggagccctcacccaaagaccctgccatggcccgcctgtctcacctgagcaccgattttccgccggaccagcaactggccggctggacccaggacgagttcttctcgacgctctgccagctcctgcctgccaacccgcccagcgccgcggacgcaccgcagatgcaacgcatccgcgaaaccggactgatcagcaccgactgccagccgcaccagtcggcatggcagcgtctgggcagtcgcttcggctaccgcaaggtgaccgacctgatggctcgctccgatgagctgcgcgacaagatgcccggcatcaacggctggaaagtcagctatgacctgggccagtacggcgaccgctatgcccagcgcgccctggtggcgaagatggggctgggcgccaataccgccgacgatgcgatctaccccaacacccgcgccgaccaggacggccagttgctcagcggcaagcaccgttacctgatccatttcgacaaggcccagctgccgcccgtgaaaggcttctggtcactgaccctgtacaacacccacctgctgctcgccgacaacccgttgaaccgctacgccgtcggcgaccgcgacgacctgcattacaacccggatggctcgctggacctgtacatccagcacgaggcgccggagcggcccgaactgcggaacaactggctgcccgcgccggaaaacgagttcagcctgttcctgcggctgtactggccgaaacctgaagtcctccagcgcgactggcgcccgccgctggtacagcgccagtcctga

SEQ ID NO: 337146 - DNA, 1047 bp, Pseudomonas aeruginosa
atgaaccgcccccctcacgccgctgacgcacccgtccccagcaccctggccacggtggtccgttgcctggcgacaacgctgcgcgagcactacggcatcgacccattgccggtactgcgccaggtgggcatcgatcccgagatcatgcacgaccccgccgccaggctgccgatgacttcgctgagcccgctctggctgcgctgcgtcgaagtcaccggcgatgttcatttcggcatccgcgcggtgcgctaccaccagtcctcgaacctctatggaatggaccttgccctgtacgcctgcgcgaccctgggcgaagccgtgcagagccatgtgcaactggtcaatctggtgagcagcgtggggcagccaagcctcatacgggacgatcacggcgactggcggatggagttccgggtccgcgacgactacgtaccgaccttcgtcgcccgggacttctactggcatttccatgtgcgcatgttcgagcgcctggccggccgccaggctgccagcttcctgcgtggcctggagctcgcccgcgccgcgccgcccgacctgagcgcctggcaggagctgggcgtaccggtacatttcgagcgcccggtaagcgccatcgtcttccgtggggcgagctgggatttgcccttgcccggcgccaacccgcgcctgctcgcccaggtcgagcggccgatcctgcaatacctggcccatcacggcatgccgctgcccctcagcgcgctgcgcgcacgcctggcggagcacttgacggagcagacagcgccggagcaactcgccctcctggtgggaattcccctcgcccaattgaccagcaccctgcagcagcatggtctgagcttcgcccaactgctcgaccagacccgcgaggcgcaggccctcctgctcctgcgcgacccgcagtggtcgatgcagcaggttgccgagcgcgtcggattcagcagcaccagcagcctcatccgggcatttcaccgctggcagaacatgacgccactggcctatcgcaaactgcaccttgcagccaggcactag

SEQ ID NO: 337147 - DNA, 150 bp, Pseudomonas aeruginosa
atggcgcagatcgtgaaacgtcagatcctctatacctgcggcagtgatcgcgcgactccatgccccctgaatcgcatcggtggtgtatggaaagatctcctcgaaagcccgcggcatactcttgatgaccgccattgcctcctcgggtag

SEQ ID NO: 337148 - DNA, 1386 bp, Pseudomonas aeruginosa
atgcgtgatccctacagcctcgaagccgagcatggggttcttggcgcgatgatgcagcgtccagagctaatcgacgttcttgccgatgagctgaccccggagtcgttctacttcgcagacaacgctgaagtattccgggcgatcatggcggtacgttctgccaacaaggcggtcgacttcctgaccgtggctgagcagcttggagcgcttcctagcgagaccccggcactggcttactgctgcgagatcgtgaagaacactcccagtattgccagcgcctcgacttatgcccgtatcgtccatgagcgcgctgtggaccgggcactgcacgttgctgcccaggacatttccgagattgccagttcgaatcaagagaccgccgaaaaggtctctgctgctcatgccgcaattatggcggtggatgccggcgaaactagcgttgacgttcagaaggcttcagatgtcctggcaacccaggttgaggtctggcagcagcgccacgaccgctatcggagcggacaaaccctgatgggtatttcttctgggctgactgatctcgacgccaagatcggcgggttcctgccgggccaactgattgtcgtcgctggccgaccagcgatgggcaagacaaccttcgcaatgtcctgctcgatccatgcggcgctcaaggagcggaagtcagtgctggcgcttagccttgagatgagcaatgggcagctcattgaccgcgccgttgcttcagtcggaaagattccgctgaacatgatccgaaacggcaccgcatgcgaggagtacggtgccgagctgggtgccgcatcgcggactatcagcatgtccagcctgtacctcgcggacaagccagccctgaatacgatcggccgagttcgcgccatggcgcgccgtcacaagatgcgctatggactcgacatgctgatggtcgactacctgcaactcatggacggggaaggggagaaccgcgtcaacgtcatcagctcaatcagccgcggcttcaaactcctggcaggcgaacttggcgttccagtgattctcctaagccagctttcccgaaagtgtgaggagcgccctaacaagcgtccgatccaatccgacctccgcgaatccggcgctattgagcaggacgcagacatcatcctcttcgtgtatcgggatgaggtctacaacgagcataccgagttcaaaggggtggctgagatcatcatcgcgaagggacgcgaagttgaaacggggacggtgcgcgctgcgtttctgggtcagtacaaccgctttgaaaacctgtccgctgagtggcgtcctgatgaagcggctatcccgcagaagtcaactcgactgtctgaccgatacggcagcaaaggagcggaccaatga

SEQ ID NO: 337149 - DNA, 225 bp, Pseudomonas aeruginosa
atgaaacgcatgaaaaccttcgaactcctgcgcatggaaggcctgcgcacctacggtcgtcaggtcgaggccagtacttggcgcgaagccgagctgcaatgccgcgacggagagatcgtaaacggcgaactgatcggtgtgtacgactgcgatccggtaacagatgccgtctgcactgcgcgcaatgacgtgatgattgagagcttggaggtgtgcagtggctga

SEQ ID NO: 337150 - DNA, 336 bp, Pseudomonas aeruginosa
atgaatatctatccggctccatggagtatctcagcctttcaaagccaatgcgggacgcgggtcatcgaaatcagagatgcgcttgggtcatgtgttgccaccatgctcgatgaggacaccgccaccaagattgtcggatgccgaaatgcctcttctgacattgatggggtcaatgcgatcagatcagccttccagggggctatcgacgctctgaatagcgatatcaacgggattcgcgagaggtggcatgaggaggtgtccgacctcaataggcaaattgctcagtaccgcgagcaaatcaaggcctatcgcgatgggaaggaggatcacgcatga

SEQ ID NO: 337151 - DNA, 270 bp, Pseudomonas aeruginosa
atgagcaagttcaagtctggcgatctcgctcttgtagtaggcggcgatcttttcttagggcagcaggtagaggttcgcagctgggtgaatccaggtgatctctaccacgttgctaaggacgggagtcactactacctgaaccctgagtctcagcattccggctggtccgttacggacggcgttcagatcggagtaaagctggagcgcaacttgatgccgctcaagggcgacttccagcccgagcagcagaaggcgaaggaggaggcatga

SEQ ID NO: 337152 - DNA, 318 bp, Pseudomonas aeruginosa
atgaaaaccaccatctcgatcatcatcagcatgacgctgagcctttccctgctgtccggcatcggccagctatcgcagttcgccttctacgtctgcgtcatcatgaacgttctttcctggatcgggatgctcctcggcatggtcaaggacgaggtcagtgcgggcatccgccggaccttctggattctgctcctacaatccatcttctacgtctatgccctgatcttcagcgggcatccaatgcttggcgcctcctccttcatggtgcagttcctgatcgtcgccaccgccttccgcaaggaggcaaagccggcatga

SEQ ID NO: 337153 - DNA, 162 bp, Pseudomonas aeruginosa
atgactgaatccggagaagagattcgaatcattctgcgtgatctcctcgctgagcagcgcttgaccaatcagttgctgaacctgctgatccaggcgctcgccgaggatggtgatgattccgaggccatgccgaccagctacctgagcggagagccgatctga

SEQ ID NO: 337154 - DNA, 252 bp, Pseudomonas aeruginosa
atgtcgacgtttatgggctccgcgagggaagctcagatagctgctgtccgggtccgccgcggatggttcggcaagctggttgtccaggttcgctacaagatcgagcggcccgaaagcccgctccctggccgggaactgatctatcacgtatgcgggctatcccgttggcgagatgccaacgcaaatgatttcgccgaagccctgatggtcgcgaagctcatcgggatgtctgatgaaggaaagccctcatga

SEQ ID NO: 337155 - DNA, 357 bp, Pseudomonas aeruginosa
atgctcgcctaccgcatgcgccaccgcatcgagttccagcgtcaggtgcatacccaagatccggtgaccggcgaggtgataacgacctgggaggccgttctgttttccggtcgcttcgatgtccccgcagaggtgctgacaggccccggccgtgaactgatcgctgccgatgcgcaacaggcagagaccactgctcgcattaactgccgatggttcccggttgaccgcctggagctctacacctggcgaatcctctgggatggccgggtttacaacatcaccagtgcagagaccgatgccactgctcgccgtgagtggcgcttgcgctgctccgatggcctgactgacggccagtaa

SEQ ID NO: 337156 - DNA, 813 bp, Pseudomonas aeruginosa
atgctcggccttggtgacaatatctacgcgcgcgcgttcgtgaagaagcaccggggcgcctatctcgaaacgccatggccgcaactctattcagacatcgatgtgaaatgcgtgcgtccatgcacccaacttcgcacgcaagcgaagaacgtccagcgcccggcgcagtggcacaagcctttcggtggtggacaattacgaatcgcatacggacagatgccgatcatccagggcttgcgacaagctttccggtgcgagcccggtgcgttcgatttgcctgacttcggcccgtcgccggtcaatggccgctatgtgctggttcgcccagccacggttcgcgctgagtggcgtgcagacacgcgcaacccactgcctgagtacatcgccagcgctgccgaagagatgcgccgcaggggctggaaagtggtttccgtggcggacctggagccgggaaaggagtgggcgctcgatccacttccgccggctgacatccagttccacaagggcgaacttccggttgaacaactgctggcgctgctccagcacgcagatgccgtgattggcggcatcggctggattgttccggccagcatcgccgccaaggttccggcctggatcatctgcggcggtcagggcggctacaactcgcctgaacacatcaccgacaaatgcatggacctgtcccgcatcaccttcgcggttcccgacaggttctgccgctgcaccatgaaacagcacaactgcgacaaaaggatcaccgatcatgaccaacgctttgccgcctgggctgaccgactgcctgctctggtctga

SEQ ID NO: 337157 - DNA, 618 bp, Pseudomonas aeruginosa
atgaccaacgctttgccgcctgggctgaccgactgcctgctctggtctgaagagcttggcatgggcttccacccgcgtcctccgatggactatagcgggccgtatttcgagaagtaccagctgcttgacgctaccccgatgggcgctgcgctgactcagtgccgcatcgatctggtgcgccgtcactttgccggacaggtggtagatatcggtatcggcggaggccgtttcgtcacagagtccggcgcgatgggctttgacgtgaatccggaagcggtggcttggctgagggcgcaggagcgctattacgatccgtaccagcaccacgcagaagctgtgacctgctgggacagcctggagcacatcccggagccggagaaactgctgggccacgttggcgagtggctgttcgtgtcgatgccgatttataaggatcaggctgactgcctggcctccaagcattacaagccgggtgagcattgctggtattggagccttccgggcctggttgcctggtgcgagcggcatggcttcgaactggtggagatgaaccaggcggaatccgaccttggccgagaaggcatcaccagctttgcgttccggagggtccatggctga

SEQ ID NO: 337158 - DNA, 351 bp, Pseudomonas aeruginosa
atgaaactagccgatctggtggccgctggcgcggtccttggcgatggactggtgaagaaaagcatcacctggacgcacactccgccgggcaagaaaaaggcggtcacggacaccttcgacgtgttcatcaaacgcagcagtttcggtgccatggaacgcctgttcgcccaagacgacgacaagaagagccagaatgcgcgttacctggctgagagcgtcagactgggcgagggtggcgaggaagagattccctacgaaactgcgttcaacctcgaccctgcgttgggcttcctgctcttgcaggctgtcgcggaggtaaatggcacggcgccgggtgacgaaaaaaactga

SEQ ID NO: 337159 - DNA, 267 bp, Pseudomonas aeruginosa
gtgctgaacggcatcggcggttgcaccattcgcgaggcgaaggagcgcatcgactacgatgagtacagggcgtgggttgcctacctgaaaaagcgtggctccctcaacgggagctatcgcctggagtgggtgctggctcagttagccgcgattcaggccaaggtagggggtgtgaagtgcgaacccgacgacttccgcccccatgttcgggggccggtagagccggtgggtatctcgctcgagcaagccatggccgcatgggtttga

SEQ ID NO: 337160 - DNA, 1845 bp, Pseudomonas aeruginosa
ttgtccttcgtcgatttcggggacaaggccgagagtaatgctggtcgtgcggccaatgctttcgaagacgcctccacccgcatccgtcaggccgctcggacgatgattccggaggatctttccgggctcagctatgagcagttgaagcagcagttggcgggccttcaggatcaattgaaggatgccgaggcgcttcaggagcggttccagaagggcgttgacgacaataccgacgttccgtttggtccttcgctggacgaggcaaaggagaaagcagagtccttgcgccttgccatccagaagacacagcgagaactggacggtgcaaggttcgcttcggataaggctggcgcgagctatctggataatttgcagaagcagagcgttgtcgccggcaaactgaccgaggtagagaagctccgtgcccaggtcaacgctggcatcctgaagctaagtcctgacgatgaaaagcgcgccctggcctatgccgcagccgtggacaaggcgaatgcctcgaccaagtcccagaaggacctgttgaaggactctgcgaaggggctgaagcaggctgaggagcggtatcgggacctcaagaaggagatagaccctaccgcgactgcgacggacgagtacaggaagaacatcgaagccctcaacatcctgaaggacaggggaaagatcacgagccaggagtatgcgaagggaatcgactgggcggccaagtcgttcaactccgcagtggacgcggctaatccgttcgtgaagcggctcagagagatcaagtccgcgatggacgagagcttgggcaatctcaagctcgaagggcaacgcgaaatcctcgggatggggatgagcgatagccagagggggctgttcgacaagctgaacgaggagaatgaccgttacgccaaggcccgcagggatcttgccgaccgctacgcagacagatcggtcgggatgagcgacgacgagtaccagcaggaacttcaggctcagcagaaacaccatgagcaaatgctggagcagttgcaggcaaactacgatgctcgacttgaggcccagggggactgggtgtctggagcccgctccgcatgggaaacctacgtggaggatgcacagaattactcgaagcaggcctctgacttcgtgtctggcgcacttggcgatgctaccaacggcttgggcgatgcaatcaccgatatcgtcacgcggaccaagagcctcggagatgcgttcggtgacatggctgcggacctggctaagtcggtcatcaaggccctggctgacatggccgcccagtggcttgtctaccaggcggtgcagttggtcgtagggaagacggctcaatcgactgcggcaatcgggctggtcgccaatgctcaggcaacggcgttccaggcacagctagcagcttttgcctcgacggctgccatcccgattgttggccctggcctggctgctggtgctgctgcggctgccgccgcagctaccgcgccaatggttgctggagtttcttcggcggccttcgcgggcatcgcgcacggcggcatcgacaacatcccgaaggagagtacctggctgcttgatgctggtgagcgggtgctcagtccgaatcaaaacagggacctgactgctttcctcagcagggaaggcggcgcgagtgctggggctggacaggcgccgtcgatcactatcaacgctccggtcacggttaatgcccagcccggcatgagccaagaggaagctcgaatgcagggagaggctgccgggctggccttgcgggaggaggtccggagcgtcattcgggaagagttggggcagaacggtctgctttggaggcgataa

SEQ ID NO: 337161 - DNA, 234 bp, Pseudomonas aeruginosa
atgccgcgggagagtgtgatgaaactcgataagctggagttggcggtagagcttccgcagcctggtagtgcagatttcgaaaagcttgtctcggaggcaacgatctcgccggttgatgtcactggcctgtgtctgccgaaagagtttacagacgagttagaaagaaaagccgacctgctcgagcgccggctttcgaggatggaggcggctctcgggcttgagccgatcctttag

SEQ ID NO: 337162 - DNA, 243 bp, Pseudomonas aeruginosa
atgagcgaaaagcccgttgtgtcacccttccaactgagcgttatggccgcactatcggtggttggctcaattcttgggtcaacgaacaaaggggccatcgacaaggtggttgagcatatcgagaccatcaaatccaaaatgccagcagatgcctccctccgcgacggttcttctgagcaccacctagctcttgatgccttgatttcagggctgagggctgccagcaagatggatcagatctaa

SEQ ID NO: 337163 - DNA, 702 bp, Pseudomonas aeruginosa
atggccttcaatgctgatgtgcagaagcttgagccggggaacctgatccggctgtttgaggtggatgcgacgcgccttggcggaaatctctggcgattccatggccacgcccaagaaggggaaatcatctggcagggcaatgtgtacgagccgatccaaatcaccgcaaaaggctttgatatccgcggcgatggtcgacccgcgtcgccgaccctccaactggcaaacgaactcgccggcatacgaggagcgatatcggccatctgccttcagttgcgagacctctgtggcgccagggtgcgggtgatcgagacgtggaggcactatctggatgccgcgaacttccctgatggcaaccccgatgcagccgacgaggctcggatggggatctggttcatcgagcagaagaccgaggaaacccgggagcaggtcaccttcgcgctcagcagccctatcgacatggaggggcagatgctaccggcccagcagatcaccaagctttgccggtgggcgtgccgaggtcagtatcgaggagaggcttgcgcctataccggcgctgccctcttcacgaagaaggatgagcctaccgataacccggctctcgatcggtgtggcggccgctggagcagttgcaagctgcgcggcaacaccaaccgcttcggcggttccttgggggcaagtttgatcgtttcgtcgaggtaa

SEQ ID NO: 337164 - DNA, 783 bp, Pseudomonas aeruginosa
atgcgcatcagtcaaaagctgcagtgtcagatcctggcgcacgccgaaaccgtctacccgagcgaggcgtgtggcgtattgctcaagaccgatagcggccgagaatacgcgccttgtggcaacctggcggtcagtgatcgcgaaaacttcgtcatggatcaccgggactacgcagcagcagaggaccgcggcgaagtaattgccgtcatccatagccatcctgacaaggctccgatcccgagcatggccgaccgggtcagttgtgagcttcacggattgccgtggggaatcatcgggctgccgggtggggaaatgacctggttcaaaccatcaggttatcgtgccccgttgcttggccgagagttttcccacggcttgctcgactgttggggcgcctgccgggattggtacgagcgagaagctggggtgacgctgccgaacttcgagcgcaaggacctttggtgggaggtcaaggacggatcgagcctgtacgaggacaattacgagagtgcgggtttctatcgcgttgaagacctgcgccgcggcgacatgctggtgtttcaggtgcccactccagggaggccttgttatcacccgaaccatgccgcgatctatctcggtgccgatccttgcttgcgaagtgaagaggctccagcgctgggcggctcgggtccgttcatctatcaccacatggcgggtcgcgcggccacacgcgaaatctacggctggtccatggccaacagggtccggctgatccttcgccacaaggacttcccccaatga

SEQ ID NO: 337165 - DNA, 579 bp, Pseudomonas aeruginosa
atgaagaccgtgcgactgtatggcgcgttgcgccgtgaatttggccgtgagtatgtgctcgatgtatcagggccgcgagaggccgccattgccctggccagcatggtagatggtttcgagaaattcatgcgaaccgcagaagagcgcgggatgcggttcgcggttttcgtagggcggcgaaatcttcgcgaagaggagcttaacctggccggagccggcgagtcggtcatccgcatcgtgccagtcatccaaggcagcaagagttccgggatttttcagacggtcctgggggcggcgttggtcgttgcgggctatttcacgttcggtaccacctcggcaataggcgttgcaatgatggctggcggcgctggcctggcgcttggtggcgttgcccagatgctggccccgtcaactcaggcttccgccgcgaagaacgaggatgggaataacccgagctatggattcggtggcgccatgaccactattgctcagggcaacccatacccagtgctttacggcgagcgagagatcggcggcgccgtcgagtcgggcggggtttacacggaagaccagctctag

SEQ ID NO: 337166 - DNA, 1410 bp, Pseudomonas aeruginosa
atgaccttgaatcgccctggcttccgagcgcccactgggcaggttgactcgcagccgcgcgccgaccgggatatccacatctcggtctacggtgattgctcgtccagataccgccgagatcctgccgccattcgcacgaccggcaagcatggggtctgccagagccaccacctgtccaggccgcgggatgaatccatccaggccaaccttccagacggccccacgagtctgcaactgctcagtcataagcgcccactgccccgcccgctgcgcctgaccctggctggtgcagccgagagccccgaccgatacctccctgacgatcccgccaagctcgataatcgcatcctcgtcgaagaccggctctttgtctgtctcgaacgcattggccgggttgtcccaagagaccatcgccagcgaatggcggtctcgcgtccgcgtccccgaatacgcaaccacgccatcgttcagaatctgcgaagtggagtaggtgtaaaccgggtcctgaggcatgtcggcgttgacagtgatctggctaccatcccagaacgccaacccatgaaagattgcggcgaggtcctgaagaacggcatacgcctcctcttgcttctgaagatagaggttgcaagtgaaccgaggctcttgaccgcctttcccgtctggcaccaactggtcgcagtactgcgcaatgcgatagagggcccaacggttgaccatgctctggtcgatgcgctcacccagaccgtaataggggttcaacaccaggtcatagaagacccaggccggattgttggaataagcctccttgaaggtgccgtcccaaacgccattcgtggtaccggggccgccggtaaaataggtccgagtctcagggtcatagttcatcggaacccgcacgatccgcccgcgcatgagcgcagagaacttcggaaagtcgcccccgaactgctgggcgtcatactccacgcagccaacggcggtgagcggaaactcctggttgctgtcgacaacttcagctatcgcagtcagcatcatggtgtcctggaccagagagctgttcgcctcaggcgtgatccgccgcacgcgaaccgcccagtgccctcctgccggcaggttgatccgatgagaacggtagtaagtcgtaacgttcttccggtcgacaaacgtgctgagtacggtctggtaaggagcgccatccgtggcgacatcgatcgcgtactcaatgcgcaccccattgatgttcccggacgaatcctgcgcctgcaggttgggccaggacaggcgcacgcgtaccgcatccgccgtggcgttcgtgacggtgtagatgtagggctgcgtgctgagcaaggtctggcccaccgcaatctcgttgctggactccgctacaccttccagtcgctcctgatttaa

SEQ ID NO: 337167 - DNA, 267 bp, Pseudomonas aeruginosa
atgctggtgattcgattggcggggaagtggacgctgaagctcgatcggcagataggcagttccggaaaacacgggatatgggcattccactgctcggaaagcacgttcgcgccgtcctcaaacgacctccggcgtactgcggcaatcctgcctgccgagcccaaggaaggccagacggtggaagtatcgatctgcgacaccgcgcactcgccggatggatggatcgccgtcggctcaggcgccgcggcttacgaagccgagcgctga

SEQ ID NO: 337168 - DNA, 303 bp, Pseudomonas aeruginosa
atgaaagtccccgcattcttcgctgctaatatcctgaccatcgagcaaatcattgaagcgatcaacaatgacggaagcgctatgaccagcgcgccggaaatcgccggctactacgcctgggatgccgccactgacgcactcgaaagcgagaatgaccttgagcaactgacggaggatgacttcgttgctcatctggaagttctggaagaaagaggcgccaagatcgaccgcgatgcagcagtcgcagttgcgctccaattccaggccgcagcggtgaacgacctgcattctggtgacgaatga

SEQ ID NO: 337169 - DNA, 219 bp, Pseudomonas aeruginosa
atgaagccagactcagccaatcacaaccctgacccgcgctacctgcgcgggctggtcgacaaagccggaatcagtcagcgccaagcggcggaactactcggcctgtcgtggcctggcttccgcaactacctgcgcgaggagtcccatcaactctaccgggccgcgccttacacggttcagttcgcgctggagtgcatggctgaaagccccagctcctga

SEQ ID NO: 337170 - DNA, 528 bp, Pseudomonas aeruginosa
atgattcgcataaatcaagctcagcgtggcgtcacgcttgtagagcttctgttcgtgttggttatcgcagcaaccgtaattgcgtggggagtaagttcgtgggcgacactggcggacaagaatcggaatctgggcggaaaggatggattcgtcaaagttttggtatacgcgcgctcatacgcgctggcaaacatggccaacgttgatctctgcggagagagcggggggtggggtgagggctatctcgttcgcgacgtaaaaaagaatgccgttctgtatcgggaaactagctacaaagaggtgcatcctgttggcccctggcagtcaaggctaagctcaggctgtgtcagattcctctccaatggctccatcgcggacgtgcctgctccgcagggcgggttctaccagtcaggattctatggcggcaagagcgagtccgaagcactctggcgagtgtcctttaaaccgacaggctggttctgcgaagagaaagatccgaaaaaagcgcagtgcgccaaggaccaatag

SEQ ID NO: 337171 - DNA, 1710 bp, Pseudomonas aeruginosa
atgctgctgaacggcatgccgttaaacgccggaccgctgaacggcctaggtggctctggcgacgctgtcgggcctatagagatcctacctgggatggcattcgcgtggcgtctgaggctggtggtgagcggtgaggattggaccgctcgtcttgtgggcgccgtcgagatcgaccgcgaggagggatcggctggtacagccagcttcacgctataccttggcaccgatccagtttcgccatctgcatggttaggccgatccgtcgagattcactattcctccacctttgacggcctatctaccgaggtagttaggttcctagggcgaatcgccgagcctacttttgatgcagtgggtagaacgctaaccgctcgctgctccgatcagttgcagcagcgaatcgaagctttggatattacccggatcgatagcctgatcggagggcattggtcttcagatgtgtttgagccagttgacggtaggtctcgatgggattacgcgcaagagcgcctcacgaccgttacggccagcctagactcctctccaggcggtgatatcaggcttacaagctggtacccgcgtcagcccgactttctgttcggctccggcacctctgtctatggcactgcacggatagagccggcagtgctcgactcgcaagtcaacaggatcgagatcgagtgtgactaccggttcagtcggctgtggcaatggaatatcaactatggatggaaggcgccaggcacggatggacaggacggggagccaggcttttgcaattggcgcccggagtcgcatgagctaccggatacggaaatggttgagtcggcaaccagtagttcagggcaaacgctgatccaaacgtcgactgaatactatccgctgccgcccactggcatctactgcacgcctccgcaaagttgggtcaacaactacacggggctgttgctaggcgccgactgggccgcagggcgtcgctgggtgcaagcggttacggagtcataccgaatagcggtagaggtacaacctagcgtgctggcgaccggaccaattatcagtcgatcccgggcctcgtttgaagttgatagcgaccttgccgagtcctgggagagcgctgccatcaccgggggtagttctgggcacattgatcagcccagcgagacgcgcaggattggcgcgctgacatgtctgcttgagcaggctcgagctactctcgtcggtgctcacaggggcacgacagtgagttgggactgccctacatccatggtcatggcggtcgatttgacgcacaccatcaaattcgatgatcagagaatcaaggctgtggggaagtgtcgccgcgtgcttgatcgctttgaccttgagagtggttccgcgataaccaccctgagtattgctgtgatgcgcggtggcggaggagattccgacgccctcactcctcctggcagttctggggctgcccccgaactaccagccttcgatgggcgccttgagtcgcaaatcgctggtcacccggatgaccccccattcgatgaatcgaaagacgggttttccggtaactacgacaactacaacagcccacagcctcgttatccgaggcaactacgtataactgctcccgagatacccgcctcgctccgcgatgaatattcgccggagataggcgcgtccttccgcgtctcggttcctgatgatttgctggagatgtag

SEQ ID NO: 337172 - DNA, 333 bp, Pseudomonas aeruginosa
atgccagttccaacgacagttccggacctggatgccctgaagcggcacctgcgcatcaggcacacccaggacgaccaggacctggaggaaaagctggcggcggcgatcgaccaggcggcacagttcctcaaccggccgatcccctggccggttgatcctgctgctgaccctatcgtccaggctccggtaccggccagcgttcgcgctgccatcctcatccaggcggcggagctgtacgccaaccgcgaatcctcggtggtgggcaccatctacacggtgattgccaccgcccggaacctgctaaacccctaccgggtcgggatgggggtctga

SEQ ID NO: 337173 - DNA, 180 bp, Pseudomonas aeruginosa
atggacctccgagcaatccagcccatctatcgaggtggccgcttggtccaaccgggcgagccgttcgagaccaccgccgaagacggcaaggcgctgatccaagaaggcaaggcgcgcgaaccggtcgcccggaaggcggccgccaaacaggtgaaggccgaccagcaggccgagaagtag

SEQ ID NO: 337174 - DNA, 189 bp, Pseudomonas aeruginosa
atggaactgaaagcactacgccccatcctggtggacgtggtgggaaccgtggtcgaaggtgcgaccttcgataccaacgaccagcacgcccggcaactgatcggcaagggctatgccgttgagcctggtgaggaaggtgccggcgagcccccgcagcggcgccgtcgcaactccagcaagaaggagtaa

SEQ ID NO: 337175 - DNA, 1212 bp, Pseudomonas aeruginosa
atgtccgaaaataccgctgacctgctcaagcaggtatccgctgagctggagaaggcctccagcgacttcagcaagaaagccgaggccgccctggacgaagccaagaaggccggcagcctgtccagcgaaaccaaggccgccgtcgacgaactggcgaccaagttcaacagcctgaccgaggccgagaagcagctgaaggccaagctcggcgagttggagcaggagttcgcccgctcgcccaccaatggcgcgcccgccgcccgcgataccgtcggcggcatcgtgatcaagagcgaggcgctgaagcagttcgccgcgagcgtggagggcggaaagcgcgtcagcattcccgttcagaacgctctgatcagcaccgacatccccaccggcgtggttgagccgcagcgccttcctggcatcgacgtgatgccgaagcagcgcctgttcattcgcgacctgatcgctccggggcgcaccacttcgccggcgatcttctgggttcaacagaccggcttcaccaacgccgccgcagtcgtgccggaaaaaaccgcgaagccgtacagcagcatcacgttcggcaccaagatcaccccggtgaccaccatcgcgcacatgttcaaggcgtccaagcagatcctggatgacttcgctcaactgcagtcgaccgtggacaccgagatgcgcttcggcctgaagtacgtcgaagagcaggagatcctgttcggcgatggcaccggcgcgcacctcgacggcatcgtgccgcaagcctctgcgttcagcgccgccttcgcggtcgagcagcagaacggtatcgatgacctgcgcctggcgatgctgcaggcccagctggcgcgcctgccggcatccggccacgttctgcacttcatcgactgggcgaagatcgagctgaccaaggacaccctgggccgctacatcctcgcgaacccgctgggcctggccggcccgctgctgtggggcctgccggtggttgccactgaaatcgccgcgttccagggcaagttcctgactggtgcgttccagaccggcgcgcagatcttcgatcgcgaagacgccaacgtggtgatctccaccgagaacgccgacgacttcgagaagaacatgatctcgatccgttgcgaagagcgcctggcgctggccgtgaagcgccccgaggcgttcatctacggcaccttcaccccgccggctccgtaa

SEQ ID NO: 337176 - DNA, 873 bp, Pseudomonas aeruginosa
atgactatcaaatcgcttccgacggcgccggcggctcgaccgcgcgcggacgtttcctgcgacctgatgcccaaggcgctggagcgctggaaccccgccattcgcgctgcggtggaggaagagaacagcatcagcatcttcgacccgatcgggtacgactggtggactggcgagggcgtcacggccaagcgcatcagcgccgcgttgcgagccatgaaggatgccgacgtggtggtgaacatcaacagccctggcggagatgtcttcgaggggctggcgatctacaacctgctgcgcgagcacaagggcaaggtcaccgtacgcgtgctcggcctggcagcttccgcagcgtcgttcattgccatggcggccgatgaggtgaagatcgcccgcgccggcttcctgatgatccacaacgcctggacgatcgccgcgggtgaccgcaacgagttcaaggaggtggccagcttcctggagcagatcgacggaaccctggccgacatctactcggtgcgcaccggcgacccggtcgaggacatgcaggcgctgatggatgtcgagacctggatgggcggatcggatgccattgagcgtggattcgctgacagcctgctggagtcagacgccaccaaggacgacgccaacgcgctggcggcaccgatgatcgccgcccgccgactcgaccagatcctggcgaagcagggcattccgcgctctgagcgccgctcgctgattcaagaactcaagaccggtacgcctcgcgctaccggccccggtaagccctgcgctgccgataccacggccgatctggccgcccccatcgccgagcttcaagccgccctggcgcggttctcggcagcagcttccaagtaa

SEQ ID NO: 337177 - DNA, 1404 bp, Pseudomonas aeruginosa
atgggcgacaaaaagaaacccgggcggttcaagtccgccttgctcgattggctcggagtgcctatcggattgaccgacggcgcgttctggcaggagtggttcggaacctcggcgagcggaaagaacgtgaccgtcgataaggccttgcagctctcgacggtatgggcgtgcgtgcggcttctctcggagtcggtgtccacgctgccgctgaaactctaccggcgccttccggacggctcccgcgagcaggccaaggatcatccgctgttcaggctgctttgccgtacgccgaatgccgagatgaccccgcagcgcttcatgctgatggtggtggcgagcatctgcctgcgtggaaacgccttcgtcgagaagaagatgatcggcactcgcgttgttgcgcttgtcccgttgctgcctcagtacatgcgggtgaagcgcgaagacagcggtcgcctgaagtacacctacaccgagaacggtgtggagcgcgtcattccagagaataacctgatgcacatccgtggcttcggcctggatggcgtctgcggcatgctcccggtgaccatgggccgcgaaatcttcggttcggcgatgtctgccgaggaggccgccgccaaggtgttcgcccagggcatgcaggcttccgggattctcagcggtgatacgactctcaccccgaagcagcgagaagatcttcgggccagcctgaccgccttcatgggatcgcagaacgccggaaagatcatggttgccgaggccggcctgaagtaccaggggatcacgatgaaccccgaagctgcgcagatgctggagtcgcggtcgttcaacgtcgaggagatgtgtcgttggttccgcgtcccgccgttcatggtggggcacatggacaagcagtccagctgggccagctctgtggaggcgcagaacctccacttcctgaccaatagcctccggccgctgctggtgaacatcgagcaggagatcacgcgctgcctgatcggcgaggccgatgcggatgagttcttcgccgagttcgcagttgaggggctgctgcgcgccgacagcaccgcccgtgcggcttggtacaacactgcgctgcagaacggctggatgagccgtaacgaggtccgtcgcctggaaaacctgccaccaatcgaaggcggggatgtcttcaccgtgcagtccgcgctggttccgctggagcagttgggagccactgcgggtggtgtgtcgcccgcagcgacggcctacatgcttcgcctggtcgcggccaatgagagcggcgacaaggccgccatgcgccaggctatcgacctcgctgtcgaggcactggaaaccggcaacccggctggtccgatgatggcgcacgcgctgatttcacttcctcgcttgaaccaggccgcctga

SEQ ID NO: 337178 - DNA, 1764 bp, Pseudomonas aeruginosa
gtgcgtgattacgtcaaaatcgccctcgactatgccaaggcagcaatcgccgataaaagtcgtaagaagcatggtctgctgatacgtcaggctgcaaagcggtttgtcgacgatctgaagcgggcgaaaaagaagtcttgtccgttcttcttcgacgagtggcacgccaacgatgcatgcgacttcatcgagaaactaccccacgtcgaggggaagtgggatacgcctacgatcgttatgcacccgtcgcacgtcttctttgtcgtgcagctcttcgggttccgcaagcgcgagtggattcaggtagatggctggggtgatgacgaccggttctacccgcgccggttcacctccgcgctgttcgcggtggcccggaagaatgccaagagcaccttgtcgtcgagcatcctgctgtactgcgaatgttgtgagccggaggagggcgcccaggtcatcagcgccgcgaccaccttcccgcaggcgagcatcatcttcaacgtcgccaagcgcatggtcgagaagacgtcggcgctgcgcgaggcgttcgggctggagacctgggccaaggcgatcacccgtttcgagacgggcgcgaccttcaagccgatccatgccaaggccagcacccaggacggtctgaacccgtcgcacgtcggtctcgacgagatccacgcgcacaagagcgctgacctgctgaacgtcctgacctcggcggccggcgcccgcggcaacccgctgtggctgtacaccactaccgagggttacaccaacccggggccgtggggcgagatgcggcagttcgcgaagcggctgctggcgggcgtcttcggtaccacggctgaccacttcctggtggtcttctacgccgtcgacgaagagaacaagaccctcaagatcaaggcggacgacgagttcgacgagcgggtctgggtaaaggccaacccgctcatggatgccaacaagcatctgctctccgccattcgcaaggaagcgatcgaggctaagcagatgccctcgaagctggcggagttccgcatcaagcggctcaaccggccggcctcgacggcgaccggttgggtcgacctgacgaagtggggcaagtgctccggcgaggtggatcttgaatggctggcgcagtacccatgctggggcggcctcgacctggccagcaccaccgacctgacgtgcttgcgcctggtgtggaacgtggacggcatgctgtacacccacggctggcgatgggccccggagagttcggtggcgttccgcactgagcgcggcacagtgccgtacgcagcctgggttgagatgggtctgctgaagcagaccgagggtgacgtcgccgactatgcagtgatcgagcgggacattctcgcggctgttgagcgtttcggcgtgaagttgattgcgtacgaccgctggaacgcctccgacctggtcaaccgcctggtggcggaggaggtgccaatgctggagttcatccagggcactaagtcctaccacccgacgatgcaggccctggaggtcgcctacatcagcggcaagctggcccacggtggcgatccgctgctgaactggtgcgcctccaacgtgatcccgcgctatgacgggaacatgagcatggcgcccgacaagaagaagtcgcccgacaagatcgacgatatgaccgcgctgctgatggcgatcggcgcatcgaaggctgaggtcgaagactcaggcgatctggacgacttcacctccaacccgatcatggtaggcctctga

SEQ ID NO: 337179 - DNA, 267 bp, Pseudomonas aeruginosa
atgtggaaccagctcggacctcagttggttgccgcgaaggttctgcaggtcgtcgacctgtactcgctagagcagctttgcttcgcctggcagtgtttccgcaagaaggcgcgtgccgatatggaggcaaccgccgccgagcaaaccgctctcaaggcactgttttctgagttcggaatgactccggccagtcgccgcaaggtttcgtctgccggcgagaagcaggccggaaatccatttgcgaagaatgggaggcgcggtgcgtga

SEQ ID NO: 337180 - DNA, 420 bp, Pseudomonas aeruginosa
atgccgagacgaccagctcggatatgcagtgaggtcgggtgcggcaagccttctgttaccggcagcttctattgcgcgatgcacaagagggctgctgacgagcgccgcgcagcatcagtcaagcaggcccacaagaagtacaacgcacgccgtgacgatagcgatgccttctacaagaccgagcggtggcggcgtctaagcgtctactaccgcaagctccatccactctgcgagcaatgcgagggtagaggactgatcgtcgagagccgaatggtcgaccacatcaaggcagtcaagagccatccagagctggcgctctcatgggacaacctgcgagccctgtgctggacctgccataaccagatcggcgagaaggtcggattggtgggttcgggcccgcctgagcaatcgaatgactag

SEQ ID NO: 337181 - DNA, 450 bp, Pseudomonas aeruginosa
atgaactggaagccctggctgatcgctgccctggtgggtgtgctgatgctctggcgcatggatcacctggcacaggatcgcgaagccgagcaacgccgggccgatgctgccgagctcgagcgcgaccgcaaccaacagatgatcgacctgcaggctggcgtactggctgaacagcaacgccaactcggccgcgtcgccgagatcgaacggcaaacccgccagcttggccaggccttggagatacagggcacgcgccacgctgcggcgttacgggagttgaaagagaatgaccaggctgttcgcgactggctgcgtgctggcatccctgctggccttggccggatgtacgcccgccccgaaaccactgaccccagcgcctaccgcgcagcaggccaaatgtccgctgacgccgtgtcggctcccaggccgccctccgctggcgaacggtga

SEQ ID NO: 337182 - DNA, 300 bp, Pseudomonas aeruginosa
atgaaaaagacacatggtccagatctgacgaccaagccacgcctgctcgctcagtgccccatttgccacggaaaagggtacagccgtggcgtgttccacgagatcgattgcgccgcttgtggagcagcggggttcgtcgatggcgtgacggggctggcgctggagcagcgagatgcggtggtgcaactgcggatgtgggtgaagcggttgcttgaagagcagcgacgccaggcgagcaggctggcgcgagaagagatcaaccagaggggcgccggcggctcccacttcagaggcgactga

SEQ ID NO: 337183 - DNA, 348 bp, Pseudomonas aeruginosa
atgatctcgattcgccttccctggccgcccagcaacaacacctactaccggaacacgcagtccggaacgctgatcagcgagcgcggcaggagttatcgccgatcggtattgcagcactgccttgcacaaggcatcaggaggacgtccgggcctgttcgggttgttatccatgcatccccgccagatcggcgaaagcgcgacctcgacaatctcctcaaggggctccttgactcgttgaccaaggctggcgcctgggatgacgacggcctggtagatgacctgcggattgttcgaggggaggtgaaagctgggggcgaggtgctggtcaccatcgaggcgctggcatga

SEQ ID NO: 337184 - DNA, 372 bp, Pseudomonas aeruginosa
gtgaagggacgggccgttacttcggaacagaagcgctggcacgacctgctggcgcgccatgtggggtgcatcgcctgtcgggtgtccatggggatcgtgaacacctattgcagcattcaccacgtcgacggaaggacgaagccccacgcgcattggtatgtgctgccgctgtgcgctgggcatcatcaaaacggctacggcggtgcgggcttcaccggggtcgccgttcacccgtacaaggcgcgctttgaggctgagtacggaacccaatcggacctgctttcgaaatgcgcctcgatcttggcggaggaggggcacgacataccggctgggttcctcgcgtggctggacggtggcgaggtggaagcatga

SEQ ID NO: 337185 - DNA, 1230 bp, Pseudomonas aeruginosa
atgaatgcaccccaaaaacgacaatcgatcatcatcgtcggcggtggcataggcggactggccgccgcccaggccctgacccagcaaggcctggaggtactgttgctggagcaagccggagaaatcggtgaaatcggcgcgggcatacaactgggcccgaacgcctactcggcgctagacgcactgggggtgggcgataccgcaagggcacgctcggtatttacagaaaatttgatcatgatggatgctatagatgcccgggaagtggcgcgcatagatgtcggcgaggcctttcgcaagcgcttcggcaacccctacggggtgatccatcgcgccgacatccaccgctcgatcctcgaggccgtgcagaagaacccgctgatccgcttccagacctctacccgtatcgaaactctcgtggcggacgctacaggggtttcgctgagcgacagccgcggcaatcgctaccgggccgatgctgtgatcggctgcgacggagtcaagtcggtcatccgccagacactgctgggcgatgacgtccgcgtcaccggtcatgtggtctaccgggcggtcatcgaacgggcggacatgcccgaagaccttcaagtcaatgcgccgatgctctgggccggccctcggtgccacctagtgcattatccactacgcggcggccagcaatataacctggtggtgacatttcatagtcgtcgcgaggaacgctggggcgtcagcgacggcagtaaggaggaagtgctgtcgtacttcgacggtatccacgagcgtccgcgacaactgctcgaccgccccacctcctggcgccgctgggcgaccgctgatcgcgacccagtcgaccgctggggcgaaggcagtgtcaccttgctgggcgacgcggctcaccccatgactcagtacctggcacagggcgcctgcatggcgttggaggatgcggtagtgcttggacaggcggtgaaggcctgcaaccacgatctggtggccgccatgcggctctatgagcaagtacgcataccccgcacagcacgtgtactgtggtccgcccgcgaaatgggccgtctttatcacgccaaaggcgtggagcgacaggtccgcaatcagctatggcaaggacgcgaccaggaccggttccatgatgcactccattggctgtacggatggcaggcttccaactgcttgcagccgttggagctggctacctctgtgaaactaagctaa

SEQ ID NO: 337186 - DNA, 1044 bp, Pseudomonas aeruginosa
atgagcaacgattgcgctcgcaccgccttctatcagcgccttgccagccaggcgctggttcccctctgggaacaattgcacaacctggtcccgcaccaacccaacagcgactgccagccggccctgtggcgctacggcgacattcgtccgcacctcatggaggccggccagttgatcagcgctgaagaggccgtgcgtcgcgttctggtgctggagaacccgggcctacgtgggcaggcggcaatcaccactagtctgtatgccggcctgcaactgataatgccaggcgaacttgcccccaaccaccgccacagccagtcggcgctacgcttcgtggtggaaggccaaggcgcctacactgccgtggatggagagcgagtgaccatggcgccgggcgacttcatcatcacaccgtcctgggcatggcatgcccatggcaaccccggacaagccctgggcggcgaagcggtagtctggctcgactgcctggacattcccctggtgcgctcgctcgactgcggtttcgcgcagagccctctcgatgccgaacagcccgtcacgcgtcccgagggggtcagccaagcgcgctatggtgccaacatgcttccgcttcgtcaccaagtgtgcggtgcaacgtcgccgctgttccactatccctacgaacgcagccgcgaagccctggacagcctgctgcgccaatccgaaccggacgattgggacggcctgaagctgcggtacgtcaatccggccaccggtggctgggcaatgccgaccatcggcacctgcatgcagttgctgccacgtggtttcaacggcaagacctaccggaccagcgacgccacagtgttctcggtggtggaaggccacgggcgggccgtcattgcgggccagaattttgattttgctcccaaggacaccttcgtagtgcccagttgggcttcgctgagcctgcaggccgagcaggaatgcgtgctgttcagttgctctgatcgcccggtgcagcaggtgcttggcctgctgcgggaatcccgcgaaaaccgttag

SEQ ID NO: 337187 - DNA, 945 bp, Pseudomonas aeruginosa
atgacccacatctacaatcattcccatggcgcacgcatcgtccagcatgaccgcaacgtcttccgtatcggcctgggcgaggttgaggtgattcgcttgtacgacacttcgctgttgggcgaaaccgcacaaagctggctgccgaatttcgaccgccagcgcgtggctgcccatgagcactggttggcaccaactcattacgatccggaaagcggtcgcattccgatgccggtgcacagctggatcgtacgcaccggccgccacactgtgttgatcgacagttgcatcggcaatcacaaggagcgccccggtttgccggaaatgcaccatctgtgcacacgctacctggacaggatgcgagccctgggcatccagcctcaggacatcgattacgttatgtgcagccacctgcacgccgatcatgtcggttggaacacccaactggtcaacggcgtctgggtaccgacctttcccaaagcccgctatgtgatctcacaggtcgagtacgaccatttgctgcgcgccgtacgcggcgaaggtgcccccggccctgcctggttcgcgcccatgtacaacgacagtgttttgcctgtgatcgaggcaggccagagtgtgatgttcgccgacacttatgaactggacgacacctttctcatccgccatgcaccgggccattcgcccgggcatgtgcggatcgaactgtcctcccgaggcgcacgcggcgtatttagcggcgacatgctgcactctccgatccaaattccattctggcagtggagcagcaaggtttgcgaagaccctgcgctggccgcgcgcagtcgctacgacctgctgtcgttttgcgaacagcacggcgcactcctcttgcccgggcatttcgaggcccctcacgccggtcatatcgtcgatgacgccggcaccttcggcatcagattcttgtcctga

SEQ ID NO: 337188 - DNA, 1695 bp, Pseudomonas aeruginosa
atgaacctcaccagctacgactacgtgatcgttggcgccggctccgccgggtgcgctctcgcttatcgcctgggcgaagatccgcaagtgagtgtcctagtgctcgaggctggtggccaggaccgctcaccctatatcaaggtaccgctgacctggggcgtgatcctcaagaacaggctgttcgactggggatacttcaccgagccagaagctagcatgcaggcccgccggatcgaatgcgcccgcggcaaggtggttggcggatcctcatcgatcaacggcatggcctatgctcggggagctcgcgaggactatgacggctgggccaatgagctgggcattgagggctgggcttacgacgatgtgctgccctatttcaagcgcagcgaaagctgggaaggtggcgaaagcgccttgcgcggaggcagcggtccgctgacggttggacggctcgactaccaagaccccttgatcgatggattcctagccgcgacacgagcctgcggctatcccgaaaatccggactacaacggagcttcaaacgaaggtttcggaccgatgcaggccaccattcgtaatggccttcgctgcagcgcggcagtagcctacctgcgcccggccctagcccgtggcaatgtcaccctggtgactggcaccctggccaggcgcatcatgttcgacaacgaccaatccacgccgcgtgccgtcgcggtcgaatatgcccgcaacggcgagctacatcacgcagaggcccgccgggaggtcatactctgcggtggggtaatcaattcgccacaattgctgatgctgtcgggcatcggccctgccggacatgtgcaggcgcatggtatcgaaagcttggtagacctgcagggtgtgggcaacaacctgcacgaccatattgtcttcgatctccgctggcggcggcgcactcccggtcccttacaccgaatgatgcgcgccgaccgaattgtcctagatgtcctgcgtacactgcttggcggcaatggcttctccagtcgcatacccgcggcggcggttgggcttgttcgcagccacgccgacctcgcgcatcccgacgtacaactgatcctggccgccggaccgatgaacgccgcgccctatcttgaaccattcaagcggccctacagcgatgccttcgccatcaaaggtgtgtacctgactcctgaaagccgcggtcaggtcacactgcaatcggcggaccccgagcaacctgcctgtatccgtcagcatttcctaaccagggagaacgactgcatcgcggtacgccagatgttcaggcgcatgcgcgagatcggcgcacagccgggtctggaggccttcatcgccgaagagctcgcacctggtctcagggtccaaagcgacgccgaggtcgacgccttcatccgcagccaagccatcaccctgcatcacccggtcggcacctgccgaatggggcctgacgaagatccgcaagcggtgctcgacaatcagatgcgtgtgcgaggcgtgagggcgttgcgagtcgttgatggctctgccatcccgcgcatcatccggggcccgaccaacgcgctgatcatgatgatggctgaacgcgctgccgatttcattacgggcaaggcctcgccccgcaaacagcggccggccagttccccgctcaccccgcgccagcctgccgggaggctgcaatga

SEQ ID NO: 337189 - DNA, 927 bp, Pseudomonas aeruginosa
atgcgtggttttgattcgtacctcaccttccagaagcttgaggtgttctgcaccgttgtggagttgggcagcgtcactcgggctgcggaccggctgtgcatagcccagccggtggtcactgcccatgtgcgcagcatggaggcacggctgggctatgccttggttaggcgttcgggccgcaatatcgctttgacggaggcgggcgagcgcatttatcgatgggcgacggaggtcataacccgtacccgagaggtggaacgcgagttggctgggctggaaagtggcgagatgggcaatgccgtggtggcgacgtcaatgtcggtagggtcctatgcgttgccgccgctgctgctggactttcaccggctgcatcccgacgggttggtgacggtggaaatctccaacccgcagggcgccgtagatgccacgcgtatggggacatgcgattttgcggtaattctgttagctgttggccaggatcttgatggcttaaccaccttgccgttgtgggaagacgacttagtgttggtgtgctcgccgagcagcccatgggcaagcttgccgctggccgatctcgatgtgcaccagatgcctttcgtcagcacgccacgcaatatgccgcgtcgagaattggaggagtcactgctgcgtcgacagggtttcgagcagcggcgagtggtcatcgagctaggccatccggaggccatgaagcatgcggtgcgacaggaagtcggcgtgagcttcatgttcgcctcagcggtgcgcgccgagattgcccgtggtgagctgcaggtgctggcacgccccgatctgtccatgaaggtaccgatctatctggtgcaccgcgaagacaagcgcttctcagctttccagactcaattggtccagttcattctcagccgtgcggtgccggtttccgtgccctaa

SEQ ID NO: 337190 - DNA, 795 bp, Pseudomonas aeruginosa
atgcttaaccattcttgccaggctcatggcagcgcagcgtttgctaacgattctgggcatatcggcattacaccggatcctgcgttggtcgaggatctggtccgtgccaaccatattctgttcgatcagggcattgtcgatgccttcggtcatgtcagcgtgcgtcacgacaaagatcccgaacgattcctactggcgcgcaacatggccccaggaaccgtgcgccccgaggatatcgtccagttcaccctggacggagcgccggttgatgccggcgggcgggcggtctatctcgagcgttttatccatgcagagatttatcggctgcgccctgacgtgcaggcgattgtccatagccattcacctacagtcctgccgtttagtgtctcgcgtgctgttgcgctgcgaccggtatgccacatgagcggcttcctaggggcgggtgcgccggtgttcgagatccgcgagagcggcggcgatgccaccgacctgctggtgcgtaacaatgccctcggcgcggcgctggcccgcagccttggcgacgcgtcattcgtgctgatgcgtgggcatggctctacggtggtggcaccgaccctcaagcaggctgtgtaccgggccgtgtatgccgaggtcaacgcacgcatgcagatcgaggcgctaaacctgggcgatgtggtctacctaagtgaagaggaggcggccaccgcctgcgccaacatcgagacccaggtcgaccggccatgggaattgtggaagaagcgtgtgcagcgcctgcacgcttccgatgtccattga

SEQ ID NO: 337191 - DNA, 1452 bp, Pseudomonas aeruginosa
atgcaagactcattgatcacagggcgcctgctgattgacggcgaactggtcgagagcgaaggcgctggctgggtggattcgataaaccccgccaacgaacagatcattggccgcgcgcccgccggtacccgacgggatgttgagcgagcggtggatgctgctcgccgcgcgtggccggcctgggccgagcgtaccggtgaggagcgaggcgaactactgcgcaccttcggcgagcgtatcaaggcgcgtgccgaggagctgtctcggatcgaggtgctggattcgggcaatacctactctcccaccctggccagtatgcacgagaccgtgcgtagcctgcgttactatgcgggtctgatacacgggctgcacggcgaaacgattcccgccactggcagacatctccacatgacggttcacgagccgtatggcgtggtcggccgtatcgccgcgttcaaccacccggcaatgttctctgctgcgcgcaccgcctcggcactggtgaccggcaacactgttgtggtcaagcctccggaaacttcgccgttgtcagtgctgctgctgggagagatcgcgcgggaagtgttgccgcccggggtattcaacatcgtcaacggcactggccaagaggttggcgatgcgttggtgcgtcaccccgaggtcaagcgcatcgcgctgatcggctcggtaccgactggcatggcgatccagcgcagcgccgcgcaggttgggattaagcacgtgaccctggaactgggcggcaagaacccgatgatcgtgttccccgacgctgatctcgatgccgcggccgacagtgcggtacgcgggatgaacttctcctggcaggggcaatcctgcggctccaattcgcggctgctggtccacgaatcgatctacgaagccctgctgcagcgcgtcgtcgagaaggtggctgcgataaaagtgggcgaccctatggccccggatatgggcatggggccgatcaactcagccaagagctatgctcatgtgatgagcttccttgacccggcgcagacccagggggctcgcctgatgaccggcggccgccgcccgccaggcgcggccttcgccaagggcttctgggtcgaaccgactgtttatgccgacgttctccccggcatgcgcctatggcgcgaggaagtctttgggccggtactgtctgtcagcaaatggcgcgactttgagcaagttatcgccatggctaacgacactgagtatggactgtccgccgccatctggacccaggatattcaacaggcattcgatactgcccgccgggtgcgggctggaagcgtcttcatcaacggcagcaacacccattttctcggcgtgccctggggcggtttcaagaacagcggcgtggacagggaagagggcattgaggagctgtacagctacgtggagaagaaggtcatcaacgtcatgctgtaa

SEQ ID NO: 337192 - DNA, 738 bp, Pseudomonas aeruginosa
atgagcgaaacaagcaaagtcgcgttgatcactggctcatcgcgcgggatcggtgcggccctggcccagcgcctggctggcgagggtttccgggtaattgtgaactacgccggcagcgccggcccggccgcggcagtggtcgcctccattgaggcggccggtggtcaggctctggcccttcaggctgatgtggcagatcccgtggcggttggagtgatgtttgaagaagttgagagagcgttccagggtatcgacgtggtcgtcaactgtgccggcgtgatgcaactggccagcgttgccgacagcgacgaccaactgttcgatcgcacggtggccatcaacttcaagggcaccttcaatgtctgccgtgaagccgcgcgacgtctgcgcgacggtggccggattatcaacttctcatccagcgtgatcgggatgcgtagccccacctacggcgtctatatcgccaccaaggcggccgtggaggggttgactcaggtactcgcccaggaaatgcgagggcgcggcatcactgtcaatgcggtggcgccagggcctgtggccaccgcgctgtttcttgacggtaaaagcccggaactgatcgaacgcatgtcccgagtcgcgccgctggagcgccttggtgaacccggggatatcgctgaggtggtcgcgttcctcgctggtccgcaagggggctgggttaacggacaggtcgtgcgagccaatggcggcctatgctga

SEQ ID NO: 337193 - DNA, 900 bp, Pseudomonas aeruginosa
atgaaacagatcgttctggtaaccggcgcatcgagcggcttcggactgctcagtgcccagcgactggcccaagcgggccataccgtttacgcttcgatgcgtgaaacccaggggcgcaatgcgccgcgggtgaccgaaatcgcggcctatgcacaaacgcacggcgtcgatttgcgcaccgtcgagctcgacgtgcaatcgcaagcatctgtgcaggccggcatcgacaaggtcgtcgcggacaatggccggctcgatgtaatcgtccacaacgcggggcatatggtgttcggtcccgccgaagcctttaccccggaacagtacgcgcaactttacgacatcaatgtgctgtcgacccagcgcgtgaaccgcgcggccttgccttatatgcgcaagcaggggcgcgggctgctggtatgggtgtcgtcgtcctcggctcgtggcggtacgccgccgttcctggcgccatacttcgccgctaaggcagcgatggattccctcgccgtttcctatgcttgcgaggtttcacgctggggcatcgagacctcgatcgtggtgcccggcgcgtttaccaaaggcaccaatcatttcgcccatgccggcagtcctgccgacgcggcggttaaggcggcctacgatacgggtccatatgccgatgtggcggttaagtccctcgaggggctggcagcacaggagccggaagatgccgacgcctcgtccgtcgcggtggccatcaccgagatcgtcgatgcgcctttcggcaaacggccgtacagggtgtacgtcgacccagcgcaggatggcgcagaggaagtatttcgggtcggcgatcggatccgtcgcgagatgttccgcacgattggtctccaggatctgctcaagcctcgtatcaacgtgtga

SEQ ID NO: 337194 - DNA, 774 bp, Pseudomonas aeruginosa
atgaccgaccacagcataaagggcaagatcgtcatcatcgccggcggcgccaagaacctcggtggcctcatcgcacgcgatcttgccgctcacggcgcgaaggccgtcgccatccactacaacagtgattcaacaaaggccgaggccgatgctacgatcgccgcgatcaaggctgcgggtgcccaggcggtggcgttccaggcagacctaacccgtgccggggccatggaaaagctgttcgccgaggtggttgacgccatcggccgtcccgacattgccattaacacggtgggcaaggtactcaagaaaccaatcgttgacattagcgaagctgagtacgaccagatgagcgatgtcaacgccaagtcggcattcttcttcctcaaggaggccggcaagcaccttaatgataacggcaagatctgcatgctggttaccgccttgctgggggcttataccccatactacgccgcgtatgcgggcaccaaggctccagtggagcatttcgtgcgggcagcgtccaaagagttgggtgagcggggtatctcagtcaccgcgatcggcccaggtccgatggatacaccgttcttctatccagaggagggggccgatgcggtggcgtaccacaagacggccgcggcgctgtcgaaatattcgcgcacgggcttgaccgacatcgaggacatcgttccatacattcgcttcatggtgtccgaagggtggtggatgaccgggcagacgattctggtgaacggcggttacaccaccaagtga

SEQ ID NO: 337195 - DNA, 1776 bp, Pseudomonas aeruginosa
atgaccggcgaatccgtttcacagaccgccgaaacggcggtccatcaggggttcgacctgctacgcgtggtcgtgctgttgggagctgcggtgatcgccgtacctctgttcaaacgtctggggctgggttcagtcctgggctatctggcggccggggtagttatcgggccattcggcctgggcttttttgacgacacccattcgatcctacaggtcgcggagctgggggtggtgatgttcctcttcatcatcggcctggagatgcaaccgtcgcgcctactgtcgattcgcggggatatctttggacttggctttgcacaggttctggtctgtatcgggctgctcacctgcgtcgggctgctgctcggctatccgactgcgcaaagcttcgtcgccggcacaggcttcgtgcttacctccacggcgatcgtcatgcagatgctgcaggagcgtcgtctgttggggcagcccaaggggcggcggatcgtggccgtcctgctgctcgaagatctagccatcgttccgctcctggcgctggtcgcctttctcgcgccgggaggcgggcaggtcagccagggcggtcgctggatcgaagtcgccactggggtgggggccattgttggcctgttggtggcggggcgctacctgcttgatccgctgttccgcgtgctgggtaaggcgaaggctcgtgaagtaatgaccgcggcagccctgttcgtcgtgctaggggcggcattgctcatgcagtggggcgggttatccatggccatgggcgcgttcttggccggggtattgctgtctgaatcgtcatttcgccaccagttggaggccgatgtcgagccgtttcgcggcattctgttggggttgttcttccttggcgtgggcatgtcgcttgatgccggcatcgtggcgggtaactggcggctgattgcggtgtccgtgctggcctacatgttgttgaaaatgcttggcatcttcctggttgcccggctgatgggggccggcaaccgcgaggcgctggagcgggcggttttgatggcccagggcggagaattcgctttcgtgctgtacgccgccgccatggcggtggggctgatcgatcggcacggcaatgccatcctgacggcgaccatcatcctgtccatggcccttactccgatcctagtgatggcccatgaccgcttgatgcccaaggtttcgccatcgctagagggcgtcgagcccccggacaacctcagtgccagcgtgctgctgatcggttttgggcggtttgggcaaattgtcagccagccattgctcagccatggctgttcgatttcgatcattgagactgatcccgatgccatccgcgatgccggcgactttggcttcaaggtgcactacggtgacggagctcgcctggatattctccaggttgcgggagcggcgaacgcacggctgatcatcgtcgccgttgatgatcgcgaggctagcctgaagattgccgaattggttcataccagcttctcgcaggtcccagtgctggctcgttcgttcgaccgggagcacgccatcgaactgcttaatgcaggcgctacctggcaagtccgggaaactttcgagtcggcgctgacattgagcgagcacgccctggagctgatgggaacgccggagcaaatgcgccgtcagatcatggacgacgtgcggcgtcgtgacgccgagcgcttcgccctggaaacggcgcagggaatctacgctgggcgcagcctgatccatggcaaccggagtgcatcatga

SEQ ID NO: 337196 - DNA, 249 bp, Pseudomonas aeruginosa
atgccccacgtcgacgcgccgttgcgcgtgttcttctgcctaccattcgcccattccgaggatctggccgaccaagcgctgtcgatacggttgaacaagcaattgggtcaaccctggttggcgcatgccgaaggacattgcgacatcattcggcgttttggtcgatttccgcacaggaacgcgatcctgggtcgggtctcgacccaagaagaggagcgctttcttcaggaaggcggttttgccggttga

SEQ ID NO: 337197 - DNA, 420 bp, Pseudomonas aeruginosa; identical to SEQ ID NO: 325843

SEQ ID NO: 337198 - DNA, 147 bp, Pseudomonas aeruginosa
atggagtctgaagaccggtccgtatctgaggagttccgctcaatattcaagaggatagagtccctaccagaagaggaccgggcacgaatcaaaatggcactaaagggcctgctactggccatcgatcacgagaggctaggcaactga

SEQ ID NO: 337199 - DNA, 147 bp, Pseudomonas aeruginosa; identical to SEQ ID NO: 337198

SEQ ID NO: 337200 - DNA, 231 bp, Pseudomonas aeruginosa; identical to SEQ ID NO: 325846

SEQ ID NO: 337201 - DNA, 312 bp, Pseudomonas aeruginosa
atgccgttactgatcggggtactactgcgggccatcggctggtcgctgatcccgctgggttggaagctgctgcgcggcttggggtttaccgctgtggccttcgtcggcgtcaaggcggtgatggatcaggccaaggactacgtgttcagcagtctcggcggtgtgcctgcgcagtggctccaggtcctggggcttctgcaagtggacgtgtgcatcaacatcctgttctccgcgtacatcgcccgcgccgtgctgtggggtatggacaagtctggcggcaagtccggcatgcgctggaccggaccgaagtaa

SEQ ID NO: 337202 - DNA, 1281 bp, Pseudomonas aeruginosa
atgctctatctgcgcaccggcctaccaggggctggcaagaccctgaacgcgattcgggaaatcgaccttgaacaccagccggacccggacgacccgaccaagcggttgcacaaggacccggacaatccggacctgccgcccaggacgatctactactacggcatcccggatatgaaactggatcgactcaagtccaagtgggtcgagttcgagacgcccgaagaatggttcaacctgcctgacggctcggtgatcgtgatcgacgaagcgcaacgggtgttcggcaacgatggcaccagggcgcgcccggagaaggtcacgcgcttcgaaacgcaccggcaccagggcctggacattcacctgatcactcagcaccccagcttgctgtgcacgcccgtgcgcaagctggtcggcaagcacatcaacttcattcggccctatggccgggagaaaggcatcttccggcatgagtacgagttctgcatcgacaacccggagcggcgcagcaacttcaagcaggcgcaggaagagaaagtcacgctggataaggcgtatttcggcgtctacaagtcgtcgacggtgcacacgcacaaaccggtcacgcccagctacatgaagaaaatcccgctgattatcgcgctgatgctggtcccgatcggcgtgatcgtcgggctgattatgatcgcgatgcagcaagggaacgaggaaaaggaagcggctctggcgaggagtcaagcggctgaggcgtcagcgggtgttctgcctggggctggaaatgctgttcaggcagttcccaaggcctccagcgggccgaaatcggccgacgagttcattggtgatatgtcgcccagggtgcccgacctggtggtctcggcgccgcgctatgacgatctgaacaagcccagggatttccctcggccggtctgtgcggccagctcggacccgaacttgatcggcaaggctcctgagcggcggattccgctgggtacgtacaatggccgggtgatggtctgccagtgctacacgcaacaggtcacgcggatgcacacgacgttcgagttctgcatggacgtggtgaacaacggctatttcgacgacacgcggatgccgccgacctatgccagcggcaacagcacgcgaggtttgatcaccagtccgtcagttgacccggcgacggcgattgagcgagggcgcgcagcgacatcgccgacgccgggggatgcgttctcgacacgagtaaccatcgtgccggatagcagcaggatgcccaggacgctatga

SEQ ID NO: 337203 - DNA, 270 bp, Pseudomonas aeruginosa
atgagcaagcagtcgtatacaccagggccatgggactactggtctggctacaacccagtcgatgagcttgaagctcagataacaaccgaagacggcgatattgtgattgctagttacaatcgccaaatcccggagggcgaagcgaatgccaaattattggctgctgcgcccgagctgcttgaggcccttgccgctctggttgagtgcgagcaaaccacgccagagctttgggaaacagcccgagccgcaatcgcaaaggccaccgcctaa

SEQ ID NO: 337204 - DNA, 675 bp, Pseudomonas aeruginosa
atgtccgcagaaaacaacaactccgccatgacaacgaaccagaaccaccctgacgatcaccttgccattgaagcgctccacagccgctatctcgatgtcctgaccggacgcaccagcgatcacctcctgatgttccaggacgaggcctacgcgcttggccgcgcccgggggcgcctggacgtgttccgtttcgacctgcacctggagcgccagcgccggttcagcgaacgcacgttcgggcctgggtcgcgctccgccggcgtcgtcgaccacatccgcaaggaactgcgcgagatcgaggaagcccctggcgacctggccgagtggatcgacgttgtgatcctggcccttgacggggcttggcggaccggcgccactccggcgcagataatcgacgccctggtcgcaaagcagacgaagaacgaggcgcgcacctggccggactggcgcacggcgccggcagacaaggcgatcgagcacgaccgcgcggacgacccgatcgacgacaacacctacttcgtcatgcgccacggctgcggcgccgtgttcgtgaagcacggtcccttcttccgcgaccagggcggcctgacggaggactgggggaagaactggacgcgcatcagggccggcagcctcaagcatgcccggcaggtcggggagagtctccttccgtga

SEQ ID NO: 337205 - DNA, 249 bp, Pseudomonas aeruginosa
atgctgaagcatcaggaacaaaccgaagttctcgccggcctgctctcccagaccgccatagcccgaatggctttcgctcagcggctcatggctcctgcggtcacggaaccgtaccaagttgttcctcaggggcgcggactcttccacatcatcgagaccgccactggcgcggtgcgcggattccgccggagccacaacgaggcatgcgcatacgcagagcacttgaagcgccagcaggccgccaagtga

SEQ ID NO: 337206 - DNA, 867 bp, Pseudomonas aeruginosa
atggcggctaaatcgttcaagcagatgatcaaggacggcgacctgaagcgcgcggatgcgatgaaggctcgcctcgaagaccttcacgaagaacccggcttcaacctgcgcgccgaaggcgaagacctcgagcagagcatcgcggatctggccgactacctgcaccagggcggaatcgtacctgccctcgaagtgcgaccgcgcgaagaagggggcatgtgggttgtcgacgggcaccgccggcggcgcgcttacctcaagctcgacgccgagggccggctgccacgtgacccgaacggcgagttctgggtgcccatcgttgcgttcggcggtaacgacgctgagcgcgtgcttcgagtgatcaccagtcaggaggggcgcaagctctcccctctggagctcgcacacggctacaagcggctcattgcgttcggatggacggtcgaacagatcgcccagaagatggggaagacccggcagcacgtcgatcaggtgctggttgtaggcaacgcgaataccgatgttcagcagttgatcagttccggcgcggtagcggctacgaccgcagcgaaggttgtcaggaagcacggcgagaaggccggacaggtgctcggccagcagctcgccaaggtgatcgcagcgggagggacaaaggtcacccccagagcggtagccgagccgaccgtgccgcgcgccattctggatgatctgctgaaggtcactaccgatatcgtcgaggccttccctacggcactccgcgcaggcctggccgaagggccggaatcgatcaccctcaccactcgctcggcatgggtagagcggttgatggatctcgtcgctcaggcgaaagagtccctccaggggtaa

SEQ ID NO: 337207 - DNA, 312 bp, Pseudomonas aeruginosa
atgacagccagccaattaaacgccgagcgcgatgcaagggcacgggagttcgagtccctgatcctcaaccgacttttgtcggtgggtcagaagaccgtcgccgacacaatcggcgtgagcgaatcgactgtcagtcgttggaaagagggcgagatagagcggtggtgcaaggtgcttgcgctgctggagcttcaggtcgtcccgatgtcggctcagtgtcatccatccgagtacatccaggcgctcaagaccctagccgagcttggcttgcaggccgagaagaagcggcctggaccgttggggtgggattga

SEQ ID NO: 337208 - DNA, 915 bp, Pseudomonas aeruginosa
gtgactacggacttggaagtcagccttccgcttgccttctactacgacaccaagaaacctgtaccaatcccagatgtgatcaaggccctgtccgctcttgagcgcatgagccttgggatcccggcattcttctcgtccatcagtggcgcaaaggtagattcctgcgcgctaaaggtttccaggattgaatcaggaagccttaaggaataccttgagttagcgctaaaatttctcacgactgaagaaaggcagaaatttgaggactggctgaagaccacgaaaatggggaaaggacttcgttatacgatcgttggtggcgtagcagctgcggctttcgttgtcgtggcatcaagcgctatcaccttggtagacaaggtgtcaggcacaaacgccccatccataagcgcaagcaatagcgttgtcatggttgcgggtcagaatctatttaacgccactcccaagcagcttgaatctgctgtcaatgccgctctgtcaaaggacagaaagaagattgcatctgcagcactggacttcgttaagccggcatcaggccagaatggcggtgcgatctacgctggcgaggatgccacgagcgacctgaggattagcaaagaagctgcgcgcgatgcgcccgatagcgtcgatttcagcgcaagcgatcaagaaatttcctaccagaacgtcacgattgatatccgcaccctgaaccgagatagtgaccattcaggttgggtcgctcgcatccagtctatagcgaagaacaaaaagctggggctgtcattcgctagcggcgtagattattcaaaggccacgtcgcagcaattcatacaagctgacatcactgttacatatacgcaagatcccaacaaaggagctctggttccaaaatctgtactggttaccaggatctactga

SEQ ID NO: 337209 - DNA, 543 bp, Pseudomonas aeruginosa
atggcccgcacaaagattcctttctccaaggtagcaatgctcagcctggcgctgagcgtttcgacctcgtgcgcccaactggcagcggcaacccccaatctggatagccaaaagcccagcaagcaacatcagcagcaggaacttgccaagaaggccaagatccgcgagcgcatcaagcgcgccatggctgctctcggccaacttcgcgacacccttgagacatcctgcaagatcatgctggagcataaggtgcctgactcgctgatcaatgagcagcccttcaccgaggtggtgcataccttgcgccagctagaagaggttgttcctgccgatagcgcactgtcgagactgccagtaatcggcgaagagtacgacgcctttcgccgcaacctggctaaggttcgcgccatggccgtgcagaacgagattctcttcaagcagcaaatcaccgttcctgaagtcttccagagtgacgtaagcggtgaaggactcaaatctctggccgacctcggcaccgaacgcctgcatcacctggtgagctga

SEQ ID NO: 337210 - DNA, 441 bp, Pseudomonas aeruginosa
atggcggtgattgtcgagttcaatccggaaacctacgccgagctcttccaggacgtcctgaaggatttcccttctctccttgatggtctctgccgcgattttgcccgctacatcgaatctgatcgtctctggctgccaccctatttcgggcgtgatgtgccatatgtcgtgccgcaggaggcttaccgtgccggactgatgcacatccacatcgctattccgcccacggtgttcccggccaaccgacctcagcgtgacagaacctgcccgaacggtgctccgcaacaggacgccgccttggtttacgtccaggggctattcgaggaaaaccgctactccctgcttgccctccttcaccctgatgcccatggtaaggctcgccagcgcgagatgatgacctaccttgctcgtgtcgcaagccgattccgcgataaatactga

SEQ ID NO: 337211 - DNA, 1251 bp, Pseudomonas aeruginosa; identical to SEQ ID NO: 328572

SEQ ID NO: 337212 - DNA, 240 bp, Pseudomonas aeruginosa; identical to SEQ ID NO: 324359

SEQ ID NO: 337213 - DNA, 915 bp, Pseudomonas aeruginosa; identical to SEQ ID NO: 324360

SEQ ID NO: 337214 - DNA, 2004 bp, Pseudomonas aeruginosa
gtgcgccagagccagatcgtggcccaggggaatctggcgatcaaggccgtggaagggctgaagatcgacctcaagcatatcgaccagaagaccgtgagccagaccatcgacgcgatggtgcaggcggatccgcaactggcgtggctgaaggaggccgagcagcgcggggatgtggactggcgcatggtgcaggaggtgcacgatagctggaagtacagcaactcggggttgggggctgcgccgtcactggccattgccatcgttgcagctgcttacctcggcccggtgtatggcgcaatggccagcaacctcgccattggcaccatcaacaatggcggtgaccttggcaaggggctgcaacaggccaccagcgctgacagtctgaaagggtacgccatcgcagcggccacggcttatctcgtcagcccgcagttggacaaggcattcggcgtatccagtgacaacatcaacaaagtcaccaaaggattcaagctcagcacagttgagggaatcggtggatttgctgcctacagcattgcccaaggctttgctcaatcggtcatgcagcaggccgcctatggcggcagctacatcgacaacctcggtaatgccatggcaggtcaggcgcgcaacctgggaatggcggtaggtttcaatttcattggcgactcggtcaaataccctgatggcagcccgccgaaaatcatggctcacgccctgatgggaggtctgctggccgaagcctccggcagtgacttcaagactggagcggcggccgctggtgccaacgaggccatgatcaacctccttgggaaaatggtaggtggcgatcaaaacctcgaactgatggcctcgcaactcgttggcgtagccgcggcaagtgcggtcaatggcgatgtgagtctgggcgccgagatcgccaaaagcgggacggcgtacaaccggcagctacacccagatgaaatcaaattcgcatcggatgtggagcgcgtcaaacgttatgcccaggaaaatgggctgagcgaggacaccgcccgcaaagagcttctcagcacggccgccatgatggtggacaatggctggaaccaggccttggccggcacagacatcaacgctgcccgggctgctcagtatctgcgtacggagctgggcacaggcccggacagcaatctcttccaggtgacccaggctgactactacaacgagcgggtggggctgacggcgctattcaagaacaaggaggccctgaccagcgttctggaaaacatagccctagcgaatcccgcgagctatacgagggaccccgcgaaccgtgcggaagtgctgaatgccaaaggtgaaggtagccaagcgggctttgggctggcactggaagggatcgtcagcgcgccttcaaaaactgccttgtggttgatgggtgcgctaacctgttcaagctgtgcggagcgggatatccagaacgcttggaactcggttgcctcgttacctgaagacatccgtatgaaaggctatctggatgccttgcacaccatgcaaggccagggtgccagcgtggtgcgggacaacgccgcgagttcgactgcattgggagttgaggttgggctggccattgatggagggttggcaggggcaggcaagggcgtcgttacggatggtccgaaaggaatacttacactgaaagattttcctgatgtctctaccaagataagccagaagcagcttcgccatattgctggaacacagcagcttgaggcacggggaggcggtggtttcttaaacagtgtctctgatgctcaaaaagtgcttgatgcctaccataccggccaagtgaaaatcctagggagaaatgctcagggattcccagtagtcaagtttgagggcgttactggaactaacgttaatctcggtgttggtataactgatcaggcaaccaatgtatttattatcaagggcacaaagagtccaagtattgtccctacaaatccaaactggagtcccaaatga

SEQ ID NO: 337215 - DNA, 351 bp, Pseudomonas aeruginosa
atgggcaagagagtggttgtattgctatggctgctattcacatcaatgtcagcccacgccatcgataaaaaagtcaacaacgtcaccatcatgcgcgtgggcttcatggtggacgcgaattctccgggtggaggctggggcttcatcgtcagcaagccgggagcggcggattgcggctttggcctgatgcgcctgccgccgatgaataccgatgccggcaaggccatgctgtcgctgatgctgagcgcccaggccacacagaacaaactgccggagatcgcctattcggccagcgccacggtgaacgaggtatgccagatcacttcggcgcagatagacagcggcacttga

SEQ ID NO: 337216 - DNA, 369 bp, Pseudomonas aeruginosa
atggacgccaaagctctgctcctcggcagcctctgcctggccgccccattcgccgacgcggcgacgctcgacaatgccctctccgcctgcctcgccgcccggctcggtgcaccgcacacggcggagggccagttgcacctgccactcacccttgaggcccggcgctccaccggcgaatgcggctgtacctcggcgctggtgcgatatcggctgctggccaggggcgccagcgccgacagccccgtgcttcaagaggggctgctcgatagtcgccaggacacgccgcgcacgctgaccctggcggcggacgccggcatggcgagcggccgcgaactggtcgtcaccctgggttgtcagacgcctgactga

SEQ ID NO: 337217 - DNA, 939 bp, Pseudomonas aeruginosa
atgaccagcctcaacctccgccgcctggcagcggcggccgccaccttcagcctctcgttcacggccgcggccgcgatcaacagcgccgccatcgtctcctccaccctttcccctcagtgcctcgaatacaaggtcgtcgggatctgttactggctgctctgcggcccgcatggctgcaaagtgaagacgtcggtcaaggtccgccactacgtgcctgacgcagtcgtctccagctacgcgaataccgggagcaacccctggaccgaggtatcggcgctgggtacaccgaatccactcgcccaggccggcaatgacgcgaccacaaactacaaggccgagaacagcatcggccgcttcaaggaagcggatgtgatcggccatcctggtggcgccacgttcagccggttcgccagcgcctctgggtacgtttgccctggcgccaccgtcccgctggtgccgtactttctcagcacactggacgccattggctggcggcatggaattcccgagcaggtgtaccccgaagcgttggtcccagggctgcgcgaggtgggtggaatcttctccggcgacatgtgggggaacctctatccgcgcagcggattcctgcaccagaccgacgactacaagacggcggccgtcatcgcccagcgcgccggcgacatcaccacgcgaatcggtcaactccacgtctaccttcccatgcgcgcagcccccaaggacggctactggccggcgggcgagctgaaagagggcgatgcctcgaccgggaaatggcaggagctgaccccgtccctgagcctcaactgcgcggtgtttcccaactcagggccgaagacgcaagccgtcgacggcgattacgcctgggcgctctggcgtccctactcctgctgccagcgcaaggggcagatcttcctcggcagtaccgacttccaataa

SEQ ID NO: 337218 - DNA, 225 bp, Pseudomonas aeruginosa
atgatcaacgccggcagcgacatgaccgcgccggtcgcgttctggatgactgagcccatgatgttctggaaaccctgtgtggcaccgttgagctggttctccagggtggtgctcaggttcatgtttccgcacatcatgtcgttgttccagccgaagccgacgccgatcgagtccatctggccggcggtgcccatgctcaccgcactgccgccgccaatgctgtag

SEQ ID NO: 337219 - DNA, 273 bp, Pseudomonas aeruginosa
atgcaactgttacgcgacgaacttcggacggcccggaagcactatcagtgtgatgcctattactggttcgaccgtgccggcttcggaaggcaagacgttggtgcggatgactggctaatcgttgaggccgttcgatccgaccgagggaagatccttccgggaacaaagtacatctatcaggtgagtgtcgatggtggggagttctggattttccgcgcccgcccggaaatggatgccatctgccgcaagcacgacctgtatccggaggactga

SEQ ID NO: 337220 - DNA, 645 bp, Pseudomonas aeruginosa
atgaccgtcgcccagcatgagcgcatcgtcggggagctgcgggcggtgatcgcccaactccgccagcacaagaacgattacatggattccggccaggaaacgtaccgggcattacagaacgaaatcagagaacgggaagcggaaattgctcgtcttgatggtctggtttcgggccgcacggcagagcgcgacaccgccctgaccaaggtcgcggagctggagaaagaactggaaatggcacgcgacgccgcgtccaagggtgacgctgcgcgccacgcggcttgcggcatggaaatggatatccaggagctgaaagccaagctggccgatccgacagcagttcatcagtggcaattcagcaacgcatggttcgacggtagcgaagaggctgtgcttaaagcaggcaaagaaggatcgcctatccgcactctctacaccgcgccagcccaggctcagcacagcgtgccggatggcgttacggtaaaccctgaagcacttcgccaagtggtgcgggcgcttgtcgggccggcgcaccacatccgcgaactgcaggtaaccgccagccttcctggcagccccatcacggaactggtgaagcagtacaacgcatgggcagccggcgcgggcggaaaggagggggtgtga

SEQ ID NO: 337221 - DNA, 174 bp, Pseudomonas aeruginosa
atgaaaactgtaaccctctatgaaatccgcgaataccaatacgaaggcgctggatactccaaggtcatgagcagcaagctgcgcgaccgtaaagccgcaaccaagctggtcaagcgccttaagaaaatgggtcacaaacgcgtctttgctagcccgatgaaggttgccgcatga

SEQ ID NO: 337222 - DNA, 357 bp, Pseudomonas aeruginosa
atggcagatacgctcaccacccgaaagcttctcggtcagctactggtcggagtgctgatcgtcatcggactggcagtggtcggtacgctgctcagcctcttcgccctgaaccacttcggtggcatccagggcctggaggcctggcggcaaagcaactactggagcttgttcgcctggcgggcgctgctgtactgcgccctggccatcgcatggttccggtggttccggctcaagcagcgcaaggaactgagcgcgcatgagcggcagcgcattcggcggatcgagatcctggtgctgttgctggtcctgctcatcgaattcagcaaagcctacttccgcacgggaggcgcagcatga

SEQ ID NO: 337223 - DNA, 609 bp, Pseudomonas aeruginosa
atgaagttgcggctgatctcgcggaagcggtcgctgccggcgccacgatcatcgccccggcctggcgcatccgctccacggccagcgccttgtcgctcggccgccgcgagccgatcgcctcctccacgacgaacacttcgcgaccacggccaagcaggtcgagcacggtctgcagcacgcagacgtgcgcctcgctgccgcaaaccacgaactgccggcggtcgccgccgggcgcgcgcagcagggcgccgtcggcggcggccgagaagtccagcttctcgaggatctgcgtgggctccagctcatcgcgcagggccgccaccgtcggccccaggcccttgctgtactgctcgctggccagcaccggcacgtccagtgcgcgggccacgcgcaacaaccactggctgtactcgaccagcgccggaccgtcgtcgatggccggcagcaggcgttcctggatatcgaccaccagcagggtcgaggttgcggcgcggatcagcatggcgtcctccttcggttcgacgtctcggttcgtctggcttaggcttgcacggcacgggcgccatggacagcgcgtcctcccacaaccctagcaggagcctgcgatga

SEQ ID NO: 337224 - DNA, 1146 bp, Pseudomonas aeruginosa
atgacgccccaaggccactgtgacagccgtttcgccccgcttgccgaggccttcgcccggcttttcgacaatccgcaggagcgcggcgcggcgttgtgcctggaggtcggtggcgagacggtggtcgacctctggggcggcgtcgcggacaaggacggcgagcagccctggcagcgcgacaccatcctcaatctgttctcctgcaccaagaccttcaccgccgttgccgtgctgcaactggtggccgagggcaagctcgaactggacgcgccggtggcacgctactggcccgagttcgccgcggccggcaaggcagcgatcagcgtgcgccagttgctctgccatcgcgccggcctgccggcgctgcgcgagcagatgccgcccgaggcactctacgactggcaggcgatgaccacggcactggccgccgaggagccctggtggacgcctggcgaagcgcacggctatgcaccgattacctatggctggctgctcggcgaggtgatccgccgggtcgacggccgcgagccgggcgaggccatcgtggcgcgcaccgcggcaccgctgggcctggatttccatgtcggcctggacgacagccagttcggccgcgtcgcccacatggcacggagcaagggcagcctcggcgacgctgccgcccagcgcatgctgaagaccatgatgagcgagccattggcgctgaccacccgtgccttcaccaatccgccgtcgatcctcaccagcaccaacaagccggaatggcgacgcatgcagcagccggccgccaatggccatggcaacgcgcgcgcgctcgccggcttctatagcggcctgttgcggggacgtttgctggaagatgaactgctgggccagttggcccacgaacacgcggtaggcgaggatcggaccttgctgacccggacccgcttcggcctcggcaccatgctcgaccaaccgggcgtggccaatgcgacctacggactcggccccaaggccttcggccaccctggggcgggtggctcgatcggcttcgccgatcccgagcgcgacctggctttttcctttgtcagcaacgccttggggccgtatgtgctgatggatccgcgggcgcagcagctggcgcgtgtcgcgggggagtgtctgtaa

SEQ ID NO: 337225 - DNA, 1521 bp, Pseudomonas aeruginosa
atgcgttacgcccatcccggtagcgaaggcgccatcgtttccttcaaggcccgctacggcaactacatcggcggtgagttcgtgcctccggtcaagggccagtacttcaccaacacctcgccggtgaacggccagccgatcgccgagttcccccgttccaccgccgaggacatcgacaaggccctcgatgccgcccacgccgccgccgacgcctggggccgtacctcggtgcaggagcgttcgaacatcctgctgaagatcgccgaccgcatcgagcagaacctggaactgctcgccgtcaccgagacctgggacaacggcaaggccgtgcgcgagaccctcaacgccgacatccccctggccgccgaccacttccgctacttcgccggctgcatccgcgcccaggaaggctccgccgccgagatcaacgacagcaccgtggcctaccacatccatgagccgctgggcgtggtcgggcagatcatcccgtggaacttcccgctgctgatggccgcctggaagctggccccggcgctggccgccggcaactgcgtggtgctcaagccggccgagcagaccccgctgggcatctgcgtgctgctggaactcatcggcgacctgctgccgccgggcgtgctcaacgtcgtccagggcttcggcagggaggccggcgaggccctggccaccagcaagcgcatcgccaagatcgccttcaccggttccaccccggtcggctcgcacatcctcaagtgcgcggcggagaacatcattccctccaccgtcgagctgggcggcaagagcccgaacatctatttcgaagacatcatgcaggccgagccggcgttcatcgagaaggccgccgagggcctggtgctggccttcttcaaccagggcgaggtgtgcacctgcccgtcccgcgcgctggtccaggagtcgatctacccggcgttcatggaggaggtgctgaaaaaggtcagggcgatcaagcgcggcgacccgctggacaccgagaccatggtcggcgcccaggcttcccagcagcagtacgagaagatcctctcctacctcgacatcgcccagcaggaaggcgccgagctgctcgccggcggcagcgtcgagaagctcgaaggcaacctggccagcggctactacatccagccgaccctgctcaaggggcacaacggcatgcgcgtgttccaggaggaaatcttcggcccggtggtcggcgtcaccaccttcaaggacgaagccgaggccctggccatcgccaacgacaccgagtacggcctcggcgccggcctctggacccgcgacatcaaccgcgcctaccgcatgggccgcgggatcaaggccggtcgcgtgtggaccaactgctaccacctgtacccggcccacgccgcgttcggcggctacaagaagtccggcgtcggtcgcgagacgcacaagatgatgctcgaccactaccagcagaccaagaacctgctggtgagctacgacatcaacccgctgggcttcttctag

SEQ ID NO: 337226 - DNA, 345 bp, Pseudomonas aeruginosa
atgaggtggtacgtttatgaggtgtatcctattgattatgggtgggattacctgcattcgctgtcagatgtgatggcgcgtctcagtgcagactctttgcatgatgaggctaacgagaagggatatgacctttcggtggtgaagagcttcgttgacgattgggagtcagcaaagatggctgcttcatcaaaaggttgggagggcgacttcagacacaaaccggtggttttctggattccaatcgaagacagatttgagcatgggtttgtattcaagcaggacaacaatggcacaacatttgtggtgtctccagtcgagttgccctggctgggaagctatcggtag

SEQ ID NO: 337227 - DNA, 462 bp, Pseudomonas aeruginosa
atgaacaccagcgactatgttttctccccctccagggcggcgttctaccccgtggcattgcgtgaagtctacgaagcgggagaaggctggcccgaggatggggtatcagttcgcactgagttgtacgagcagatgctggcagggcaagaggcagggatgcggatcgctgctgacgcctccggtcagccggttcttgtcgacccgccgcccctcaccgaagcggagcgcatgacgaaggctcggacctggcgtgacgctcagcttgcacagaccgatggcatggtggctcggcaccgtgacgagcgcgacctgggtaatgacaccactctcaaacctgagcagttcgtagaggttatgaactatcgcgcggccctgcgcaattggccggacgacccggcattccccgaccccgcctccaggccggagccgcctgcctggctggccgaagaaggcaccaactaa

SEQ ID NO: 337228 - DNA, 2337 bp, Pseudomonas aeruginosa
atgagcaccaatcaatacgggggcttcctcaccgacaagggggccgccaagcaggtcgaggctgcatccggcggcttgcgacggaacatcacccacatgctgatcggtgacgcgggcggtgcgcccggccagacgccggacccggtacccagcccctcgcaaaccaagctcgttcggcagcgctatcgggtcaagttgaaccgcctggtagccgctgacaacagtcccagcgtgttgatcgccgaggcgatcttgccgcaggacgtgggcggttggtggatgcgtgagctgggactggaggactccgatggcgacatgatcgctgttgccaactgcgcgccgagttacaagccgctggtgaacgaggggtcgggacggacgcaaacggtgcgcctgcatatcgcgttcagtcatgcggaaacggtcgagctgctgatcgacccgaacgtggtcaccgcgacggtggcggatctgcaaaatgcgctgctggaagtgcgcgcgaccaacgacgcgaccggacagatgacgcgaggcacagacggaaagctggccctgccgctctcgctgagcctgacaggcattgccgccggcacctatcgcagcctcacggtcgacgcgaaggggcgcgctaccagcggcagcaaccctaccaccctgggcgggtacggcattaccgacgcgctggccaagagcgatgctgtcgacgtgccggcgccgaataagctgctgcggctcaacgctgccagccagttgccggcatcgattaccggcaacgcggcgactgccaccaagcttgccgttccgcgcatgctgtcgtttacaggggacgccacggggggcgcatcgttcgacgggagtgccaacgcggctgtagcgctgaccctggcgaattcgggggttactgctggtacctatgccaaggtcacggtgaacggcaagggtttggtcaccggcggggcgcagctcactgcggcagatatcccggcgctggatgctggcaaagttgtttcgggtgtcctgcccatagctcgtggcggcaccggcaacgccatcggccaggctgcaactgcggtcaaactggcatcccctcgcacactggcaatcgctggggatgccaccggcagcgctgcattcgacggcagcgcaaacgccagcatttcggttacgctggccaataccggtgtcgccgacggcacctacaccaaggtcagggtaaaccccaagggtctagtcatcggtgcaaccacgcttactcccgacgacattccctctctggacgcctcgaaaattacgtcgggcatgttcgccgatgcccgcctgccctggtacgcacaagggctatgcaccagcgcacccaacacgacggacccgaacaccacgaacatcccgctcatcctcacgaatcacgagaacggtccgattccggggcagtatttctatatccagacgatgatgtacaaccagcgcaacggcaacgcggggcagattgccgtgcgctacgcggcgaacgccgaaatgtatgtgcgctacatgtacagcgagggcaacaagcgtggggtctggtccgcctggaagcgctgcgatgtgggtggctcgtttgcaaaagagcccgacagtcgcatcggagacgctttcgatctgaacacacttgaatcatccggctggtggtatcagaccgccaatggctatgcggccaacggggcaaactacccgactgcaaaggcggggcggttgatggtttatcgagcctcaagcgacttcatttttcagacgtaccagacacatgatggattcatgtttcatcgttgccgttatgcgggtacctggcagccgtggagggagcaatggacgacgctcaacttcaacccggccaactacgtggccaagtcggaatacaactggtcttcgctgccaggaaagcccgcgacctttcctccgtcgggacacaaccacgacgcaagtcagattacgtctggcatcctcccgctggctcggggcggcgttggggcgaacaatgccgcgacggcgcgtagcaacatcggagccggcaccatcgccacggcttccctgggatcgagcggttggtggcgggataacgatacggggtacatccggcagtgggggcgcgtgactgttgcaggcgacggcacggcagctatcacctttcccattccgtttccgactgtgtgcctgggcggcttcgcgggccagaccgccaatttccatcccggcactgacgcgagtaccgcgttctatgggcagacgaccacgggggcgaccgtcgaaaacggctatcagaaccaagctgtgttgctatgggaggcctttggcagatga

SEQ ID NO: 337229 - DNA, 525 bp, Pseudomonas aeruginosa
atgggtcgaagagtgacgaaagccgacctggccgagatcgtcgggcgcgacgaacgcaccttgagccggtggcagcgtgagggaatgccggtggtgtcggttgggcttggtcgcgggaacgagaacgagtacgacaccgaagacgtgatcggctggctggtgcaggtcgccaccctcaacggcaagaaggaatcagcgcgagaccgcctggacaggctgcgcgccgaccgcgaggaagtagcactagccaaggacgttggcctggtagttacggtggcggatctcgccgcggaatacgaagcgatgattactgcggcgaaggtagaactcctccatacctaccccgactcggtggcagcttcgctatcggctcggtatggcatcgagattgacgaaagcctgatccgcgagccactggaagacattctaaggaaactggccaagtatgaacccgatgacgccccgtcagacggggatactgacgacgccttcgctgaggaaggctttgaagaagacggcgactag

SEQ ID NO: 337230 - DNA, 555 bp, Pseudomonas aeruginosa
atgtcccgaccctcgttcgcggatcagttcgatcgtatgggccgcgaggtactccccctgggcgaagcgctcaacctcgtcgcccgcaatcaacgcatgtgccacggtggcatcactggcttcgctcactccacaggccgaagcgtctccaccacttcccacaagttcgaccccagccacaccagccacatcctcaacatctacgacgtgctcgacttcctgcggtacgtgtcggccgaggggcgggcggtggtgctcgacgcgctgcatgccgagcttggcgacagcctgtggttcttcgtttctccgcttcagttcgaggatgtgccggccagcctgattgccggcgccggcgagatcctgcacacgtcggccaacgcggccaccaccatcgcgcgccatatcgaggacggccgcattgacgcggccgagctggccgaaacccaaaagctggcgatgagcatcatccgcgcggcggtcggcctctacgagcgtgcccgctacgtccaccagaccaccaagggcgccgaacgcggggaggtggccaatggctga

SEQ ID NO: 337231 - DNA, 255 bp, Pseudomonas aeruginosa
atggagctagctgcatacatcagggagattgaccgtccgaaggaggcttcaggtaacccgctggaacgctatgccgagcgctgtggagtgacggtgggttacatgaggattcatgttctgtacgcccggaaagatccacgctttcgcttgctgcgggctttggctagagaaagcgaaggaaaagtgagtttggctgaggtgctccagcacttcggcgtgccaacggcagaaacgatttggccgatagctgcttag

SEQ ID NO: 337232 - DNA, 741 bp, Pseudomonas aeruginosa
atgcggctgaagggcctaaaccaggcagatttcagccgcgcgatagaccgacaacctgggcaagtcaatcagtttgcaggccccaacccgacaaagaacattggctccaagctggctcgccacattgagcaggcgctggagcttcctcagttctctctggacaactcgcgcgccttcgctgaagacggagatcgtcaaagcaatgtggttaaactcccgaggaaagacggcggcccactggtgcttgagccaatcgcaccttgggatagcgacactccactggaagacgatgaggttgcgttgccgttgtacaaggaagtagagatttcggccggcacgggtaaaaccgccgtgcaaccccttgaagggcggctacttcgtttctctctggccacactcagggtctgtggagtcgatccagcaaatgccatttgcgccacagccagtgggcacagcatgtcaccgctgattctgcatggagcgacgattggaatagaccgcggaatgaccaaagtcgttgatggtgaaatttacgccctagagcacgacggcgagttgcgcgttaaattcgtgcttcgactgccaggtacaggctatcggttacgcagctacaaccagcaggaatttcaagacgaagattacacgtttgaagagtttatagagcagcgaatcaccatcattggccgtgtcttctggtggtcaacggtccgcccgctcaaggggtctctccccataatttga

SEQ ID NO: 337233 - DNA, 192 bp, Pseudomonas aeruginosa
atgcaacgttccgccacggtacacgtccacccggcctgtacttcctccccccaacagatccaacgcctccaggccgacactggctgcctagtcgtcatcgtcaacggcaaagcccagcttgtcgcaaccaagcgcaccttgggccgccgctacgcggtagccacctccccgttcggaggtgacgcggcatga

SEQ ID NO: 337234 - DNA, 816 bp, Pseudomonas aeruginosa
atgactctccccatccagtacgccttcgaaggcacccacgtgcgaatcgccatgatcaacggcgagccatggttcgttgctgccgacgtgcttgccagcctggcgctcgaccgcaaagcacttgagcgcatcgacgatgacgaaaagggggtgaattcaattcacacccctggcggcatccagcagatgacaacagtaaacgagcccggtctctattcgctgatccttggcagccgcaagcccgaagccaagcgcttcaagcgctgggtgacccacgaagtgctccctgctattcgccaacacggcgcctatagcccgtccccaattgagcaagaccaaagagacaccgccgcgtcggtagccagcaacatcgaccccgacgcgctggttagcgctggaagggtattcaacactctcttccgcacagctcgacatatgggcatgacccgccaaatcgccgccggccgggccagtgaagccgcccaacgctccaccggagttgatctaatcaccgagcttgctcccagcacctggctgaacagcagcgaactatcgaagctcccacttcgcgttcctcgcgataacactggactccagcagcgtatccatagccatttggaggcgcacggctggccccaagcattcactggtcaacaactgatagaggagcttggcctagttgacgacagagccaatcaatcagcagtcgggaagtgcctgtcggcgctgaattaccgtcgcacccggctttcgacgcaaggccgcccctgggtctacacccgtccgaccgcgttaaaaggaggggatttggcatga

SEQ ID NO: 337235 - DNA, 312 bp, Pseudomonas aeruginosa
atgagtggctatcgtctccggcagcaatcgttcatccgactgcaagcccagctcaacctgaccggcaagttccacctgacactcgaagacgcgaaagcccaggctgtcatctacggctcgatcaccaccgaacgcaccgacaccagtgttcgcatcgatctccgcatgggcgaccagcaccacagcctcaccctgccttcccgcagcaggaacaacgccaccaccgtggcgcagtggctggaagggatcgcaaacggcctgatcgagacagccgagttcaaacctacccgccgctggcgggcggccgcttga

SEQ ID NO: 337236 - DNA, 279 bp, Pseudomonas aeruginosa
atgatctggagaaaagaaggcccccaggcctaccccgaactggccgaagctcaacgcctacaggacgaagcaagggccgagcaaatccgcctgatgaaagagacattccccgaaggaacccgggtactgattcggcacgaccgcggggaatacacgggaacagtcaagcgcaccgaccagtaccgcgtctacgtgatcaacgacacaagcgggaaaaccagcagcgcctatcccctgctcgacactcgcggaaagctttcggtcgagatcatcgactga

SEQ ID NO: 337237 - DNA, 564 bp, Pseudomonas aeruginosa
atgcatacccaacacatcattctcgcggtcaccaccctcgccgcgctgctgatcctgatctccaccgcctaccttgccgggcgcaaggacagaaagaacgcgcaacagcaggcggtcgacgaggcgctctatctctgccgcgtctcgcacagccaggaactgactgcgctgcataccgacctgatcaagctgcgcaccaatgcccagcgcctgcaacaggtcatcgatgagcagcaggaagagatcagcgaacagaaggggcttctgcaaacagccgaagccgaggcttccgagaaagaagccgagttcgtgagggcttatgtggacctgtcgaatacggtcaagcggctcaaggccgaggccttgacggaccaagagcaagacgccatccgcaccgccagtcgcctcctcagcggccacgctcgacagttccaaaagaccggcaccaccaagcgcaacgcagacgccgaggcccaacagcagctcgccgcgatcctccagcggctcgccatcacgagattggccagccagagcgcagacgccgaagcgcaggaggcggcatga

SEQ ID NO: 337238 - DNA, 483 bp, Pseudomonas aeruginosa
atgaccgcccctatcccggctggctgcgtagcagcactccgccagggcgccgccctggcacacgccaccaacagcacccaagccccggccgcgcagaagcgcggcggcggcctggcacgtcgcatccaactgatcgccatcgcccagggccgccaaccgatgcccgagggtggcgctatagaaagccactgctgcgcagcagcaggcatattccaatccgaccctcagcacacgccgaaggcacacataccccacgaaaggctgcgccggggcgcgaagcacatagccacgcttcgcttaatgactcgctcgcccgcgcagcttgtcgaggggggaaagcgcccaccgaagcccaccgataacgcactgatccgcactctgtgcgcgcagatccgcgagcagaaccaagagatcgctgcgctgcgcatcgcgaacaccgacctcctccagcggctggagaaagccgaagggggacgggcatga

SEQ ID NO: 337239 - DNA, 384 bp, Pseudomonas aeruginosa
atgagccagaagacccaacccgacagcatgcccgacgccgaggcggtcgaccttccagagttcagcgtggagcactccaccgagtttctgaccggttccgcaccatgcgccggcgtatcccggccactgcccgccgcctggctcgggcagcgcggcatctaccgctccagactcgaagccgtctgcaacggcgagcagttggtggacccgctgacgctgagggagttgatccagcacgcctggcgctacctctaccttacccgtcgcgccggcctggggctaaagccagctcgacagtcgctgaccagcaccaccaagacgccggaagccaccgacgccgcggttgatcagatgattgcagaagaacaaggagcaagggcatga

SEQ ID NO: 337240 - DNA, 408 bp, Pseudomonas aeruginosa
atgacgaggaatatcgaaacccgcgaaggctatgagctctgggaccgcctgtgccgccttcagcgctacagcttcttcctgggcaacggaccttccgtgcggaggattgaagacagaaccggaaactggatcgaggtccatgacgctcagtctgtgatggacgatgcccagtcggagatcaacgaacttcgcgagcataaggctgcactagaagccgagacccaggcgctcagggaggaagttgcgcgcggaaaccggatcatctgcgccatggcgctggaccttgctgccgttggcgaggcgctgggaatccccgcagagcaacaggaaggtggcgccggtgagatcatcgaagccattcaagcgcttcaggaagagctgggccggggagggccacgcgatgcgtag

SEQ ID NO: 337241 - DNA, 285 bp, Pseudomonas aeruginosa
atgagcgaaatgtacccaaaccccgaaatgccgaatgccatcatcagcgccaactctagcagcggtttcgtcgccacaacccgcgacggcaagccgctacgcatggctctagtggacgaagaaggcaacatcatcgaagcgggcgacccggtacgctgggcagcctggcgggtctgcaccgagacgctagagaacctctggcagtgtgagggctggctagtagtccacagcagccctccaggcgaccccgaggtgatcagccgcttgatcaaggccgccgcgtag

SEQ ID NO: 337242 - DNA, 1632 bp, Pseudomonas aeruginosa
atgggaaaaaacggcgcgcgagtatacagctatttgaggttttccgatccccggcaggcgaccgggagtagcgccgaccgtcagttagcgtatgcctcggcctgggcctctaagcatggtatggagctggatgccacgttgactctgcgtgacgaagggctttcggcgtaccacgaaacacacgtaaagcagggcgccttgggtgcgttcctcagggccgtcgatgagggacgcatcccggcagggtctgtcttgatcgttgagggactggaccgtctgagtcgagcagagccacttcttgcgcaggcgcagcttggccagatcgtgaacgccggcattacggtcgtgacggcaagcgacggccgcgaatacaacagggaagggctcaaggcggagccgatgaaccttgtgtattcgctcttggtaatgattcgggcgcacgaggagtccgataccaaaagcaagcgggtgaaggccgcagtgcggcggcagtgcgaagcatgggttgccggctcctatcgtggtcgcattgtgagtggcaaagatccgcagtggctggcctgggacggtgactcttggcagttcattcccgagcgagtcgaggcggtacgctttgctctagatgcatatcgatccggtattggggccgctcggctggttcgcctgatgcatgaaaaggggatggtgctgagcgactggggtattgcggcgcagcaggtatatcggttggtgcgtttgcccgcattgcgaggtgccaagcggatctccatcgatggcgaggacttcatgctggaggactactatccacggctgttgtccgatgaggagttctccgaactggagacattggtgggccagcgctatcggcgtcgaggaaaggacgagattgttggcatcgtgaccggtatcggcataactcggtgtggctactgtggtaccgcgctggtagcacagaatctcatgcagcgagtgaaggctgacggctcgcttgaggatggccaccggcgtcttcactgcgttagctacagcaagaatggcgggtgtaatggggggagctgtagctcggtaccgattgagcgcgccgtgctcgcttactgttctgaccagatgaaccttcagcgcctacttgagccgacgtcggccggcgaggatctgcggccgcgcctggtcgaggcgcaaaaaggcgttgccgagatcgagcgccagttggagcgcgtaaccgatgcgctgttggcggacgacagtggtgcggcgccgttggcgttcgtacgcaaggcgcgcgagttggaggaggatctggaaagacgtcgatcagcagtccgggcgttggagcaggagttggtggcgaagtccgcttcagcccctgcggctggggcgtcaaaatgggcagagttggcggagcgggcaaaatcgatggccgatgttgacgcgagggagcaggcgcggcaactggttatggataccttcgagaccctggtggtgtacatgcgtggtgtgataccgaacccgaaggggcggtacattgacgtcatgatgaagtcccgtgccggccaaacgcgctggattcgcgttgaccggcggacgggagtctggaaggagggggccgaccggccaactacgcggcggccttga

SEQ ID NO: 337243 - DNA, 1449 bp, Pseudomonas aeruginosa; identical to SEQ ID NO: 318546

SEQ ID NO: 337244 - DNA, 2454 bp, Pseudomonas aeruginosa
atgtccaagcgtcaaaacaaaaccggtgttcagcacctggtctatcaagccaaaaccggcttccagtactacttcaccttcccgagctatatcggcaatcacccgcagctgccggcgcaaattcgctggtcactcggccatgatgaagcgctcgcacgcgatctcgcgcaatatctcaacccgcgtttcgaagacctgctgaggcgcagcagcgccgacacggttgagctggatcctgagggctttctgttaaacctggccactgtccacgctgaaatcagccgttttaccgaaagccacctgaaaatctgggcgctccgccctgcgcctgccgtactggccaactctgacttgagcgccgggcatgagcgcctgctgaaagagtgccaagagcacaccgtgctctattgcaacgagccgggcggtgaaatccacttcgccttgcatccgagcgaagccctgcgccaagccctcaaattcggcttcacccgtttcgactggccgctcggcaccaacgaccacgtcaccgccaacgcagccgcagcttacatctacagcgccatcacggtgctggaaactaccccgatggccaagaacatcttcaaaaccgggcatccgcttatcacgatgctctcgctctatgagtacctgtgttttgcacgccccgaccaaggccgccatctgctgcatattccaccgggcctgccacgttccgcacatagcgtcatgtttcacttcagccggatctcgggacaactcgaccgcctgacaatctgccaaaactttcagattcttcaggaggaaagcgggctctacacgctccttattccgctgaccggcgcacaactcaccggcgcgcctcgtcatcccgatgagctgcgtgtcgaactactgaccagctcaccgatcctcgcgtcgatcctgctgcacttcagcctgggtcaaatcgacaaaatcttggtcaaaagcttcattgaagccccttcagcggatgcctatgagcgcgcgctgcaagaaattcaggacctgatccggcgcatgcttggcccagtaccacctgccgagcccatgtacaccctccccgacatgagcgcggccaacgacgccgtcacgacgccccaggacgctggcacgctagccctgctgaatgccctcggcagcgtcttgtcacctactcagaacgcaaagctacaagccttgtttgaaacacccacctccaacgacctgctgatccagccaccactcactcatgagagctgccggcacttcggcgccctcacgcgcgagttcgaagagcgtcaggtacgcgaaggggcgtggaagaatccgcgtacgcgcatcactatgcatgctcgcctggagggtttggcagagctaatcggaggacatcgcccactcagcacgctgactcgcgcggacttcaatgcgctgcgcgatcagttgcgcagctaccccaaaaaccggcatcgcttgcgcgccactcgctatcagcccctgagtcagattattcagagcggcaagtacgagccgctgaatgccaggacagccaaaaagtttttcgaactggcacgcgcgctcatcagctatgcgcacgaccaggggtatttgaaagaaaacctggccgcgggcctgacgttcagcaccaaaggcgccccctcgcctcgcaagcgcacctacagccccagacagattgagcaactgctcaatggcccagtctatacgctcaaagcgccgcctcggtggcgcctggatgactaccgcttctggctgcccctgctcggcctctacactggcgctcgcctgagcgagctttgccagcttcggcttggggatattcgcgaagagctgggcgtctgggtaatcagcatcagcagctcaggggcgcgacagctgaaaaccgtcgaatcggagcgcctcgtgccgctgcataaagtcattcttgaggtcgggttcctagcgtttcaccaacagcgcctggagacgcatggcggcgatctgtcggcgccgctttttgaaaatctgcgcacttatggcgacctctcccctgggcacacggccagccgctggtaccggggctcagacaaagatgacaagggctacctgggacagtgcggactcggtgatgatgaactgacttttcatggcctgcgacacacattcattcagcagttccgtcgacaaaagctggacatgctgatcggcaaagccttggtcggccacgccgaccgcagcaccactggcggctatggcgattgctatccaagctacgtgctgaaagaggagctcgacaagatcgactttgaggcctcgaccgcgcacatccacttcagccactacagggagctgcaaaccaagcaaggcgtctttcgcatcggccgcccagttggagtcaacaaggctaaggccaccagttgggctgaaaaacggcactggcaatcccgcatcacccaatag

SEQ ID NO: 337245 - DNA, 1272 bp, Pseudomonas aeruginosa
atgaatgcgctgaacccatcccatatctccgtcccaatcacccatggcctatcgttagctttagctgctgggcatgacccggaaatcttgaaactggcgatgccacacctcgccaagatttctgaatcgatttatcgacaccacaactcgccgctactagccgagttcatggacaatgtgctgaatcgtttccttcgtgagaatcatcacaacgcaaagtcggcataccaactcagagccaggatgaccaaaatcaaggccgtccttactcaagatgatcccttgcgccgagtagccagcctaagcaatcacgatatcgaagcgctaaaggacgagctcccaaagctgcttaggaagaacagcaagtcgagcagccagggcgataaccttcaagcctacttccggctgtttaatcgcatgctagatcaagcaaccaatgatcactggattgatgaagacctcaagatcaaaggctgccagaccaccaaaccgaaaatcaccaagtcgttcctcgactcaaacctagtaagcctcttcaatagctggccctatcaggcatacgattcgaacatacctgcagcgccagttctccaagatgcgcagagctattgtttttggctgatgccgcttggactctttactggcgccagactcaatgaaatctgccagctacgcgcccacgatgtggtcgaagacgcccatggcgtgcccctgatcagcatcaacgacaacggcttcaataagtcgctgaaaaatgagcaatcgagacgcgagatcccaatttgctcgaagctgatcacaatgggctttctcgacttcgtgacggagcgccgccaggccgaaggcccggatgctctgcttttttcagagctgcgctttgacgagaaacacctctactcgcgcgccgcgagccgcttcttctgcggtcccgaaacaggcgccggatttataggtcagcattgccccgtggcattggatggcggctttaattttaaaagcttccgccgcacgtttgcggtccggcttgagaagtcgaatgtaccggcaactaccattgcacatctgctgggccattctgacggcaagctcgaagtcacccaagagcactacctagaaaagccgcaatccgtgcttttgctggatactctggaacgccacctaagctacaacctgcccttgggcgacataaactggaagcatttcaagcatttgatgagcagccaggcaggacgcagcaaacgtggtcggagagcgaggaagacgttgcactag

SEQ ID NO: 337246 - DNA, 3255 bp, Pseudomonas aeruginosa
atggagaacaagcaaggatcgctgtttgaccaagcgcctcaggccggcggtgatctgcctgtcgcatcgcgtatgcccctcaatgcgcgtggccgtaaagtttacgacacgctgctggccgatttatgtgagccgtctgaggctttggtgatcactggctacagtgcgttggatcagctgctggcgctgatcagccagcgcggtgataagtctgggcttttaaggttgatgctgggttctgaaccttcacccagtaggcgccaggaattttccttggcccgccatggctttggtcaagaggtgaaaaattactggctcaagcgtggcgtatcgcttcgtttaagcggacagctgattcactgcattgagctgattcgtcagggctatgtgcgagtgcgttatccagggcccgggcctcgtttgcatgccaagctgtattgcaccgggtctgcggtgacactgggttccagcaatttcacagagccaggcttgcactaccagcaggaggctaatgttcgctttaccgagtcacaagaagggcgacgctttcgtgaggtatggcaactggctgaaagcttctgggctcaggggctagatgccgatcaggacctcatcgacctgctggaaaaacttctgcgttttgtgagttggcgagaggcaatggcgcgtgcctgtgttgaactgcttgaaggtgagtgggcagatcgttacctgcaatcactgagtagtcacgagggtgttcgtctttggccttctcagcgtaaggggatcggccaagcgctttatcttttggagacagccggtggcgtgcttgtggctgatgcgactggttcaggtaaaacccgcatgggtgtgcatctgctgcgtgccatttatgaccggatttggtcgatgtcgcgtgggcacaagggaatgatgaccatggtgtgcccacctttggtcacgcccaattgggaccgagaacgtgcacattgccagttatctcttgaggtgatttcccacggatcattgagtgtcctcaagcccgatgaggattcgatggttggccagttgcttgcccgggcacaaactcttgcggtcgatgaggcgcataacttcctaaatcaaacctcgaatcgtacccgtcaactgctgcataaccttgcagaccagacggtgttgttcacggcgacaccaattaatcgctcggcgtccgacttgctgcgcctggttgatattctgggtgcggacaactttgatgatgcggtgctggcaatttttgagcgcctaaatcggaccaaaggcagtgtgcgtgatgcccaccccgaagagctgcgcgaacttcaactcgcggtcgcaagctttacggtgcgtagaaccaaggctcagctcaatgcgatggttgatcagcagccagatgcctaccgaacacctgccggccgggtgtgtcgttacccgacgcatgctgcatgcagttattcgttgaatgagccagcagaggatatccgtctggctgagcagatctcggtgctggccagaaaccttaaaggggttgggcattttgaaaagaacttgtacctgcctgtcagcctgatcagtcatgggtactcacctgaaagttacctgcgcatgcgtttgcattctgcgggttccttggcacgacaccatgtcatggcgagcttgcgctcatctcgcttggcgctcttccggcacatcctaggcgagaagcgtgcgctggagcatatggggctggaagggttaggcagcagcaagcctgacaaggacagcggcaatatgctgcagcgcattgatgctttgaaaggccgtgttcctgaaaatcagctgggtatcgatctgcctgaatggctgacggaccctaaagcgcaccaagaggcgtgtgaggctgaaatcggtatctaccggatgatccttcggctacttgagcgaatcactgatacccgcgaacggcgaaagtgcagcctgttagtggagttggctggtcgccatgatcaagtgattgccttcgaccatttcccgctgacattgcgcttcctgcagcacctgatcagtgccgatgcgaaagccgagaaaattgatgtgctgcttggggtagggggtaataaaacgcagaacgagcagctgcaaaaacgcttggacccgctgaaaggtggggggcgtgttattgctctttgtagtgacgctatgtccgagggtgtgaacttgcagcgtgcctccagcatggtgcatctggatatgcccagcgtggtgcgttatgccgagcagcgcgtaggccgaatcgaccgcatggacagccctcacgacactatcgagtgttggtggccattggatgcgccggcttttgcgctaaaagctgacgagaagtttgttgcccgcattgaagaggtggagtcgctgctgggaggtaacctgcaactgccgcaagagatgttgcgcgaagaggttgctagccgcgttgtaagtcctgaggattttcagtccgaaatgcaggcccgctcggttcagccttgggacggcattgaggatgccttttcacctgtaagggggcttgttgagggcgatgctgctctggtcaggcttgaggattatcaccaggcaaaagctgacccgacagctgtgctttcacgagtcagcctggtgcgggcgcaacgtccctggttgttcgtctgtttagcaggagaagcaaaccaagctcccaggtgggtattcctctcagatgaacacgatgcaccattgatcaatcttcgagatgttgttgcagcactcagggaccggttgacagacgatgtgcatgacttgcagcccagtcacgctgctggtcgcgagcttgaccgattgctgggaaggttgagcaagatggagcgtttactgctgccgcgcaaaaaacagcgtgcgttggaacagatggctgctgtgctacccatttgggcaaaacagcctggttggattcagtcttccgagcaggctgatcaagtcaagatgctgatggatatcttgagccctaatggacggagtgactgccccgactgggggcagttggctgatgcttggctcgaccttgttaggcctgcatggtcacgttatctggatcgaggtggtcgcaaagcagcgatcactcggctgcgggatattcacaaaagcctgctggctgatcccatccccgcgcagcagttgcttgatcgtgtagcgggcatagcaacgcgtcagacttgggaggagaggattgttgcatgtattttggggtatgccggggcttag

SEQ ID NO: 337247 - DNA, 3102 bp, Pseudomonas aeruginosa
atgactgaagaccaactggaacaagaaaccctcggctggctggcggaggttggctatagccacctgtacggcccggatatcgcccatgacggtgatagccccgagcgccagaactatcgccaggtgctgctggttgagcgtttgcgtcatgccattgcgcggttaaacccgtctgtgcccttggcggcacgtgaggatgcactcaagcaggttgtggatttggggctgccgattcagctctcggccaaccgtttgttccatcgcctgctggttagcggtgttccggtgcaataccagaaggatggtgaaacgtgcggggactttgtgcgtttgatcgactgggtggatgtgcgagccaacgagtggttggcgatcaatcagttcagtattcaggggccgaagcatacgcgccggccagacatcatcctgttcgtcaacggtctgccgctggtgctgctagagctgaagaacccggcagatgtgaatgcggatctggtgaaagcgtttgatcagatccagacctacaaagagcagatcccggacgtcttccactacaacgagattctggtgatcagcgatggcagcgaggcgcgcatgggctcgttgtcggcggacattgagcgttttgcgcgctggcgcaccatcgatggtgtgaacgtcgacccgctgggcgagttcaacgagctggaaaccctggtgtgtggcgtgctgcagccctccatgctgctggattacctgcgttacttcgtgctgttcgaggatgatggccggttggtcaagaagattgccggttatcaccagttccatgccgtgcgtgcggccatccaacaggtggtcagcgcctcgcgcccaggcggcacgcacaagggcggggtggtctggcatacccaaggctcgggcaagagcatcaccatgacctgcttcgctgcgcgggtgatgcaggaagcggagatggaaaacccgaccatcgtggtgatcaccgaccgcaatgacctggacggccagttgttcggcgttttctcgctgtcccaggatttgctgcgtgagcagccggtgcaggtggctacgcgcggtgatctgcgcgagaaactggctaaccgcccgagtggcggcattgtgtttgccaccattcagaagttcatgccgggcgaggatgaagacacttttccggtgctttcggagcgctcgaacatcgtggtggtggccgacgaggcgcaccgcacccaatatggcttcagtgcttcgctgaaggtgccggaccttaaggtggccgaggccagtgcccgctatcaggtgggctatgcccagcacctgcgcgatgccttgcccaatgccaccttcgtggcttttaccggcacgcccgtgtccagcgaggaccgcgatacccgcgcggtgttcggtgactacatccacgtctatgacatgcagcaggccaaggaagatggcgcgactgtggccatctactacgagtcccggctggccaagctgtcgctgaaagactcggagctggcgcatatcgacgaggaggtagatgagctggctgaggatgaggaggaagaccagcagtcgcgcctgaagtctcgctgggcggcgctggagaaagtggttggggctgaacctcggatcaagagcgtggcggcggatttggtcgcgcacttcgaggagcgtaaccaggcacaaagcggcaaggccatggtcgtggcgatgagtcgcgagatttgcgtgcatctttacgacgcgatcattgccctgcgcccggattggcatgacgaagacccggagaagggcgcaatcaagatcgtcatgaccggcagcgcttcggacaaggcgttgctgcgcccgcatatctatcccaaccaggtgaaaaaacgcctggagaaacgctttaaagatccgaaagacccgctgcagttggtgatcgtgcgcgacatgtggctgaccggcttcgacgcgccctgcgtgcataccctgtatgtggacaagcccatgaagggccacaacctgatgcaggccatcgcccgggtcaatcgcgtattcaaggacaagcagggcggcctggtggtggattacatcggcatcgccaacgagctgaaggccgcgctcaaggagtacacggcgagcaagggcagagggcgacctacggtggatgcccacgaggcctatgccgtgctggaggagaagctcgatgtactgcgtggcctgctgcatggtttcgattacagcgactttctgactggcgggcacaagttgctggccggtgcggccaaccatgtgttgggcctggacgatggcaagaagcgctttgctgacaacgcgctggccatgagcaaggccttcaccctgtgctgcacgctcgatgaagccaaggcggtgcgtgaggaagtggcattcctgcaggcgatcaaggtgctgttgaccaagcgtgacatcagcgccaagaagaaaaccgatgaagagcgcgagctggccatccgccagatcatcggcaacgcggtggtctcgggtgaagtggtagatgtgttcgaggcggttggcctggacaagcccaatatcggcctgctggatgacgagttcctcgctgaggtgcgcaacctcccggtgaagaaccttgccgttgagctgctggagcgcctgctggaaggtgagatcaagagcaagttcgccagcaacctggcccaggagaagaagttttccgagctgctcgatagcgtgatcaagcgttaccagaaccgctccatcgagaccgctcaggtcatcgaagagctgatcgagatggctaagaacttcgccgcagcgagcaagcgtggagatgcgctgggcctgaatgatgacgagttggctttctacgatgcgctggccaataacgaagcttcggtgcgcgagcttggcgatgagatcctagccaagatcgctcatgagctgactgatagcctgcgccagaacgtgacagtcgattggagcaatcgcgacagtgtgcgtgccaagttgcggctgatggttaagcgcattctgcgcaagtacaagtacccgccggaccagcaggaagaggctgcgcagctggtgctggcgcaggcagagacgctgtgtgaggcgtggatgtaa

SEQ ID NO: 337248 - DNA, 1353 bp, Pseudomonas aeruginosa
ttgagtgacgtggctggccagcatgtcaccatccgcgaatacgcccgcctgactacagcggcggttgagtcatcgctggatttggtccagatctcggcgagcgccttcgattggttgtgcgagctcagtgcgcgcttcaacaaaaatggtgcgctgctgttgcagattgaagggcggcaggtgctcaagtgggactcctacgtgggtgtgctggaaacgccctgtggcacgcggctggagattctgcccaaacaccatgagcaggatgattgcctgatcaagagccgccagttgctgcgcaagctgattcagagcgctttgcagctcaaacctcgcgaggcctcggtagccagcctggcgctgttcgatgcgccgctcagcgagtgggtgatggggcagtttctggctgagctggatctgctggttaaacgtggcgtgcgcttcgactaccagcgtatcgaggaggaacagcgctttctgcgtgggcaactgaatgtagtggcgcagatgcgccagccgccagggcggcagcatcacttccagattcgccacgatgtgtttctgcccgatcgagccgagaaccgcttgctcaagctggcgttggaacaggtggcaaaaagtacgcaggatgccgccaactggcgcttggccaacgagctgcgcgccatgctggcggaggtacccaccagccgccaggtagcgcatgactttcgggcgtggagccgcgaccggctgatggcgcattaccaggcggtgaaaccctggtgcgagctgatcctcaatcaacagatgccgatagccgtgagcggtgactggcgcggcatgagcctgctgttcccgatggagaagctgttcgagtgttatgtagaaggttggctgcgtgagcagttagcgcctgctgcgcgcttaaccagtcaggccagccgcgcctacctgtgtgagcatggccaggggcggatgttctgcttaaagccggatctgctgatcgataccgctgagcagcgttggattctcgacaccaagtggaagcgggtggatacgcgtaagcctgagaccaattacgacctgagtcaggctgatttctaccagctgtttgcctatggtcataaataccgcatcaatacaggtacaccgaagttggtgctgatttatccctcttggtcagggctgaaacaggcgctgccggcgtttgattacgggcaggggatgagcctgtgggctttaccttttgaccttgatggtgatcgactgctggatgccgattttgccggtattccgttggtcggtaagcgcaccgatcaagtaaccgtacaagtaagcgatcaagcatatgcagcagcaattgccaggtaa

SEQ ID NO: 337249 - DNA, 3186 bp, Pseudomonas aeruginosa
atgcacgagcccatcgagcagcgcgaagcgttgtggaacaagtttctccagcgctggccgttggagcagctgccgagcatgacgttgccggtctacaaccaggctgggtcggatgattccttctgccgttggctggaaaagcatctggaatccttgggatcgatctggggtggctcgtcactgaagttcggcatctactcgcgcgccaatacggaaaaagacccgagtgggcagaacggcgtgacggccaatgggcgctatgcctggtatagccgttacgggcagagcgaagaagtagcctttgcccgggttcgcgatttgattgttgcaaccgcccaggccgcgcgcgaggggcgcttggaggctatcgaagccatcgacctgtggccgattctgaagtggaaaattgcctttctttaccagaatcgccagcagccgacggtgctgccgatttacctgcgtaaatacctggcggcggcgctgacagggactgtgccgacctcgcacgccgagctgtatcgcgtgttgctggcagagcgcggtaaccaaccgctactggcctatgccgacgcggtgtatgagcgtgggcaagtggcacttcagcatcagcagcgggtggcggtgctggagcattttgctggggcgacggacctggcggcacgcttacaggccgccaatgcgacgctggcgttttgtgatctggcgctggcgctgcatgagcagggcttggactggtggattaccgaagctggggcgattcatgccgggcgcactgaggattttcgagtctggcaggtggctttgggcttgcgcgtggacgttggcactgagctgacgcgggtgtgtgtgccgggcgaagaaggagagcagtggcatgtgctggaagaggtgctggtcgattcgctgatcgagtcggtagcccgccacagcgcgcaatggcccaagcccgcaagggcggcttactggccggatgactacgacaacatggctgatcggttggtaatcaccctgacggatggggctattcgcaatggttacctgagtgtgccgaagctgcagcgtttgttccctgaggcgtgcctgggtgaaagcgatcagccggcttcgcgcctgtttaccctgcgcttgcctgacggccgcactgagcagactcaggtgttgaagcagcacaagcgtatccaagcacgcttcaacagcctgtttgctgccaatggtctgcaggccggggatcaagcggtgctgagcaaggttgccgagtttgattaccaactgagtttcaggcgtgccgggcagcaggatgctactgccgtgagccaagtaaaagatgtgagaaaggagatgcccgtgcgcgatgtgccgcttaatcagatcctcttcggcccaccgggcactggcaaaacctacgcgactgtcgatgccgcgctggcggtactagaccctgactatctgcacgtacatcgggacagtcgcgaggcgcttaaacagcgctttgacgccttggttgctcaggagcgtattcgcttcgttaccttccatcagagctttagctacgaagatttcgtcgagggactccgtgcgacgacggacgagggcactggccagttgcgttatgaggtggtggatggcgtgtttaagtcgctctgcgaggccgcagcggcgaaggtgacacagcaagccgaggctcccacggagattggtcagcggcgtatctggaaaatgtcgttgggcaataccttgggtgatgacgccagcatctatcaggagtgcctggccggcggctatgtgctgctgggctacggtggtgcgattgacttcactggctgtacttctcgccagcaggtgcaagcgcggttcgcgcaagcgggtatcacaccggagaacccggccacggactatggcatcaccagcgtgacggcctttgtcgcgcgcatgcaggtgggtgatctgatcgtggtttccgatggcaactttaaattccgcgccatcggtgaagtgagcggggattatcagttcaagccgcacgcggatttctctggcgattactcgcaaatgcgcccagtgaagtggttgcgccaataccagccctcgttgccgcacagcgagctgctcaatgcccagttcagccagatgaccctgtatgaactgcgtgagcccagcttgaataaaacgcggctaaaagcgttgttgggcgcgccaatggctagtgctggcagcttgttgcgcgttggtcagcgttttggccagggctatgtggtgcgtagcgtgggcactgaggtcgttgagttggacaagccgcgcggcggtatcttgccgctaccgatgagtttgttgcggcagctgctcgcttacgtcaatgcgggccagattagcgtggatgacattcgccaaggtcgggttttcgagaaggttgccgaggccgagatagaaaaatacatcgtcaatggctatcaaagcttgttcgcggcgatggttgagcagttgatggctgcgccgccagcgagtgctggcaacgacgtacgagtgctgattattgatgaaatcaaccgcggcaatatttcgcgcatcttcggtgagctgatcacgctgattgagccctccaaacgtgctggcgcggacgaggcgttgtcggttgtgctgccttattccaaacagtcgtttagcgtgcctaacaatgtttacctgattggcaccatgaacaccgccgaccgctcactggccgggctggatattgccctgcgtcggcgtttcgtgttccgcgagatgccgcctcgacctgagctgctagatgatgttgaggtggcggggctgaatatcggccagttgctgcgggtgatgaatcagcgcattgaggtgctgctggaccgcgatcattgcctgggtcatgcctactttatgtcgctgaaatcagacccttcgctggcgcagctagagctgatcttccgtaaccagattctgccgttgctgcaggagtatttcttcgaggattggcagcgcatcggttgggtgctgaacgatcaacaggccgtgagcaaaggcgctgagccgtttattcgccgcccgcagagtgagcagagcctggttgcgctgtttggcagtcaggtggcggagcaactcagtgaccaacgctgggcgctgaacgatgccgcctttgctgcgctggccagctatcagaacattctgggttga

SEQ ID NO: 337250 - DNA, 1281 bp, Pseudomonas aeruginosa
atgagttctgagtgggtttcttttactgatctgctatcagcgatagtcgataacagagggcgaacctgcccagttggggaagctggattgccgttgattgctacaaattgcatcgaccccaacactctctacccacggtacgagacaactcggtatgtgtcagacgagacatataaaacctggtttcgcgggcatccgaagcctggggatattctctttgtgtgtaaagggagtccaggcagaactaactgggtcccagatccagtagatttctgtattgctcaggatatggtcgctgtaagagcagacccacagaagatttatccaaagtatctgtttgcagcattgcgatcctcggtggtgcagtcccagatcgataacatgcatgtcgggacaatgatcccgcattttaagaagggtgatttcgggaagctaaaaattcctgtactgaggtcggatgctcagaaggtgataggtgatttctacttcactgtatccgagcgcatcaccctgctacgcgaaaccaacgccaccctggaagccatcgcccaggcgctgttcaaatcttggttcgtcgatttcgaccccgtgcgcgccaaggccgaaggccgccagccggaaggcatggacgccaccaccgctgccctgttccccgatagcttcgaagagtccgaaatgggcttggtgccgaaggggtggagccattcaactgttggcctttcgttcgtcctgactatgggacagtcaccgcctggtgatacctacaatgaggttggtgaaggactgcctttttatcaggggcggactgattttggttttcgctttcctaagcaacggattttttgtactgaacccacaaggcttgcaggtgcaggcgatacgctcgttagcgtccgggctcctgttggtgatgtaaatattgcgcttgaggcatgcgcattaggtcggggagtggcggggttgcgccaccctgagggccaccaaagctttgtcttttatgctgttcgttgtcttaagccgcattttgaaatgtacgacggtgaaggcacggtattcggatcaatcaataagaaagatttccagtctctgcctgtagtcgttccaactacagaggtcttgagtgcttttgaagttgttgtcgcgccacttgatgcagcagtagaaaacaatgagcagaaattacgatccctcacccaactacgcgacactctcttaccccgcctgatctccggccagctgcgtttacccgaagctgaagccctgctggaggacaacctctga

SEQ ID NO: 337251 - DNA, 1944 bp, Pseudomonas aeruginosa
atgaatgagttggagcaggccctgctggccttggtaccggttgatggttcgagcatcggcaatcagtcgctgctggaacgcctcaaacggcaatttcagcagctgagcgaagaggccttctgggcagcgcgcgatgggctgatcgagcagggcgtgctgcaaaaaggccgtggtcgaggcggctcggtgctgcgggcgcagccggttgccagcagcctggccgaccaggtgctgagcaaggcccgtgagcgctttgagccggcagcggttgaggaagtcagtgccgtctatgtggccgacgccgcagccagcgtcagcaagggcaaggcggccaaggtgcagcccgccaccggcatcgaggacatgaagaaaaccctctgggccaccgccgacaagctgcgcgccaatatggacgccgccgagtacaagcacatcgtgctcgggctgatcttcctcaagtacatctccgacagtttcgccggccgccgcgccgagctggaacgcaagctgaccgacgagagcgacgactactacctgggcgacgatgaccccgaggcgctcaacgccgaactggaagaccgcgactactaccgcgaggttaacgtgttctgggtgccggaagtggcacggtgggagtcgatccgcgccgccgccaagcaggtggatatcggcaagcgcatcgacgaggctctcgccgccatcgaggcagaaaaccccaagctgaagaacatcctcgacaaacgattcgcccgtgcccagttgccggatggcaagctgggtgagctggtggatttgatctccaccatcggttttggcgaggacatcggcaaggcgcgcgacctgctcggccaggtctacgaatacttcctcggccagttcgccagcgccgaagggcgcaggggcgggcagttctatacgccggccagcatcgtcaaaaccctggtggcggtgctcaacccgcaccatggcaaggtctatgacccctgctgcggctcgggcggcatgttcgtgcagtcggagaagttcatcgaggcccacggcggcaagctgggtgatgtgtcgatctacggtcaggaagccaaccccaccacctggcgcctggcggcgatgaacctggccattcgcggtatcgacttcaacctcggcaaggagccggcggatacctttatccgcaaccagcattcagacctgcgcgccgatttcatcctggctaacccaccgttcaatatcagcgactggtggcacggcagcctggaaggcgacccgcgctgggtctatggcgcaccgccgcaaggcaacgccaactacgcctggctgcaacatatgctctaccacctcaagcctaatggccgagccggtatcgtgctggccaatggctcgatgagctccagtcagaacagcgaaggcgatatccgcaaagccatggtcgaggccgacgtggtggaagtgatggtcgcgttgcccggccagctgttcttcaacacccagattcccgcctgcctgtggttcctggccaaggacaagcgccatgccctgagcactggcggcatcgatcgcagtggccaggtgttatttatcgacgcacgcaagctgggcaccagcgtcagccgcgtgcagatcgagctgaccgatgctgatatcgagcgtatcgccagcaccgtggcggcctggcgtggcgaggcgctggatgaaggcgggcaggttggcgaattcgccgatatccccggcttctgccgcagcgtcaccctggcggaaattgcagagcatggtcatgtgctgacgccggggcgctatgtcggtgccgaagaggtggaggatgacgacgaagcctttgccgagaagatgcagcggctgacccggcaacttggcgagcagatgcaaaagggcgcggaactcgatcagttgatccggcagaagctgggggggctggggtatgagttctga

SEQ ID NO: 337252 - DNA, 642 bp, Pseudomonas aeruginosa
atgaataaacccaccaccgtgcaggcactggaagatctggggcgtgtcaggctctccaagagcttcttcatgcgcgattttctctattcggagatcagccagatcgacggtatcccgaatatccccgacttccccgatcgcgccatcgaggcgggtcgccagctctgcgagcagttgctggagccactgcaagatcgcttcggccgtatcgccattcgttcggcgtatcgcgccccggcggtgaatgccaagggggcagaagacggcaacaactgtgcgaagaacgaaagcaactacgccgcgcatatctgggactacccggatgccgacggccacctgggcgccaccgcctgcatcgtggtgccggccttgctgccctggtacgaccagaccagtgactggacacccctggcctggtggattcacgacaacctgccctacgccaaccagtactggttccccaaactggccgccttcaacctgcgttggagcgccaacccgcaggtgctgccgagcatcaatacctatgtcaccaacccgcataccggtgacaaaaaggcgctggtgcacaagggcgtggccacgctgggcgttgaggagcgcaagcacatcgtcgagccctggctggccagcctggcgtga

SEQ ID NO: 337253 - DNA, 255 bp, Pseudomonas aeruginosa
atgaacgcgttcgtgcgactggccatggtgctgctgctcggcatgagcagcacggctttcgccatggatcgcgacctggacaacgatggccgctgggacttcggcgcaggcggcagcgatcgagacatggataacgacgggcgttgggatttcaatgccggcggctcggatcgggatatcgacaacgatggtcgttgggactacgacaagggcggcagcgaccgtgacctggacaacgacaaacgccgcgattga

SEQ ID NO: 337254 - DNA, 1587 bp, Pseudomonas aeruginosa
atgagcgatatcggaatgtcctggggaatggtggcggctgccctggtgctggccgcaggtcttggcctggcgctgttctggcagagcatgcggcgcaaggaggcgcacaccagtttgcaggcctgcaaagaccagctggagcagcttcaggcactgagcgagtcgcgcgaattggagttgcgcgagctgaccgccgcggtgcgtgccgagaaggcgcatgtcgagcaactgcagcgccagctgagctttgcccatgaagagtctgccggcttgcgcgatgagcagaagcaactgctcacccagttggccgatgcgcaaagccaggccagcgcagcgcgtgctcagtacggccagctgctgcagcaacacgccgagctcaagcaggcccatgagtgcctgcagaacagtcacgaggtgatgcaggaaaagttcgccaacctgtccaaggaacacgccaccctcagcagcagcctggaacagaagcagcagcactttgccgagcaacagcagttgctcaaggaaagccgcgatcagctcaagctggagttcgagcagctcgccgggcagatcttcgaagccaagggccaggccttctcgcagcacagccagcagtcgctagatgcgctgctcaagccattccgcgagcagatcgacggcttccgcgccaaggtcgaagacatccaccacaaggatgtccagcagcaggccgcgctgacccaggagctgctgcacctcaaggaactcaaccagcagatcacccaggaagcgcatgacctggccactgcactcaagggccagaagaaggcccagggcaactggggcgagctggtgctggaaaacgtcctggagcgctccggtctggtcaacgggcgcgacttcaagcgcgaggtcagcatcaatggcgaggagaatcgccagcgcccggatgtgatcgtctacctgccgcagggcaagcacctgatcatcgacgccaaggtctcgctcaatgcctacacccgctacatcaatgccgaggatgatgccgagcggcgcctggctctcaatgagcacgtcacggccatcggccagcgcatcaaggagttgtccaaccggcactacttcgagctgccggggctgaatgcgccggagatggtgttcatgttcgtacccatcgagtcggccttcgtcgaggcgctcaaggcggacgagaccctgttccagaaagccatcgagcagaacgtgctggtcgctaccccgaccaccttgctcaccagcctcaacatcgtgcgtcagctctggcgtttcgaggaccagaacaagcacaccgccgagctggccgagcgcgccggtaaggtctacgacaagctgcgcaccttcctcggcagcatggacgccatcggcaacagcctggacaaagcccaggacgcctaccgtaaggcgcgtgatcaactggtcagtggcaaggccaacctggtcaagcaggtcagcgacttccgccaactgggcgtggccgtcaaaggtgagctggacgaaacctgggtagaccgcgccgagctagagctgggcctggtcgaacaggaagccttcgaggcgcaggagcaagcatga

SEQ ID NO: 337255 - DNA, 876 bp, Pseudomonas aeruginosa
atgaaacgcaaacaagccattgagtcagtgcgctgggatctggccctgcgctaccgcctgatcgagaccatcgcctggtgggagggccgtttgaccactggccatctgatgcagagcttcggcatcagccggcagcaggcgtcgaaagacatcaactcctacatcaccgactacgcgccgaagaacctggaatacgacaagcatttgaaggggtatgtgccgagccgccacttcaaaccgctgtttattgatgacagcgccagcgcctacctgcatctgcttaatcaaaactacgaccgtgcaccgcatatcgaaggtctggcgctggcctatgcgcacaccgaggtactggacgtgccggatcgctcagtgcgtccggaggtgctgcgcccgctgctcaaggcctgccgcgaggggctgcgactggagtgcgagtatgtgtccttcaccacgccggacggcgaaactcgcctgatcgcaccacacacactgatctacaccggcatgcgctggcatgtgcgagcttactgcgagaagaaccgcgattaccgcgacttcgtgctgagccgctttcgcggtgagcccgacctgatggatgccccctcggagcacactcgcgcgctcgacaagggctggaacaccccgctcacggtggttatcgcgccggactcgcgcctcaagccggagcagcgcgcgatcatcgaggccgactacggcatgcgggatgggcagttggtgatcgagacccgtggtgccctggtgcagtacgtgctgcagcgctatcagatcgacccgaccaaggtgcacgccaaagctacggcgcagcagatcgtcgtcaccaacctcgatgaactgcagccctggctgtatcactga

SEQ ID NO: 337256 - DNA, 534 bp, Pseudomonas aeruginosa
atggcgactcaaccgctgctgtataccctgcacattcagctggagccgttgaacttcaatcctccggtctggcgccgcctgcgcgtgaacggcgactgcatcctgcgcaagctgcaccacttcatccaggcagcctttggctggcacagcagccacctgcatgagttcagcgacggcatccatcgctacctgccgctggatgccgagctgatgtacatgtacgacgatgcgctggatgaccgtaagagcaaactgcgccgcgtactcaaggaggcggaccggctgcgctatctctacgacttcggcgatagctggcagcacgtgattgccgtagagagcatcgagcccagtgatatcaccggcacctggtgtgaagtgctagatggcgcccgtgcttgcccgccggaagatgtaggtggcgtgccgggttacctggacttcttggcttcaaacggcagctttgatcccgagctgtttgaccgacgcgccgccaacgcagcggtgcagcggatctgtaataacttctggggctga

SEQ ID NO: 337257 - DNA, 180 bp, Pseudomonas aeruginosa
atgagcaacgcccttatcctcggcccgctgcagcgcagcggcaccgccctccctctcttcgatgcgcgagtcccggccggctttcccagccctgcacttgatcacatggagcacaagctgtcgctcgatgcgctgctggatatgcaggccccgtatacccaaccgatgacagacgactga

SEQ ID NO: 337258 - DNA, 306 bp, Pseudomonas aeruginosa
atgcggctggacgttggcatagtcggcgccgaacagctgcctggcgcggtcgatggccagccgctcgaccttgtcgacgtgttcgcagccgccgtagtagcgcttgcccggatagccctcggcatacttgttggtcaggccgctgccctgcgcctgcatgacccgcttgctggcgtagttctccgaggcgatcagttcgatgtggtcttcctgccgccggtcttcggcgtccatcgcggcgagcagttcgtcgtcgtagccctggagctggtcgtgcttgctgaacatggcgctggcctcttgtag

SEQ ID NO: 337259 - DNA, 240 bp, Pseudomonas aeruginosa; identical to SEQ ID NO: 328651

SEQ ID NO: 337260 - DNA, 846 bp, Pseudomonas aeruginosa
atgagcctgacaatggggccgaacactggcttactgatcaacggcgcccccggtgaggggcattacagcgaactgatccgcatgttgcgctgggatgacttcctgcgccaaccggtcgtaaaggggcgggtcgcaacgctgccgacttccggccaggccgagggcgacacttacattttcaccagggccggggcgaaccagaaccgcttggcccgctggtgggcgactggtgcgtcaacgccaatctgggagtacatgccgccacggctgggctggcgtgtccaggtcgcaaacgagacaaccccggcaggccaggtcaagacctacgagtattccggcagcgcctggactgagctggtgggcggaatggccgacgcgccgagcgacgggaagcgctatgcccgactaaacaacgcgtgggcaggcttggggactgctgccgtcgccgatattcttgggccggtctctcaggctggcggtgtgccaactggtgcgatctacgagggcggcagtaacgcgaacggaagttacgtcaggctcgcagacggaacgcaaatttgctccagcagccttttaacgtttactgcgggttcaacgtcggtgggtgcgtcttggacgtttccggccagctttgtgtcgccgtcgctgatgtttggcaccgttgtagcatcgggagccggcgcagactatgaccccggcgtcgctgcgaggaacctgggagctgtttacttcaatgcgtcaacaaactctgctgcactggggtttctttgcatctcgtctgcatcgttcaccgctggcgcccaaactcgaaataaccgtgctgtcgcaattgggaggtggttctga

SEQ ID NO: 337261 - DNA, 303 bp, Pseudomonas aeruginosa; identical to SEQ ID NO: 328653

SEQ ID NO: 337262 - DNA, 633 bp, Pseudomonas aeruginosa
atgagccgcgaactgcccttgttcttgatcgatgcgggtgaactgctccagcatgtgagccgcgtcgtctatcggggcagcccgctgtactatggccgcagcggcaccaatcgctacgacgacccggcgcggacctacggcgtgctctacctgggccgcgacctgtccacggcgctgatggagtcggtgtttcacaagcaccagtggctggcggacgagaagcgctcgattgcgctgaaggaagtcgagagccggctcgtgcgggccgtgggggtcctggacgacgtgcgcttggccgatctcacggccgagggtgtcatggcgggttacttcggcctgaacctggaacagttggccagccgcgactacacgcacacgcagcaggtgtccgcccaggtgcatgcgatgctcggcgatgatggccagccgctgttcgacggggtgctctatccgtcgcgcaacaactatcccgccaagagcatcgccctgttcgagcgtgcggcagcaagagtcggcgttgtcgatgacatcgacctggtggaccatgtggactggccgcgcttcgttgccacgtatcgcgtcggcgtggagcctgatcccgggccggtggaaccggatgacgaagcgtcctga

SEQ ID NO: 337263 - DNA, 627 bp, Pseudomonas aeruginosa
atgcccaccgccattgaattcattgccgatcgtctgccgcgcgtcaccgtggaggacgtgcgccgtttcgcggataccgttgaaatccgggatgcgccggctttcgcggccgagttgcaggcgttcattcacgagcgcgtggaggcggtaaaactgccagccaacctcgaaggcgaaacggtggagcaggccctggcgcgcaaggcggccgcgctgcgcaccgaaacgcgctggaccccgactgaaaccgacgtccagcgaggccgcgccgtgttgctggaatccttcaaccagccgcacaacctgccgatccccgagtacgccaagctggcggacaagtcgcgccagcagatctacaaggacatcctcgcgcgccggctgctggcgctgaatgtggggccgcgcggccagaagctgcccgactggcagctcgacccggtgaagcagcagttgacccaaaccgtgcttcaagaggtcgagggcatcgaccactggacgatctaccgcgcactatccgaaccgctcgaaggcttgggcggacgctcgccggtggatgcggtgacgcatggcacaatcgatgacgtggccgaagcggtgttcaacgtgctgggcgtccaggtgcattga

SEQ ID NO: 337264 - DNA, 1314 bp, Pseudomonas aeruginosa
ttgaccgatctattcacgacaaagcccaagcctcccttggccgaactcctgcggcccaagacgctggatgaattcgtcgggcaacggcacttgctcggccccggcaagccgctgcgtctcgcgttcgaggcgggcaagttgcactcgttcatcctctgggggccgccaggcgtgggcaagaccaccctggggcgcctggccgccagtgcgaccgacagccgattcatcgccatctcggccgtgctggccggggtgaaggacatccggcaagccatcgacgaggcccaggctgaactggacaaccatggtcgatcgacggtgcttttcgtcgatgagatccatcgcttcaacaaggcgcagcaggatgccctgctgccccatgtcgagtcggggctcctgaccctggtgggggggacgaccgagcatccggggttggcggtcaattccgcactgctctcgcgcgcgcaggtctataccctcgaaccgctgtccagcgacgaactgaaccagctctacgaacgcgcactgccgcatctccagggcgtcaagttggacgcggacgcgctggacctgctaaagggctttgccgatggcgatggcaggcgcttcctcaatctgcttgagcaggtgacgaatgcggcgtcgggcgcgggcaagaccgtggtcgatggcgagttcgccaatctgtccacgagtccatcgctgcgcaggttcgacaagggcggtgacgagttctactggcagctctcagccttccacaagtcgctacggggctccgaccccgatgcggccctgtattggctggcccgcatcctcgacggcagcggcgacgtgagccaggtgacccgccgcatggtggtgatggccagcgaagacatcggcaatgccgacccgcaggcgctgcaactggcactcaatgccgcgctggcctacgacaggctgggctcacccgaaggcgagataccgctggcccaggcggtgacttacctcgctctggcccccaagtcgaatgccgcctatgccgcctgggatcaggccaaggcattcgtcaagcgcagcggctcccaggctgtgccgctccatcttcgcaatgcgccgacgaagctgatgaagcagatgggctatcgcgaaggctaccgctacgcgcatgatgagcccaacggctatgccgctgggcaaacctattttcccgagggcgtggcgcggccgggctggtaccagccaacggacaggggcgtcgagcgaaggctgggagaaaggctcacttggctgcgctcgctcgatgacgcgacgccgctaagcccgtacacttga

SEQ ID NO: 337265 - DNA, 1944 bp, Pseudomonas aeruginosa
atggcgctctctgatctgaccgtccggcaggcgaagaccaccggaaaacgctacaccctctccgacaacgactgcctgggcctgatggtctcagccgcaggcggcaagtcatggcaattccgctactactggctgggcaagcaaaagcgcctgtgcctgggtggctatcctgccctcagcctgcgcgaggcccggaccgagcgggacaaggcccaggccctgctcgccagggggatcgatccccaggtcgagcgcgaccagaaacggcacgcggccaagctggcgggcgaatacaccttcaagaccgtcttcgatgcttgggtagagcatcgccgcaaggaactcaaggaaggccgtcagagcacgctttcccagatcctgcgcatcttcaacaaggacgtgctgcccactctgggaaagatgtcgatctacgacattcgtcgcccccagctcctgggcgtcctggcggcgatcgagaagcgcaaggcgttcaccaccgccgagaaagtccgcacctggttcaaccagatgttccgatatgcgctggtcatcgccgagggactggaagtcaacccggccgcggacctggacgtggtggccgagcccaagcccccggtggcccacaacccctacctgcacctgcccgagatgcccgagttccttcagaggctccggctctacaacccccgtggctggcagacccagcttggcgtccggctactgttcctgaccggggtgcgcaccggcgaactgcggttggccgaacctgaacagttcgacctcgacaggggcttgtggatcatcccgccgcagatcgtcaagcagctccaggacgaaatgcgcaaggcggggaagcggccgcaggacgtgcccccctatatcgtgccgctgtccctgcaggccatcgagatcgtccgctacctcctgggcgcaatgcggccggcgcaaaaatacctgctgtcgcaccgtagcgaactcaagaagcgcatcagcgagaacactctcaacaaggccttgcagctcatgggctacgaggggcgtctgaccggccacggcattcgtggcaccatctcgacggcgctcaacgagatcggctaccccaagatttgggtggacgcgcaactttcgcactccgacccgaacaaggtgagttcggcctacaaccacgccaagtacgtggagccgcgccgccggatgatgcaggactgggccgatcgcctcgacctgctcgaacagggcgaagtgggagccgcgagcgcgcacctgaccatccgtatcgacggggtgccggcgatggcggaagtggaggacgcgatggacgcggcccccgcggtggccgagcaggctccctccgtcgccccgccagtggtggccacgcccatcgtcgtgaccccgaacagcggcgggatcacgttccagcggctgtcgcaggtgccgccaccgccgacgcatgccccggagcccgaagtctctgcaatccagcgcgagcgggaagaaatgctggccatgtacgagtcgccgaacaacctgccggtcccgctgttcggcaagctggccggaaaatccaaggaccagatcaaccgcgagctgaaggcgggcaagctgctgtccatcagcttgggcaaccggggacaacgcgttcccgactggcaacttgtaccgctcaagcacaggctggctcaggtgctcatgaatcagtatccacacgcggattcgtgggacctgtaccgcatgctgacccagccgcaccctgacctgggggaccgcgcggccattgatacggtcacgccgaccaacgtgcccgcgatcatccgggtcatcacgggcgactaccagcaccatgcggatacgcccgagactattgccccgcaccccatccccgaggatgtgcggcaaagcgtccgccggttggttgatagcgcagtggtgcttgagggtgcctga

SEQ ID NO: 337266 - DNA, 351 bp, Pseudomonas aeruginosa
atgagttacacgaagaaagactattacgccgaatgccttagtgaggcttttgattcggcaggccttgaggcaactcgcgaacagatcgctgtgattgcgcgcgatgttgaactcgcggtagagcatcaaggcatggctttctacgagccacctgcatctgatcgctacaacgagatagagcgcgagtggaagaaaaagtacgaagctctgcagaaagagttcgaccgttacacacataacgcagaaacggcggttcgacgtgcacttcgtcagcaccgtgacgcaaatgtctccatcggtgagtacggcgaagtgcaccgccatgatggcagaacaacgcagattcaatga

SEQ ID NO: 337267 - DNA, 363 bp, Pseudomonas aeruginosa
atgaacgagcaacgccttcttgagcaggcagcaaaatccgctggtttgatcaatcacaagtactgcgacgcatggaagggcatggccgcttacacgttgcaggaaggcttctatggaccgacctggaaccctctgaaggacgatggcgacgcgctacggctggctaacaaccttgggctcaccatcggtcagggctggacatcggcctacgttgatctttgcacgggcgagcttcttggattgatgccggcaggaggctgccagcatgaggttcactgggaagagttcggcggcgacaagcatgccgcatgcagaaaggcaattgtgctgtgtgccgcgcagattggggagtacatgccatga

SEQ ID NO: 337268 - DNA, 558 bp, Pseudomonas aeruginosa
atgagcattgactggaacacggcaccggagggtgcgactcattgggagccgagggggatagtattcggcgaaggctggatgaaaaaggtcgggaatgaatggtcctattggctcgaaggaagcgaagtgtgggccggagtgtgggcagattgttttgtatccgcagagcgtgaggcgacattcgaggctagaccgcaagaggcctgggacggccagggcctgccgccggttgggacggtgtgtgagtggcacgagtctgatggctgggcttatacagaaagcaaggtggtcgcctatacagatgatgggctattcgtctgtatgcagaaacaaggccgtcggcctgaagtactgcggatagataattgcgatttccgccccatccgcacccccgagcagatcgccgcagccgagcgatgggctgcgattcagcagatgctggcctttgctgacgtgaagtacggcgccggagaactgatgtccccgaaggagtacgtagagacagccgtggccgcgctctatgacgccggctaccgccgccaggagtcatccacatga

SEQ ID NO: 337269 - DNA, 852 bp, Pseudomonas aeruginosa
atgagttggctttattcgctggagctggtggaggcattctcggcggccacctcatcggatggcgcacggtctgcgctgtcgagttcgaaccgtacgccacaagcgttcttgtcgccagacaaaatgacggaattctcccgcccttcccggtctgggatgacgttcggacctttgacggaagaccttggcgaggccttgttgacgtggtttctggcggattcccgtgtcaggacatatcagctgccgggaatggagccggaatcgacggtgagcgatcaggcctttggcgagaaatggcacgaatcatcggtgaggtacgaccgcgattcgtcttcgtggagaactcaccgctgcttgttcgaagaggacttgccgtggtcctcggtgaccttaccgagttggggtatgacgctagatggtgtgttatgggagccgccgacgtcggggcgccccatcagcgtgatcgcatctggattgtggccaactctgacagcaaacattgggacaaagtgcggaggtcgtcaccgcggcaaggcagatacattatccagccgtctagccgaagtggaaggattgaaaacatcatcgacttccctggtgaacccaacgtgggcagagtggctcatggggttccccaccgggtggaccgacttaaagcccttgggaatggacaagtgcctctctgtgcagcagtggcattcacacttctcagcaatggttttggagatcatcaatgagcagcagatggtcagagtggtacttcagagaccacgcacgcaacaaggcaaagaaagcagcgcagatgcgcgattggcgctcgaagaacaaggacaaatcaaggaagcagtctag

SEQ ID NO: 337270 - DNA, 762 bp, Pseudomonas aeruginosa
atgagcaacgcagttgcacagcggcaggaaagtgctgccgtcatccaagccaacgaagcaacgacagtgcttcaggtaatccagaaagctgcatctgatcctgggtgcgacatcgacaagctagaacgcctcctggcaatgaaagagcggatggattccaaggccgccgaggtagagttcaacgacgccttgtctcgcgtacaagcccgcatgggccgtatcgaagccgacgcgaccaacagccagactcgcagcaagtacgccacctacggaaagctggataaggccctgcgccccatctacacgtccgagggcttctcgctttcgtttggtaccgagaacgcaccggaaggcatggtcggcatggtctgcttcgtcagccaccgcttcggccacacgcgccagtaccgcgcgcacgttccctcggatggcaagggcgccaagggcggcgacgtgatgaccaagactcacgccttcggctcaggaacctcttacggaatgcgctacctgctgaagatgatcttcaacgtagcaatcggcgaagaagatgacgacggcaatgcagctggctccgatgacttccgcaatgccgtgctggatgacctgatcgccaaagcaaaggcatcgcagaacagtgcagaccttcaagccgtttggcaatccggactgaagatattgcaggcagccaaggacgtggccggcgccgatgagctgcgcgcttctgtaactgcccgcaaggctgaactggagggcgtgaaatga

SEQ ID NO: 337271 - DNA, 207 bp, Pseudomonas aeruginosa
atgccattcgacgaaagccccgcagtccgccgcataaaagccctctgctctcccgcgccagcacgctatctgcacattcccaccggcattcactgggtagtcatcgacagcctgggcaatgtcctgcaactcgaaaacatcgagcgccggcgccgactgataaccgtttctgacctcgaaaccgaggcctggagaaagctcccatga

SEQ ID NO: 337272 - DNA, 1302 bp, Pseudomonas aeruginosa
atgaacaaagcgaatgaatgcacctgcccttctggcgacggctccctcgtccatccgtgcccggcacatcctgcggtagagcaggtaggcggggatgagcgcgcggcgtttgaggctgcttttgctgcaatgggtaggccggtatgtcgtgctgattacgaccaggacgcctacggaaccccattcgatgatggcggatggactggctggcaagcccgcgccgccctggcgcaaccctccccagtgcgctcgagtctcttgatcaacggataccagttgcgcgccgccctggacttcattgcgccggatggcactgccgagcaactggaaagcgaggcctgcatcgagtggcgccagcaggatgccgatttcctcgaagcaggcctatacgccttctgcgctgagtatcccgaagaaggcggcgtcttgttggatgaggagccaaccactgcgcaaccatccccgttgcagtccgagcaggcagaggcggagcggtcggcattgtgggctgtacatgcccaggggccggacgaactgtacgcagcattcagccgcgaagacgcggagaaacatgccgccgagctgaacgccctgccaatgcctgaagggatcgcggttggcgccgtggtcgttccctccccctggccggctgtccagcactggcagtatctggccgaacaggagcaagaccacaagaacgagatcgccgggcgcctgcgccagcacgagcgcatcggcgaggcgctgcgggcggagatcgcagaatggcaagaagctgccgggagatctcgttccgatgtcgtggcgtacatcgcggagcgcgcaaagctgctggaagagcgagatagccagcaacgcctcgccatcaaggctatggaggaagtcgcagcactgcggtcggaacttcaaactcagcgagagcgcaacaccgagctgatcttcaagctcggtagcgcaacgaacggctgggggcgctgcgaaaaagagcgagacgccgctctggccagggtcgctgaatacgaagcccagggtcagcacagcgtgccgggaaatgctgccgctctggtacgggccgaagcgaagaaatactcgctcaacgctgccggcatgcttgactccggcgccccggaacacgcccagacctttgccatcgttcagttgctgtctgagttcgatgacgaagaagcggaaagccactgggaagcgatcatggcctattccgattttcgcaccagtgacgctctgttccgtgcagccgagctgctcgccgccgcgcccggcaaggaggtaggtcatgagtga

SEQ ID NO: 337273 - DNA, 639 bp, Pseudomonas aeruginosa
atgagtgaggtgaagcggttcgaccatgtgaaccacgctcacattgatgactgtgaacatgttgagtccagcgaaggggcgtgggtgacggcctccgactacgacgccctagctgccaagctaaccatggctgaggacgcagcagcaaagggagatgctgcgcgccagcaatgcggcggaatggaaatggagatcgaggaacttcgcgctgaactagcggaactgcgcgcaagggtggtggtgatcccggagcacaaagacgatcttcctccgatatacgaggatgagaaccttcccgcattccaccattacaaaggctggaacgcctgcctcgacgaactggcgcgcatcaacggtatgacggtcagcgaggggcttgtgcaggggatggccaagttcgcgcgcgagatcatctgcggagccctcgatggcggaagcttcgatggggcagacatacaggaaagcgctgaacgccatggactgatcgccaagcaggtgatgaacgagccgtgccgaggcccggaagagtactgcgcctgcgcctggtctacctcgttcccggctgaatgctatcgggtaacgccagagcttcgcgccctactcaacgaggacaaggagaatggcgaccatgctgcatga

SEQ ID NO: 337274 - DNA, 408 bp, Pseudomonas aeruginosa
atgaccgatatcaacagggtgacggcgacgcgcaatctcgacgcctactactacggcttcgatccaactggatgcgacttggtggattccgtgctggagcaagtcgcgcgtgcaggtaaggcattccatagcaccgatgattggaacgaagaggatctcgacgggttgagtcctgtcgataagatgcaggcggcggcgaatgcctcagcgaaaacaatcatggcgctgattgccgaggtggaacatctgcgcaaggacgcagcacgctaccggtggctgcgagagcgagacctcgaaacgatcagacaaggcggcgtattcgccgggatgaccccggagaacatcgtactcaaccaggaagacctggacgctgaaatcgacgcagccctagaaggagcaacgcaatga

SEQ ID NO: 337275 - DNA, 327 bp, Pseudomonas aeruginosa
atgaacgaccgcacactactcgaactggcggcgcgggcggcggggtatcagttttcatactcgtaccggtccctctccagcccggcggtaccggtaatcctggctgagactggacggtggagaaagtgggacccgcgacacgatgacggcgacgcgctgaggctggcggtagacgccggaatcctagacggtaacgccttttccgtctggctgaactaccgaaatggcgcaatggccatcgaagggcttggcgctcgcgaagcaactcgtctcgccttcgtccgagtcgccgccgagatcggcaagtctatgggaggtggggagtga

SEQ ID NO: 337276 - DNA, 363 bp, Pseudomonas aeruginosa
gtgagcgaaaccgtagaagtgaagacctgcgagcttgagggggcagctcttgattgggccgttgcggtgatcgaaggatatgacctgatgaagcatcccttccgccgagcattcatcccaaacttcggctactgcgactactcgccttcgaccaactggacctttggcggcccgctgatcgagaaatacaaacttgatattggcgcgccaatggaaaacatacccggtccgtggaatgcgaatactgagtggggccatcctataggcactccagggcctacagcactcatcgcagcctgccgcgccatcgttcgagccaagctaggcgaaaccatcaacgtccccgccgaactcatcaagtaa

SEQ ID NO: 337277 - DNA, 1233 bp, Pseudomonas aeruginosa
atgtccctgggtagcgattacttgcgttctctgctcgaggaagaccccgagcgcggcgtctaccgctgcaagcgggagatgttcaccgacccacgcctgttcgaactggagatgaagcacatcttcgagggcaattgggtctatctcgcccacgaaagccaggttgccggaatcaacgactacctgaccacccagatcggccgccagtcgatcgtcatcgcgcgcaaccgcgacggccagctcaacgccttcatcaacgcctgcagccaccgtggcgcgatgctctgccggcacaagagcggcaatcgcagcagctatacctgtccgttccacggctggaccttcaacaactccggcaagctgctcaaggtcaaggacccggccgaggccggctacccgcagggcttcaactgcgagggctcgcacgacctgacccgggtggcgcgcttcgagtcctactatgtctacgaaggcaactggaagcttaccgccgagaacggcgccgacggctaccacgtcagttcggtgcactggaactacgcggcgacccagagccagcgccagcagcgcgacgccgcggaccagctgcggaccatgagcgccgccggctgggcccggcagggcggcggcttctactcgttcgagcatggccacatgctgctctggagtcgctgggccaaccccgaggaccggccggccttcgagcgccgcgccgagcttgcccgcgacttcggcgaggcacgcgccgactggatgatcgagaactcgcgcaacctctgcctgtaccccaacgtctacctgatggaccagttcagctcgcagatccgcatcgcccggccgctgtcggtggaccgcacggaaatcaccatctactgcatcgcgccgaaaggcgagagcgccgaggcgcgcgcccggcgcatccgccagtacgaggacttcttcaacgtcagcggcatggccaccccggacgacctggaggagttccgttcctgccagcagggctaccagggcagcgtggtcggctggaacgacctgtcgcgcggcgccgaacactggatagagggcgccgacgcggcggccgcggccatcgacctgcggccgcgcctgagcggcgtgcgcaccgaggacgaagggctgttcgtattgcagcatcgctactggcaggaggcgctgctcgccgccctggagcgcgaacggacgcagcgcgtggcgctgcgggaggtggcgtcatga

SEQ ID NO: 337278 - DNA, 381 bp, Pseudomonas aeruginosa
atggcaaggcgctacgaactcacggacgaggcctgggatgtggtctccgatctcttcatcgaaacccatggccggggccggccgcgactgagcgaccggctgatgctcgatggcgtgctatgggtactctgctcgggtgctacatggcgagatatacctgagcgcttcggcccatggtcaacggtgtatcaacggtttcggggctggcgaaaccaagggatcttcgagcagatgctcaaacgtctgcacctgagattgaatgagcagggcttgatcgatctgcaaacctggatgatcgactcaactgcagtacgcgcaacccgagcctcatctggcgccgggaaaaaaagggggctgacgagcctgccgatcatgctctag

SEQ ID NO: 337279 - DNA, 1911 bp, Pseudomonas aeruginosa
atgatcattgaaacggccgcgccagacttcgatgagagcgccgacgtacagatacgggcctgtctgaatcccgccgcgccgcaaagcttttttctctacgccggggcaggatccggtaagacgcgctctctgaaaagggcgctcgacacctttcgcgaagatcatggcgcgacctttaggcggactggtaagaagatcgcggtcattacatatacgaacgtcgcggccgacgaaatcgccgaacgtgtcggagaggatccgctgtttcctatatcgacgatccacagcttctgctggcgccatatcgaggcctaccatcgtgatatccaggcgtggctcctcaacagacttccggttgagcttgccgacctacgcgagaagcaagcgaaggggcgctctggcaccaaggccgcgcaagaccgcgagagggccatcgcttccacgatgcaacggattgagtggctcagtgttcctcggcggtttacctacagccccaacggcgataattttggtcaggactcgctatcccacgcagaggtgctgaaaatcaccgctgcgttcattgaaaccaaaccatcgatgcaagcgatcttggttaacagatttcccttcttgcttatcgacgagagtcaggatacgaatagagggctgatagaagccttctttgccctagctgccgcacacaagggcaagttcgcgattggcctattcggcgataccatgcaacgcattttcttggatggtcatcccgagctggagcgtctggttcccgcagactgggcgcgtccggctaagcgccttaaccatcgttccccccaacgcgtgattgccctcggcaatgtgctaagagagcctgttgatggccaataccaggtagcccgcgaagacagcgaaatcggtattgtccgtctctttgtgtctcccagcgatgtccttgataagcctgcacttgagcggcgcgcgcgcgatcgaatggccgacttgtgtaacgatctccagtggcgtgaggaggctgcggtcaaagcgctgacgctcgaacatcacatggcggcatcacgccgtggcttcttggagatgttccaggcgctcaaccaggattcacgcctatcgacaggtctgcgcacaggggacttagccgggctcagattattcaccgatagagtcgccccgctgattgccgccgcgcgtatgaaggatgacttcgcagtgatggcgcagctgcgcgcgacctcgccgcttctccagcgtgcagctatcgctcggctcgcgcacacggatgatccgttattaccgattcgcgccgctgtagaagcactgcttaccctggatactgacggccaggaaaccactttcctcgccgtgttggaatgcgtcgcaaaacatcgtttattcgagattcctgatgcgctacgcccatttgttgcgaatggagctgaagaaaacgatgtcgagctggccggcgatgagagcgcaccgggcgaagaggacgcgccggaagagaggtctcctgcgagcttggaggcctggcgagcattcctggaaacaccgtacaggcagtcgatcccattcgcggaatacgtcagtgataaagggcccctcggtacacatcagggtgtgaaaggcctggagtttgaacgtgtcctggtgatcctcgacgatagcgatgcacgcggctttctgttttcttacgacaaattattcgaagcgacaccagcgacaggagctagtcgtaaaactcctgctgacacggctgaagagggcaccgtgcgcacgcgtcgcctgttatatgtgacctgcactcgtgcccagaaaagcttggcgctggtggcctacacgaaggatcccgaagcgctcattgcggcggcgctgcgcaacaactggttcagggcggaagaaatcgagcgactatga

SEQ ID NO: 337280 - DNA, 2292 bp, Pseudomonas aeruginosa
atgcgaatcaagtttgtggagatttccaatttccgaaagctgaagtctacccatctcgatttagataaaaacacgacgattctggtcggtgccaacaacagcggaaagacctctgcaatgctggcgctgcgcatcttcctactatcacctacgcgcttgaatcttcgcgacgtcacaattgcaaattggaccaagattgatctactggggagcgagtgggaagccggtgcggagcccaccgtcgatctggattcgctgcttccctcgctggatgtctggcttgacgttccgctccgcgagatccagcacgtcgtcgatatcctaccaacgttagattggtccggcgggctgctgggggttcgactagcgtttcgaataaaaaatctcgacaaactcaagagcgaatatatcgcgcaacgaactgcggcgcgggacgcggctatcgttgggccgaacggtgagtcgatcaagattgcagtctggccacgcaaccttacagactttctggagcgtcggctgcgagcacatcttgaactcctagcctatccccttgacccggctgctgttgttccgccgggaagaagcggcctcgcgacgccgcaaaggctccccgccagcgcacttgcgttcgagcatccaccattcaaaaaactcatcaagattgacgaaatcgccgcgcagcgcgacttcgccgacgctagcagcagtgacggcggtgaagacaagggggaggcgaacaatcgtcggttcaaacgtcgcctctcagaccagttacgctcctattatgatcgccatctcgacccgacgaagacgccatcggacaaggactatgaagcgctcggagcaattcaagcggctgagcgcagttttgacgcgcgacttgaggaaggcttttccgctgcctttcaagagctagaggatctgggttatccaggcatgagtaatcccaagctcaagatctcgacccttcttcggggaacggatgggctcaagcatggatcgtccgtgcagtaccaggttgcagacccttcaggggacggcagcaacaccctccaactaccagaggactattcggggctcgggtatcagaacctgattgccatggtgttcatgttgatgggcttccgcgacgagtggatgcgcgtagagaaagccggcattctcgagggggccgacgtgtcacacgagatacagccactgcacctcgtgctagtagaggaacccgaagcccatcttcatgcacaggtccagcaggtcttcattaacaaggcctatacactactccgaaagcacgccgatctgggtgtcgcggaaaactattgcactcaactgatcgtcagtacgcactcgagtcacgtcgcgcacgaagctgacttcgccaatttacgctattttcggcgccggccggcggccagcatgggggagacgccgaccactacggtggccaatctgtcctacatcttcggtgatggggacgagacaaagcgcttcgtgaaacgctacctcaaggcgacccactgcgatctcttcttcgcagacggcgtcatcttcgtcgagggacaggcggagcgcatcctggtgcctcacttcatccgccatcattttccagagctgtcgcggcgctacgttacgttgctcgaactcggcggaagtcacgtgcacagcttccgcaatttagtcgacgcgctcggcatcgcgacgctgatcattggcgatctggatgccacaacggcggttaagattatcgataaaaatatgcgagaaacaactcgttggaagtcggctcgccccgagcagggcaaagctcagcaaaccgcaaactcagttctcaaagattggcaccccgggaaaaagcttattgatgaactcgtcgcgctaccgcccgatggacacatttcaacggctggcggcgactatgagctgtatgtcgcctatcaaaagccagtcaacgtgaagggtgcttccgaagacagcgacctcatcattccgcgaacctttgaggacgccttgatcctggagaatttggcagtcgctggaaagatcgaaggttcgatcacctcggccaaggttcgcggcattgtcgctcaggatctgtccggagatgagcttgaggatgagctgtttgagctgttgaagacggccgagaaagcggcgttcgcgctcgactgtctcatgttggaggaccccaaggcgctcaagcctccaggctatattgcggccggtctcaagtggtttgaaggggcggtaggtaaggacatcgcccagagcgaaatccagggagcagaggattag

SEQ ID NO: 337281 - DNA, 285 bp, Pseudomonas aeruginosa
atgaaattgatcaagcgcagcaacgtcacctttctgcacccatcgatggaggctcgcgagcaccagtacctgaagcacttggcctcggccatgagccactatctggaacaccctcgtggaaccgagttggtctgcatcctcggctccggcttcgagaaggacaaccgtcaggcgctcgacacctgggttgcctaccaccgcgacgaggtcttcgaaaagcgcttggagggccgcagtccgctggatttcctgatcgaaaaactggaagacctgatcaacaactga

SEQ ID NO: 337282 - DNA, 2958 bp, Pseudomonas aeruginosa
atgcgcgaggtgtcgatcgagcacgtgcgtgaactggaggcgcagcttggtacgaatcacgcgctacggaacatgctgcgcaccatcacccaacgactcagaaggcagattccagggttcccattggcccgtatcgccattgccgtcgaacgcccagcgaacccgatcaaccccgacatctacacggccgaacgactacgcagaagtcgccaactgctcaatgtattgcagcagggattgaggctggatctcgattcgttccgcccagaggagcgcatcggcctgctattgatgagtgcggcctatggtggcggcctgatggacattgctcaactgaatgccctagtcgaggtggcctctgagcgaatcgagtggatcgcaggcgttccggaactaagactgcccctctccattcgcggcaaggcgcaggcggaataccggcaatggttcccggacccagccacgctggctctgttgatccgttgttcgaacgatatgcgagcaatgggcactcgattgaggcgcagagaaactgttctcaggtgtattcgagcgtttctcggaagggggggcgtaccaagtcgggatctgccgaccagcctgacggagctgctggatttgctgtggatgcagatgcaattgcgcctgcctcagattctggtgaatttcgcatgtcgacatgggttcgtatcgcagtcgctgagaccatcgtcctggggggaaatgttcggctatccaggcttggaagatccggttggcacctatggagatagtgtcagatcggacgagtacggagaggaaaaaaacgatactcccaattgggtgctggatttgtgtcggcagatccgggcaagtgaacctgtcgagctatcgccagagactgagggtcctgaagcacttgaagtgctcatcagagagtgggttgcctacctggtaggtggatcgtccgtatacggtcatgatattgggcgcagtagcatcgcccggtacacccgactgctcggggaagcgttggcgtcgcaattgggtggccagagtgttttcctgatggagcccgatgcactggagagtgtctacgagacggtcctcgatgcccagataaccgatggcaagcgccgcaccttggccaaggctattcatgagttccacgcatttctggggcgtcgctttcactatccaccgatcagcccttactcggtcctgggcattggccgggatgtggctagcgttgatgctcggatcctctccgaggaccaatatcaggccgttttgcgcgccttggacacctgcgggctggaattacggaccccgcgtctggtcacggctgccaagctgttcttgatcttgggattccggttgggcctgcggcgcaatgaggccttgaagctgcggctcagtgatctacatctgcccgaattatcaagtgaagccagcgaacgtattcgcaggcgtcacccggagatgcagattctctccaaccaggagctggcagggttggatctgccggttgacctgcttgtacggccacatgcacagcgcggtctgaaaacccagaactcggttcggcggttaccgctccgcctgttgttggcgcccgatgaactcgaactgttgatgggctggtaccagcaacggcaagcagaagaaagccgggcgccttcatcggagtttctattctgcatcccggagctgagaactcagtgggtcagcgaaagcaccttattaccagcacttcatgcctgcatgcgcgcagtcacaggttccgaggttattcactaccatcacctgcggcattcctgcgccacctggcagatgctcaaactgatgggaaccattaccgactcatcggcggagttgatattccgtgatctgcccctgaccactcgatggctcagcgacaatgccaggcagcgtgaagcgctaatatctgctcacggtggccccacgcggcgtatcgtccatatcgtcagtgctctgctcggtcacggtagccccaaaacctcactgctgcactacatccacagcctgcctctggtaatggcccaggcctggcagtggaaccccagggcctggcttttcagcgcgcataacgtcgcgtcgattgccaaggtcagcctgcctacgatggattccggttccgtcggtggtccagaacatctgttgcggatcattggccggatcaagtcgctcaagaaaaaaagacggcctcgacgggctgcggtttgtttcgccgttcagcaggtcgaaaataactgggcgatcgagcgtattcgtcggatcgagtcgatgctggcatacgcatcgtatgccgagagtagtggtcggcagatcaatctggagtggctggagttcgcgacagaagagcggagcatgatgctggatcgagctcagtatatccgcggcctgacgcagagatctcaaccggaggctgggggcaagcacaggctgcgagcctctctgcaggctgagacgccatcgctcataccaatgcctcctcgacatggtggaagagatgccgtagcagggtatgcagaacgtctctacgagttgctggagggagcggagagcgagcgtgccaatcgagcgatagacgatttcgccgaacgctgttgggcaacggaaacgacgctgcgtttttaccgtgattgcgacgaggagcatgcacgggactacctgtggctgctcacagccatcggcgctcccgcccaatccatcgagttgattatctacgacacacgaaagcccagagccgctaagtcatattggcgtcaacagctcgggaatattcgtcggccgattagccagcatgcgcccgaaaatccggatgccgaaaatacccatcttggaattcgggccacgctggcgctggaggaggggcggcagcagaaccgacattcgggggcagcgctgcgctacctattcctgatggcctccatcgactggcatttccggacatga

SEQ ID NO: 337283 - DNA, 1689 bp, Pseudomonas aeruginosa
gtgctgggcgatccggaggaccctgaccagttgccagggcattacaacatcctcgcagaatcagcggactcccatgaaggagagttggcgccagacgaactgagcccgccggttgagatatggattctggatgatgacggcagcgagcggccatacgttgcggacaagctcagccagcaagccgtagaggcgcatatcgtgcgcagtcggcaattgttgccgttctcgtacacccagttcaccttggtggaactgcgggatttgctgttcggtgccagtgacctgttcgcgtcatgccagcaagagttgtcccaagcccaggatccctcggggttacaactccgaatggaggccatcctgctattgcatatcagcctatggctggggcagccgacaacccaggttgtgcagttgacggtagtggagtgcgaggaggattgcacagatggcttggctctggtcaaaggatcacccgagcggttcagtgtgattgtccgtcgccccgacctagttggcgacgatcgttggttgcctgcaacgggtatccgtccgttgctgttgcgtattctgctgcccgatcttgccggaagctccgcactgatcggtgcgctgttcaggcatttcccgcgttcatccaaccaggttttcaggaggcaggctgcggaactggaaaccgaggctagggtagttctggagctattgggccggggcgatcctcgcttcaccctgaccaaggtccgcaattacctgttccaccagctcgtatcggacacccacgacgtggctgctgcgtccatgctgtccggggtctgcgtgccatctgctcaaactccacgctactacctgcaattcgacgccaatcatttgcgtcgtatctatgcggaatcactggggcgtgtactacggcaggtctatgcctgtgccgggttggtgtacgaaccggtagaggttgggattgttcagcgcggagcggtgggggcgagccactgcctgctgcctgaaactgtcgtgatgaatgtgaaagccctggccggtgtcctgcgcaggaagccagcgggtcgcctcagcgacatgctgacctggcacaaccactacaccctgtgggttgtacagatgttcatgctgtcgactggctgccgggcgatccgcaaccctttgcgatataccgatgagttcgacctgatactgggcatgggcgccatgtctgacaaggactctgatgatcggcacatgagccggctgatctgcatgccgtccatgctgcggcgccagttagatcaatacttccagcactgtctggctcttacacgatacctgatcggctatctgccacatgacgaagagggtaggtggtctcgcggctttttcctgtcctctagtgaaagcggtattcgccgcctggagatccggcctgccaccattcaccaacatatggagcaggtatctggctatatcccgcaccgcatcaatgcctatcgcaaattcatccgaacggagctggcggaacgtggctgccccgctgaggttttagctgcgtatatggggcactggctgcgaggggaggagccgcaggacgcatattcatcgttctgtccgttgacttacacagaggtagtcggtgagtggattactcgactgctgaaagatctgggctggtgcgcatttggtagtccatgggtggtggagtga

SEQ ID NO: 337284 - DNA, 276 bp, Pseudomonas aeruginosa
atgaatacattcaattcggtggaaggggcgatatggcgtccctacgcactctggctgacgattgagttgtccctgtggtccatggtggggttgctagaactgccagagccagcgatatgctggggacttttatctatcgtacccactctggctctcgtccgggtgttgaggcggcttggtgaaccgcggagggccgagctgatgctgctggtgctgatggggtacttgggaggagctatcggcgcagcctggattgccacagtcgtggcccagtga

SEQ ID NO: 337285 - DNA, 396 bp, Pseudomonas aeruginosa
atgcccatcaaacccgatattgaaattcctccgacggatttccaggccctgatagagcgtatatctactgagagccgtgcgagcttttctccagagctttacatggaagtgtttgccatggatgaacaaacattttcccgcctcgcccatgtgtcccctgacgccgtcagaacggctcccgagtccgagaggatccaggactacatccggagcaccctccgcgtgctcagcgctgtcgcggacacaggaactgacattggcaaagccatctactggctcaggagcgtgcacttgtcgacgttcaacgataaaacagccgaagagatggtcagtgagggccggacagcacaactgatcgactacctacgctcatgggaggcaggagcccaaggatga

SEQ ID NO: 337286 - DNA, 123 bp, Pseudomonas aeruginosa
atgacctgcacgctgttctgcaccaacctccagaagcagcagatcgagcatgatgacggtaaaattttgtctatccatatccatatttttcaaataatgtttgcccggttcaaaaaactttag

SEQ ID NO: 337287 - DNA, 1530 bp, Pseudomonas aeruginosa
atggagagcccacttgtcggctatgcctttctcgtcgaaaccctgaagctgaaagtcttcccgattcagcgtcctgcagtgatcagacctgtcacgcggattgagccgttgggccgcgaactcgccgtacctcagcgtctcgccccaccaccaggcgactgttgtgctcatgtcctgttcgccctgaaacatgagggggtcaacctaggcgtgctggcccaggcattgcctcagatccctgccgccaccatgctggcagagcttcgcaaggctccgagcggcgcctatatccgcaaggcctgcttcctctgggaggccttcagcggaacccggctgccccatgatgtgagtccaaaaggcgcagcaaccctgctgttcgacccggaccgctacatcactggccctgcgcggcgcgatacccgctggcgggtggatttcaacggcctgggcacactccattactgcgctacggtcgagcggacacccgagatcgaggcgctgctggcactggacattctcggcaagtcacgtgagttcatcggctcgctgcccacgggaatgatggacagggccctgagctgggcctacctacacgaaacccacgactccttcgccatcgaacgtgaagcccccagcgcggacaaggccgagcgcttcgtccagttactgcggcaggcccatgagcgccagccgctgaccgaggattacctggtcgcgctgcagaacagcacgatcagcaatcccttcgatcgggctgtcgccttccgccacgaacagaatcacctgaacaacggcctgcgcggcgctgcgggcgtgacctatgttcctccacctcccgagctatgccgagacctgatggaagaactgatgcagttcgccaacgaagcgcccatgcagatcgatccgctggtcgccgccggtatcatctcgttcggtttcgtcttcctgcacccgttcatggatggcaacggccgcctgtcccggttcctgattcatcaggcgctatgccgaagcggtgccatgagccatggcctgctgctgcccgtctctgtagcgatgaagcgcgaggaacagcgctatctcgaagcactgcaaagcttctcgcgccctgctcgcgagttctggcgggtattgtggctcgatgcgaacaacctgagcttcgaattcactgggaatgaggggatctatcgctactgggatgctacggcgtgcgcggctttcaccctggagatggccaggcaggcgctggaagtcgaactgcatgaagaaaccgagtttctccaagcctacgaccagatattcaaggccgtcgacgtacgctacgacgtccgcggcagtgacctggcgcaactggtgatgatgtgcctgagtaacaacggcatcgtctcgcgcaatcgccgcaaacagttccagtacagcgtcccggaagaagtattcgactttatcgaggagcgtgcacggcaagttctggctgaacaggcaacgaagaaggcagatcctaatgagtccaccttcttaagcaagagctaa

SEQ ID NO: 337288 - DNA, 1812 bp, Pseudomonas aeruginosa
atgatgtggcttgatcgactcacagggaagcaatgccgtcacctgcctgcggtagtcgagccggggcgctatcagcttgctaccagcagcctggttttcaatggtcactcgacgaatttttcgggtgtcttggtgagtgatggcggggatcgctgtcagttgggtagtgaggtgcgctcttttgttctaccgcagcatgcacaggctacggcagcagaactgctgtcaaaagcaatagcaaccatcgatgccgacatgcagccgtccccgttgatgtcgccgttgatgccggctgcgatcattgacgctcaaagccatctcctgccctttgaagagcgcttgcttgatgtggtgcaacatgggcatctgcatcagatatcgcaacgaccacgtttggatttgcgctatgagaacgaggtggcggatgtcgcgcgtgcacggcgcctcgataaaggtgcactggtgcacttggcatcccactcagagtgctggcagcggcaaacgctcagcggtgtgattcccaagaaagtgctcgcccgatttagcgaagatgactacggcatctacgagaatcttgtttatgcccggctgctggacaaaatcgagcgccatttgtggggccgcctgttagccctgaaggacctgcaggcaaccctgagtcaggcgctggagttttatcagtcaaaagagattgactatcgtctttctcgcgaggtttgccggctctgggggatgacatttgaccagaatgcgacgagcaaggcatcggagctcctgagcaaaacgctcgaaacgcttcagcgtctgcacaagaccatttcggggttgcagcaaagtggcttgtacatgctggtgagtcgccaggtgcaggttacgggctcgttgcacctaacgaacatcctcagccatgatcctcattatcggcacctggcgattctctggagtcttctggaaaaaacgacgcaaggcagtcgaacaactcccgaagagcggctcaggcagaatcagtatctagcacatgcctattcacgttatgccgggctggttctacgacatgccttatatccgtatctgcatgggcgcgatgagggcatatgggccggtagagtcatacggcttcagcaggatgagctggagtggcggctggtaagcgtcgcctctagagagcaatctggtgacgaaaccttgctcaccgtggtgccctggctgagcagtacgcctgggcttgaggcgttgcagcaaatccctggggatagattcattgcctggcccgctattgggcaggagcctcagcaggctgcatatcaggagaactggatcgctctttccccgtcagacatgtactgcgtagagcgatttggccagcttattgatcgagtgctttaccgtaaggtgctgcagtcttatgggaggcctctcaccaaaatgccagcaaaagtactggctttggccgacggggtttccggtttacacgttgatcatcagatgcatgtcctgagagtacgagaggtggtatccagcgagcgcgttgatgaactgaaaaaggccttgattgcggctaacgcaactcagcagggggacgctctggagctgcttaatcaggagatactcgctttggaaacgtgcccagtctgtaaggaaaaggcaggtctggttttccagagtcctgccgggttcagggcgaactgctcgaagtgcggcactgaacgctatctacgacagcaaaagggggagctcgtatttgaccaaatagttgcggggaatatggactttacctccttgggacgtagggcattttcaatgcaggtttaa

SEQ ID NO: 337289 - DNA, 1530 bp, Pseudomonas aeruginosa
atgccattcctgcgggatgcgcgcaaagcatgcgcacgagcggcgtttcgcttattggctgacaggtcgctttctcccagagccacggaaggaatcctgcacatacttgtccctcgatgggatgccaagctgggcgactcgatcgtttcgtctttcttctttcgcgaggtgcgcaagctcaatgcccgggtgaccgtgttgacggtcgcagagcttgcccagatgcacacgctggattttgcggtggatcaggtcgtgatcaccaaagccaatcccggagtccgcgaactccgccgactggcaccgcagcttgggcgagtcgatgtggtggtccatctggtcgggaggattcaacctgcggaaatcctgttcctacgactgctgcgcccagttcgggtgtattccctcgacgaccgtttacgctgcgtcaatcgcaagttcggtgcagcgacagccgggctggacgtggctgagcgctaccgacgcgtgctcatggacctaggtgcaggccgggtcgagaagaagtacatcgtcccccttcccgacgcgctgccaccctcttcccaaatcccgtacatcctgttcaacccctacgccagccggccagacaagtgcttgaccttcgatcgatcagtgagcttgctgcgtgctatcgccgatgcttaccctgcccggtctgtcggtatcctgtgcagccccgcgacactggaggacgcgcagcacatggaaatcaccgtggcgcgaagaaacgtccgcgtcgtccatggactgttatcgcccaaggacgtcactgggtacatccgttgtacgcaagccgtgatcagtgtcgatacagcaatcgtacacatggcggtcggcctggaaacaaggctggtggcaatctacccagccatggatggacaagccaacccgtggctgcctccatcctctccgttgacccgtgtgatctatagccggcaagaccctggacaatatcgtcgcacagggaaaaaggacatgaatgcattctcgctcaaggctctgctcgacaatctccacgagctgttggccactgcgccagaacctgaccactacctttcgctcaaagcgcggatagtgcctggtctaggtgttgcgaagggaactctcgctcgccaactgccgctgatcagccagggcttccccgaagtcgccgactgtcaccctggaaccataaatttggagctcgactcccctttagtggtggcgcagcctgactatcgcaccgctccgctcgcctggaccccgagcggacggacaacagaagtattcgacctagtgcgagttgagctcgagttcgaccagttaccagcgcgcgtagccgcatggttgtacgttgcccatggttcgcctcaccgttgcacaccgaccgtccatgaggtgatttctcggcagctaaacctgagcgaggtccgtgagtgccgacttcatctacgcgcaagcgccgtaacactggcatgcccagatcaagaaacggcctccatcagccgctcgctctcccccagccaataa

SEQ ID NO: 337290 - DNA, 705 bp, Pseudomonas aeruginosa
  misc_feature (598)..(607): n is a, c, g, or t
atggaaactggcgctgctgcaggtcggcttctgcctgctgctgacctggctgatctacacctggggcctgtcggtggagcgcagcacctacttcctcgccccggccgaccgcagctacctggcggactacgcgcggcaggcggaggatgcctggcgcagcgagggtgccgcgggcgccgaacgcttccgcaaggaactgtcggcgaaggaagatacctgggtggcgctggtcggaccgcacctggaaagcctcggcagcacgccgctaagcgccgaggagtcgagccacctgaccttcatgcgcaagctcgactggccgatgagccggcgcctgcaggacgaactgccgtacgtcagcatcgagttccccggacatcccgagcagggccggctggtaatccagttaccggagcgcctgctgcccggcgggctgaccccctggacccacctggtcacccacggcatagtcccgaccctgctggccgccctgctcggcctgctgctctatcgccacctggtggtgccgctgaaccgcttgcgcgatcgcgccgacgccctgcgcgccgacgaactggaaagcactcccctcgccgcaccnnnnnnnnnnagcccggccggctacaccagcgtgccctattacccgccgcgacgaactgggcgagctggcccaggccctggagcacatggccgagcgcctgcgcctga

SEQ ID NO: 337291 - DNA, 1467 bp, Pseudomonas aeruginosa
atgaacgccgtcgccccgctgatcccctgcatcgtttccggcggttccgggacccgcctgtggccggtttcccgggagagcatgccgaaacccttcatgcgcctggccgatgaccagagcctgttgcagaagaccttcctgcgtatcgccgggctgccggacgtcgcccgcctgctcacggtgaccaaccgcgacctgctgttccgtaccctggacgactaccgcgcggtcaaccgcagcggcctggcccaggacctgctgctggagccggtgggacgcaataccgcgccggccatcgccgccgccgcgctgcatgtgcaggagcacttcggcgaccaggcgcagttgctgatccttcccgccgaccacctgatccgcgacgagcaggccttcgccgcggcggtggccgaggctcgcggactcgcggcccaaggctacctggtgaccttcggcatcaccccggagcgcgccgagaccggcttcggctatatcgaacagggcgccccgctgggcaacggcttccgggtcgcgcgcttcgtcgagaaacccgaccaggccaccgcccagtcctacctggacagcggcaagtacctgtggaacgccggcatgttctgcttccaggccgccaccgtgttgcaggagctggagcgccacgcgccggaggtgctgatcgccgcccgcgccgccctggccgacggcagcagcctggagaacggccagtgccgccagcgcgagctggccgccggggccttcgccgaggcgccggacatctccgtcgactacgcgctgatggagcgctcggacaaggtcgccgtggtgccctgctccatcggctggagcgacatcggctcctggcaggcgctgcgcgaactcagcgcggcggacgagaacggcaaccaggtacgcggcgaaagcgtgctgcacgacgtcagcaactgctacatcgattcgccgaagcgcctggtcggcgccgtcggcgtgcacgacctgatcatcgtcgacacccccgacgccctgctggtggccgacgcggcgcgcagccaggacgtcaagttcgtcgcccaggaactcaagcgtcgcggccacgacgccttccgcctgcaccgcacggtcagccggccctggggcacctacaccgtgctcgaggaaggccgccgcttcaagatcaagcgcatcgtggtgcgtcccaaggcttcgctgtcgttgcagatgcaccaccatcgcagcgagcactggatcgtggtcagcggcatggcgctggtggagaacggcgagcgcgagtttctcctcaacaccaacgaatccaccttcatccccgccgggcatagccaccgcctgagcaatccggggatcatcgacctggtgatgatcgaggtacagagcggcgagtacctcggcgaggacgacatcgtccgcttcaacgacatctacggtcgcgcccccgccagcgacgagaagaaagcctga

SEQ ID NO: 337292 - DNA, 1110 bp, Pseudomonas aeruginosa
atggccgagactcaaggcggcgatgtgctggtcagcttccgtggcgtgcagaaaagctacgacggcgagaccctcatcgtgaaggatctcaacctggacattcgcaagggcgaattcctcaccctgctcggcccctccgggtccggcaagaccaccagcctgatgatgctggccggtttcgaaacccccaccgccggcgaaatcctcctggccggtcgctcgatcaacaatgtccctccgcacaagcgcgacatcggcatggtgttccagaactatgcgctgttcccgcacatgaccgtggccgagaacctggcctttcccctcagcgtccgtggcatgagcaagaccgacgtgaaggaaagggtcaagcgcgcgttgtcgatggtccagctcgacgccttcgccgggcgttatccggcgcagctttccggtggccagcagcagcgcgtggcgctggcccgcgcgctggtcttcgagccgcaactggtgctgatggacgagcccctgggagcgctggacaagcaacttcgcgagcacatgcagatggaaatcaagcatctgcaccagcgcctcggtgtcaccgtggtctacgtcacccacgaccagggcgaggcgctgaccatgtccgaccgggtggcggtgttccaccagggcgaaatccagcagatcgagccgccgcgcaatctctacgagcagccgcgcaacaccttcgtggccaacttcatcggtgagaacaaccgtctatccgggcagcttctcagttgcgacggcgagcgctgcgtggtcggactgccgcgcggcgagaaggtcgaggcgctggcggtcaacgtcggccagccgggcgagccggtgaccttgtcgatccgccccgagcgggtgcgcctgaacggtgccagcgagtcttgcgtcaaccgtttctccggccgcgtggccgagttcgtctacctgggcgaccacgtgcgtgtgcgcctggaggtctgcggccgcgacgacttcttcgtcaagcagccgatcgccgagctggacccgacgctgagcgtcggtgatgtggttccgctgggctggcaggtcgagcatgtgagggcgctcgaccctctgccggcggcgtga

SEQ ID NO: 337293 - DNA, 174 bp, Pseudomonas aeruginosa
atgccattcacggaaacagtgcataagttcaccaggaaggagatttctgcagatgaggccgtggcccacttgaaagagcaggggctgttcaatctcgccctgatgaccctgcttgaagagtacctggaagccaagctgggtcgggacagctactatcccgacgacgcgtactga

SEQ ID NO: 337294 - DNA, 423 bp, Pseudomonas aeruginosa
atgtttgactatcccgtaacggttcacgaggaagccggcagcgtgtgggtcagctgcgacgatgtacctgaaatggcgagcgccggagataccgttgatgaagcgctgctggacgctgtggaaggcctagagtcggccctgtcgctctatgtggaccggcggcagtcgatcccgctgccgtcgaaaggcaaagcgggtcagtcgatcgttcgattgcccgcgctcacttcggccaagattgcgctgtggaacaccatgctggctcagaacgtagggaaggcggaactggctcgccggctgggagtgaatcgcgttcaggtagaccgcctggtggatctgctccacgggtcgaagatcgaagcggtggaacatgctctggcgatcttgggccaacggttggctgtgactgtcattgcggcataa

SEQ ID NO: 337295 - DNA, 183 bp, Pseudomonas aeruginosa
atgaagtacagcgagtttcggcgctggttgaaggctcggggagtcattttcgagcctgccaagggaagccacttcaaggtttactacggcgacaaccagacgattttccccgaccatggagccaaggaaataggcgatgggttgaggaagaagataatcaaagacctgggcctcaaggattga

SEQ ID NO: 337296 - DNA, 315 bp, Pseudomonas aeruginosa
atggtgcgtggcgtgtacatccagcgcagcggctccgagcgcatgacgctggagaaagctttagagcgctacctatccgaggtgacgcccagcaagaagcccactacgcgcaaagccgaagccaccaaggctaagcagttgatccagcgcctgggcaagtactccatggccgccctctccgctgaagtcatcgccaaatatcgcgacacaaggctcggccccctgagcaagagcggccttcccgccagcaacaataccgtgcggcttgagctagcccttctccgccaccttttcacggtagctattcaggaatga

SEQ ID NO: 337297 - DNA, 408 bp, Pseudomonas aeruginosa; identical to SEQ ID NO: 331619

SEQ ID NO: 337298 - DNA, 603 bp, Pseudomonas aeruginosa
atgaccctattcaaattttattctaatctgagaaaggaaattcttagggaaatttctggagtggagaattccaatggctatctatcatgggacaacactaccccgaattacataataaaatctcgactaaagtcgatacttgatcgatacatagatgcagcaagagaatttggcgtctacgttattacgaggtacagcgactgttccaagccaactcacgacggctatccaactgaaaatagatacggccttaacatccaatatcaagatgatcaatacgtatggaactcataccaactatttcaaggaaagcgcgttagtacctgcccttgccaccccgccaacaaactaaaagaaaactgggtgatagacgatataatatacaaaaaatcagcaaacgcagaagactgcataataatttcattaatacttactgacatttccgaagcaatagacaactcagccgataaaaaagcgagatcaggaataagagagcatctgctcagagctatactcagactcaacgacgcaattttgcccatgtcgatagataaatatattatagaagtgaatcataaaacgcatattaactcactcaactga

SEQ ID NO: 337299 - DNA, 681 bp, Pseudomonas aeruginosa
atgaaacagctatcaagtaaagatcgaaattttatatcgagagagatgaagatatctcttgaatctattgagtcaaagttgaacgaggattttttgtcaccgtacaggagtcgctttgaggatgccatcgcctttttcacaaattccataagaaagcaaagcgaacagggctacaaatttgactgctccccattcaaagatagcccggcaaaaaacgaaataaacgatcattactctaaactatgcaaagaaatcaatgacacctctgccgaagtagtcttggactcaatacggcatgcgttctgctcgtatgcatacaatgggattcatgaactattcacccatcaggaaaaggaatcttggtatccaaaggtaattctcgactgcgtaattaccccaaaccacattgacttattgccaaagaaagtgactctttacagaggcacagacatttcggagtttaaaaaatcaatattcggccaatcatggacgacaaaagaatccgttgctcacaaattcgcctacgtccattataaaaaccagcattggttcaagaaagtagatcgcattattctaaaaacagaatatcctaggcagtttgtgtattatgcaagtcaggaacctgagttcgaagttgctatagacacaagcaagattagtaatgtcaaaagaatcaaataa

SEQ ID NO: 337300 - DNA, 330 bp, Pseudomonas aeruginosa
atgctggggcccgatcccgccggacacctccccttcaacgctgattacgacatcaccggagtggtaagtcggcagactctcttgggtcgcccaacgaactgcaaggccgctgccaactccaacaaaagtgttgatgcgtttaccggctacacccgcaagcataccgaccatgccagcaacggtgacacgctgctggttcagagagtcagcctgagctcgggtcaggggcagcgagacaaaaaccctcagtatgcaaggtcggtcctttgcctgcatccggtcgaaaacctcaaccgcaagatcagcagtcgcgtgactggctttcactga

SEQ ID NO: 337301 - DNA, 162 bp, Pseudomonas aeruginosa
atgtcccttggcaccttccttttcaatgatggcccggtcgatgtaggcgtctgcccaggcatccagctcttgccgatcaaagccgatgccttgcactccaatgcggaattcccgcacgtaaggccggacggttttgttgaattctgtgcggcacatgcctag

SEQ ID NO: 337302 - DNA, 1299 bp, Pseudomonas aeruginosa
gtgtctcccgaagaggtatcccagcaacctagttccagtcctggtggcccagtcagtcgtgaggagatgtacgcagaggtgtggcggcttcccatgaccaagatcgcggatcaccaccgtgtttcttccagcttcttggcgcgcgtgtgtgcccgcatgaatgtcccgcggccgccgcgtgggcattgggtaaagctggagaatggaatatcgagtcctcagccatccttgcctgatgctgggcctggtgaccttcaggtatggcgcaggggagatgctcttggtgctgtttctcgaccggtaccgaaggcacctgcaccgcgcaaaatcaaacccgaacagctccgcatatcgcgatcaagtcagcatcctgttgtcgtgggggcgtatgaggtctttgagcaggggcgcgtcatcgaccaaggattcctcaagccaggtaggcagcgcctggtggatgtcgtggtgaccaagccgcaactggagcctgccctgaaactggcgaatcagctatttctcaagctggaggctgccggccatcgcgtgatgtttgcaccgagtgaccgaacctatgcccgggcctcgtttgatgagcatgaacacccacccaagaagccaaggcaccggcatccggcgttgtggtcaccctccaagcccacagtggttttcatcgggacggttgccattgggttgacgttatttgagatgactgaggaactggaggcccgctacatcgatggcaagtacatccccacctccaagataccgtcgcagcaaatgcgccgcttaagctcaacctggaactggtcgacgcgcatggactttgcgaccggccgcctatgtataagagcgttctcgccatatccgtggactgattggtctcagagttggaaggatgccaagcaaggctcgctacgtggccaattggatgagatcgtccagcagctcacggacgccgcgcctgtaattgcccgattggtagaagaggccgaggagcaggccagaattcggcagcaggaggggatggaacagattcgccggagtgaggagagagagcggattcgactgcaaaacgaggcaagggagcaggcgaggactgatttgttgagtgccatcaagcattgggatgacataaagcggatccaggcctttttcagtgatgcggagagctctgtttcgaatctgcccgaagccgcgcgatgcattgctatggacaagctcgccgaagcgcgtgagcttgttggcgagctggatccgcttcaggcgttgctggaatggaaggggccgcgggagcgctga

SEQ ID NO: 337303 - DNA, 1500 bp, Pseudomonas aeruginosa
atgcacttagtcggttacgcttggctacgcgaagccatgcaactgtccgcattccccttgtatctgccagcgattgtgcagcctgtcactcgtttgaagaagataggccagaccttggctgtaccatctgccatcgcaccggctgctgatgacttgctgggccatgtcctcttcgcgctgaagcatgagggggtcaatcttgccattctggctcaggctctccccaagataccagtcgcagccctggagaatgccctgcaggaggcgcccaacggcatctacattcgcaaggcgtgctatctgagagaagcgttcaccggcgaggaggttcctcagcatgctccggttcggggggctttcgtgccgctcttcgatcccaagcgctacgtgacctgcccgggaacaagaaactcccggtggcgggtggaattcaacggccttggcgacgtgggttactgcgccaccgtggaaagaaccgccaggctgatcgaacttcaggagcacgacatacttggccgggcgaaagccttcatggagtccctgcctccggtcatgatggatcgggcgatcaactgggcctatttgcatgagaccaaggattcgttcgctatagaacgcgaagcgccgaacgaggacaagtctcggcgattcattcacctgctacgccaggcacacgaacgccagccgctgaccgaggagtatctggtggcgctgcagaacgccacggtatcgaacccttatgatctagctgcggcattcaggcatgaacaaaaccacctcgcaggagcccttcaaggggctgccggggtgacttacgttcctccaccaccagagctgtgccgcgaactgatggagcacctcatgcagtttgcgaatgaggcccccacccagatcgacccgctggtagcagctggaatcatttcctttggtttcgtatttctccacccctttatggatggaaacggacgcctatcccgattcctgatccaccaggcactttgccgcgcaggcgccttggagaacggcctgctactgccagtgtcggtggcaatgaaacgtgaggagcgcctgtatctggaggccctgcagggattctcccgcccagcccgggatttctgggatgtgcagtggatcgactttggcaagttggctttcgacttccggggagatgcagcgatctaccgctactgggacgcaactgcctgcgtcatcttcaccatggaaatggctcagcacgccctggaggtcgaactccgcgaagaagccgcttttctggagtgctacgacgccgtctacagggctgtggatgaacgattcgacatccgcggcagcgacttggcgaatctggtgatgatgtgcctaaccaatgatggctttgtttcgaagcaccgtcgtaagcaataccagtacacggtacccactgaagtcttcgactacatagaacagactgcccagcaggttcttagcgagcaacacgcggctcgagaaacacgtcaatag

SEQ ID NO: 337304 - DNA, 198 bp, Pseudomonas aeruginosa
atggatgacgaagccctaaggaatcttgggcttgagtgggtggatgctgatggcgaccgcggccgcatcgtagtcgcgacacctgagcgcgcaatcctagagctgtgtgatggcgtgtcagacgcgtcgctcgtttatgaagtggatgcgctgatgcagggcgcggacacccttcgtccccaaagggtaagcatgtag

SEQ ID NO: 337305 - DNA, 495 bp, Pseudomonas aeruginosa
gtgaacaccgaacagttcattcgggagtccgccgcgcgcgggctttcccggcgcgcaacgatgcaggcccttggcctgggccgctggaagttcgacctgatcatcggagccatggagcccatcgagtgggccaagaacggcacgacgctcggcaaccgcctggcctacgaagcgtcgcgcggcaggttcacgccagcgcaggccgcagcgctggagcgcgcgcacgaacgctggagcgagagccgacgcttcaccgtcgacggcgtgaccgggaccatcgccgagctggtggagaacttccagagcccggtccacgcaacgaccgtccgccgccgcgtcgccgccggcatgaccttgcgagacgcactcacgaccccgcgccagcagcccaagcccgggcgccggcatccctggatccgctcacagaaggagcacacattctccgactgttcagcgccagaaggctccggcatgaatcgttactttgagaattga

SEQ ID NO: 337306 - DNA, 1053 bp, Pseudomonas aeruginosa
atgaaaggcacgaaaaaggtaacggccgcgacaggtgcaaacatgaaatcgtatgcgatatggaacaacaaaggtggggtcggaaagacttacctgacgtttgctatcgcgtcagaatatgcacgaattcaccctgaaaagcgcgtcatcgtcgctgacatgtgcccgcaggccaacctttcggagatcattcttggcggtaacggcaaaggtgccgctgcgcttggaaagctcattgctcagcgcaaaaccatcggcgggtattttgatgcccgcacacgtagcgcacatgcgattacgggtagtgagacgtcttttttggtgaaagggaaggatcacaacgccaacatgccagacaatctttactgcctggcgggtgacccaagtcttgaggtccaggctcctgtaatcaaccaattgagcgccgtcagcctgccggcagactcttggaagaatgtccacctctggctcaaggatctggtaacggcctgtggcaattaccttggtgagcaagaaaccacctgcttcatcgactgcaatcccagcttcgcggcctacactgagctcgcgcttctggctgccaaccagattatcgtcccatgttcgagcgatggctcttccgcgcgagcgatcgacaaccttggacaactggtctacgggattgatgttcaggacgcctacaaggccgttagcttctttgaccgaagtaatcaatttggcgctccggtccctgttattcactccttcgtcttcaatcgctctacgcaatacgacaaaaaggcgagcaaggcattttcagccatgttcgacaatatcgaagcgcgagcgagaaacctgaaagacaagaagccaagcgctttccagagtggtgaattgcagcgatttgaagtgcctgacaaccattctgttgcgattgtttcctcgcacctaggtctgcctctgtacgatgtgaagccaggcagctacgaggtctacgacacgaagcctcaggtcaataacgagccaatcgagcgttaccagcgagcgatttctgatctagtcaccagcctctga

SEQ ID NO: 337307 - DNA, 2547 bp, Pseudomonas aeruginosa
atggccggaaaaatacaaaaaactctctgggttactggggtacaacctgttgaagtaaatggcagccgctacatacctactgctttgctttacgaaaaggatgggacagtaacctttggaaaggatgcagcccaagcgctaacaggaattacaaataataatttcaaaattgatttaggtgatatatcgcctggctctccaacaagaaaattgttccccacagagcacggtggggagaagagcgcatacgagctaagcaaggacttttttgatctctccctatctgcgatagagaaagagttagcggtcgaagcaagtcataaaattcccgccaagataattgttgccgaaccgctaaactttcagcttcaagaaaactacaaggcatgggttcagaattaccggggcaacatcagaaggattctgagcaagtatgaggaagtggagtttctacctgaaccgtttgcggtctatcaatattaccgttacggacagagaattcctcacttgcaagagaaggcaaagcacatagctttggttctggattttgggggcggaacgtttgatgcctgcataatagaatcaaccaatcaaggcgacatcagtctttcgggcaagcactcaaaacctctcggcgcagactcagcacctattggtggttttttcataaatcaatgcctggctgagtatctaatcaagagaaacatcgagcagcgcttgaaagctgacgccgataattgcataaaaaaccatcaaagaataaagtcaggtgagcttgatatatccagccttagtgagaaaaagcaaacattcctaaaaaacttccgctcactaattgcagcatgcgagcagtacaaaattgatctggtttcttgcataaatacttgggggcttagcaatgatgcttacgaaagggtccctattatggttcctagagacccctttactgatgccccttggattcaagatgagctttttgcgcatcagttgcgaaaaattttcatagaaaaaatatgggatcagtatcttcacaaagtaatcagaaaggttttcaaacttgcagaggctgagcttactggaaaggatattaccataacattgatatctggtgggtcttcaaatataagatggatgcttgaattgctaaaacgggactttgaaggagagctggctggagctgaacccataccaatctcccagtcattccaagaggttgtagcaactggcctagctattgagtgcgctcgaagatactatgaggaagagtctgagtttgtgggggtaacatacaacccgattcgacttaagctggatccggatgataagggctttgattcaaataggatttttacttcagtaggagataaagtcgatatgaaagaggccaggccgggggatctcatgccttcggctctggcattaaacaacttcatcgacgaacctttgcagtggaagatcaagctcagcagtccacccaagactcaacttcgctacgttttttcaaagcctgctgatgcgggtgaggaagatatatataacgcagagtctcaagttgtttatacgcgagaaaataagcaattcgactcggctcttaccgttcagttggtggtcagtggggatggaacggcaaagcctagtttcatttacaaaaacccaaaccccagttacggggttgctggaaacattgtagtgggcaaggcatttgcaatcgacatgacaacgcccacggacaacaagggttcatcggttaactatattggatatgattttggcacttgtagctctgcgatatgcctaataacgcaggatcaagtgaaaaccacgaagattagagccgaaaagacctcctgggtagagttaagcgacgctttatctcgattgccatatcctgttgcatatccattaagaaaatatctggatgttaagtcttcccatcaatccacagctgtggcaagagaggcttttgaggcagggttagcatttttggcatattcggtggcttccgaaacgctagccttgaatccaacagagcgatttttcaagagctttcaacaccgttctatggggccattgaaagatcttttggtcagatcacttgagctcggcaagaaaaacctgagattctgttctgtcctgtgcgagatgcttcccaagcatttagagcagctagaaagatcagttcaggattttacaaagcacaagcacgaaaagctggatgatgagtcgtttgatagtcatggtcatctgtatctaattgtaaatctatgcttggagattatgaaagggcgaaaatttggatatgtggctgactctaggtctatgccattcaatcccggaacgtcaattggtctattcaaggttgcaagtgatattcagccatttattgaatcatttaggttcaaatctagcagccatttgcctagagagatacctttaatactggatctggatactgggaaggccctatctctattccccctcttattctggaacgaggacggcgattttcaaggtagttgtcgcgtgagcgtgtcacgctgcctttga

SEQ ID NO: 337308 - DNA, 291 bp, Pseudomonas aeruginosa
atgtctgccaaggaagagcagttgatacagttgctgggcctcatggctcgcagcatgacccacatgaccgcatccgtaaccgctatggccttcgagcaactgcgaagccaggatacagcgctgcagaattcagccaagcgcatgatcgagcgcatgcaggctatcaatgaagagctggatcagcagtgggagctggtcggccagctaaccggccatcgggatcaagaagcgcttgtggaggagctggatatctcttctgttcgagtgcatcgggaagcggaggcctcgtga

SEQ ID NO: 337309 - DNA, 348 bp, Pseudomonas aeruginosa
atgagcaagagtgtgatgacctaccttccacctcacgacggccatccaggtatggagatagcttgggctgcagattgcagagaggcgttcaaccaaggcgtgaagctggcccagacctggctcgataatgcccgcagcggatggctctgggcagtgatgatcgcggagcgcgatctgctgccctgcgctattaagaggcgagcattcgaggtgggtttcctgagtcgcatccatcagcgcatgtgctcacaccaaggctgcggtgagcaggccgagatctataccgcgggtgattgctttggccacagaaaggccctgacgctcgccggagcgagctgtcagggctga

SEQ ID NO: 337310 - DNA, 507 bp, Pseudomonas aeruginosa
atgtcgcagctttctctcgcctttgacgcttcactgatgattcgcgacgagcaaggtcgttatctgcctgccactgcagaacagatcctggacgctgctcgcaaggtgatcgatcagaaggttcagcgaggtgcagcctttacgtcttcggagctggtcaaggagtacttgatcgcgaagctgggtggctttgagcacgaggttttttcagcgctgtttctggatgccaagcatcgcctgatccagtacgtcgagatgttccgcggcaccatcgacagtgcatctgtttacccgcgcgaggtggtgaaggaagcgctgcgcctcaatgctgcggcagtgatcttcgcgcacaaccatccaagcggaaatccagagccaagccaagctgacaaggtgctcacacaacgcttgaaagaagccttggcgctggtcgatgtccgctcgctggatcacatcatcgtggcaggccaacgcaccgcatctttcgctgagcttgggatgctatga

SEQ ID NO: 337311 - DNA, 813 bp, Pseudomonas aeruginosa
atgggagttttcactccggctggagaaacgcgtgtagctgttctggtggattgcgacaacgtatcgcccgagattctggaacacgccttgcgtgtggtcgcccagttcggacgtgtcgtcctgagacgggggtatgggaatcacggcaccttggccaacaaatggcaggaggctctggttcgactggctttcacgccatgcctgcagtaccagtatgcagccggcaagaatacctccgacatcgccctggctctggatgccatggaggcgctcttcgatcagcgcgcggatacgttctgcctggtaaccagcgactccgatttcgcctacctgtgccgcaagctcagagagcgcggcgctaccgtctgcatcgtcggtgaacccaagactcccgatgcactgcgcaacgccagcgaccagttctttgagtggcgccgcgaggagcacttccaggagcctgttgcggagcataccgagaagcgtacgaccaaggctgagtcgagttgcaagcaggaaaccactaagcctgaacccggcaaaccggtcgtcaagcggcgaccaaggtttgtggtggatgccgtatctctccttgcaggaggaaccagcgaaggcaaggtcaccctgagcgctcttgggcagtacctcaaacgtaccgatccggcattttcgccaaacgcgtatggccactctggtttgctcgacatgatcagaacctacgacctgctgcatctgattcaagagaatggcgggcactggacggtggggctggcagcgaaagaagaggaaccggctgaacacgctgcgcacgcctga

SEQ ID NO: 337312 - DNA, 552 bp, Pseudomonas aeruginosa
atggcagtcgacaatactactgatgggcaatctcctgatcctgatgcatccacctcccagccgagcggtacggcaaacctcattcagaatgtctccgactacctgaaaatcgaagcggaatatgacaaaccggtagcatcaggcctgatgcgaaagtcgctggaagaggttggcgtagagaagactgtaggagaaattcaagcgtgggcagacgttaatcaagcgctcttgacccgccctgtcagtgttggcaagacacatgacaaagctaaagccaagaccgatgcatgcgtgaatcagatgattaacgctgcgagcaccgccgcgcccgatgctccatccgtgggaaggagtcaaccggctgacacctcgctctcacacgaacccgagcaactccttgacgaaccagatgatgcgtttgacgaggatgacgccgcaatcgatgaaccggaatacgattccctcacggaaatcttcggcaccgacgatccggacgacgcggaagagcaggccctggattacgtcctgaaactgtcggaggagatcgactag

SEQ ID NO: 337313 - DNA, 513 bp, Pseudomonas aeruginosa
atgagcgaacacatcaggatctacgttgccgacctggccgcctacaacgccggtcacctgcatggcgtctggatcgatgccaccttggagctggacgacatccagtctcaagtcagagccatgctggcggcctcaccggtcgagagtgcggaggagtatgccatccacgacttcgagggcttcgacggctaccgcctcggcgagtacgagggcctcgaaaacgcccatgagattgcgtgtttcatcgaggagtaccccgagttcggcggcgccctgctcgatcacttcaacgacctggagcaggcgcgcaaggcggccgaggaggattactgcggctgctacagctcgctggccgactacgcccaggagctgaccgaggaaaccagcagcattccgccgcacctggctatgtacatcgactaccacgccatggcccgcgatatggaatacggcggcgaggtgttcaccctggagaccggcttagagcaggtgcatgtgttctggaatcgatag

SEQ ID NO: 337314 - DNA, 372 bp, Pseudomonas aeruginosa
atgtcgcactcaaccaatctttcccgtcagccgcgtcgcatcgatctcgatgccccgctgcatcgcaaggccgggccaacggcgcatgccatgcggcccgttgagggggcttgcgaggcgcaaacaccacaggcctgccctacccctcgctacctcaccaacaacgaagcggcggacttcctgcggctgtcgccgcgcacgctggagaagctacgggtgatcggcggcggaccgcgcttccacaaattcggtcggcgggtgatgtacgcggttaccgacctcgaggcctgggccggtgagcgcagcttcgagaccaccttcgatcccgagtacatcgaccgccacccgggagcgcagcgcgatgagcagtga

SEQ ID NO: 337315 - DNA, 828 bp, Pseudomonas aeruginosa
atgagccgcaaccctcacgacctgcctgcgcagagcgggcaactggatctgttccgtgccctgccgggcgacatggccccgcgcgacgcccaggacctgatggcgcatccgttcttctcgctggccaagtcgcggcgcaccgtgcccatcgactttcgctcgggcgaggtgacggtccacgtggaaggcacgctggagcgcggcattgccacgatctgggatgccgacatcctgatctgggcggccagccagatcgtcgaggcgcgcgatgcgggcatccccacttcgcgactaatgcgtgcgacgccctaccagatcctgcgcttcatcggccgcggcacctcgctgcgcgactaccagcgcctgaaggccgccctggatcggctgcagtcgaccagcgtggccacctcgatccgcgagaccaccggccggcgtttgcaccgattctcctggatcaacgagtggaaggagctggccgcggcggatggccggccgctgggcatcgagctgattttgccggactggttctacagcggggtgctggatcaagccctggtgctgaccatcgacccggcctacttccgcctcaccggcggcatcgagcgctggctgtaccgtctggtgcgcaagcatggcggcaagcagaaggacggctggcagttcgactttcgccacctgtaccgcaagtcgggcagctcggcgcgctattcggacttcgccctcgacctgcgtgcgctggcggctcgccagtcgctgcccgggtatcgcctggaagtggtgcgcctgtcccgttcgaccgagctgctggccttccggcgcgtgccgtag

SEQ ID NO: 337316 - DNA, 639 bp, Pseudomonas aeruginosa
atgatcgtcgccctgctcaaccagaaaggcggggtgggcaagaccaccctcgccacccatatcgccggcgaactggccctgcgtggaaagaacgtcatcctgctcgatggcgacccacagggctcggcactggactggacgcagcggcgcagccagcagggcttgcccaggctgttcagcgccgtcggcctggcgcgcgagacgctgcaccaggaagccccggagcttgctcgtcgcgccgatcacgtggtcatcgacggaccaccgcgcatcgccgccctcgcccgctcggcgttgctggcggcagatcgcgtgttgatcccggtgcagccgagcccctacgacctgtgggccagcgcggagatggtcaacctgatccgcgaagcgcaggtgttcaggccaacgctgcgcgcggcatttgccatcaaccgccgcgtcagcaccacggtgatcggccgcgaagcgcgcggcgccttggccgaccaaccgctaccagcactgcaagccgaagtacgccagcgcatcgtcttcgccgagagcgtggcagccggtcgcctggctcgcgaattggcgccggacagcgccgccgcgcgcgaagtcagcagcctggtcgacgagctactgaggtggtcgccatga

SEQ ID NO: 337317 - DNA, 243 bp, Pseudomonas aeruginosa
atgagcagcaagcgcatcggtatcggtgcacgcccgctggccgatccgcaggccgaagcctggatacgcaaaggcgctggaagcgacaacggcaaggtcgagcgctacagcgcacgactgaccctggacgtgacgccggcgctgcgcacgcgcatcaagctggcggccttcgagcgtggcgtgaccatggcggagatgctgcgcgaagtgctggaaaggcagtttccggaggctacgtcatga

SEQ ID NO: 337318 - DNA, 528 bp, Pseudomonas aeruginosa
atgacgtttggtgcttgcggcgtgcggtggccactggcgctgctcgctggcagcctggctgccctgggttgggcggcgctcacaacgtcgccaccgcggctggtctacaacgcctccgacagcgtgcccgtcggcttgtaccgcatttcgtcggccggctcgttggcgccgggcgatctagtactggttcgcctgccgccggaggcgaggtggctggcggctcagcgcggctacctgccggcgaacgtgccgctgctgaagactgtggcggcgatggcgccgcaacgggtgtgcacgcggggcggtcaagtgcgtatcgatggcgtcgttgttgccaggcgcatgaggtgggatcaacagggacgcgcgctaccggactggcagtcctgtcggcgcctggtgggcgacgagctgtttctgctcagcagcaacaacccggcgtcgttcgacagccgctacttcggcccggtgtctgccgacgcggtgatcggtcgggcgcagcccttgtggctggagtcgcgtcgatga

SEQ ID NO: 337319 - DNA, 1869 bp, Pseudomonas aeruginosa
atgagtaagggaagccttccgaacgacgagttgcgctttcgcccacagccgggcaagccgcagcaacgcggtcaacccttcatcaaccaggtgctgcgccaggccaacaaggctggcaccggaaagccgcgcaaggcgggccaccagcccggcgcccgcctcggccgcgggcatgtcgccgctcgtttcaacgcgcagcaactgccgtccaacgcccgccgcatcaccatcaagacgcgcctggtaaacctacgccaggccggcaagcgctcgacgctcagccacctgcgctatatcgagcgcgacggcgtcagtcgcgagggcgatcctggacaggcgtacgggccattgaccgaccaggccgacctcaatgctttcgaggagcgaggccgggacgaccgccatcagtttcgctttatcgtctcgcccgaggatgcggagcaactcgacgacctgcgcacctacacccgccacctgatgagccggatggaggccgacctcgggacgcgcctcgactgggtagcggtcgaccactggaacaccgacaacccgcacacccatatcgtcctgcgcggcaaggacgacaccggcaaggacctggtgatcgctcgtgactacatcgccgagggcatgcgcaaccgcgccgcggagctggccaccgaatggctcggcccgcgtaccgaactggagatccagcagagtctgcagcgcgaggtgcagcaggagcgctttactagcctggatcgcacactgttgcgcgaacgccaagccggcgtgctcagcctgaaatcgctcgccaaccatccgcgccgacagctgctgatcggccgcctgcagcagctgcagaggcttgagctggctcgtgaggttcgccccgggcaatggctcctgcgggacgacatcgaggtgaccctgcgtgccatgggcgagcgtggcgatatcatgcgcacgatgcagcgggccatggggggagtgcagcgggagctggcggtcttcgagccgggcaaggatggttctgttgtggtcggtaggatcgtatccaagggcctggccgatgagctacacgaccgcggctacctggtggtcgacggtctcgacggcaaggcgccgcgcgcggtggatcgctcgattgcggcgttggctgcggacggcctttatcgcaccgatcatcacgcggccctggcacgatcacaggcagtcgaaggacaggatcccgaggcattggtcgagcgccatgttcgccgcctggaagcgctacaccgggcaggtatcgtcgagcggctggccgagggcgtctggcaggtgccggccgatctgcccaagcaaggtcggcagcatgatgcccgccgactaggcgacgtcaccgtcgagctgcgcacgccgctgccccttgagcagcaggtgcgcgccgtaggcgcgagctggctggaccaacagctgatcggcggcaaccgcgagctggtcgacaagggcttcggcaaggaggtgcgcgaagcgttgcggcagcgcgcgaactttttggtggaacagggcctggccgagcgccagggccaacgcgtggtgctcgcacgcaacctgctggccaccctgcgaggacgggagctggccgcaacggcgcgcgagatctcggcgcagacgggcatgcagtatcgcccggcagtcgagggccagcgcgtcagcgggatctaccggcgcagcgtgcagttggccagcggccgttatgccctgctcgacgatggcatcagcttcagcctggtgccgtggaagccggtgatcgagcagagactcgggcagagcgtgtcggcgcagatccagggcaacagcgtctcctggcaactgggtcgccagcgcgggccgtcgattggttga

SEQ ID NO: 337320 - DNA, 855 bp, Pseudomonas aeruginosa
atgagcgcgccccgcacagctgaacgcactcgggtagagctggccgaattcctgcgtagtcgccgcgaacgcatttcgccggaggaggtgggcttgcccgctggtagtcggcggcgcacgcccgggctgcgccgtgaggaggtggcggccctggccggggtgggtttgtcttggtacacctggctggaacaagggcgggatatcagcgtgtccgcgacattcctcgacaacctctcgcgcacactcaagctggatgccaccgagcgtcgtcacctgtttctgctcgcccaccagcgcctaccgccagaaccgggcaagacctggtgcacagtgcctgcgctgattcatcgcctgatgggggatctgccgtctcgtccggcctatgtgctcaacttgcgctgggatgtgctggcctggaacgctgcggcagatcgagtgttcggtttctccgcgctgccggcggaccgccgcaacctgctgtggatgctgtttaccagcccggccatgcgtgagttgttcaacccttgggatgagcaggcgctgcagatactctccagcttccgccgtgacttcgtgagggcgacccaggatccggatatcgctgcactggtgaaggacctggagaaggcctcgccggacttcagggaatggtggcggcagcaggacatccacggcccgtgtcaggggatccgtcacctgaagatcgattcggtcggccaggtggtgttcgaacacaccacgctgaccatcgacgaggatcgccacctgcggctggtctactacgcggccaaggaaggcatgccgcagagccgcgacttcgagcagtggttgcagcaggaaccggcgctggtataa

SEQ ID NO: 337321 - DNA, 1233 bp, Pseudomonas aeruginosa
atgtaccaagcacttcttcgggaacaactggagacattgaagtcctccaaccagtaccgcaccttcaccacactcagccgcatctgcggccagtacccactggccaaactggatggccgcgagcaggatccggtggtggtctggtgcagcaacgactacctcgggatgtcgcaacatcctgcagtgcgcgaacagatgcacgatgcgttggaggcatacggagcgggctcaggcggatcgcgcaatatcggcggctcgcatgaggtgtatgccagcctcgaagcaagcctggccgactggcacggcaaggaagcggcgctggtcttccccaccggctttggctccaacgacgccaccctccagtgtctactgcgacgtatccccgattgcgtggtaatcagtgacgaactgaaccacgcctccatcgtcaacggcattcgctcgacgcctaacgaacgcaagatcttccgtcacaacgacgtcgcgcacctcgagcagatcctcgccagctacccgctgggccagccgaagatcgtggtcttcgagtcggtctactcgatggacggcgatattgcccctatcgccgaaatcgtcgcggtcgccaagcgctacaacgccctcacctacctcgacgaagtgcatgccgagggcatgtatggcccgcgcggcgccggtatcgcagccgaactgggcgtggccgatcaggtggacatcatccagggcaccatggccaaggccatcggtgtaatcggcggctatatcgcctcgagccaggtgatcgtcgatgccgtgcgttccttcgccgtgggtttcatcttcaccacctcgctgccgccggcgatcaccgccggctgcctggccagcgtcgagcacctcaaggccagccgcttcgagcgcgatcgtctgcacactcagaccgccaagctgcgcgagcgcctcaagcattacgacgtgccggtgatgccctgctcgcagacccacgtgctgccggtgctggtgggcgaggccaagcgctgtaaggcagcggccgagcgcttgctgcaaacccacggtgtgtacctgcagccaatcaactatccatccgtaccggtagggacggagcgcttccgcgtcaacgctacaccgaaccacagcgacacgcagatcgagcatctggcggtatcgctgcgcgagaccttcgaccacttcagcatcccgctggcatccgaggtgtttgctgcggaggtggcctga

SEQ ID NO: 337322 - DNA, 504 bp, Pseudomonas aeruginosa
atggaactgtccttcttcacagtacgaccggcgacccacgccgacctggccagtttggtggaactgcgtgcgtatctgctggacggcaccaacgccagttactcgagcaagacaccagaagacgctgcacgctggcgagcagcctaccgcatctggctgagcagccgcctgaacgagaacgactgcgttcagatcctcgtcgcagagcacaaggaatccgcccaggttctgggctgcgcgatcgccatcatcgaccagcgagcgccggcaccgggttgcctcatcggcctatccggctgggtgcaatcggtggtagtggatccgcagtggcgcggtcgcggcatcgctcggcagttgatgcaacacctgctccgctggttcgccaaccgcggcgtcggctgtgtggtgctgcagagcaccgcggccgccgacaagctgtaccagaccctgggcttcgccgtcagcgacgagcgcctgctgatccgtcaggaggcctcggcatga

SEQ ID NO: 337323 - DNA, 1071 bp, Pseudomonas aeruginosa
atgaagatactgatcatcggcctgggctacgccggcaaccgctaccgccgcgccttcgagcatatcgccacgagcaccggcctgccgctgtcgctggcctatgtcgggcgccggcagaaaacgaccgaactgccctacttcgacagcgtcgagcgggcactacaggtatttaatccggacatcgtggtggtcagcgtcaacgaccacagccatgcgcccgtgctcaagcaactggccggctaccggggtttcgtgctctgcgagaagccgctagtcacaccgggcgacgacttggaagaactgctcggtgcgctggaccaggtcggcggctttgccctggacctggtggagcgctactcggacgcaacccggcagttgcgcgagtgggtcgagcgccacgattggcagctggtgcgcgccaacttccactggggcaaggaccgcatcaacgactaccgccccacctgcggcgtgaccagcgaggtgatccatgccatggatctgatcggctggatatgcccgcgcgctggccagctcaagctcgatggcgtgctaggtgtgcgatcggatttctccatctccggcagcgaagtgctcgataccgttcagctcaccgccagcctgggcgaagcacgggtcaccggttacgccagcttcgtcaacatcgtgcgtcagcgcaccgtggatctcagcttcgtcgaccgcgacgcccggctgatccatgcgcgcttggtgttcgatacgccgcgctgggatcacgaccagctgcggatctggacgcgcggtaccaacggcgccgaggagttgctgcacgcgttcgccaccgctcccgacgagcctggcctggacaccctgcacaagctctcgcggctgtgccggcaggtggtgcgcgccgtggcgctcaaggaaccgccccgccagcccttcgccggcctcgataccgccgtggtgctgcagcgcctgctcaacgacctcgacacccatgcccaaaccccagcaccggcgcgctacgcccatggcgagacgcgcgtgctgctggccgaggacagcgacctggaaagcctcgggtaa

SEQ ID NO: 337324 - DNA, 1854 bp, Pseudomonas aeruginosa
atgtgtggaatcactggatggctgtcctacagccagaacctggaaactcaacgcgacaccctgcagcgcatgaccgacaccatggccctgcgcggaccggatgccggcgggctgtggatcgacggaccgatcggcctgggccatcggcgcctgtcgatcatcgacctgaagggcggtcgccagccgatgacggcgatgcacggaggcccgcgcgaggtcgccgcgatcacctacagcggcgaggtctacaacttccgcgaactgcgcaccgatctgcaacgacttggccaccgtttcgagacccgcagcgacaccgaggtagtactgcgggcgtatgtggaatggggtgaggccttcgtcgagcggctcaacggcatgtatgccttcgccctctgggacctgcgctcgcaggagttgctgctgatccgcgaccgcatgggcgtcaagccgctgtactacttccccaccgcggacggtgtggtcttcggctccgagcccaaggcgctgctggccaatccgctggttccacgcaaggtgcgcgccgatggcttgcgcgagatcctggagatggtgaagacgcccgggcatgccgtgttcgacggcatgcacgaggtgatgcccggcgagatcgtgcggatcaaccggcagggcttctaccgccgccactactggaagctgcaggcgcgcgagcacacccactcgctggacgaaactatccgccatacccgcgacctgctggaggacatcgtcgaccggcagatcgtcgccgacgttccgctgtgcagcctgctctctggcggcctcgactcctcgatcatcaccgcgctggcctcgaagaagctgctcgccgccggcaaggagaacatccgctccttctcggtcgatttcgtcgaccacggcagcggcttcaccggcgatgcggtgcgcggcacgccggatgcgcccttcgtccgcgatctggtggagaagatccgctcctgtcaccaggaaatcgtcctcgatagccgcgagctggccgacccgacgttgcgtgcgcagatcgtccgcgccctcgacctgccgccggccttctggggcgacatgtggccgtcgctctaccggctgttccaggaggtgcgcaagcactcgacggtggcgctgtccggcgagagcgcggacgaggtgttcggtggctaccgctggttccacgatccagaggcgatccaggccgacaccttcccctggctgacctcggtcacaggcaagtacttcgacggtaagaccctgttcgatccaggactgctggcccagctcgacatgcacaacttcctgcgcgacagctacacccaggccatcgccgaagcgccggtactgccgggcgagagcacggtcgaccagcgcatgcggcagatgagctacgtcaacctgacccgcttcgtacagaccctgctcgaccgtaaggaccgcatgagcatggccgtcggcctcgaggtgcgagtgcccttctgtgatcaccgcctggtcgagtacgccttcaacatcccctgggcgctgaaggccttcgacggacgggagaaaagcatcctgcgcgcggcgactcgcgacctgctgcctgaatcgatcagcgagcgggtcaagagtccctacccctcgacccaggacccggcctacgagcaggcgctgcgtgatgccctggctgccatccaggcggaccgcaacgcgccggtgacgcccctgctcgacagcggccaaattcagcaaaccctggccaagccgctcggcagtgtctcgcccatgtacgagcgcatgggcatggaactggcggtcggcctcaatacctggctgaacgagtatggcgtcagcctcgaactctag

SEQ ID NO: 337325 - DNA, 1200 bp, Pseudomonas aeruginosa
atgcacacacctaaccaatcctccatctacctcatagcactgggggcctttgccctcggcatggcctcatacgtcaccgccgggttgatcccgatgatcgaagcctcgttcgcagtctccgtcgcggtggccgctcaattggtcaccgccttcaccctggcctacggcctgggttcgccgatcttcgtcgccctgaccccagcgcaccgtcagcgcgctggcttactgctagccctgggcctgttcgtcctcgccaacgctgccagcgcgctggccgaaagcttcaccacgctgatggtctggcgcgccatcgccggtatcggtgctggtgtctacctggccatgggcatcggtgcctcagccgccgtgtccaccccggaacgccgcggcaaggccatcgccatcatcatgggtggcatggccagcggcgtggtgctgggcgtgccgctcagcctgctgatcgccgaacagctcggctggcaggccgccctgtggctggtgaccctgcttggcctggtggccttcctcggcctgctgctgaagctcccttccctaccggcagccaccgccaccacgctgggccagaagctggcgatcctcggcgacggccatgtgctggtcatcctgctggtgtcgctgctggccgccatcgccagcctgggcatgtacaccttcatcgccccgctgctggctgatccggcctacggcgcagtgcgttcggtcaccccctacctgtgggtctggggcatcggcggcgtgctgggcagcttcctgatcggcccgctggtggatcgcatcaagggtccggtgctgaccttcgccatcatgctgatcctcgccgtgtcgctgttcgtgctgccgctggcggcggctctcagcacctggctggtgatgctgcccatcgccctgtggggcgcggtcggctgggcactgcaggtgccgcagaacaacgaactgatcctggcgcgccaggctcagggggacggcaacctggccatcgccctgaacgagtcggcgctctatctgggcagcgccatcggcgccgcggctggcggcttcgtgctgctgttgcagatgcccacctggaccctggccgccagtgccggtggtgtcgccgcgctgggcgcactgctgcagatcgtcaacctgcgtcgccagccgacctggaacggcgacgtgcaagccgaaccctacaactga

SEQ ID NO: 337326 - DNA, 927 bp, Pseudomonas aeruginosa
gtggaactgcgccaccttcgctgtttcatcgccgtcgcagaagaactgcactttgcgcgtgccgccgcgcgcctgcatatcgagcagtcgcccctgtcgcggatcatcaaggaattggagtaccgcctgggcgtgcagctgttcgaacgcaccacgcggcgcacgcgcctgacctgggccggcaaggtgctcttggaagaagcgcgccgggtgctggccgtggtcgaccaggccaaggccagcgtcaagagcgcggcggccggctactgcgggcgtattcgcgtcgcgctgtccgacggtataccccaggcacgcctggccgccctgctcgcccagtgccgcgaggaagaaccggaggtcgagatttgcctgtcggaagtcaccttcagcgaacaggtcaggggcctgaacgacgacctgtacgacatcgggctcgcccagtccgacgaggttggcgaggggctggtggccgagccggtctggttcgatccactggtagtggcggtgccggcccgccacccgctgttgacttatcgtcgcgtgccgctcgatgaagtggtgcgctacccgctagtgctctgcgatccgcaggtctgcgaaggcttctggcaacagttgcagcgggtgcttggcgccgtagatacgcgactgactattgccgaccgcgttccaaccctggatctgatgatagcgttggtggccgcgggttacggcctgggtttctccagtctggcgcgcatcaacgaactcaacaatccggacgttgtggcccggccgctagacggctgcgcatcgatgctaaccacctacttggtaaggcgcgaaggcgaaccgaccgaacaattggcgcggtttatcgggcgggtgagcccggcggaaagccaggcgttgctgccggatcacacatcacagaaggaaatcgcctga

SEQ ID NO: 337327 - DNA, 345 bp, Pseudomonas aeruginosa
atgaaagcattgttcgttgaactgtcaccctttgagcgcaaccgaaaagcctacctggatgacggcgaatactcgctattccaacagatgctcttggccaacccggaggcaggcgcagtcatcgccaacagcggtggtctgaggaaggtccgcttcggatcggccaggcgcaacaaagggaagcgcggtggcgttcgggtgatttactactactggcacagctgtctgcagttctggctcttcaccctgtatgacaaagacgaactcgatgacctgagcagtgaccagcgcagacagttgaaagcgctccttgagcgcgaagtgaagacgaggcaagcaccatga

SEQ ID NO: 337328 - DNA, 309 bp, Pseudomonas aeruginosa
atgaccaaacgcgatattttttccgagctgatcgaaggcttcgatgacctggccgcagcacgtgaaggcaagcgtacgctgcgtacccacaaggtcgaatacacgccaatcgagcccgcgacaggtgcggaaatcgtcgcactgcgcgaaaagctgaagatgtctcagggtgtattcgcccaggccattcacgccaagcctgcgaccctcaagaactgggagcagaaccgctcaaagcccaacgatcaggccactgtcttgatccgtatcctgagcaagcacccagagctcattcgcgaactggcgtag

SEQ ID NO: 337329 - DNA, 507 bp, Pseudomonas aeruginosa
atgtcactctcttgcaatgttatcgagccattgcgctttcgcgaagcgctcggacactacgcatccggtatcacggtcattacatcgctcatcgatgatgaaccgcttggcttcacttgccagtcgttctacagcgtgtcaatgagtccgccgttggtgtcattcagcgtaatggccaagtcatacagctatcccaaaatccgacacgcaggtcgattcgcagtcaacatcctgtcaggtgaacagatccagatttccaacacctttgctcgccagggcgtagacaagtggcacggtgtcgaatggcaggagtcgccactgggtaatccaatcattgaaggtagcctgcactggctggattgcgaaatccacgcagagcacgctgcaggtgatcacctgattgtcattggtgaggtgaaagccttgaacattcaagaaactgcaattgcgcagccgttactgtatttcaaaggtaaatattgcaacctcgccgggtctgccgagtga

SEQ ID NO: 337330 - DNA, 1029 bp, Pseudomonas aeruginosa
atgaagaagttattgcctacgtcgacagcaggcagcttgccaaaaccctcctggctcgcacagccagagacgctttggtcgccgtggaaattggaagatgaagagctggctgagggtaagcaggatgcgctgcgtttgtcgctgcaagagcaacagcaagcaggtatcgatatcgtcagcgatggcgaacaatcacgccaacacttcgttaccacgtttattgagcacctcgacggcgtcgatttcgagaagcgtgagaccgttagaatccgcgaccgctatgacgcgagcgtgccatctgttgtgggtgcggtaagccgctcaaaacctgtgtttgttgaagatgccaagtttctgcgccagcaaaccaagcagcctatcaagtgggccctgcctggcccgatgaccatgatcgacacactttacgacggccattacaaaagccgtgaaaagctggcttgggaattcgccaagattctcaaccaggaagccaaggaactggaggcagctggcgttgatatcatccagttcgatgagcctgcattcaatgtgttcttcgacgaggtcaatgactggggtattgccacgttagaacgagctatcgaagggctgaagtgcgagacagccgtgcatatttgctatggctacggcatcaaggccaatactgactggaagaagacgctcggttcggagtggcgccagtatgaagaaatcttccccaagctgcagaagtcgaacatcgacatcatctcgctggagtgccaaaactctcgcgtgccgatagagctgctcgaactcattcgcggaaagaaagtgatggtcggtgccattgatgtggcaactaataccatcgagaccccagaggaagtggccaacactctgcgcaaagcgcttcagtttgtagacgccgacaaactttgcccttgcaccaactgcggtatggcgccgttgtctcgccaagtcgccagaggcaagctgaatgcactgagtgccggagcagagatcgtccgccgagagctctctgcctaa

SEQ ID NO: 337331 - DNA, 984 bp, Pseudomonas aeruginosa
atgaatcaagaatttacatttgccgtcaagagtattcgttttgatgagaactaccatccatcagacagtacccgtctcactacaaactttgccaacttggcccgtgggcagcatcgtcaagagaacctgcgcaacgcgttaaggatgattgataaccgtttcaatgccttggcgcaatgggacaatcctcagggtgatcgttattccgtcgagctggaaattatctccgtcgagatgaatgttggctccgcagggaatgaaaataccttccctgcaattgaagtgttgaaaaccagcgttattgataagaaaaacaataagcgcatcgagggcgttgtaggcaataatttctcctcctacgtcagggattatgactttagcgtgctgttgttagagcacaacaaaggccaacaaaaatttggcattccagaaggttttggtgaattgcacggaaagctcttcaagcattttgtgaattccgaagcttataagcagaactttagtaagccgcctgttatctgccttagcgtttcggacaataaagtctatcgccgcactgagaatcagcatcctgtacttgggttcgagtatcaacccaatgagtcgtccttgacggaaagctatttcaagaagatgggcttgcaggttcgttacttcatgccttctggcagcgctgcacccttagcgttctatttctttggcgatttgctcaatgactacaccgctcttgagttgatcagcaccatcagtacgatggaaacgttccagaaaatttacaggccagaaatctataatgccaatgctccagccggccaacgttatcagccgaacttaaagaaccaagatcactcgttgactcgcgttatttacgatcgcgaagagcgtagccgtctggccattgagcagggtcgctttactgaagagtatttcataaaaccataccaatccgttcttgaacaatggtctgctagctgcggcctctga

SEQ ID NO: 337332 - DNA, 666 bp, Pseudomonas aeruginosa
atgccggatctacagcgccccaaactgagcctaccgggtggcgccgaaaagctgctactgcactcctgctgcgcgccttgttcgggtgaggtgatggaagcgatcacggcttccggcatcgactacaccatctttttctacaacccaaatattcatccggcaaaggaatacctactgcgtaaggacgagaacatccgttttgctgagcagcatggtgtgccgttcgtagacgctgactacgacgtcgacaactggttcgctcgagccaagggcatggagcatgaaccggagcgcggtgtccgctgcaccatgtgcttcgacatgcgcttcgagcgcaccgcgttgtatgcctacgagaacggcttctcggtgatttccagttcgctgggtatctcgcgctggaagagcatgcaacagatcaatgactgtggtcagcgctcagcggccaaatacgctggaatccgctactgggattacaactggcgcaagggtggcggtgcggcgcggatgatcgagatcagcaagcgtgagcgcttctaccagcaggaatactgcggttgcatctattcgctgcgcgacacaaaccaccatcgcaaggccacaggccgcgacatcatccggatcggcgtgcagtactacggtgatgacgatgcctatgacgactga

SEQ ID NO: 337333 - DNA, 1455 bp, Pseudomonas aeruginosa
atgagcctgctgaaaaaggcactacacgaacaacgcttcgtgtgtgtcgtcgaattcgttcctaagcctgctgtagagcacttcgccgcgttcgagaagttgatgcgtcatgaaaccttgtgcggctggccaatggtcgctgctattgctgatcgggttgccagcgcctccgatatcgtgccgctggatgctttcggcaaactcgacaagccagttcctgcgctgatccacttttcgggcaaggacagggggcgcgaagcacttctggagcagttggccaaaatggacgctatgggcctggatcagttcctgctgctcagcggtgatcggctacccggccatgatcctgggcaaaggcccatacgctatctggagtcggttcccgcattgcagatcgttcgccaagccaggcccaactggctactgggagcggccctcaacccattcaagtatcgcgaggaagaaggcggggcgcagtacttcaaggcggagaagaagctcgccgccggtgcagacttcttcacgctgcaattgggcttcgacgcacagaagtacattgaggcactggcgtgggtacacagacagggtactccggtacctatgatcgcatgcgttatgggcctcacccgtaatcgtgcagccatgcttgagcatgttcctggggtggtgatttcggcgtccatgcgtgcagtgctggcatccgaagagggtgtgtctaaagcctatgccaaggcacgcagcaccgatcgcctcgcattgcaggtcatcggcctgaaactgatgggatacgcagggattcacttgtcaggaatccatggcgtggaacaactggaagaactgcagcgcgcgatagaagagcagcagacacaggttcaaacgctagaacaatggtttgcggcctgggaagccagctggcagatcgaagggttacccatgacgaccttcaaccctgaaggcgccgattggcatatgggtgaatcccgggtcaacgcttcagcgaaagaaaggctgcgctatcacttgctgtcgggcgttcattctctggtgttcaaccgtagcaactatgccagccgaggactcggttgggcggtacagcgacgcatctggagtactccaagtggcgcccgctggttgcatcaggtggaacgtagtctgaaacggccactggttggatgtgacacctgtggcagttgccgccttgaagacaccctgtatgtctgcccggaaacgtgccccaaggggctagccaatggcccttgcggaggcacacgcctcaaccgttgcgagttcggtgatcgagagtgcatacacagtgtcaagtatcgcaccgctaaaagcgtcggccggactcctgtgctgaccgaacgactgatcccaagcgtggaaatcgcatccagataccagagctcttggcctcgctggtttgctccccctcacgaaggcggagaactatag

SEQ ID NO: 337334 - DNA, 1992 bp, Pseudomonas aeruginosa
atgcatgcaacaacggtgctgtacggccaggttcttgtggtgttggccattaccctgtccggggtatggggtgccacgcagtggacggctgccgcgctcggctatcaggcccgcctgggggcaccctggttcgatctgctgggcacgccggtctatcacccctggcgtctgttcgagtggtggtttgccttcgatgcctatgcaccggacatattcaacatcggcggcagcatcgccgcctgtagcagcctgctggcattggtggtggccatcggcatggcgatctggcgcgcacgccaagcgcgccgtgtcaccacctacggctcggcgcgctgggctgatgcggatgaggtgcgcaaggctggcctgacgcagcccgcgggtgtgttcctcggccaattcgacgatcagtatctgcgtcacgaaggccccgagcatgtgctcaccttcgcaccgacccgctcgggcaagggcgtcggcctggttgtacccaccctgctctcctggccggcctcggcggtcatccacgacatcaaaggcgagaactggagcctgaccgcgggctggcgttcgcgcttctcccactgcttgctgttcaaccccaccgacctggcctcggccgcctataacccgctgctggaagtacgtcgtggtgcacacgaggtgcgcgacgtacagaacatcgccgacatcctggtcgatccagagggcgcgctagagcggcgcaaccactgggagaagaccagccatgcgctgctggtcggtgccatcctgcatgtgctctacgccggccaggacaagaccctgcgcggcgttgccaacttcctctccgacccggcctgcaccttcgagttgaccctgcatcggatgatgaccacgccgcacctgggcgatgcaccgcatccagtggtggcctcggccgcgcgggaggtgctgaacaagagcgacaacgagcgctcgggcgtgctgtccacggccatgtccttcctcggcctgtatcgcgatccgacggtggccgaagtcacctcgcgctgcgactggcgcatcgccgatctgatctcggccgagcatccggtatcgctgtatctagtggtgccgccctcggatatcagccgcaccaaaccgctgatccgtctgatcctcaatcaggtcggccggcgcctgaccgagtcgctcgacggctccgacggcatcgagcgccggcacaagctgctgctgatgctcgatgagtttccggcgctaggacggttggatttcttcgagacagccctggccttcatggccggctatgggctgcgcgccttcctgatctcgcagtcgctgaaccagatcgacaaggcctacggccagaaccactcgatcctcgataactgccatgtgcgggtgaccttcgccaccaacgacgaacgcaccgccaagcgcatctccgagaccctgggcactgccaccgaactgcgcgcgcagcgcaactacgccggccaccgcctggcgccctggctgggccacctgatggtgtcgcgccaggaaaccgcacgcccgctactgaccccgggcgaggtgatgcaactgcccagtgacgaggccgtggtgatgctctccggcctcgcaccgatccgcgcgaagaagctgcgctacttcaccgacgccaacttccagagccgagtgctgccggcgccgcgcttgcagccgggccattacgccgatgcaccgttaccgcgcgcggacgactggagcggcctggccgtgcctgcggccgttacagcatcgccgaccgtcctgagcgatgactcgaccatcgaggacggcggcccgcgccgtcagcacgaactggcggaactcgcccagttgccagatcacgacgagctgaccagcgacctgctgctgctcgacgaggacgacattcccacgcccttccccacccagccggatccgcgcctacagcgcgtggcgcggctggccgccctggaccctgacgatggaatagccctatga

SEQ ID NO: 337335 - DNA, 435 bp, Pseudomonas aeruginosa
atgagccgagcccgcctcaacctgtttatccaacccgagcatgccaagcgcctgaacgaactggcgatcaccaagggcgtatcgaagtcctcgatcatcgccgcggcgctggcctcctggctgtcgcccgagtccggcgagcagcgcgaggtggccatggccaaacgcctggattgcctgtcacgtcagttcgagcgcctggagcgcgaccagcacatcctgatcgagaccgtggcgctctacgtgcgctactacctcacggtcagcacgcctgtacccgaggctcaccaagaagcagcacgcgcgcagggcaagctgcgattcaaccagttcgtcgagcaactcgggcgtcacctgcagcgcggacgcagcctggtcagagacgtgcacgaagaggttcaggcagaggcccaggtctcgggagagcgtccatga

SEQ ID NO: 337336 - DNA, 1032 bp, Pseudomonas aeruginosa
atgactgtcgcctcctccccaatgctgagcgctgcggcaacgtccctggatcgccgcacgcgcatgttgcgcacggcgatgggcccgctgatcgctgccgccctggatgacccggacgtggtcgaggtgatgctcaaccccgacggtctgctctggctggatcgcctgtcagttggccgcgcccggttgggcacgctagcggctggcgacggtgaacggatcatccgcctggtggcagcgcatgtcggccaggaggtacatcgcaacaagccgctactgagcgccgagctgccagagactggcgagcgcttcgagggtgtgctgccgccggtggtggccgggccgaccttcgccctacgcaaacgcgcagccggcgtcatcccgctgcagcagtacgtggccgacggcatcctcagcgcggcgcaagccgagtacttgcgcgtggccgtgcgcgagcggcagaacatcttggtggccggcggcaccagcagcggcaagaccactctagccaacgcgctgctggccgaggtggccggcagtggtgatcgcgtgctggtgctggaggacacggtcgaactgcagtgtccagccctcgatcacgtcgccctgcgtaccaagcctggcgtggtctccatggctgacttagcgcgcagcacgctgcgtctgcgccccgaccgcgtggtggtcggcgaggtacgcggcggtgaagcactggatctgatcaaggcctggggcaccggccatccaggcggtatcgccaccattcatgccggctctgcacagggcgcactgctgcgcctggagcagctaattctggaggtcgccctgaccgcgccgcgggcgctgatcgccgacgcggtcaacctggtggtgtttctcgccggccgtggccgcacgcgctatgtccagcagatcgcccgcgtcaccggctatgacgagcgcggctatcaactcacttccatcgctcccgcattcattccttcgcttactcaggaaaacagccatgactgcctgccatccccacgttgctaa

SEQ ID NO: 337337 - DNA, 342 bp, Pseudomonas aeruginosa
atgactgcctgccatccccacgttgctaatcgtcgtcgcctcgtcggcgccttgatgctcggtgccctatgcctgagcgcctccctgcccgtgctcgccgctggctccggcatgccctgggaaggaccgctgcaatcgatccttgattcggtacaggggccggtggcgcgcatcatcgcggtgatcatcatcattaccacaggcctgacgctggcgttcggcgacaccagcggcggctttcgcaagcttatccagatcgtcttcggtctatcgattgccttcgccgcgtcgtcgttcttcctcagctttttcagctttgccggcggggcggtgatcgcatga

SEQ ID NO: 337338 - DNA, 273 bp, Pseudomonas aeruginosa
atgaacggcgagcgcgaactcatccccggtttcgaggtgccgctgcaccgctcgctggccgagccgattctgctcggtggagccccgcgcaacgtggcgatcctcaacggcactcttgcggcagtggtcggcctgggcctgcagctgtggctgcctggcttggcgctctggttggtaggccactcgctggcggtgtggggtgcccgtctggacccgcagttcctgcaggtgtttgcccgacatatcaagcagccgtcgctgctggatgtgtga

SEQ ID NO: 337339 - DNA, 2430 bp, Pseudomonas aeruginosa
atgctgaacctcaccgaataccagcgccgccccgcccagctttcagactggctgccatgggccggcctggtcgcacccggcgtcgtgttgaacaaggacggttcgttccagcgcagcctgcgctttcgtgggccagacctggacagcgccacacagggcgagctggttgccacctcggcgcgcctgaacaatgctctgcgtcgccttggctcgggctgggcgctatttatcgaggccgagcgcctggcggcagccaactaccctgacagcgactttcccgagccgctgtcctggctggtggacgaggagcgccgtgccgccttcgaggcccagggcagccacttcgagagtaactaccacctgacgctgctgtacctgccaccggaggaatcgcgctcccgcgccgccgacctgctctacgagcaccggccgcagcgcggcgtcgactggcgcgaacggctgaccgccttcgtcgccgaaacggatcgtttcttcgacctgctggacggagtgatgtcggagcttgcctggctcaatgacagccagacgctgacttacctgcatgccacgatttcgccccatcgccagcgggtggctgtacccgaggtgcccttccacctcgatgccctgctggccgacagtccgctgaccacgggcctggagccacgcctgggcgagcagcacctgcgcacgctgtcggtacgtggcttccccacctcgacatggccaggcgtgctggacgacctcaaccgtctaggcttcgcctatcgttggtcgacccgttttatctgcctggagaaggacgaggccgagaaggaactggtgcgcctgcgccggcagtggttcgccaaacgcaagggcgttctggcgctgctgcgcgaagcgatcttccaacaggaaagcccgctgctcgacagcgacgcggcgaacaaggccagcgacgccgacgcggcgctgcaggaactcggcgccgaccagatcgccttcggctatgtgacggccaccgtaacggtgagcgatgccgacgcccagatcgccgacgagaagctgcgccgggtcgagcgggtgatccagggacgcggcttcgtcgccatccccgagagcctcaacgcggtggaggcgtggctgtcgtcgatccccggcaacgcctacgccaatgtccgccagccgctgatctccacgctcaatctggcgcacctgatgccggtctcggcagtctgggctggcccagcacgcaacgaacatctggaaggtccgccattggtgatcacccgcaccgatggcgcaacaccgtttcgcctggtcacccacgttggcgatgtcggccacacgctggtggccggccccacgggcatgggcaaatcggtgctgctggcgaccttggccctgcagtttcgccgttaccggggctcgcgcctttttctgttcgatatgggacgttcgctgcgcgcaacggtgctgggcctgggtggcgagcactacgaccttggaggcgacggcgatctggccttccagcctctggcgcgcatcgatcagccgggataccgagccagggccgccgagtggctggaggctcgcctgctgcaggaaggcgtggccgtcggccccgagcagaaggccgcactgtggacggcactggacagcctggccggcgcgccggaggcgcagcgcacgctgaccggtttgtcggtgctgctgcaggacaacgccctgcgccaggcgctacaaccctatgtgctgggcggtgctcatggcgcattgctggatgccgatcaggatcggctgggcagcgccgacgtccagtgcttcgagatggaggaactgatgcacagcaaggcggcggtggccgccgtgctgagttatctgttcgcccgcttcgaggagcgcttcgacggcgcgccgaccctgctgatcctcgacgaggcctggctatttctcgacgacccgctgttcgccgcgcgcatccgtcagtggctcaagaccctgcgcaagaagaacgtcagcgtcatcttcgccacccagtcgctggccgacatcaaggattccagcatcgctgcggcaatcatcgagagctgcgccagccgcatcttcctgcctaacccacaggcgggcgagccgcagatccgaggcatctaccagagcttcggcctcaacgaccggcagatcgagatcatcgcccaggccacgcccaagcgtgattactactaccagtcgcgcttgggcaaccgcctgttcgacctcgacctagggtcggtagcgctggccttcgccgcctcggccagcccggccgagcagcgcgagatcgaccgcattttgcacacgtccggtgccgccgatttcgcccctgtctggctgcgacaccgcggcttgaactgggctgcagacctactcacagcctatccctcgtcacgccaggagtgcctgccatga

SEQ ID NO: 337340 - DNA, 735 bp, Pseudomonas aeruginosa
atgagatcccctgttcaccgtttcccctgcgccacgctgctggtatttggcctgctggccgtgaagccggtaaacgctttcaccgtaattgatccaaccaacctggcgcagaacacgctgactgcggtgcgcaccctggagatggcgaacaaccaggttcgccagttgcagaacgagacccagatgctgctgaaccaggcccgtcatctgcagcgcctggactacaacgtggtcagccagttgcgcacgagcctggccaataccgagcggctgctcgccgaggcgcaagggctggcctacgaagtgcagcgcctggatcaggagttcagccgactctacccggacgagtacaccggcgacgtcagcagccagcgcctggcagaagaggcgcgggagcgctggcagcagggcctcgacgggctgcatacggcgctgcgcgtgcaggcacaggtgacgcagaacctggccgaggatgaaaacgccttggccgctctggtgcagcagagccagtccgcgggtggcgccttgcaggctgcccaggccaccaaccagttgctggccctgcaggccaagcagtcgatccaggcgcagcaactgcagatcacccagaaccgcgccgtcgccctggagcttgcccgtcagtctgctgctgccgaggaagcccgcgaacgacgacgccgattcatgggcaacggcacgccctacaccccctaccccgtgcagttctatcgctag

SEQ ID NO: 337341 - DNA, 186 bp, Pseudomonas aeruginosa
atgagactcctgacactgctgccgctgctggtgctagccgcctgtggacaggctgacaacggcgtcatggctcggcaagaggatgcgcctgaacgcttctactcgggcggcgcccatccaggcgagtttctccgtcctgccgacctaaccgccataccagcaagtttcgacgaggacgtgcaatga

SEQ ID NO: 337342 - DNA, 1161 bp, Pseudomonas aeruginosa
atgaatgacgtcagcgtgatcgaccgattcctcgaggtgttcgggctgtatatcgacaccggcttcggcctgctcggcggtgaggtggcctttctcaccatgaccctggtggtgatcgatatgaccctggccgggctgttctgggccatgggcggtgaggatgtcagcgccaagctgatccgcaagaccctctatgtcggtgccttcgcctttatcatcggcaacttcaatgccctggcgaagatcgtcttcaactccttcgccgggttgggtctgctggcctctggttccgagttgagtcatgcggagtttctgcagccagggcggttggccgcgattggggttgatgctggagggccgttgctcgagcagataagtaagctcagcggttttccggaagtcttcggcaacctgcacagcatcctggtgctgtttctcgcctggctggtggtgatcgtcagtttcttcttcctggccattcagctgttcgtgaccttggtcgaattcaagctgaccaccctcgccggcttcgtgctggtgccctttgcgctgtggaacaagacggcctttctcgccgagaaggtgctgggcaacgtggtcgcgtccggcatcaaggtgctggtgctggccgtgatcgtcggcattggcagcgggctgttcgccgagttccaggctatgccggacgagccctccatcgaccatgcgctggtgatcatgctcgcctcgctggccttgctcggcctgggcatcttcggcccaggcattgccaccggcttggtctccggctcaccgcaactgggtgctggtgcagcagccggtaccgcgctaggcgcggcgggcatggctgctggtgctgctgcagtcgccacaggtgtcggcggcgcggtattggccggcgcacgtatggcacccggtgcagcgcgcttggcaatgggcggcgctcgctctctggcaggagcttcttccagcgctgcagcaaatggcgccccagcagcttccgatcctgcaaccgcccctgccaaacagcccgactgggccaggcgcctgcagcgcaggcagcaactctcacaggccaccagcacggtcgcccacaccttgcgtggtggcgatggcggtggctcatcacctgggccgcagatccgcgacccatcgaattcgtaa

SEQ ID NO: 337343 - DNA, 708 bp, Pseudomonas aeruginosa
atgcgattcagacgtccacgggtgcgctacagcgacactcctcaacctgtcaccccttaccaggcagcggcacaggcatgggacttgcgcatgggcagcagcctggcgcaggcacgcaattggcggctgatggccttcggttgtctgggcctggcgctgctgatggccggcgggctggtctggcgttcggtgcagtcgacggtgacgccctatgtggtggaggtcgacaaccttggtcaggtacgcgcggtcggcgaagccgccagcccttaccaaccccaggatgcgcagatcgcgcatcacctggcgcgctttatcgagcaggtgcgctcgctatctatcgatccggtggtggtacggcagaactggctggaggcctatcactccaccacagaccgcggcgcggccaccctcaatgattatgcccgcgccaacgcccctttcactcgggtcggcaaggagactgtatcggtggaagtcaccagcgtggtgcgtgccagcgacagctcgttccaggtgcgctggatcgaacgccgtttcgtgaatggtgcggccgccggcctggagcgctggacggcggtgatctcgctggtactgcagcctccgcgcacggaggaaaagctgcgccgcaacccgctcggcatctacgtcaacggcctgtcctggagccgcgagttggacactacggaaggagccaagaaaccatga

SEQ ID NO: 337344 - DNA, 987 bp, Pseudomonas aeruginosa
atgaaaacctccctgaacctctgcctctgccctttgctgctgagcgtgctggccggctgcgccagccaggaaccgccagtgatagcgctggatgaaccgttagaagcgcagcgcctgccggagccgcccaagcccatcgaggtagtggaagtacccaagcccctggccctgcccgcccagctcaaaccattgccggaaactcagcgcagccaaccgaccaaggaaccggccgatgagcgcgtgcgggtctcgcgcgccaatcgcgaggctcgggtggcaccgagccgggaaggctatatcaatgccatccaggtctggccctactccgatggcgcgttgtatcaggtgtacaccagcccgggtcgggtgacggcgatcaacctgcagcccggcgaagagttgatcaccgtggccgccggcgacaccgtgcgctggatcgtcggcgacaccaccagcggaagcggagacgagctacgcaccagcgtgctgatcaaaccgacgcgggtcgacctgaagaccaacctagtgatcaccaccacgcgccgcacctacctgatcgagctgagttccaccgagcaggcctggatggcgtcggtgtcctgggactacccgaaggatcgcatgctcgccctgcaacaccgcgccagtgaagcccaggctgcggcaccggtggatgccggcctggcgctggagcagctgcgctttcgctatgcgatcagcggcagcaatccgccctggaaaccgctgcgcgccttcgatgacggtcgcaaggtgtatatccagttccccgccggtatcgcccaaggcgagctgccgccgctgttcgtaattggccccgaaggtgacgggcagctggtcaactatcgcttccgctcgccctactacatcgtcgaccgtctattcggcgcagccgagttgcgcctgggcgccgacaagggtgacgtggtgcggatcgaacgcaccgatggcgtggcacggaggcgctga

SEQ ID NO: 337345 - DNA, 1263 bp, Pseudomonas aeruginosa
atgacgggtaaggacaacgaacaaaacgcggcaacctcactaccgaccaaggaggcgccggagtcgctggagctgcgcgccaagcctcgcccagtcacccgcctcaatccacgcatgctggcggtagtggtgggtggcctatcggctgcggtactcggtgccatgctgtggtcgctgcaaccgcaacatcgccgccagggcgccgagcagaacgagctatacaacgtcgaccgcgtggcacgctccgaggggctggagcagttgccggcagactactcgcagttgccgcctccacctgcgcccgagataccgcaactggggccgccgctgcccggcgatctgggcgggccaatcctcagggcggagcagcaggcgcaaggttatggacatgggccagatgccgccgaagcagagcgtctggccctgctcaaggaagctgaggaagccgcgcagtcctcggtgtttttccagaccagcagcgcgcggaaatcgaacgtcgcatctgttagtggcgctcaactcgattccccggctctgggtatggcttcgtcaggcgcagtagccgccgcaggaacaccaacgcagcaggagcggaacgaggcgtttctcagtaaatccgtaaacgcacaaatccgtaattccggattgctgcagatgccagaatcgccttaccaggtgatggccggcaccgtcatcgcggcagcactggtaactggcatcaagtcggatctacccggcgacgtgatcgccacagtgaccgagccggtctacgacagtgccaccggtgagcatgtgctgatcccccaaggcgcacgcctgctcggtcgctacaacagccaggtgaactacgggcagagccgcgtgcaggtggtgtggcagcgggtgatcctgccggacacctcgtccttccaactcgacaacctggtcggtaccgacgccgccggctatgccggtcttgaggatggcatcgactggcactgggatcggatcgtcgccggcgcagccatgaccagcctgctgggtatcagcgccgagctggctgcaccgaccagtcgcaccgatggcgaccgcatcatcatcgccgggcgcgacagcctgcaggacacagtgaaccaggtcggccaggaggtcacccgccgcaacctcgatatccagcccacgctgacccagcgccctggcctgcccctgcgcgtgatcgtcaaccgcgatctggtactgcgcccctatcagcctttctccactcaacagaggaacccgcaatga

SEQ ID NO: 337346 - DNA, 234 bp, Pseudomonas aeruginosa
atgagcacgaccaagctgcgcctcggcccactgccgagaaccgagaacctgaagctgaccttcacctgcccggccaacctgaaggccgaccttgagcgctacgcggcgctgcactcacagacctacggtgaagcagtcgacgccctgacgctcattccgcacatgctggaggccttcatggcgagggatcgggtgttcaggagaacaaatacacaatcttgcagcggcaattga

SEQ ID NO: 337347 - DNA, 288 bp, Pseudomonas aeruginosa
atgaccatgttcaacccaccgcatcctggtgaaaccctgcttgaggacgtgctccccgaactgggcatcagcattgccgaacttgcccgccgccttggttttgcgcgggaatccctgtctcgcatcttgcacggccatgcgccggtcagtccggacttggctgttcgcctagagttggccggcatcggcaaagctcgcacttggctcggagtgcaagccgactacgacctttggcaagccaggcatcgcgaacagccgcacatcgagcgctttgctgcgattgcttag

SEQ ID NO: 337348 - DNA, 234 bp, Pseudomonas aeruginosa
atgactgtcgtgctgcaggttgcaacgcctgaaggtgcctgtgggaggattcttaccagtggcactgactacctgttccgctaccacgaggacgccaaggctcaggctacggaactaagcaatcgcagcaaagcgctcgatgtgcggctgttcgcgatgcctggcttgccaaaggtcgtagtcggcttgcactccgagccaagtgcgagctttgccgatgccggccaactctag

SEQ ID NO: 337349 - DNA, 258 bp, Pseudomonas aeruginosa
atggtgattcgctcaagccgcaaggccatggacatgcgccaggacgacgccgcgggcagcatcggcgtctccgagaacttcctcggcaaagtggagcgtggcggcgagtcggttcattgggggaagcttttccaagtcatgcgggagctgggacttcaagtctacgttgatgtcccggatgaagtcgcggaacaaactcgacagaatctggaaaggcttctcgaaaaagctgaacaaaagcaatctgcccagagatag

SEQ ID NO: 337350 - DNA, 336 bp, Pseudomonas aeruginosa; identical to SEQ ID NO: 328877

SEQ ID NO: 337351 - DNA, 960 bp, Pseudomonas aeruginosa
atggctgagctgtacgacgggccgatcgtcgacgcccatcatcatttctgggacccgcaggcgaactaccacccctggctcgcggaggacgccaagattccgttccgctacggcgactacagcgcgatcaagcgccgctacctgccggcggactacttcggcgacgtcggcgcacaccgggtggtcgagacggtctacgtggaaaccgagtgggacccgcgcgatccgctcggcgaaacccgcttcgtgcatcacctcgccgaacgccatggcgcgccccacgcggtggtggcgcaggcctggctggacgcgccggacgccgccgaggtgctggcggcgcaggcgggcttcgcacgggtccgcagcgtccgccacaagcccggcggtccgcaacgcccgcaacaggtcggcgagctgcgcagcctgatgagcgacgagcgctggcgtcgcggctatgccgagctggcccggcacggcctgcacttcgacctgcagacaccctggtggaacctcgccgaggccgcatgcctggcgcgcgacttccccgatacgctgatcgtgctcaaccacgccggcctgccgtccgatcgcagcgaggaggggctggccgcctggcaacgggccatggcgcgcttcgccgaatgccccaacgtggcgttgaagatctccggcattggccaggccggccggcgctggagcgtcgaggacaacgcctggatcgtccgcgaaagcatcgccctgttcggcgtcgagcgggcgatgttcgccagcaacttcccggtggacagcctgtgcggctcgttcgacgacatctatggcggtttcaaacgcatcgtcgccgacctgccgtacgccgaccaggaacggcttttccatagcaacgcgcggcgcatctaccgcaccgtacccgacaccgtgcgcctgcagcaggcgtcgcccgacccgaggacttccccatga

SEQ ID NO: 337352 - DNA, 252 bp, Pseudomonas aeruginosa
atgaacgtacgccgtaagaatagaaccctcatagataggctgaaagcctactatcgtcatgcggaaatggatgctgcaaagcttcctccattctatgtcgcaggggatggggtcatgtacgctcagcctaaggaagttttgcgctctacagcagtgattaatcagctaactgcttttgagtcgttgcggcaggagcttaaggtaaaagaaaaggaaaaagaaaacggctctttggttgttgatgggctataa

SEQ ID NO: 337353 - DNA, 522 bp, Pseudomonas aeruginosa
atggccattctcgttgatctgctagaggatggcgtgatgactgattttctcgaaatacgtgaggcatacactaagtacaaggccgctcaggacgcctactggtctgaccttcagaagaaggcttgggccatctatattggcttcgagcgtcatctccgtcttgagcagcacaaggtgacggttcccggcgaggatgcgcagccttatgtccaagtcggcagcatggatggcgaccgctttgtaagggctctggcccctcagttcagcggagcagatggaaaggtggaattcacgatcagcctgttggttgacgaacaccccacctcctaccccaaaaagagaatccttattccggcctctatcggaaaagagtcgggccggtacatggtggagattaaaggtaggtcgggacctatcagtgtctccataggccctgacttcccagtcgatcagcttggcgatttgtacgaaatgatcgctagagacgtgatcgcgtcgatggacccatcggcattcgcctag

SEQ ID NO: 337354 - DNA, 1341 bp, Pseudomonas aeruginosa
gtgcctgaatcgctttcccttctgcacccattgaacgtaaagatcgtggagttccttgaggatgaacacgatctgcaattcaaggttgagtttccggcacccgagttctgcacctcctgcggagctatcggccagtcgatccgcttttctaagaagctgaccaagtacgttgacctgccaatcaggggcaagcgcacggtgctctggggtatgcgtcggcgctacaagtgcaagacctgtggcaaggtcttctcgccggccctgctggacttcgacgagaagcaccgcatgacgaagcgctgccatgcctacgtaatcaagcacgccatgaccagcacgaactcagcggtagcccgcgatcttggcgttgatgagtcggtggtgcgccgggctttgcgcgactactgcgccgagcaggaggcgggctacaggccaatgcttccgcgtgttcttgggattgacgaactgcttgttggtggcgagtaccggtgcgtcctgatcaacctggaagaaaggacgatcatcgacgttctgcccaaccgcaagaagatcgtgatccacaactacatctccaatatgcgcggccgtaacagggtccagatcgtttgccaggacatgttccacccatacaaagacgtgtcgctagagctgttccctaacgccacagtcatcgtcgataagttccacgttgtccggtacgccaacgatgcgatggaccagatacgaaagagggtcaagcgaggcctcactgttccgcaaaagcgcaccctgaaaggcgaccgcaagctaatgctgatgcgccgacgtgacctggatgtttgggcgcaccttaagatcaagacgtggttcgatcagttccccgagctaggcaccgcctacaacctcaaggagggcttttacaacatctggaatagcaagacccatcatgcagccaggcaagcctatgacgagtggcggcggcgtatccctgtagagcaggagaaggactggagagtcgtcacaaccatgatgaccaactggggcgagtacatcttcaactacttcaggttcattccccggcggtacaccaacgcgctaaccgagtcgatcaaccgctatctgcgcgacgtgaaccgtaacgcgcgcggactgagcttcgagatgttccgcgccaagatcatgttcaccctagagcacaaagtgaagccgccagaaaccaagcggctagcgccgttcctggccagggaaatcatggcagtcgagcccatcgaggacgagctggtggattacggcgttccgatattcagcatcttgcagctgtacgcggagccggagaccagagccatccgcgaggacgactaa

SEQ ID NO: 337355 - DNA, 264 bp, Pseudomonas aeruginosa
atgagcaagttcaaggcgggcgatctcgctcttaatctgcaagacatccccagctgcatcagtgcgggagtggtagtcgagttgatgtctcgacttgcccctggtgatctgtttgccgaagacggccagacctttcgggtgattcggccagcttggtgggtgctccatgaaggagaccggctctacatacctgaacggtatctcatgcccctgcgcggcgacttccagcccgagcagcagaagagcagggaggtggaggtatga

SEQ ID NO: 337356 - DNA, 471 bp, Pseudomonas aeruginosa
gtggctgatcgaatcgccgtaaacagcgccgcgcgcctgtccgaggcgatcacccgcctgaccgcgatgtaccgcgagaaaaagtacgtcgtggtttcccttcgccccgggaaggacagaacactggaccagaacgccctatggttcgcgctctaccagcgaattgcccagatgaccggaatggatgacgtagaggacgctcgccggtactgcaagctccatttcggtgtgccgatcatgcgagcagccgatgccgatttccgcgatggctggaaccgcctgttcttgcacctggactacgaaaccaagatccgcctgatgggcgcctgcgccatgttcggaccggatggcttccccgtgaccaggctcttcaaccgagcccagggcatcgcctacaccgacgccatcgttgccgagttctcggagaagggcgttttcttcaacgatcttcttagcgaggacgcagcatga

SEQ ID NO: 337357 - DNA, 216 bp, Pseudomonas aeruginosa
gtgcctaagttcgagctgatccgcatggaaggcctgcgcacctacggtcggcaagttgaggccaatacatggcgcgaagcggaacaacagtgccgcgacggcgagatcgtaaacggcgaactgatcggtgtgtacgactgtgacccggtaaccgaggccgtctgcactgcgcgcaatgacgtgatggttgagagcctgggggtgtgctgtggctga

SEQ ID NO: 337358 - DNA, 1386 bp, Pseudomonas aeruginosa
atgcgtgatccctacagcctcgaagccgagcatggggttcttggcgcgatgatgcagcgtccggagctaatcgacgttcttgccgatgagctgaccccggagtcgttctatttcgcagacaacgctgaggttttccgggcgatcatggcggtacgctctgccaacaaggcggtcgacttcctgaccgtagctgagcagcttggagcgcttcctagcgagaccccggcactggcttactgctgcgagatcgtgaagaacactccgagtattgctagcgcctcgacctatgcccgtatcgtccgtgagcgcgctgttgatcgggcactgcatatcgctgcccaggacatttccgagattgccagttcgagccaggagaccgctgaaaaggtctctgctgctcatgccgcaatcatggcagtggatgctggcgaaactagcgttgacgttcagaaggcttcagatgtcctggcaacccaggttgaggtctggcagcagcgccacgaccgctatcggagcggacaaaccctgatgggtatttcttctgggctgactgatctcgacgccaagatcggcgggttcctgccgggccaactgattgtcgtcgctggccgaccagcgatgggcaagacaaccttcgcaatgtcctgctcgatccatgcggcgctcaaggagcggaagtcagtgctggcgcttagccttgagatgagcaatgggcagctcattgaccgcgccgttgcttcagtcggaaagattccgctgaacatgatccgaaacggtaccgcatgcgaggagtacggtgccgagctgggtgccgcatcgcggactatcagcatgtccagcctgtacctcgcggacaagccagccctgaatacgatcggccgagttcgcgccatggcgcgccgtcacaagatgcgctatggactcgacatgctgatggtcgactacctgcaactcatggacggggagggggagaaccgcgtcaacgtcatcagctcaatcagccgcggcttcaagctcctggcaaacgaacttggcgttccagtgattctcctaagccagctttcccgaaagtgtgaggagcgccctaacaagcgtccgatccaatctgacctccgcgaatccggcgctattgagcaggacgcagacatcatcctctttgtgtatcgggatgaggtctacaacgagcataccgagttcaaaggcgtggccgagatcatcatcgcaaagggacgcgaagttgaaacggggacggtgcgcgctgcgtttcttggtcagtacaaccgctttgaaaacctgtctgccgagtggcgtcctgatgaagtggctagaccgcaaagggtaactcgactgtctgatcgctacagcagcaaaggagcggaccaatga

SEQ ID NO: 337359 - DNA, 1461 bp, Pseudomonas aeruginosa
atggagaagggaatcccctacgaaggatttacaggctctagcaaagagcagctccagacgctccttccctttaatttcgatgagcccgggcaggagcccatgaaaacccaagatttccccccactacccgcccccgatcagcctttgatgtttgcagatttgtttgcaggctgcggcggcctctccctcgggctctcgctctcaggcatgaatggtgtgtttgccatcgaacgcgacaagatggctttctcgaccttatccgccaacttgcttgaagggcggaaagtaccagtgaaccaattttcatggccatcatggctagagaagaaagcctgggcaatcgacgaagttctggagcagcacccgaacgaattgacccagctcaagggcaaagtacatgttctggcaggaggccctccctgccaaggtttcagctttgcgggaaaacggaatgaatccgatcctcgcaacaagcttttcgaaaaatatgtagaaatggtccagtcgatccgaccttcagcccttgttcttgagaatgtacccgggatgaaagtcgcgcacgccgcaaaaaaatggaagcagctgggtctctcaatcaaaccccagtcctactacgaaaagctggtagaaggtctggacagaatcgggtacgaagtcctaggcaagatcgtcgactcctctcgcttcggggtgcctcagaagcgcccacgcctgatagtgattggactcagaaaggacctggcccagcacctcgaaggcggggtagcccgagcctttgagctgctagaggaagcccgacttatgcagctgcatgagcttggtcttcccgaggtcatccatgccgtggatgccatttcggatatggaaacaggccatggaggcacgaggccctgcaacgaccccgactctccgaagagattcgaagagattgcctataccggccctcgaacggcgttccaaaggctcatgcatcgaggctgcgatggcattatcgatagtttgcgcctcgccaggcacaagccagagatcaaggccaggttccaggcgatcatcgacgaccctaactgtgccaagggcgtacggatgaacgccgagatacgccaagcatatggactcaagaaacaccgcatctacccaatgcaagctagcgctccagctccgaccatcacgacactaccggacgatgtcctccactataaggaacctaggatactgaccgtacgagagtctgctcgactgcagtcattcccggattggttccagttccgcggaaaattcaccactggagggagccagcggaccaaggagtgcccgcgctacacccaagtgggcaacgcggtaccaccttatttggcacgagccgtcggcatggctatcaaggcaatgctggatgaagccgtgatgctcgccagccaacaggcagagcgtgaactagaagaaaaaatgatagccaccgcttga

SEQ ID NO: 337360 - DNA, 2151 bp, Pseudomonas aeruginosa
atggatagctcccaactggaagaggcacaataccctgccgcgcttgtcgactgggccggccatcactcaggaggggtaaaacggctgctggacgagaaaagcggccagccgaataagcagttgctacggacaaacctcctatcccgtcttcaggattgggccaataggcttccaaccgaggcctcaacttcccccaggattgtcctgctggtaggtggccctggaaatgggaagaccgaggcaatcgagtgcaccattcgctggctcgacgaaagcctcggctgcaatggcaggttgatcgacgaactctcgaaagccttccatccctctccaggctcagcagtcccacgactagcaagagtagatgctggccgtcttgccaggcgtgatgacagcctaagcattgacatcgtccaggacgcgtctgccaccgcaggtcacgagggaagcacggctcccgccctcctcatagatgagctaattaggctacttgatgggccatccagccaagcctatctctgctgcgtcaatcgtggcgtcctcgatgacgccctgatccacgcaatagacaacaatctagacaaggcacgtactcttctcgaagccattacacgggctgtaagcctggcgtatgacgctccctcttgctggcccctcgatggcttcccatcaattgcagtctggccgatggatgccgagtcactgttggttaagccggacgacgagcccgtgccgcctgccgagatactcctaagccaggccaccgcttccgagatgtggccagagaaaggaggatgccctgctggagacaaatgccccttctgctccagtcaggtcatcctcgtccgggatgagaacagggcctccctgctgaagatactgcgctggtacgagctcgcgagtggcaagcgttggagtttccgggacttgttctccctcacctcgtacttgctggcaggccaccatcccggagtgcacgacccggtaggaactccacaccagtccactccatgccaatgggcggcgaacctcgtcgacctcgaccaaaaggctctaacggcgaagaggcatggcaggcaatcgctaactgccattttccacctggccacttcgggctaccaacatgcactcttccatcgctgggacaagagcgcagccacctcgctccgccgcgacctcaaggaccttggcctcgagaaggaactcgacatggaggaagggcggaccctaatggggctcgtctatttcctttcggaacgtaaaagccactaccttccagcgaccatcgcccccctgctagagggcctggtcgaaactctggacccggccttcgcgagcccagacattgaagtagccgtgagtagtcgcagcacaatagtcctcggcgacctagatatgcgttttagtcgctccctggcaggcggcatcgagttcattcgcaagtatcaggtgctatcgccaaacgagctcgatttgcttcggcgcctatctgcttcagacaccatgctttcctcgcctagcatacggcgcaagaggccattggcagccagccgagcccagcacatccttcgtgatttcgcatgtcgcctggtacgcaggagcatatgcacgcgaacggctgtcgtggcggacgctccaattctggaggcattccagcaggtcgtcgaggacagcgacaagcaccatcacctcttcaaggtggtaaggcaagtaaaggaactactgaacactggcaaggagttcgaagtgtcgctaaccactaccttcggccagccacttcccccacggcaacgccaggcaacgcttgtggtccaacagagcccggtccggatgtctccccaaaacactaagggacgccctcacccgccaatctgctatctccatgtcggccaggggcaatcagtccagccagtcccgctcacctatgacctgttcaaagccgttaaggaattggagagaggactttcacctgcatccctaccacgcacggtcgttgcactgcttgacacgacaaaggcccggctatccggcccgattgtccgcgaccatgaactactcgatgatgcccgaatccgcgtcggcgcagatggcacagtggtaggtcgttcatcgattggcttcgtcgtcgaaagcccggagggcaatgtatga

SEQ ID NO: 337361 - DNA, 1545 bp, Pseudomonas aeruginosa
atgagccttgcggatttcaagcatgcgccctggggcaagtcgcatccgagctaccagaagacagctctggcaatcagccccgctcccgagtatgcgagctcagaagtcctgctagcctcgctctaccgaaccatcggctttgcatcagccagtgaagggagcgtgccgcaggcagggcgagacctggaccgacgcatccagaagctccgcgaaaaacgccaactcccaccagcaggagcgatagtcagtgtagaggcttggaatacagtgcttcatgggattctggagagtccaaagcttcccaaccagtcctccaagcgtttcctgcaggtaacgcccatcgtacccggggctgcactcttctccggatccgcccgactgagcagcaactcttggcctgccggcagcttgattcgccgcatggtctgcttggggtcgaaagactgcgaatctgcgcaacgactttggcaaagtctcttcgctgcactgagcgtcgatgacgacgatgatgtcttcgcacgctggctcgaccaagagacatcggcgtggaattcaggagcaagtaactgggcgctttcgccaatacccgcagacgagatggcaatgttggaggcctcggatttccagggaatccagttccttcctgctaggcgctttaccaaggacctgcaagccatcattcaggccaagggttccatgactcgtcggcagtggaccagcctcctcgaggcgttgcttcgcctggcagcagcatcccacgtaacctggttgtgcgacgtgcactccagaacgtggggctgcctttgggccgcactcacagatggcattgctccttctaacgaattggatacaaggcgcgcgctattcccggaagccccccagtacatgacgtacgggggcaaggccctccaaggcatcaaggacaaggtttccagctacctaaatgcccgcttggggatcaatgccctcctctggtctctggaccagataggggcaccctacaatggcaacctctcctcgagcgccggagtagctgcactgtgccaacatatccgccagcacaaggtcggtcttgctcgcctaggcacgcttgagacgattgccgatgtgcgtgggcaagaaggccgcgcgctgctttgcaagaaaggcataggctccaatctgctcgagtttgcacgtcacgtccttggtcaacgccaagctgcagtcccattgctgaggggttatgaccagggatacatcctgaagaaaaaaggcagcagtccatccagcccatgggtcgtctctctaggcccagtcgccgtgcttgccctggtccactgcgccctcgcaggaatgggtggcccccgctcggtccaccggcttgggcaacatctggaagcctatggcatggctgtggataggcatgacatcggtaggaacgaccttggtcatcagttgcggatgctcggtctggtgcttgatagccctgatgccgaaagtggcatgctgctacttcccccgttccccataaaccaagccagccagggcccggaatatgaataa

SEQ ID NO: 337362 - DNA, 5481 bp, Pseudomonas aeruginosa
atgaataaactcgcacactggctctcggacactatctacgagaaggtccgtggctcaactcaagggtttggaggcaccaaccttgagtaccgactgattttccgcggccctccgcttgagcttctcgagccgacatatgacgaactggcccgagatggagggattcaggtgccagatggggctggcggtggactggtgaccctgccggtactcctccagtatccggccggccagttacaggggccaagaccccgcattggagaatccggcaagtgcgaaaacgatcacttgctggatgtgcgcaacgaccctgccaaccctagttttattgccttggttcctccagggctgcacaacaacctctcgatcgagtccacgaccgatgagttcggattgggggcaactaccagcacagggcatgcatccttcgaacaatggtgggaggatggctttgtccagcaggcagtcaacgaggcattgatcgccgccggcataacggacgcccagatggatgacgccaggggtctggtccgtgcagccgcggcctcggtcgacgaggtggatccagacaagggcggccatcgcgccgcctggcgcctactctcccgcatctactcgatagcaaacgcgaatcaagggttgcctgcaggaacagcactatcactggcatgtggcctccccccgatgaaggagggaggaatttccgccaagacacagctttcggtcctgggaaaaatcgccgacgagcttgcagacggcttcaagactggcatcgagcgcctggcacaagacgcccagcagggggttgcgcaagcgctacgtaacctgctttcccatctccagtcgaattgcgacgtgcctacggccttcgagcgtgccacagcggctttctacctgccctgcgccgctgttgaactggcgccccctccatcctggtggacgacgctcaccaccgagcaatggacggaactacttgccgacgagcccgaagaagccgtcggcgagctaacgatccggtgcaccaatagcgtgatccccgcggggaagggcttgccagccgtagtgcgagataaggtcgagctagtgatttccacaagtgaggagagccagccaaaggagttcctgttgacaggaggctcccacggcaaggtcccgatggcattgccagcgggctccaacgggactaccagccacgttgaccctctcccctcctcccacaaagcgccaatgagctacaaggtctccgcggacggctgcaagcctgcaagcgttcgggtcatctctctcgcgagctggaagcccgggatacttgttacctgcaggctcgcgacaaagctctcgccacccaaaaaaccccggaagaacactgcggcgatggactgggagacgtctctgtcgctgcctggctccggtcgttatgagctacggctccaccttgctccagacgcaagcattgggaaggttgaaggcgtgccggacgatgccactgagtttgaggagcagcgggagacactcgaccctcggcaggttggtgaggacgaatacctcatagagatcgaggccgatggcaagtaccaactggacataacctttactccagccggcgagcaatcgccaaaggcctgtcgggtctacctcgcctgcgaagaggcgaaggaagaaggctgcaggagtgagttcgagcggctcatcaagctaaaccggcggcatctcgagaagttcgacactaaggctgtcgtacatctcgaccggaattcacgttcctcaagcctgcagtcatgggtgctggaggatcagaacgtatccaactcgttcaggccattagtaatcgcagaagactatgcgtcccggtgggctcctcctgactgggacgccccgcacggacctgtactctcgaacgggcgtttcctgcatgaccctcgccctgaggccttgagcttcacgccacccaagggcttcgtcgaggcccggcgggggatcgcccggtacatacggggtagcgacgatcagtcggggctccttgagtccgcaccacttggtacctggctatccgatgagcctgaatttcggtcccttgtcgaggagtacatcggtgcattcatgtcatggctggacgccgacccggatatcgcctgctggattgacaccgttgccgtctgctctcttgagtctgatggtcgtaccctgggaagggtcccagatgccatcatcctttcccccttgcacccattacgcttagcatggcactgcttggcccagaaagttcttcgtgacgaagccgagggcaactctccgtgcccggccgcgagcatcctcgatccggattgcgtccccgacctccttaccatctcgctgcaggcaccggatggtgtggacaagatcgacttcctttctgtcgaatgcagctcagactattggtccgtgctttggaacggctcccggttgggacagatacccgaccgcgctcgtaaagccccgttcgacagtagcttcggactggctgtcggagggatatcgagcgggttcagtccagctcaggtctcgcgagcactcgacgacgtcaccgaccttctggcagccaagcctatcgtcagcctggtagtgtccagcgcaaatggcactacggatgcatgcaacgaaggattggccacctggtgcaccaagcggttcggcaatgagggcaatgacaccccgctgcacggtgtcgggccaaggattgtggaggtattcgatactagggaggccggtcggcccgaccaagcgacgatcgccaacctttctgaggacacgggcaaccacgtccgctggtatgacaagcaaccaactggatccaagcctgacctaggtatcattgcccaactaggttcggccgaacccgaatccaaggaagtcggaatgctttcgccgatgggggccggtggactgatcaggcaccgcgtgaggcgtcaattacaggcccccttcctcagcgagtcccgacagggcttgcagatgccaccctctggtgatctgttcgccgacaaggtatccgcgtgcatgctcatgatggaaagacttaaggatggcaaggtcggcctacagttctccccaaatgtccattcagtttccaacatgctcgaggagaaatgtgctgggttcgtcgccgtatcatcgtcagcgatcgaccctgcctgcttcctcggtggctggattcaagggacgtatctatgggactacgacctaccgtcgtactcgcatcgagcaggcgacaccagcggctactatctattgtcccaggtcaagcaggccgatcgcgatgcgctgcggcgtgtcttgaagcccctgcctggatgcgacgatctggatgatgctcaagtcgagcaaatcctcctcgaggtagcgcggagggggattcctacggtgcgcggcctctccggggacgatacgggggcaacgggcgaccttggcctgtttctcgctgtccggctcctgcaggaccaattccgcgtgacaggaaacaaggaaagcctgctgccggtgcttgccggatcgccggaggactcgacgatagccatagtcatccccgtcgaccccttccggggttatctttccgaccttgcccgctcccttggcaaggagcgcaaggatacatccctgtcgcgccccgacctactggtagtgggaatacgcgcgttcagcgacaagatccacttgcatcttacgcctatagaggtcaagtgcaggcagggagttgtcttcgggacaggcgaatcatccgaggcgctctaccaagccaaggccctgtcgtcattgctgcgtgctatcgaggagcgggcaggtagttccttggtatggcgccttgctttccaacacctgctgctctcaatggttggcttcggcctacgcgtctacagccagcatcaggcagtaggtgggcatgcaggccgctgggctagctaccacgagcgtatcgccgcggctatactcagcccaaccccaccaatcagtatcgatgagaaagggcggttgatcgtggtggatgcgtcgctccatagcagcccgcatgatcgcgatggcgacaagtacactgagaccattgtcatttccagccaggatgcaggtcgtatcatcgctggggatgatgctcaatcgttctatgacggcgtgcgtggcaaggtcggcgactggggactgctaccgcgccagacaaatacgaccggtatcccagccgtgcagcccgacatccccccatcggacgatgcccacacgggcgagcccaccgtagctccagcagaagacatcccagaggcagccacgaaggtatccgccggcatagcggaatctgggaaaagccctgacacctcaagcgaggagccagggcccgggatcatcctgtctgttggaaagactgtcgatggcttcgagccccgatcactctgcctgaacatatccgacacccggcttaaccagttgaacatcggtgtcgttggcgaccttgggactggcaagactcagttcctcaagtcgttgatcctgcagatatccagcgcccgcgaggctaaccgcgggatcaggccaaggttcctgatcttcgactacaagcgcgactacagcagcaaggactttgtcgaggccacgggagccaaggtggtgaagccctatcacctgcctctgaacctcttcgacactaccgggatcggagagtcctcagcaccgtggctggacagattccgcttcttcgccgatgtgctggacaaggtgtattccggcatcggccccgtgcagcgggacaagctcaagggtgcagtccgcagcgcctatgaggcggccggtgcgcaaggccgccagccaacgatctacgatatccatgtcgaataccgggaattacttgccgggaagtcggactcgccgatggctattattgacgatctggtggacatggaggtcttcgcgcgctcaggagaaacgaagccgttcgacgagttcctcgatggcgtcgtggtgatatccctggactccatggggcaggacgataggagcaagaacatgcttgtcgccatcatgctgaacatgttctacgagaacatgctcagcatgccgaagcgccccttcattggcacgtcccctcagctccgggctattgacgcgtaccttctcgtagatgaggcacataacatcatgccctatgggttcgacgtgctccgcaagttgctactggagggccgcgagttcgggacgggggtcattctgggctcgcagtacctgcggcatttcaaggctggggcaaccgactaccgggaaccattgctgacctggttcatccacaaggtaccgaacgcaacacccgcggaacttggggtactcggcttcacctcggatctggcagagctatcagagcgagtgaagactcttcccaaccaccattgcctctacaagtcgttcgatgtggctggagaggtcatacggggactgcctttcttcgaactcaataaccaaggctga

SEQ ID NO: 337363 - DNA, 870 bp, Pseudomonas aeruginosa
atgcatccatttgtcgtcggacaggaatatgagcgcccccgccttcttgacttcattggtagccgccaaatgcaatcaggtgttctttggggaagcaaggagccagggtgcctagtctgcacgtctggcgggaaggggggcaaaagggcgggatactcggatgaactgctagccgatggaagctggtggtattttgggcaaggattggtcggggaccagtctctgtcaaactcagccaatgcaaagctttcatcagggaaaatgtcggtgttgttcttcactacaagggagcccacagcgcgagaggtagccgcgaggggtggatacggaaagctgtttgcatttcgtggagaattcaatgtcgttggtttcgaaccgttcgtcccgagcgatggcaatcgaaaaggtgacaggctatggcgattccgcttggttccggtagggggtggtgacgactactggaggggagatgagcatacgaatgcagaccgccatataggtctacaggatttacaacgaagcatatacgtggactcacccggatctgaggttggtattagcttgcaggaataccgtcgtcgtagtgctgcggtacacctctacgcgacgcttcgagccaatggccggtgcgagggctgtggcatgcttgccccgttctttcgtcctgatggccgagcctttttggaggtccaccacatgacccggctcgccgacgatggtcctgacctgcccgccaacgttgtggctctttgcccgaactgtcaccgccgggcccattactccattgatcggatggagttcggttgcgctcttcgagcgcatgttgcctgtctcgaggagcgaatcgccacagggaaaggactggaatag

SEQ ID NO: 337364 - DNA, 1227 bp, Pseudomonas aeruginosa
ttgcagcattcaatcagggccacgagtagccgcgcgttatcagaaagcaaagacagcgcgctgagagatcctgagtggaagcgcttacgcaagcgcatgaaatcctatgtcgatgcgcctggtggatggttcatttgctacgacaacgatcaggagatcgtatccacctacctaaccagagccaggcgatatggaagcggctacctagaggccgaagctctcccggaggacataaagatcggtgacaggaccttcggtgaatggacccacgccagcgaccaggcgctagggcgcatcctgtgccacatagacttcgtcggccttctgcaggaaaaaaggcccaaggtcgatgcaagcaatgtactgactctattcgccagaaggcatgacatcgacgaggtttggcaagaggccggactatctgcagctcgagtctcaccgaccatgcaagcactcaccctggatagcgaaaacctggatgactgggaaaaggcgcatgaggtgccttgcgccctctatgtcgatctcggcaaagaccacgtactgcttccttgcttcggcacactgaccaatccctatttcgccctgtttcgccatctacgcagcacctacaagcatgactgggaccgtggcgtagatcggagggaggcgatcttccgttccgacctggcgaaagcattcccggaaccggactttctagtaccttcgcacggtttccagttgcggcgtgccgatggctcgaagctaacggatgtggatgcagtagtcctcgacaggcgccatggcacgctggtgctggtccaactgaaatggcacgacgctttcggactatccttgacggagcgcgagagccgcaggcggaacatcacaaaagccaacgaatggacggagcgagtcatttcctgggtcgatggacgcacctcctcccagctagccaaggcactgggattggatgccaaggcctccgacagccctcctctcctctatgtcgtcgcacgttatgcagctcgctttacaggggagtctggccaggatccccgggcgtcttggctcggctggccagagataatgcatgtactccaccacaaccccggcgtggacattctttctcagattccccgactcgtcctagagcagcaggcccgtttcacactaaaagaagaacaactctttgagtttcgcttccccgagctatccgtggacctccacattcttccagggccttga

SEQ ID NO: 337365 - DNA, 1230 bp, Pseudomonas aeruginosa
atgccaagccctcaaacccctgcgtttccggttgtcttcaagcgaaccctcaagcgtgtgctagagcactggactccaattacagtcatcctcgcactcataggcacaggacttagtatccttacgctgtacgtctatgctcgggccatcggccggacagacctcttcatggttgccatcgaggaaaagtcatatttggttgcttggttgttgctagtgctgccaataatggtgatgcacctctgcatgctgatagcgaccacggtgttctacggtatttccgtcgcaatgtttagccactgccgtcgcaggatcaaccgagcggccctgtggctgctgttgccgcttgtaagtggattcagcgcttttactattttgctgttctacttttctgactacatagaggcatcgcttgcgattcccctgatcgctctggctaccttactagggcttatggcaactctggttttccggagctttcgaatattggttgcgctgagcacgtccagttctattaagattgatcggtttttctttttgttctgcctcgcgggtatgcttatttgcacagtcatctctgcatacttctccacttccctgattctcggcacctatgtaggagaagactcggagaaggcagtcagttttgtggctacgttcaccctgagcactctgacattaagtctggtccccacctttgtcttcttcactgctaaaggatccacctaccgtcggctcgctttcggctgcgcgataactctggttttgttcctggcatatttgctgttcgctcgcggagccatgtcaagcatcacctatgcagcggctggcaatttggagatccggcaagactttcccgcccggtttgttctggatgaccgaatcagcctggcagatcttgataacgtacaatggagaactcgcttggcgttagccgatagggtcgaggtagaggctttccagctatttgcctttggcgatgtactactcctgtgtcctagcagtttgcgacgagcaagcctctatgaactaccccgctatagccgccagtgcctccttactcgcagcagcaaagtcgatcgcaagccaccccggcttcggtatccagcccagtccaaggtgcagccgtcctggcaggagcaggcagagcgcctggtagactgggacttgctgcgtggcctgccgccagggcatgtccaagatgccggacgacgtgccgactcgaattga

SEQ ID NO: 337366 - DNA, 471 bp, Pseudomonas aeruginosa
atgcgcgttctctttatgtgtacagccaacagctgccgcagcatcctttccgaggcgatgttcaatcatctggcccctgatggcttcgaagcggtcagcgctggaagctttcccaaagggcaggttctgccgcgcagcctgacgaccctgcaacaagccggcatttccaccgaagggctgagcagcaaggggaacgacgcgttcgaaagcaatcctccggatatcgtcattactgtttgcgacaaggctgccggcgaggcctgtccggtctactttggcccggcgttgaaggcccattggggattggaggatccctcggacgtgcagggtaccgatagcgaagtggatgctgcctttcgctgcaccctggcgcggatcgagaggcgttgccgtgcgttcctcgccttgcccttcgaacagctgagccgcgatgaactcaagcgcgagctcgacagaattggcacgatgtaa

SEQ ID NO: 337367 - DNA, 711 bp, Pseudomonas aeruginosa
atgatcgacaatctgcccaacgtcgtcgaggagctgtttgaccgctctatcccggcaaaactgaatctccccgaaggggggcacaagccgcgcattctgctgctctatggctccaaccgagagcgctcctacagtcgactgctaactcaggaagcggcacgcttgctggaagccttcggtgcggaaaccagaatcttcaatccttccggcctgcccatgccggacgatactgacagcagccatcccaaggtcaaggaactcatcgacttggtgctctggtcggaaggtcaggtgtggtgctcaccggagcgccatggagccatgaccggcgtgttcaaatcgcagatcgactggataccgctggccatgggtgccatccgccccagtcagggcaagactctggccgtgatgcaggtttgtggcggttcgcaatcctttaacgcggttaaccagatgcgtgtgctggggcgctggatgcgtatgttcaccatcccaaaccagtcttcggtgcccaaggcctacctcgaattcgacgaggccggacgcatgaaaccctccagctactacgaccgagtggtggacgtcatggaggagctggtcaagttcaccctgctgctgcggggtcacggcaactacctggttgaccgctactcggagcgtaaagagtccgctgaagagctcgccaagcgcgtcaaccaacgcgacatctaa

SEQ ID NO: 337368 - DNA, 390 bp, Pseudomonas aeruginosa
atgggccagataaagccaaataaagcccccgatggcagccacctcatatcgccaatcgaggtattcaaatgcctgtccgatgagacgcgggcgcgcattgtttttctggtgactcacgagcaggagctgtgtgtctgtgagctgacctcggcactggaagcggcacagccgaagatctcccggcacctggccatgctgcgcagttgcggtctgctggaggatcgtcgccaggggcaatgggtttactaccgcttgcacccgcagttgccggaatgggtgagcgagatcctgaaaaagaccctggacagcaatgccgagtggttgcgtcaggacattcagcgcctccggcaaatgcgggatcgcctcgggagcaagactgcctgcgattag

SEQ ID NO: 337369 - DNA, 1080 bp, Pseudomonas aeruginosa
atgacaaacgcgtgtgaagtcgccctgaaacaggcatccggggctccattaggtgtctttgagcgttacctgaccctgtgggtgttcctgtgcatcgtggcgggcaccatccttggcctggttgttccgcaagcggcccaggccgtaggcgccctggaagtcgccaaggtcaatatcccggtcggtctgctgatctgggtgatgatcatcccgatgctgatgaagatcgacttcagcgcaatcagtgaagtgcgccaacagaagaacggcatgttcgtcaccctgttcgtcaactgggcggtcaagcccttttccatggcgctgattggctggttcttcatcaagcaggtgtttgcaccctggctgcctgctgaggagctggatagctacatggccgggctgattctgctcggtgcggcaccctgtacagcgatggtgttcgtctggagcaatttgtgtaagggtaatgccaacttcaccctgacccaggtcgccctcaacgatctggtcatggtgtttgcctttgcgcccatcgtggccctgctactcggggtttcatcaattcctgttccttgggacaccctgctgctttccgtggtgatgtacatcgtcatcccgctggccattgctcagtttttgcgagctcgtttgatgagacgtggtgaggcgaactttcagaaagcactggccaggatctcgccgttctccattctggctttgctggcgaccctagtgctgctgttctccttccagggagagtcgattgtcgagcagcccctggtcatcggcatcatcgccattcctctgctggtgcaaactctgttcatcgcagctctgggttactggctttgccatgcactgaaagtgcgccatgacgtggcaggcccggccaccatgatcggcgcctcgaacttcttcgagctggctgtggccgtggcgattgtcttgtatggcttcaactcgggtgccgctctggcaacagtggtcggtgtgctgatcgaagtgccggtgatgctctggctggtacgtatggtcaacaacacccgcaattggtacgagaccagcctcaaccaccgttaa

SEQ ID NO: 337370 - DNA, 1755 bp, Pseudomonas aeruginosa
atgcgctttatcgacaatgcaccgcgcttcctgtttttcaccggcaagggcggggtcggaaagacgtccattgcctgcgcgacggccctggagctgtcccgtaagggcaagcgagtgctgctggtgagtaccgatccggcctccaatgtgggtcaggtattcggcctgcggatcggcaatcacattactgccgtgcccgccgtggaaaacctgtcggccctggagatcgatccacagggtgccgcccaggcttatcgggatcgcattgtcgggcctgctaaaggcgtcatgcctgaggacgtagtcaaaggcatggaagagcagttgtcgggggcctgcacgaccgagattgctgcctttgatgagttcacctcgctactggtcagcgatgagctgaaagcccgtttcgatcacatcatttttgacacggcgccgaccggccacacgattcggctactgcaactgccgggtgcctggagcggcttcctggaagccggccaaggtaatgcctcctgccttggcccgctcgctggcctagataaacagagagaccagtatcacgaggctgtagaggcactgtctgatccttccaaaacccgtctggttctggtcgccagagcgcaggctgccacgctgcgcgaggcggcacgcacccgtgaggagctggcagccattggattgcaagagcagtacctggtgattaacggggttttgccagagagcgaagcacagaaggatgaattggctgccgcggtctacaagcgcgaacaggcagcagtcgccgccatgcctcccgcgctacgagcactgccgctcgatctgttgccgttgaaagccttcaacctggtggggctggatgccctgcgacagcttctggttgagggctcagatgagggcacgcagacatctgccagtgcgccggttgaactgaacgcgccacgactcaagtccctggtcgacgagatcgccgccgatggtcatggcctgatcatggtgatgggtaaaggcggtgtcgggaaaaccacactggccgcagcggttgcggttgaattggccaggcgtggactgcctgtgcacctgaccacctctgatcctgccgcccaccttgcagagacactggaaggaacacttgagcacctgacgctgagccgaatcgacccgcaggtggagacccagcgttatcgggatcacgtcatggcaaccaagggggcagatcttgatgatgaggctcgggcactgcttgccgaggatctgcgctcaccctgcaccgaggagatcgcggtgttccaggcattctcgcgaatcatccgtgaaggcggaaagaagttcgtggtgatggacacagccccaaccggccacaccttgctgctgctggatgccacgggcgcttatcaccgcgacatcacccggcagatgtcgggcagcaacatgcgttttaccacgccgatgatgcagcttcaggatcccaggcagaccaaggtgctgctagtgaccctggctgaaaccactcccgtgctggaggccgctggcttgcaggcggatctgcgtcgtgcaggcattgagccttgggcatgggtgatcaacaacagtgtggcagccgccaagactgaatccccgcttctgcataagcgggcagtcaatgagctgaaggacatcaagcgtgtcgcgaccgagcatgcgcagcgctatgcagtcattccgctcatggcggaggaacctgtaggggttgagcgtttactggcgctcagcaagtaa

SEQ ID NO: 337371 - DNA, 1236 bp, Pseudomonas aeruginosa
gtgagtaggctatataaggacatttgcagtctacgaacgctctacggcgcctggagaaaggtacgcagtagcgccttcctctcctcttccgacgaaatcagacgggaggctgaagaatttgaaagtcgcctccccgactccttaattgaaattcagcacgccctatcgaagcagatattcatatttctccagcaaactggcgtcgcacagaagaagcctggcgggaaatcccggcccttggtgttggcccccatacctaatcgtgtcgtccagcgcgccttgctcgacgtgctgcagcgtcgtgtccgcttagttaagcgagttctgggcacgcctacaagctatggcggtattcccgataaacgcgtagccatggccatcgctgatgcacgggaagcaatgcgcacaggggcacgattccacatccggtcggacatacccgccttcttcaccaagatcaacaaggaccgggttctagaactacttcgaccacatctaaactgtgaggcgaccctcaagctttttgaggaggctatcagaaccgatttggccaacatcgacgacctcaggcgaaaggggctggacgaaatctttccaatcggcatcgagggtgtggcccaagggtccccactgtcccctctgctagccaacatctacctggccgacttcgacctagcaatgaactcgaacggcatcacatgccttcgctacattgatgacttcttgctccttggggcaagccttagcgacgtagacaaagcattcaacagagcgctgaaagagctgggtaagatcggcttggaggcttacgacccacggacagacaaaacaaaggcctcccgcggggcaacagaaattggtttcgatttcttgggatgcaatgtctcacctggcctgatccaacctagcgaagcgacgcgcagacgattcagggcaaaacttgacgccgaattcgtcgcagcctcacacgcgctgcgctataacgctcagtaccaagacggagacggaaagtactcgtattcatccgccctttaccgcatcgacaaaataatcttggggtggggtaaggctttcacgttttgcaatggttctcagtgcatgattgcactggatgactttatttcaaataaacttgctcagcttgaagcagagaagatcgctattcttgccaattccgatagtacagttcgaagacgtgtcttgggagtccgtcttctcattgacatccaaaactga

SEQ ID NO: 337372 - DNA, 1206 bp, Pseudomonas aeruginosa
atgttctcgcaagtagtttgtttatatcgttgtgcaggccggccggaaatattaggcggcagcttctcttacaaggggcgctatgacgaagttttggcgagggttgttgaagattgcaaggaacttcctccgcactatggccgattcttagatgtaaattgttctgagcaggatggctgctctttcaccttcaaattgccatcgagcgagcatgggaaattttttgctgatgtgcccgctttagtgaatggtggcacctcaatgaacaagggtgttttcccgtctaatgtctacgttgtggatatcgactgggcagactctgatactgatgagcgagactgcatagccagcctaaggaagatctgtagactggtccatctgcttaccgagttggcgataggtgttgatcgggaaactaatcgaggctttttcaatctcttctttgcgttacctcaagatggagtaaaacctcctcgatccttcttgatatctaccaaaatcaccagcgatatgattggggtaaaacttaatcacctggaactgctcgagcagatattacatcccaaaaatgccaataaggctcatctgctcgagcggatgatgatgttcaggctttccattgctgacactttggattctgcagcctcccttggagaacctctctccatcgttgtaaaggagtggggggcgatcctttctcagtaccgaataaatcttcagtcttatgttcatggcttctcatttgagaaggtcaggcaggaggtcgcacgggctgagctgaagtatgctaaaagcctaagcgccattttgggggatatcgccgggaagcttcttgcattgccagtgtcccttgcaggcttaatcttgttgaacaagagtgatgaccttttggaagcctgggttctatcgctagggcttttgattgtttcgtatattttgctatcgacaatcaataatcagaagcttcaggtggtaagacttaaacacagttttgatatggttttcgagggctttgagagtcgtaagcacacatatcctaagaaaatacaagctctacttgcagagactatcactcagctcaacgggcaagttcaatctcttcgggatacgttctatttgctcagccagatttcttgggttccagtttggggcgtcgtcatcatttgcacgagtaagctggtgctttttttgctttcgcagccgtag

SEQ ID NO: 337373 - DNA, 1143 bp, Pseudomonas aeruginosa
atgttcgaattgaagagagccataatccacagcttcaagaaagctgcgcatacagatgtagtcggggaggttgtgaagaaggatgttgtgttaaagaccgacaatccggcccttatcgcactggcgcaaggtattaatggactgattggtaaaacagggaacagtgttgtttacggtcagttttctaacgatggccggcaagggcccttccctgaaagcttcaagaagtacacaggtaatttgctagacgaggcagagttcctagcgcttacccacttggcaatggatcaattggttgaacaggctgcaaagcgagtgctgtcaaccggagggcatgtactatgtgcgctctacgagtcacaggggatgcagttctttctggttgcgagtatgaaggaaagaggcggtatccagcttgataagaactacgtccctacggcaatccaagagattgatctgaacaaggttcagcaagcggctcggatcaatgtcaatgactatgtgtacataactcagcaactgcctcaggagcaagctctgctggagggtgctgctcagatcaaggacgctttggaggagcagcgcgacactacttatttgtgcttcattagtcgcgggcgggatagccaagcgtcggattacttcatctacgccttggggtgcgcgaaaggtgttgcgtcaggccgggcgacgaagaatgcaattgacactgtcgctaagttctttcagtccaaccctgagcttaaagggtatggttataaggccaaagaggcagtaatcagatatttagaacagcagttggcggatgagaagcccgcgcgcctcgatgcgatatgccatgcagcaacgcagcatgtgccagctggactggtagagcacctagagggactcaaggactttctcaatgacgagaagaatagggtgcctgatgagttttctgtccacgcgaagggattgaaagagaaaactcgaataaagtctgatgcttcaagttggtctattcaatttgagcgcggagccttggggaagagcgaggtcgctgatgtttattatgatgagaaaaacaaaaagcttgtcttgaccaacttgcctgacgagctggtgtcagtcatcgaagaggaaatttccagcaggaatttataa

SEQ ID NO: 337374 - DNA, 750 bp, Pseudomonas aeruginosa
atgatatttcgccagctattcgagcccgtgtcgtccacttatacctacgtactcgggtgcgaggacaccggccaggccgtgctcatcgacccggtcatttccgcaacggaccgcgacctggccgagctggccaggctggacctgcagctggcgttcaccttggatacccacatacatgccgaccacatcaccgccgcgctggagctgaagaagcagaccggctgccgtatcgcggggccggctatcgacaagttgccctgcacggatgtgggcatcgaagaaggtgtccctttcatcgtcggcagcctgcagttcacacccttgcatacccccgggcacacagacgggcactttgcctacctcctcgctgatcgcctgttcagcggtgatgcattgctcatcgacggctgcggtaggactgactttcagaacggcagcgccgacgacctgtttcacagcgttagaaacaagctgttcacgctgccagacgacaccctggtctatcccggccatgactacagcggtcggcgagtctcgaccatcgcacaggaaaagcagcgcaacccccgactcggtgaagcgataacgttggagcgcttccgcgagatcatggcggaactgaatttgccctatcccgcgttcatcgatcatgccgtgccggggaatcgccagtgcggcgtctgcccacccgacctgacggataatttccgtcgctattgcgaacaggttgagcacagtcctcagggttga

SEQ ID NO: 337375 - DNA, 255 bp, Pseudomonas aeruginosa
gtggagcgcgtgcttgaggtcaatgcctcctcgctcgcgctgtctggcttgctacttggcctgacagcaaaccgaaagtggtttctgctgcctggcgtcgtgctgccgtttcttctgcaacacggcttgcagggctggtgcccgccgctggcgatcttgcgccggctgggtatccgcacgcggggcgagatcgatcaggaaaagtatgcactgctcagtgcgctggaacaggcaccgctgaacactcaccactag

SEQ ID NO: 337376 - DNA, 339 bp, Pseudomonas aeruginosa
atggcccacatggcagatctcgatatcgaaacgcttcgtcgcagtgctgcggacgcctgcggcttgctgaaagtgctcggcaaccctgaccgcctgctattgctctgccagctgacccagggtgagcactgcgtgggtgacctcgccaatgcgacgggcattgtgcagccgaccttgtcgcagcagctcacggtgctgcgccacaacggcttggtcagcacccgacgcgagggcaagcaagtgcattacagcatcgccagccctcaagcgatggaggtcatgcaggtgctctaccggctttactgtcagcatcccgaacgcgaggaaccctcgacatga

SEQ ID NO: 337377 - DNA, 432 bp, Pseudomonas aeruginosa
atgacgattgactgggtacatttcacaccgtggtcctcgctcgccgggggcgcgctgatcggtcttgctgcgaccttgtttattctgttgagcgggagaatcgcgggcatcagcggcgtgatcggcgggttgctgcggccggccaaaggcgatgtgctctggcgtgttgcattcattgccgggctggtgatcgcgccggtgctgtttcaggccgcgttcgagcaaccagacatcgacgtagaggcgagcaccctgacgctgatcgcggctggtgtgttggtcgggatcggcacgcggtatggctccggttgtacgagcgggcatggcgtctgcgggttgtcgcgacggtcgccgcgctcgctggtcgcgacggccgtcttcatggccagcggctttctaaccgtattcgtcatccgccacctgctgggctga

SEQ ID NO: 337378 - DNA, 426 bp, Pseudomonas aeruginosa
atgaaattactgagcgcctttatagcggggctggttttcggcctcggcctgatcctgtcagggatggccgatccgtccaaggtgatcgcctttctcgatctggccgggccgtgggacccctcgctcgcgttcgttatgggcggtgcgattgcggtcggcagtgtcgggttctatttcgcctccaaacggtcccgggcggtgctgggagatgtcatgcggatgcccaccgccacccggatcgatcgacctcttgtactgggcagcctggcattcggagcaggatgggggctggctggctactgtccgggtccggcggtcgcgacgcttttgagtggtcggagcgaaccgctgatctttgtccttgccatgttggcgggtatggcgctctacgagatgcagacacgcttttcagggaagccgcagtga

SEQ ID NO: 337379 - DNA, 492 bp, Pseudomonas aeruginosa
gtgcgggcggcggtgctggcgggtgtgctcagctgggggttcggtacctttgcgttgcatgcgttcgagcagggcacgcggctgcctgagatgggcctgcgggacaaccagggtaaacccgtcgccttgcaggattacgttggcaagccgctggtggtcaacctgtgggccacctggtgcccgccctgccggcgtgaaatgccggtccttgcgcaggcgcaacaagacaacaccgacgtgacctttctgttcgtcaaccagggcgagggtgagcgattaattgccgacttcctcaacggcgaagggctcggcctggaaaacgtcctgctcgacaccggcggtcgtctgggccagcacgtagggtctgcgtcgctgcccaccacgcttttttatgacgccgagggacgccaagttggcagccacctcggtgaactgtcccgtgccagcctggcgcgcgcccttgagcagctagaggtcaaaacccagccatga

SEQ ID NO: 337380 - DNA, 777 bp, Pseudomonas aeruginosa
atgaaaccggtacgttcactttcgttttttatctcaacgctcgccttactgccgacgccctgggcgctggccgaagcgctgccccctgcggttcaggccattgaagcgcgcggagccaaagtggttggcagcttcgacgcgccgggcggattaaagggctacgcggcgcgttacaacggacaaggcattgcgctgtatctgacaccggacggtgatcatgtcgtggtcggcagtttgctggatgccgctggcgaagacctgaccaaggcaccccttgaaaagcttgtgtatgagccgatgagcagcgagatgtggcagcggctggagagcagcacctggattgctgacggcgcggctgaggcgccacgggtgatctacatgttctccgacccgaactgcccgttctgcaacatgttctggaaacaggcgcggccctgggtcgaagcgggcgacgttcagctccgtcacgtcatggtcggcatgttgcgcgcggacagcgtgggtaaatccgcggcgctgttggccgcgaaagaccctgaagcggctctcaatgagcacgaggccgcgggcaaggccagcacgcttaagcccatcgagcatatcgcgcccgaggtgaatgaacagcttgaggcgaacctcaccctgatgggcgaaatgggcgcttcggcgaccccggctatctattaccaggatgagcaagggcgtctgcagcaacatcagggcgcgcctcgtcccgaggcgttgaatggcatcatggggccgttgtcaaaacgctag

SEQ ID NO: 337381 - DNA, 648 bp, Pseudomonas aeruginosa
atgaacgtccccctctggcccttggccgggctcttccttgcgatctccgtgtccgcgcacgccgcggatgccgctgcggtgtacagcaaaggcgggaccaaccccgccgcgatggcgtgcgctacctgccacggcgccgagggtgaaggcatggctgctgcaggattcccccgcctggccggcttgtcggcgaattacatgcgcaagcaactggctgatttcgcgtccagtgcgcgggcgaatccaatcatgcagcccattgccgcggccttgagccatgaggaagccgacgccgtctcgacgatgctggctgacaagccgcaaccgcaggtcgagcgaatcgaccgcaccgcgttggtcgacgggcctggcgaaacccttgcgctgcgtggcgcctgggatcgcaatatccctgaatgcgtcgcctgtcacggccccagcggaactggcgtcggcgacgcttttccaccgctggccgggcagtcggcacagtacctgtcgtctcagttgaccgcctggcgtcagggcacccgcaagaacgaccccaacgacttgatgggccacattgcacgtagcttgaccgaggacgaggtaacggcggtctcgacgtacttcgcaggcctgactgacaaaggagcagccaaatga

SEQ ID NO: 337382 - DNA, 918 bp, Pseudomonas aeruginosa
atgaagacccatacaaccgcgctgctgttgatgtcattggccttcccggtgctcgcggacgacatcgcgatggaagatcagtcacagatcctgaccggggccggtgatcccgccagcagtaagtacttccaaccgcccaaggaaagcgaactgcctgacaacgcctacggacagttggtacagcaagggcgggccatattcgtcgataccaagacgcatgcgcccgactatgtcggcaacggcctggcctgtgcgaactgccacctcgaacaaggccggaaagccaactctgcaccgctctgggctgcctataccatgtacccggcgtaccgaaagaaaaacgacaaggtgaacagttatgccgagcgccttcagggctgtttccagttcagcatgaatggcaaggcacccgaggcggacggccccgttatcgccgcgctttcagcctattcctactggcttgcaaccggagcacccacaggtcaagagctgccaggtcgggcctatccggaagtgccacaacccgaaggcggatacgacttggcgaagggagaacaggtctacgacgcacaatgcgccgtctgtcatgggccgaacggggaagggcaaaagtcaggtgacatgtatgtcttcccaccactctggggggcggactcgttcaactggggtgcaggcatgcatcggatcaacacggccgccgcgttcatcaaggaaaacatgccactgggcaaaggcggcaccctgtcagatgaagacgcctggaacgtggcggccttcatgaacagtcacgagcgaccgcaagacccacgcttgattgatggctcagtcgagaaaacccgagataagtaccacgccaatgacggcgtgaacctttacggggaaatcgtaaacggcaagatgctagggaaggggatctga

SEQ ID NO: 337383 - DNA, 366 bp, Pseudomonas aeruginosa
atgaaagttaaattattgcttcaaataccagctatttttagctgcttcacagccttagcacttgcaactgaagtaggaagcaaaaaagacgatacaagctcaataggcgcttactgggattgtttgcgagctaactacagcaaagtagccttgcagagcaacgatatcgctaacattcaggacaaaaccattgatgcctgcgatccagaactgcgcaagcacttggatgctgtttacctgtccgagctgaagaaaaacaatgatattgtgtcgtccgccgaccctgcgaaaatcaccaaggatgcagaggtaagcgaagtagagcatgcccgctcactcataaagacctggcacgccggaaagtag

SEQ ID NO: 337384 - DNA, 363 bp, Pseudomonas aeruginosa
atgcttgtcgtcaatttgtcagaaggtacggccctgccgtataatcagaaaatgcgaacagtcatcgaaaccgagattttcaagcgctacgcagacgacatctggagcgaccccgagcgggaggagttcattacgtggattgccgccaatcccctggccggagatgtaatcccaggatcaggcgggcttcgcaaggtgcgctggtctcgccccggcatgggaaagcgcggcggcgcgcgcgtgatctactacaacgccgaagagtcgcaagccatctggctactgatagcctacacaaagtcgaagttcgataacctaccagcatctaccttgagcaaattgaaagaggctatgaatggataa

SEQ ID NO: 337385 - DNA, 255 bp, Pseudomonas aeruginosa
atgctcaacgaccaccagctctacgacgtgtacttcgtctgccaccacttccggtacctctacgacatcttcaagcgccacagcctctacggcttcttggagcagcatggttcccgtgccggggtagagatgatcgaccacttcaaggatggctccatgggcgtctggaagctaagaagggatttcgaagaggagttcgacgcagttcagaggcggctgaagctcaaccagtattctgaattccgcattcgctga

SEQ ID NO: 337386 - DNA, 369 bp, Pseudomonas aeruginosa
gtgatctccgcccgtgctttatcggtcgcgctggcctgcctgctactgcttggcctcggcgccgccggcggtgtctggctcagcgcacgtcattaccggccgcagctcgatgccgcacggtcggatctggtcgcctgccgtgcctcccggggagagttggagtccgcagtggcggagcaggtccggcatgttgccgcgctgcgcctggccgacgaacagcgggcccgggatgccgcgctggctgtggatcggggacggcagcaggccgcggagcagtatgccgcggcacagcgtctgttgcgtgagcgaaccgctggtgatcagtgcctggcagccgaagtggtcatcgatcaggagttggggctatga

SEQ ID NO: 337387 - DNA, 279 bp, Pseudomonas aeruginosa
atgctgctgcggccgaaccacaagtatcagactcggctcagcaagctcgatgacctgattgtgcttatcccgaaaactcagccgtcctgtgcgcaacaggtgagcatggccaaaaccgccttgaccgtagatatcggtgacgccacagaaagccccctgatggaatgtagtggcgtgtggattgaagtgtttaagcagaatggacaggcgatccatggcacgctcgatttagacgatctgttgcataacatcgacgatctgaatccgaaagtgaagtaa

SEQ ID NO: 337388 - DNA, 519 bp, Pseudomonas aeruginosa
atgactcgtatcgccgctctcaccttggaacaagctcccaccggttcacgtactgcccttgaaggcttgcagaaaggtctcggattcattcctaacgcgtttaaaacactggctcacgccccggccgcgttgaacggctatttggccctggcacaggcgctgggtaaaagctcgctgagtgtcaccgagcgcgaggttgcggcactggcaacctcggaagtcaacggctgcgactattgcaccgcagctcattcattcttcgcaaccaaggcgggcctgagtgctgaagagatccatcaggcacgctcggggtcgctgagtgctcttgccacgctggcgcggcagataaccgagagccgtggccagttgagtgatgcacagatagccgcggcacatcaagcgggcctaactgacagcaagattgtcgaggtggtggcgcaggtcacgttgttaaccctgaccaattacctgaacaacattgccgccccagacatcgatttcccgccgtctactcaatag

SEQ ID NO: 337389 - DNA, 261 bp, Pseudomonas aeruginosa
atgaacccggttactgtctataccactcagcattgcccttactgcgtgagtgccaagaaactgctggcacacaagggaattacagccgtcgaaattgacgttgaagcgtcaccacaacgtttagccgagatgatgcagcgatctcaacgcagaagcgtcccgcagattttcattggtgaggtgcatatcggcggatttgacgacctagcgggccttgagcgcagaggcgaattggatgtgttgctgcaactctcatgctga

SEQ ID NO: 337390 - DNA, 777 bp, Pseudomonas aeruginosa
gtgaacatcgacgcatcagcccttcagaaacagctctgcagcacgttctgccaggatgtgaaggtcagcctgggcgacggttttgcacgggtaaatctgccaatgacggggcgcgatggagatggcttcactgcttatctacagcccatacctgctggatggcgcatctcggacatgggcaccaccatgatgcgtctcagctatgagaatgatctttcgaagctgtttactggatcacgcggcaagctattcgcaaccatcctaaaggaaagcggcatttccgaggatgacggagacctatacttagaggtgccagctgatgccatatcgcgtggattgttcacccttggtcagggcatcaccagggttgaagatctggggctatggacgcatagcagaatagagtccactttctatgaagacctagccaccatattggaatcaatcctccctccagagcaattggaacgaggctatgtagtcccgggagttcctaatggcgactcatacccggtagattattttatccgtaccaagggacgtccgctttacctgttcggcgtaaacaacaaagaaaaagccatgcttaccactatcattctgcaacatctgatagcagcacagcaggattttgactcaatggtgatctgcgcaaacattgaggaaatccctaagctcgacaggcgcaggctgacgaatgcagcgaacgatgttgtcgccacaattcaggatactgacgtcattcgcaataagatcgaacatcgagtcagggcctag

SEQ ID NO: 337391 - DNA, 519 bp, Pseudomonas aeruginosa
atgagcgaaatcatactcacggatgagcaaattcagtatctgctcactattccaaagcgcacaaagacgccaaatgcacgttggcgcgttcagaaaaagtccaggcagcgcaactacgatctggagtccgaggacggatcgctgcaattttccctgtatctgcgtcagaacatgcgaatcgttgagtccttttcctgcggccttctctatttgcatgctggtggcgaaaaagtgactctagctcgctacaacggtagcgatcacccacacaacaatccgctggatggcactcgcgcagacaaccactgtcacatccatcgagccactgaacgctacatggccattgggcggaaatcagagcactacgccgaaagcactgaccgctacaccgatctaagcggagctttgcgggcaatagtcgatgattgcatgatctcgggcattcgcctcgccaatgcaatggcagcagacgataatgacgagatcgacgagcctcaactggacttggacctaaagtga

SEQ ID NO: 337392 - DNA, 339 bp, Pseudomonas aeruginosa; identical to SEQ ID NO: 331856

SEQ ID NO: 337393 - DNA, 207 bp, Pseudomonas aeruginosa
atgcaaaagatgaaacaacttatggttcgtggcggtgtcgttctcggctcgctgggtctgttggccggccaggcgatggcggaagttccggctgatgctactgcggcgctggccgatgccaaggccgatggcattgcgattggcggtgtcgtcctgggcgtcatcatcgcgattgcggcgttcaaatacattcgccgcgcactctaa

SEQ ID NO: 337394 - DNA, 492 bp, Pseudomonas aeruginosa
atgaccatcttttacagtaccaacctgaaaatccgtataaatctccttgccgaaagtttccttgcaagaatcatcttcacctttacactcgccagtttcagaaacataattcgtatcttgagggcaagaatcgccgtaccgacctatagaagcaccaacctcgccaaatggttcaccattatcaaaacgattcagagagcagctaaattcaacatcagaattacgcctcaagaacttaaacgaataactatactgacctccttgagactgaaaataagccagcaccgccgaacacccttcgccaggcgaatcgaacgacttatcgcgcaaactttcaatgccattgacctgccaccaaaagacctcagcatttgcaatctgcggccaaaaagaaaaagcaagcaaaaacaatacatagcgcataatcacgccctacagtcgaagaaagaaaagcgcccaaaacgcagccgcaaccaccacgacaacatatga

SEQ ID NO: 337395 - DNA, 540 bp, Pseudomonas aeruginosa
atgaagcaaatgaccttcgccgacgccgagtacgccggcaagcgcaagcagacccgcaaagagttgttcctgatcgagatggatcaggtggtgccgtggaagggtttgattgccctgatcgagccgcactaccccaagggtgaaggtggtcgtccggcgtatcagctgatggcgatgctgcgcgtacatttgatgcagaactggttcggctacagcgatccggcgatggaggaggcgctgtacgagaccacaatcttgcgccagtttgccgggctgaacctagagcgtattcccgacgaaaccaccatcctcaatttccgtcgcctgctggagaagcacgagttggcggccgggattctggcggtgatcaatggttacctgggcgatcggggtctgtcgctgcgccagggcaccatcgtcgatgccacgctgatccatgcgccgagttcgaccaagaacaaggacggtaagcgtgacccggaaatgcaccagaccaagaagggcaatcagtattgtgtgtcacgaacacaggtcggatga

SEQ ID NO: 337396 - DNA, 336 bp, Pseudomonas aeruginosa
atgcgtctttacctatgcgaaaagccgtcccaggacaaggatattgcaaaggtgctcggtaccacacggcgaggcaaaggctacctgaacgtcccggagagaactgtcacctggtgcatcggccacctgctggaagccgcccttcccgaggcttacggcgagcagtacaagcaatggttgctggagcagttgccaatcattccgtctcagtggaagctggaggtcaagccgaaagctgcgaaacagctccgtgtgattcagcgcctgctagatgaagcggatagcatggtgatcgccaccgacgcgggctacgaactgtctcttatacacatctga

SEQ ID NO: 337397 - DNA, 315 bp, Pseudomonas aeruginosa
atgccactgttcgtagcgctgttttcgtttctgagttctgtcgcgggtccgctggtggccaaggtgcttatatcgctcggcgtcggcgctgtgacgtatgcggggattaatctgctgattagccaggtgaagacgtatgccatatctcagttcggtgcggttggtgctgatgttgcggcgattttgggtttggctaagttcgatgtggcgatgaatattatttttgctgcggtggtggccaaggctgttatctcgggcatggataaggccagcggcagcattaccaagattggcagtgtcggaaaaggtagttaa

SEQ ID NO: 337398 - DNA, 360 bp, Pseudomonas aeruginosa
atgatgcgtcccgacgccaaagtgcagaaggtctatctctacccaaagcccgtcgacttccgcaaatccatcaacggcctggccgcgctggtcgagctggacatcaaggtggaagtgttcaacccggtgctgttcgtgttcctcaatcgcacccgcagccaagtcaagattctctactgggagcgcaatggcttctgcctgtggctcaagcgactggaagccgagcgtttcaagaccaaacccgatgcgggtgacgaagccatcgaactgacggtcgacgagctgaactggctgctcgacggcatcgatctgtggcgcaaccgcccccatcaagtcctgacaccgcgttacgtggcctga

SEQ ID NO: 337399 - DNA, 1548 bp, Pseudomonas aeruginosa
atgaaatgcgcccctgataaccttcctgacgatcccgtcctgctcaagcagatgctgctgttggctcagggaaaggtggcgcaactccaagaacaagttgctctgctgcgccacaagctgttctcgcccaagtccgagcgcagccctgaagatgccgactcgccgcagttggccatgttcaacgaggtcgaagagctgatcgaagcggccgctgcgccaagcgaggccgaagccgaagccgaagccgaagccgaagaagtcgttgcaccgctcaagcgccgtggcaaacgcaagccgctgccggccaacctgccgcgtgtggaggtcatccatgagctgcccgagcatgagctgacctgcgcctgcggtgcctgcaagcaggtgatcggcgaggagaccagcgagcagctggagatcatcccgatgcaggtgcgggtcatccgccacatccgcaagacctatgcctgcaaggcctgtgaaaccgcgccggtcaccgccgacaagccggcacaactgatcgagaagagcctggccagccccagcgtattggcgatgctgctgaccaccaagtacgccgacggcatcccgctgtaccgcttcgagaggatgctcagccgccacggcgtcgacatcccacgccagaccctggcgcgttgggtgatccaaagtggcgagcaactgcaaccgctgctcaacttgatgcgcgacaagctgttcgaataccccatgttgcactgcgacgaaacgcgtctgcaggtgctgcatgagccgggacgcgacccctcggcacaatcctggatgtgggtgcaaagcggtgggccgccggacaagccggtgatccttttcgactacacagccagccgcgcgcaggaggtgccgctacgcctgctcgatggctaccgcggctacctgatgaccgacgactacgccggctacaacgccgtggctgcacgcgacggcatcgagcggttggcctgctgggcgcatgcgcggcgcaagttcgtcgaggcgcagaaagtgcagcccaagggcaagaccggccgtgccgacatggcgctgaacctgatcaacaagctttacggcatcgagcgcgatcttaaagaggtcgacgacagcggacgcctggccgcccgccagcaacgcagccagccgctgctcgaccaactcaaggcctggctggacaaaacccagtcgcaggtcgctgggcagacggccctgggcaaggcggtgaactacctggccagcaactggagcaggctggtgcgctacatcgaaggtgggcatctgccgatcgacaacaaccgcgccgagaacgccatccgaccgttcgtcatcggccgcaagaactggctgttcagcgacacgcccaagggtgccacggccagcgcgcagatctacagcctgatcgaaactgccaaagccaacgggcaagagccttacgcctggctgcgccacatccttgaacgcctgccagcggcgagctgcgtcgaggattacgaagcgctgctgccgtggaactgttcgccggcgtttgctccagccacctga

SEQ ID NO: 337400 - DNA, 1278 bp, Pseudomonas aeruginosa
gtggtcgacacgccccaggtagtccaccagcccatcggcacgtgcccgggtcaggtcgccgctgcgatagacccgctcgccgttgccgtacggatccgggacgaaacgctcggccgtcagcgccggccggtccaggtaaccccgcgccacaccttctccacccaggtagagctcaccggccagacccagcggcagcaggtccaggtccgcgcccagtacataggccctgcgacgtcccagcaaggtaccgataggtgcgtaagccgcaccgcacggatcctgcggacgcgccttccacaacaagggcgtgaccaccgtctcggtcggtccatagccgttgaacaggtagtccgggcgcaggctttcccaggccagctcgtagctggcctgcggcaccgcgtcaccgccgaagcagtacacccgcaccggcggcgggttgccgtcacgctcggcatgctcggccagttgctgcaggtacaccggcggaaagaccccgatggtcacaccgtgacgatgcatctgcgcataggtctcctccggcagccagatactgtcgtcgcgcaccagcacccgcgctccgttgatcaacgggtgcatccagccttcatgggcaccgtcgaaggcgaacgacatgaaatgcagctcgcagtccgccgggctcgtctcatagcgctcgccggtcgcacggatatgcgacaccagcggtccgtgggataccgccacgcccttgggcaggccggtcgaaccggaggtgtagatcacgtaggccaggttttcctcggccagatcgacctccggcgcaccctccggacgatcctgccattcgcccggatcgtccaccgccaggctcgccaagccggcgggcaacggcagacgctcgagcacgtcgcgctgggtcagcaccagcgccgcgccgcaatcctccagcatgtagcgcaggcgctcggccggataggcgatgtccagcggcacgtaggcgccgccggccttgagtacggccaggaacgccaccatgatctccgccgaacggcgcatggcgatggccacccgcacctccggccccacgcccagctccaccaggcgctgggccaggcggttggcctggctgtcgagttcgccatagctcagccgctgctcgccgaacagcaccgcaatcgcctccggcgctcgacgcgcctgctccgcgaccaactggtggacgaacggccggctcggatagtcctcgccggtctggtccctgcgcgccagcagcaggtcccgctcggaacgatccaatag

SEQ ID NO: 337401 - DNA, 1665 bp, Pseudomonas aeruginosa
atgggggccgcctataggcagctcaggcgaacaactgcgtcgatccgcccatacgagagtcagtggcggtcacaccaaactgcggatctgatcaccatctcaacgcagacgtcagaacaaagagagacaccgacgtgcctatccggtcggtgtattcgatatcatatgtcggcaatgaaacatggagttacgatcttgaaagtaagtgaattgtcaggccaaaccgcacgcctctccggcttgaacaacatcaacatacttgtaggccgcaacggcgcgggaaagagtcgtttctttcgtgatatcgacgaaatggccagccgcagtacgcaactattttatgtccggtatgtcagtccagagcgagcggggtcgttcaagcgtgatggcaacgtcctcacaaatatgagcaacgaccccgaatggctgcggcacacgcgtgcagtcaatcaggccagcgacttcaaagctgcatcggcgatgctctttcgcgaggctgaaacgctttatctgcgccggctcgcacgcacaccagaaatccgcttggatccgacacgcaatttcgagacagaccggttgagcaaagtaaatcaactgctcactaatatttctctagagatgggtaatgccgatttcgagtttcgctcgctcctcaatggtgaaacaatcgctccgcaacaaatcagcagcggcgaatcagaagctgtggccttggccgctgagattctctattttttcgatacgattgatcccgcgaagttcaacgtactcctccttgacgagccggacgtacatcttcacccagatctgcaggcacggcttggcaagctaatcatctctatgcttgatgagttcaaagaccacgcagacagcatagccgtatgcatctccacacacagctccccgctagtctgttctctcgcagcttcgccgtatgtgtcgatcggcacaaagagtttcgcggtcgatatagttgaactgaaaccggccagcgccgagcttcgcaagattgctccgttcctcggacatcccctctccctttcgcttagcgatgatgcagctctgatcctcgaaggagaagacgatgagcgcgtctggcagcaagctgcaagaacgtcacagggcaggatcaaagtctttccagtgctggccgccagcgtcgatcagcagggcgctcttgagactttctgcatccaactgctagacacactctacgacaacccagtcgccttttcgattcgcgacggcgacggtgtggtggaccagccgctcgaacaccgcccccccctcaagcgttaccgcctccagtgctacgcgatcgagaatgctctattgactgactcatgtcttgccgtaatggacacgacctgggaagacttcatcgccacatcaaggaaatggatcaaggacaatccagaccatcgtgacaccgctctcattgaggagctcgccggatcgagcgaccgcctacggcacaagaagataaaaaaaatccgtaacctcatctgcgacgtcgccggttgcaagaagccttgggagatcgtagttggtcaagcgatcgcagcactgacaagagaagatcttgcaaatccaaacatgctaatcgacttcctcggtgcggaaatggtcagcaacgttatcttcagggatgcggtaaatccatga

SEQ ID NO: 337402 - DNA, 966 bp, Pseudomonas aeruginosa; identical to SEQ ID NO: 324937

SEQ ID NO: 337403 - DNA, 630 bp, Pseudomonas aeruginosa
atgtcgacggcagtattgaacaagcatctggccgacgcccacgaagtgggccacgaccaggatcatgcacacgatagcggcggcaacaccgtattcggtttctggctctacctgatgaccgactgcgtgctgttcgccagcgtcttcgccacctacgcggtgctggttcaccacaccgccggcggccccagcggcaaggacatcttcgagctgccctacgtgctggtggaaaccgccatcctgctggtttccagctgcacctacggcctggccatgctctccgcgcacaagggcgccaagggccaggcgatcgcctggctcggggtcaccttcctgctcggcgccgcgttcatcggcatggagatcaacgagttccaccacctgatcgccgaaggtttcggcccgagccgcagcgccttcctgtcgtccttcttcaccctggtcggcatgcacggcctgcacgtcagcgccggcctgctgtggatgctggtgctgatggcgcagatctggacccgcggcctcaccgcgcagaacaacacccggatgatgtgcctgagcctgttctggcacttcctcgacatcgtctggatctgcgtcttcaccgtcgtctacctgatgggggccctgtaa

SEQ ID NO: 337404 - DNA, 1977 bp, Pseudomonas aeruginosa
atgttcgggaaactgacactctcggccgtgccttaccacgagcccatcgtcatggtcacactggccgtcgtcgccctgctgggcctcggcgtggtcggtgcgatcacctactaccgcaagtggacctacctgtggaccgagtggctgacctcggtcgaccacaagaagatcggcgtgatgtacatcgtcgtcgccctggtcatgctggtccgcggcttcgccgacgcgatcatgatgcgcggccagctggccctggccgaaggcgccaaccacggctacctgccgccggagcactacgaccagatcttcaccgcgcatggcgtgatcatgatcatcttcatggccatgccgttcatgaccggcctgatgaacctggccgtgccgctgcagatcggcgcgcgcgacgtggcgttccccttcctcaactcgctgagcttctggctgctcgtggtcagcgccatgctggtcaacgtgtcgctgggcctgggcgaattcgcccgtaccggctgggtggcctatccgccgctgtcggagctggcctatagccccggggtaggggtggattactacatctgggcgctacagatatccgggatgggcacgttgctcacggggatcaacttcctggtcaccgtgttcaagatgcgtgccccgggcatgaagctgatgcagatgccgatcttcacctggacctgcaccttcgccaacatcctgatcgtcgcctcgttcccgatcctcaccgctgcgctgggcctgctgtcgctcgaccgctacctggacatgcacttcttcaccaacgagcttggcggcaacgccatgatgtacatcaacctcttctgggcctggggccatcccgaggtgtacatcctgatcctgccggccttcggtatcttctccgaggtcaccgcgaccttcgccggcaagcgcatgttcggctacaagtcgatggtctgggccagcgccgcgatcaccttcctcggcttcaccgtgtggctgcaccacttcttcaccatgggttcgggcggtgacgtcaacggcttcttcggcgtggccaccatgctgatctcgatccccaccggggtgaagctgttcaactggctgttcaccatctacaagggtcgcctgcgcttcagcacgccgatcctgtggaccctgggcttcatggtgaccttcaccatcggcggcatgaccggcgtcctgctggccatcccgggcgcggacttcctgctgcacaacagcctgttcctgatcgcccacttccacaacaccatcatcggcggcgcggtgttcggctacctggccggcttcgccttctggttcccgaaagcgttcggcttcaccctcgacgagaagtggggcaagcgctccttctggtgctggctggtgggcttctacatggccttcatgccgctctacatcctcggcttcatgggcatgacccgtcgcctgaaccactacgacaacccgctgtggaagccgtacctggtggtcgcgttcttcggcgccgtgctgatcttctgcggcattgcctgccagttgatccagctgttcgtctcggtccgcaaccgcaagcaactggccgacgtcaatggcgacccgtgggaaggccgcaccctggaatgggccacttcctcgccgccgccgttctacaacttcgccgagctgccgaaggtacaggacgtggatgccttccacgacatgaagaaggccggcaccgcctaccgcaagctgccggcctaccagccgatccacatgccgaagaacaccgccgcgggcttctccatcgccgtgttcgccttcgtcttcggcttcgccgccatctggcatatctggtggctcatggcggtcggcttcgtcggcatgatcggctccttcatcgtgcgcagctacaaccaggacgtcgactactacgtccagcccgaagagatcgagaagatcgaaagcgcccgtttccagcaactcgccaagcaggtctga

SEQ ID NO: 337405 - DNA, 828 bp, Pseudomonas aeruginosa
atgaattacaaccagccagccaccctccaggccgccatcctcgactgggcgggaaccgtggtcgatttcggctccttcgcgccgacccagatcttcgtcgaggccttcgccgaattcggcgtccaggtcagcctggaggaagcgcgcggtccgatgggaatgggcaagtgggaccacatccgcaccctctgcgacatcccggcgatcgccgagcgctaccgcgccgtcttcggccgcctgcccagcgacgacgatgtcaccgccatctacgagcgcttcatgccgctgcagatcgaaaagatcgccgaacattcggcgctgatccccggcgccctgcaggcgatcgccgaactccgcgggatgggcctgaagatcggttcctgttccggctacccggcggtggtgatggagaaggtggtagccctggccgagaccaacggctacgtcgccgaccacgtggtggccaccgacgaagtgcccaacggccggccatggccggcccaggcgctggccaacgtgatcgccctggggatcgacgatgtggcggcctgcgtgaaggtcgacgacacctggccgggtatcctcgaagggcgccgcgccgggatgtggacggtggcgctgacctgctcgggcaatgccctgggcctcacctacgagcagtacaaggcgctgccggcggccgaactggagcgcgagcggacgcgtatcgaacagatgttcgaaggttcgcgtccgcactacctgatcgagaccatcgccgagctgccagcggtggtccgcgacatcaatgcgcgcctggcgcgcggcgagatgccgcagggtaactga

SEQ ID NO: 337406 - DNA, 1116 bp, Pseudomonas aeruginosa
atgagcactgccgaacgcgcacccatcctgctgacccccggtccgctgaccacctcctaccgtacccgtcgggcgatgatggtcgactggggctcctgggacagcgatttcaacgaactcaccgccagcgtctgccagcgcctgctgaagatcgtcggcggcgaaggcagccacacctgcgtaccgttgcagggcagcggcaccttcgccgtggaagcggcgatcggcaccctggtgccgcgcgacggcaaggtcctggtgttgatcaacggtgcctacggcaagcgcctggcgaagatctgcgaggtcctgcaacggcccttcagcaccttcgagaccgaagagaacgtgccgaccaccgccgctgacgtcgagcgcctgctggccgccgatccggcgatcagccatgtggcgctgatccactgcgagaccagcaccggcatcctcaatccgctcgaggccatcgccaaggccgtcgagcgtcacggcaagcgcctgatcgtcgatgccatgagctccttcggggcgatcgggatcgatgcccggaaagttccgttcgatgccttgatcgccgcctccggcaagtgcctggagggcgtccccgggatgggcttcgtcttcgcccgcagcgccgccctggaagccagcgccggcaactgccactccctggccatggacctgcaggaccagcacgcctacatgcgcaagaccgggcagtggcgcttcaccccgccgacccatgtggtcgccgccctgcacgaagcgctcagccagtacgaagaggagggcggcctgccggcgcgccagcggcgctacgcgagcaattgcgaaacgctgctcggcgagatggcccggctcggtttccgcagcttcctgccggcggaaatccaggcgccgatcatcgttaccttccacgcgccgcgcgatccgcgctaccgcttcgccgacttctaccaacgcgtgcgggagaagggcttcatcctctatccgggcaagttgacccaggtggaaaccttccgcgtcggctgcatcggccacgtcgacgccgcggagatgcggcaggcggtcgccgccatcggcgaggcgctgcgcgaactggaagtcctcgagatctga

SEQ ID NO: 337407 - DNA, 1017 bp, Pseudomonas aeruginosa
atgcctatcaaacacgccatcgtccacctgatcgagaagaagcccgacggcaccccggccgtgctccacgcgcgcgacgccgagctgggcgactcccaggccatcgagaacctgctggccgacctcaacgaaagctacaacgccaagaacaaggcctggggcttcttccagggcgagtccggagcctacccgttcagcggctggctcggtgaatacctggagggcgaccgcgacttcgtcggcttcagccgcgaagcggtcgagcacctgcagaagctgatggaggagtccaatctctccaccggcggccacgtcctgttcgcccactaccagcagggcatgaccgactacctggcgatcgccctgctgcaccacagcgaaggcgtggcggtgaacgagtcgctggaggtctccccgtcgcggcacctcgacttcggccagctgtacctggccgcgcggatcaacatctccgagtggcgtaacaacaagcagtcgaagcagtacatctcgttcatcaagagcaagggcgggaagaaggtcaccgactacttccgcgatttcatcggctgccaggagggcatcgactcaccgggcgaaacccgcgccctgctcaaggccttcagcgatttcgtggaaagcgaggacatggccgaggaacaggcccgcgagaaaaccgagacgctggtcgactacgccacctcgcaagcgcgcatcggcgagccgatgaccctcgacgcgctttcggaactgatggacgaccagcaaccgcgggcgttctacgactacatccgcaacaaggactatggcctgtcgccggaaatcccggcggacaagcgcaccctcaaccagttccgccgcttcaccggccgtgccgaaggcctgtcgatcagcttcgaggcgcacttgctgggatccagaatcgagtacgacgaggagcgcgacacgctgcggatcagcaggctccccactcaactccgcgaccagctcaagcggcgcaaggcccaaattggagaatga

SEQ ID NO: 337408 - DNA, 159 bp, Pseudomonas aeruginosa; identical to SEQ ID NO: 329011

SEQ ID NO: 337409 - DNA, 171 bp, Pseudomonas aeruginosa
atgtcccgccggccggattgctcaatcgtcataaagtggcaggcccttgagcgtgggcgcgaatggatcgagtaccaggaaccgaatgtctgcttgtcccgcgaggtgaagcagatcgaccaggtgttcgtcgaggccgaaggcaagctgctgctctcgaagagttgctga

SEQ ID NO: 337410 - DNA, 255 bp, Pseudomonas aeruginosa
atgaacccactgttcaccaacctcacccaggaaaccctcgcctaccttgaggaccaactgtccaacaacgacgtcgccggcgacgacgagctcatcgacctgttcatcgaggagctgtcgctgaccttggagcaggcggaagcagctgtcgcgctacgcgatcagtacctctgccaggtcttcctgaacggccaagggccgctgcaccaagacgatgggctgagcttcgaccctcacaccaagagcgttcggtaa

SEQ ID NO: 337411 - DNA, 657 bp, Pseudomonas aeruginosa
atggaaacggagggaaaggtgccggctgcgatcgatcgcggggcactcgcccgtctcctggaactgacactgtccaccgcccaggccggactcaccttctccaaggatcgcttcgacatcgaacgctttcgcacgctccagcgcgccgtggctgaattcatcgccaatgatcgaggagtgacgtgcgaacgggtcgagcaatggatcgctctggatagccattacccgaccccgaagctggatgtgcgcgcattgatcctcgatccgcagcagcgggtcctgctggtacgggaagcctctgatggctgttggaccctgccgggtggctggtgtgacgtaaacgagtcgccgggagacgcggtggttcgcgagacccgcgaggaaactggcctggaagtccaggccgttagcctgttggcgctgttggataaacacaagcaccctcacccaccccagctgccgcatgcgctgaaagccttctttttctgccgcatcactggcggctcgcttctgcagcttacggacgagacttccgcggccgactacttcccggtgaatgcgttgccaccactatccgagcaccgggtgctggcctcgcagatcgaaaacctgtggcagcgtatccgtgcgcaaacaccggaggcacttttcgattag

SEQ ID NO: 337412 - DNA, 477 bp, Pseudomonas aeruginosa
atgaaaacgacctactttctccgattcggcgagacgcccgtggcgttcaccgccgatcggcacgacctgtccatcgtcgcgggcctatccgacctgtccgcctacaaggctctctacgacgaaaccggttggagcagccactggcactggacacccgacgattggcacggccacctcgaacgggaagacgtcagcggtatgctgctctgcgtcgacggtcgccctgccggcctgttcgaactgcggggaaaggagcgcgcactgacggaaatctattatttctgcatcgccaccgcttaccgcggtcgcggcctttcccggccgttcctgcgccatgcggttacccaggcctacaacgaaggcgccgggaacgtctggttgaaaaccagctctacagatcatctcgcggcgttgccgctctatctcagcgaagggttctatctatgggacattcatcggacggtttgcaccatgtga

SEQ ID NO: 337413 - DNA, 810 bp, Pseudomonas aeruginosa
atgaaccctgaaagctacgtgcttgccgtcggcacggccgatgtccggcgtctggctatctccgacaggatctatggagcggcttcgcgccgcctgctgacgccctgggtcgccagacggaacataaagattctcgacgctggctgcggcccgggcaacatgctgctgtggttctccgcggaagtcggagagggtggcagcgtcgtcggcgccgatcgaagccgacagcagttgagcgtggctcgccagcgcgcgcaggcggaaggtcggcgcaacattcgctttgccgaggcggacgtcgaggacctccacgagttcggtgaagcctttgacctggtctactgccgcttcaccctgatccacctggaaaacccgctgcgcgcgctgcgctcgctgtacgcggtgctcaagcctggcggcatgctcgtctgcgaggaaccggtgaccgagtcgcatgcctgcactccgtacaacgaggcgttcgaccgggctaatcgcctgaccatcgcgctcggacgaagtcgtggcgtcgattacgacctcggctaccggttggggagtctctgcgtaaaggccggtttcgagcgggttaccgtcaacagcgagcaaccggagatcgcggaggtgaacgaacgtagcatcttttccgactccttctcacaggtcatggaccaggtggtggccgctgggctagcccagacgcatgaagtggacggcgtcctgcaaggcctgcgggcgttggagcaggacccggcctaccgattgaagggtttctgtacggtgcaggtacaaggcttccgctcccattga

SEQ ID NO: 337414 - DNA, 393 bp, Pseudomonas aeruginosa
atgagccgcccagcgcttcgccacgctttcgagcgctgccggttcgacgctcaagtcgctcatgacggtgtcggtagggttcttgcctgtcgggcgctaagtggcgcgatcggaatcggcctcaacttcctcgacttcgtcggcattccgccaggctgcagcatcgggcggcaccgccacggcccgagcgatagcgaaatctacatcgtggtatctggctccggggaaatgctcctcgacggcgagcgcttcgccgtcgagcccggcgcggtgctgatcaacaccccccagggagaacacgaactgcgaaacaccggcacgaccctgctgaagttggtcgtgatcgatatccccgtcaacactcgagtggaggagtcacgggatgaaccctga

SEQ ID NO: 337415 - DNA, 711 bp, Pseudomonas aeruginosa
atgggtgcgctgcgttggatattcttcgatgtcggcaacacgttgatgaatatcgactacgaggtcatcgcccggctgagcaagacgccgatgcaatccctgctccgacgcgcaccgcaggcctggctggcgctcaatgcgcggcttgagcgtgccgccgtcgagggcggctcggtggcggtcctggatacgctgctgacgcacctgctgccaggatgggacgaacgacggctcgcctcgctcggcgagcgtatcgactcgcgcgagctatggcgcatacccaacgaaagcgcgcgcgagacggtggagcggcttcgccacgcgggtatccggctggcggtgatctccaattccgatggcacggcggaggagttactggaaaccgcgggctggggagacgcgttcgagttcgtcatcgactcccagcgccttggcgtcagcaaaccggatccaagcatctttgtcgccgccctagagctcgccgggacgagcgccgagcaggccctgtacgttggcgacctgcccgcgatcgacatccgtggcgcgctgcgtgcgggcctctcggcggtgctttacgatccagacgacaactatccgcttgacgccttgcctcaagtcgacggccgggccgcccgctgccaccggatcacggcgatgtggcaactgccttacctcgtcgaactgctcggagcgcggagtgcgcagccatga

SEQ ID NO: 337416 - DNA, 1248 bp, Pseudomonas aeruginosa
atgatccgagtggacggcccggcgccgaggctggagggcgagatcgaggttcccggtgccaagaacgttgccatgccgttgttggtggcggccgcgttgcaggggcgcgccctgcgcgtcgacaacgtgccgcgcatcgccgatgtcggccatctgcttgaactcctgcgggtctgcgcggtggacagcgagatacggcggtccagtgtgacgctgcgcgggcaccagccgctgcccgctctggtgtgctttcctgccgacaccgccgctcgcttgcgtggcgcggtatacgctctggccttgccggccagccagggacgtcgcgccgtgctgccctgtatcggtggcgatttcatcgcgtcccgctcgttcgccccacactgtcgggccctacgcggtttcggcctagaggtgcggcatagtgacggtgcgctggagataaccggcggccggccgcgaccggcggagttcgatctagacgaccagggcatcaccgccacctgcttggcaatcctgatcgctggtgcgctcgaagggcggacggtcctgagcacggcgagcctggaaaccgagtgcgacgatgtcatcgccgcgctcaacgccctgggcgcgcgggcatctcgcgaagggcgcacgatcttggtggatggtccctacgggggggacgtcgacagcctgagcgtgcccggagaccacctagtctggggcaccctggcgatggctgcggcgatcactggcggcagcacccggtctcggacgccggcggaccaccgctacacgccggtgattgaactgcttgaagcctatggactgtcggtcgatcgacgggacgatgggctgcgggtatcgggagcgccccggcggggggtggaggtgcgcacggggatgttcccaagctttccgtccgaccttctgccgccagccatggcgctagctgcggtggcaccgggcaccagcgtgttccatgaagcgcactacggtagccgcttcgatcacgctgggggcatgcgtgccctgggcgcgcgcatcagcatcgacggcgaacacggtacggtgaagggcggcgagcgattgcgcggcgcacgcctagccggagctggcatcagggaaaccaccgccttgctcctgctgtctctggcggcggaaggacggacctggctgtccgacatcggctcgctctaccgcggctacgaggatctgccaggcgcgctgcgccacttgggcgcacctttgcacgtgctcgactga

SEQ ID NO: 337417 - DNA, 948 bp, Pseudomonas aeruginosa
atgaatacgcttagctttctggtcgtcggttgtgggcgcatgggtaaaatcagagcggcagccctgcaggccctcggcgcgcgcatcgcttacgcactggacagcgacccggcccgtgcccaggcgctggccgaatacgatgcggacttgcaaccgctaaccgacctcggcgctgtcgactgggcacgtatcgacggggtgtttgtctgcacccctccgggttgtcgcggcgaagtcgaatacctagcccgtgaacaacgcaagccattgttcgtcgaaaagccgctgcatacctcgctgcaacgggccggagaactgctcgggctgttcgcgcaatccgaactgccggtgggcgtgggctatatgaaccgctaccgggaatcggtgaggcgggtccgagcgctgctgcccacgctggaagtcatcggcttccagggacgctgggtctgcaagccatacgcggttccctggtggagtgaccgggcgttgtccggcggcgcgctgaacgagcaggccacgcatctggtcgacctagtgcgcttcctgatgggcgaagtcggttcggtcgccgcctaccgccggcaggcgcgctccggttcgagcgagtcggtctgcgtggcgctcgatctgcaggccggtatcaccggttcgctgctctattcgtgctccggctgcgaaaaggacatcggcctgcagatatttaccgaccgcggcacgatcggcctggccggctgggacttcgccccggactccccagcattcccggaactcgccgccgacaagaagtcagaggacgtgttcctggtggagaccgcctgcttcctggaaagcgtacgcagcggctcctcggagttgctcgcctctactctggaggacgcctacctgacccaactgacaatcgatcgcatagctcgctccatcgctggcgaacggatggtgagtgtgtga

SEQ ID NO: 337418 - DNA, 1203 bp, Pseudomonas aeruginosa
atgaagcgcattacaatcgttggcggcagcagcccctacactgtcgagctgtgcgagcaactgaggcgttcgcggctggccgactgggctttcgaactggtgctgcacgggcgcacgccggccgccctcgaggcggtcgcgaggtacgcccgcggcgctctggtgggctggaaagtgcgtacctcgcaggcgctagaagaagccttgcagggcgcgcacttggtgatccatcaaccgcgctatggcggttcggccgcgcgggcgaggggcgagcggctggccagccggctcggcttgcccgccgacgaaacgctgggccccgctggactgctcgctgccctggagatcacgccgcacatccagcgcttctgctcgatcttgcggcaggcctgtccggacgcctgggtgatcaacatgagcaacccggcgagcctttccacttcgatcttcgccctcggcgggcaggcccgctgcattggcgtctgtgagctgcccatgctgacccggcggcgcatcgccgagttcctggacgtgccgccgccgtcgctggaatggtcctatgccgggttcaaccacagaggctttctgttcgatctgcgggtcgactcccgaccggtactcgatacgctcctgcggcgactcgatgcgagcggcctgatgggcattccgaccgacgtcatcgaacgtctcggggcggttccgaccaagtatttcgccctcttcgacagccatcaggcactgcgcaacgaccgctcacgcgtattggaagacttgcgccaggaggtattcgccgagctggagcaagcgccggaccgctatcctgcatcgctgggccggcgctcgatgccttggtacgagttcgccgtggtgccggtgctcgaagcgctgagcggcgtgggacaaccgatcgttaccaccgccaacgtcgctggcgaagacggcctgacctgggaaaccttctgcacggtcggcgaagcccgagtccaggcagcgcctccgcagctccaggttcccgaaccggtgcgcccctggctggagcgcttcctcgagcacgagcaacgcgcgctggagacgctgctgcggccttccgcacagaccatccgcgccgcgctgcgcgcggacccgattatccccgcgcagaagagacaggccgcggaacgggaaattatccggagcatggaggaactgcatgaatacgcttag

SEQ ID NO: 337419 - DNA, 996 bp, Pseudomonas aeruginosa
gtgagcgtggtcttcgatgtcggcggcaccagcctgcgcttcgctctcttcgatccggcgacgggccggctctcggggcgtggcgaggtcgcgacgccgaactacatgagttcgccgaaacgcgatggggagcttgtcgcggaagtgctcgcgagtatgcgtcgctgcgtgcttgaacaccgtgctgaacagccggcggcaagcatcatcgctgccctcccgggcccggtcattgacggcgagtacgtcagccacctgccgaccatcctcggggcgccgttgggcgaaccgttggcggtcggcacgttgatgcgcgaggtgttcgggacccatgacgtacgcctgctcaacgacatcactgcggccggctaccgctttctcgaccgtcacggcccggacttcgcggtgatctcggtcggctctggggtcggctccaagctgttcctcggcggccggccgattgtcggccggctgggtgatgctggcgagatcggccacctcgcgctggatagcgcggacctcgatgctccctgcgaatgcggcggcaacggccatgtcggcgcgctcgcctcgggacgtgggatcgtccgcttgggtatctgccgggcccgcgccaacctgcgggaataccgatcctcgcagccgggcgccttctgccccgtccccgaacgcctgaataccgcagtgctggccgccgccttccgtgacggcgacccatggacgctgcgattggcgcgcgcctccctggagccgctggcccaggccatggcgacgatccgggctgcgaccggaatcgcgcgctatgtgcttatcggcggcctcgccatcgctctgggacaacgctacgtagaggcgctgcaggaagcctgcgcacgccactacgcctgggcgagctggaacgacagtatccatctggggccgggcgatgactgcaacggcttgatcggggccggcatttattcctgcatcgaggaggacaaggcatgcacatggtaa

SEQ ID NO: 337420 - DNA, 1197 bp, Pseudomonas aeruginosa
atggaaattatggcgaacgactcattgggtagcgacgagtgcctgacctggcgcattcggggcgaactcaagctgcaatacgacgttatcgaagcgcccaatttgctcgacgtcgacagtcggatcctggaagacatcggccgcgaggatacgcagaaagaacggcgaagcctgcttgtcgctgatcggcaagtcttcaagttgcacggcgacaacataacccgttacttcattggccgcggtatcaagttccaactgacggttatcgatataagtgagtcgaccaagaacctcgacactgtcaggagcatattgaacagcatgatcgagttcggcatcgcccgtcgctgcgagccggtgattgtcttcggcggcggctgtctcatggatctggtcggcctggcggcggggctctatcggcgcaaggtgccctacgtgcgggttcccaccacgctgctgggtatcgtcgacgcggccatcggagtgaagactggttgcaatttcggcgaacacaagaaccgcatcggcagctactacccgcccgtcgcggcactactgaaccgctccttcctgcgtaccctgccggatcgacacatcaggaacggtctggccgagatactgaagatgggcatcgtggcggacgaacagctcttcgcgctgctcgaaacccattgcgaagcgctggtccaggaacggctggcggagtcgcggccggcggccgaggtgattcgcctggccgtgcagagcatgctggtgcagcttgaaccgaatctctgggaaaccgatctgcgccggattgtggatttcggccatggcttcagtccgatcttcgaaatgaaggcgctggacgaattgctgcatggcgaggcggtggcggtggacatgtgcatttgtacggtgatcgcagcgaaccgcaagctgctcgcctggcctatggccatgcggattctcgagctggtggtgcgcatggggctgccggtgacccacccgtcctgtacggctgagaatttccgcgatgctttgctggacgccagtcgccaccgggggggccgccagtcgataccggtgccgtcggcgatcggacgggcggtgttcttggatgacatcggcgtcgccgaatgcctgtccgcctgtgccttcatagagtccttcgtcggccgcggcgaagacatcgcggccagcggagcaggacggtga

SEQ ID NO: 337421 - DNA, 1023 bp, Pseudomonas aeruginosa
atgaagacttccttcgatttctccttgagggagatgaataccttcggcatgaaggtcaacagccgcgtctatatagagatcgggacgaaagaggaactcgtccaggcggtgcttagggcggacttggagggctggccgctgttggtgctcggtgagggtagcaacgtgttgatgcgcggcgacttcgacggggctgtcctgcgccttaccgggctcgaccaagtgcgcataatccacgaagacggtgatgccgtgcacctgcgagtcggcgccggcctgaactgggatcgcctggtcagacattgcgccagacaaggttacgccggccttgagtcgctggcggggattcccggcacggtcggcgctgctccggtacagaatgtcggtgcctatggctgcgaggtcggccagcgactccgccagatcgaggtctatgatcgcctagagcacgggttccgtctcatcgccgccgaggactgccggttttcctaccgaatgagcctgttcaagtcggactggcgagagcgctacatcatcgtcagcgtgaccttcgtcctcaggcgagctgcggatgcccgagtgagcgatcccaagatccgagaagaactcggtctgcgggacgacacgcccattgccctcgggcggattggcgaagcggttcgcgccgtgcgcggccggcgactgccagacccgggaaaactgggtaacgccggaagcttcttcatgaacccgatcgtttccgcgacgcatgcccaggcgctcgccaggcgctatccgcaaatgccggtctacccggtttccgccgaccgcgccaagatctccgccggctggttgatagagcagtgcggttatcgcggatatagaagcggcaacgtcggcgtatactgggacaacccactcgtcgtggtgaactatggcgacgcctgcgcagccgagatactggcttttggaaggcttctgaaagaggccgtgctagcgaagttttccgttcggttgcatatggagccgtcggtcattggatga

SEQ ID NO: 337422 - DNA, 708 bp, Pseudomonas aeruginosa
atggaacagttgttgagccggtgcctggctcagagcgccagcttcaacgtacgggacgagcggggcttcaaccggttgctggaaaggctgcgggaccaattgggcttcgactatctggcattcggcgtgcgcgctccgctcccgatcagtcggccgcagatgcatttgtttgggaattatccgggaggctgggtttctcgctatatcgaacagaactatgcgcgtgtcgatccttacctgaatctcgagagcggtgatcgtatcctctgggacgacgcccgtttcgcggcctgtcccaacctgcgcgatgaggcgaaggagtttggcctcaactacggtctgtcgctgtgctgcaaggtgagtaacaacggcatcgcggctctctccatgggacgcaggagcgaacaggtcactttcagagaaacatcagcgatacgggtggagctggaattcctgctcgcctacctcgccaactatgcggcagaactgcatctggcacccacggtattccgcgagtaccggataagttcgaaagagcgggaagtggctcgctggattgccgacgggaagagttcaggcgagataggttcgatactgggtgtctcggtcaataccgtcaacttccacataaagtccctgaatagaaaactgggcacccgcaacaaggccggtatcgtggcgtgcctgttgtccatggaattgatgtga

SEQ ID NO: 337423 - DNA, 906 bp, Pseudomonas aeruginosa
atgggaaaatttgcccatgccctggctttgaccttccccctaatagggctcgtatccacagccggcgccgccgaggagataacccaagacaagaccagcttcgtgctacacaagatttccgagcatatttacgccattggggagccgaactactatcagaaaaactattcctacctgctagtgggctctgacagagctctgatgtttgatgccggcgccaaccaaaaggacgacatcactaaactggtgcggacggtgacgaaccaaccgttatcggttctaccctcacacttgcacttcgatcacctaggcggcttgcacaacttcgacagcatttacctgccggatctacccttcgttcgcaaattccaacagaaagacgggctgtaccacgtgccggagcctgtccatctcggtaacattgatcaatttaccctgccgccctttaaggtttcccgcttggtcaagctaggtgagaaaatcgacctaggcgactacaaggtgaagcttttgagtactccggggcatacacaggatgaagtggcgctgtatgacgagaccaacaacatcctgctgtccggcgatcatctctacccatcctggctactggtcggaaatttgagcgactacattgactccctctcctcaaccctgaaactgatcaacaaagacactcgcatctatggcgcccacgcggacgaggcctccgacgggataccgatcatgacctacgaagatgtactagagatccgcaataagatgatgcaaatccaagccaacagggtccagggggaagcattcacaaccaccgccctgatcaagggctcgaagctctacaaggtcgtaaaggacatcagcatcctcacaaatatccaattcaccgatgggcgccgctacggctattga

SEQ ID NO: 337424 - DNA, 888 bp, Pseudomonas aeruginosa
atggctctgcctccactttacagcatcaaagttttcgagtctgtcgcccgcttgggcaatatgtctgccgcagcggttgaactgcatgtcaccattggagccgtgagccagcaagtcaaggcgctgcaggacggcttgggcgtggcgctttttgagaaacgtggtcggcaactggtactcaccgacatcgggcacacattgcggcagcgagtatccggggcgcttgacgagatcaacgaagctgtgcaggtagtgcaaaacagcgcgaagcaggcgtctgagcaaatcgagctgacgctctccatcccgcctattgaaggagtagcttggcttgccaggccgctgttcagcttcatggaggagagccgctcaatcaaactgaatgtaatcaaggccaccaagttcagccaggtggattggcgtaaggctgatgtggcggtggtctacggtacgccaccctggccgggtttctggtggaggctgttgcacggtatccacatgacccccgtctgcagcccgcagttccttcgtggccatcaggccattcgcggtgtcgagcacctctcacggcatcgactgctgcatgaggacaatggcgcccagtggcagcattggctcgccgaggcgggttactccggagcaggaacttcggacgtctactttgaagacttcggtatggtgctgcaggctgcaagagatggtttcggtgttgcgctcagtgacgggctggtatcggcccgtgacctcgatgaggggcgactggtgcagcccctgtcattctcagttccggctgtgcataactactactgtgtatgcagcgaggacaaacgaaaaagtcccgaggccctagcctttatcgactggttgatgtcgacaaccaactggtaa

SEQ ID NO: 337425 - DNA, 1020 bp, Pseudomonas aeruginosa
atggtaatgtcaccactgacacgcagccgcgctggcaagggagacacagcgactgcgttgatcgccgagtactatcggcagcgtgccacagccggccttattatcaccgaatcttcgcaaatctcagcccaagccaaaggctatccacgcacgccgggaatattcaacaatgatcaagtcgaaggctggaagctggtcaccgacgccgtccatgctgaaggtggccagatattcctacaaatctggcatactggtcgtctgtcacatcgaaccgtgcaacctagtggcgccttaccggtagctccgtcagcgattaaagccgaaggggacatcttcacacctgaaggcctcaaagcgttggaaactccgcgagcgctagacattctggaaatcccaggcatcgtcgaagacttccgcagggccgccgcaaatgccaaactggctggattcgatggagtagaaatccacgcggccaatggataccttattgatcagtttctgcgtgatggcactaatattcgtacggactcctatggtggctcgctagaaaatcgtgctcgtcttctcaaggaagtagtcgaggcggtaatccccatcttcggcgccgaccgtaccggcgtccgactctcaccaatattcgacggtttttctatgagggatagcgaccctagagggacatttggttatgtcgcagacttgctctcgagatatggactagcctacctgcatgttttgcagtacggcgcgggcgagtttgacttcgttgagctcaaacaacgctttggaggaacctacatcgccaatgggggttacagtgccgagcgcgcagcacaggcaattagatcaggtaatgccgatctagtatcgttcggcacggcgttcctcgccaaccccgacctagttaaacgattcaaacatggcgcacggttgaacgaggcagataaagcaaccttctaccagggcgaagggcgaggttacatcgactatccgtacctagaggaactcaagtcaaagagctga

SEQ ID NO: 337426 - DNA, 159 bp, Pseudomonas aeruginosa
gtgaagaccacgaagcgcgactacatccgccacatgcccaagcctgatcgggcgacggccctgcgcaacctggccaccgccttcgagcattacaacgaggaacatccgcacagcgcactgaaataccgctcgcctcgggaattcaggcgtttggcgtag

SEQ ID NO: 337427 - DNA, 669 bp, Pseudomonas aeruginosa
gtgatagtggtcagtgagagtctcggtgtggcgcgctcgcaattgacggctcgactcaaacaacccgctccagggctgcggccgcgtcgccgccgggtgctcaacgatgtcgccctggtcgagcagatcaagcaggccgtcggcgcgttgcccagctatggctaccggcgggtctggggcctgttgcgtcggcagcatgagcagcaggcccagccaccggtcaacgtgaagcgggtgtatcgcgtcatgcgaggccatgatctgttgctggaacgctggcgcaaacagccaggtgtggcgcggcgtcacgaaggtcgtgtcgcggtggacacgagtaacacccgcaggtgttcggatggcttcgagttccgctgcgaggacggtgaaaaactgcgcatgaccttcgccctggactgctgcgaccgcgaggccatcagttgggtggccagcccaaacggctactgtggcgacgacgtccgcgatgtgatgttggaagccgtcgagcaacgcttcggtagcgaactgcctgcgtcgccggtgcaatggctgagcgataacggctcggcctataccgccgagcagacccgagcctttgcccgacagatcgacctgctgcccctggcaacaccagtatgcagcccgcagaggggatggcggagagcttcgtga

SEQ ID NO: 337428 - DNA, 267 bp, Pseudomonas aeruginosa
gtggtggcccggtgcaacgacatcaatcccaaccaattgttctactggcgcaaactctaccaggacggcagcctctcggcagtcagtgccggtgaagcggtggtgtccgcttccgagttggccgatgccctcaagcagatccgcgaactgcaacggatgctgggcaagaaaaccatggaggccgagatcctcaaggaagcggtggagatcgcccgctcgcgaaaatggattgcgcactcccccttgttgctgggggacgaccagtga

SEQ ID NO: 337429 - DNA, 873 bp, Pseudomonas aeruginosa
atggagcttttcgtggaggtcgttcggcagaatagccttcgaaaagcggctgaaaaactaaagatacctgtttctacattgtcgagaagattgtctgttctagagaaagagataggagtcaggctagttaggagaaccactaggagcttggaggttacggagcttggtaatatttactatcaacgatgtaagcctataatagatgaggctcgtattgcaaaccaaagtttaagtgatatggtgtctataccttctggcttgcttagagtttcaatgcctgtagatttctcaatggcgtatataattccactgattattaagtattcagaagcgtatccagatattttttttgaatttgatcttaccccccgtcaggttgatctggcaagagagcctctggatgtagcgataaggcttggtgagcaacagaactccagcttgatagctagacatctgattgatattcctcgttacttatatgcctctcctgaatatctgagggttcatggatatcctaggtttcctagtgatctttgctctcataagtgcttgataatgaatacgccacaggaaagaaagtattgggctttgttgagcgaaaatgaagaggtggaagttgagctgaaggggcgctttcttatgaatagcataggaatgctaaaaactttagctcttatgggggagggggttgcgatgatatcgcccggagtggtcaggagagaagtctctgatggtgcgctggtgagggttttgcccgagtggagaggtaagtcactatctgtatatgcattaaccgaaaacagattgagtccaattaagatatcaagctttatagattttttgtgtgatgggcttagatcagggctaagttag

SEQ ID NO: 337430 - DNA, 753 bp, Pseudomonas aeruginosa
  misc_feature (714)..(723): n is a, c, g, or t
ttggctactagttatgcttctttatatgttgctgtattgctgctggcaacaatacagtttttagaatctagtatgctgggttttgcctcgactcctattcgtggagagattcaggcaagtccggaagaatatagctttattgctgttttatatgcttgcttcgcagttatttctatttcaaaagttaggtggtttattgagcgtattgggtggaggaactatgtgctttcttcaattgctttgtatctacttggtgcgttgatttgtagcttcagtgatgggaaagtgagcttttcaattggacgtattattatggccttgggagggggggcatttatgactatcgggcgcctccttgcaaatacactacctagccaattgcgttttaatgggatttgcttctttgcgacgggtgttctgcttggcaccatgggagggggctgggtggctgcactgacagtcagtgcagggcactggcaagctatgttctgggttttactctttttggcaagtgcggtagctttgttgactatcatctatgcaccgaaagtgtctattcctagagatagctggactagtagtagtctttcattcgtttttcttttgggtttgttttcgttttttaccctctatcttctacagcgctcttactatgagttctatagtgatagagctatattaatattttttgctgtcctggcgatgggagggggnnnnnnnnnngggagggggaggggcgatattctatgttga

SEQ ID NO: 337431 - DNA, 822 bp, Pseudomonas aeruginosa
ttgagagctcaggtggggaaagtcgatattctagtcggcggaccaccatgccaaggacactcagatttaaataattattcgagacggaacgatcccaaaaacagcctgtatttcataatggctcgggcggcttacgtgctccaaccttctcatattataatcgaaaatgtcttgggggcgcgccatgataaaaatggcgttgttcacaagacgatttccgctcttcaggagcttggctatcgagtcgagatggcccctgtagacctaacggttattggggttcctcaaactcgccgcagactaataatagttgcgtctaaatcagccactgaaggcattacaaaggcggtcgagcgattcactacacccgtgcgcaacttggaatgggccattaaagacctcgaagatagtcattcgccgaatttggaagaaactccttctaagccgtcgaaggacaacatggctagaattaactatctttttgacaacgatatagatgacctaccaaatcatatgagacctccctgccatgcccatggcaatcactcctacaaaagcatttatggtcggttaaaatggagtgagccatcgcaaactatcacaagtggcttttatagcatgtgcatgggccgctacgtgcatccgagtcgcaggcgtacactgactgccagagaagcagctcgactgcagttcttcccagattattttaaatttaacgctgcagggtctagaactgcaatcgcgaagataatcggtaacgcggtgccacccaagctgtcttatatatttgcttatagtctgatatgtgacaatcgcatatga

SEQ ID NO: 337432 - DNA, 1158 bp, Pseudomonas aeruginosa
  misc_feature (250)..(259): n is a, c, g, or t
atgaatctcgaaaagttacaagacttgaaacctaaggtttgtggattattttcaggcattggggggttggagcttggcttccatctaaatggttttcaatctcagatgctttgtgagatcgacccggtagctgcgcatgttttgaaagtccggttccccaacgtagaacttatcgacgacgttcgagatgtgtcatcgctgcgcggcgcagatgtattatgtgctggctttccatgccaaaaccttagtnnnnnnnnnncctcaggaaacaaggtaggaatcaacggcagtcagtcctcattggtagatgaagttttcagagtactcaaaaccaatcatcctaaatgggtgattattgaaaatgtccggtttatgcttcatctaaacaaaggtgaggccatgagacggatagttgagagcttcgagcaacttggttacaactgggcttatcgagttattgactcccagtcttttggcgtacctcaacgccgccatcgggtttattttgttgcatcccgtgaagaagaccctagaaacgtcattctctctgatgacagcggtaagccggaatcccttaaagaactttcaatcgaagaaccgattggcttttactggacagaaggtgcgtttgctgccgggctaaataaaaatgccattcccccgcttaaggctggctccaccatcggtataccctccccgcctgcaatctgtttcccagatggattagttggaacgccagatattagagatgctgaacgagtacaaggcttctacgaggattggactaagccagctgaggaaatcgctaaaccatcaattagatggcgtttgcttggaaactctgtaaccgttaacgtttcggaatgggttgcaaagaaaaccttgaggccggtggaatacgacgcttcaaaagatcggcctttaggacaaaaatggcctatggctgcatggtccatcaataagcaaaggtatgagtccagtagctcagactggccttttgattctaaaatcgctcgaatatcagaatttctgctacaccccgttaagcctctctcaatacgtgcaacgacgggatttctttctagagcatataaaggcaatcttaagtacccggcaggctttctggaaatactaagtaatcattcaggatttaggtaa

SEQ ID NO: 337433 - DNA, 1194 bp, Pseudomonas aeruginosa
  misc_feature (1177)..(1186): n is a, c, g, or t
atggatttgagctcaatttcgctaaatgatttttttgaggccattcaataccttcgggaggctgactctcaaaacaacaacaaaggcaaactgattaaagagtggtacgcacaaaattttggcgctaccgcgcgcgcgagtatagtcaacgaactgcgccaagctggcaacagagtaaaagagcaactaagccctcaagatgcacaacatgttctctatgttgtgaccgaccctaatgcattagacaagctgatcaacgactgtcagaagtttttgtataatggtttagaaaccatactctttatggaggcagcaaaaggcgcctcaggtagcgccaccccagtcttcctactctctaacgcagcctctaatagttcagtggaaggattttatttagcaaacttcaaagacttgaaggtgcacaaattcagccctgaccgcaaagtcatttccacaggcgctagccaaacaaacttgcctccggccaaacttcaatcccttatagctgaagacaatgaaatttacttaaaggttttacagcttctggatgacggctatggaggcgttatcttcacgggagacccaggaacaagtaaaagctggtttgctagacagatagctctcagattggctgacggcgatcaggagcttgtaaaatttattcagtttcatccgggctaccagtatgaggattttgtcgagtcctacatccctaacgaaagcggtggatttgatctggttgataagatttttctacgcgcatgtgaggcagcacgaaacaatcctgattcaacatcagtgcttgtcatcgacgagctcagccgaaccgatgtcgtccgggtatttggtgaagctctaacctacctagaacagtccaatcgaaaactgaatttcactttatcttctgggagatcctattctgtccctgacaacttggtggtcctgtgtacgatgaatccatgggatagaggagtcgaagaactggatatggccctggaacgccgatttgcaaaaattcattttgaaccgaaaattgagttactgagagacgccctttctggaagtagcttgagcgatgagcgaaaaggaaaactcgaacaatttttcttcatgacctcccgacactcaaaccggttatgcagtctcggccacgcctattttttgaaagttaaagatnnnnnnnnnnaaagatga

SEQ ID NO: 337434 - DNA, 1248 bp, Pseudomonas aeruginosa
atggacgttcctgaatccttactacttccgagtggagaactccttgcctaccccgagattctagaaagaaacttcttttctattcgatacaagaagggaaagccaatattccaggccggaggttgggtcggcgtcattccagtaaatgacaagttaagtcttaatataatccccaaggtgcctattagcaacttggagcggcttgttttcctatccaatcacaaacccgaaatccttaagaacttcaagcgccgctattccccccacgattattcgtcaaaaaatctgaatgagttcttgatcgattgtttactaaagcacattgaagagataataaataccggactgtacaaaaagtatacgagagtagaagagcaaaccttatttccctccggaaagataaatttcaacaaaacgattagagctcgggccaaacttaatggtatgcatgtcgtagcttcgcactacgagcggatgattgacaacccccccaatcgtttcctaaaaaaggtttgtttgggtctctcaaaaaatccggaaatggtaaaggacaagcatcgccgagttgcaatacagtacgcccttaacacttttgcagaggtctcagatcactacgagctgcacaacgcgccgcacgatccgagccttaatattgagtgcctcaaagagaactatcgcgacgcggtaggcttggcaatgatcttcatttccggcaaaggattaagcttcggacttggtggttctacaagcgccaactctctgattttgaatcttgcagaagcctttgagtggtatgctcttgaggtcttgcgatccgcttaccgataccggaatgacattcaagtcttggacggaaataaaggcggcgcagatggagggaaaaaagcgttgctagttccacctccgcaagtaaaaaaaccgattatggccaccccagatattgttctaaaatctgttcagaccagtgacaactctaccattgttatcgacgtaaagtacaaatccatagaaaagcttcccgaccgcgatgaccttaatcaaattatttcttatgccgcctcttacagcgccagtcacggaatattgatatttcctgcaaatgataaaaacccatccggcataaatctaataggcgaattacctggcgtcagattttacgccctgtttattgacctgaataactcgcacatcgaggaagaggaggccttgatggcatctagattgtcagagctttttcaagggccttga

SEQ ID NO: 337435 - DNA, 876 bp, Pseudomonas aeruginosa
atgaccgtcagagtgttcttgagtcacaaccatcacgacaagcccttcgttcgcaagctagccgctgaccttgaggggcataatgtgaagtgctgggtggatgaagcggaaatgaagataggtgactcgctgatccagaagattagagagggtatcgacaactctgattacttcgcagttatagtctccccaaactctataatcgcgccctgggtagctaacgaacttgacgttgcaatgtcgcagcaaatatctggaaaaagcataaaagtactacccattgttgtaaaagagtgcgaactaccgggattacttccaggaaagctatatgcagacttcaaggacgaatcgctatacgaggaatcattcaaacgactcgtaaaagacatggggattgtctacaataaaaacatattgaacccgcaaaaaacacagcacagcctaaaaacatcaactgataaggcgtttttcagcaccttaccgctcatgagcaggccttatcaccgtcctttccaatacatcggtatgtccattgagcgagccgagaaggaggttagcggaaaggctaacgacgtgggcaatattattattgaaaacgctgattgcagaatgattctagaggcagaaggaaattacatcagttttatatcagtcgaatttaaagcaactgcacctcactttcagaaccaagaattcgattccgaaccgctactcggcgcactgagcattagcctatctgagcttgaattcgtgcggaagaaaacctatttccacacttactacgatcacaaacggcgacttaaggttagcgtcagctgtgattgtgacgaaggcccactttcagtttcgttcagctccaagtactacaacatgtag

SEQ ID NO: 337436 - DNA, 1278 bp, Pseudomonas aeruginosa
atggaggagaatgatggtgtgcgtactcgcttaacgcattcccatgaggttgccaacctagcacgctcaattggcgcgcgtgctttcaagggagctcgtgaggctttcaggcagcatggctgtgatgaagatagtctcaccgagattattaaccctctgttgctgtcaataggtcttgggcatgacttagggaaccctccgtttgggcaccaaggtgaggtggctattggtcgctggtttgagcggcgtaaaagctggatttttacccacaccaaggaaaatggggacctcttggcggctccagttcctgagaactactggcctgagtttgtcgaatttgatggcaatccacagagccttcgtctcttgactaggctgcagactcatatcgacgggcttgggcttgacttgtctgctgccacattagctgcggggttgaaataccccgtgagttacttaaatagggataaaaaagatccagttagaaaaaaagggggctactttgagtctgaaaaagatttggttgactggattagaaagcataccggactggaggagggacagcgtcaccctttgacttggattatggaggcgtgtgacgatatcgcctactccgttctggacgttgatgacgtgctcaaaaaggggattatgtctccagatgatgtacttgtaatactgcgtcagaaattcagcgctgacggtgtggttggtaaaattcaagaaaaatttagagaggttgagtctcgtctattttctccggaaatacagcgcgacattaaaattgaatatttgcgtgcgtaccttatcgaaagcttgattgagcacgcaagcaaaacatttatagagaatgctcctgccatctttgactttaaaccaatcaagcctttaatggatgatagtcggctgtgcgagaggttgaaggctgtcgcgcagcagaatgcctttaatcattcatctgtactgcgcacggaggcattgggttcggcagccatcgatgacttgatgacggtcctgtgggatgctatctctaaccgtaaggaatttgacagccttcgatcaaagcgactggacgctcgtgctaagtatgtattctcattgattagcccgaactatatcgagcaggccgaccaacctaagagcccatctgaggtggcgtcggggctgcgctatcgtgagcttcgcctgcttacggatatggtatctggaatgactgatacttttgctatgcgcctttggaaagatattaaagtgatgcctgatgccaattgcgcctaa

SEQ ID NO: 337437 - DNA, 621 bp, Pseudomonas aeruginosa
gtgagtaaagcgctccttctggcctctggcggcctggactcaacgactgtgggatatcagctcgcagcagcgggtctggaggtcgtgccaattttttttgactacggacagcattgtgtagacctggagtggagtcgtgtaaatgaagtcctgccttccgatatgcagcgacctcagcgcttcgacatatcggacatcttccgaggctcgcagtcgcggctgatttgcgaagccgacctctggactgaagaggtcaaggacgacgatctatacatcccttaccggacaatgctgttcttcgccgccgctgcggcgcgcgcgcagactattggtatcctggatgtgtataccggcttcatcaacagtaaccacgccaaagaaattgactgtactgccgcgtttatgaatagccttgacggactcacatcgagcattggcccggttcgctttcactcgccgttccgctattcgtccaaggctgatgttgccaggacagctgctgagcttggtgtgcctatcggacgaacctattcgtgccaggcgtccgcacagtttccgtgcggtgcttgtccgaactgcgtcgagcgcctgaacgccttgaaagaggcgaagttggtatga

SEQ ID NO: 337438 - DNA, 1332 bp, Pseudomonas aeruginosa
atgccccatacagatgctgtcctagttgttggggagcttgttgtcgactacacgcttgcccagcatgatgcaatgtgcaaactccgcttaggtggcgtcgcgcacgccgcgagagggttatgggctgcagagctggaatactcagtagcagctttctgcccgcaatacctcgttgacgaagcaaagagctatctctcagagttcgggtgcaaagatttcatctggcttggtgacgtagtcggcgcaccgaacgttatccttattggtgacgtcacagaggtttcgcagcaaggctacgaagacttgatgcgtaataccaaggtagtgaagttccacgatccgttaccgcgccttgatgcttaccagaaggttgtgattttccccggtaggttcgatatcaacgcactcactagcgcattcgctgcggatgcacgactctcgttcgacatcgcatacgaccttgaggacctatcgtcgctcgatgcattcaaaggtcgtgtgcaggccctcatcatctcaacatcgtcctcgctgttcatgaagcttggaaaggatgacatcgatggtctgctagattcggtgaaaacacttctgccagaggttttcctgctcaaagagaatcgtggcgggagccgcctctttaacttgcgtgatggcagcgtcatagaaataccagcgacgctgggccgcactgccaactcggtcggcgttggggatgtttattccagtgtcatggtgggtctctctcacaagggatggaccgaagcagcgtggcgcggatgccaggccgccacggtttattcgcagtcaacatttcccgacgacatcaagcgcgatgtgcgacgcgggttccgactctcgctaacggtgctggaagcgcttggcgggacggctctcccatggcacgaccggcaaagctactcgatctacctcgctggcccggatttcacgtacatcgaaaagcaggagctcgaccgtgcagtggatagcctcacgtatcacaacttcagggtgcggcgccccatcttggagaatggagagctgacgtcccccgcgagtgaagaagacctgcgccgcacgtaccacatggattatcaactgctaaaggaatgcgatgcagtcttcgcgattcctctcggccgtgaccctggcacgcttgtcgaaatcggcatggcaatcgagatgggcaagccggtcatcacttacgatcctcggcgtgaaaatgagaacacgatggtggtcgtcggaagttcggtatactccgcggcccttgatgcgtgcctcaatggcaccttcaacgcaattgctgaactgagggccgaatcacggtga

SEQ ID NO: 337439 - DNA, 375 bp, Pseudomonas aeruginosa
atgacaatgcatgacatcaagtccaatctttatccctgcgcccattgcgaaggcagcggaacctgccgcaacggagagcagcagctgtcctgcgcggtatgcatcaaggagagcgagctgaagggaaaaagctttgcaggattgccctgcatggtgtgcggtgggatcggccaggctgaaccgaagaccgaacgcatcaataagcgcattccagcactcgtcggattcatagtcgtttttatgctgcttggcggcgtactgatttgcggggttctacagagccgctactttagcgaagtactagcattcgccggccccttgatcggtagcgtactggcgtactactactctgctcagcgccatttaacaaactag

SEQ ID NO: 337440 - DNA, 630 bp, Pseudomonas aeruginosa
atgagtttgcttgatcgttggaagattctgatcggccacatcaccctcctgccggtcgccggcactgcttttgctcaagccaaccagctgcctctcgccgacacaacctgggagccacgcagcgacgcgcaaccgcccgtattcatgaacactctgaacgcccccgatgccgtaaacatctatgccgcgcaccgctcgcacagttcccaccggtcgcatagctcacacagctcgcattacagcggatcgggtgggtacagcgcccctcgctactacagcccaccggccgctcccacgccgagttacaccccgaacagctactacagcacgcccagtacttcgagcagcagcagccgatcaagtaccaacttcaacagccccgcatcgccctccgtggatacgacgaccaagaccgtacccgcgcgtcccgcggcgggcgagctgtccaacctggtgatgcgtgtgcagaccgcgctgatggtgcgcaaatactacgaaggtgcgatcgacggaatcttgggcaagacaactcgcggcgcgctgatgtcctttcagatggacagtggtctggacatcaacggccggatggatacagcgacgctgaatgcgctgggcatccgtattccttga

SEQ ID NO: 337441 - DNA, 1230 bp, Pseudomonas aeruginosa
atgctgcgcagagaaactcaattcgacatccagaacctgtccggcccgcgcctgctgaaagtcatcactgccagcgaactcatcgagaaaggcacagccgtctgtgccggtcatgcaacgttcaacgacctggcactctgggtcgaggcacatgagctacgcgaacaccctggtctacgagcgctaccggtaggcgccttcctgtgcccggaccaggacgcgccggatttgcccaatgcggtattgcagcttcgggcgccgaaagatccacatgtcgtgcgccccggggacgtcattgcgctctcgccggccagcaaccttgtgcgcgtgctgtatcggcgtggggccaactccaacctgctgttcatcaccgatcgctgcaacagcttgtgcctgatgtgctcacagccaccgaaggacatcgatgaccgctggcacatcaaggaaaaccttcgcttgatcgacctgatggacgcaggtgaggagcacttcggcatcagcggcggcgaaccgacactgtatcgcgaagggttgttggagattctcgccaggtgcagggccgtgctgccggagaaatcgatccacttgctcagtaatggccggctgctaaaggactccagctggatacccgaattgaaacagttggagcacccaagcctgagctggggagtcccactctatggcgataatgccgacgaccacgatcacgtcgtccaggcgcctggagccttcagcgaaaccatgcagggcctatacaacctcacccgagccaaccaagtcgtagaaatccgcgtggtactcagtcgtctgaccacacccaggttacctgagctggcccatttcatatttcgcaaccttcctttcgttcgccacgtggctctgatgggtatcgaaagtaccggcctggcgaagaagcattatgaggagctctggatagacccattggattatcaagagcagctcagccagtccgcctttttcctgcacaaccgtggcatcccggtttctatttacaacctgcccttgtgcgtattgcctgcgcagttgtcgcactttgctcggcaaagcatttccgactggaagaacctgttcatcgacgcctgccaaagctgcgctgcagcaagtcactgtgcaggcttcttcaaatcccacaccgaccgctggcaaagccgcggtattcgtccgttttccacggaagagttcgccacttatgcaaggagtgcttcatga

SEQ ID NO: 337442 - DNA, 1488 bp, Pseudomonas aeruginosa
atggggagcgtcatcgccacggacggtagctaccgactactgcccttccgcttcatgcgcttgaacggcgatagcacaaagaatgtgctgatcaccggggataccggcgaacacctgttcatctcggacccgcaattgcgtgaactgctgagcaagcgcctgcgtccaggaacttcgctgtacaaagacctactagccaggcatttcatctatgagcccggcaggcatgacccgctgccggagatggccgcacaataccgcagtcgcaaggactttcttctacagggtcccgctctgcacctcttcgtcgtcaccttgcgctgcaaccatacctgccagtactgccaggtctcgcgagcaccgcttgccggtggcggtcacgacctgtccgaacaagacgctatggccgcagtggaacgcttgttcgaatccgcgtcccccactctcactgttgagtttcagggtggtgaacctttgctagccttcgagcgcatacgtcagatcatcgagcgtgtggtcgagcaaaacgagaccgaacagcgcgatatccagttcgtcatcaccagcacattgcatcacctgactgatgagatcctggattttgcccaggagcatcgcatccagttttcgacgtcactggatgggccagccgcgcttcacaatgccaaccggcccaccccgacgcgcgactcttacgcacgaacccttgaaggcattcatcgcgttcgcgagcgtctaggtcacgatgcagtatctgcactcacgacactaaccgccaaaagcctggaacagccgcgagcgatcatcgacgagtacgtaaaggagggcttctccagcatctctctccgcccgctcagcccctatggtttcgcctccaaaagtgctcagcgtctcgattacccgatggagcggtacgttcgtttctacaaggaagcacttgcctatctgctggagttgaaccagcaaggcatctacctctccgagggctataccgcactactgctgaacaacgtcttgacgcccttctcatccggctacgtcgacttacgttcccccatgggcgctggaattggcgctctcgtttataactacgacggctatgtctatccatccgatgaagcccggatgctcctggagatgggcgaagatggattgcgactgggcactgttcgacaaccgctgcgcgagttgctgaacgcgcccgtgatgagtctgctgctcgaggcaggcatcgcggaagccttgcctggctgcagcgattgcgcgttggtcccatattgcggcgccgaccccgttgaacactttgcccgccagggtgacccgattgggcatcgcgccttcagtagtttctgtgaaaagaacatggggctgcttcaacacctgtttggtctgctgcggaatggagacgagagtacccagcgtgtcctgctgtcctggctgactcgccgttccttcgctgatatccctcacgtcggctacagggggtag

SEQ ID NO: 337443 - DNA, 303 bp, Pseudomonas aeruginosa
atggcatggcaagtcatactccaactcgacgagcaagcctactcgcccggcgtcgtacaacgagcggcctacagcatcgccagggactttgtcacagaagtccggatgcagggccagcgaaccacccttctggtcacccccaatccgacctcagccaacgcagccacgttctgccccgagcaggtcaaatccctgctgctccagcagctgaatgatttcgtcctgcgcgaacgaatccagcaggaaaccgccggcatcagagaggctctgatccgcacggcactggtcggctgtagctattga

SEQ ID NO: 337444 - DNA, 771 bp, Pseudomonas aeruginosa
atgctaccgactctctatatttcccacggctcaccgatgctcgccctcgaaccgggcgccagcggcgtacaactgcgccgcctggctacagagctgccgcggccgaaggcgatcctggtggtttccgcgcactgggaaagcgacgacctgcgagtaaccggcgccgcggcgccggatatctggcacgacttctacggctttccgccgcccctctacgccgtgcgctacccggccaagggcgcgccggcgctggcgcagcggacgatcgaactgctccaggccgccggcctgccggcccaggccgacccacagcaaccattcgaccacggcacctgggtgccgctgagcctgatgtacccgcaggcggacatcccggtgctccagctgtccctgccgagccgcctcggtccggccctgcagagccgcgtcggccaggccctgcgccaactgcgcggggaaggcgtgctgctgatcggttccggcagcatcacccacaacctgggcgaactggactggcacgccggaccggaagccatcgcgccctgggcgcgggagttccgtgactggatggtggaaaagctccaggccgacgacgaggccgcgcttcacgactaccgccggcaggcgccctgggcggcgcgcaaccaccccagcgacgagcacctgctgccgctgttcttcgcccgcggcgcgggcggcggcgggatgcgcgtcgagcacagcggctttaccctgggctcgttggggatggatatctatcgcttcgattga

SEQ ID NO: 337445 - DNA, 1995 bp, Pseudomonas aeruginosa
atgaacaagctgggcagccccgaagacactgcttctctcttaggaaaataccgcgacgcagaaatcaaatacaatgcagcaattgcaaaacttaacttaaagagtgaagcactggagacaaagcttaaggacaaggcaaacaaagcaggaacaggaataaagcacaacaaactatttggcgatgcaaattacaatgtaaacaagctaaaagcagacatttcagcagtttcaagtaaaggctactcagcattatcacaagaacaatcagatgagtatcacgccttactacgagaggacgccaaagaagaaattccgcctctagcctcatttgagctgaagctttcaggactagccgaaaaggttaaagagctagtcgaacggaagattacgatcgcgaaccccttgcaagaacttctaggtgatgcagcacttgagtcctgggtacgaagtggccgcgaattgcaccggggaagacgggagtcctgtgggttctgtggcaatcaactccctgctgatctctgggaaaaattagaccaacactttaatttgcagtctgagaacctcagagttgaaattgaagctacgattaagctactgaacaaagagagcgaccggataccggggctattaaaaatcaagaggtccgatttctacgcaaacttcaccaaatctcttgatgaactggaaagtgaatttaatcaggaggccaaaaattaccagacggccttggactcactaacttcccagctatctactcgccttactgaaatccactcgcctttagtttactcgcaaccggccagatcaggctcagatctaaatagtctacatgatgaatatgaagctcttcgcgagcaatcaaacgactttgcaaccaagctagttacagagcaaaaacaagcacgacatttgcttcgccttaacgaggtttacaccttttatgtcgacataaagtactcggaagaagctgaggctatagacactcttgaaagcaacaagagcgcagccgctgaggtaaaagaagctgcacagatagcggtaaaaaaaaccgagctagagattaaagacctgaagtctcaactgaaagatgagagcaagggggccgacaaagtaaatgaatacttaaatagtttctttggacacaactcattgaaacttgaggcctttgaaaacagcggactagccacttctggcggctatagattcgaagtaaccagaagcggaaagaaagcctttcatctcagcgaaggggaatgcagtcttatcgccttctgttacttcttggccaagctaagcgactatgaaacaaaaggaactcaacctataatttggatagacgacccaatctgcagtctagattcaaatcatatatttttcacctatagcctgattcattcagagatcattgagccagagaagtatgacgacggaggcgaaataaaagaacgcagtcgcttcaagcaaatttttgtatccacccacaacttggactttttaaaatacctaaagaggctacctggcgctggaaacaaaaaagaatctcaatacttcaccatcaatagggcaggtgacttcagcgaaataaaggtaatgcctgattacctgaagaatttcgtcactgaattcaactacttatttagccagattcacacctgcgcctcaattgacattatagatgatcaaaattacaccgcatactacaacttcggcaataatgcccgaaaattctttgaaatatacctttattataaatacccaaataaaggcatgacagatgagacaatggaggctttcttcggagaaaacatacccgccatccttacagatcgaattaataatgagtactctcacttagcgggagtctttgagcgaggagccactccgactgaggttcccgagatgaagcgcgccgcaacccacataattgagcgtcttcggctcaacgatccagaccagtacagctccctcctagacagtattggagtcgctgaatag

SEQ ID NO: 337446 - DNA, 507 bp, Pseudomonas aeruginosa
atggaaaagcgcgaaattgacgagcagctcaaaagcctgagcttcgacatggacgaggaaatcgacgatcgcaacgaacgtcggggccggaaagccgcgccacctcgccacgcccacactcccatggaccccagccacgccatcatcctggccgccatcatcatcgtcggcggcctgtggggcgggaagcttctctacgactacatccaggaacaacgcatcaaggccgccttcaacgaagctgccgcctacatgcagcagaccatgcagcaagccgagcaagacaccagacgcgcacaggcagaaatgcagcagcgaatggcggtagaggaagaggcaagagaacagcggcgcgctgaacagcttgttcaattgcaggcagaacaagcccgagcggatcaggaaaaacgcttcaaatcatcccagtgccagttctggtggcagcaaaatgatcagaacccttcgcagagaacaatgaagaaaaaggcagaagcatgcggggaataa

SEQ ID NO: 337447 - DNA, 996 bp, Pseudomonas aeruginosa
atggcacgtggcgaactgatgaaaaagctgctggctagctatggccgggacgaggagttccgtgctgttgccgagcagatcattctcgaagaagagcagaagaacaatcgcgttctcgctagatctcttcgtcacacgctcgacaacgccacctcagcgaacgttcgctcaagcaaacagcccccctctcaaaagctggcttcgctgatcccgtttcccgacgctgccaacgacttcgttgagagagtcgaaccggttcattcgcataaagacatcaccctttcgcacgccaatacgcgcgtttttgatgggcttctccaggagtacaggcgctccgaagaaatccggcgtcatggtttggctgtgagggccaagcttctgttctgcggcccgcctgggtgtggcaaaaccctctgtgctgaggtatttgccgctgagctcgggttgccgctcttcgtggttaagcttgatcgcctgatatcgtcttacctaggcgaaacggctggaaatgtccggaagatctttgagtttgctaagcggcaaccgtgtgtcttattcctcgatgagttcgatgcattggctcgctcgcgcgacgactcagcagagcacaatgagttacgtcgggtcgtgaatagccttctgctgttcattgatcgcatgcagccgcgcggcttcatgatcgctgcgaccaatttggatagttcactggatccggcgatttggagacggttcgatgaggtcatctggttcgacaagccagatcaggcactcatcaaacgcttcctgaataccaagttcaaaaatgtcgtgatcaactttgatctagataagtatgttgatcgtctggaaggctattctttcgcggaaatcgagcgagtctgcattcaaacgatcaaggcgcctctcattgcccgtcgtaagggaatcgccgagtccgactttacagctgcgattgcagatgagagtcgtagaagggcaggacgcgcaaggctctga

SEQ ID NO: 337448 - DNA, 2358 bp, Pseudomonas aeruginosa
atggcccgctatgatcacctccgcttaattcggctccccacggagcttccccgcaggaaaaggccaggcttcggagcgccggtcccccgggcccccggagagcacagtgcccggcttacagctgagctgacgcaggctgttgatcaacaagttgctcgtaaacggccaggcattgtcgacccgtcgctcatcctgcgggtgaggatgacagagggcctactggagcaggactggcataatgcggggttggagctcttatccagtgatccagacaagacgctaattctcttctcctccagcggtgacctcgctcattttcgtagacagctcgatgcgttcggtggggatatccccgttgggcagagaaatcctccgtatgccggttttgtctccggaattgagtcaatcggagctgtcgagccgcgcgatcgcctcggtatgcgtctcagagaagaaggatttggggatctggacgacattgatccagatgctctaatgctgctcgatcttgaaatatggaacatcggctctgcccaaatacggggcgcaaagcttgatgagctgaccgaccttattgagcagcagggcggaaatgtctatgacaggtacaacggacccgcgatctcactactgcgcattgaagtgcttggtcgcctgctgatcgatcttctttccgtagaggtcatcgcggtcatcgacgcccccccccaacccgacacgttcactcgtgaggctctcgaactcaatttggcggacttcccgccagtcgaagttcttgagaacgctccggtcattgggattctcgacagcggaatcaacgcgcatcccctgctggaaggcgtcgtagttggggccatcggtgtaccggaaggacttggcactgccgatgagtttgggcatggaactcgggtggcaggggttgctgcttttggtgatctgcgagctcaactagccgaaggtggcgatctggtgtgcgcggcgcggatatgttcggcacgcgtcgtcaatcatcgaggaggatttgacgaccatagcctgatcaccaaccagatgcgcgatgccctgactaccttgaatcgtgagtttggctgcaggattttcagcatctctctggctgacattaagagcgctccatatgccggtggcaaagtaggtccctggacagccaccttggatgagcttgctcgcgagctggatgttctgatccttgtctcagcaggtaatcgtatgccgcggcaaggggagcggcaggaggaaagtgtaactggataccctgactatcttttagaggcctctaaccgctttctggagccatcggcagctctaaacgtcctgaccgttggctccatcgctcatggaaatgggattgaccaagcacttcaagatgctggggttggcattcgaccaattactggtccgtatgagccgtcgcctttcactcgcgtcggcccaggcattgggggggcaataaagccagatctggtggatctggggggaacacttgtttacgacccgcttgccggcccgcgtaccggatacgaccagccaagcgcggggattcttacattgaatcatcgctatttggagcagatgctgaggacggcttcaggcacgtcatattccacacccatggctgctcataaggcggcccagttactgggtcgttttcccgaggcttcggcaaacctgctgagggcacttctggttggcgcggcaactgtgccggaccaggccaagcagcgtcttatccatttggaccctgaggctactcgccatatctgcggcaacggatttattggtgttgaaagggccgtgtactccgatgacgcgcgtgtcgtcctgtatgcagaagatgctcttccccttgatagctttgctgtcttcgaaatcccgattcctgagccgtacctcaatcaaccgggcgataggacgataacgatcaccctggcatacgacccaccggttcgacacacaagagtcgactatgccggcgttcacatgaactatcgcatgcttcgtggcgtgaccttggatgaggtggtggagcatttccgctggaggtccagggatgaaggtgccgcccccccgatcgcccctgccaaggtttgcgacatggtcccgaggcctaccttgcgggagaaaggttcagtgcaaaccagctgcgtgacctttaggcgtggtgagctgacgcactatggggacacgtactacctggttgtccgctgcgagtctggttgggctgatttcctcaatgagcagcgatacgcagtcgttgttgaaattgcccataacgcgggtgtgcagatctaccagcacgttgagcaacgtgtacgtgtccgcccacggattttggcctga

SEQ ID NO: 337449 - DNA, 990 bp, Pseudomonas aeruginosa
atgccattcggcactcaatctgcgtttgatacctacgcacgcaacctctacaacgctgcatccgaagtcttttctctcagccgctcgaagctcaacgaggcactcgctcgcgggtacggattccgcacctatgcggccctttgcgcacacctgaaaaatggtcctctggagagtactcggatattcgaccacgctgcttttctgagcagcttggcccgtctcgaagactggtcaaaggcctcgatggtggccgtccttgttgaagggcacaccttcgacatcgaaatcaccaaatggcctgctggcaccccccggcgtaacgaacctggcgatctggaaacgtcctatcacatctctctaaacatctcggaggcagatggcagtaaagcccaaggccggcagccattcacactgccggagttcgcgaaatctgtgatggacgaaaaattccgagtcgactcgggacacacataccgagtaacagagggcctgtatgtcagtcgcttccgcaatgggagggacacacttcgggcacttgtcacggaggggcgttggggaggcgaagcattcatttacggtactgaggagcagttggatgattcgcgcaccctgcaatggatcaaatcctcaatggcaaaagctgtgctccccacgacctcaaatcgggtggtctgcgatctctatcacccggataagtatgatcccaatgctcgccggatcgagatcagacttgccccccaagtgctggaattcctcgactccacgcccctccacttcgaaattccggcgatggaaaagcggttctttgtcatggacgatggacgcagccataccgtggcagagggtgtgatcgtcgacggtttctggggctctgcggtcaactccaacggcatcgccgaagctgagaatccaacccctctggaggaagtgagggtacggctgcagattgccgtggaagaaagcctctcgagggctggctacaacggctaa

SEQ ID NO: 337450 - DNA, 1071 bp, Pseudomonas aeruginosa
atgagcaaatcaaagcccacagctatcgatttattttgcggtgcaggtggactcaccactggcctcaagaaagctggattcaaagttctggccggttttgagctagacaatacagctgctgagacttacaaatccaaccatagaaaaaccaggatttttatttcagatatatcccgcctaaatcccacagaagtaatggcggaattaaagctagagaaaggtgagttagatctactcgctggatgccccccatgccagggattttcaactcacaaaacgcggaataaatcaagctccgtcgaggacgaacggaacaatctaatcttcagcattttagagttcataaaaactctagagccgaagacaataatgatagaaaacgtaccaggtttagccaaagaccctaggattgaagagttcaaatcggaaattgggctcctaggttataaaattgacaaaaatacaattcaagttctagacgcagcagacttcggagtcccacaaagaaggaagcggatgatcctgcaagcatcgcgcttcggatacatttctccaccaacaccagtcaaaaagcgcaaaacagttaagcaggctataggtaaattactaagccccggactctctggcgacgctcttcatgacctgcccttcacaagaagtaagaaagttaatgaaataattaagaacgtgcctaaagacggaggctctcgcgctcaactccctcttagactatggctgccttgccacataaagcgtcctggctcttatagagatgtatatggacgaatggcgtggaacgatgtatctcccaccataactggcggctgcacaaatccttctaaaggtcgttttatccatcctgaacaggatagagcaattactctcagagaagcggcccttttacaaacattcccgcaaaactataaattctccttaaaaaaagggaaagacttcaccgcactcatgattgggaatgcactcccaccacatcttatttacacacacgcaaagaagtacagagaacatttaaatactgttaacgcaggggataaggaatgtctgaaaaattag

SEQ ID NO: 337451 - DNA, 612 bp, Pseudomonas aeruginosa
atgaagctgttctatgcgcctggaacctgcgcggttgcgtgctggattgcactggaatgggccggtgacgaatatagcgtgataaatgttgattacacctccagagagtttcagcagataaatccccttatgttggttcctgcgttggatactggagagggtcatgtcctgacgcaggcaagtgctatattgaattttatatctgagcgatacccttcagcttcaattggtcccggtgacacaatagaatatcgctcaaggttcaatgagttaatgtctttcttgtctagtgattttcatccatctttctggcctttcttcacacctcagcgatttacggatggtaagtctcctgaagcccttgaggatgtcgtacatgcggcatatttaagaatagatcgggtactggcttatctcgaccagcttgtcggtaaagaagggcatctttacctagggcgaagatctgtaattgatgcatatgcgtatgtcatgactcgatggactgagcggctgccaaaaacatggcgagagtatcctaatgtggcccggttctattccaagatggagagtgatgcagttataagaaaggttattcaagcctctattgcatag

SEQ ID NO: 337452 - DNA, 858 bp, Pseudomonas aeruginosa
atgaaaaatgacaccaagtctattcaacacagtgccacagttaacggggtacgtctgcgttataccatttctggctccggagagccattagtactactccacggctggccacaaagcatgagagagtggcgccatataactccctcgcttgcgtctcggtttacagtcattgctcctgacatgcgaggatttggtgaatcagataagccgagcactggatatgataagagaacggttgcccaagacatttacgagctagtacatcaactgggctttaagaaaattcatctcgtcgggcacgatatcggcctaatggttgcatacgaatatgccgtctcgcacccagacgaggtaaagaaactagtagttatggaggcagcgataccaggtctaggactggaagctttgcaagacactgctcgcttcccacatctttggcactttggatttttcatcgcaccaggagtcgcagagtcgctcgttacaggaaatgaagagatgttcttaagatatttcatccaacatcttgcttatgatgcctcagcggttacagacgaggatataaaacactactccaataacatgaagtcacctggtggattaagaggagggtttgagcactatcgcgcattcaatgtcgatgcaatcaacaacaagaaaaactcattaacaaaactgcaaatgccggtgctaggcattggaggctcacacggaatgggtagtcatgtgggggaactcatgaaacctttagctaaaaacgtgcaaaccgccgttattgaacgtagtggacactggattccagaagagcaaccagaacaactagcaagcttacttttaaacttcctaaatagtaattaa

SEQ ID NO: 337453 - DNA, 726 bp, Pseudomonas aeruginosa; identical to SEQ ID NO: 323977

SEQ ID NO: 337454 - DNA, 264 bp, Pseudomonas aeruginosa; identical to SEQ ID NO: 331611

SEQ ID NO: 337455 - DNA, 453 bp, Pseudomonas aeruginosa
atgagtgctctcgaagattaccgcgccgcgctacagcggctaatcgcggacaaaacgttcaatgttcccaagggttctgcgataaataaggatacggtcgctctggaggcaggtcgaaagcgaggttcgatcaaaaagagccgagaggaacatgcacaacttattgccgagatagaggctgctgctgccgctcagaatgagcaagctaagccgacccctactcaagaagtcgagaagcataaagctcttaaaaaggctgctcaggtcaaacttggaagtctaaaagaggattacgaattggcccttaccaagatcgtttcgctggagcacgagaaccatattcttaaggggcaaatccaggagcttaccgaggaaattcggaggaacaataaaatcgttagaattaccgaagcaaaaaacgctcgtaaactacatcctagtaaagaatcctaa

SEQ ID NO: 337456 - DNA, 2028 bp, Pseudomonas aeruginosa
ttgaacatcatttctaacctcacgttcagcgaaggggaagaaaaccgactcccggacagctatacccatctctcatcttatctttctcccgatgatgattttgtggtgtcgcgcggactagatggctcagttgtttcgcgctttagccacgacacctgggatgtccgcatgtatgacgccaaaaataaatgcgtctataacttttcatcatggtgcccatcaccaaccagtgatctggcgcaaagcattaagcgcgaattgaagataatgcaacttgcgcgcctttatctggctggaaagcctcgaaaagttaactccgtcaggatgatgtacccgcgaaagctggcaaaactcgcatttaacaacaaagcatccctcaccgaactattcaacaattccgcacatcacgcctctatcttatcaagcttctccacgctttcgcctgctacaatgaagttaatgctggctgtaataagagagttatttgaaatacgagccaagcatccagatttcgaaattgccccggccaactacgggctcataacttgcctggaggaaatctacaacaaattccccaaggcaaaattagatgaaccacaacaaaccaagcttattccctcaagaatatatggagagcttatttgcgccttaggcaccatgctagatattttcaattgtcattccgccagaatatgctcattatatgagcagcgtattggcaatccgcaatatggagttccgcaagcacatcacaatagaagcaaggaaactattccctggtcagacgcaataagccagcatggacttacatcgctattagaacagttatccatcacaaattggcgactactaaacttctatcttggaaagatacaagccgccgccaaatattggattcatttattttctggcatgcgagacaacgaagcaaactttttacctgccgattcttacacgtcaattgatacaggcgatgtctccttccagattttgcagggttacacgtcaaagttctccgctcaaaaccacaccgcaactttttgggttacgcacaatattgtagaaaaaggtatcaatgcagccagtgctgtcggcagaatagcagcattaaaatgtggatgggacgacacgaataaaaggcagtttcctcttttcccaggaaaagttgctagaaaggaaggcagcggatccgcaaataaacacacctggcactttgagtgtgctccaacagccggaagtatccctgattcaacccaacgtgaactgcttgcaggcattcctgccctatgtgtacgggaggaagatatttgcgaattagagaggttcgacgggttccgcaactggcgcgacgatcctactataaaaattggcgagccgtggccactagcaactcaccaatgccgtcgctcgcttgcagtttacggagctcgctcaggtctgctttcactcggagcaagtgcgctgcaatttaaacaactaacagaagcaatggcctcgtattatcgaaaagacagcatctttgctgttaattttctcaatacggatgatgcacagaactggatggatgaactggagcacgagcgcagggtagctcagtttattcaatatgaggcagatgtgataaataccactaatcgcctgtggggtggagagggaaatcgcatccaagtagcgcgcgataaaggccagcctttggttattactacagatagattattgactcaaagaaaatttttgaaaggtgaaatggtctataagaccggcccaactggcggctgtactaacacggatcattgcgacaaaatcgcgttcactagcatttttgcgtgcctcgattgcgataaatcaattcttgatgataaccgcagcctgaagagtatcaagcgcggcgtgaataacctgaaacgcgagcaggccctgtttaatccaaagaatccgcagttcaagcaacttgaatcagaaatcaacgcgctgtacgaaaagctcgaaaagcgtggacttcgtgaaaaaatggaggcgatgggatga

SEQ ID NO: 337457 - DNA, 1971 bp, Pseudomonas aeruginosa
atggaccagaactttacgtgtcgccctatcgtaatagttgatcataacgattgcgatttcgaagtacttcatccccaatcgattattatcgccggcgacaatattgcaaccaatggcaaacgctatcttgacttcggctcactatgttatgtgcgccgcaaagatcgagcaagcaaaaatagatatagcaactatgacggcgtcaaagttgatcagacctcgctagacattaatcgcctctccgtcgtgagcaagattatagagcttgccagattcaaacaaagcttcgcatcggcaattggattacatgcaacctcaaaatgcttttttgactggatggatgcgcaaaaacaaaaatactccattaatcaagctgaatccattaatgaagcctatatcgaatatactcaacatttacttcatagggtgaacacctcctccatcagaggtggggctattaaattagccacggcatcaaagcttcaagttgccgcgcgttcagtggtcaccttcgcgactggcatgcacgacaaagaggttatggcgctagccaccattcttcctcaggtacatggtcaggaccatgtcaatttgaagcagcctagcgcagatatccaggccaggacatttgcaacgctggttaactttgtggaagaagctcatcgcatattagtaaatggcggtgattttccgatgcgcctagtttcaccaggcagcgaaccttactatctatacagcctacatcaaggatcagaaaagaccaataacgcaaaattcagcgttcttcgcctgctcgatgagaccccgcaatttccaacatgggaagaagtgcaaaatcactataatatttctggaccaaggtggaaaaactttcatcaacaatcaaactatgaaagtttaaaaagaagacatgtagaaagtattacagatctaagatccgatctgaggttgcagatagcgaaccatgctatgactgccggaatgctagcattcattgctgcaacaggctgcaatctaagtgttgcacagaaccttgatgttaataattcggaaatcgtaccaagcacacaaggtcaaagattttacggcaccaagcctagagcggacggaaaatcagtcaccccggaattcggggcgcgattcatcccaatattcgagaagattcttgagttgcggaaatggattttaaatggcaaagcatgccaccttgtgttcccaatttcacccaaaagaacggacaccattggttatataggaactagcgctttccagacacttagagcagtatttaaaaaataccaccccaacattacttgggtgccagccgtccagtggagaaaaaatttaagttaccaatacattagcagtagcggtggcgatactgccttgacggcagaaaaactgggtaataccgagaaaaccttgcggaagaattactccagaccagcacttgaagattttgccagtcaaatggccgaactctttgaagcaattcacttggcggcagtagcccgcacacgcaatttagatcttattcccgtgcatattacggctgaaaaacgacttgatgcggttacgggcattggcagttgtgagaaagggtctgcgactgagccgcggcgggcccctggcttcacagatcaggcgccacagccatcttgccgtgaccccgaaacatgcttgttttgtgatttctacgcagtccatgcagatgaagaagatatacgccgattaatatcgctgcgctatctcgttcaaactgcgaaatctcagcttgaccatgaacattgggaaaataaatttggcccgaccattcatcggatcgaagaaatcttaacagccattaatgacacagacacgactttagaagaaaccatcagccgcgtacgcaatgaagtcgaatctggattacttgaccctttttgggcaatacactttgacacattggtttatgtaggagcggtcacttga

SEQ ID NO: 337458 - DNA, 1458 bp, Pseudomonas aeruginosa
atgtcgcgcaatcagaaaaagagaaaaaccgggcaagaccgttatgactcaaaagcacggcgcgttcttatccctcagtttcgtttgttaaaagttcaatttctcgaatcccatgctgaggcagctcctcttggccggcatctgcttgattataaaatttcagagaatgatgacggatactacccaaacttcccagtaattattcaaggcaatggtgaaccctggagaatagcgaacctctacttaaccactaaacttcagcgcgaaagtggctatgagtctagaactttcagaagcattgcagaccaccttctcgactacctacgctttctagaagatgaaaacctggactaccttcacctccccaagaataatcgcctgaaagtcaccttccgctacaagaagcacctaatagaattgcgcgacaacagcgagctatcttcaagcacagcgagcgctcgaataaatgcggtagtgaatttttaccgtggaataatagattggggcctgatcaacgaagaggaacttgaaaatgaaccttttgaggagatccttaagcaaattagcataacctctaaatttggcacagaaaatacagtaaaaattaaatctcacaacctcgccatcaaaacatcgaaggggcagattcagtccgagtacatcaatgatggaggactattgcgcccgctcactgtgaccgatcaagtgatcgtgttagaagcactgctaaagtcgtctcgtgagtatcagctaatgttttatttcgctctattcacaggcgcccgtattcagactgtaggaaccttacgagtcaagcaccttcacggaaagctcgatggaaatgggtatctgcgacttccaatcggagctggaacgctcattgacactaagcgcggaagacaaatgacgctgcttgtgccgggctggctcgtgaaagatatgttgatttatagccgtagcgccgaagccataaagcggcgcaagcgttcattttacaacgacacagaagataattatttattcctgagtaaaaacggcaccccttattacaccagcaaaaaggagttgtttgacaggcgcgacacaagcgtaagcaggaatacacatatcaaagatcgcgcacagcagatgtcaattcaagatggtgctgctctgcgccagcatatccgagaaatactatctccgcgaatacacattgataaccctgacttccaagatttctcattccatgatctgcgtgccacatttggcatgaatttgctggaaagccagttacagcaaattggagataaatccgttactactgcattggactatgtgcagcaacgcatgggccaccgagacaagacaacgacattgcagtacctaaactataagtctcgcctggagtggaagacccacatccaaaacgagtttgaaacaaaactgttcgcccacattaacagcccgtcctcttga

SEQ ID NO: 337459 - DNA, 330 bp, Pseudomonas aeruginosa
ttgttcgtccaggctctccaacagggccacggcaccggcgatggcttcggcctgttccccggcggcttcgtcgagggcttgctccaggcgctggcgctcgctcttgttcggtttgcgccgcaacaggaagctttgtgcctcggcgaagggcagcagactggcgtcgcggaggtgttcggcagggctatgcggatggctgcgcagcagcgccagggacagggtccgggcgccgaaatccaccaggccgccggagagtccgaagagcagggcggtgaagcgcgggagttggtcggagctgggcatgcgaaaggcgtctggcaaatggtctag

SEQ ID NO: 337460 - DNA, 777 bp, Pseudomonas aeruginosa
atgagatcgacgaagccatcgcactcgtgcgacaggatcgtggagaaatggttgtcggcgttttcgagaccgagagtcaataccacgtcgcagaggtgttctgactccgctcacctggttgacaaaagtagaaatttgccagattctttggttgacaaaaatccgtttttgccaggaaccctcatgagcagccgacacccatcttcgtttttccctgacctgactgacgagcgcctggcaaaaattgccgaactcctgctcgacatccgcttcaacactctgcgtgaaatggattcgccttatgacgactcctatacccgggaggcaaccgttttcggacggtcccgaaacctgctcattgagcagtgtctgagccgcagatacagttggttgagtttggcaaaccctggcatggacgtcaccttccgcattggcagtgttccatgccgttttttccgagatgacccagaaaaccctgacaagaagggtttcttcaagcgcaacgccgttgatgacttgcttgctgaagacgatagcactccagtgatgtggcgattcgtagtcgagcgggcattgaccgacgaagacgaagacagagtcttcttcatcggatacaacgtttaccaagataaagtgtctcaatgggcctacggtgcttcgggtccagtacttcacagtgtggatcacgaaactcctgcttccagagagctgcagcctgctgaggttgacgtccgtgatgactccattgaaaagagcgataaagctcaatctgagtga

SEQ ID NO: 337461 - DNA, 1116 bp, Pseudomonas aeruginosa
atgaacaccgtttttgacggagcatctctcagactagcccgcgtttttagcgggctagctcttgaagaggtagcggaaaaggtcggcaaaactcgccagtaccttcataaactagaaacagggcaaggatcgccaacagagcaacttatgggcgacctcgcagaggccttaaaggtagaggtcggtttcttcgcgcctaagccacaccgattgaatgaggaccaatttcactttaggaagctgctcaccaccaaaaataccatcaagcaggttgctatcgcccgaggcgaaatgatcgactctttgatcaagtttcttgaccaagagcttcggctgccccccataggtattcctagcattccaatggtacagtcctttgaggacatcgagcgcgcagccgagcattgccgaaaagaatgggagcttggtctaggccctatagccaatatgactcgactcgcagagaacctgggagctttggtaactacattccaagggttatcgaaggaaatcgacgccctctcagtgtccgttgagcgccctttcatcgtacgtaactctgcgaaagagagtgcttgtcggcagcggtttgatattgctcatgaactaggacacctagtcatgcacgaaggtattgttaccggcgaccgggttactgaggggcaagccaataggtttgccagcgccctacttctacctcgttccatgatggctaaactattcccacgtcccaatggtagtaggcttgactggaagggaatgcgtgagttcaagttgacttggaaggtcagcaaggccgcaattctttatcgagcaaaacaactggacctcatcaccgagactcagtataagactggggtaatgacactaaaaaaatatggcgagtcagatggagagaaagatgattatctgatcgaccaagagccgccagagatgcttgcccgatcttttttcattcttgcagaaaagaagggtatccgtgcaactgaaatcgcaaaggctcttcaagttaagccggaattccttcgagaacttacgggcttggagtccttggttttaggacctacgaccgctcctcccactcggggagcggcctatctaagattggtgaagtga

SEQ ID NO: 337462 - DNA, 1182 bp, Pseudomonas aeruginosa
atggcgaagaggattaagtttgatgacttgcttccactttaccgatcagttgttaggatcgaaggaagtaagttttcattaaaagtatccaatgaggaaatacgagacgcattgattctagctgttgatgagtctaacgttgacgaatctggcgtagccgtcattaagggcgactacgccaacgtaaaccttgggcaagattttattatctctctgtcgccacctagggttggtatggggatattagccgacgatttctctggttaccttcgtgctcgaggggcaaagatcaaggaaagaaattactactatctgttggactcagggttttactccggggatgagaccgttccggtgctcgtgagcaagtacagggatctgatgaggcttataaatctgctttcggactccgctcactatctggatacgacaaaggaagagtttgttttctataaggatggacgatttattattcctgttgtctattccgttgatgatgttggtagttttaaattgcaatcctttgaaaggcttgaccgcttaatggccgatcctcttcatcatagtcagaaagtaagaatatttggtgaaagtcttgttgctatgctcgatgggattgatctgaggaacagattcaaatttatactagacaacctggatggtttgtattcaagggttctgattggctataatatttttgcggctgactttacttatgagaaggccgttgcggagatacattcatttaaggttgatgtcattacaagggtgcataaggcgataactgatattcaaggtcaaatacttggaataccggttgcaacttttgttgccctaagtcaggtcaagaaaacagtttcgcttaattctcaatttgctgctaataccataatattttttggggtttttgttttttgcgcccttcttttagggttccttcttaatcagaggtcaacccttgatactatttctgatgaggttaaaagacagaggggagtttttgaaagcaagtttagcgataagccgggagtgtacagctcagagtttcggaggattgatgctagaatttgtatacagtatgcggttctggttggggttttcatacttgatgttttaatgttcattggcgccgttgtttactatatcgtgcatacaaggcctatatacgatatttttttctaa

SEQ ID NO: 337463 - DNA, 1092 bp, Pseudomonas aeruginosa
atggctggagaacagcaagcggatattgatgcgcctgatgatgaagtagtagatgcacaggtggtggagaacgagatcgtaaatgtaatagttcatagcctcgtccgaactaaggctggttttgttattgaaaatagagaagaggttttagaggttggtgatacggtccaacggttaattgatcagttggccaagatatatgcgggtaagacagggaagtctcatggtagattcgaagaggatgttgatatatatccggtttcgcaatttttgagttcctactttatagatggcgagtcggattttgttgctaccacatgcaaaatggttgaaagcctcaagaaagaggcccaaggaacagcgtctaccggcggtcatgtttttattgctcattttaaacgggtggcggataattcagactatcttattgttgccatccttaatgatgagctcggtactgctttaaataaagaaaaagatgttgtggatgcaatgcatctagatataaaaggttttcggttggcggggcgggtaaaccttactcactgggcggcggggggagacaaatacctaagctttattaaaggacgggggcaagacaaggtatccgacttctttaagattttcttggggtgtaataactccgttgcagcagtggttgaaactcagaagctgaactctatcttggaaggcttcgcgaattccaaaggaatggatgaggcacagaaagatgagtttctacgtaatgcctatactatttgtaagagatatgctgacaatgaaacgccttttgaattggaggtcttctctaatgaactatggccagaagaccctcagcagttaaaccaggcatttgaggactccggtgaaaatatttcggatgggttcattcctgataagcgttcattgcggtcgctggttaagtttagtggtgtgaccaagaactggaggctcgtttttgatcgggctgcgctgctcaatgatgagattttctttgactcagagacagaaagtttgacaatcaagaacctgccggaagaactagttcgcaggctcgttgcagaagacaatcaagatggcgaagaggattaa

SEQ ID NO: 337464 - DNA, 468 bp, Pseudomonas aeruginosa
atggcggtgcttggtagcagggagcggcttgtgctccaacagcgtgggattgatgtggtgtcgggtgtctacggtacctactactccctcacgagcaaggggctgtactggctcttcaatcacgtccatgaggtccgccccacaaaactccggttctccattccacttttgaagtcacttgcctctgtccagccgaccagcaactggcgaaacctccgtatcaccgctgtagtcctgcccacctacaaggcccagtactaccagttggcggtttacctgaatggttctccgccacggcagatctaccattcctcggtcgagcgtagcgtgccggaggagttcaatcttcttagcggggcgccattcatctcggcggcaacacacggggtaggcgaggtaagaggccagctcactgaagtagagcggcaacggctcaccgcaggcgagtacattgaggtggcgctctga

SEQ ID NO: 337465 - DNA, 1170 bp, Pseudomonas aeruginosa
atggcagacggagtcgaggtacgcggaaaccggatcagaatctacttccgctaccagggcgagctgtgtagggagtccataccaggggacgcaacgcccgagaatatagccaatgccgaacggctggccggcatcatcaactacgagatcaagcaaggagtcttcaactacagccgacacttcccgaactcaccccgggtgaaaagcaacaccctcggccattacatcgacctctggctcgatatcaaacgcaaccagatcgccgccagcggcttccgaggctacaccagccgcgtggaaacccacatccgacctcgctggggtgacagccaggccgacagcatcgaccacctggatattcaagactgggtgcagaacacgctcatgcccaagctgcacaacaagacggtgcgagagatcgtcagcaacctgcggcagatcttccggctgtatcgaactcggaaccggaccgcgcacgacccaacagacggcatcgtgatcactctcccggatgcggatgacccagacccattcactcgagaggaaatcgacctcatcctcggtaccgaaaccgcgcgcaccggtgagctgaacctggcggaattcatgatctggagcggcccccgcgtcagcgaggccatagctctggcctgggaagatgtcgatttggacacggggaccgtggttttccgccgcgcccgtgtacgcagccagtacaaggtcaccaagactcgccgatcgacgaggaaggtccagctactggccccggcgctgcgcgcactgcagcagcaggccaagctaaccagacgccttccgcccgtacagatcgaggtgatagaccgcgacaaccggaccagaaaggctcaacgggtacgcttcgtgttccacaacagtgctagcggggcggcgtactccacgtcggatacgctgcgcaacggctggtggcatggccacctcaggaatgcgggcgtccgctcgcgtggtcccaatcagtgccgccacaccttcgccagccagatgctcagcagcggcatcgccactcccgaatggatcgcggaccagatggggcacacctcgacggcgatgatcttcaagcattacgccaagtggatcagcaaggacggccccgacatcgtaggtctgctgaaccaggcgctgaaactttcctga

SEQ ID NO: 337466 - DNA, 513 bp, Pseudomonas aeruginosa
atgtcctactccgaccctcgtatctgccaccaccagcgcgtcacccaatggctcgccgcgatacggcagcatgccgcttggctgtacgccgcggatgagcagtacctgtacctggtcgccgaggccaacgaactctaccagtgcggcgtcgtggggttgcaggaccggcacgacatggtcaccgacgccctcggcatgtactcatgggcgatcgagcacagcataacgcgcgagacgcattactgcgctgactgctgctacgacgtgctcgacggcggcgccgtcgtcgggagcgtggacgacgagggcatctaccacgggcccgcacccgcacgacagcgcctgggctacatcagccgggatccgctcgacgggataacatacctccgcctgggccaggcgctcgagcgcgccggcgttgtgcgcggtctggagatcgaactcgacgccggcggcacgctgcaactcgccgagcagatccctgatgacttccggccctggcggtgggcctga

SEQ ID NO: 337467 - DNA, 384 bp, Pseudomonas aeruginosa; identical to SEQ ID NO: 331030

SEQ ID NO: 337468 - DNA, 195 bp, Pseudomonas aeruginosa
atgagactcaagccaaccttcgaaaccgatgtgtacatcagcaccggcggctatttcgcgatcagccaaacgcacctgatgggtgaggaggaggtagtgcttctatcccccgatcaactgcgctccgtgctggcccatgcccgcgtcttgctgcggactgaaaagacttggtggtctccggagggccgggactga

SEQ ID NO: 337469 - DNA, 558 bp, Pseudomonas aeruginosa
atgactggggtctaccgcgacgtgatgccggcgatcgttcgcgtcctggcggctgatgccatcgacaatacggcgaagcagagttggcagaggcttatcgagcgaaaggtcgacagcgggtttcgggcgctgctttctgcccaagatcagttcgagttcgattgcatcctgcacgccttgttgcaccgggagctttcgccgggcgagtgggacgtgctgcatgctcgctactcgacgaataacggccgtcgacttcaggcgatagggcgcttggttccgcgcatccagactccggcgccgcacctgttcttgaccagggccgtctccgcctgggcaattccgaagatgaaggggaaggagggaaagcgctccaccgatgtgctgatcctatccgatgagtattacgacatgaaccagtgggataccgaggctcgtcctgactcaacccgcaacaggtggcgccgtgatatccgcaagcaactcgagcagcttgaggaggaggctctggtgcatgtgactgaaatactggatcgggagaaactgctcgatgtggcttga

SEQ ID NO: 337470 - DNA, 336 bp, Pseudomonas aeruginosa
atgaaaatgcccgacaaagaccccatcacgtgggctgcgctgctggcgtggctgtctgcgcactatccgcagctgtacgccgccggcctgtcctttgtggtcgcgctgacccgggtgatctacggcggtggaacgcggcgccaggcgctgctcgaggcaacgctctgcactctgatcaccttgggcctgattcctgtccttgagtggtttggccttccgcagaacatggctactgctgccggggtgttcaccggtttcctgggtgtgaagaagatcgccgagttcgctgatcggatcgccgactggaagtttccgcgccggggggctggcgaatga

SEQ ID NO: 337471 - DNA, 174 bp, Pseudomonas aeruginosa; identical to SEQ ID NO: 335320

SEQ ID NO: 337472 - DNA, 279 bp, Pseudomonas aeruginosa; identical to SEQ ID NO: 335319

SEQ ID NO: 337473 - DNA, 207 bp, Pseudomonas aeruginosa; identical to SEQ ID NO: 324746

SEQ ID NO: 337474 - DNA, 207 bp, Pseudomonas aeruginosa; identical to SEQ ID NO: 328529

SEQ ID NO: 337475 - DNA, 828 bp, Pseudomonas aeruginosa
atgcccggccaccgcattaccctcaccggagaaaagcagacgctcctgatcaccctctacgccaaggcgctggatagccgcctggacgattccatcctccatgaccgtttcgccgaggcggcggtgcggcagatcgacttcgacttctccagggtcgccctcggcaagggcaacgaacgggccctggccatgcgctcgcattacttcgaccaggcctgccgcgagttcctcggccgccatcccgaggggcaggtgctcaacctcggttgcggcctggacagccgtatctaccgggtcgacccgccggccgagctgccctggttcgacctcgactatccggaggtcatggacctgcgcgagcgactctacccgccgcgcgccggcgcctatcgggcgctgcgccactcggtggacgacgacggctggctgcaaggggtgccgcgcgagcggcccgccctggtcctggccgaggggctgatgccctatctgcgggagtcccaggtgcgacgcctggtggaacgcctggtcgaccacctgggtagcggcgagctgctgttcgacggctacggccgcctcggcatcatgctgctgcgcctgtatccgccgctgcgcgagaccggggcgcaggtgcattggagcatcgacgacccgcgcgaactcgagcggtggcatccggccctgcgtttcatcgaggaggtcaccgactatgacccgcaggacgtcgccaagctgccgcagtcgtcgcggctgatgctgccgatctacaacggcttcgccttcctgcggcggatgggccggctgatccgctaccgttggcccagggtctag

SEQ ID NO: 337476 - DNA, 246 bp, Pseudomonas aeruginosa
atgaaacattacgtggtgatcgaggactgggaaggcgatggcgctattcgcctgcccgacgacgttctgcaggaaatgggagtcgacgttgggagcacgctctacttacttgaggaatatgtaggcaccacccgctgcctagtgctcagtaagactccgcgcattcctgatcgcgttgatgagctggctggccactgggagtccttcggcaaggtcgcaagcgacttgggtgccaaggatgattga

SEQ ID NO: 337477 - DNA, 783 bp, Pseudomonas aeruginosa
atggtgaggcctctaaggaagcttacggggaaaggagtgccctacatgcggcgcgacgccgttgaagccgaaattgcagagctggaggagcttcctctcgaccagttagtaatgcgctgcgacctatggccgaagactgcggtaggtttcgtgacgacggaagcgctcctctactttgtacggactaccgatgcatctgccccgcagcgtgagcgtctgttccgagggctgatgcaacgggtacgacgggggctgccaaagcccgatagtcacgacggtagaactgcaagcttcagtgacctcgcgattcgtgatcgagtgcaggatggtttcattgaccaactgctggcggatcaaggggaatacaacgagcaactcgactactacgaggtcaacttcaaccacgctttgaaagcggactgttttgatgcgaagcgccaggtctggaccgaagaaaatcgatcagaggagctggtaaacgacgaagacgagatctctgcagaggttgaggatgcggtggcgcactatgacccgttcgattctggcgagctctatcaagaagattaccggcgtctgttggacggcgcgattgatgcgttaccgcccctgcagagaagaatcgttgaaatgatgcgcctagagatcccgatagcttcaatcaatccggatatgcttacgattagcaaggcattgggtaagtcggagaagaccattcgtaatcagcgtgaccgtgctttcgccactttacgacggcgccttgagcgaaaggaggaaatgcgatga

SEQ ID NO: 337478 - DNA, 3381 bp, Pseudomonas aeruginosa
atggatgccgtcgagattgccaggcagcgggcaaccgagctgcatcttgaggcggtcagagccgggcatgacccgtggtcaccctatgattttgcgattgccgaagccaaggttagagggctgagcgtcgaaaaatgtgtgccaggtgctgatgtcctcgacggtggccgcgctatttttgacactgagtaccagctcatcatccatgaagacgcaggctcgcctttcgagcaagcctttttggtggcgcatgagattggtcatgccgaactaggtgatgacgaaagcggggagagccctttagagatcgatcctgcacgggcggcagaagccgcaccagtcgggctcgaccgggtggtcgactacagccctcggcaacggcgtgaagtccagatggatctctttgcccgtgaattcctgctacctcgcccagtggtccgagatctgcacctaggacaagggttgacctgcagcgacatcgctggtcgcctcggtgctccgtttgatgttgttgcacagcaaatgcttgatgccctgctccttccaagtgtgagacaggagccatcagctctagaggcggaaattcccctaaacgaggagcaacggcaagctgcagctcatcgcggcaatgcgttcttgcttcaagccgggccagggaccggcaagacgcgcacgctggtcgcacgtgttgaaaatcttctggacgaaggcgtagaccctcgtcgcattttgctcctgacattctccaacagagcttccgcagaaatggccgagcggatcgctcgtaagcgccctttggaggcggctgcgctgtggattggcaccttccaccggtttggcctggatctactccggcgtttccacgacctcgccgacctcccggccgatccacggctaatggatcgaacggaagcagttgaactgcttgaatatgagttttcccgtttgggcttggagcactaccgtgacttgtacgacccttcgcagaacatatccgacatattgagcgccatttcgagagcgaaggatgaagtggttgatgctcgtcggtatcgtgagttggcgcagcaaatgctggatgatactgagagtccagacgccattggcgcggcagagcgagctctggaagtcgcaaaagtatacgaggcgtatgaggatctaaagcgccaggctggctgtgtggacttcggtgatctggtaatgaggccagtgcagttgctggaatcgaacgaggctatgcgacagcaactgcagcaaacctatgaccatgtgttggtggatgagtatcaggacgtgaaccacagcagtgttcgactgctcacggccctaaaaccccaaggcttgaatctatgggttgttggcgatgcaaagcaatcgatctaccgtttccggggcgcgtcctccttcaacatttctcgcttcggcaatgaagattttcctggtggtgtaactggctatctggaatgcaactatcgttctgtccaagagattgtcgataccttctctgactttgcagcaggcatgagtactggcggagcgcactactggcttagggcagaccgcgctccgtcgttcagcagtcctgaactgcaaacagtcacatctggcgatcagacgagtgcagccttggccgaaagcatcgaacggatgagagcggccggtttttcttatcgcaaccaagcagtgctttgcaggggaaacgacaagctttcagagttggggcaagagctggagcgactaggaatccctgttctcttcttgggaagcctgtttgagcgcgaggaggtgaaagaccttgtagcactgctttcattgctaatcgacaggcgaaagatggggctgatacgcattggctgctggcccgattttgcgatctcccttgaggatatagtgctggtgtttgagcacctccgagagatagatgcacaaattgatgactggggctctgagctttcagggctgtctgcattaggcaaggcttcattggtcagcttgaggcaggcgctagaaggattcgatcagacatcttccccttggactgtcctagcgactgctctcctagaccgtacacgaatggcagcgcaagtcgctctgtcgagtcgagtggttgatcaggcacgtggcattgccatttggcagttcatgaactttgttcgggcgcagccggcaggcccaggtctaccaatcgtaagactgatgaaccgaatacgtcggctgctgagattgcgcgatgatcgcgacctgagacaattgccgactgccgcacaaggcatcgacgcggttcggctgatgaccattcatggtgccaagggactggagtttcctgttgttcatctgacaggagccaatcaagacagcatgcctggagcctatcggaccgccagatgcccaccgcccgatgggatggttatgggggcggaaggctcctccgattcagtgggacgtgccgctcacgctcaagagcaggaatgtctcttctatgtggcaatgtcacgggcgcgtgaccgcctttttctatacgcagtcacccataaaagtaacggtcatcgtcgctccctttctgactatgtccataggctctgcaatctacctcaagtggaggctcgcccctccctccagctcccagttgcgctcgacaccgtcccgttgagtgtccagttcaccggccagatcagattcagcgctcaggccgtggcactttatgactcgtgcccccgacgatttctctacacacacctattgcaagttggtggacgccggcaggcaacggcctttatgcagatgcacgaagctgtgcgcgatgttcttcttgccatgatcgaggcgggcgacatgcctgtcgacgactggcaggaaagacttgagcgatcattcttcgacaaagggctacaccagcatggttacgtggacgactatcgcgatatagcccaaaccatgcttcgatatttcttggcgtctcgaagtggtgctgtggtcgagcccgtgcaggctctgactcttgatttcggtggcgagacgatcgtcgtttacccggatgaaatactaatgaaggatggtgtgcgcactctccgtagagtttccactggccatgcccgccgttccgagtcgaaagatgtcgggatcgcggcatatctactggctgccgaggaggcagagcctgctacctcggtggagttaatttatctggcagacggtgagagtagaccaatgagtctcaagccgaaggagctggtcggccggcaatccaagcttagggagatactggctggcattcgagcaggacacttcgatcccgagcgttcagagtatacgtgccctggttgccctgccttttttgtgtgcggtgcaacgcccaagggaatactgcgcaaatcgttctga

SEQ ID NO: 337479 - DNA, 756 bp, Pseudomonas aeruginosa
atgagctccattcatgatgattttgatgatgtaggggaggctttgcgggaagatcgcccgttgaaagcctcccgcgggtacatgatccgatttgccctcgatggtgtggactttcgccccattgcggtgtccgaccccattccaactggccgtcagatcctgtcggcagcagatttggactaccggggtgacctcaccctatgcgccattctggcttctggtgattttgaggttgtatccctcgatgaaatgttcgacctgcgtggacagggcgccgagcgttttattgccttccgcacggatcgtgatttcaagctgacgctcgatggtcgtcagttgatctggggcctgcccgttatcacgggggaggcactctactccttgtcgggagtcgatgctgagcacggggtatttctcgaagttcgcggcggcaccgaccagttgatcgaccccgtcgacagcgtcgatctcacccggccgggcgtggagcacttcatcacggcaccgcgaccggttaagggccacgtcattgttgtgaactcccgcgacgaatccgtacctgggaagcatgtcaccttcgagcaggtcgtactgcttgcgttccccggcgctccggttgagccgaacgtccgttactccatgacctatcgtcatgctgcatcgaagccacatgcgggtgagcttgcagagggtggcgtagtagaagtcaaacatcaggggactatcttcaatgtcacaaaaactgttcagtcttaa

SEQ ID NO: 337480 - DNA, 1182 bp, Pseudomonas aeruginosa
atgtcacaaaaactgttcagtcttaatccggacctgcgccgcttgcgcgatgagggctacttcgtgcaaatccagggtggttttctggtgatgcgagaggtgccctatgtcgattctcaaaagcatgttcgcttgggaactttggtgaccgctctggatcttgcaggcgacatgacccgcaagccagagtcccatgtcatgcattgggatggggagttcccgtgccgggccgatggcacgccactgaaggaaattgcgcaccagtcccaagtactcaacttggggcatggcgtgactgcacgccactccttctccagcaagccgggccccgagggctaccccaactactacgagaagatgtccacctacgcgaccattctggctgggcctgcagccgtattgaagcctggtatcagcccgcgggtatttcgtgcgcccgacgatacggataccgacagcgtattcaattacatcgatactgcgtcggaccgcgttggcattggtgaattgaccgacaaactggagagcgaagtcatttcggtaattggcacaggtggtactggcgggtacatcatcgatttgctcgccaagacgcccgtgcgcgaaattcgtctgttcgatgcagacgagttcttgcagcacaacgctttccgtgcccccggagcgccttcgttggaagagttacgcgatgcgccgaaaaaagtcgattacttcaaggccatctattccaagatgcatcggggaatcgtcgtgcatccagtcaggctagaccacaccaatgtcgacttattgaacggcagcacctttgccttcatttgtatggatgccggtgaagaaaagcgtgctgtggtgcaaaagctcgaagtgcttggaatatcgttcattgatgtcggtatggggctggagttggtgaacggtagtctcggagggatcttgcgagtgaccgccagtactccgcagaagcgcgagcatgttcacgccggacgcatttcgtttgccggtggaggagggcgagacctctacacgtcgaacattcaggtcgccgacctcaatgctctcaatgccgtattggcggttatcaagtggaaaaaactgaagggcttttaccgagatttggaaagggagcaccatagtacatacaccaccgatggggggcttttgctcaatggtgagctggcatga

SEQ ID NO: 337481 - DNA, 4422 bp, Pseudomonas aeruginosa
atgagccgaacacgcgccgatgctttggccttagtcaattggaaaggtgtcttctacgagcgctatctcctcgatcggcatgtcactgcgctggagggcagcaacggtgccggcaagaccacggtgatgattgccgcctatgtctctctgctgcccgacatgtcccgcctgcgcttcaccaatctcggcgagactggagcgactggcggcgacaagggtatttggggacgtctcggtgatcccggacgcccttcctacgcggtgatagattttgcccttgcgggtgcacagaggctactggctggggtacatctggagcgcaaaggtgaaccctccgtggagcccaccccatttatagtctggggcctcgaacctgcggttcgcttgcaggatctgctgctggttgcacaggggggcgtcgagtctgtgccggagttacaggagttgcgcgacaacgcggcgcggctcggtgggcgattacaatcttatccatccgcccgggagtacttcgccgcgctattcgatcagggagtcatgcccctgcgccttggtaccgacgaggagcgcaataagttcaacgatatgttgcgtaccagcatgaccggcggcatctcaagggtgctcacttcggagctacgctcgttcctgctcagggagcaaagtggcctcgctgataccttgcagaggatgcgatcgaatctggattcctgccggcgcacgcgggtagaagtgcaagagtcgcgccgcctggagcaagaaatcggcagtatcttcgaagccggccaggccatgttcggcgcggccttcctcgctactcgcgaacgtgccgacgagttggcacgccgggtgagcgaggctcagagcacgcgtgatcaggccttccaggcgcaggaagttgcgcgcggatcactcgacgcgactctggccgagttggatgagctcaatgctcgcaagggcgaactggatcgagtgctcgaatccgcacgcaattggcactccaagctgaaggatgccttggcggcattgtgcaccctgcaacagagtgttatccgtctcgcggagaccgagcgcgaagcacaggaagcgggcaggctgcgaagcgaggctgaaacgttgcgaatccgcaaccgcgaggaactcaagcgtgcccaggagggttacaaacgtgccgctgaggggctcgccgacctgcagcggggcatagaggaactgcatcgccgggccgctgcctatcgccaagtaacccgacgactgcgggaagccgagatgactttgcaggttgcccctttgctcccggcgcagttcgtcgatcacctcgcatcggcacgtaacacactcgagtccatcgatcaggagcgtcgtgaagccaggacacgcctgtccgatgcgctgcagcatcgtaagcggcatgcgcagctcatggcggctgtgcggcggctcgcgggacgggatgtcgaaatcatcgctgcgtacgatgcggctactgaagcgttacgtcttcaccggcaactgagcgtacttgctgatcaggttcccagcatcgaacgtgaactggccgaagcgcaacagttgcaggtccggcaggctcgggtgcacgcacaggcgagcgagttgggtgtggtcttgacccaggcgcccgccacgcaagtcgtcaacgctttgctcaccaatactgaagccgaacgatccgcacacgagcaggcgcaacggacggctaatgtcgaacttgccgggctacgacgccggcgcgaggagctccagcaacaatatcagcagttgctggcacgcgagccgcaatggcggaagctgacggaatgcgctatgcgcttgtccgaacacctcggtatacgagtagaggatcggggcagcctggatgaagcccgtgctctcttaggcaagcagtacgccgaggcaggccgggccgaacagcaggcacagcaagcgcaggagcggctgatccgggaggcgcgcgatttactggcggccggaggcccgttctctcctgcgttgttgcagctcaaggacaggctcggtgccgaactactggccggtagttacgaagaagtggcgattgaggaggctgcggtgctggaagcccggcttggggccttggtgcaggcattggtcgtcgacgatctcacagcagcagctcttgcggctgtggaccggccagaggaactagctgacgtgctactggtgccgcgtgatgccgacctctatcgcttggcagaagcctccgacaccacgattgccggcgaaggcgatcttgctatccaagacggcatcgctctccgcttgtcccgtattcccaccaagccgcgcatagggcggcgggcgcgcgagaaaagggcggccgacctgcaggcgcaggccgaagagaaagcccccgagctgcatgcgatgaggagtgcacggcgcacgctggagcggctgcaggccgatggcgatgctctacttgctgggctggaggtctggctggcgggggatcctgcaagtgccatcaccgaggcgcagcaggcgatcaccttggtcgatgaacagatcgagcagcagcgcgaaacggctgatcgaaatgctacagcggcacagacactgcagccgcgtattggcagactgcgttcgttgctggccgaggcgatgctgctcgatccccccgatcatggcgagcgcgtgcacgtcctcagcgaaaaagcatcgcaagcagacgaggccagaagctggatcgccgccaaccaggaagatgtcctacgtgtggagcacgggcttggtgacttgcgccagcttccgttgtcggacacggatatagaaaacctgacgcttcactccaatgccttggagaagcggcgccagcagctcgatgccgggatcgaagcactcgaatatctgtgcgacaacgccgaagcgttggcctgggaggaagctccaggtcggctcgaagactcgcaagaactggttccggcgctgcaagagcaactgagcgaagccgaaacgctacaacaagatagcgaaaacaaggtcacccaggcggaagcccagtatgacgaggcgagcaagcgctttcttgcagcgcaaagccagtacgacaatgcaagacaggaacatgaatccgccgctgaacatttcaattccctcggcatacccgctcccaccgaggatgccctgtcggcggctagtgccgaggtgatgcggttggaacaagaactgcgtacccatgggactcggcgcgatgagttgctgacggccaagggcaaccaggagcatggcttacagaacgcccagcaggatctgcaatctgccgacgacaaactcgctaccgaacgccgcgaggccgagccggcacgtaagcgctgggacgacctacttgactgggcgatgcgcgatggtctggtgggcgagttgctgaccagaacccctgaagagtttgccgacatccgtggccacattaattttgtccaggaagccaagatacgccgaggtgtcctactggaacgcctgggtagtgcgcgcggcggggagaccttgctgaccgaactgcaacagctgcgcgatacctccgatgccgccttcgctgatgccatcctgacgctttggctggctgtgcgcgactggctgcgccgccgcctgccggcacaggtggccgaggtcgatgacccgcgcgaagcgctcatccggctgcgcgaccaactgtctgacctcgaagagcgtcttgcccgtcaggaaagcgacctgcgtggagctagcgaagacgtagcacgcggcattgacgtacagatccgcaaggcgcgtggccaagtcactcgcttgaccaagaatctagaaaaggtcagcttcggcagcattcagggcatccgtgtgcgcatgcaggctgtcgaacgcatggagcagatcctacgcgccctgcgtgaaggtgcggcccaggagctgctgttccaggcggacatgccgatcgaggaggcgctcgacgaaatctttcgtcgctacggcggtgggcgctcagcagggcagcgcctgctcgattatcgggaatacgtgcatctgcaggtggagatccgtcgcaagtccggcaccgagtgggaagtcgccaacccgacacgtttgtcgaccggcgaggcgatcggtgtcggtgccgcgttgatgatggtggttctcaccgagtgggaacgcgatgcgaccttgctgcgcggcaagcgcgctcacggttcgctgcgtttcctgttcctggacgaagccaaccgcctgtcgccggacaatctcggcgtcctgttcgatttgtgtcagacactggatctgcagttgatgatcgcggcccccgaagtggcacgtgccgaaggcaatacgacttatcgcttggtgcgccaggtgacgccggaggggcgcgaggaagttctggtgttcggtcgtcgcactaggagcgtaggctaa

SEQ ID NO: 337482 - DNA, 822 bp, Pseudomonas aeruginosa
atgcgtttcataattaaactagcggcaacagtcgttgctggtgctctccttgccggttgcgggggcgaggatttcacaggcagctatcgcgctaagaacccgtcgaatagcaaagttgagctagtcctcaatatccacggcaatgaagctgagctcattgggcaggagctaggtactggccgcatcaagccgcttgtcaaaatgaccgtctctgtcaaagatggaaagcttcttcttgacgacgtaaatagttccgaacgcttggccatgaagcgcaatgtggacgagcagagccttgactgcctcaactgcaagattcttcgcatcgaggacgatacggtttggaaatatgaccccaaagggccttatgacgtagaccagatgctcaaagatcaggccagcagggacgaggaggaattgaatgccgagcttgccaaaatacaggaaaaagccttgcagcaggggatgcgggatctagaagctccgaagctaactccctatgaaggcgattgggtctatcagcgcacaacgaaacaagaccctttgaccatcatgaccatctggcgcaaaagccagatcaaaagctggtcgttcaaatttgagaccatggatcgtttggggcacgaggttccagggttcgaagtcacggaagctgggctgaagattggaactggccccaaggcccacctatatagccttagccctgacaagaaaaccctgacctgcatggactgcaccaagcccgagcgctggctcaaggctgatcctaataaagacctcagcgatcgttattatgcccgccagatggcaggcaacccgtaa

SEQ ID NO: 337483 - DNA, 189 bp, Pseudomonas aeruginosa
atgttcaagctggctttgaaggaggccgcggagcatgagcaacggagcatggtgaacatgcttgaagtgctgctttgtgactactgtgatcgcaaaggtatcgtgttgccgaatcaaggagccagccagatgcctggtcaggagcgagtagcaactggccgtaaaaagaatgtgggggcagcggcatga

SEQ ID NO: 337484 - DNA, 1095 bp, Pseudomonas aeruginosa
atgacctttcgctatatcggttctaaatccagactcatcgaccagattacagcctacatagggccacccagagagggtgccttttttgtggatgccttttgtggaactggtgtggtggctgaagccgcagcggagctcggttggagcgttcggctgaatgatagcttgcactcagcagtgatctctgcgggagcacgccttattagccatgaccaggcggcattccaatgtcttggaggatacgccgatgccattgccaagctgaacgcagctaggccgcggcatggattcatttggcgcacatatagccctgcttcggtcgattcgtgcggaattgagcgtaggtacttcaccaaagaaaatgcggctcgaattgacgctatgcgtggtttgattgcggagtggaaagaagcaggcgacattgacgagattgaagagagattattaattgccgatctctttggggcattgaatcgtgtggctaatattgccggaacttttggctgcttcctctccaagtggactagtcagtctcaagaaagaatcactatgcggcctagagctctcaaggccaatagcgttcacgtcgaagcaactgtaggtgatgtgtttgacgtacccaataacacacatgacttggtctacctcgatccgccgtacaccaaaaggcaatatgctagctactaccatatccttgaaacggtggctctcggtgatgagcctgaagtcgaaggtgtctcgggtttacggccttggaagatgctggcttcggatttttgctacaagacccgtgcccttaaaacgctctcacgtttggtgcagggcttgagtgctcaaaaggttctgctttcgtacagcagtgaaggacatatctgcatgcaggatatgaaatccgaactctcgaagatcggcacgtccaccatgcatcctctaggtgctatcggacgttaccgccctaataaagtggccagtaataccgcttctgatgtgaacgaatttctggtgatagtggagcgacccgtgacccagcctctcaaacctcagcagaatgttgctaagctcaacaaacccctccttgtggagagctatgcatga

SEQ ID NO: 337485 - DNA, 2226 bp, Pseudomonas aeruginosa
atgagtgctccgcggcccgttgaagcggagtacctagccccagcagaaagcgcccttagcaaagccgctggccatggtcctgccagctttgagcttcgcctccaagtcttggaggctacctctgcacgttttggtgggtttgatttggaagcctttcataaggcattcggggtgcagagcaattactcagcagcagagcttttggaacttgcagcgccagttgcaggcgcgattgagtgctcccccgtccaccctgcaatggcattgagtgctttggcgcgtgaggccctgcacgaacaggaacgtaagagtacgggggcatatcacacggacttccgcttagccacaaggctggcacagcttgcagcccctaagctgactcataaaagtaaggttatcgatcctgcaagtggtgcgggaattttgctggcagctctgacccatgctgtatgcgggatggatcgagctaaggtggcgcattggctggccaatggtgtgtgtgcggcagatctctcgtccaactcgctacgtgcagctctgctgagccttgcatctttcactgacgatgtggaggcccttagggccatgcgtgcccgctggtattgcggcgatagcctgatggcagatcgcgaagtctggacagctatggctcctgagggctttgatgcggtgatcggtaacccgccctgggaaaaggttaagctttctcggcatgaattcctgaaatccgctggagcgtaccgtcattacggggcccaaattcatgggctcgatgaagagcgttttgctttacaacgcgaagaagtggcaacttactctcgccgacttctagcacgctatcctgatttaggtatgggtgagcccgacctctacatagcttttactgatctcttctttgaactctgcaaagaacagggtgtggtggcggcgctgatacccggagggctcattcgctctcaaggcacacaagctatgcgccagaagatcttcgaggccagccagagtgtatctctatcgataatcgacaaccgcgcacggttctttgctatagatacgcgctttaaattcttggctgtggctctggtcaaggcgggctcagagaagagcaagcgtgaccccatcattttactgcatgagcggggaacgtcgacaggcctggaaaaaacaggtatggccactattggtcgtgcagcactgacagcggttcgcgaagacctgagcttgcctgaagtgcggagcttggctgagtggaagctattctcgaaaatcgcaaaggcaggtgtatcttggaatgagccaggcagtggctgggctccgaaattttgccgtgaagtcgatatgacgaaagagcgacccaagttccttggtcgtgcgacgccgggtgctttgcctctagtggaagggcgaatggtgcagagccatcgctttggagttaaagggcacgtttctggcacaggacgcagtgctctgtgggagacctacgctatcggaggttctcgcctctctccacagttttggattcgcccttcagacctgccccgtgccaatcggcaccgtgtagatgtgctgcgtgcagggttctgtgatattgcgggtcagaccaatgagcgctcgctcatggccgccttaattccacccggagtggcctgtggcaacaaggtacccacgatcctctttcccgaggacccctcggaagaaaggttgctggcgtgggtatctgttgccaacagttttgtctttgactggatgctcaggcgtgtgctcactactacggtgaattacttccttctacaaagcgtgcccatgcccaagctcactaaggggggattgccgtggaacaagcttgtgagtgctgcacgcgaacttcgcatactggatgacgctggggctacccgtgaaacatatgaacgcatggcccagcttcgtggggaaattgatgccgaagtggcggtagcgtatgggctcgatttgaaggacatggagctggtgcttcaggacttccctattttggatcggggccaggccgcactgcctagtgaagtcaagtcaacgattacacgcgacaccgttttagcgataatggcaaagcgcacaatggataaaacgacaacctggctgcatcgcgcgaccgaggcacaggctatgggagccatggcctatgtaccctcggagcttgccttaggtggcgaagaactcgaaaaagagggagttaaagtttatggctaa

SEQ ID NO: 337486 - DNA, 633 bp, Pseudomonas aeruginosa
gtggcgaagaactcgaaaaagagggagttaaagtttatggctaatggaatggggcaggttgctcgtatcctttacaaggaaattgttgcgggagatcttcgaaagattcatgcagagtctaatgacgcagacactggaggtggcgcgcgagattttcggtttggttcctatccaagcatttcagcgattgttatgcgaatgtttccagatcaggtagtagaaaatcgccgcagaggtggtatgtcagtacctacgacaatctactctggtcaattctattggtatgaccaagctggcaatgtccgtagggctgtttcctattttgagcctcccaccgacgctaggcctaccgaaggaagaatcactcgggtgcatgaacaaccgtgcctttcaacagatttaatgccgaggcctacggctggaaatcgggtttttctgctgttgattcaattgttggatgatacagtttggccgtattacgcagaagagcaaactctgcgcactgcggggttgtgggatcctcaggtcgctcagcgaatgttgcaatgtattgatgctcagcgcagggcagaccaggcagttattggcttttttgacttcttaaatggcggaagttactgcaatggccgctag

SEQ ID NO: 337487 - DNA, 1149 bp, Pseudomonas aeruginosa
atggccgctagttattctgctgattgccaccatatactaagtcttctggcccgctctaggaatgtcttgctttctggtgcgccgggaacaggtaagtcaaagcttttagctgaggtagcattagcatttgaagccgctcttggtgtatcacctgttggtggagcgccaaaactcaacccatcgggacgtattcccattcctccggctgccgggagtgtaaaaaatatccccgcccccaccaagactgatcgcaaggtcttccggacagtgttccaccagaactccaaatatcgtgattttttatctggtatcacgcccgcggtaaacaaggtggcaggagcaccagatttcaatattgtaaagggtacactgtatcgggccagtgagcatgccaagtctcccaatggtgctgcattgttgatcattgatgagatcaaccgaggcccggctgttcaggtttttggtggcgctatcgtagctattgaatccgataaacgtttggctcctgatggtaataagcggccggaaacgcagttctttgaattgcttgacccgacaacaggagaagtcatcccttacgctttgccgcatgatctatacatcctggcggccatgaaccaggcggatgcgtctgtggaacctctggatgttgcgttcttgcgccgctgggagcctcttcggcttgaacctgatgaggccatcctgagagccttttatggtcttggtgccgcaaattcaaatgctctgcctgatatgcctgcaagcgtaatggatgccctagaggcttcggttagagcctgggtggcagtcaatgagcaaattgctttgggacgcggtcccgaattccagattgggcatggcgtgctattgtcggatatgaatatccagactctttcacttcccgaagtcctgagtatattgtgcgtgggttgggccaaagtgcgcgcccacgtggaagaggtgttcttcggggacattcgtggcattgctgctgctcttaatgcattggacggcccagctttcaatccgtttaagctgactgagactacatttgcggatgacttgcgattccgacttgaaggtcccacgaacttcaccgagggcaatatctacaccactctgagagcatttgcccatcccagggggtag

SEQ ID NO: 337488 - DNA, 1305 bp, Pseudomonas aeruginosa
gtggggcacactcgaacacggttgtctctagttgagtacggagcgcctgttgacctgagtcgagaggtttcatcgaccattggaatagaccgtgcgaaggctaacaatcttttgattgaggctggaaaccgtattgcgtcaagcttgcgactcaactacaaccccataagcattgatgccaggggggcgagggccgtcgacttcgcaggtctcattcgtcttgctccttcgctagaacttgaagttgcacccaagttcttgggtcttgatgacgccgatgctgcgtggcgggaagatttcttttttctctctacactctcgcggcacggccgactgttggcttctgagagcctatctgcatcagggggaacttcgcgcgatctttctactttagtggctcgctccatcatagtcatgtacgaggctcgtaaacgtcggccgttgcgtagctacaggagagtgcgtgaagcggacttctttatcgacggggatcctgaccctgtggatctcatctttccttctcccgatggcttcgagcaagatctcattcgatttgaccgaaacaacgggtggaacgcagatatcgttgcggctgccaaagagcttctgtctgaggtgagtgatccttcggttgtcagttcgttggtgcgactcattgaggacttatctcctcagaacggccctgcgaatcgtcggagatctattcctgccagacatagagcatggaaacccttacatgagctttctgtcgatgtgctctatggactgggcctgaattacaaagaaggcaaggccagtgctccgggatacttggtggctacttggcgcatttgggaggatctgttggcgattgcacttcgactgggctttgggcgttccgtcgtagtgccacaaaagggcttcccgctgggcaccaagatcagagttaacacaggagtaagaagcacgctgtcggtttttccggactatgtcatcgagtctgatggggctagaccccgcatgctattggacgctaagtacaaaggtcacgtagagaacgggcggattcgcatttctgaggctgatatctacgaatctctggcattttctagggccaccgcgtgcaattttgtggttcttgcctatccagccctaccaactgaaaaaccacaacccgtgggcacttgcaaggtttttgagaaaatccaagttgagtcggtgcagatcttaggtgttcaggttgagagccgatgtatctcaaagactggtgctctcaacgagtttgcattgagcttcgcaaaatgggtctcagcggctttcgcataa

SEQ ID NO: 337489 - DNA, 183 bp, Pseudomonas aeruginosa
atgagatggtttttcgtggtgatgctttgtggtggtgcaggcctctggctgagcgcccaatatcaaattccgcaatggttgctttggctgctgctagcgctgggaaccacgatatggggcctagccaagtggatggaacggcaggaggccaagacggagcgcagccatgatcgtgcacgctga

SEQ ID NO: 337490 - DNA, 603 bp, Pseudomonas aeruginosa
atgccccgctcccattctgaacagtcggtatctcaactcgtcacgcagcgtgttaagcgtctgcgcagggggagacctttcagcatcaggtgtcttgcagagcttggttcgagctcggccatctccaaggcagtcgcccagctagttcgccgcggtgagcttttgcgcgtgtaccgtggtatctacatgcggccgaaattcagccaatacaccggccgtgttcgtcgtcctgggccttgggacttgttgagtctgattgccaggcagagtcgctggaagctgcaggttcacggcgctgatgcagtgaggcaattcgggctgagcacacaggtgccgatcattccgatctattacacgagcggccccagccgatcactttttgtcgggaaggcggaaatcaggctcgtgcatgctgctccgatggtcatgcagtgcgcaggaaccagggttggggtagctatcagtgccctctactatctcggtagagatggcgctactcaggagtgcatcgatgcgattaaagcagcactcaaccccggagaactggccaccttgtgggactgcgatatgcccaaatggatgcgcgtggcgctagctgaatga

SEQ ID NO: 337491 - DNA, 2172 bp, Pseudomonas aeruginosa
atgggaaacaaaatgtcggcaaggaatcctgtcagccagcgaggtgtaaaaatttttggattcccctatgcctcttttctgcacatattgagagactacgagaatggacaggattacgagcggctactcgcgcaggtgctcgtcgcaactcagaaaacccctacagatcgccacgtagatcagcgataccgcgtttacctggagataagcaaactttgcggattgcggttcttcacaattccccccgaactaaaaatttggggcactactgaagagttcgtggcgagctgccgggtttttttgcctagtaaatcgagttcaggtaacgccaagagttttgctgctatcgcccggctcgtacgttattgcaacggcgattcgccgcgaactggtggtggcggtggcggttatcgaggtaaacgcaagcaagatgaccagccagatctaatccattacatcacagaggatcctcgcggatttgtcttgggtgaccccgatgatcctgaccagctacccggtcactacgacattctggggggacatacggatactgttgaaggtgatctggcgcccggagaaatgagcccatcaaccgagatttgggtactggatgatgacggctttgagcggccgtatgttgctgatctgctgggccaacaaaatgtcgaggcgcatattgtccgcagccgacagttcctgccgttttcatataaccagctcacgctgaaggagttgcggaatttgttgtttggcgctagcgacctattccactcgtgcctgcaagagctttcctgcccgaaagatttagctcgaattcagctcagaatggaaggaatagttgctctgcatatcagtctgtggctgggccagtcgatgacgcaggtcgtccagttatccatcgttgatgatgagacagatgacgccgatggtctggcattgatcctcggggattcggtgcagttcagtatggtcgtcaggcgcccagacctcgctggcgacgatcgttggcaggcctcctcgggtgtccgagtctcgctgctgcgaattctattgcccgatcttgcgggtagtgcccggttggtaaagcagctgctcaaggcatttcctcgctctgccaaccaggtattcacgtatcaaactgagcagctggacgccgagatcaaagcactgctactggaattgggtgaagacgaccgacgctatacgcgaaccaaattgcgcagttatttgttccaccagatagtcgctgatactcaggatgtagcagcagcatccatgctgtctggcgttgaaatcccctcggcgcaaaccccgcgctattacctgcagctcgatgcctgtcaccttcgcaaaatttacaccacctcactggtaagagtgctgacgcaggtttatgcctgtgctggtctcgcatatgaacatgtcaacctaaatgcagaccaacagggtgggttgggagcaactcattgcctgctgcctacaaccattgagagcaatgtcagtgcaatggccagggtcttgaggaggaaaacgagcgggcgtctcagcgagatggtcgcttggcacaactgtttcaccctctggacagtgcaaatgtttatgttggtcacttcctgtagggcggtccgcaaccctctgatgctcatcggcgagtttgattctgtgttgggcatgggcgcgctgtcagacaaggactctggcgatcgtcatatgagtcggctgatttgcatgccgccgatgttgaggcggcaaataacaagctacttcgcgcattgcgcttctatcagccgacaattcattggttatctgccacaggatgaggaggatcatcagtggtcgcgggggtttttcctgcagattggccaggctggagtgcgccgcgctgagattaccccgggcaatatctacgaccagatggggctggtatctggctacaccacgcatcgagtcaatgcccaccggaaattcatccgcacggaactcacggagcggggctgtccttcagaagcgctggctgcgttcatggggcactggctcaggggtgaggagcctcaggacgcctattcgacgttctgccctgcggtatacgccaaggttctagatgagtggattaccccactactcagggagcttggctggtcggctctaagcagccagtgggtgacagaatga

SEQ ID NO: 337492 - DNA, 3132 bp, Pseudomonas aeruginosa
atgaatctgccccgtctaaacgatcaacagggcagtgttatctggtcggctcggcctcatgagccggaatggatgcccgagatgcgggcgcttctgaaatcgattgccgagaagtccgggacggcgttcggcaaatggctgttgggtgaatgcgccatatccgggatctcgacgacgcacgtccgtgaactggaggcacagctcggcacaaatcacacgttgcgcaacgtactgcgcagcatcactcagcgagtccgggaccaaatcccaggatttccgctggcacgaatagccattgccgtcaggcgtgcagcaaacccgatcaatcctgacgtctacacggctgagcgaattcaacgcagcagccaactgattcacgccctgcagcagggtctgaaactggatatcgatgcgctcagcacggatgagcgcattggtctgctactaatgagtgcggcctacaacggcggattgctcgatgtggctcagctgaatgccatgctcagtacgacgccagacagcatcgagtgggtagcgggaattcccgagatacgtctgccgctatcgatccgcggcaatgccgtcgctgaatttcggcagtggttccctgatccggcaacgctggctctgttgatacgctgcgtggatgatgttcaaaaaagcaccggcaaactaaagcgtagaaattggcacatgcgctgtgtctgtgcattcctgaagaaggttgaggtacctgaacagtatcatccagagaatcccagcgacctgtttgattttctaaggatgcaaatgcagttgcggctgccgcaggtgctggtgaattttgcatgccgcaagggttttgtctcgcagtcactgcgcccctcatcttggggcaatattctccgcctagatgatctcgaggaccctgcggggacttatgacgatgaatctgtttcggatgtaactgaggataaccctgacccacccgcatggctggaggaactgcgcgatcggatccgggacaacctgcccatagagagccctttgcaagcggagtctcatggagaacttcccggcctaatccagagttggcttgcctacatgctgggtggcgcctccgcatacggccacagtattgggcgaagcacgataaagcgatatacccaagtactaggcgcagcactttcctctcggttagatggcataagcatcttcgagctcgaaattgacgcgctcgaacttgtgtatgaatccgcactggatgctcaggccacagatagcaaacggcgcaccctggccaaggcagtccaggagtttcacacgtttctgcagcgtcgttacaactacccgacaatcagcccctactcaatcctaggcatcggcaaaggtgtgaccagggtagatgctcgcattatcagcgaggagcagtaccaattggttatgcaggcgctcggcacatgcgggcttgagctgcgaacgccacgtctggtgacggctgcgaggcttttgttgatcttggggttccggttgggattgcggcgtaacgaggctctaaagcttcgcctacgtgatttgcatctgcccgaattttcagcagcggagtgcgcgcatatacaagctcggcaatcgcatatgcgcaggctatctaaagatgaacaggccagaatagagctgcccgttgacctgctcattcgcccccatgcacagcgtgggttgaaaacccagaatgcggttcggagtttgccgctgcgtgagctgcttgagcccgatgagctcacattgctgatcgactggtatcgagagcggcagcaggaagaaagccaaaattcaacgtcggaattcctgttctgcatcccacagctgagaactcagtgggtcagcgagagctgcctgttcccagctctacatgactgcatgcgagcagtcacgggttccgagttcctgcattaccatcacctgcgccattcctgcgccacgtggtttttgctcaagttgatgggtgcgcagaatgcgctatcaccagagctgattttcaaagatctgccccttaccactcgctggctcagagatgacctcaggttgcgtaaggcgatgttgcctgtagagggccccacccggcgaatcgtccatattgtcagtgccatcctcgggcacggcagcccaaaaaccacactgttgcactacgtccatagcctgcctcagatcatggcgatgatgtggcaatggaatccccagaactggatattcaacgccgcaaacgtcgccaagatagccgaggtaagccaacccaccatgagcactgagccccgtgaaggcatttcagctgagtgcggcgtgctactcgacatcatcggtcgcattagacccctgaaggagcgtaagcgtgctcggaagaaggcgagtcgaggccaggctgaacaggtggagcagaactgggcgattgggcgaattctggctatcgagtcgatgctggcgtatgcctcatatgccgagcagacaggtcgagcggtcaatctcgactgggtcgagttttctgccgaggcgcgtgaaatgatgcttgagcgggcacgctgtatccgcgatatgcaacagcgaccgggagcaagcagcgcaagctctaaacacaggctgcaacctgctctgtatgcagaaggttcgtcgtatctgtcgctgttgccctcgcctccaaagcatggtgggcgtgaggctgtggccgagtatgcgcagcgcctctacgacctgctcgaaggccccgacagcgaacgcgcccagcgcgtgattgatgattttgttgagcgctgttggatgactgaaaccacgctgcgattccagcgtaaccgtgacgaggaccatgcacaggactatctgtggctgctgagtgctataggtattccggctcgatctatcgagctgatcgtctacgacgctaacaagccgaagacgaccaagtcctactggcgtcagcaactcgggagcactcgccggtcgttcagtcagcacgcgccggagagtaacgatgtagcgaatctacatttgggtataagggcgaagcttgagctgaagggtgaggcaaggcagaaccatcactccggcgccgccttgcgctacttgatgctgatggcctccatcgactggcatttccgtggttga

SEQ ID NO: 337493 - DNA, 285 bp, Pseudomonas aeruginosa
atgagactgatcaagcgcagcaacgtcacgcacctgcatccggcgatggaagctcgtgaacaccagtacttgaagcatttggcctctgccatgagccactacctcgagagccccaacggcaatgagctggtctgcatccttggttccggctacgagaagaacaaccgtcaggctctcgatacctgggtcgcctatcaccgtaatgaggtcttcgagaaacggttggaggggcgcagcccgctggacttcctgatcgaaaagctggagagcatgctcaacaactaa

SEQ ID NO: 337494 - DNA, 243 bp, Pseudomonas aeruginosa
atgaccacagaaaacgacgttgaaattctgaagttggcgatcaccaggctccacaggtttgccctgcagaatgccagctcgcagatgaggatcgtatccatactgtcggcgatggattcgattcctgcacatgctcaatccagattgattgaggcaatgcacagcatcaatgaccagatcgcaacgatcaaggaaatcggggagattcttggggtcgaggacgatgacgaatcagaccgttga

SEQ ID NO: 337495 - DNA, 630 bp, Pseudomonas aeruginosa; identical to SEQ ID NO: 324022

SEQ ID NO: 337496 - DNA, 174 bp, Pseudomonas aeruginosa; identical to SEQ ID NO: 335320

SEQ ID NO: 337497 - DNA, 279 bp, Pseudomonas aeruginosa; identical to SEQ ID NO: 335319

SEQ ID NO: 337498 - DNA, 207 bp, Pseudomonas aeruginosa; identical to SEQ ID NO: 324746

SEQ ID NO: 337499 - DNA, 207 bp, Pseudomonas aeruginosa; identical to SEQ ID NO: 328529

SEQ ID NO: 337500 - DNA, 264 bp, Pseudomonas aeruginosa; identical to SEQ ID NO: 324024

SEQ ID NO: 337501 - DNA, 363 bp, Pseudomonas aeruginosa
gtgctgctgatcgatccgccgttcgagcaggccgacgaattgcagcgttgtgtcgctgcgctcgacgaggcgatcgggcggatgcgccagacggtggtggtgatctggtatccgatcaaggacgagcgccagctcaagcgtttctaccaggccctggaacgtagcgtcgcgccgaagctgctgcgtgccgagctgcacgtgcatccgatcgacgacgccgagcgtttcaacggctccgggctggccatcgtcaatccgccgtggccgctggaggacgaactgcgcgacctgctgccctggctggccgaggtcatggcccagagccagggcggctggcgtctcgactggctggtggcggaatag

SEQ ID NO: 337502 - DNA, 555 bp, Pseudomonas aeruginosa
atgagcgagataatggacgtcgagcggctgcgccagcgctgcgcggccggcgaaagcttcaaatacctgtatttctggggacatcgcccggcgacggatgacaaggtcggcaagagctgtttcagccagtggtacgaggcttcgttcaagctcgacggggtgcgctacgccagcgccgagcattacatgatggcggccaaggcacgcttgttcgacgaccctaggttgctcgagcgcatcctggcggcgcgcagcccaggcgaggcgaaggccctcggccgcgaagtcgccggcttcgacgaggcacgctggaacgccgagcgggtgggaatcgtgatcgaaggcaacctcggcaagttcggccagaacgcttcgctgaagaaataccttctgggcaccgccgaccgggtgctggtcgaggccagcccggtggacgcgatctggggcatcggcctggccgcgagcgatcccctggcagccgagccggcgacctggcaaggcctcaacctgctcggcttcgccctgatggaggtgcgccggaggctggctcagtag

SEQ ID NO: 337503 - DNA, 381 bp, Pseudomonas aeruginosa
gtgccaggcgaggacggcgacgaaaacctagtcagccacctcaacggcggcgccggcggcagctggatgttcggcgacgacttgctgctctacgccatgggcaccgcgcggatcgagaacaacagggacttcgccgccgccatcgccccggcggtgggcttcgacagcggcttgctgtggcgcaacccgctgggcaacctgaccctggaggccaagggcgactacttccacaacggtgaagtgcgccgcagtttgggcttcgtccagcaggtggagctgggccgcgacctcggcctgcgcctgagcgccgaacgcgagttcagccatgtcggcaagccgatcaacgaggtgaagctggagctgcgctggtactactactga

SEQ ID NO: 337504 - DNA, 1290 bp, Pseudomonas aeruginosa
  misc_feature (1268)..(1277): n is a, c, g, or t
atgatccaccagattacccgcgcaggaaaaagcctgctggctgcaggttgcaccctgagcatcctgttcgcctctgacagttatgccgccacggccctgaatgtcagccagcaacccctgttcctaacccagggcgttgctcccaacctgctgttcactcttgatgactcaggcagtatggcctgggcttacgtgcccgatggtattagcgggaatagcggcagagcgggacgttccagcgattacaacgcactgtactacaaccccgattatgcttaccaagtgcccaagaaattgacactgtcaggcgatcagatcatcgtttccgactatccagtgccacgcttcacagcagcctggcaggatggctacgcccaaggctccaccaccaacctgagcaataactatcgccctcaatggggaaccggctggcttggttgcatcgatagcagctgcaataccgggagagcttattactatacttataaggtaagcgctagctgccctgcacagccggtgagcagctccaactcctgttatacctacaatgctcttcctaccagtcaggaaagcaactttgcgatatggtactcctactatcgcaaccgcatcctggccacaaagaccgctgccaacctggccttttacagcctgccggaaaacgtgcgtctcacttggggggccctgaacacctgtagcatcggcgccaacagcagaagctgccaaaacaatgccctgctccaattcaacaagcagcacaaaatcaatttcttcaattggctggcgaacagcccggccagcggcggtactcctctgcatgcggctcttgaccgagccggacgcttcttgcaaaccaacggcacagcttataccaccgaagacggaaagacatattcctgccgggccagctatcacatcatgatgaccgacggtatctggaacggtcggaacgtcacccccggcaatctcgacaaccagaaccagacctttcctgatagcaccctctataggccacagcccccttatgccgacagcaatgccagctcattggctgacctggctttcaaatactggaccacagacttacgtcccagcatcgacaatgacctgaagcctttcatggcctacaagagtggggacgattccaaggattactgggaccctcgcaacaacccagccacttggcaacacatggtcaactttactgttggcctgggtctttcctattcgctcacattgaactctgcaccaacttggacaggcagcannnnnnnnnntacgaggagttga

SEQ ID NO: 337505 - DNA, 822 bp, Pseudomonas aeruginosa
atgcgtatcgtcgtcgcattgggcggtaatgccctgctacgccgtggcgaacccatgaccgcggacaaccagcgggaaaacgtgcggatcgccgccgaacagatcgccaaggtgggcgcggaaaccgagggcatgatcggctacatgatcgaacaggaaatgggcaacctgctgccgttcgaagtgccgttcgccaccatcctcacccaggtcgaggtggacggtaaggatccggcgttccagaacccgaccaagccgatcggcccggtctactccagggaagaagccgagcgcctggccgccgagaagggctggagcatcgccccggacggcgacaagttccgccgcgtggtgcccagcccgcggccgaagcggatcttcgagatccgcccggtgaagtggctgctggagaaaggcaccatcgtcatctgcgctggcggcggcggtatcccgaccatgtacgacgaggccgggaagaagctcagcggcgtcgaggcggtgatcgacaaggacctctgctcctcgctgctggcccaggagctggtggccgacatcctgatcatcgccaccgacgtcgacgcggcctacgtcgactggggcaagccgacccagaaggccatcgcccaggcccacccggacgaactggagcgcctcggcttcgccgccggctccatgggtccgaaggtccaggccgccatcgagttcgcccgcgccaccggcaaggacgcggtgatcggttcgctcgcggacatcgtcgcgatcaccgagggcaaggcgggaacacgggtcagcacacgcaaggcgggtatcgagtaccgctga

SEQ ID NO: 337506 - DNA, 1107 bp, Pseudomonas aeruginosa
atgccttcggtctacaccctgttcggcagcatgctcggcgccttctatttccccgagctgagcctctggggcaagatcgccatcggcatagccctggcgctgctcaccgcggcgttcaacgtggtcgcgctgcgcctgggcaagtggctgccgaacctcggcgcgctgctcaagctgctcgcggtgctcgccctgggcgtcggcggcctgcacttcggctggaaccatggcttcgccaacgacttcagcctggactccatcgtcccgtcctcgccgggccagatggccgcgctgggagtgatggtctatggcatcatggggaccgagctggcctgttgcagcgccgcggagatgcgcaacgcgcgccgcgacatcccgcgcgcggtgctgatctccgggctgatcgtcggcgccttcaacatcttcggcaccctcggcgtgctggccgcggtaccggccgaggaaaccgacgtcacccggatcttcgcccataccctctacaacatctacggccacgacggcgccggcgggatgctcgccgacctggtcggcgccttcgtcctgttcaccctcttcaccaacatggtcacctggagcatgggcaccaaccgtgccgcggtggaagcggccaaggccggcgagctgccggcgctgttcggcgtggtccattcgcgccacggcacgccgatcggctcggcggtgctggcctcggcggtgagcatcgtcctgctgctgctctacggcctggtggcgcacactgccgaggaactgttctggaccctgctgtcgatcttcgccatggttttcatgatgccctatgtgctgatgtgcctggccttcgtccgcctgcgccgcgccgacccgcgtccacggccctaccggatgccgctgggcgaccgcctggccagtctctgggcgctgttcgtcgcgctgcatgtgctggccggcatctgcctgttcgtcgtcacccccggcgcgccgatggactgggcctacgccggcaagatcgtcggcggcgtggcgctggccctggccgtgggcgaactgctgatccgccaggcggcgcgaaggcgcggcgtgatgtcactgcgcggtgcctacggttga

SEQ ID NO: 337507 - DNA, 201 bp, Pseudomonas aeruginosa
atggctgaccttgccgatcacgccaacgaactggtcctggctcgcctcgacggcctcctggcggcgcgcccggcgctggccatccgcgagtccgcggaagactgcgaggactgcggcgagcccattccccaggcgcgccgccgggcggcaccgggctgcagtcgctgcattgactgccaggaccgccacgagcgccgttga

SEQ ID NO: 337508 - DNA, 201 bp, Pseudomonas aeruginosa
atgccaataccacccccgccgcacaccaccatatgcccaaactgcggctggcagcgcaccagcattccagccagcgacgtcctccgactgaatgtcgattggttctgccgctgcccccactgccagcataccgagttggagtcacgcccggccagccgcgcggaaatcatgcgagagcggctggcacagttctttcgctag

SEQ ID NO: 337509 - DNA, 468 bp, Pseudomonas aeruginosa
atgacagggaaaatcatcatgcacaaaaccaaaatgctgctgctctgcagcctgcttacctgcaccagcgcccaggccggcacctatgaatggacgcccggctggggtatgggcgtcagtgaacatctggtggacgacggtaacggcaacgagttgatcatctcctgcccggactacgaggaagatggctatgtccgcgcctacgccagcatcggtggccggcagtacagctccgaagagggcagcggcttcgacgtgatcgtcgacggagagacctacaacaaccccttcttcaccgactgccgagtgtgcggggccaacttccccagtttctgggaggccctgcgccaggccgaccacctgaagctcatggcggacggcaagaccatcaatctgcccaccaaaaacatctccagcgtactccagccgctgggcagcccggaaaacagctgccgctcggcctggtag

SEQ ID NO: 337510 - DNA, 123 bp, Pseudomonas aeruginosa
atgctcaagaatcttcttgccaccataggtctagcagtagtggtcaaggtcgcctttgaacactatcgagagttccaggagcttaagcgcgaaaaacagggctgtagggagccgacgatctga

SEQ ID NO: 337511 - DNA, 786 bp, Pseudomonas aeruginosa
atggttgagatcgggctcgggctattggtcggcctcgtcctggcgctgaccggtgcgggcggcggcattctcaccgtcccgtttctgatcttcgtggtcgggctcgagctgcatcaggccgcgcccatcgggttgatggcggtcgggcttgccgcatgggttggcgcggtgattggcctacgggacggcatcgtccggtacaaggcggcggccctgatggcctgctgtggcgtgctgctcgcgcccgtcggtgtctgggcggccgcgcgggtggcgcacgatgtactcgccgtggtgtttgcgctggtgatgttctgggtcgccttcagggcattcaggcgtccgccgagcgatgattcgatcccgagagccgtgccctgttggctgaacccgcaaaccggccgctttcactggacctcacgttgtgcagcgagcgtcgccgcgtccggtaccctggcgggttttctctccggcttgctgggggtcggcggcgggttcgtgctggcgccggcgctcagtcgcttcagtgatctgccgatgcgttcgattgccgccacgtcgttagcggtcatcggcctggtgtcggtcagcggcgtgttgtccgccgcgctgacgggtggcattcagtgggcagtggcgctgccgttttcggccggtgcggtgctggggatgttcgccggccgcacggtttcatctcgcctggacgggcgcgtgctgcagcgaggcttcgggttggtagcggctgttgccgcgtcggcattgctgcttcaagtcgcccacgcttga

SEQ ID NO: 337512 - DNA, 237 bp, Pseudomonas aeruginosa
atggtcgacggcggcgaacaggccgaactcggcacgctcggcgaccgccgccacgcccagctccggcgggtagtgcggctgcgcggcgagcaggccgagggtggcgcggccgcggctgacctgggcgatcacgtcctggtcctcggcgatcaggcattcgaactccagctcagggtaacgctcgtccagttcggccaggcgcgcctcgtagcgcgccgaatggtaggtgtcggatag

SEQ ID NO: 337513 - DNA, 459 bp, Pseudomonas aeruginosa
atgatccgggaaatcctcaagatgggtgacgagcgcctgttgcgcatcgcgcagccggtgccgtccgaactgttcggcagcgaggagctgcaacggctgatcgacgacatgttcgaaaccatgcatcacgtcggcggggtagggctggtgccgccgaccatcctgttgaacccgcggatcaccctgctggacgacgagatggaagagggctgggagggctgcctgtcggtgccggggttgcgcggcgcggtatcgcgccatcggcgcatccgctaccagggcctggacccgcagggacagccgatcgaccgcagcgtcgaagggttccatgcgcgggtggtgcagcacgagtgcgaccacctgatcggccgcctgtatccctcgcgaatcaccgacttcagcaagttcggcttcaccgaggtgctgttccccgacctggaccccgccgcggacgattga

SEQ ID NO: 337514 - DNA, 750 bp, Pseudomonas aeruginosa; identical to SEQ ID NO: 318383

SEQ ID NO: 337515 - DNA, 441 bp, Pseudomonas aeruginosa; identical to SEQ ID NO: 318386

SEQ ID NO: 337516 - DNA, 690 bp, Pseudomonas aeruginosa
atggatactgacgtagatccagctggtgccggcgccgacccgcggatcggctaccacttcatctaccccggctgcggctacggcggctcctgcttccccaaggacatgcgcgcgctgatccacagcgccgagcaggcgcattgctccagcgacctgttgcaggcagtggaagcgatcaaccggcggcagaagcacaagctgttcgaacgcatccgggtgttctacgacggcgacctgcgcggcaagaccttcgccctctggggcctggccttcaagccgaacaccgacgacatgcgcgacgcgcccagccgcgaactgatggaagcgctctggcgccacggcgcgcaggtgcgcgcctacgatcccgaagcaatgcaggaaacccagcggctctatggccacgacgaacgcctgagcctgatgggcacccccgaggcgaccctgggaggcgccgatgcgctggtcatctgcaccgagtggcagcaattcaaggcaccggatttcgagctgctcaaggagcgcctgaaggccccggtgatcttcgacgggcgcaacctctacgaccccgagcgcatggcccgccacggcttccactactacccgatgggacgcgggcagtcctgctcgttgccgatcaacgaggccagcctcgcacaggaagatggcgtgcgcctgttgcgccaggcctga

SEQ ID NO: 337517 - DNA, 813 bp, Pseudomonas aeruginosa
  misc_feature (751)..(760): n is a, c, g, or t
atgaaacgaatcctggtggcgaccgacctgtcctcgcgttccgagctggcggtcatgcgcgccgcggcgctggccaaggcgaggaatgccgaactgaccgtgctgaacgtgctcgacgacgaccagccgccggtgctgatcgcgccgcaacggctggccatcgccaacctgctggaagtgaacggacaggccctgaaggagcgcctcggcgtcgagtccaaggcgatcgtgcgggtcggcgatccggtggtggtgatcaacgcggtggccgaggagatcggcgccgacctgctggtgatgggcgcgcaccggcacacgccgctgcgcgacctgttcatcggcaccaccctggagcgggtggtacgcaatgcgaagatcccggtgctgcgcgcggccggtgcgccggaagaggagtaccgccgggtgctgctggcgctggacttctcgccgacctcgacgcgcgcggtgcagatggccggccagctcggcttcctcgacgccgccagcctcaccgcgctgcatgccttcgagccgttcgccaaaggcatgatgcgttattcggggatcaaggaagaccgcgtcgagcattacgtcgaccaggaggaactcaaggccaacgtcgagctgcgcgactacgtcgccggcctggggctgggccgcgaggacatccagttgcgcgtcggcgaaggcttgccgatcaacgtgatcatgaccgaggtacgccgccaggcgccgcagttgacggtgctcnnnnnnnnnngcgccgaactggcccgccaggcccagcaggcggtgccgcccaagcgcgactag

SEQ ID NO: 337518 - DNA, 912 bp, Pseudomonas aeruginosa
atgaccacccgcatccgggccagcctgctggccctgcccctgctgctgccctcgttccaggctatcgccgcgctgccggggatgaacctcggccagacctccttcctcgacggcaaggccctgcccggcacgctgttccagcagttcgtgaatatctacgaggccgacgacttcatggacgccaacggtcaccggcgcccgctcgacaaccgcctgcgcaccctgctcgccaccagccacttcgcccacatcagccagcaccagctgttcggcgcctactacggcgcggaaatcctcgtcccggtgctgctcgccgatcccgacttcgaaccccacgccggcagcgccaacggcctcggcaacctgatcgtcagtccgttcatcctgcaatggccgcagaccgagctgttcggccggccctactggcagcgcctgaacctcgccttccagttacccaccgggcgctacgacaggcatcgggcgatcaatcccggcagcaaccactggagcttcaacccgcactacgcgctgacctgggaattcgccgaaggctgggaagccagcgctcgcctgcagtacctgttgccgggcaagaatcgcgacccggcgccgccgttggccgacgactacctgcaaccgggccaggcgttccacgccaactactcggtatcgctggcgctggatgcgcattggcggctcgggttgtccggctacagcctgcgacagatcaccgacgagcgggtcgacggccacgaccgcccggactcccgcgagcgggtcgatgccatcggcccggcgctgatgttcggctggggcaagtcgcggctgttcctcaacgcctatcacgaatacggcgcacgcaaccgcagcgagggcagccggctgatcctgcgctactcgcaggtcttctga

SEQ ID NO: 337519 - DNA, 558 bp, Pseudomonas aeruginosa
atgaatgactggaaagcatgcgttgggaaaatgagcgatcgggaggtggccagacgctttgggctgggcgccagcaccgttcgacgatttcgccaatcaaataacattcttgggttctgccccgaagacaccgagctgtcacctgatttgattgtgcaactggcaaaggaaaccaattaccgactggcaaaaagatttggtgtttccatcaagcgaatcaagcgtgcgagagcggagctgaagatcccagagtcaaagatcagtcgtgagcgtttcaaaccactggaggacatttggaccagcgaagccatagctctactggggatgatgccggatacagaagtcgctgaccgtttaggcatcagtaattttccggtcaaaaaaatgcgtagggagcttggaatacaagcgtacaagcgacctttgcccgaaatgacacccgaaattatctcggaattcgggggcctttccgacgcagagatcgcccgccggctcagcgtgtcggtgagctatatccgcagggcgcggataaatatggagaagggcagccagcaatag

SEQ ID NO: 337520 - DNA, 1311 bp, Pseudomonas aeruginosa
atgaatagctcacgactttcggatgaaatgctgtctgttgtctggagcccggataaacatgatccagagtggaaaagcggatatctgataacactccgggagcgctgccaaaactccggcaacagcatcggtgaatggctctgcggacaacgtttgctgcgtagctttcccatcaaggagatgcaaaatctcgagaatcagctcgaaagctcgacattgcgcaacacactgctagatgtgacgcgtcgggcacagcgttttaatccgagcttgccgctggctcggatagcgatcgaaacgcagcgccgccctaatccgattaacccagacctatacaactcagagaatctgtcggccagtcaagacttggttgattcgatggggcgcgccatcaggcgtgatctagatcaactcacaccccatgcgcggattgggctgcttctactgagtgctgcctattatggcgctctgatggacattccccaactgaacgcgctgactcagcttgatcctgggcaggtcatttggatatccggaataccagagttccggttgcaactctcaatccgaggtcaacctgaggctgagaaccggcagtggtttccagacccaataacgctctcgcttctgtcgcgctgcgctgcagatctagccgagaaccggtcttacttggatcgaaagggcgggaagttaaggtgtattcaagcggcgctggccaaaggagaaatttgccctgataaccagccagcctctctagagcgagtgtttgagttgctgcgtattgagcgtcaaacacagtttccacagctgctaataaattatgctacaagatccaactttgtgtcgcattctgttttgtcggactcttggcagcatttgaacaggaacgcaccggtaccaagtagcgaagagaagcagaaacggaaaaagcaccgatttcgcagaccccgaaaaaatgttcccgaatggttgactgtattgtgccgaaaagtccgcaagcggcaaatttcaccagtcgagaatatacctccacctcagacgcttgaagctttgatcaatggctgggcggcactcctgcttcacggccgctcgttttacggcaacatgttacagcctaaaacagttgccaactatgttcgggatgtcggtgtaggtttggacaatctgctctgtgaggaggaatctcgccaggggattattggagtttcatggtcacctgcagaaaacttttgcgtatccgccaatcagcccctacagcacgctgggcattgggaaaacacctcagttcgtcgatgctcagatcctcaatga

SEQ ID NO: 337521 - DNA, 4305 bp, Pseudomonas aeruginosa
atgaaaccccgtgatatccacgacgaatggctgtcgctgatcgaggtctccggccccttcctcgccacgcccgtgctcgagcgagcgttctccaccggcctaccggcggtcgagcagcgcattcgccagtacctgcgccaagcgcatgacgaatggtgcgaggcacgcgacaacgaggatccgcgcttcgccgagctgcatcgagcctggatccacgaagtgctcgcacggggcctggaatacgacgaggacgatagcggcgaactgctgcggcgaggcgaacgactgcccgactccgtgcgcgtcaccctgtccgagcatggcgtcacgctggtgcccgactacgcgctggtatccaacgacaagccgctgctgctggtgcagagctacccggccggaaccgatctcaccgcgaccatgaagatcgatggctggatcgccagccccgccgagcgtatggaacgcctgtgccgggcaagcggctgccgcctcggactggtcaccgatggcgagcgttggatgctggtcgatgcgcccgtgggtgcggtggtgacctatgccagttggtacgcacgcctgtggagccaagaacgccagaccctgcaagccttcgtggcattgctgggtatcgcccgcttcttcggcgccgaggacgaaacgctgccggcgctgctcgacgaatcgctgcaacaccaggaggcggtgaccgatgccctaggcgagcaggtgcgccgggccgtggaagtgctgattcaggcgctggacaaggaagatcgcgaccgctcccgtaccctgctgcaaggcgtcgagccagccgagctctacgaggcaggactgacgatcatgatgcgtctggtgttcctgctctcggccgaggagcgcggcctgctgctgatgggtgacgagacctacgagagcgactacgccatctccaccctgcgcatgcagttgcgtcaggaggccgaggaggtgctggaacaccggcacgatgcctgggctcgcctgctggccaacttccgtgcggtctacggtggcatcgagcatgagtccctacgtctgcctgctctgggtggctcgctgttcgacccggatcggttccccttcctggaaggccgtgccaagggctccgactggaaggtcgatgtcgctcacccgctgcccatcgacaaccgtaccgtgctgctgctgctggaagccatccagcagtaccaaggcaggactctgtcctaccgtgcgctggacgtggagcagatcggctacgtctacgagggcttgttggagcgtaccgtcgcccgtaccacgagggtgaccgtggagctgagcgctggcaagggcgcgaagaagaccctgtatggcctggacgacctcgaagcgctgcaccgccacagtgtcgatgccctggccgatgaactctccggccccgatgccaccaagcggagcgccagcgccattcgccgggatctcgagcgtgccgtcgatgcagaggaggccaatcgtctgctgaccgcctgtggtggggacgaaactctccgcgagcgtgtgctgccgttcttccatctgttgcgcaccgatccctggggatatccgctggtctacccggagggtgctttcatcgtcaccacgggcagcgaccgccgtgaaacggggacccactacacaccgaaatcgctcaccgaagccatcgtcacagagacgctcacaccgatcgtctacgtcggccctgccgaaggactgccgcattcggagtgggtgctcaaatcgcccgccgagctgctcgacctgaagatctgcgatccggccatgggttcgggagccttcctcgtgcaggcctgccgctggctggccgaacggctcgttgaggcatgggcgctggtcgaggatcgaggcgagacgatcgatgccgatggccgagtgaccgacgctgctgcctgtctggaaccgctgccaagcgatatcgaggcacgcaccaccatagctcgccgtctcatcgccgaacgctgcctctacggcgtcgacctgaaccctctagcggtcgaactggccaagctatccatctggctggtgacgctggccaaaggacgtcccttcggcttcctcgaccacaacctgcgctgcggggatagcttgcttggcatccaccgcctggatcaactgacagaactgtctatgacccccactggtcgggaccaactgcggctgttcggtcagaacatcgaacgggccgtgcgtgaagccatcgaactgcgcttgcgcctgcgtgaaatgcccatccgcgatatccgcgatgtggaggccatggctcatctggacgctgatgctcggcgaaaactcgaagtgcctgagtgcatcgctgatgcgttcatcggggaggttctggcctcagttggcaacatgagcgcgatagaacgagccgccacgatgctgagcatccaagccggtcgagtagtcgaaggcgatcatgatgccctcgacgccatcattaagcgcgcgcgcgaaacgttgagcgccgatctgcccgaaggcaagtccatccgcactccatttcattggcccttggagtttccggaggtcttcgtcggtggctcttcgggattcgatgctctgatcggcaatcccccattcctcggtaaccgactatggaaaggcgcgatgggcgagaggctgcaatggcagtgccagatggtactcggcacatcgccaggcaagatcgacctgtgcatcgtgttccaccgacgggcggtcaatttactccgtccccacggctgctatgggatgcttgcgaccagcaacatcgccgaaggcagtgcgattgaggtcggtctcggtgtcatcgtgcagagcggcagcatccatttcgctaggaagggcatgccgtggccgggctcggcggcggtcgtggtcgccatcgtcggcttctacaaaggcgattggaaggccgactgcgatgccgatgggcaacgttgcccgcgcatcgggccgagactggagcccgaagcggcggacgtctgggtgccgcaggtattaacaggcactacatttgcctttgagggtgtgaataacagcaaagggctggctttcgtcataacgccagaaagtccgtggttcgatcgactccagaacgaaccaggcagcttgttgcggccatacatcaccggcgatgacatcaccagttcggcactgaatcgtatcggacgctgggccctggatataggtgacctgaacttggatgagatcgcccgccgatggccggtagcgtatcgcttcctcgtcgaggaagtgcagtcgacccgcacggtggcatcactcaagagctataagggattgatcgaccgctggtggcagttctggaataaccgagccgacttgatgcgccggattcggcaacgcgaaagcttcatcggctactccaagaacaccaagcatcctgttggaatgctcgcgccatcgggatggatatataccaataaggttctgttgatcggaatggagcgagacgacctctacgctatctctctcagcacaggattccgcacgtggctagaacgattcagcggtggcaacctcggcgaaacgctttccctttccatcagtgagtccgtcgcaaaatatccagttcctgaacagcgagtggctcctgctggcattgaggctgccgcacagttcaatcatcttgccgtcgagttcagttcggctcatgagtgcggcctgactgacgtcatgaatgcgatccatacgcccggcgcgacagattcgacgattgccgaactgcgccgattgttggccatcatcgatacggaagtgactaccgcctacggctgggacgacgtggatgtttcctacgagttccgcgcgttcgacggcggttccgtgaatgaccgctggcggtgggcgttgtcctccgacgccacttcgacattgttggagaggctcgtagcgctcaaccgtgcacgcttcgaggctgcgaccaatgagcaggagagccgcccccccgctcgcagacgccgctctagtcaggcaactgcaccacagccttcattcgacttcgatgcaatgcttgccaccacaggaaacttgcccaaggctgccgagcttcctgcgagttatcgagcaggcccaacccaagccatcgctgagcacctgaaagcacgccctggctggcacgccaagtccgatatcctcgcggcaactggcatcccgactacgctgtggaacgccgcgatcgccaacctgatagccgagggcaaagtcgaacgacagggggaaaaacgtggcactcgctaccgtgcgcttggcaaggcctcttga

SEQ ID NO: 337522 - DNA, 1548 bp, Pseudomonas aeruginosa
atgggcgatgccgccggtcaactggccgaccatctccatcttgcgtgcctcgtgaagctgcgccagggcgctttcgcgctgggcgagcatggtcgcgacacgttcttccaggctttcgttgagttcgcgcagctcgttctcggcgcgtacccgcgcgctgatgtccatgcacacgcagagcaggccgctggcggcatgctgctcgtccaccagcggcgtgacctggttctgcacccacaccgtatcgccgtcggggcgaacgtagcggccgctcatctcgaacgccgcgccggtcgctccgcctggcgccgcggggagggcgaagtcggcggggtcgaggatgtcctgcatgcgcaggccgagcagggtctcgcgcgaacggccggcgatctcgcagtagcgatcgttgacccgggtgaagcgccagttccggtcgcataccgcgatgcccgcgctggcctggtcgaacatcgccgccagttgcgcggaactggtgcgcagcgccagctccgcgcgggcatgggtgagcgaggtccaggccagcttggcggcttcctccgccaggcggcgcgaatcttcgccgagggcctgcggatgggcgaagtggatcgccagcagcgcctccagccggccgtggcgcagcaccgggacgtgcagcgtggcgcccagccccaggcgcgcgcggctcgccgcctcgtcgagactcatgccgcgctccccggcgaggtcttcccgcgccacgctgcgtccggcatgcagttcgccggacagggtggcgccgaacgccaggtagcgatgccgaccgaccgccgagcggccgtcgtggagatagtcgcgatggacctggaaggtcatgccgtcgccgttgtcctcgccgaagaatatccgcgacgcgcccagctcctcgccgagccggcgcagggcggtggcttcgatctccaggggatcggccagggacggcagggtctggcccagttccaggaggaacgcctggcggcgttcgaaacgcacccgctcggtggtctcggtgacgatgcacagcacgccgccgacggaaccgtcggtttcccgcaccgccgaataggacacgtcgaaatagaccgtctcgccgcgtccatggcgttcgatgtagaagggccgatcctttgccgcgaaggtttcaccggtctcgtacaccccgcgcagcagcggttcgaggtcatcccacagctcccgccagttctctatcgccggccggccgagggcgcgcggatgcttgtcgccgatgctcggcgcgtaggcatcgttgtacagggcgacgaattccgcgccccagaacagcacgatctgcgccttggccggcagcagcgtggccatcgtcgtcttcaggctcgccgaccaggcgtccggcgggccgaggggcgaactggccgcgtcgaggctgagcaacagtttcccgaccgctcctccgttggccaggaaggccggtggatggtcgagggtgttcgggtccggttcgatggtgaaaggctgtgccatgtctgcggagtcttgctcggttccggttga

SEQ ID NO: 337523 - DNA, 1443 bp, Pseudomonas aeruginosa
atgcccagcaccgtctcgtcgtcgcggctcggcctcgccgggctctgcatcctgctggcggggcaactgttgccgatgatcgatttctccatcgtcaacgtcgccctcgacgccctcgcccattccctcggcgccagcgaaaccgaactggaactgatcgtcgccgtctacggcgtggccttcgccgtgtgcctggcgatgggcggccggcttggcgacaactacggccgtcgccgcctgttcgatctcggcgtcgccctgttcgccgtcgcctcgttgctttgcgggctggccggttcggtctggctgctgctggtggcgcgcgccctgcagggcgtcggcgcggcgctgatcgtgccgcagatcctcgccaccctgcatgtcagcctcagcggccacgcgcattcccgcgcgctggccgcctacggcgccatcggcggcctggccttcgtcgtcggccaggtgctcggcggcttcctggtctccgccgacatcggcggcctcggctggcgcagcgtgttcctgatcaacctgccgatctgcctcggcattctcctttgcagccgccgctgggtaccggagacccgcaccgagcatgccgcccgcgtcgacgcgccgggcaccctgctgctcgccgcgctgatcctctgcctgctgctgccgctggctctcggcccatcgctgcactggtcctggccctgcgccctgctgctggcggcggcggtgccgctgctggcctggctgtggcgcaccgagctgcgccaggaacgccgccaggcctggccgttgctgccgccgtcgctgctgcgcctgccgagcatccgcttcggcctgttgctggcgatcctgttcttcgcctgctggagcggcttcatgttcgccctcgccctggccctgcaggccggcgccggtctctcgccggtacaggccggcaatgccttcatcgccctcggcgcctcctacttcgtctcggcgctgctcaccgcccgggtggcggcgcggatcggcccggtacgcctgctgctgctcggctgcgtcatccagatgtgcggcctgctcggcctgatgctgaccctgcaacgggtctggccgcagccgggcatcctcaacctggcgccggcgaccctggtgatcggcttcggccaggcgttcatcgtcagcagcttcttccgcatcggcctctcggaggtgccggccgcccaggccggcgccggcagcgccatgctcgccaccgtccagcaggcctccctcggcctcggctcggcgctgctcggcgcggtgttcgcgcacaggctggagcgccatggcgactacctggaagcgacgcagacgaccctggccgtcgagttcgtcctgatgacgctgctgctcggcgccacctgcctcttctacctgcgccgcgtgcgcacggtgccattgcgctgcgactcgccgggcaactga

SEQ ID NO: 337524 - DNA, 201 bp, Pseudomonas aeruginosa
atgatcgaactgttcatcgaccggcgtccgctgcgggtcgccgtcggtaccagcgtggcggccgccctcgccctcggcggcgacggctgctcccgcagcgcggtcggcggcgggcggcgcgcgccattgatcgacggtcggcgacgcctggcctgccagaccgtctgccaatccggcatgcgcgtggagacccaggcatga

SEQ ID NO: 337525 - DNA, 411 bp, Pseudomonas aeruginosa
  misc_feature (263)..(272): n is a, c, g, or t
atgaacgaatcccccgagaaggaccagcgccaccgcgagcggatggagcgcaagaaggccgtggtcgacgagaagatcgcccaggcccgcgacgaacgcggcgtgctcctggtgcatagcggcaacggcaagggcaagagcagctcggccttcggcatggtcgcgcgggccctgggccatggcatgaaggtcggtgtcgtgcagttcatcaagggcgccgccagcaccggcgaggaagccttcttccggcgcttccccgaggnnnnnnnnnngctatcacgtgatgggagggcttcacctgggagacccaggaccgccagcgcgacatcgccaaggccgaggcggcctggaaggtcgccgcgcaattgctggccgacccggacgttggcctggtggtgctggacgaactga

SEQ ID NO: 337526 - DNA, 1164 bp, Pseudomonas aeruginosa
gtgctggaaagcgtgccgtcgctgatccagggcatgctcgccgaagagcgccaggccctcgacggcctgcgctggatgctgcccaccggcgaggcgatgccgccggaactggcgcgccagtggctcaagcgctacccgcggatcggcctggtgaatgcctacgggccggcggaatgctccgacgacgtggcgttcttccgcgtcgacctggcctccaccgagagcacctacctgccgatcggcagtcccaccgacaacaaccgcctgtacctgctcggcgccggcgccgacgacgccttcgaactggtgccgctgggcgcggtgggcgagctgtgcgtggccggcaccggcgtcggtcgtggctacgtcggcgatccgctgcgcaccgcccaggccttcgtcccgcatccgttcggcgcgccgggcgagcgtctgtaccgtaccggcgacctggcgcggcggcgcgccgacggactgctggaatatgtcgggcggatcgaccaccaggtgaagatccgcggcttccgcatcgagctgggcgagatcgaggcgcgcctgcacgaacgcgccgacgtccgcgaggcggcggtggcggtgcaggaaggggcgaacggcaagtacctggtgggctacctggttcccggcgagacacagcgttccagcgccgactcgccggccggactgatggtggagcagggcgcctggttcgagcggatcaagcagcaactgcgcgccgacctgccggactacatggtgccgctgcactggctggtgctggaccggatgccgctcaacgccaacggcaagctcgaccgcaaggcgctgccggcgttggacatcggccagatgcagaaccaggcctaccaggccccgcgcaacgaactggaggaaaccctggcacggatctgggccgaggtgctgaaggtcgagcgggtcggggtgttcgacaacttcttcgaactcggcgggcattcgctgctggccacccagatcgcctcgcgggtgcagaaggccctgcaacgcaacgtgccgctacgggcgatgttcgaatgcaccacggtggaagagctggccagctacatcgagtccctggccccgagtgagatcagcgagcagaaggccgagcgcctgaacgacctgatgtcgaagctggaaatgctctga

SEQ ID NO: 337527 - DNA, 1029 bp, Pseudomonas aeruginosa
atgccggtctaccccagtcgccgttccggttcggcgccgcagtggctgtacgacaacaccttcgccaatgccaccagcgccaggctgctggacggcggcaacgggttcgccgacgcctatggcggggtgccgttcccgattccgaagagcggcgtggaggcgctgtggaaccacgtcgcccgctaccgcggcacctatgtcgtgcgccgcgcttcggaagtcgcggtacagcgcaacggtagctactcgctggtgacctcgcagcaggaagcgctgttcaagtactacctcaagggcggcagcttcgccgacctgaacaacctgatgttctactacctgtcgttcaccaagagcccggcgcgcctggccggcggcgcggtgctggtgcacgagaccctcgaccaggtcaaggagccgcgccaggcctggggctacaacgccggccagcgccgtgtgcggcgtgcgccgaaccttgcctacgacacgccgatcgccgccgccgacggcctgcgcaccgccgacgacaccgacatgttcaacggcgcgccggaccgctatgactggaagctgctgggcaagaaggaaatctacattccctacaacaactacaaggtcagcagccccgaggtgaagtacgaggaactgctcaagccgggccacctcgatccgcaatacacccgctacgagctgcaccgcgtgtgggtggtggaaggtaccctgaagccgggcgcgcggcatatctactccaagcgcaccctgtacctcgacgaggacagctggagcgcggcggtggttgaccagtacgacggtcgcggcgaactgtggcgggtgtcgatggcctacctgaagaacttctacgacctgccgtacacctggagcgcgctggacgtgtttcacgacttgcaggcgcgtcgctaccacgtgcagaacctggacaacgaggagccgggtaccatcgacttcacccaggcgataccggacgactcctacttcaagccctcggccctgcgccgccgcggcacccgctga

SEQ ID NO: 337528 - DNA, 2382 bp, Pseudomonas aeruginosa
atgagtgccatgaaccagcatcagcaaaacaaggcgagcctgctcgaacgcctgatcttcaacaaccggccggtggtgatcttcctctgcctgctggtcagcgtcttcctgttctaccaggccacccaggtgcggccgtccaccagcttcgagaagatgatcccgctggagcacccgttcatccagaaaatgctcgagcaccgcaacgacctggccaacctcggcaacaccgtgcgcatctcggtggaggcggtgaacggcgacatcttcaccaaggagtacatggagacgctccggcagatccatgacgaggtgttctacatccccggcgtcgaccgttccggcctgaagtcgttgtggagccccagcgtgcgctggaccgaagtgaccgaggaaggcttcgccggcggcgaggtgatcccgcagacctacgacggttcgccgcgggcgctggaggaactgcgcaacaacgtgctcaagtccgggcagatcggccgcctggtggcgaacaacttcaagtcgagcatcgtcgacgtaccgctgctggagatgtacccgaacccgaagaaccagagcgaactgatcaagctcgactaccgccagttctcccatgagctggaagagaagatccgcgacaagtaccagttgcagaaccccaacgtgaaggtgcacatcgtcggcttcgcgaagaaggtcggcgacctgatcgacgggctggtgatggtggtcggcttcttcggtatctgcctgctgatcaccctggtcctgctgtactggttcaccaagtgcatccgcagcaccatcgccgtgctgatcaccaccctggtcgcggtgctctggcagctcggcctgctcaacctggtcggtttcggcctcgatccctattcgatgctggtgccgttcctgatcttcgccatcggtatttcccacggcgtgcagaagatcaatggcatcgccttgcagtccagcggcgccgacaatgcgctgatggcggcgcggctgaccttccgccaactgttcctgccggggatgatcgcgatcctcgccgacgccgtcggcttcatcaccctgctggtgatcgacatcggggtgatccgcgagctggccatcggcgcctcgatcggcgtggcggtgatcgtcttcaccaacctgatcctgctgcccgtggcgatctcctacatcggcatcagcaagaaggcggtgcagcgcagcaaggatgacgcggtgcgcgagcacccgttctggcgcctgctgtcgaacttcgccagcccgaaggtggccccggtgtccatcgccatcgccctgctgatgctcggcggcggcctctggtatggcaagcacctgaagatcggcgacctcgaccagggtgcgccggaactgcgtcccgactcgcgctacaacctcgacaacgacttcatcatccgcaactactcgaccagttcggacgtgctggtggtgatggtcaagacctccccggaaggctgctccacccaccaggccctggcggccatggacgagctggcctggaagctggagaacaccgagggcgtgcagtcggcgatctcgatggtcaccgtgtccaagcaggtgatcaaggggatgaacgaaggcaacctgaaatgggagaccctgtcgcgcaaccaggacgtgctgaacaactccatcgcccgtgccgacggtctctacaacaccgactgctcgctggcgccgctgctggtcttcctcaacgaccacaaggccgagaccctcgaccgcgcggtggcggcggtgcaggccttcgccgcggagaacgacaaggacgacctgcagttccagctggccgccggcaacgccgggatcgaggccgccaccaacgaggtgatcaagcagtccgaactgatcatcctggtgctggtgtacatctgcgtggcggccatgtgcatgatcaccttccgttccttcgccgcgaccctctgcatcgtcctgccgctgatcctcacctcggtgctgggcaacgcgctgatggcggcgctgggcatcggcgtgaaggtcgcgaccctgccggtgatcgccctcggcgtcggcatcggggtggactacgggatctacatctacacccgcctggagtctttcctgcgcatgggcctgccgttgcaggaggcctactacgagaccctccgctccaccggcaaggcggtgctgttcaccggcctgtgcctggcgatcggcgtggccacctggatcttctcggcgatcaagttccaggccgacatgggcctgatgctgaccttcatgctgctctggaacatgttcggcgccctctggctgctgccggccctggcgcgtttcctgatcaacccggccaagctgcaggccaggaaggcctcgctgttcgctcactga

SEQ ID NO: 337529 - DNA, 432 bp, Pseudomonas aeruginosa
atgcaatccatccgctgcctggctctcgcggccgtcgccctgttcatggcgggctgctccagcttcaccagcgaaagcgctacgccgctggcgcgcggcgcgcagtggggcctggtgccgctgctcaattattcccaggcgccgcaggccggcgagcgtgccgagcagatcctgctcagcgtgctggccgaggagtgggcacgccagcagaagctggcctacgtggtcaccggcagcgtcgaggagtggcagtacaagaacggcctcgacggcgagccggcggtgggcgtcagcctgcaggtgctggagccggcctccgggcgggtgctctggagcaccagcggggcgcgcgccggctggtcccgggaaagcctggcgggcgccgcgcagaaagtcctgcgcgagctggtcggcgacctgcggctcgagtga

SEQ ID NO: 337530 - DNA, 1371 bp, Pseudomonas aeruginosa; identical to SEQ ID NO: 319323

SEQ ID NO: 337531 - DNA, 1758 bp, Pseudomonas aeruginosa
atgacaacaacaaaaaggcgcggaatcttccctctgcacgcactcgctgcggccacagccctgggttgcgccacccaggcctcggccgtgtcattcaacatcggggagatcgaagggcaattcgactcgtcgctgtcggtgggggccagctggtccatgcgttccgccgacaaggactacatcggcacccgcaacggcggccacgcctcgtcgcagacctccgacgacggccggctgaacttcaagaagggcgaaaccttctcgaagatcttcaagggcatccacgatctcgaactcaagtacggcgacaccggcgcgttcttccgtggcaagtactggtacgacttcgagctgaaggacgaacaccgcctgctctacgacatcgacgaccacaatcgcaaggagggcgccaagtcctccggggcgcagctgctcgatgccttcctctaccacaactacagcatcggcgacctgcccggcagcgtgcgggtcggcaagcaggtggtgagctggggcgagagcacgttcatccagaactcgatcaacagcatcaacccgatggacgtcgccgcgttccgccggcccggcgcggagatcaaggaaggcctgatcccggtgaacatgctctacctgtcccagggcatcagcgacgcgctgaccgtcgaaggcttctaccagttggagtgggaccagacggtgatcgacaactgcggcaccttcttctctaccaccgacgtggtcgccgatggctgcgagcggatggtctacgccggcagcgacttcgacccgaacccggccaacggctaccgctacctgccgcgcgccggcgatcgcgatgcccgcgacagcggccagtggggcctggccctgcgctggtacgcggcggagctgaacgacaccgagttcggcctgtacgcgatgaactaccacagtcgcaacccgtactacagtgtgatcgccggcaacggcctggccacctccgacccggtcaccgggcgctccaccggctattacttcatcgactatcccgaggacatccgcctctacggcctgagcttccagaccaacatcggcagcacctcggtggccggcgagctgagctaccggccgaacatgccgctacaaatcaacagcaccgacatgtcgatcgccgcgatctacccgaccaccctgttcggcaacccgatctacgacagcggcttcgccaccccgcgcgccggcgaggtgatcaacggctacgtgcgcaagccggtgacccaggcacaggtgaccgtcacccagttcttcgaccgggtactggcggccgaccgcctgaccgtggtcggcgaagtcggctacaaccacctcagcggggtcgacggcgacgatctgcgctacggccgcgacgccatctacggcatcggcgaactgccgaacaacgccttgtgcaccggcgcgctcaacgtggccaacccgcaggagtgcaacagccacggcttctacacccgcaactcgtggggctatcgcctgcgcgggatcctcgaatatcccaacgtgttcgccggggtcaacctgaagccgaacctggcctggtcgcacgacgtcgagggctacgggccgaacttcagcgagggcgccaaggccgtcagcgtcggcctcgatgccgactaccagaacacctataccgccagcatcagctacaccgacttcttcggcggcaactacaacccgatcaacgaccgcgacttcctcgcggtgagcttcggggtgaacttctga

SEQ ID NO: 337532 - DNA, 1413 bp, Pseudomonas aeruginosa
atggcacgcatgttttacgacgagatgcacgatgctggcggcgaatgccgctcgcattatcgggaattcgctcgctggctggccgacacccctgaagagcaattgctgcaacgccggcgcgaagccgacctgctgttccatcgcgccggcatcaccttcaccctgtatggcgacgagcagggcaccgagcgcctgatccccttcgacaccatcccgcgcagcattcccgcggcggagtgggcgcacatcgaggccggctgcatccagcgcgtccaggcgctgaacctgttcctcgccgacctctaccacgaacagcgcatcctcaaggccggggtgattcctgccgagcaggtcctggccaacgaccagtaccaactggcgatgcagggactggacctgccgggcaacgtctacgcgcacattgccggggtcgacctggtccgcgacggcagcggcaactactacgtgctggaggacaacctgcgcacgcccagcggtgtttcctacatgctggaaaaccgcaagatgatgatgcgcctgttccccgagctgttcgtccgccagcgcgtggcgccgatcgaccactacccggacctgctgctcgacaccctcaagcgggccagtgacgtcgaatcgccgagcgtggtggtattgacgccgggacgtttcaacagcgcctacttcgaacacgccttcctcgcccgcgagatgggcgtggaactggtcgaaggcgccgatctgttcgtccgcgacgagcgggtctacatgcgcacgacggccggaccgcaaccggtggacgtgatctaccgaaggatcgacgacgctttcctcgacccgctggcgttcaacccggattcgctgctcggcgtgcccggcctgctggccgcctaccgggccggcaacctggtgctggccaacgcgatcggtaccggggtggccgacgacaagtcgatctacccctacgtgccggacatgatccgcttctacctcggcgaagacccgctgctgcacaacgtgccgacctggcaatgtcgcaagccgaaggaactggcgcacgtcctggcgcacctgccggagctggtggtgaaggagacccagggttccggcggctacggcatgctggtcggaccggcggccagccgggaggaaatcgagctgttccgcgagcgcctgaaggctcgcccggaggcctatatcgcgcaaccgacgctgtccctgtcgacctgtccgactttcgtcgagagcggcgtcgcgccacgccatatcgacctgcggccgttcgtcctgtcggcgccggatcgggttcgcctggtgcctggcgggctgacccgggtggcgttgcgcgaaggctcgctggtggtcaattcgtcccagggcggcggcaccaaggacacctgggtggtggaggaataa

SEQ ID NO: 337533 - DNA, 351 bp, Pseudomonas aeruginosa
atgatcgagcttgaacaagaagaccccattccccagggaatctacggcggttggctggtatcccagatggacctggcgggaaccgccatggccagcaagatcgccggcggccgtatcgccaccgtcgccatcgaccgcatggctttcatggtgccggtcgcggtaggtgcccagctttccttctatacccagaccctggaagtcggccgcagctcgatccgcatgctggtcgaggtgtggagcgacgacccgctgtccagcgaatggcgcaaagtcaccgaggcggtgttcgtgttcgtcgccatcgatggcagcgggcgcacccgcccggtcccgccacgccggggctag

SEQ ID NO: 337534 - DNA, 660 bp, Pseudomonas aeruginosa
atgacggacatgccagccaccgccgacgagccggttcgcctgctgctggtggacgaccatccgatgatgcgcaagggcgtcgcccagttgctcgaactggaagacgacctcagcgtggtcggcgaggccggcagcggcgaggaagccctgcgcctggccgccgagctggacccggacatgatcctgctgggcctgaacatgaagggcatgaacggcctggataccctgcgcgcgttgcgcgaggccggagtcgacgcgcgcatcgtggtgttcaccgtgtccgacgacaagggcgacgtggtcaacgtcctgcgcgccggcgccgacggctacctgctcaaggacatggagccggagcgcctgctcgagcacatccgccaggccgccaccggacagatgaccctcagcccgcagttgacccagatcctcgcccaggccctgcggggcgacgaccgctcgaagagcctcgacgagctgaccgagcgcgaacggcagatcctccgccagatcgcccacggctacagcaacaagatgatcgcgcgaaagctggacatcaccgaaggcacggtgaaggtccatgtcaagcgggtgctgcacaagctcggcatgcgttcgcgggtcgaggccgcggtgtgggcggtggagaacgacctggtgtga

SEQ ID NO: 337535 - DNA, 657 bp, Pseudomonas aeruginosa
atggcgctcgtcggccagcacggcatcgtcgacatgggccagcagcacgcgggcgaagatcaggtggcaattggggttctccgccggatacggcttgatctccgccacctcgcactcgaaggccaccgccgccgcggcgatccgcggcggcgccacgcgtacgctggacacggtagggatgccgaccgtctcgatctcgctcacaccatggggcagccaggcggaggtggcgttcatggtttcggcctgggcggcgccgaccaggtggatcaccaactgcccggtggcctggacgttgcgcagggtgtccttgaggctgccgtcgtcgcgcaggctgacgttgaccatcagggtcggcggctcgtcgctgatcacctggaagaagctgaacggggccaggttgctggcgccctcggcggacagggtcgagacccaggcaatcggtcgcggggtgacggtggaagccaaccagcgataggcctcggcgggagcgatggtggtgaagtccagttgcatggcggtctcgcggaaatcgacggaggggacgccgattatgccgcagccccgcagctctcgcgaccgtctgcgccgcagccctgcgccacctggaggcagcggctagacttgccctaccctcacccaggagccctgccatga

SEQ ID NO: 337536 - DNA, 1113 bp, Pseudomonas aeruginosa
atggctgatctcaagatccgcaacctgcagaaaggcttcgacggccaggccatcatcaagggcatcgacctcgacgtccgcgaccgcgagttcgtagtcttcgtcggcccctccggctgcggcaagtcgaccctgctgcgcctgatcgccggcctcgaagaggccagcggcggcagcatcgccctcgacggcacggacatcaccgacaccccgccggcgaaacgcgacctggcgatggtcttccagacctacgcgctgtacccgcacatgacggtgcgcaggaacctctccttcgccctcgacctggccggcgtcgacaagcgcgaggtcgccgccaaggtcgacgccgccgcacgcatcctcgaactgcaagcgctgctggagcgcaagccgcgccagctctccggcggccagcggcagcgggtggcgatcggccgggcgatcgtgcgcaacccgaagatattcctcttcgacgaaccgctgtccaacctcgacgccgccctgcgcgtgcagatgcgcctggaactggcgcggctgcaccaggaactggcggcgaccatgatctacgtgacccacgaccaggtcgaggcgatgaccctggcggacaaggtcgtggtgctcaacggcgggcgcgtcgagcaggtcggctcgccgctggagctttaccaccatccggccaacctgttcgtcgccggcttcctcggcacgccgaagatgggcttcctgcgcggccatctcagccgcaaccagggcgagcgctgcgaggtcgccctcgaatgcggcgcgcgcgtcggcctgccgctatgcgccggcgagctggcaaccggcagcccggtgaccctcggcatccgcccggaacacctgaacatcgcccgcccgggccatgccttccagggcctgctgcgggtcgccgccgacgtcagcgagcgcctgggcagcgacagcttctgccatgtccgcgccgactcgggggaaatgctcaccctgcgcgtgcgcggcgatttcgcaccggactacggcgcccccctggagctgggcttcgatccggagcactgccacctgttcgacagcaacggccaggccctcgacaaacgactgcaacaggcggcctga

SEQ ID NO: 337537 - DNA, 321 bp, Pseudomonas aeruginosa
  misc_feature (305)..(314): n is a, c, g, or t
atgaactatttattcgtgccattcacaagcgaagaaagcaataacgaactactatccatgggtacgctttgggcatcccaagtggcaaaggatcctcgcggcagagaaccaccgaagctattattttacaacactaagcacatgaagccattaaatatcataaacaatgacgatacgctgtacgtgattgctcatggttacgaaggcatctcagactacatattcagcctgagcacccctcctgcgaacgggctcataccggcgttaacggcaggggaactgtcagtaagactgaaagtagcagnnnnnnnnnnaccatag

SEQ ID NO: 337538 - DNA, 420 bp, Pseudomonas aeruginosa
gtgcgcgcgcaggcggtcgccggtgcctaccgggacggtcgatttctccaccacgatgacgggcttgcggcggtgctcggcgatggcatcggccaccgcgaagaccgcgccgagatcggccgcgccgccctcgccaggcggggtgccgaccgcgatgaactgcacccggccgtgttccacggccaggcgcgcatcgctgctgaaacgcaggcggccgctgtccaggccttcgcgcagcaaggcgtcgagcccgggttcgtagatgctggcgaggccctgcgcgaggcgttcgaccttgttccggtcgatgtccatgcacagtacatcgtggcccacttcggcgaggacggcggcctgcaccagtcctacatagccactgccgaatacgctgatcttcatggtgctttcctcgacggatga

SEQ ID NO: 337539 - DNA, 2376 bp, Pseudomonas aeruginosa
ttggtagagtacgtagtttccctcgataagctcggcgtccatgatgtagagcatgtggggggcaagaacgcatccctcggcgagatgatcagcaacctggccggtgccggcgtttccgtacccggcggatttgccaccaccgcccaggcctaccgtgacttcctcgagcagagtggcctcaacgaccgtatccacgcggccctggacgccctggacgtcgacgacgtcaacgccctggccaagaccggcgcgcagatccgccagtgggtgatggaagccgagttcccggcccgtctcgacagcgagatccgccaggccttcgccgccctggccaacggcaacgacaacctcgccgtggcagtgcgttcctccgctaccgccgaagaccttccggacgcctcgttcgccggccagcaggaaaccttcctcaatatccgcggcgtggacaatgtgatccgcgcagcaaaagaggtcttcgcctccctgttcaacgaccgcgccatcgcctaccgcgtgcaccagggcttcgatcacaagctggtcgccttgtccgccggcgtgcagcgcatggtccgctcggaaaccggcaccgccggggtgatgttcaccctggacaccgaatccggcttccgcgacgtggtcttcatcaccggtgcctacggcctgggcgagaccgtggttcagggcgcggtgaaccccgacgagttctacgtccacaagccgaccctggaagccgggcgtccggccatcctgcgccgcaacctgggtagcaaggcgatcaagatgatctacggcgacgaagccaaggccggtcgctcggtcaaggtggtggacgtcgatcgcgccgatcgcgcccgcttcgccctgagcgacgccgaggtcaccgagctggccaagcaggccatgatcatcgagaagcactatggccgcccgatggacatcgaatgggccaaggacggtgacgacggcaagctgtacatcgtccaggcacgcccggaaaccgtgaagagccgcgccagcgccacggtcatggagcgctacctgctgaaagagaaggggaccgtcctggtggaagggcgtgccatcggccagcgcatcggtgccggtccggtcaaggtgatcaacgacgtgtcggaaatggacaaggtccaaccgggtgacgtcctggtctccgacatgaccgacccggactgggagccggtgatgaagcgcgccagcgccatcgtcaccaaccgcggcgggcgtacctgccacgcggcgatcatcgctcgcgaactgggcatcccggcggtggtcggttgcggcaacgccacccagatcctgcaggatggccagggggtgaccgtttcctgtgccgaaggcgataccggcttcatcttcgaaggcgaactcggtttcgatgtgcgcaagaactcggtcgacgccatgcccgaccttccgttcaagatcatgatgaacgtcggcaatcccgatcgcgctttcgatttcgcccagttgccgaacgaaggcgtgggcctggcccgcctcgaattcatcatcaaccgcatgatcggcgtgcaccccaaggcattgctgaacttcgccggcctgccggcggacatcaaggaaagcgtggagaagcgcatcgccggctatcccgatccggtcggcttctacgtcgagaagctggtggaaggcatcagcaccctggccgcggcgttctggccgaagaaggtcatcgtgcgcctgtccgacttcaagtccaatgagtacgccaacctgatcggcggcaagctctacgagccggaagaagagaacccgatgctcggcttccgtggcgcctcgcgctacatcagcgagtcgttccgcgactgcttcgagctggagtgccgtgcgctgaagaaggtccgcaacgaaatgggcctgaccaacgtcgagatcatggtgcccttcgtgcgcaccctgggcgaggcgagccaggtggtcgagctgctggccgggaacggcctgaagcgcggcgagaacggccttaaggtcatcatgatgtgcgaactgccgtcgaacgccctgctggccgacgagttcctcgagttcttcgatggcttctccatcggttccaacgacctgacccagctgaccctgggcctggatcgcgattccggcatcgttgcccacctgttcgacgagcgcaatccggcggtgaagaagctgctggccaacgccatcgctgcctgcaacaaggccggcaagtacatcggcatctgcggccagggtccgtcggaccacccggacctggcccgctggctgatggagcagggcatcgagagcgtctcgctgaaccccgactcggtgctggatacctggttcttccttgccgaggggcaagaccaggcctga

SEQ ID NO: 337540 - DNA, 825 bp, Pseudomonas aeruginosa
atgcaattcgatatctggacccagagcttgctgaccgcgatgaacaccctgtggggcaagctggcaggcttcatccccaacctgctcggcgccctggtggtcgttctgctcggcttcgtcatcgccaagctgctcgatgcgctgctttccaagctgctggccaagctgggcctggaccggctgatgggtggcaccggcctgaccaagctgctggcccgggtcggcatccaggttccggtctcgacgctggtcggcaagatcgtctactggttcgtactgctcgtcttcctcgtatccgccgccgagtcgctcggcctgcagcgggtatccgccacgctggacgtcctcgccctgtacctgcccaaggtgttcggcgcggccctggtgctgatcgtcggcgtgctcctggcgcaactggtgaacagcgtcgtgcgcggcgcggcggacggcgtcggcctcgaatacgcgaacggcctggggcggatcgcccagtggctggtcatcatcatcagtatctcggtggcggtggggcagctcgaggtcaagaccgacctgctcaactacatcatcgccatcgtcctgatcaccgtcggcctggccgctgcgctggccctgggcctgggcagccgcgaggtcgccgggcagatcattgcaggaatctacgtccgcgagctgtatcaggtcggacaacaggtgaaagtgggtgacgttgaaggcactattgaagagataggtacggtcaagaccatcctgctgacggaagagggagagcttgtgtcgctggccaaccgtctactgctcgatcagcgagttaccagccgctga

SEQ ID NO: 337541 - DNA, 639 bp, Pseudomonas aeruginosa
atgaccgacctcaccaagctgaaggagctggcggagcgggctacgccagggccgtggagttgcaaccgccattgggccatcgtcggaggccctattcttgagttcacgaatggggctgctcagcaacagatcgcaatggcttgcgggcaaagctggatgcacgacgaggagctgcgaaacaacgccgaatggatcgccgcagccaaccccgcagcagttctggagctgattgccgaggtggagcggctgcgcacacggctggagattgacgaacgcacgccttatgacggcattgcctgccgtgacgagacgatcaaaggactggacgagaagtgtgaccggctaaaaaggcaggtcgacatgctgatcaaccaacacatgccgcgcgagccgatcccagacatgcctgggtggagtcgcgtggttgatgcggagcgactggtagctgagaacgaggtattgcgctctgcgctccaggccgtccagggcgaggtggacggaaacatccgccctctcacccgcgacctagtgaacatggtcagcggagtgaagaacagcagccacccgaatgacatctacgagcactgcgatgagatcgaccggatcatcgacgcagccctggaaggagacgggagatga

SEQ ID NO: 337542 - DNA, 216 bp, Pseudomonas aeruginosa
atgagcggaaacatggagcgcacccgcaagtggtatggcgtcccggcgaagcgtggaatgcgcgttctatacaccggctgcgggaaaaaggaatacggaaccatccgcagtgcgcgcgattgccgccttaacatccaactggacggaatgaagcacacgatgcctttccatccaacgtgggaacttcagtacgagccagaggagaagcagccatga

SEQ ID NO: 337543 - DNA, 303 bp, Pseudomonas aeruginosa
gtgcctgacatgagagaagagtttgaagcgtgggctaccaagcaccggatgccgattcatcgcgacggtgttgtaaccgactatgcagccagatgcacagatgaatgctggcaagcctggaaagccagccgcgcggctctgagggtggagttgccgccgacgatcaccgccgaagaggttgttgagcatttcaacatcgacgaggaaggcatcgacatggccgctggtattgcgcacatggtcaacggcgccatctggtcctgcgcggcgttcatcaagcaagcgggaatcgaggtgaagtga

SEQ ID NO: 337544 - DNA, 486 bp, Pseudomonas aeruginosa
atggagcaagcagtgaacaggcgagaggtgacattcctctccgcagtggatgccagcaggatcgagacgcctagcaacgtcatcagcatcggcagcaagggtgattggtacgcctttgcctgcgatcacaagcgcgttctgcggctggagtttgatgatgtagacggatacgtgggaagcgatggctttcgagtgttcagccacattgacgccaagaagatccacgacttcgtgaacgagtgtggtgatgaaccgatcatcgttcactgccaagcaggcatgagccgatccgccgcagtcgctaagttcctggccgacaagcgcggctacaccctgaacctgtcgaagccttgcctgggcaccacgcaattctacaaccgccatgtctacggaacgttgaacctcaacgatgccgaaagcatgagcgcctattacgccgagatggagttggccgaccggctgcgtggccacccaaaggagtcctga

SEQ ID NO: 337545 - DNA, 342 bp, Pseudomonas aeruginosa
atgggccgcatcctcctcgccgcgctggacgacgacgcgctgcacgcctacttcggcggagtggagatgcaggccaagaccagccgtaccctgtatacccccgagaccctgctgccgtgcctggtggagattcgtcgccagggctggtgcatcgtcgaccaggagctggaagtcggcctgcgctcgctggcggtgccggtacgcgactccgccggccatgtgctcgccgcgctgaacgtcggcacccatgccgggcgggtctcccgcgccgaactggaaagccgtttcctgccgttgctgctggaggccagccgcgagctgagcgcgcgtctgttcacctga

SEQ ID NO: 337546 - DNA, 1104 bp, Pseudomonas aeruginosa
atggcgctgcccgccatcctgtgcgccggcctgcttgtcggttgcggcgccgagccgcccgccgaggaacacgtccgtgtgctggcgcagacggtgaagatggccgagttcgcctcggccacctcgatcaccggcgacatccaggcacgggtacaggccgaccagtcgttccgtgtcggcggcaagatcgtcgagcgcctggtcgatgtcggcgaccacgtcgcggctggccaggtgctggcgcggctcgacccgcaggaccagcgcagcaacgtggagaacgcccaggcggcggtcgccgcgcagcaggcgcagtcgaagctcgccgacctcaactaccagcggcagaaggcgctgctgcccaagggctacaccagccagagcgagtacgaccaggcgctggcctcggtgcgcagcgcgcagagttcgctgaaggccgcccaggcgcagttggccaacgcccgcgacctgctttcctataccgagctgcgtgcctccgacgccggggtcatcaccgcccgccaggccgaggtcggccaggtggtgcaggccaccgtgccgatcttcaccctggcccgcgacggcgagcgcgacgcggtgttcaacgtctacgagtcgttgttcagccacgatgtcgacggccagcggatcaccgtcagcctgctcggcaagccggaagtcaccgccagcggcaaggtccgcgagatcaccccgacggtggacgagcgcagcggtacgctgaaggtcaaggtcggcctcgactcggtgccggcggaaatgagcctcggcagcgtggtcaacgccagcgtcgccgcgccggccgagcacagcgtggtgctgccctggtcggcgctgtccaaggtcggcgagcagccggcggtctggttgctcgaccagcaaggcaaggcgcgtctgcaaccggtgcgggtggcacgctacgccagcgagaaggtggtcatcgacggtggcctggaggcgggccagacggtggtcacggtgggcggccaactgctccatccgggccaggtggtcgaggtggcccagccgccgcagccgacccagagcaccgccagccgcgacgccgtgggcggaggccagccatga

SEQ ID NO: 337547 - DNA, 1071 bp, Pseudomonas aeruginosa
atgaagccgttttccctcgccggcctgttcggcttcgtcctgctcctctccggctgcggcgacgagccgccgccggcaccgccgcggccggtgctgacggtgaccgtgaagaccctgaagaacgacgacctcggtcgcttcgccgggagcatccaggcgcgctacgagagcgtgctcggcttccgcaccaacggacggatcgcctcgcgcctgttcgacgtcggtgacttcgtcggcaagggcgcgctgctggcgaccctcgaccccaccgaccagcagaaccagttgcgcgccagccagggcgacctggccagcgccgaggcacagttgatcgacgcccaggccaatgcccggcgccaggaagaactgttcgcccgcagcgtcaccgcccaggcgcgcctggacgatgcgcggacccgcctgaagaccagccaggccagcttcgaccaggccaaagcggcggtgcagcaggccagggaccagctttcctacacgcgcctggtgaccgatttcgacggcgtcatcaccacctggcacgccgaggccgggcaagtggtcagcgccggccaggcggtggtcaccctggcccggcccgaagtgcgcgaggcagtcttcgacctgcccaccgaggtcgccgagagcctgccggccgacgcgcgcttcctggtcagcgcccagctcgacccgcaggccaggaccaccggcagcatccgcgagctgggtccgcaggccgacgcctcgacccgcacccgtcgcgtgcgcctgagcctggcgcagacgccggaggcgtttcgcctcggttcgaccatccaggtccagctgagcagcgccggtagcgtgcgcagcgtgctgccggccagcgtgctgctggagcgcgacggcaagacccaggtctgggtcgtcgatgggaaacagtccagcgtggccctgcgcgaggtacaggtgctcagccgcgacgaacgccaggtggtgatcggacagggcctggccgacggcgaccgggtggtccgcgccggagtcaacagcctcaagcccggccagaagatcaaactcgacgaggatgcgcgatga

SEQ ID NO: 337548 - DNA, 3048 bp, Pseudomonas aeruginosa
atgaagggcggtttcaacctgtcggactgggccctgcgccaccagtccctggtctggtacctgatggcggtatcgctggtgatgggcgtgttctcctacctcaacctggggcgcgaggaggatccctcgttcgccatcaagaccatggtcatccagacccgctggccgggcgccacggtggacgacaccctggagcaggtcaccgaccgcatcgagaagaagctcgaggagctggactcgctggattacgtgaagagctacacgcgacccggcgaatcgacggtcttcgtctacctcaaggacaccaccaaggccggcgacatcccggatatctggtaccaggtgcgcaagaagatatccgacatccagggcgaattcccccagggcatccagggaccgggtttcaacgacgagttcggcgacgtgttcggcagcgtctacgccttcaccgccgacggcctggacttccgccagctgcgcgactacgtggagaaggtgcgcctggacatccgctcggtgaaagacctgggcaaggtgcagatgatcggtgcgcagaacgaggtcatctacctcaacttctctacccgcaagctggccgccctcggtctcgaccagcgccaggtcgtgcagagcctgcaggcgcagaacgcggtgaccccgtccggcgtggtcgaggccggccccgagcgcatctcggtgcgcacctccggcaacttccgttcggaaaaggacctgcaggcggtcaacctgcgggtcaacgatcgtttctaccggctgtccgacctggccagcatcagccgcgatttcgtcgacccgccgacctcgctgttccgctacaagggcgagccggccatcggcctggcggtggcgatgaaggagggcggcaatatcctcgagttcggcgaggcgctcaatgcgcgcatgcaggagatcaccggcgaactgccggttggcgtcggcgtgcaccaggtgtcgaaccaggcccaggtggtgaagaaggcggtcggcggtttcacccgggcgctgttcgaggcggtggtgatcgtcctcatcgtcagcttcgtcagcctcggcctgcgcgccgggctggtggtggcctgctcgatcccgctggtgctggcgatggtcttcgtgttcatggaatacaccgacatcaccatgcagcgggtttccctcggcgcgctgatcatcgccctcggcctgctggtggacgatgccatgatcaccgtggagatgatgatcacgcgcctcgaactgggcgactcgctgcacgactcggcgacctacgcctacacctcgacggccttcccgatgctcaccgggaccctggtgacggtggccggcttcgtgcccatcgggctcaacgccagctccgccggcgagtacaccttcaccctgttcgcagtgatcgccgtggcgctgctgctgtcgtggatcgtcgcggtgctgttcgccccggtgatcgccgtgcacatcctgccgaagactctcaagcacaagtcggagcagaagaagggccgcatcgccgagcgtttcgacagcctgctgcacctggcgatgcgccggcgctggacgaccatcttcctcaccgcgctgctgttcggcgtgtcgctgttcctgatgaagttcgtccagcaccagttcttcccgtcttccgaccgtccggaactgctggtcgacctcaacctgccgcaaaacagcagcatccacgagaccagggcggtgatggaccgcctggaagcgacgctgaaggacgacgaggacatcgaccactggagcgcctacgtcggcgaaggcgcgatccgcttctacctgccgctggaccagcagttgcagaacaacttctatggccagctggtgatcgtcaccaaggacctggaggcccgcgagcgcgtcgccgcacgcctgcgcgatcgcttgcgcaaggactacgtcggcatcagcacctacgtgcagccgctggagatggggccgccggtgggacggccgatccagtaccgggtcagcggaccgcagatcgacaaggtccgcgagtacgccatgggcctggccggcgtgctcgacggcaacccgaacatcggcgatatcgtctacgactggaacgagcccgggaagatgctcaagatcgacatcgcccaggacaaggcgcgccagctcgggctttcctccgaggacgtggcgcagatcatgaacagcgtggtgaccggcagcgcggtgacccaggtgcgcgacgacatctacctggtgaacgtcatcggccgcgccgaggatagcgagcgcggctcgctggagaccctggagagcctgcagatcgtcacgcccagcggcacctcgatcccgctcaaggcgttcgccaaggtcagctacgagctggagcagccgctggtgtggcgccgcgaccgcaagccgacgatcacggtgaaggcgtcgctgcgcggcgagatccagcccaccgacctggtcgcccggctggcgccggaggtcaagcgcttcgccgacggcctgccggcgaactaccggatcgaagtgggcggcacggtggaggagagcggcaaggccgagggcccgatcgccaaggtggtgccgctgatgctgttcctcatggcgaccttcctgatgatccagttgcagagcgtgcagaagctgttcctggtggccagcgtcgcgccgctggggctgatcggggtggtcgcggcgttgctgccgaccggcacgccgatgggcttcgtggcgatcctcgggattctcgcgctgatcggcatcatcatccgcaactcggtgatcctggtgacccagatcgatgccttcgagaaagacggcaagacgccctgggaagccgtgctggaagccacccaccaccgcacccggccgatcctgctgacggcggcggcggccagcctggggatgatccccatcgcccgcgaagtgttctgggggccgatggcctatgcgatgatcggcggcatcgtcgccgccacgctgctcacgctgatcttcctgccggcgctctacgtcgcctggtaccggattccggaaccgggacgctga

SEQ ID NO: 337549 - DNA, 939 bp, Pseudomonas aeruginosa
gtggacacattgcaaggcatgcgcgtgttcgccagggtggtggacagcggcagcttcacttccgccgcccaggccctggacctgtccaccgcgcaggtatcgcggctgatctccgacctggaggcgcacctgcagacgcgcctgctgcaccgcaccacccggcgcctggccctgaccgaggccggcgagcgctacctggagcggtgccgcgggatcctcgaggacatcgaggtcgccgaggccgaagccgccggcgcgcacatccgcccctgcggccgcttgcgcgtgcagtcgctgatgggcatgggccagcatcacctggtgccgatgatcgcccgctacggcgcactgttccccgacgtggtgatcgagctgaccctgtcccagcgcaacccggacatgctcgaggaaggccaggacgtgctgatcaccggcgagcgccagttgcccgactcggagttcgtcgcccagcgcctgggcagcatccacagcgtgctctgcgccagtcccggctacctgcagcagcgcggcgtgccacgctcggtggacgacctggagcgccacgtctgcctgcgcctgcaggacccggcctacccggagggctggatcttcgccgacgagcagggcgagcgcaccgtcagcccgcagaacaccttcatggtcaatgtcgccgaggtcatggcccaggcggccaaggccgacctcggcatcgccctgctgcccagctacgtggcggccgcggcgctgcgcaacggcgagctgctacgagtgttgcccggccatgccatgcaccagcggaccatctatgcgctgtatccctcgcggcgttacctggacgcgaagatccgcacctgggtcgatctgttgcaacaggaacttccccaggcattcgcccgcgacgaaactaccatgcaaagttcaagttactgggcacagtga

SEQ ID NO: 337550 - DNA, 186 bp, Pseudomonas aeruginosa
atgaatcgccagatccttgctgccgccatactcagtttgttttccctcgcattttcccaggccggtttcgccgaagagtcctcgctgatgaccaaccgcatggtcgacgccaaccagcaggccatcgagcaccagcaggaactttccgcctccgccgcgcaggccggggcccgcagcgactcctga

SEQ ID NO: 337551 - DNA, 792 bp, Pseudomonas aeruginosa
atgaacggacagcctgcggaactgcaccgcccgattcccaccctcgcccgcctgccacggccggtctacgcgcgcgccgaaagcctgcgcgccggctcctggacctcgcgccaccggcacgcctgggtacagctttcctacgccatcagcggcgtgctcggcgtacataccgccgagggcagcttcttcgccccgccgcagcgggcgatctggattccggcgcagctggaacacgaggtggtcacctccacccgcgccgagatgcgcagcctgtacatccgtggcgacgcctgcgcctgggcgccgacgcgttgccgggtgctggaggtgacgccgctggcgcgcgagctgatcaagagtttctgcgagttgccggtggactacccggagggcgacagcgccgaatcgcggctggtgcaggtgctgctggaccagttgcggctgctgccggaggtcgccttctccctgccgatgccgcgcgagccgcgcctgctgcggctgtgccaggcactgatcgacgaaccgacccagagcctgaccatgggcgactgggcgcagcgcctgggcacctcggaaaagaccctgtcgcgcctgttccagcgcgagaccgggatgaactaccggctctggcgccaacgccagcgcctgctcgcctcgctcaacgcgctggaggccggcgacagcgtcaccggcgccgccctggacagcggctacgactcgacctcggcctacatcgccgccttcaagggactcttcggcttcactcccggcgaactgttccgccagcgctga

SEQ ID NO: 337552 - DNA, 1617 bp, Pseudomonas aeruginosa
atgctcgacttctccgcccacgcgcttccctacgcctcgcaacgttcgccggtccatgcccgccgcggcatggtcgccacctcgcagccgcaggcggcgcaggtcgggctggagatattgcgccgtggcggcaatgccatcgacgcggcgatcgccaccgccgccgcgctgacggtggtcgagccgaccggctgcgggattggcggcgatgccttcgccctggtctggacccgcggacgcctgcacggcctggacgccagcgggcgcgcgccgggcctgctcgatcgcgagcgggtgcgcgccgccggccacgagcggatgccgctgtacggctggacgccggtcaccgtgccgggctgtccggcggcctggggcgaactgtcgcggcgcttcggcaaattgccgttcgaacaactgctgcggccggcgatcgagctggctcgcgatggctttccggtctcgccggtgatcgcccgcctgtggcagagcggcctggacaagttccgcgcggcgttgccgcagcggcccgagctgcgggcctggttcgacgagttcctcatcgacggccgggcgccgcgcgccggcgaggtgttccgccagccgggccaggccgacaccctggacgagctggcgcgcagccagtgcgaaagcttctatcgcggcgagctggccagggccatcgtcggccacgccgagcgcagcggcggctacctgcgcgcggaggacctggccggctaccaggcgaagtgggtcgaaccgatctcgctgaactaccgtggctatgacgtctgggagattccgccgagcggccagggcctgatcgccctgatgaccctgaacatcctcaagggcttcgaattcggcgagcgcgactgcgcgcggacctggcatcgccaactggaggcgatgaagctggcgtacgtcgacgggctgcactacatcagccagccgcagtcgatgcgggtctcggtcgaggaactgctgcacgaggactacgccgccagccgccgtgcgctgatcggcgagcgcgcgctcgatcccagccccggccagccgaggccgggcggcacggtgtacctggcctgtggcgacgaggagggcaacctggtctcgttcatccagagcaactaccacggcttcggctccggcgtggtggtgcccggcaccggcatcgccttgcagaaccgcggcgccgagttcagcctcgatccggaccacgtgaattgcctggagccgggcaagcagaccttccacaccatcattcccggtttcctcagcaaggacggcgtgccgctcggcccgttcggcgtgatgggcgcctatatgcagccgcagggccacgtgcagatggtgatgaacctggtggacttcggcctcaacccccaggctgccctcgacgcgccgcgctggcagtggctgggcgggctgcgcgtcggcatcgaacatgccgcgccgcgcgcgctggcggcggagctggcgcagcgtgggcaccaggtggagatcgcctacgactcgaccagctacgggcgcggccagatcgtcctgcgcgacccggccagcggcgtgctctgtggcggcaccgagccgcgcaccgattcgcagatcgcggtgtggtga

SEQ ID NO: 337553 - DNA, 837 bp, Pseudomonas aeruginosa
atgagccgcacactcgccaccgtgatgctagccggggggctactggccgcaggccaggctgtcgccgaagaccatgacatgacgccgacccacgagaccgactcggggccgctgctctggcacaacgagagcctgacctacctctacggcaagaacttcaagatcaacccgccgatccagcagaccttcaccctggaacatgccagcggctggacctggggcgacctgttcatcttcttcgaccagatcaactacaacggcaaggaagacgccagcaacggcaagaacacctactacggcgagatcactccgcgcctgagcttcggcaagctcaccggagcggacctctccttcggcccggtgaaggacgtgctgctggccggcacctacgagttcggcgaaggcgacaccgaggcctacctgctcggcccgggcttcgacctggcgatccccggcttcgactacttccagctcaacttctactaccgcaagcccgacggcaaccgcgtgcgcgccggcgcctggcagatcaccccggtgtggtcctacaccattccggtgggcaactccgacatcctcatcgacggctacatggactgggtgatcaacaacaagagcgccagcaccagccgccgcaaccagagcgactatcacgccaacctgcacttcaacccacaggtcaagtacgacctgggcaaggccctcggctacgagcctaagcacctgtacgtgggcctggagtacgactactggtccgacaagtacggtgtgaaggactcgcagtacttcaccaccgaccagaacaccgccagcttcctggtcaagtaccacttctga

SEQ ID NO: 337554 - DNA, 1407 bp, Pseudomonas aeruginosa
atgcatagcgaagaccaacgccccaacgacctcatctacggcctcgacgaccggccgcgcccgcttcccgccttccttgccgcgctacagcacgtgctggccagcttcgtcggcatcgtcactccgccgctggtgatcggctcgctgctcggcctcggcgagcacctgccgtacttgatcagcatggcgctgatggtttccggcgccggcaccctgatccaggcgcgccggccgttcggcatcggcgccgggatgatctgcctgcaaggcaccagcttcgccttcctcggcgccgtgctggccgccgggatgctggtgaagcagcgcggcggcggtcccgaggagatcctcgcgatgatcttcggcgtgtgcttcttcggcgccttcgtgcagatcgtcctcagtcgtttcctcggccatcttcgccgggtgatcacgccgctggtcaccggcatcgtcatcaccctgatcggcgtcagcctgatcaaggtcggcatcaccgacctcggcggcggagccggggccacggacttcggcgcaccggccaatctcgcgctgggcgcgctggtgctgctgagcatcgtcctgctgaaccgctcgcgcctgccctggctgcgcctggccgccatcgtcatcggcctggcgctgggtaccctggcggcctgggcgaccggcctgttcgttccgcgggcgttgcccgagctgccgctggtcagcctgccgcagccgttccgcttcggcttcgccttcgactggatggccttcctgccggtggcgctgatctacctgatcagcagcatcgagacggtcggcgatctgaccgccaactgcatgctctcgcggcagcccctggagggaccggcgtacctgcagcggttgcgcggcggggtgctcggcgacggcgtcagttgcctgctggcagccaccttcagcgccttcccgaacaccaccttcgcgcagaacaacggggtgatccagctcaccggggtggccagccggcacgtcgggatctatatcggcggcgtgttgctggcgctcggcctgttcccctgggtcggcgcgatcctccagcagatccccaagccggtgctcggtggcgccaccctggtgatgttcggcagcgtcgccgccgccggcatccgcattctcggccagaccgcaatggaccgccgcagcgtgctgatcatcgccgcctcgttcggcgtcggcctcggcgtggccgcgcagccgaccctgctcgaccagatgccggcggtggtgaagaccctgttcgactcggcgatcaccagcggcggcatcaccgccatcctgctcaacctgctgctgcccgaggagcgcgttgccgaagcggcgcaagccagcgcgaagggcggcgccctggcgcgctggcgcaagccgctgggttga

SEQ ID NO: 337555 - DNA, 591 bp, Pseudomonas aeruginosa
atgccgagcaccctgcaaggcctcgccgaataccgcgaggaaatccgcaagagccgcttccacaccatcgccgcgccggtggccgacgaggacgaggcgcaggcgttcatcgccgcccaccgcgacgcttccgccggacacaactgctgggcctggaagtgcggcgcgcagtaccgcttcagcgacgacggcgaacccggcggcagcgccgggcggccgatcctggcggccatcgagggacaggacatggactgcgtggcggtgctggtcagccgctggttcggtggcatcaagctcggcaccggcggcctcgcccgcgcctatggcggcggcgcggccaagtgcctgcagcaggcgccgcgcagcgagctggtcgagcgctgtcgggtgcgcttcgcctgtgccttcgccgaccacgcgctgctcaaggcgcgcagcctggcgctgggcgccagcgtggcggccgaagactacggcgccgacggcgtcgtcctgaccctggagttgccggtggcgcgcttcgaggcgcttcaggcgctgctggtggacctcagccgaggccaggtgcggctgcagcggctggacgcctga

SEQ ID NO: 337556 - DNA, 828 bp, Pseudomonas aeruginosa
atgagccgcgaacgcgaactggacgcctggatcgacggcctgctggccgatccgcagttccacgggcatccgctgcaccaggcgctggcccgcctgcgccagcaatcgctggagcaactggtgcggctggagcgcatcgcccggatctccgacggtttccagtcgatggcgcgggagcagaacctgtcgctgtccgagcgctaccacaagcagctgcggcgcctggaaaaggtggcgcggatctccgaccgctaccagcagatgatgcgcgacctcaacctggcgctgaaggaagcctcgatccgcgacccgctgaccggcctgcccaaccgacgcatgctgctggagcgcctcagggaggagaacgaacgctcccagcgccacggccagagctacgtgctggcaatgctcgatgtggacttcttcaagcaggtcaacgatacctggggccacgacagcggtgaccgggtgctggtggaaatcgcccgggccatggagtccgagctacgcgaatacgacctctgcggccgctggggcggcgaggaattcctcctgctgctgccacagacccgcctgcaggacgccggcccggtactcgagcgggtgcgcgacagcgtacggaccctggcggtacgcgtcggcaccgaggcgctgagcgtcaccgccagcgtcggcgttaccgaacaccgcatcggcgaaacctattcgcagaccgtcaatcgcgccgacgccgcactgctcgacgccaagcgcagcggccgcgacaaatgcgtgttcgccgcgctcccgccgcttcctgccccttcccgcccggctccagcgcgctga

SEQ ID NO: 337557 - DNA, 381 bp, Pseudomonas aeruginosa
atgagtgacctgcacatacccggcacccagtccacgcccgccatccagggcgactggcaggccggacgcctgtccatgcaaggcgattcctacccggaaaactcctatgaactgttcggccaggtgatcgactgggtcgagcgcttcctcgccgccgggcagcggccgctggaactggacctgcgcctgctgtacctgaacaccagttcgatcaaggccatgatggacatcctcgacctgctcgaagaggcccaccagggcggtcgcccggtcagcctgcgctggcactacgaccggcgcaacgaacgggtcgccgagctggccgaggagttccgcgaggactgcagcttccccttcgccatccaggcccacgacgagtag

SEQ ID NO: 337558 - DNA, 543 bp, Pseudomonas aeruginosa; identical to SEQ ID NO: 322992

SEQ ID NO: 337559 - DNA, 1992 bp, Pseudomonas aeruginosa
atggcggcgaactgggggttgcgcggcaaatcggtggtggcgctgttgctggcctgtgccctggcactggtcccggcggtgctgctgggctggcgcgcgatggacgacatccgtacgcacttcggcctggcctacgcgaagaacttcaccctgctgcaccggcagaagatcctcgccccggtctcccgcgaactggcgttgtcgcgccgtttcgccgaatcggtggtgacccgcgactggctgctgaaggaagacgacccggcgcgccgcgcgctgttcttccgcgaggccgagggctaccgcggcgacttccgcgaccacgcctacttcatcatcgccagcggctcccagcactactacttcaacgacggccgccaaccctacagcgaacggccgcgctacaccctggaggccggcgacccggaagacgcctggtacttcaataccctgcgcaacagcgccgcctacaacatcaacgtcaatgtcgacagcaagctgaacctgaccaaggtctggttcaacctggtgatccgcgaccagggccggcccatcggcctggccggcagcggcctggacctgagcggcttcctcgacgacttcatcatcgcccgcgagccgggcgtgacgccgatgatcgtcggcgacgacggcgccatccaggcccacccggaccgccgcctgatcgcctacagctccgccgccggcggcgccagcgaacgccaccgggtgttcgacctgctcgaccagccggaacagcgcgacgccctgcgcgaggccatgcgcctggcccgcgccaaggccggctcggtgcactgcctgtgggccggcctcgacggccgccagcaactcttcgccgtggcctacattccccaactgcgctggtacgtgctcaccgccgtcgacctgcacgccgcccaggtcctcgacaaccgctggctttggccgctggcgggcacgttcctgctgttgctggtggccctgctgctgggcttcgcctatgccgtcgagcgcctgctgttgcgccccctgcgcagcctcaagcgctcggccaaggcgatcgccgccgggcgctacgacacgccgctgccgctggcgcgccaggacgagatcggctcgctgtcgaaggccttcgccagcatggccgaccaggtccgccggcacaccgccgagctggaagacaaggtccaggagcgcacccaggcgctggaggaagccaaccgcgagatggccgccgcgcagaagaagatcggcgacagcctcgactatgccagcctgatccagcgcgcgatcctccccgaccgccagctcagcgccaccctcggcgagcatcacttcatcctgtggaaaccgcgcgacgtggtcggcggcgacttctacgtgtaccgcgagcaggccgacggctacctgatcggcgtggtcgactgcgccggtcacggcgtgcccggcgcgctgatgaccatgctcgcccgcgccgccatcgaccacgccatcgaggcggtgggcagccgcgacccggcggcgatcctcggcgagaccgaccaggcgatgcgcagcatgctcagccaggagcagatcccccaggcgctggccaccaacatggatgccgggctggtctgggtcgaccgccggcgccgccagctggccttcgccggggcgaagatctcgctgtacgccagcgacggcgaggaggtccaggaactcaagggcgcgcgccgggcgatcggcgacaagcgccgtggcgactaccgcaacatcgaggtaccgctggcgccgggctggaccttctacctgagcaccgacggtttcctcgaccaggccggcggcgaacacggcttcggcttcggcagccggcgcttcgccgacatgctccgcgaccacgcgcggcagccgctccccgagcaggccgaggccttcgtggcgacgctcgccgagtaccagggcgagcacccgcaacgcgacgacatcaccatcctgtccttccgattcgactag

SEQ ID NO: 337560 - DNA, 1296 bp, Pseudomonas aeruginosa
atgctcttcggcagaaaaagcagggcggtggaaagcgccgccaaggatgaagacctggcgtggcgactcgatgccatcgggcagaacgtcgccaccatccgtttcactcccgatggccagatactgtccgccaacccgctgttcctcgcggtggtcggctactcggcggacgagctggtcggcaagcaccatcggatcttctgcgaagaggacttccaggcctccgccgcctacgtgcgcttctggaaggagctggccagcggcacgccccagcgcggcgtgttcaagcgcctgcggcgcgatggtacgccggtctggctggaggccacctatttcccggtgaagaatgccgaaggggcggtcgtcgaggtgctgaagatcgccgccgacgtgacccgcaaccattccgaactgctcctgctcaacgcgatcaacgacgccatacgccagtccatggcggtcatcgagttcaccccggacggcgagatactcgatgccaacgagaacttcctgcgtctcttcggctacagcctcaagtcgctcaagggccagcaccaccgcatgctctgcttcgacgagttctatcgggagaacccggatttctgggctcggctgcggcacggcgaattctcccgcgggcatttcgagcgccgcagcgccgccggcgagcgggtacatatcgaagccacctacaacccggtcaaggacagttcggggcggataatcaaggtcatcaagttcgccatcgacgttaccgagcaggtcaatcgcaacgaggaggtacggcgcgccgccgagctgtcgttctccaccgcggaagagaccgcgcagatttccacccgcggcatcgactccctcgaccagtccgtcgccctgtcggccaagaccctgtcgatggtcaacaccgccgtcggcctgatttcccagctcacccaccagaccaaggacatcgagaacatcgtcaccaccatccagagcgtcgccgaacagaccaacctgctggccctcaacgccgccatcgaggcggctcgcgccggcgacatggggcgcggcttcgcggtggtcgccgacgaggtgcggcaactggcggcgcgcaccagcggcgccacggtggagatcaagaacgtggtcaccgagaacgtcaagctgacccagcagatcaaccacaacatgcagaccatcgagtccagcgcccaggagaacaacaaccagatcaccaccgtggccggcatcatgcaggagatcagcaagggcgccgagcacgtggcgcgggtggtgtcgagcctgttcaagtga

SEQ ID NO: 337561 - DNA, 2103 bp, Pseudomonas aeruginosa
atgagcagaatcttcttgtccatcgtgggtatcgccgtcctggcaagcgcggctgcgacagctgtctcggggtgtgccggtgtgttcgaccgcatcgccgatacgctgcttgccaacgaagtacgcttcgacgaccgggaaacaccacgaaccgcctacgccattccggcgtccgccgatgcactgcagaccttgggcgggcagggtggcggactgagctgcagcctaccgccgggtacccaggcgttggcgttcaggcgcggcgccagacaggcacccatcgcattgcagatgcgccaggcatgcgccttccatgattactgttaccggcacggcaacgcgacctacggctacagccaagccgactgtgatttcatgctacagcaacaggctttccgtttgtgcaagtacatcaatcccgagcattctatcgacagctgcgagactaacgcgcgcaaggttaccctcggtgtgcgtctgggagggttcggtagtttcaagcgcgctcgtgcgctggaggacgaaaaggcttcgaccttccttgagttcgatccctacccggtacgggccaacagctatcgtgtggtacgcatcgccgacgcgccccagcagtggcgacgcgacggcttgttgccgaaggccgtctatcacttcgacatccgcccctccggtagccaggtatatgtcctgggctggaaacctggaggtggtatggtttgcgccagcttcgaactgccgggggcttatgacgtcctcaacggcccgccgatggtggtacgtgccggggccggtggcgaagactggttcgtatggtggaagcgcgaggcgctatcctccaccaggggacgtttcgcgctgctgccaccgggccgggcgacgcgccaggactggaacttggcggcgggtgggtgggtccgtgatgaagaggctctgggctgcgagagcagagcactctggagcctcgaagacaacgtcgctcgacctgcgcaactggctttcgtcagcgagaagaagaacctgggattttctgagttgcacccagtagttggcggtactgggtcgggagtcctgcagttgatgggactgtccacacattcctgcgatggcgctaagacggacctctcgccctgtctagtggaagtaacgttcgataccgtgcaacgggcgtttcgccaacagccgaagagtcctaccctctaccgtgcctcggagcgcaattgcggaggcggccagtcgggagaccgccgcaacgacgattgcagtcgctaccgcaactacgtgagcgcgcctttcgtggtagcctggacgagcccgccatccttgctctggatacgtcgcggcagtggcaacggcgatggctacgagcacaccgccacgctacgccgctacaccgtcggcaagacccgcgccgaccctgccatcgacctcggggatcggttgctgacggcattccccgagaccatggagccggccttcatcaccaacgcggctgccgatgcgcccagcttcgtcagcctggtggccgccggggagggcatccagttgtatagccaggcggcagtggcgcgcggcaaggcgtcgacggcagtcagattggagtgtttgcgcaacgcgccggtttcctggctgcaacgtcccactttcctggcgcaggatccgctcgatgccagtcgtagctacctggtgttctcgcgggtacggctgctcgacggacagggcgtggcacccgcgcaaggcgcgctgctggagattgccgtggctacgctggcgaacgatgcctgcctcggtgttcgggagttcgcctatccgtcattcttcgacggcttcgccgagagggatgagcaagaggccagtgtagccatggcgaccgccacggcacagggcaaccagcccgacaactcgcagcaagaagcattcgagcgttacgcggagcgggtacgcggtgggcagatgttgctggcggacgtcaccggcgacggcgtgctggatctgttacaggtggcccaactgccgcagcagcgacgctttcgggttgggctgctggctggcgatatcgacgcgtcagggctgcattttcagcggattttccgcactgggccttga

SEQ ID NO: 337562 - DNA, 147 bp, Pseudomonas aeruginosa
atgttacggggagcggaaaaccaggagcgttatcgaaatgatttcgaggccattcgatcccccgaaaccagagcggcttactggctcatggtcggatgggcggcgaccctgaaagactatgatgtctatcctggcatcaatgtgtag

SEQ ID NO: 337563 - DNA, 1713 bp, Pseudomonas aeruginosa
atgtccggtcacgaaagcgacggtcaccttgtcgccgatgcgataactttccctgggttgttgcaacacgtcgccgaaggacttgccgatatagggatcgtcggccactactccggtctggaagttcatctggcagcaggacaggtccggcgctatcgccgaggtttccaccggcaggcgttcgcgcagcgccaccgccatgtcgacgaacaactgctggtaggcggcctgggtccaggggccgtagagggtcgagccgccttcgtattcctgggcggcgtattcctcgcgggtggtgacgtagctggcataggcattcgcgtagccattgaagaccacatggcggataccggccgcttcgctggccgcctgcaccgcgcggcggatccgcaccccggccatcacggtgaactcggcgggggcgccgagcagttccaactggccgatgcggaacatctggatcggcagcaccgtcggcgtccaggggtagggtttcttgttgccggtgtcggcgaggatggtcttttccgcctggcattgcaccagttcctgcggcggcacgccggtgagcaacccgcccagggccgagaggaacggattgttgccttcctccagccccagcgggcctggaccgtcttcggtgctaccggcggccaggctggtgccgatggccgcggtgcacaactggcgcggctggccgtcggtgaactccgggcggatcggcaggcgggtgaagtcgacgaaacggaagcgcgaatccagttcgccgagcacttcctcctgggcctggccggcgatctcgtaggccttggcgaattggcgcagaccgatctcgcgggtgttgtcgaactcgttgtcgaagggaccggagccgggcttcaggttcaggttgggcgacaggttgccggcattggtctgggcgaaggcggcgacgaaaccgctcttgcggctgacgtcgtgctcccagtgataggaggcgtagcccttgttgtccggggagatcaggtgattggcgttggtcatcgaggtgctgtgcaccgggaaccaactgatcgcgccggccagctcgccgttggcgtcgacgaagctgagcacgctcatctgcgggtcgatgccatcctcgtagccggcgatgtccggattcttcaggtgcgacagcagcgagcggttgcggctggcgttgcgcaactcgccgctgccgtagaacaggcggccgggctgcaacctggcctgggcccgctcgatggagcggacgatgccgtcgacgatggcgttgaaggtcttttcctggaagccgagcaccgacaggttgtacatcgcgtagtgggagaagccgcccggaccggagtgggtgtgggtggcggcgagcatcacgttgttctcgtcgtagacaccggggtacttcgccttgagccgggccaggacattcaggtgcacggcctggaagatcatccccaggtcggtgttgacgtagaccaggcgacgtccgctggccgcttcctcgatcacgaaggcacgcgcccactggcgcatgtggatgccggcggtcttctgttcgagggaggagtaacccatcatgccgacttcggcggcttcgccggtgatgtccgccttgcccaggccgaagcggtagggcaggtcgtcggccctggcaggcatggagagcgccagcaggacgcaggacagcaagagcgcggtgaatgcggaacgtga

SEQ ID NO: 337564 - DNA, 927 bp, Pseudomonas aeruginosa
gtggtccccgacggccagctctgcggcgccggcaaggcactgttcaagggcctgaacctggctcgcagcgactggcccagcactgccatcgcgccggacgccagcggcaacttccagttcgtctacaaggccagcgcgccgcacgcgacccgctacttcgacttctacatcaccaaggacggctacaaccccgagaagccgctggcctggagcgacctggaacccgcgccgttctgctcgatcaccagcgtcaagctggagaacggcacctaccggatgaactgcccgctgccccagggcaagaccggcaagcatgtgatctataacgtctggcagcgctcggacagcccggaagccttctacgcctgcatcgacgtgagcttcagcggcgccgtcgccaacccctggcaagcgctgggcaacctgcgcgcgcagcaggacctgccagccggtgctaccgtcaccctgcgtctgttcgatgcccagggccgcgacgcccagcgtcacagcctgaccctggcccagggcgccaacggtgccaagcaatggccgctggcgctggcgcagaaggtcaaccaggactccaccctggtcaacatcggcgtgctggatgcctacggggcggtcagcccggtggccagctcgcaggacaaccaggtctacgtgcgccaggccggctaccgcttccaggtcgacatcgaactgccggtcgagggcggcggcgagcaaccgggcggcgacggcaaggtcgacttcgactatccgcaaggcctgcagcaatacgacgccgggaccgtagtgcgcggtgccgatggcaagcgctaccagtgcaagccctacccgaactccggctggtgcaagggctgggacctctactacgccccgggcaagggcatggcctggcaggacgcctggaccctgctgtaa

SEQ ID NO: 337565 - DNA, 963 bp, Pseudomonas aeruginosa
atgcctttttctctcgccgccctccaacaggccgccgccatcgtccaccagagcctgccgccgacgccgcagatacgctggccgctgctatgcgaggcactgggttgcgaagtgtggatgaagcacgagaaccacctgccggtgggggccttcaaactgcgcggcggcctggtgtatttccaccacctggcgcaccagggcgagcggccggccgccgtgatcagcgcgactcgcggcaaccacggccagtcggtggccttctcggcgagccgctacggcatccagccgatcatcgtcgtgccgcacggcaacagccgcgagaagaacgcggcgatgcgcagccttggcgcggagctgatcgagcacggcgaggacttccaggcctcccgcgaatacgccgccgagcgcgcccggcgcgaaggcctgcacctgattccggcgttccatccctggctggtggccggggtcgccagctacagcctggagttgttcgccgcgctggccgaccttgacgaagtctacgtgccgatcggtatgggttcgggcatctgcggcctgatcgccgcgcgcgacgcgctgggcctgaagacccgcatcgtcggcgtggtgtccgcccatgcgccggcctacgccctgtcgttcgaggccggcacggcgatcagccacccggtcgacacccgcctggccgacggcatggcgtgcagtacgccggacccgagcgcgctggaaatgatcctggccggcgccgatcgtctggtgcgggtcagcgacagggagatcggcgcggccatgcgcctgtgcttcaccagcacccacaacgtcgccgagggcgccggggtggcggcgctggccgccgcctggcaggagcgcgagcgcctgaaggggctgaaggtaggcctgatcctcagcggagcgaacgtcgaccgcgaggtattcgccgagcaactggccgccggcgactga

SEQ ID NO: 337566 - DNA, 951 bp, Pseudomonas aeruginosa; identical to SEQ ID NO: 322506

SEQ ID NO: 337567 - DNA, 600 bp, Pseudomonas aeruginosa
atgagcgtactggtcaacaagcaagcccccgatttcactgccgccgcggtcctcggcgacggttccatcgtcgatgccttccagctttccagcctgcgcggcaagtacgtcgtactgttcttctggccgctcgacttcactttcgtctgcccctcggaaatcatcgcccacaataaccgcatggataagttccgcgagctgggcgtcgaggtggtcggtgtctccatcgactcgcagttcacccatcacgcctggcgcagcacgccggtggagaagggcggcattggcgcggtcgagttcaccatggtcgccgacgtcaagcacgagatcacccgcgcctacggcattgagcacgaggacggcgtggccttgcgtgcttcgttcctgatcgaccgcgccggggtggtccagcaccaagtggtgaacaacctgccgctggggcgtgaggtggacgagatggtgcgcctggtcgaggccctgcagttcaccgaggaacacggcgaggtctgcccggccggctggcgcaagggccagaaaggcatgaaggcgagcgccgagggcgtggcctcgtacctggccgagaacgccgaggcactgtga

SEQ ID NO: 337568 - DNA, 1986 bp, Pseudomonas aeruginosa
atgctgtcgcccattacccgtcctcaccgcatgcccctacgcacacgcctgctctggctgttcctgccgttgctggccgccagtctcggcggtatctggctcttgtcggaaagcatcctgctgagccgtttcgaccgagaggaccagcaacgcctgcaagagggcgccaccgtcctgcacaaccggctggacttcgagttgaagcgccacctggacatcgttcgcacctacgcctggtgggatgccagctacgacttcatccagcgccccaacgagaccttcgaacaggaaaacctcgaccacgagatgctcgacgacctgggattcgacttcgtcctgttcctcgacgaccggggtcacctgcaactgaagcagtggtccccgcccgcgcccgaccagcgcgtgctcttcggcgccccctcggcgagcgaccaggccctgctcgaggcactgcagcaacgcgccatccgcctcggcgcgctggactttcgcggacgcaccgaccacagcctgagcgagctgctgctggtcgacaacctgccgaccctgctggtcagcgtgcctatcagcaacaaccagggtagcgcgccggcgaagggcgcgatcctcgccggctacttcctcgaccgggaacgcctggccaacctccgcgaacagatgcaggccgacctgcaaccgatgcccaacatcgccaccgactccacctggaagccgctgcgcagccgcagcggcagtacccacaaccaggccctgctcagcccacggcggttcatcggcgaacatgtccagcaggtctcggtgcagtacctgagttccagcggcgagccgcagctgcgcttcgacatcaccaagaaacgcctgctctacatccagggcgagaaggccatcaacttcttcctcggcgcctccctgctggtcgcgctgggcgctttcctggtcggctacctggccctggagctgtgggtcctgcgccgggtccaacggctcaaccgggaggtcgccgaagtcggacgcaacgcccactcgatacgcctgagcgacttcggcaacgacgagctgggacaactggcgggcgagatgaaccagatgctcgagcgcctggaacacagcgaggcgcgcgaccgggcgatcctccagtcgatgcgcgacggctacttcgaaatggacgtcgacggcgtgatcctcaccgtcaaccccgcgctctgccaactgctcggccagacgcgcgaaacgctgatcggccatccctactacgaactgctcggcgaagacgacctggcgcgtgcccgccaacccttccagcgcgccatgcagagcggcgcaggcaagaccttcgccatccccctgcagcgcgccgacggcagcctcggctacttcgaggccacggtttcgctgatccacgacctgcagggcgaactacggggctaccgcggcatcgtccgcgacgtcagcgaccagatcgcctaccagcagcaattgctggaaatggcctaccgcgacccgctgaccggcctgggcaaccgcaaggccttcgacgaacagctcggccaggcgttgcttcgcgccggctccggcggaagcgaactggcgctgctgtacctggacctggaccgcttcaaggaggtcaacgaccgcttcggccacgacatcggcgatgccctcctcaggaccgtcgccgaacgggtacgcagcaccctgcggcagccggacaaggcctaccgcctgggcggcgacgaattcgccgtgctcctcgaggacagccaggaaaacaatccgcagcgcctcgcagaacgcctgctggcggcgctggtccaaccgatcgcgctgaatggcgaacgcatcgacttcgtcaccccgagcatcggcatcgctctctacccgcggcatgccggcgatgccgaaggactggtccgtgccgccgacagcgccatgtacgaggccaagcgccagcgcaaccactattgcctgtaccaggcgccagcctga

SEQ ID NO: 337569 - DNA, 159 bp, Pseudomonas aeruginosa
atgtacatcaagaaagacgtcatcgaggtcatcaagtacgcggcgatgatggcggcctgctctcgccagtcctggggaatctaccccatgaaccagggctacaaggccatgcccttccgtggcgactatcaccgagttgtcgaagtctgccatccctga

SEQ ID NO: 337570 - DNA, 336 bp, Pseudomonas aeruginosa
atgagaaccgtactcaaagccacatgcggcaaacattccaaggaaatcccggttgagcagatcacccacttcgtcgccgaggataagtacgtcatcgcgtactacgcggatgggttcctgctgctgcgcgacacgatcagggaactggaatcagagttctccgccgatttcatccgcacccaccgtaaggccctggttcgccggtctctgatcagcaggttcaagcgccggccagacgacacccaggccggcgaagtgctgctgctcggaaccgagaactggattccagtcagccgcagccactcggcacagatcaagtcggcgatgagtgcatga

SEQ ID NO: 337571 - DNA, 258 bp, Pseudomonas aeruginosa
atgagcagcgaagacccgcgctatccgtacacctattcgtccgatttcatccgcaacgtggctggctacggagaaagcggcaccaagctttcccgcagcgatgccagccagattatcagcagtgtcgcagggatcattggtatgtcggtagatgaaatggccaggaagcttgccgattactacctggagaatcgggaggcaatatccgaacaggcagcacaggaactggcggcagccattttcccgaacttccgataa

SEQ ID NO: 337572 - DNA, 264 bp, Pseudomonas aeruginosa
atgatcagtgatgagcagttggcggagttggcagatggctgcatagattcgattccgtgccccatctctgcgctgtatgaactagctgagcgacttatcgctgctgaggctgatgctaagcggtatcggtggctgcgggacaagaactcaattcccggagttgtttgcacaaacagcaaggtagagaagtacttcaacgagtacatgatgtgcggacaggtgatggacaaagccatcgacgccgccatggagcgcacgccatga

SEQ ID NO: 337573 - DNA, 375 bp, Pseudomonas aeruginosa
atggaactctggctcgcctcagacgagtacgcaaactggaagctcgacgctgtggagtcgctgctcggcgactgcgatgttgatctgcacagcaaagggttctggtgcagcaagttgaaggccgatctgctgcgcgaggagcttcacaagaaactgatcgatttgttggagaacgaccgggagcgcctgatggctacggtgatcatggccgtggccgaccgccgcccatgcgacgccctggcgaacctgcacaacttcttcccggaaggcgatgcagtcgaagcgatcaaggcacttgccgaaccaatcgcagcaggctacgcagcagaagcccttgcacggtatcaggaacagaacatggaggatgcagcatga

SEQ ID NO: 337574 - DNA, 231 bp, Pseudomonas aeruginosa
atgcttctagtcatcctgatcggcgcatacctgacctatgagcggccggcatccgctcccatgaccgaggtcgccgatccagaaccttccgggcgacggcccaagctggacttccgatcatgcatcggggcgccgagcaatccggtgcagagcgtcccgccacaaagaacacaaaccagcgagaaagcccgtgacaccgcacgggctttcacctttctcccgcctgtatga

SEQ ID NO: 337575 - DNA, 186 bp, Pseudomonas aeruginosa
atgacgcgcaacgagtacgacgagatggaaagcactgcaaacgtggcattggctggccttctggctggtgaaggccagtgggtaagcaatcccaacgaactggtcaggcatgcattcgacatagccgaagccttcaacgtcgagaagaagcgccgactcggcgaacgtccggaatgggacaactga

SEQ ID NO: 337576 - DNA, 210 bp, Pseudomonas aeruginosa
atgtacttcgacgaatcacacaagcgaagcgaggtctgcaagctgcgttacaagccagaggatatgcgcaatttgcgcatggaagcgcgcttggcaggaatgcaactcgctacctacatccatgacctttcgatgcttgcgcgtcggctcggcgccgctgaactgatccgcgagatgaatggccttggtgaacaggataaatcggcctag

SEQ ID NO: 337577 - DNA, 213 bp, Pseudomonas aeruginosa
atgcgcgaatccattttcgatgcgttggaaccgggggcaaaagatgaggttgtacggctaagtgccgaactcggctgggacctcgaaagaacagcgcatgagtacctaaaagctgggcaaagactctccacctggttgcagatggaaaggatgaagaaccctgctcctgtgctctccctggtggagcacaaaaagggcctcgataggggctaa

SEQ ID NO: 337578 - DNA, 801 bp, Pseudomonas aeruginosa
atggccagagcaagaaacatcaagcctggaattatggccaacgagaacctagctgaggtgtctccgattgagcgcctcttgttcatctatctctggatgctcgctgatagggaagggcgcctagaggatcgtccaaagaggatcaaggctgaggctcttccatatgatgacgttgacgctaatgaggccctcaatagtctcgccaaggctgggttcatcattcgttaccgcgccgaaggtcaaagcattatccaggtggtgaacttcaccaagcaccaggctccgcacatgcgtgaacagggtagctcattgccggagtatgtggctgaaactgccgagatagagccttgccaggttgaggatgttgcagagcactgcctaggtagtgctaaggcgatgcctagcccatctgattctctgattcctgattctctgattcctgattccaatacccccctacccccaaagggggagtgtgacggcctgttcgaccagttctgggccgtgtatccgaacaagacctgcaaagcgaaggcgcgtgccaagtgggagaagctgaaggtaactcctgatctgttcaacaagatcatggcagggcttcgcaagcaatgcgcaagccaagcatggctcaaggatggcggccaatttgtcccgcacccaaccacatggcttaacggcgagcgttggaacgatgaggttcgcagcaacgttcaccagttgcctagccgccaccacgggtttgctgatcgcgactacaccgcaggcttgatcgagcgggaggacggcacctatggcttctaa

SEQ ID NO: 337579 - DNA, 816 bp, Pseudomonas aeruginosa
atggcttctaacgccctgaatcttgaagtctgcgacttggaacgccgtttcgggatcgtctccaagactcccgcaaaatgcgacaagcacggcgagtacgcggctgttttccgtaggaactcggacaagcccaccggttgccctgagtgctccagggaggctgaggctgaaaaacttcgcgatgagcaggccgaaatgtggcgccggaacgagcgcgagcgcatggagcgtcggctcgctggagtaatgatccctccgcgctttcagggtcgcacgttcgactcatacatcgcgcagaacgatggccagcgcaaagcgctgaaggtttgccgaaagtacgcagacgacttcgccgagaacaagcgcctgggtcggtgtctgctgctgcttggcatgccaggtactgggaagacgcaccttgccaccgcaatcgccggacacgtcgtgcgcaacagcaattccgttactgccgcctaccgaacggtgagcgcaattctccagtttgtgaaagggagctttgatcgcgaagccgggtacaccgaagcccaagcttttgaggccctttgcgcgccttcgctgctgatcatcgacgaggtgggggcaacgaagccgaccgactttgagcttgcaaccctcttcagcgtgatcgatgggcgctaccagaacctaatgccgaccatcgtgatttcgaacctcaaggccgaggaactgcctggagcgcttggagagcgttgcgtcgacaggttgcgcgaaaacggtggggtagcggtccggttcgactggccatcgaagcgttcagaggtgcgtcatgactaa

SEQ ID NO: 337580 - DNA, 153 bp, Pseudomonas aeruginosa
atgactaaggctcacaacgggaagatcagcaccgagggattggagcttccaagcgcctgcgacatctgcggaaagtcccgcgcccacggaagccacgtgaagtgcagcaagatccggcaggcgcagtaccaggcgaagagggctgcgaaatga

SEQ ID NO: 337581 - DNA, 300 bp, Pseudomonas aeruginosa
atggcaaacttcattgtcacgtttcaaatcaaggctgatgatacctaccagtctcggtatagttccttcaagaagaagatcaatgagctaaccagctacaaacactgggatgaaacgacttctttctactgcttcgaactggactacacggcgcaaaggctttgctctgagctgtacaccggcagcgagttcaacgcaaccaaagacataatggtggtcatcgatgtgtccaatcgagagaaggccacgaaaggtccgatccagtatcctgcgctgctcgacgcctacctcggtttctag

SEQ ID NO: 337582 - DNA, 771 bp, Pseudomonas aeruginosa
atgaccctgaaaggcaagaccgccctggtcaccggttccaccagcggcatcggcctgggcatcgccctgagcctggccgaggccggcgccgacctgctcctcaacggcttcggcgaggtcgacgcggcactggcgcaggtccgcgcccgcggcgtgcgcgcagagcaccacccggccgacctctccagcccggagcagatcgccgaactgatggccttcgccgagcggaccttcggcggcgtcgacatcctcgtcaacaacgccggcatccagtacgtggcgccggtgcaggaattccccacggaacgctgggacgcgatcatcgcgatcaacctgtcctcagtgttccataccacccgcctggccctgccgggcatgctcgcgcgcggctgggggcggatcgtcaacatcgcctcgacccacggcctggtcgcctcggccgggaagagcgcctacgtcgccgccaagcatggcgtgctcggcctgaccaagagtgtggcgctggaaacggcgcgcacgccggtgacctgcaacgccatctgccccggctgggtgctgaccccgctggtgcagaagcagatcgacgcgcgcatcgccgagggcgtctcgcccgaacaggcggaacacgacctgctggcggaaaagcaaccctcgctggccttcgtcacccccgagcaactcggcggactgacgctgttcctttgcagcgaagccgccgaccaggtgcgcggcgcggcctggaacatggatggcggctgggtggcgcagtag

SEQ ID NO: 337583 - DNA, 1968 bp, Pseudomonas aeruginosa
atgaacccggactaccgcagcatccagcgcatcctggtcgccaaccgcggcgagatcgcctgccgggtgatgcgcagcgcgcgcgccctcggcatcggcagcgtcgccgtgcacagcgacatcgaccgccacgcccgccacgtcgccgaagccgacatcgccgtcgacctgggcggcgccaagcccgccgacagctacctgcgcggcgacgggatcatcgccgccgccctcgccagcggcgcccaggcgatccaccccggctacggcttcctctcggagaacgccgacttcgcccgcgcctgcgaggaagccagcctgctcttcctcgggccgccggcggcggccatcgacgccatgggcagcaagtcggccgccaaggcgctgatggaagaagccggcgtgccgctggtgcccggctaccacggcgaagcccaggacgccgagaccttccgccgggaagccggaaggatcggctacccggtcctgctcaaggccgccgctggcggcggcggcaagggcatgaaggtggtggagcacgaagccgagctggccgaggccctttcctccgcccagcgcgaggccaaggccgccttcggcgacgcgcggatgctggtggagaaatacctgctgaagccgcgccacgtggagatccaggtattcgccgatcgccatggccactgcctgtacctcaacgaacgcgactgttcgatccagcgccgccaccagaaggtcgtcgaggaagcccccgcccccggtctcggcgcggaactgcgccgggccatgggcgaggccgcggtacgcgcggcgcaggcgatcggctacgtcggcgccggtaccgtcgaattcctcctcgacgaacgcggccagttcttcttcatggaaatgaacacccgcctgcaggtggaacacccggtcaccgaggccatcaccggcctcgacctggtcgcctggcagatccgcgtcgctcgcggcgaggcgctgccgctgacacaggaacaggtgccgctgaacggccacgccatcgaagtgcggctctacgcggaagaccccgagggcggcttcctccccgccagcggccgcctggcgctgtaccgcgaagcgcccgccggccccggccggcgggtcgacagcggggtacgcgaaggcgacgaggtctcgccgttctacgacccgatgctggccaagctgatcgcctggggcgaaacccgcgaggaagcccgccagcgcctgctggcgatgctggcggaaacctcggtcggcggcctgcgcaccaacctggcgttcctccgccgcatcctcggccatccggcgttcgccgccgccgaactggacaccggtttcatcgcgcgccaccaagacgacctgctgccggcgccgcaagcgctgccggagcatttctggcaagccgccgccgaagcctggctgcagagcgaaccgggccaccgtcgcgacgacgacccgcattcgccgtggagccgcaacgacggctggcgcagcgccctggcgcgggagtccgacctgatgctgcgctgccgcgacgaacgccgctgcgtccgcctgcgccacgccagccccagccagtatcgcctggacggcgacgacctggtcagccgggtggacggtgtcacccgtcgctcggcggcgttgcgccgcggacgccagttgttcctcgaatgggagggcgaactgctggccatcgaagccgtcgacccgatcgccgaggccgaggccgcccatgcccaccagggtggtttgagcgcgccgatgaacggcagtatcgtgcgggtcctggtcgagcccggccagacggtcgaagccggcaccgccctggtggtgctggaggcgatgaagatggaacacagcatccgcgcgccccacgccggggtagtgaaggcgctgtattgcagcgagggcgaactggtagaggaaggcacgccgctggtggagctggacgagaaccaggcctga

SEQ ID NO: 337584 - DNA, 822 bp, Pseudomonas aeruginosa
atgcctgtcactctcccgcgcctggcgttgctaggtgccctgctcttccctgtggctgccgcctgggccgccgagctccgcctggaactgccggggggcacgcagacctggagcagcgaagaactgctcaggcatccgcaggcccgcgacctggacatcccggccgacgtcgcctaccgccggaacatgcgctaccgcgccgtgccactggcggcgttgttgaaaggcgtgcatcccgaagaccatttgcaggccgtggccagcgacggcttcgccgccgagttgccggccgccccgctgctcgccgaacagggctcgcaagcctggctggcgatagaggatccgcagcgcccctggccgccgctgggcgcgggcaagccgtccgccgggccgttctatctggtctggagcaaacccgaggaaaaacgcatcggtccggagcaatggcccttccaggtcgtccgcatccgctaccagtcccctctggccgaacgcttcccggccctgctgccggccgctgacgccagcgcggaggtgcgcgccggcttcgccgtgttccagaagaactgcctggcctgccaccgtctcaacggtgccggcgacgcccagttcggcccggacctgaacctgccgtacaaccccaccgagtacttccagccgcaattcctcgcccgctacatccgcgacccgcaggcgctgcggcaatggccgcaggcgaagatgccggcgttcccggaacgggtgatcgacgaccaggagttgcgccagttgatcggctacctgcgccacatggccggccgcaaggcgggcgcggccggctga

SEQ ID NO: 337585 - DNA, 888 bp, Pseudomonas aeruginosa
gtgctcgccgagttgttcgccgtgatggcgcccgtgctgttcggcgccggtgtcggttacgtctgggtccgtctcggacacgcctatccgaccgagttcgtttcgcgcatcgtgttcaacatcggttcgccatgcctgatcctcgccaccctggcgcatacccgggtggacctgcacagtttcggccggatggccctggccagcgcgctgatctgcgtctgcatggctgcgctgggctgggcggcggcgcgcctcgggcgccaggagtggcaggtgctggtgccggcctacagcttcccgaatgtcggcaacatgggcctgccggtgtgcctgtatgcgttcggcgaggcggggatgaccctggcggtggcgttctacctgatcatgtcgatcggcaacttcagcctcggcgtgttctggatgagcggcgagcgctcctggcgctcgctgctgggcaatccgatcctgctcagcgtgctgctggccttgttgttgatggggctcgacctgcaactgccacgctggatggcgaataccgtcgacctgatggccgggctgaccattccgctgatgctgatcaccctcggcgtgtccctggccagcatccgcccgcggcaactgggcaatggcttcttctatggcggcctgcgtcttctgctgggggcgctggtgggctggtcggtggcgctggcgttgcaattgccgccgctggcgcagggggtgctggtggtgcagtcgtcgatgccggtggcggtgttcaactatctctacgccttgcgcggcaatcgttcgccggatcaggtcgccagcctggtgctgtgttcgaccctgctgtcgttcgccttcattccgctgctgctgacctggtggctgcctgcgctgcgctga

SEQ ID NO: 337586 - DNA, 1206 bp, Pseudomonas aeruginosa
atgaccgacgcattcatttacgacgccgtgcgtactccccgcggcaagggcaagaaggatggcgcgctgcacagcgtcaagccggtgaacctgatggccgggctgttgcgcgcggtccagcggcgcaacgacctggataccgcccaggtcgacgatatcgtgctcggctgcgtgacgccggtgggcgaccagggcgccgatatcgccaagaccgcggcgctggtggccgactgggacgaacaggttgccggcgtgcagatcaaccgtttctgcgcctccggcctggaggcggtgaacctgggggcgatgaaggtacgctccggcttcgaggacctggtcctggtcggtggcgtcgagtccatgtcacgcgtgccgatgggctccgacggcggcgcctgggcactggatccggaaaccaacctgcacaccagcttcgtcccgcaagggatcggcgccgacctgatcgccaccctggaaggcttcagtcgcgccgatgtcgatgccttcgccctgcgctcccagcagaaggccgccaaggcccgcgccgaagggctgttcggcaagtcgctggtgccggtcgccgaccagaatggcatcgtcctgctcgaccacgatgagttcattcgcgccgactccaccctggaagggctcgccgcgctcaaaccgagtttcgagatgatggggcagatgggcttcgacgccaccgcgctgcgcaagtacagccaggtcgagcgcatcgagcacgtgcatacgccgggcaacagttcggggatcgtcgacggcgccagcgccatgctcattggctccgaggccaagggccgcgaactgggcctgaaggcgcgggcgcggatcgtcgctaccgcggtgacctccaccgaccccaccatcatgcttaccggccccgcgccggcgacccgcaaggccctggccaaggccggcctgaaggtggaagacatcgacctgttcgaagtcaacgaggcgttcgcttcggtggtgatgaagttcatgaaggacatgggcgtggcggaaagcaaggtcaacgtcaacggcggcgccatcgccatgggccacccgctcggcgccaccggctgcatcatcctcggcacgctgctcgacgaactggagcggcgcaacctgcgctacggcctggccaccctctgcgtaggcggcggcatgggcatcgccaccatcatcgagcgcgtgtga

SEQ ID NO: 337587 - DNA, 2064 bp, Pseudomonas aeruginosa
atgactgacgctatccgttacgaaaaaggccaggacaacgtcgtcgtcctgaccatggacatgcccgggcagagcgccaacaccatgaacggtgtctaccgcgaggcgatggcgaagaccatcgcacggctggaggcggagaaagaggggatcgccggcgtggtgctgacctcggcgaagaagaccttcttcgccggcggcgatctcaacgagctgatcaaggtcaccaaggccgacgccccggccttctaccagggcatcctcgaactcaagggccaactgcggcgcctggagaccctcggcaagccggtggtcgccgcgatcaacggcgctgcgctgggcggcggctgggagatctgcctggcctgccaccaccgcatcgccctggacaatcccggcgtgcagctcggcctgccggaggtgactctcggcctgttgccgggcggcggcgggatcgtgcgcatggtgcgcctgcttggcctggagaaagccctgccgtacctcgccgaaggcaagaaggtgcgtccggcggaagcgctcaaggccgggctgatccacgaactggccgacagccccgaggaaatgctggagaaggcccgcgcctggatcctcgccaacccggcggcgaagcagccctgggacagcgccggctacaagattcccggcggtacgcctgccagtcccaacgtggcgcagatgctggccatcgcaccgtcggtgctgcgcgacaagaccaagggttgcttcccggcgcccgagaagatcatgtgcgcggcggtggagggcgcccaggtcgatttcgacaccgcgcaactgatcgaggcgcgctatttcaccgagctgaccaccggccaggtggcgaagaacatgatcggcaccttctggttccagctcaacgagatcaacgccggcaagtcgcggccgcaggggtatccggtgcgggcgacgaaaaaggtcggcgtgctcggcgccgggatgatgggcgcgggcatcgcctacgtatcggcggcggccggcatcgaggtggtgctcaaggacgtctcgctggaagcggcggagaagggcaaggcttattcggccaggctgctggacaagaaagttgcgcgcgggcacctgtctgccgagaagcgcgacgccttcctcgcgcggatcgtgccgagcgtcagcgaagccgacttcgaaggctgcgacctgatcatcgaggcggtcttcgaggaccgcgcgctgaaaggcaaggtcaccgccgaggccgagaagcatgccctggccgatgcggtagtggcgtccaatacctcgaccctgccgatcaccggtctggcccaggcggtggcgcggccggagaagttcatcggcctgcacttcttcagcccggtggacaagatgccgctggtggagatcatccgcggcgaaaagaccagcgacgaaaccctggcgcgcggtttcgactacgtactgcagatcaagaaaacgccgatcgtggtcaacgacagccgcggcttcttcacctcgcgggtattcggcaccttcaccaacgaaggcatcgccatgctcggcgaaggcgtgagcgccgcgatgatcgacaaccaggcgcgccaggccggtatgccggtggggccgctggcgatttccgacgaggtctccctgagcctgatgacccacatccgcaaccagaccgcccgcgacctcgaggccgagggcaaggctctgccgacgcaccctgcgttcgccgtgatacatctctgggcggaactcaagagccgcttcgagaagcccgatgcgcaaatatccgccgaggacgtacgcgaccgcctgctgttcatccaggccatcgagaccgtgcgttgcgtggaggagggggtattgcactccaccgccgacgcgaacatcggctcgatcttcggtatcggtttcgccgcctggagcgggggcgccttgcagttcatcaaccagtacggcctgaaggacttcatcgcccgcgcccaatacctggtcgaacagtacggcgagcgcttcgagccgccggcgctgttgctggagaaggcggcgaagggcgagctgttctga

SEQ ID NO: 337588 - DNA, 1191 bp, Pseudomonas aeruginosa
atgatgcgcgcatccatcgtactttgcgtcttctccctggcgctgccggcatcttcgccgggctgggcctccggcgggcgctacctgacctgggtggacgacaatggcggggtgcacaacaccttcgtcgacggccagttcgaccgccagcagcgccaggcgcggcagcgcatcggccagagcgaccaggcgcgggtgctgaacaaggcggacaacgccacgcagtggccggggaacagcagcggaggggagagcaagcgtcgctactacacctggatcgatgccaacggcaacgtgcagaacagcttctatgccggcgcccaggtcgccggccagcgcgccgactacgtcctgcccaacggcgagcactccgccgaatacatcgacgccgaggccttcgagggcaagggtttcgttcgcagcgagaacggcagtccctactacacctgggtggacgagaagggccgcatgcacaactcgcagatcccgcccgaggagcgcgcggcgcgcttcaagcgggaggccgcgccttcgtcgcagatcgccttcaccgagggccggcagatcgagttcaagcagcgtccggcggcgttgcccgggctggatggcgccggccagcagagcgatgcgctgaaggctttgctcaagggcaccgagatgaccatcgacgatctctaccaggacctgcaacggcgctgctgcgagcagatcgccgagagcgacttcaccgaactggatgccgacgaaccgcgctacgaggagttgaaccgcttctcgccgagcttcgactttcccatgggcaggagcttctacgcggcgatccggctgccgcgctcccagggggtctacggcctgcgcatccgcagtttcgccaatcgccaggtggtctacccgtcgctgctgttcctcgacgagcacaagcggccgacccggctggtcagcgacgcggtgtacaagctgaacccggaaacctggtatcgctacgctttcatcgagggtacggtgccggtgcgggccaatcgcggcgagcgctacgtgctgctgctgaccaccgatgaggaccgctcgctgcaaaccctcgacaacaagccgttcaagcgtccgctacagggcctggcggtgaacgaggcgggtatgcaggtgcatgagcacgcccggcagggcggcttcgagctggccgtggtgcgttga

SEQ ID NO: 337589 - DNA, 147 bp, Pseudomonas aeruginosa
atggccacgccgatggcgatgccggtaccggggatccaggagcgcgatcacgcgctcgactgggtgaagtggcttgcgttggtggccatggtcctcgatcacctgtggttggggtcgcctcagaaaacggaaaataaagcacgctaa

SEQ ID NO: 337590 - DNA, 210 bp, Pseudomonas aeruginosa
atggcaacagcaatcgattacgccggcgcttggcagcgcctgaatgaagcccttgcccgcaatgtccagcaggccgagggcgatgctgagatgtttgcgttcttgctcacgtcgaccctggccgcgttcaacgcacagggcctcctcgatgacaaagccgctacgcgggcaatcgagctgctgcacgagctccaccaggtcgaggtctga

SEQ ID NO: 337591 - DNA, 1089 bp, Pseudomonas aeruginosa
atgagaccagcggaattcacaccagagcagatcatccaggccggccaggcgctcattgaagccggccgcaatgtcaccggcttcgcgcttcgccagcgggtcggcggcggcaacccgaaccgtctcaaggccatttgggacgagcacctggccggccagtctgtagtccaatctgagcccgtggcggaattgcccgttgaagtagccgagcagctgaaagtcgtcactgaagcgctgactgacaggcttgcagcgctggctgtggatctgaacgacaaggcagtcaaggccagcgaacgtcgcgtggctgaagttgtgcgcgctgcaggcgaacagcgtgagcaagctgatcgggaattggcagacgccagccagactgtcgacgacttggagcagaagctcgacgagaaggttgagctgatcgaatccctggagcagaaacttgctagcgaaaaatcagcgcgccaggctcaggctgtcgagctggcccaggtgcgtgaacgattggcggcggttgaagaagctgcagcgaaggcttccgagcatgcggcgcagcgtgaaaaggaactgcaggccgacatcctggatgcacgccgtgccgagcaagcctcccgcgaacgtgaggcccaagctgttggcgcattggctgcagctgaaaaacagcatgtcgaggatgctgagatcagccagcgcctacgcctggatctacgcaagacgggcgacgagctggcgaaaagccgctctgacgcagagaacgctactgctcagttgcagtcggcccttgaggagctgcagacggctcgcgctgaagcgcgggcaggcctggagtacaaagcacagctggaagctgctacgcagcgcatcacctcgacagaggaacgcgagcgcgatgctcgccaagccgccgagaaggcctctggcgaagcgcaccaggcgcaagtcgctctgcaggcgacgcaggcccgtctggagtccacaagccgcgagctcgaaacagctcaggccacagtgactgaattgaaggccgagttgaaagagatccgcgctgagctcaagaagcccgcagcgaagaaaggggaggggaactga

SEQ ID NO: 337592 - DNA, 210 bp, Pseudomonas aeruginosa
atgaccagcgagcaattcgacgccctggccgagctgctgcgcatgcaaaacggcgtgcgccgcgaggtcgctaggcttgtcctggtcgagggattgaagccagctgacgcagcgcgccgagctggcaccactccccaaacggtcaacagcgccctggtcagttgccgtcgcggcatcgagctcgcgcagcgagtaaccggccaacagtaa

SEQ ID NO: 337593 - DNA, 408 bp, Pseudomonas aeruginosa
atggcaatcacccaataccaccccgaagtccaagacaggcttttttcattcttggaagaacagtacgaacagagctcgaaacgatgggctatctgggtcaacccttacatgctccagggcttcaaagctgaacctttgccgccaggacaaagcattggagtcgactcgatctccgtcgtatacgacggcagggtctggcttgagcgcatcagcgccgccaagcagcgaatccatcacgatttgagtaaatgggcggtgcaccctcatttccgctcccgcaaatcggcagtagacatggcaatgcactggctcaatcacaatcgcccggatctagtgcgcgcatgcatccgcgaaactcaggaggcgatttcctaccgcaaaaaaattactgcgcagggggcgagctga

SEQ ID NO: 337594 - DNA, 150 bp, Pseudomonas aeruginosa
atgaaagccctgattatgaacagccgtaacgaaattattttcactgctgacctggacgaaaaagtccgtgaaattgaagtcgccggcgcaatagctatcaacggtgcgcccgttaaccgccgcacttacaaagtcagtctccaggagtaa

SEQ ID NO: 337595 - DNA, 129 bp, Pseudomonas aeruginosa
atggtcgcactcaaaatcctcggccacggtggcgagatcctgggcagcttgatgctgcctgccagcatccgccttgttgacctggaagcgctcaagcagctcggcgtttgtcgcctcgtgaagggctaa

SEQ ID NO: 337596 - DNA, 633 bp, Pseudomonas aeruginosa
atggcaatttacgctgtgctgcagcagaaaggcggtcctggtaagtcgaccttggcccgggcgattgcggccgaggccgctcgcgcaggcctggacgtactgctggccgatctgaacccacagcaacaaaccagctacctctggtctgttgctcgtgacgaggcggggcactcccctcgcttggacgcaacggtctaccaccgcactgacaagctgctccgcgaggccgatggccgtcagctggtcgttgtcgacggcgggccgcacgctagcgctcagagcctggaagtagcccgagctgcgaaagtggtcgtcatcccgaccggcgttaccaccgacgatttgcgcgaggccctgaaactcggccaggagttcgttgctgcagggatcccgcgtcagaagctgttctatgtcctcagccgcacgccttcctccgagcgcgagatcgagagtgcccgagcaaacatcgaggcctttggctttgcctgtgctgcagggcatatcccgttatcgaccggctatggcgcagccatggactcggccctggcaatcactgaaacgcgattccgtggactgaacgaaaaagccctggccatcatccagcaagtctttgatcatgccgctacagcatga

SEQ ID NO: 337597 - DNA, 249 bp, Pseudomonas aeruginosa
atggccacaaaagacaagacgcaaaaaccagccctgaaaatcggtcttggatccctcggcgcggtatccgaaacaccagctgctccggtcaacatcgagcggagtcctggaacactgccgaagccgattcagatccgcgtgccgattgagaagcacagcgagatcaaagcgtacgctgctgagcagcagctgagcattaccgacctcctcatgaaggcttacgaggaatatcggtcgcgtcataaatag

SEQ ID NO: 337598 - DNA, 372 bp, Pseudomonas aeruginosa
atgaggcaaatccaggagaacggcatgaagacactgagtgagaaagaagaggagttgcttgaaaccgttgcgcttccaggtgtggacgactggcagcttctggatccagacgatgaagagcgtgaagtcattgaagctatcgtcgctgagctgaatgctgtgctggtcgatgcgcttgagttcgcgaagcgggagaaaccgacatttggcgagattggtaaacgtgtctactcgcagatcgctttgattgatgcgaagtatccggagtacggagtaaccgactcggaaggctgtcagacaattgcccgctttttcgcggtgaactaccacccagccatctacgactttcttcgctaccacctcgcaaagtaa

SEQ ID NO: 337599 - DNA, 684 bp, Pseudomonas aeruginosa
atgaaaaagctgatctcttccgcactgatcctcagcatcctctccctggccggctgtgccaacctcggcccgaccgacaaagacggctcgcgcaatcagaccctcacctggggcagcatcggcaccatcgccggcgccgctgcaggcgcgctcatcaaccaagacaaccgcggcaagggtgcgttgatcggcgccggtatcggcggcttggccggcgctggctacggcgtctatgcggatcgccaggaagccgaactgcgcaaggcaactgccggcaccgggatcgaagtgcagcgccagggcgacgacatcaagctggtgatgcccggcgcgatcactttcaacaccggctcgaccgagctgtcgcctgcagcccagttcaacctggacaagctctccagcagcttcaagcaatacggcgacaacaacatcgaagtgaccggccacaccgatagcgtgggctccaatgcgagcaacatcgagctctcgcagaagcgcgcaatcagtgtcggcaagcacctcattggccagggcatcgataagaaccgcattcaggtctacggcgccggtccgtctcagccgatcgccagcaattcgagcgaggaggggagggcgcagaaccgtcgcgttgagatcaagctgaaagcgccgctgcagccggttgctatggaaaaggctcagtaa

SEQ ID NO: 337600 - DNA, 300 bp, Pseudomonas aeruginosa
atgagcctgcgcctggcttcaccgccaagcctggatgtcgccctgctactgatgcagggcgagcacctggaagcggtcgctctgatgattgagtccggtgcagtggatctgatggagctggaggagctgaagatcaaaatcggcgtctatgccgaaattggttccagcacgaggatcctgctagcaccaggtacacgcgaaaaactgcatcacggctctgtcgaggttaagcagatgatccaggcctggcgcgaagcgcaacaggacctggcgcgggagatggaagatgaacgtgcttag

SEQ ID NO: 337601 - DNA, 2172 bp, Pseudomonas aeruginosa
atgccgactttctcaatgcttgtgctcttgtggttatttggctcttggatgttcgttgctggtgaaattcctgcggaagccctagccgaagcgacgcagatcaccccgctcacgatcttcgctagctacttttccatcgtcggcctgaccggcttcggcattctggcatcctgggcaatgttcctgggcatcttccggcttcgccagaatggcaacttcttcggcgcccgagatggcaatgaagcgttcttctacccgcttagagtggtggtggccctaattctctgtgcacctgtcattcctgttggcagcagccagcattcacaacaaattgttcttactcctggtcaccaactaatagcggggattgccaaagccggaagtaacgcaggagacgacgctcagattcaatcgttcaaggcgatgcacgaatacaacctgttcacgaatccaaactacgaaccgcaggttaaggaaactgaaagcctgaagatggcaaagaactggagcgcacttgcatattcagctgcaggttacttcacacataaaaacccacacgatcagcttaaagatttaactgctgaagaaattgcaaagctgctaattgaatctaagtggagaagccaatacacaaacccaaacagctctgcatactacggttccacagaggccacgccgccaatcattgagtcaattctcaaatatacaaacatccctctgataccgcctagcgatgcaatagcatcagccatactttactcatcaaatgagatcgacagaaattcgctcggcgagcaaacaacagagtacgaaatgggttcagagagcggcatatgctcctggcttggttcagattcctcgttgtgctcgaatgaagtgaacgcactgcgcgtacaaaatgagaaagcaatatcggttgcacttgctaaagctcaaagagagctctggacaaggctatacaaaactgcaaacttcgttaatgcgacaatatttgaccttacctatgagcaagagcaaaaacttgcaaccgacatcaacaattattatgaagcagaagctaagtggtatacagcaattgctaaaagcacaatccgttcaaagctaattgaagtcaacataaaagcaagcgaagccttctttagcagtcttgaacaatggggctggatgatgggcggaacattcgttctacgttctgcaaatgatttttcccgagctcaaaagtcagccgcaagcagtacgtcgaaaatttatcctaccacgtctttagcttcgctaactcctggcgacgacctaactaaaattgctcaaggcaagcttgagctatctaatgagaggatcattcccaatgtaaatatcaaagagctgctcgggcttaatattctcgaaagcgacccatcaaaagcaaacctacatactgtgtctggctttggacgtgaactggctggtacaggtttaatgctgatttccggtactggcgcagctaagtatctaggttttgatggcgcgagctctaaggcacttacagtaatcggttttgctttgttactcgcaggcgccatgattggctacgtcctgccggtcgtattcgccatcttcggcctcatgggcgtcatcagctggctgacctttgtcgcctctgcgttcttcggcgttaccctctggggcgctgcccaggcagctccgaaaggcgaagagcatacgtctcagatggccggcaagggatggaacattcttgtgtttatcggcttctatccaatgcttgccgtaggtggccttgcggctgctgtaaccatcaccagcatcggtctaccgatcgtgaacaccatgatgggtggcctgtggggaatgatggataacggagttgccgatctgacccagccctttgacatgctcgcgggccttcttgttggctcggtcatgatggttctgctcacctgtatgctgttctggtcggtgtgcatgacctctgcatccctgatcaccaacttcccacgcaccgtgctgaacatgatctcgttctccgagcctggcctgaacccgtacgaaaacacagcgcaaggcgttatgggcggtgtcagcagtatggtgaaggcaccgctgtcgatggctacgcaagcaattgctagacgcttcgttggttctttcccccgaaccccccaagctggcggttaa

SEQ ID NO: 337602 - DNA, 978 bp, Pseudomonas aeruginosa
atgaatgatctgatcgtgaagccagccggtgacctgcaggtcgccggtgagcgccggctcaccgcggccgagttccagggcctggccgaggtgccggccgctgccgagtggttcgccaacctggacaacccgcgcacacgtcgagcctaccagggcgacatcgaggacttcagcggtttcctgggcatcactgcacccgaccagttccgcgcagtcacccgggcacatgtcctggcatggcgtcaccagttggagcagcgcggcctggccggggcgacgattcggcgcaagctcgcggcgctggccagcctgtttgatcacctgctcgatagcaatgccgtcgccggcggcaatccggtccatggcgtgaagcggccgaagatcgaaaccagtgagggcaagacgccggctttgggcgatcaccaggcgaaagcgctgctcgatgcgccggatccggcgacgatcaagggcctgcgcgatcgggcgatcctcgccgtgctgctgtaccacggactgcgccgtgaagaagcggcgcgcctgaccgtccaggacatcctggagagaaggggcatcaagcatttgcgcgtgcacggcaagggcgggaagctgcgctatctaccactgcacccggtcgccctggaccgtattcatgcgtacctggagacgtcaggtcattaccaggaagaggcttcctcgccgctgtttatgccgctgaggggccggaaaactggagccggggtgtcggctgagggaatctatgccctggtgggcaattacgcccgggctgccggcatcgaggtcgccggcttgggtgtgcatgggctgcgggccacggctgcgaccaatgccctggagcatgaggcggacattgcgaaagtccagcagtggctggggcacgcaaatatcagcacaacgcggatatacgaccgccgagaatcgaggcctgaagactcaccgacttataaagtccggtattaa

SEQ ID NO: 337603 - DNA, 165 bp, Pseudomonas aeruginosa
atgttctacgacgacgacaacacttgcccgctctgcggcctgccctatcaggccgtggaatggatcgaggatctaaccgggatcggtgacgacttcaccgacctggtgatcttccaggacgacgatgagctgtgccgctgcgcggcagaggacgagaatgaatga

SEQ ID NO: 337604 - DNA, 786 bp, Pseudomonas aeruginosa
atgagcagaacccgaaaacacctcaccccgaccgaagccgaagccaaggggcttctatgccgtaagcacctcaaggaacgcctccgcctcatgccgggactaaacaccaagcccgctggcagtgtctggcaaggtcagggggcttatgatgtgtacaacccagccgagtgcgtgccgtggcgctggatgcctgggcgtgcccaagtccgtcgccagcacgtcgcagcgcaggcaaaagacctgatcgccgcagactgcattgtgctcgataccgaaaccaccggcctcggtgacgatgccgaggtatgcgagatagcgatcatcgacgtgaccggcgcgccgatcctcgacacattgataaagccgacccgtccaatttcggcagaggcgagcgcatacaacggcatcaccaacgccatgttggctagcgcaccgagctggttagaagtggcagagcaatacgctgccatcgtcgcggggcgcactgtcgttgcgtacaacgcggcttttgatgcgcgcctgctgcggcagacccaccaactccacggtatagccgcgcctgtattgacgactgcctgcgtgatgcggatgtatgccaagtggcatggcgagtacgaccgagaccgcgatgactggcgatggttgaagctgatcgaggctgcgaccgactgcggcgtggcagaagacggcgcacaccgcgcccttgccgacgcccgcatgacgctgggtgtgctgcgctacctgcatcaccgcataaatggacgacgaccagcacagcagacgtag

SEQ ID NO: 337605 - DNA, 873 bp, Pseudomonas aeruginosa
atgaacaacgcatctcacctcctcgcacaacacggcgagctgctccaggtcggccctgttatcaccggccagccgctgggcgacaagtcgccgcgcttcctgagtgcggtctgcgtcgctgctctctgtatcgcctttgccgccggtgctggccacatcacccaaggcgtccgcgaggaagcggctcgggtagccgcggcagagaaagccgaagcggcgcggctggccgaggaaaagcgcattgctgcggcgcaagttgccggcctgcagaaacgcctcacggctatgcagacccagatcagcaccgagcgtgatgcccttcagcagcgtttccagcggctgctggcggacaaagacaaagaccccgtcgtggccgaaatggtgcgccgctacccaacgccgcaccggccgctccagggcattgatccaaccgccttcgacgcatttattgatttggatcgccagagctggatttcttcgggcacgagcccgaagctcgatgagcactaccaggtagagcgtgccaaggttcaggccggtgccgattacctgcggtacatcaacgaggccctggaactgatcgatcagggcaagcgcctgccagcgtggatgggttatgagcgctttgcttctggctctgaaaccgagactcgtgagctgaaagatcacggggccccggcgaagccggaagctcgtcgctctgtgcctgcggcgtcggccgtgccgatggcgcctgagccggtcatgccgctggagatcccagcgtcaaccgctccagccgctgcgcctgcacccgcgccggcggctgcggcgccgaaaccacgcacggcgccgactggggtgcctggcaaggtccaggtactcgactggtaa

SEQ ID NO: 337606 - DNA, 2550 bp, Pseudomonas aeruginosa
atggtaacgcaatttcagaagcatatgaaaagcctgcttctctggatcaccgatccggaagcggccaaacgcgcctggcgggaacgccgtacgatggcgattcgcgcagcgatcggcccgcaactcagtgctgacacccgcggctggcctgtcaaccagatcctgcacgatgacgtgattgaagctctgccgtcagatcgtgcggcgctgacgcgccgcgcatttttcggtcgcgctgcatttcatgccggcgcccgcctccagcgccgactgcgcgcccggaatttcgcgctcagcatcgtggcattggtcctggtatccgcaactgcctacctgctgggccgcaatggtgccagcctagcgtggcaatggggctcgaccgctgcaggtctgtgcattgccgtcgccggcgcctatgttttccgcttatctctcggcctttcgcctgcagcgtggcgggcgatggttccggccggttcgctgctgaccgaggaagagatccaggacgtgactgagttcggtgcccgggtactgctgcgcgtcacgccgcctcagacgcctgctgacctggtgggatcgtatcgttcctggacatacgaccgcgacggcaaccccgttgatggtcagatcgtccctgacgatctatctgtttcctatctgcgcaaggcactggttgacgagtctgtgccgatggctgtcgctggcattgcgattctgctggccggcctgttcgtcgccacagactcgttgagttggttcatcgcccccatcgcggcgggtgccgcggcggtatggtcattactggccattttcgatctggcgtcgatcgctaagactcgcgccgctgctgctcgcgaggcgctcgctgtaagcgcttaccccaagctgattgaacaggaagggaagtcgaagtttgcggactttgatcgcgccctggatgaacagctcgaacgagcgatggccgaaaattccatgttcatcaccctgggcacagctactgatctttttgctgagcgacgtgatccttacagcccgcctaaagcgggcatgccgttcggcttgtctatcgctgacctctcgacgcacattcttgctctcggccagaccggtacaggcaaaacggctgctgtgatccgacctgtggtctggcaatggcaagaggcgaaagccggtggattgctggtactggacggtaaaggacagcttcccaaggagttggccggattgcccaactaccaggtcatcagccctgaatcatcgcagttcaacgcgatccagaacctgccgccagatgaagtcgccgatacgctgttccagcttttcacgtcgaccaagggcaattccggcgatgtcggtggcaatgaatgggaacagttcgcccgcgaactgctccgtagcactgccaaagtccttgctctcatgaatgcacttgagcctgctcagtggccctggaatctctcgtcgatctatcgactggcgttcgaggccggtagccgggacgcggcaaaagcactgatcgaaaacgagcacatgcaccttcttcccgggcatctgcaccgtgcgtacagctcgtttatggtccgccacatgcagaaagcaaacgaaacgcgctcctccatcgaactcaatttggaaacatggctgggcacattgatcaacgaccaggaacttggttcctgggctgattgtgtggacggcgtagagatcgaggattgcctgtacggtgaaaaaatcgggctcgcgctacctgacagccaaactggtgttgctatttcggccctggcaaagcgccgtttttacacagccatcaagcggcgcggtgatggctggaaatccgaaggccaggaacctgttctgctggtagtcgacgaggcgcaggatctggtgtcgcatgaggagctggcaatcctgccaaaagcgcgctcgctcggtctatgcgctctctactccactcaagggctcgacggcctccaggtcgcgctcaaagacgagcaagcgacgatcatgctgctcgaccaattccgctcggttgtgagcttgcaggtcggatctgatatgactctcaactatgtgtctcagcgcctcggcacggcccctcgcgttgtattcagcgaggtgaatgcaaacacaactgatccggcggccaccgcaaatctctatggtgccaatgccggtggttactccacaggcaccctagcagctagggctcaaacgtcggaggagatgatcaaagtgggtcgctcctatagccatgttggccaggcgatcagcaccgtagccgagttggcgaaaaagctgggtgtcgaacaggcctggcagcagttacctgctgctattcgccgtgagcgcccagccggcagcgtgaagattggcgaaatcccgcttgtttcaccggatgaggttcgggcgctgaccatgaataaattcacggccctggctgcagtgaatcgctgcggcacaattcgtcgcgcccagatccgtttgaccccgatgttttccttcccaactgaaacgaaaaccgaacaggccgctgaggaggtcgcagcatga

SEQ ID NO: 337607 - DNA, 489 bp, Pseudomonas aeruginosa
atggacatgaaaaaaattgcggtgatgatcgccgctctgctggcgagcgtttctgtgtcggcctgccctctcagcgagtgcatgcccgagctggctggctcgaacgaggataaggcttatgtcgttgcgatgggcaaagactggttcgagcggatgcaggatctgaaagatccagttcaggcgatgcagcataccgcgctgatcgcatcgcgcctgcaagtggcaatgatccaagccgaaaaccgggctctgcggcgcgcccttgaaacaggcaaagagcccgacttcacgagcatgcgtcagttgccttcgtatcagagtctgcatgacgcgatcgcttcggatgtgctccaggtgctgacgactgggcgcatgccgcagctcgatcgactcgatcaacgcatccacgcgagtgttctgcgatcgatgattgaggaagctgctgaggaactcggccagccgcgtaaaccgcgtcggatcatcgagtga

SEQ ID NO: 337608 - DNA, 375 bp, Pseudomonas aeruginosa
atggctgcccatagcgaagatgaagatttccgtggccgcaagagacaggcgcggatcctcggctacgacgccgatgcatggatcaaagccaatacggagtcgcgaaaggaatttcgcgatatcgaaggccacgacaaagacggcctcgatgtgctggctcgcgatccccacatggatgaggtccagaaacagcaccaactgcggcaagcggagcatgacaaggccgatcaggctaagtcggaagcgtctcagctgcgcgagcgtagtgaacgcattctggtgcagacgaacgagatcagcgccctggagaaggagcttcaccagggaaacgaacaacagcagcaaaccgaagctcagcaagggagatcgatgtga

SEQ ID NO: 337609 - DNA, 669 bp, Pseudomonas aeruginosa
atgagtgacatcggtggcgccattcgctcgattgacgagctcgtggaggaggttacgcgcctccacgtcctcctccgtggcagcgaggcttatccagggatcctggagcaggcttctgatcttgccgggaagctgggctctgtgcgcgaccagctgggtagtgccgctcggctgagcgagcagctggatgcgttgcctgatcggctgcttcgctctgctgatgatcagcagttcaaagcagcgttgcgcgagtcgatcgcgcaggtactggccgactcgattgtcgatgcgaaacgccacgtccaggacgaggcggcacaggtagcgatcgaggagttgagcgccaaggtgaaattggccatgtcgcaactcggtgagagctcggcgaattattttgctgagcggaaccaacttaagggcctcctcgaagctgaaaaagcgaagagtgccgcgctggccgaacggatgaagtatttcgagcaggacaaggacaacgcccttcgcctgctgtcagccgagtttgtccaggtgagcaagcgctccggtaaggctcgtctgatcgatttcggattgggcgtggccatggcgttgatcgtgtcgctgggcacgctttacccggcggctgccaactacctcaaagccccatcgcaacaccaccaacagcgctaa

SEQ ID NO: 337610 - DNA, 837 bp, Pseudomonas aeruginosa
atgagcaagaaggaagagaagatgaccaaggcagcagcagtggcaaacctggttgagatggatgaccttaatctggattcgtcttggcttagcgcatctcgcatccgcccacagcaactgccggttggcagtgacgccggcgcctcgattgagcacctcatctacggtagcggtctgcaaagcttcgtactggacatcggcggtaacgagactgcgagcaagaccatttctgccatcggcgagcagatgctgttccgccacttcgacctgaccgttatccctgtgcgcgacgagggccaggatgtcgacaacgcagtgaagactattaagttgatccgcgagtacgacaaggaaaccccgattgccattctgctcaacgacatcacgagtcgtacccaggatacgaaggatctggccctgcgcgaggcatttgccgaggtcttcgatctggccgagcaagccggggcggaattgttggttatgccgcgcattgagcgctatggccgcagccggcgtctgggcctgactcagtgggagatctcagaggatcgcgaggctcttgccgaccgtctgcgcacgatcatcattgagtccgagcaggttggtgatcttgaccgggcgaagctgaacactcgactgatgcgtgccgttaccggcgccaaaacggtacgcgagatgatcaatgtggtgttcaagcgcctggatcagatcctcgggccacgcgatcgcctccgcatcatggtcgtctcgacgaagggtggtgtcggcaagtcgtttacttctcagcagttgctcgccccgtatctgctgcatgcactgggcagccgccatgagtga

SEQ ID NO: 337611 - DNA, 525 bp, Pseudomonas aeruginosa
atgttcaaacgccctgaggacctgatcgcggaacaacaggaagccgaagagatggctgcagaactggaggcatggctcgcgaaagaagaagccacggagcagaaaaaccggcgcggggcggggtatcgcctactgaacccggttcgagcacagatcgctctgctgatgcagcgcgggaaaacagttaaagacattcaccgtgcgctcgatgaagcgctcggcatcaaggttgacctgaagacggttcgcaaattcatggtcgaccacatgccagaggaatacgcctcttacctaggcgccacgaaacgcggcaagaaggaaaaccgtgttttcagggatggatcgaagccgactgatgaggaactgcaggccccattgcagccggcagaacagaaggaagtcgacaacttcctaggcggcgcaaagccgcaagcaactcaacaacccgagggccaatcagtggccgggaaactggacttagagcgggcggcaacccctcgaaagtttttcgacaacgacaagtga

SEQ ID NO: 337612 - DNA, 366 bp, Pseudomonas aeruginosa
atgagcgacttgctgccgccgattcccggcgaggaatcgaaaacgaacccggacgaactgatgaccgaagagatgcagagcctgctcgaatcagtgccggatttggaatcagaaaaccgatcagtagaggcctcgggaaaattcagccagcacccgttttcacccccgagtctgccgactatcagttcacccacgttgaaccttctgccggtcgaagaccgcccgaaaacgttttgcaacggttgtccgcacgctcactggctgagaaccgagagcgaaatcagggtgtactgcaaggaaatgtatttttggccggacgcgctgttcccgagctgcgacggtcggttccagccgccaaaggattag

SEQ ID NO: 337613 - DNA, 1431 bp, Pseudomonas aeruginosa
gtgaacaggttcgacaaacaggccgacaaggatctgatcgccaatctgaaaatcgcggtggatctaccgaaatacgccgctgatctcgggatgaaattggacaaggaggcctcgtacaaggatcacctggtctatcgctacggcgcaggcaagttcgacacctaccgtgcgcccgatggcacttggcgctggcaagagcgccacagcggcaagaacggcgacatcttcaagcttcatatggaggtgaaaggcggatccttcgccgaggcgaagcaagcggttgccgacttccatggcattggtgtgaccgtcagcaaagagcaactggccgaaaacactcagcagacgatgaccgagctgaagagtgaaaagctggatcgtcaggccaaaatcgaagctgggactgaaaaggctcaacgatcgttcggcctcatgagccgcgccaatgccagctacctggagtcccgaggaatctcgcccgatgtactggcccaaaccaggtggaaaaccaacatctacggcagtgcctgctttccgcattacgacgccgaccggaatttcaccgggtacgagtatcgaggcttcgattacaaggacaaggcgaccggcgaaaacaggcaggcaaaaggtttcagcagtgataccgaaaaagggatttacatcgccaaccgcgactgcgccaaccccaccgaaatccgcttcagcgaaggcggcgtcgacgttctgagcgcctaccagctggctactccagaagaacgtcagcggatcctgttcgtcggcaccaccggcgagcctggccctaaaaccgaggcggcaatcgcggccctggccgagcgccacaacatcagccgcttttcgctggcctatgaccgcgaccaaggcggcgacaacctcactgcgaagcgtgccgcccgcctggccgagcgcttccccgatgcccagatcgaggacgtacgcgagcgcatcggcctgcagctcggcgaagaccctaaccagcttgtgcagcgcctgcagggcatgaccgtcgagacggccgagatcaaggtcgagccggttcaggttgagcaggcaccgccaaagaaagaacaactgtgccagctcgccagttcgatctgccggcgtgaaggtgaagaagcatatgcacttgtgattgacgagcggcttgatcagcgccgcttggatgatgcagtggaagcctcccgcgaaggaatcaagatcgtcaaaggtaagcagatcgacagcgcccttattgaattgcgcaagcgttctcctggggcaacccgtgagcaggctgaagaggtatggaaaatctctgaaaaggcaaaagagatcctcgctgtagagcgtggcctcgcagctgttcaaggcggtggcgggcctgacagtttcgataacgaattcgaggcacagaccccggttcgagttcggtaa

SEQ ID NO: 337614 - DNA, 546 bp, Pseudomonas aeruginosa
atgcagtacgcaatcactgaaatcggcaatcagaaacgcctgatcgcggcacgcgaatactttgcctggagggagggcgccattgctcacggcgagccctatgatgagacggttctacccttccacatcgcctatggcgcctttatgcctcagcctgagctgagcgatgaacaggcagtcgagagcatgcaaaagtacctgggagcgtggcatgcgacgttgatcgagcagaccctagagctggttgctcttcacgaagtagaggccttgcccatgatcagaagcatggggcgaaaaatcccctttgctgcgttgatccaggcgcctgaagccatcatcgggaaaatctcgaacctggacacaacagagtcgacgcctgtgttcacccacttccacgagatgagtgcgatcaacaacatcttcaatcgctcggggatctgggcaatgaagggcatcgagcgccgccgcggcgttatcgagaaggaaacatggcgtgcggctgtagaccgcgagcgtgttcagcgtacagccaagtcgatcaagtga

SEQ ID NO: 337615 - DNA, 384 bp, Pseudomonas aeruginosa
atgttgatcaatatcccaatccagaagcacaagatcacccccggagaccttccaggcgcccccctgtgtctgatcacgccaatctctgccggtcgcggctggctgccgctcgtgcgcgaagcgctggacgtgctgccggccggcgccgagatactgcagatcaaggagaaattcggcgggctgcgcatcctctcgaacgcctgttctcccgatgtccgcaaagcgctgcagccgatcgagcatcgttccctgacggtctgcgaaatctgcggtgccgatggccacttgtggcatgacggcgacccgggccagcctgccggctggctacgcacccgctgccatgtacacgcccacacccgagtcctggaggtggccggtgtctga

SEQ ID NO: 337616 - DNA, 417 bp, Pseudomonas aeruginosa
gtgtctgacactctttcggagatccagcacctagccgagcgcatgcgcgatcaccagatccagcacctggaggcgcagctcgcggagctgcgcgcttcaccaggcaacgccctggccggccccttcatcctgaccatgaccatctgcaacctggtagtgcctgtcagcgccgcctatgccgtgccgagccccatcttgggcctaccaggcgatcccatcaccagctggcacctggcgctattcggcccgtggccaccgaccgaggccgttctcctggatctgcgcaacgcacttttcgacgacgcccccagcagtacccgggatcgagtcgaactcttttgttacgacaattcggcaatgctggccaagtgcaagtcggccggaattcaactccatctgcacggagccacaaaatga

SEQ ID NO: 337617 - DNA, 738 bp, Pseudomonas aeruginosa
atgcgtatccacctgctgtccgacctgcacaacgagttcgaacccttcacaccagagccgctggactgcgatgtggtcattctggctggagacattgacctcaaagcccgcggggttgagtgggccaagcaatccttctccgggccggtgctgtacgtccccggcaaccacgagttttacggtggccacctgactcacactctggaaaagctcagggctgctcaagatgatcgcgtgcgggtgctggatcgtgatgaagtgatcctcgccggcgtgcggtttctcggtgcgatcatgtggacggactttgcggccaccggcaacccgcatatcgcggcgttcagcgcccagaatgcgctcaacgacttccggcagatccgtgctgaaaactatcggcgcatccggcccgctgatctgatcgctcaggccatgatgacgaaagactggctgcgcgaccggctttccgagccttttgacgggcctactgtggtgatcacccaccacgcaccgaccttgcggtcgcttcaggacaacccccatgcaggtactcacctggacgccgcttttgcgaatcgttgggaagacctcatgtgtggtgaccaggtggcgctgtgggtgcacggccattcgcacacggccgtcgactacgaggtggctggcacccgtgtggtgtccaacccgagagggtatcctggcgaagaaactggcttctgccctgatttggtcatcgaggtttag

SEQ ID NO: 337618 - DNA, 453 bp, Pseudomonas aeruginosa
gtgatcctcttcctcgacatcgacggcgtgctgcatccagatccgccacaaccagatcagcggctgcgctcgctgccgcgcctggtcgcgatcctgcgcgacttcccccaagtcgaggtggtcatcagctcgctctggcgcgagcaccttacactcgatcagctgcgcgacctgttccctgccgagatccgcagccgcatcattgacgtgacacccatcgccgagcgggtggacggctggctgccggcgaggcgtgagggcgagatcctcgaatggttggagtctaccggccggattggtgagccgtggctggccttagacgatgcaggctggcagttcacccagcaccgggaccgccttgtcaaatgtgttttctatgatggccttgatgatcgaatcgagacgctgctacggcaaaggctggcgacctatgcacggtgcataggtccatga

SEQ ID NO: 337619 - DNA, 477 bp, Pseudomonas aeruginosa
atgaccctcactcggctctacctcgataccgagttcaccaccctcaaccgctaccgcgccaagctgatcagcctcgccctggtagtgccgggaggccctgagttctacgtcgagttgaccgacacctggtcgccggcggactgctccccattcgtgaccgacaccgttctccccctcctcgatcaagccaaccacgggcgcacaaccaagcaggccagggccgagctgctgaatttcctgcagaccctcgggccagtggagatcatcacagacgcaccagaccatgactggcccctgctgctgtggcttgcaggccctgcaggcctacctgctaatgtacgaccggaaccagggcgactgactatcgacctcgatgctgaatacagcggcgacgagccgccccaccacgcgcttcaagatgcccgcctactcgccgccctggttgagtcctggaacagacaacgggacatcagatga

SEQ ID NO: 337620 - DNA, 687 bp, Pseudomonas aeruginosa
atgatagtggctaaggatttcctgcatctgggctcatcggcctcaatcaacaaaaccctgtcccggctaactcaggaagggaagctgctgcgcgtcagtcgcggtgcttatgtcagacctcatgaaggccgatttggcatgcgccccccgtccaccgaatccgtgctgcagggcattgaggccagctccggtgaaacggtggtggcccacggtgctgctgaagccaatgcattggggctgaccacgcaagtgccgataagggaggtgtttttcacttccgggccttctcgcaccctgcatcttggcagtcgctgcgtagagctcaagcacggtagccgctggcaactgttgctcggtacacgtccggcaggtcaggtgattcgagcgctgtcgtggttgggaccagaagccgcaccggcagcgctggagcaactgcactccaggctgccagaggctgaatggaaggctgtatgtggtgcgcgtgacgcattgcccagttggttggcccagttaatttcaatcggagtctgccgcctttctgacgaagccgagaaacgaacgcgggaaggcctggccgatgttgacgctggccgggttgtcgatcaacagatggtcgaggcctgggcggcgagtctgtcatctgatgtcccgttgtctgttccaggactcaaccagggcggcgagtag

SEQ ID NO: 337621 - DNA, 678 bp, Pseudomonas aeruginosa
atgggcgtggccaccgcgctgcagttggccgactacgactgcaagtcgctgaggcgcatgttcaatgtcaatgtcgagcggactgcacgcgagctcgccggcgagcgctgtttcgccctgcaagatgggccagagccaaaacagatgattgcctgcaccaggtcattcggggaacggaaacacaccctgcaggagctgcaggaggccgtcacggggtatgccacccgggcgggggagaagctgcgcggccaacggcaactgtgccaggccctgcaggtattcatccggtcgagtccgtttgaccaacgaggggagccttacagccgtgctgtgtgtgttcctctgccgtacccgtccgctgatacccgtgacctggttgcggctgcgctgggcggcctgcaggcgatttacaggcagggtccggcctatgcgaaagctggggtggtgctgatggatttcgtggaacctgggcgattcacgccggatctgttcgcgccggcgccgaggcctggaagcgatcggctgatgtcggtagtcgatgcgatcaatgcaaagcagggcagggggacgatcaggcctgccaggctggcggcggatctgggtttctcgatgaagcgcgagcggttgagccccaaattcaccacgtcctggagcgagctgctgcgcgtcaggtgctag

SEQ ID NO: 337622 - DNA, 1641 bp, Pseudomonas aeruginosa
atgctggaaaacggcgatccgcggttggagacattcaccgaggaactgctactgaagggccaacagcatcgaagcgaaggtgtcgcgagatcggtcggaaaggtatctcacggcctcgctgccatggggattttggcgaaacctttacgcatgcgaggctatacctgttggcgggcgaaaagcatcgaaggcatcgatccgacttgggcaatgtggtgccgtcgatggcgagacacttccaccttgcgtccacgcacacgtgaaagcaattacagttttatcttgaggaccggtgtctggctagcgcgcgagcaatcaggaatggcggcgcctaccgattggagcatgtccacttgcgctgcatttattgctgccgtcgaccggatgacggtcggtgagtgggctttggagtcagcgaagggaacacagctaaaggggcttggtcagcctatcgctgccaactcgaagcgcggctttctacatgccttgcgacgattttttacagactttgaactctggggatggggtcgtttgaagttcagcccccggcatcacctcgccaccccgcgatccgtgacattcaactcgggtatcaacccgcgggtaattgatgactcgacctggctcaagctgatttgggcgagtctaaatcttgagcgtagtgatctgctttcggagattcactatccgctgtcgatggttcaagccattgctgtagtgtggacgcacgctggtttgcgcagcaatgaaatcatgcgcttggataaaagatgcgcgcatcctcagaccaatgatgtggtacacgaggatgggaccatcgttccagcaaaaactttatgctatctcgatattcctgccagcaagacgttcaaagctttcgtcaaacctgtagcggtggtcgtgaaggagcgcattgacgcctggctggaggacaggcctgctaaccaggccgctttgctggatgagcgaaccggggaaaaagttagctacctatttcagtttcgaggcaagcgcataggctccagtgtcattaatggcaccatcattccaatgctatgcgccaaggcgggtgtgccactggaggacagtcgcgggcgaatcaccagccaccggggacgtgcctccgcagtgacggcgctcgccagcgtccctcagggcatgtcgctgatcgagctaatgcagtggtcgggacatagctcgccgaattcgactttgcattacattcgaattcggcctaccaagctggcagcatccttcgttaaagccgatcaaatggcccatatggtctccgttttgatcgatcatgacgtaattgttcgccattcagatgccccctacaccttctatgacttgggcgactcgtattgttcaaatcccttctggagcagctgcccacatcgcatggcctgtgcggggtgtgacttcaacttgccgaaagccagcgcaagggcccaagcattggaaagcaaatcgtctatcggacggtacttggaggccgtgcctttaactcccgacgagcgagccattgccgagggcgacttggaaaagctggagagcctcattcgaaagctggacaatgtgccggctctagacggcaggatgccgaggagatcgatgagagaaagaggaggctataagtag

SEQ ID NO: 337623 - DNA, 1467 bp, Pseudomonas aeruginosa
atgcagccacagcggcccttcgctgccgacctcgcgatagacccaggcacgttgtccgctgcgggtttccaccaggtaatagtcgcggcggatgtcttcgccatcccaccagcccgactcgatccgctccgggccggccagcacggtgggcaaggcctcgccgagggggcgtggctccgccagcagccagccgggtcggaggccgcaggctgccggcgattgcgccctgtcgcagctgtgcggccgccagcttcgctccggacggtgttcggcgacggcgctcaggccctgtaccgtctcgtcgcccagccgcgcgcgcaggcgttcccgcaactgttcccagccgagatactgctgtgggcgctcgtcgaacagttcgcggtgctgcggcgtgaaaggaggcagctcgcgggcctccaggcgcacggcatgcacgggggcgggcagttgcagctgttcgagacggccgcgggtcagttcgaagagcatggccgcctcgcgttcggcgctgagcaggccgaccgtgacctggctgtcggcgcgcccgtgatgctccagatgcagggtgaagcgctgcacgccgctgtcgcgtccggcgagaaaggcggcgagatcggcgctcagccgtcgcagggggaagagcagggcctggtgcgattccacgtcgaaattgagttcgatgcgcaggtcgaaggtgtccggcggccggtagtgctccagcgccagtgggctgcggccgcagaggcggtcgatgtgcaacagcagttcggccgggaagcgacgggccagggcggcgcgcggcaactcgaggacctggcgcagatagcgcagtcccatgcgtccgagggcgacagccagctcccgcgagagtcccaggcggtccagcggaagggcggacaactggcgttgcagcgctgtctcgtcctcgatggccaggccgtcgtggctgttcgccaggaccctcgccgccaccggattcggcgccaggcacaggcgatggcggaagcccagcgctgtgagttccttgcgcaagcgggcctcgaagcgtggccaggggccgaacagggcaaggctggactgcacttccagcagcagcgcgcgcggatagtgcaggctgacctgcgagctgaaaccgtaggcccaggcggcgaggaaggcctgccagcgctccacggcggcgaggtcgtattccgccgtggcgaagtcccggctcagggcctgggcggcgatcagcgattgaccgggcttcaggccgagcgcgcgtgccgcagggttgaccgcctgcaactgccggcgctgcgctgggccgccgagcagcgccagcggtgcgtcgggattgctccgttgacgcagcgcgctgtccatggccagttgcggcaggagaatgcaagcccagagcatggccgcctcattgccaggcgctggctggcagggtggtcgccggcgcgaggccgccccggcacttga

SEQ ID NO: 337624 - DNA, 1113 bp, Pseudomonas aeruginosa
atgctcaagccaatgtttggcgtcgttgctctgacgctcttgaccagtcatacaacgctgggcgctacggtgaccggcggtggtgcttccatgccggccaagttgtacaaaggttctgccgacagcatcctgccaatcaacttcagctatgccgcaagcggcagcggcattggcaagaccgctttcctgatgaataaccccatgctgcttggcgctactaccggcaccgtccactacattggtagtgactcgatcttgagtagcagcgaactgagcgcctattcaaccaactatagaggcgcatatggtccactgatccagattccattggcgggtaccgcagtaaccattccttacaagaagcccgatattaccgacctgaacctgaccagtgcccagctctgcgatgccttttccggcgccaaggtcacttgggggcaactattggggaaccccgccgaccgtacgccgattcgtatcgtctaccagcggggcggcagtggagccaccgagttgctgacccgccacctgaactcggtctgcccgactcgcttcgccaccaactcgatcttcacgaacgcccgtctgccggccggcggtgcgctgccgagcaactgggtggcagtacagccttatgaaagtgtcaggaatgccgtcgacaatgtgtcaggctcgatcggctatgaggggcctgatggtgtggacctgagcgacaattcaaagatcgcgcgagtgaatggcttgctccctactctagccaatcgcgtgatcgctgttcgtagcgtggctccgccgggtgtcgctgcagatcgcgccgatccgagcaagtggataccggtcttcgtcaacccgaacgcaggctactccatcgtcggctataccaactttgtctttggccagtgctacaaggatgccactgttgccgccgacctgcgtgccttccttacccagcattatggcggcaccactacaaatagagcggtagctgaccaccgtttcgtacccctggtcgcttcctggaagagcgccatcatgagcgccttcatcactggtaccagcgaaaacctcgcgatcaacaatccctccgtctgcaacggcaaagggcgtccatga

SEQ ID NO: 337625 - DNA, 12297 bp, Pseudomonas aeruginosa
atgccgtcccgttcgccgtcgtccgcccgttcctcccgcgcgctttacgcgccgcgcctgaagccgctggcccaggccatcgccctgctgctggtcgcagggggcgcccaggccgccgggcagccgttcagcgccgcctggttcgccgccaagggcgcggctcagggcggcgctgccggggcgccgcgaccgggagcgcagttgccgggggcgccgccgccgctggcgcagcagcagcgggtcaaccagcagttgcagcgttcgatggccaacctgaacaacaccgtcgccgccattgccgcccagcaggccgcccaggccgccggacgccaggcggcgctgaacctcccgcaggatgttccggacgggctcggcgagggcggcctcaaggtcgacgcctcgctgccgttcgagcaggcctggcagaacgccaagggaccggtgcagacccaggccgccggcaagaccacggtgagcatcgagcagaccgccgacaaggcggtgctcaactgggagaccttcaacgtcggccgcaacaccaccgtggacttccagcagcacgccgactgggcgctgctcaaccgggtcaacgaccccagcgcgcggcccagccagatccaggggcagatcaaggccgacggcacggtgatgctggtcaaccgcaacggcgtggtgttttccggcagcagccaggtggacgtgcgcaacctgacggtggcggcggcgaacatctcggacgaacagttccgtcagcgcggcctctactacgacaacgccggcagccgtccgaccttcaccgacgcggccggcgccgtgcgcgtggagcagggcgcacagttgcgtacggcagcgccgtccggctcgaccaggggcggcggctacgtcctgctgctcggcagcgaggtggacaacgccggcagcatcgtcacaccgaaggggcagacggtcctgtccgccggcgacagcttcgtcatccgccgtggccagggcaccgacggcaacctgacctccaccacccgcggtaacgaggtgctgccgggcttcgccgccgacagcagtgccggccgggtgcgcaacagcggcctggtgcaggccgccaccggcgatatcagcctcagcggccgcgaggtggagcaggccggcgtattgctttccagcagttcggtggacagccgcggcaccctgcacctgaaggccagcgagcggatcaccctggccgaaggcgccaccagcgccatcctggtggatagcagcggcagcgccgccctcgacagccagcgcgaggccttgctcaagccgttgaacggctccagtgccgccgtcagtcggggcgacgacgaccgccgcgacctgtcgcgggtggagatcgactccgccggcagcgtcgatttccgcgacggctccatcggctatgccagcgaccgctggtacaccgctggcggcctgctggaggtcggtggctacctgggcacccagggccactcggcgggcgagtggatggcccagggcggcatcgtcagtttcaccggcaacgacgtggtgacccaggccggttcacagatcaacctgtccggcggaaccctcgatgtgcagggcggctacatccgccagacctggctgaagggctcggacggacgcctctacgaactcggctcggcgccgggtgacctgctctacgacggcatctaccgcggctacgaggcacacagcgagcgctgggaccagacccgttatttctacaatccgctgatcgcgccgacccagcgctacgagaacggctacagcgttggccgcgacgccggcagtctggtgatcggcagcgccaatgcgcggctcgacggccaggtggtcggcgatacctatcgcggcgagcggcagaccgaagcgccacaggccggcctggacggctacaaccagtcgcagaatgccgtggcgcgcggcgcgcagctggtcgtcgggcgctacaccccctactacgtgaagagcagcggcctgctggagtacgctctcggcgccgatgccggcagcctcaagcaggtggtcatcggtaccggcgaggtggcggccgaggagccgaccctggacgctccggtggccgccgagcgccagggccgcctgagcctggacagcgaactgctcaacggcttccagctgggcggcctgaaggtggcggccggcgagagcatccgcgtcgacagcgcgctgaccctggccaatggcggcgaggcgatcctgttcgccaacgacgtggcgatcgacgccgacatcaccgctcatggcggcagcctgcaggccggcaacgtactggcgcagatttccccgaacgggacgatcgatggtttcgtcgatgccggccgcgaagccggcatcttgcgcgtgggcgatggtgtacgactggatgccagcggcttgtggagcaacctgctgctggcgccggaggacaacgatacgttggcctaccgcgacggcggacggatttccctgcgcagcggcggcgacctgagcctgggacagggcagtctgctcgacgtgtcgtccggggcggcgctgctggccgacggcaagcgactgggcggacgcggcggcgacatcgccttgcacgccagtgccgggctggcgcaggccagcgatggccaattgcagttgggcggcacattgaatggtctcggcacgagtggcgccggcacgctgtcgctgcagagcggcaaggtgcggatcggcggcgacgacctcggggatggcagcctgcaactggccgaagatttcttccagcagggcttcgccagctaccgggtggtcggtcgctccggattgacggtagccgaggatgcccaggtgcgggtcgcgcggccggtctaccgtttcgccagcggggccggcgaggtcgcggctggcgaggcgccgcgagaggcgctggaggcctggataccgccgctgtacctagaggatgccttggccggacgcttggtccaacgcgaaggggcggacctgtacctgcaggcaggcggcgacggcaatatcctcgggcagctcgatcccgccagccagacgctggagctggggcgcggttcgctggtcgaggtcgatccggggcgcgccatcgtcctgcgcggtcccggacagatcaccttggatggcattctgaacgcttggggcggacgcatcgacgtgcgccagcagcagttcggcgcgctcgacgttacccaggacaatcagcccaaggcgcaaggccagccccatgctcgctccatctggattggagagcaggcattgctggatgttgccggccgcgctgtcactgccttggatgggcgcggtcgccgctatggagaagtgcagtccggcggcagcatcgtcatcggcggcgagatcgatccgggcaaggcgatcgcgacctcggcggatgcgttcgtcatcgtacgccccggtgcacgactggaggcctccggcagccaggcacagctggatgtaccgggactgggaagggttttgctggccggcgacggcgggcgcatcgctctcagttcctacaatgggctgtatctagacggctcgttgcgcgccgcagccggcggctcgggagcggcgggcggcagcctggagatcattgcggacgctcccctgtaccaaggttttactgtcgtggatgaccgggtattggccatgcgtgagctgatcctgacggcagggcacgccgattcgggattaccgaccttgctgcaaccgggaatggacgattcggctctgcgctatggccagagccgagttgggactcagtcgctgacgggcggcggattcgaccaactttcgttgttcagcaacggtccgctgtcgttcgaggggaacatcgatcttgcgatggggcgcagcctgaatctgtacgcggggacgatagccgccacaggtggtgggccgagcgaggtgaagttgcaggcgccctatgtccgcctttccggcatcgggatgtatgggcagcaggcctctggcgagtttcgtccgcgtctcacgtacgggccgaccgcgacagcggagcaggttcgcttgcaggtttctgccgggcgcctgctggatatcgccgggcgcttgtcattcggtagcgacggggtgatcaatggggtcaacgcagaggctgtccgctatcagcgaccaggtttcgagaaggtaacgctgcgcagcgagggcgacctgcgtttcgctggcgactatccagagaatggcgatccgtcggggcgcttgataacccacggcgatctgcaactgactgcggcccaactctatccggtgacgggagcgagttcgaccctctatgccgggtatggactggatgagggggggcaggctgtcttcgatgccgaacggcatttggctatcgaacgtagcggcgagtccttgccggacactccgctgtcggtattcggcagtctggcgttcatggcatcgaatatcgagcagggtggcgtggtgcgtgcgccgctggggctcatccagttcggcagcaatctggatcgtgccccgggcacggtaaggttgttgccgggtagcctgacctcggttagcggcgctgagctggtcatgccctatggaggcacgaccgatgggatcaactatctggtcaaccaggtccccattcaactgaccggtgccgggggcgctctcgctgctgggacactggttgcgggagtcggcctttatgccagcgaggtcgatgtgcaacagggcgcgcggctggacctgtccggcggcggcgaactcgcgggggctggattcatctccggcagagggggttcgaccgatgcgcgttttcatcccctggtgcagcaggacaatgatgggttccgtctgccggagctgtccagcaacccggtgtatgccatcgtgcctggacaccaggccgttagtgcgccattgggcggcgaggcgggcgccatccagccgttggtcgggcaacaggtcaccatcggggatggcgttcccggcctggccgccggtacctacaccttgctgccttcgacctatgccctgttgccgggcgctttccgcgtcgagatcaacggtctggcggggcaaggcgcgcccatggcgacgcaggggttgcgcaatggctcctgggcgacgtccgggcagttgtcgattgccggcacgtccatccgcgacagtctgagccgtcaggtcatcctgtcttccgccgatacgctgcgccgctactcgcagtacaacgaaatgagctatgcggatttcattcgcgccgatgccgcgcgcaagaacatccccagagcgatgttgccagtggatgccagatccctctacctgggattgcgcgcggatgaggagcttcgggaaaacgccctgagcttcgaggggaaggtcgacttcacgccggaagaaagcggatatggcggcagcctcatcgtggatgccgaggcgggcatcgagattctgcctgaaggtgggctgcccgactccgatttcgctggcgtgtcgttggttgcggacgatctgaatgcaataggcgccagccgtatcgccattggcacgctgccctacgtcgaatacggcgagcaaggaaacttcgtccagttcggcgggagcaaccggctctttcccgttgtgctgcgaaagggcgcgcacctttccgcaccggaggtgatcattggcagggatatcacccttgaaggcgggagtggcatcagcactctggggaaaggcaagactgcatacgattcgtccgatggtttcatctatcaacccggcggccgtaacctgctgctcttgtccaacggatggctgaacctgctggcacccgcagcggatagctcgttaccggttcgtctcggaggttgtgcggaaggggcgggctgcgccgacaccgaactctattcggagggcactctgggtatcgccaccaatggtacggtgacgtttggcgacaacgttcgttacgggacacgcaatctcagcctggcgctgagtacgatcaatatcggctccagccagtcgctggccgacgcggccgctcgcggcgtgttgccgaacggcctggcgctggaccagacggtgctccagcgcctgctgcgcggcgagcgcggggcgggtattccggccctggaaaacctgatcctcagtgcccgcgatgcggtcaacatatacggtagcgtcagcctcgacacctacgacccggccaccggcaaatccagcctggccaacctggtgctgggcaccccggccatctacggccatggcaccggcgaggatgttgccagcattcgcaccgccagcctggtctggagcggctccagccagccggccgcggcaccggtcgccggcggcgccggtagcggtagcggaaccctgcgggtggatgccgagcgcatcaccctgggctacggcgcgaatacccagccggccggcgagaccgacgaggcacgcctggcgctgggcttcgccgaggtgcaactgaacgccagcgagcggatcagcgccaaccacaagggcagcttgcgggtctaccagcgcctggacggctacgtcgccggcgaaggcctgcgctacagtggcggcgacctgcgcctgagcacgccgttgctgaccggcgaggccggctcgctgagtcggatcagcagcggcggtagcctcagcctggcggcgccggcgggcgctgccgcggtgaccttcgacagcggcaccgccgggcttggtgccgagttgtccctcagcgcccgcgagatccgcctggatagcgcggtctcgctacccagcggcaagctgagcctgagcgccgaagacgacctggagctgggtgatggcgcgcgcatcgatctggccggacgcaaggccagcttcaacgatgtggataaatacagctggggtggcgacctgctgctgagcagtcgcgccggcgacatccgccaggccgccggttcgctgatcgacctgtcggcgcgcaacaaccgcggcggtaccctgagcgccgtggcgttggccgaggacgccggggtggtggacctgcagggccgcatactgggtggcgccagcggcgactacgatgccggcggcacccgcgtgccgttcctcggtggcgagttggagatccgcgcccagcgcctgggcgatggcggcagcctgagcgagcagttcaccgccttgaaccagcgcctgaaccagggcgaggtcttcggcgcgcggcgcttccagctcaagcaaggcgacctgcagatcggcgacggcctgaaggcgcatcgcatcgaggtgtccctcgacaatggccaactcggcgtgagcggaacggtggacgccagcggcgcgcaggtcggcgagatccgcctggccggcggccgcggcctgagcctgggtggcaacgcgctgctggatgcgcatggaagcctgctgcggcgcgacagctacgggcagatcatcgacagcccgaaccgggcgatggtcgagctgagttccggcagcggcaccttggtcctggccggcggcgcgcgcatggacctgcgccatggcaccgcggcgccagcggaacaggttgatggcgtcgcccgtggcacgttggagttgaacgcgccacgcctgggcggggtcagcgccggcgacatcgccatcgatgccagcggcgcgctggacatccgcggcgccggcagcatcgccctgaacgcggtgcagcgttacgacgatgcgccctggggcaacgatccggcggccggcgggcggccctaccaggtgatcgaccaggcttacctcgatgcgcggcatgccgagagcagcgcgttcatcgccgcggcgctggccaaccgcgagttgctcgacggcaagctggccggactgaccaatgccacctacgcggatgctttccacctgcgtccaggggtggagatcgtcagcgcaacggcggacggcgacctggtggtgcagggcgatctcgatctgtccggctaccgctacgccagcctcaatccgaacacgccgctgaccgaggtctacggttccggcgaggtcggcgcgctggtgctgcgcgccggcggtgacctgaacctctacggcagtatcaacgacggcttcgcgccgccgccggactcgccggacgacaagggctggatcctcaccccgggggtgcagccgttcggcggcgacctagtggttcccggcccgggcgtggtgctcggcgacggtaccgcgttcctcggcggccgcaccctcaactacgacctgccgatcaagggcaccaccctggccgccggcacccgtctggccaccgaggcggtactcgaacagccctataccctggccgccggcagcgtgctggtagcggacatccacgatgccgccggcaacctgctgtacgccgcgggcagcctgctgcgcgacggggtgacgctggaggtcggcagccggctgggtgccggtaccctgctggcggcaccggccagcgtgcaggcgatgacctggcctgcgggcgtgcccttgccgagcatcctgcgcgaggggcccagcagacccaatgtcctgctgctcaatggagagctggccttggcacgtggttctctgatcccttcgcagaccgaggtggtactggctggcgatgcgcctttcatcgagttgcggcccagcgacggtgtccgccagggacgcaactgggcattggccgagatgctgccggccggtagccagtcctggtccatgcgcctggtcgccggtgccgatctcgcggctgccgacaaccgtctggtgcgtccggactcctcggccagcctgaacctggccgatacgcactatcaggcgaagatcgaacagagctcgggagggctggtgttcaccgatcaggctaccgactgggggatcaccccgggaactccggtcgacgagagcaatgaatggatctgcgggctggggccgtattgtgccgagcctccccgctggacctgggcgcccggcaattacctgggcatgcctgctggtacggcgatcggcgagggcgatctgtggtggtgcagtgtcgatccgtccctgtgtatcgagaatctcggcaaaaccgtggtcacaccgcagaaccagttgttcagtgtgctgcgcaccggcactggcgatcttgacctggccagtgccggtaaccttacgcaatggtcgccgtacggcgtctataccgccggaacgcaggccgccgatgtcgcgacgggattcaatcagcctcgcggtctgttcaatgggtcggtactgggcgccggtggcgcggattacgaagtgctctcaaccagccagtaccaggcctggtatccggaacatggcggcaacctcgatatcgccgttggcggtgatgtggttggcgatcaatgggccgagaaactgacaagtagcgatcccattcgccccttgccccccagcgctgcagtcggcaactggctctggcgccagggcagcgccgatagggaaggagtgccgacggcctggtgggtcaatttcggcagctatgtgcgtggcgcggagggagatgctccctatctggtcggcttcaccggtttcggcactctgggaggcggcaatctcagcatgcgaaccggaggtgatgccggcaatatcgcgccacgcggagatggttcgataccttcatccggtaaccttaatccgcgcagccagggactggtcttggcggttgccggcactggccggctcacctccgacggcgcgctgcaacttggcggcggcggtgacctgaatgtgagaattggcggggaggtgaacccgagccgggaggcgcgggctacccagacctactcgagttcggggtttgacggtctttacagcggcggcaccattcacgatctgcagggggccctcatcaatctgcgcggttccgcgagcttgtacagtggtgcgctgggaggcatcgatcctcgctacgacactttactgcgggaccccgccgaagtgcgcagcagggatgcgttcagcccgacgctggctagctccacgggtggcctcaccctggtggccggagatactggcatgcgtctggaaacccgtggcgacctggtcctgggtggggtgactgaccccggtagggtgggggtgccgaataccgttggcttcacggctcccgatggcagcgtctaccaagggggtgggatcggttggttcagtctctggactgcacacacctcgatcgatctgtttgcggcgggcggcaacctgacgcccagcacccaattggtcgaggcaaccaacgctattcccatggcaggccgaaacctgtcgcctagcgatgggcgattcatctatccatcgatagtacgtgcggctgccccggaaggaagtatctatctcggtccttccagcggttacatgggaggcgtgagcctgaatgtctcgaccactccctactccttgttactggcaccgtcgctcaacggtgaactggagttgctggctggagactccatttatgccggtggctattcggtgcaacgctcaggtgccgatcctgcgaacctgccatcgatctggacgccggcatttgccggctactccgatgccgcgctgctcaacccgatagccggcaacggcagtgcggacgggaatccggccgtcattggcggattgcctctgttctacttcggccccgatagcgctgcgagcctggcgcgcgatctgcaaccggcgcgtttctatgcgttgacaggagatatcgtcgggctcaatagcggtgcgcagattcgtttcggcgagcaggcggggaaccgcgccgggcaaacctggtatgaaggcgccggtcccgtctggatgcgcgccgggcgcgacatcgttgcctccggaaccccattgggacagcgtatcagcgctcccagtcagatcagtacggatgcctcgttcaccggcaacctcttcgtccacgacgaccccaacgacctctcgctggtccaggccggccgcgacatcctctacggcaacttcaacgtcgccggccccggtaccctggagatcagcgccgggcgcaacattctcatggaggatcgcgcggcgatcaccagtctcggcgcggtggtgccgggcgacagccggccgggtgccgatatcgtgctccaggccggcgcggcgggggccgactatcaggccttcctcgagcgctacctggatccggccaacctggcgcagggcggcaccccgctggccgagcagccgggcaaggtggtcaggacctacgaaagcgagttggccaagtggttgaacgagcgcttcggcttcgccggcgacgcggaacaggcccaggcgttcttcgccggcctgcccgccgagcagcagcggatcttcgcccgccaggtgtacttcgccgaactcagggccggcggccgcgagtacaacgaagtcggcggggtacgccagggtagctacctgcgcgggcgcaacgcgatcgccgcgctgttccccgagcgcgatccggcgggcaatccgatcagctacgaaggcgatatcgtcatgtatggcggtgccggcgtgcacaccgacttcggcggcgacatccagttgctcagccccggcgggcgccaggtgttcggtatcgagggcgaggcgccgccgtccaccgcaggcatcgtcacccagggccagggcaatatccaggcctattcgcgggacagcatcctgctcggccagagccgcatcatgaccaccttcggcggcagcatattggcctggtcggcggaaggcgacatcaacgccggtcgcggttcccagaccaccgtggtctacaccccgccgcggcgcatctacgacgcctggggcaacgtcagcctgtcgccacaggtgcccagcaccggcgccggtatcgccaccctcaacccgattcccgaagtggcaccgggcgacatcgacctgatcgccccgctcggcaccatcgatgccggcgaggcgggcatccgggtttccggcaacgtcaacgtggcggcgctgcaggtggtcaacgcggcgaacatccagacccagggccagtccagcggcattccgctggtggcttcggtgaataccggggcgttgacctccgccagcgccgcggcgagttccgcgacccaggcggcggaggacgtcagtcgccagcagcaggccgccgcgcggcagcgcatgccgtcggtgatcacggtgcaggtgctcgggttcggcaacgagcgcctggagccttcgcgcgacggcgccagtcgttcgccgggctacaacccggacagcgccgtgcaggtgctcggagccggagccctcggcgaacaggcgcgcagccaattgaccgatgaagagcgcggcaacctgatcctgtaa

SEQ ID NO: 337626 - DNA, 219 bp, Pseudomonas aeruginosa
atgaagcaggtacagctcgccggcatcggtgggacgcacgctcctgccggagcggtcgagcaattgcacgcgcagttgctcttccagttgccgcacctgctgcgacagggtcggctgcgaaacgtgcagcgcctcggcggcgcgggtgaagttgcgatgctcggcgacagcgagcaggtagcgcaggtggcgaagcagcatggaaacatccaactatag

SEQ ID NO: 337627 - DNA, 882 bp, Pseudomonas aeruginosa; identical to SEQ ID NO: 322350

SEQ ID NO: 337628 - DNA, 918 bp, Pseudomonas aeruginosa
atgctccatcagcatgctgctggcgcgggtgccgagcaggccgatggagccggtcacgtacggcaggtcgtcggaaaccgccgccttgcccaggagcgccttggccactccggcggccaggcgctcggcgaccgcttccagttgccggtgcgcgcccagggccccggcaccggcgaggatcgccacgcgccggccgcgattgaggatcgccgcggcggcttccaggtcggcgtcgcgcgcgtagggtcgcggctggacgaagcccaccgccgacatcacgtggccgtgctcgtggggctggcgcttcggggccgccatctgttgcacgtcgttgggcacgatcaccgtcgccacctgccgctcgccgaccgccacgcgcagggctcggtccagcacatggagcagttgtgccgggctgaccacggtctcgacataggcggaaacgtccttgaacaagctctgcagatcgacttcctgctggtagtcgctgcccaacgcggtagccgcctgctggccgacgatggccagcaccggctgatgatccatgcgcgcgtcgtagagcccgttcagcaggtggatcgcgcccggccccgaggtggccaggcacaccccgacctctccggtaaacttggcgtgggcgccggccatgaaggccgccatctcctcgtggcgcacgcggatatagtcgaatgcctcggcgcgccggcccatggcgcccatgatcccgttgatgccatcgccggggtagccgaagacgcgcttcaccccccactggctcaagcgttcgagcaattgatcggcaaccgtgctggacattctcgcctcctggtcgtgtctggggtcgtaccagtgaggactggcgccgcgggcgagggttcaaggcaatcgagcggcggtgccgacggcgaaatcgactga

SEQ ID NO: 337629 - DNA, 492 bp, Pseudomonas aeruginosa
atgagcagtcgccgagagctgttccgccgcctcggcgggcacccgccgacgcgtcgcccgccgtggaccgccgccgacttcgccgcaggctgcacaggctgcgccgcctgcgtcgaggcctgcccggaaggcgtgctgaagctcggcgccggtcggctcgtcgaactcgacctctccagcgccggctgcacgctgtgcggggaatgcgccagccgctgcgaggccggcctgttcgatggcgcgcgcccggccttcccctggatcgccacgatcggcgaagcctgcctggccctggccgggatccactgccgcagttgccaggacgcctgcgaacccgccgcgatccgcttccgcccggcccccggcggcgtcgccctggccgagctggacagccagcgctgcaacggctgcggcgcctgcctggcgccctgtccgagccaggccatccaactgcgcgcgctatccaccaaggagtctccacgacatgcctga

SEQ ID NO: 337630 - DNA, 885 bp, Pseudomonas aeruginosa
gtgaacggcgcgcaactgctggtgctgttcagcggcgtgctagctttcgccgcgctggccctggcgttcatgggctggcgcgccgggcgcaacgaactggtggttgaacggctgctgggacgccaggaggcggtcgcggtgcggccgcgcagcagtcactggctggctcgccagatgcgtcgcgccggtatccagcgcccgcgcccgtggttgttcggggcggcagtgctcgcgctgctgctggtctggagcggattgggcctgttcggcaccatcggcgcgctaggcggcctgctactggcggcgctgtcctgccgcgtcgccctgggcatgctctaccagcgccgcctgaagcgaatgatccggcagatgccgcgtttcctcgaccaggtggtgcgcagcctgcacgccgggcgcacgctgggcgacgcgctgatgcaggcagtggagaatgccgaggagccgctgcgcgacatcttcaccctggcgcgcaaccacgtgcttctcggcatccacctgccggaggcgttgcaggaagtcgccgaactctacgaggttgaggagctgcgcatcctcgccctgggcgtctcggtcaaccaccgttatggcggcaataccagcgacctgctggacagcatcgtcaagctcatccacgagcgcgagaagctcagccggcagttgcacgcgatgaccggcgagacacggatcagcgcctatgtcctggccggcgtgccgagcgccctgggcggctacatcctggcgagcaacccgggctatctgctgaacatgtgggccgacggcaccgggcgtttcctgctgctggcctcgctcgggctgcaactgctcggctgctatgcgctgtggcgcatgctcaagagcgtctag

SEQ ID NO: 337631 - DNA, 1185 bp, Pseudomonas aeruginosa; identical to SEQ ID NO: 322878

SEQ ID NO: 337632 - DNA, 1251 bp, Pseudomonas aeruginosa
atgcatcggagcaccgggataggcgtgtcgcgctggctgggagggctgctgggggtggcgttggcgctgccggcactggctttgccgcagggctgcatcgagttgctggcgcaggcgccgcgggtcgacgtcgtccagggacaacagcgtgacctgcgcctggcggtgccgatcgagcggctggccatcggcgatccgaagatcgccgacgtacagttgctggatcgtcgcggcttcctggtcaccggcaaggaacagggctccaccagcctgctgatctggaccggctgcagtcccgagccgttgcgcagcctggtggaggtcgagggacgcggtagcgtcgatacccgcggtgctccagcgttcaccgtcggcgccgtggaggagctgccgaaccaggtgcagaccgatatccgcttcgtcgaggtcagccgcagcaagctgaagcaggccagcacctcgttcgtccgccgcggcggtaacctctgggtgctcggtgcgccgggcagcctcggcgatatcaaggtcaatgccgacggcagcggcctgggcggcaccttcggcaccggcagctcgggattcaacctgatcttcggcggcggcaagtggttgagcttcatgaatgccctggagggcagcggcttcgcctataccctggcgcgcccgagcctggtggcgatgagcgggcagagcgcgtcgttcctcgccggcggcgagtttccgatcccggtgccgaacggcaccaacgacaacgtcaccatcgaatacaaggagttcggcatccgcctgaccctcaccccgacggtgatgaacaaccgccgcatcgctctcaaggtggcgccggaggtcagcgaactggactacagcgccggcatccagagcggcggggtggcggtgccggcactgcgcgtccggcgcaccgacaccagcgtgatgctggccgacggcgagagcttcgtgatcagcgggctgaccagcagcaactcggtgagcaacgtcgacaagtttccctggctgggcgacatcccgatcctcggtgcgttcttccgctcaaccaagctggacaaggacgaccgcgagctgctgatgatcgtcaccccgcacctggtccagccgctggccgccgacgcacagttgccggacctgcccggcgagggcctgcggcactacgatccggggttctcgcgcctgtacttcctcgagcgcggcgagtacgacggccagcagaacgacaccggtctgtcggattag

SEQ ID NO: 337633 - DNA, 231 bp, Pseudomonas aeruginosa; identical to SEQ ID NO: 330063

SEQ ID NO: 337634 - DNA, 711 bp, Pseudomonas aeruginosa
gtgggcagcatctacctgattcgacatggccaggcgtcgttcggtgccgacgactacgacgtgctgtcgccgaccggcatccgccaggcggaaatcctcggcgaccacctgctgaacctcggcgtccgtttcgaccgcgtcctcagcggcggcttgcgccgccagcagcacaccgcccgcgccgccctcgaacgcctggagtcctccgggctggccacgccggagctggaagtcgatccggcgttcaacgaattcgaagccgacgcggtgatccgcgcgcacctgccggacctgctcgatgagcagccggaagccttgcacatccttcgccatgcggccgagcatcgggccgagttccagcgcctgttctccaccatcatcgcgcgctgggtttccggcaaccatgagaaagatgggctggaaagctggcaggaattcctcgataaggtccatgacggtcttcgtcgtctgctggcgcaggccagcggcaaggacagggtcgccgtgttcacctccggcggtaccattaccgccctgctccagctgatcgtcggcgttccgccgctcaaggccttcgagctgaactggcagatcgtcaatacctcgctgactcgcctgaaattccgcggcgaggaagtgtccctggcttccttcaacagtcacgtgcacctggaactgttgaaggcgccggaactcatcacctatcgatga

SEQ ID NO: 337635 - DNA, 285 bp, Pseudomonas aeruginosa
atgaaaagcaagttcaacgccagcgcggccgccggcctggatctggtgttccagttcaacatcgaagacggcgacaaccactacctggtcgttaaggatggtacctgcgaagtggtacagggcgacgccgagaaccccaacgtcaccctgatcatggacagcgaaaccctgaagggcatcaccagcggcgagaccgacggcatgcaggccttcatggccggcaagctgcgcgccgaaggcgacatgatgctggcgatgaagctgggcgaactgttcccggtctga

SEQ ID NO: 337636 - DNA, 1830 bp, Pseudomonas aeruginosa
atgcgtcgcctctccttcctgatcctcggcctggccgtgagcctgcccagcttcgccgcgattacccagagccatggttatgcccaattcggcacgctcaagtatccggccaatttccagcacttcgactggaccaatcccgacgcccccaaaggcggcaccttgcgcctgatggcctcgggcagcttcgacacgctcaacccctacaccctgaaaggcaccagcccgatcggcaccggcgatttcctccagtacggcgtcaatgagctgaacgaaccattgatggtgggcaccggcctgtacgacccgtccggcgacgaaccagcctccagctatggcctgatcgcgaagagcgtggaatacgcggaaaaccgcagctgggtggtattcaacctgcggccggaagcacgcttccacgacggcaggccgatcaccgccagcgacgtggccttttcctatcgcaccctggtcaagcaggggcacccgatgtaccgcacctacctgcaggaggtgaagcgggtcgatatcctcacctcccaccgggtgcgtttcgtcctgcggcgctccggcaacccgctgctgatcctgcgcctgggcgagcttccggtgctgccgcagcattactggaaggatcgcgacttccgcgccaccaccttcaccgcgccgctgggcagcggtccctatcgcatcgtcgaggtcgatcccgggcgccgcctggtgttcgaacgcgtgaagggctggtggggcgaaaaactgccggtgaaccgcggcaaatacaatttcgaccgggtcgtggtggacttctaccgggacaacggcgtcgccttcgaagccttcaaggccggcgagttcgacttctacatcgagcaccaggcgaagaactggctgaacaactatcgcttccccgcggttctgcgcggcgatgtgatccgcacggaaatcccgcaccagatccccagccagacccaggcgttgttcatgaacacccgtcgcgccgtgttcaaggagcgcgcgctacgccaggcgctgggcgagatgttcgacttcgaatggaccaatcgcgccctcttcagcaattcctacctgcgctcgcgcagctactacccgaacagcgaattcgccgccagcggcgtcccggagggccaggaatggctgtacctgtcgccgtaccgcaagcaattgccggcgcagttgttcaaacagccgttcagcctgccgaccaccgaggggcgcggcattccccgtgaaaccctcaggcatgcactcggtctactggccgatgccggctggaagctgtccggcgaccgactgctgaataaaaagggcgaaccgctgcgcttcgaaatcctgctggtcaatccgagcctggagcgtattctccagccctatcgcgaaaacctcgccagcatcggcatcgacgcgcgcctgcgcaccgtcgaccgcgcccaatacaagcagcgcctggaccagttcgactacgacatgatcctcatgaccctgccgcagaccctcagtcccggcctggaacagtggcagtacttccactccagccaggtgaaggtcaagggcagcaagaattacgcgggaatcgccaacccggtggtcgacgccatgctcaaccgcctgcgaggcgcccacagccgcgacgaacaggtcgccgccgcgcgcgccctggaccggaccttgctctggcagtactacagcattcccaactggtacctcaattcgcaccgtctggcgtaccgcaaccgcttcgccttcgtcgccaccccgccctacaccctgggcctgcgcgcgtggtggcagaaaaacctggagacgtcccgatga

SEQ ID NO: 337637 - DNA, 657 bp, Pseudomonas aeruginosa
atgcaccgttcaccgctcgcctggctccgcctgctcctcgccgccgtgctcggcgccttcctgctcggcggcccgctgcatgccgccgagactgccgccacgcgttcgccagcctgggcgcaagcggtcgacccgtcgatcaacctctaccgcatgagccccaccctctatcgcagcgcgctgcccaacgcacagagcgtcgcgctgctgcaacgcctgcaggtgaagacggtggtcagcttcatcaaggacgacgaccgcgcctggctgggccaggctccggtgcgggtgctcagcctgccaacccacgccgaccgggtcgacgacgccgaggtgctcagcgtcctccgccagttgcaggccgccgagcgcgaaggcccggtactgatgcactgcaagcacggcaacaaccgcaccggactgttcgccgccatgtaccgcatcgtcgtgcagggctggaacaagcaggccgcgctggaggaaatgcagcacggcggtttcggcgacgaggacgacatgcgcgacgccagcgcctatgtgcgcggcgccgacgtcgacggcctgcgcctggcgatggccaacggcgaatgcagcccgtcgcgcttcgccgtctgccatgtgcgcgagtggatggcccaggcgctcgaccggccgtaa

SEQ ID NO: 337638 - DNA, 681 bp, Pseudomonas aeruginosa
gtgcgctggcgcgccgacggttgcctggagttcctcgggcggatcgacgaacaggtgaagatcaacggctaccgcatcgaactgggcgagatccgcagcgcgctgctggaacacccagcggtgggcgaggcggcggtactcaccgacgaggccgatgcggccgagccgggcgcggatcgccggatcgtcgccttcgtcaccgccgccggggagaccgcggacgagtcctggctggaagtcgacctgcccagcgggcaccgggtcgccggactgaacctcaacgaaaccgagtacgtctaccaggaaatcttcgtcgacgaggtctacagccgcgacggcatcgtcctgccgccggacgcggtggtcctcgacgtcggtgccaacatcggcctgttctcgctgtacatcgccagccgcgcgccgcgcgcgcgagtggtcgccttcgagccgctggcaccgatccgccggcgcctggaggccaacctcggacgctacgcaccgcaggtcgaggtattcggcatcggcctgtccgacgccgagcgcgaggaaaccttcacctactatccgggctactcgaccttctccgggatcgccgagtacgccgacgccagcggcgaacgcgacgtcatccgacgctacctgagcaaccagggagaggagggcgggccaacctgctgctga

SEQ ID NO: 337639 - DNA, 564 bp, Pseudomonas aeruginosa
atgtctcgcgtcatacgctttcatcgcaccggtggaccggaggttctccagatcgacgagatcgacgtgccggctcccggcgcgaacgaggttcaaatcaacgtcagggcgctcggcatcaaccgggctgaagtgatgtaccgcacaggccagtacgtcatcgaaccgacgtttcccgccatgctgggctatgaagcggctgggaccgtatctgcagtgggtcccggtgtggtcggcttcgctgttggcgatgcggtcagcgtagtgcccgcgttctcctttgacgaatacggcttgtacggtgaattggtcaacgcgccggctcacgcggtggtcaaacacccggaagcgctttctttcacggaagcagcggcgacctggatgaagtttgtcactgcctatggcgcactgatcgagcttggtgggctgcaggccggcgagacggtgctaatccgtgcggcgtccagcagcgtggggcttgccgctatccagattgcgaacatggtgggcgccgttcctgtcgcgctgacccgcaccagcgacaagcgcgaggccttactttag

SEQ ID NO: 337640 - DNA, 3264 bp, Pseudomonas aeruginosa
  misc_feature (1656)..(1665): n is a, c, g, or t
atgagcaacttcgccgaactgggcatcaaggtcgattcgagcccggccgccaaggcggccgaggacctcgacaagctggtcgactccgccgaccaggccgaacaggccatcgacaacctgtccgacgccagcaagggcctcgagcaggccaccaagggagtatcgcgcgcggaggaggacgctgcccgcagtgtcgacaaggcggccggtgcgcgtgaacgccaggctgctgccagccggaaggtatacgacagtgccgctggcgagatatccatcatcagccagttggaacgggcgctctccggcaacgtcgccaacatcgatgatctgattcgcgccgagagcttgctcgagcgggcgcgcaaggccggcctgaccacgctgcaggacgaggcgcaatatcaggatcgcctgggtgcggcctatgaccggttgcagaaggcggaaaccaaggaggccgccgagaagcagcgcctggttgcggcgcagaagcgtcagatcgaagcgatgcaacacacggtcaacagcatcgatccggtgaccgctgcgttggccaggcttgagaagcaggaggccgcgttgcgtgggctgcgcgccgccggcgggctggatgacgccggattggccgccggcctggagaagatcgcggcgaagcggcgggacatcgaagggaccggcggcgcgatcaacaagctcgggctgaccagcaaggaagcgcgcgagaacgtgctgcagttgggtaacgccctctccaccggtaactggcgggtcgccgcccacaacatcgccgagatcggtgtgaacgccggcggcgccgcgcgcggtgttatcggcgtcctggccccgattgggctgctggcagcggcgatcggtggcttgagcgtcgcttatcttgctggaaagcgccaagctgatgatttcaacaaggcgatcatcagcactggcaatgcctctggactgacagctcagcaactgaccgacatgctcggccgacttggcaaaagcggaaacttctcagaggcatctgaggctcttctggcgctggttcggtcagggcggcaagtaggaggcgctttcgaggatgtcgcgcgcgcggctacggagatgtctgccgtaaccgggcggagcgctggggacatcgcaactgaactggcgggtgccaagggtaaggttgcggacttggcggctgaatacaaccgccagtaccacttcatgaacgtcgacaccttcgctcaaatcgaagctctggagcggcagggacgttcaatggatgccctgaagctgcttgcagggacgctggcctcggagatgagcgctcgaaaccgagagattgaggcgtcgacccgcggaatcgtaaaagcctgggacgatgcgacgaaagctgtaaaacggtattggcaggaacttaaaagccggaccgctgcagaccctgagacattcaagcttcaggttttgcagggccaactggaggactcacggaagctcccggattccacgctgaaccggaagaacattgagttcctcgaaaaagagattgccttgcttcagaagcggatcagcgtccgtgaggaggggcgacgggctcaggcagaaggtcaagaggaccaagatagcttcatccaggcgatacgttatcaagctgagcattcaggtccnnnnnnnnnnagcaaggacctgaatgctcagcttgataacgtatcgcctgcgaagaagcgggcagcagccattcgcgagctcaatgcgcagtttcttgagctgctgaaatcatcggaacggcttggtaagaggagccctctgctcgagggggttcagtacgatgggcgttctttctctggcggtgcgtacgaccaactgcgcaaggggattgaggagcgcctgaaggaccagaagggctccgccggttcggtggacctacgcgcggccaacgccgcgaagaacagcttggccgagatcaccgcgacctaccgtaacgcgcaaaaggaattggaggcatcccaacgcgcaggcgtgatcagcgcggaaagctacgcgcagcagcgcatctcgatcatccagcaggagcgggatgaggtcacccatgcctacgagcgtgaaatcgcagcgctggaggctgccagggcgaagcaaggaacgtcggcagcccagcgaatccaactcgaccagaagatcgccgacgccaggtcggccatggtcaaggcgcagaaggacgcggacacggaattggctattctggctgcgaacgaggatggcaggctcgcccggcagaaggccgccactaaggcctatgtcgatcaattggagcggcagcgggctgcgcttgcggcagccgggattcgagcggcgaactcccttgggcttggtgatcgccaggctgggcttcagagcagtctggatggcgcaacggaccgcttcaatgacgagcgcgccaaactgctggaccgccgccgcacagcgccggacaagtactcgcaggaagactacaaacgtgacttggtgatcttggcggaagccgaagacaagtaccgggatacggtgatctcgaactacgacaagataaccaaggcccaaggggattggcgcagcggtgcttcctctgccttccagacctatctggagagtgctcgggacgtggcgggtcaaaccaagagcctgttcaccagcgcgttcagcagcatggaggactcaatcgccaacttcgccacgaccggcaagttgtcgttctccgacttcgccaagagcatcctggccgacatggcgcggattgcaacgcgcgccgctgcctcgcaggccctttcgtccctcttcggcggattcttcggcggtggaaacgctgccgcgcagtctggtgtcgacaacctggtgagcaacagcgggctgttcgccaacggtggtgcgttcgccggcggcgtgcagatgttcgccactggcggggccttcaccaacagcgtggtcagcacgccaactgcgttcggcatgagcggcggccgtatgggtgtgatgggcgaagcggggccagaggccgtgatgccgctgaccagaacctcgtccggggccctcggtgtgcgcgctatgggcggcggtggttcgcaaatcaacgtcgaggtgaacattgcctcggatggttcggccaacgtctccagcagccagcctggcctggaccagttcggtcgcgacatcgggacgttcgtcgagcagaagtaccgacaactcctggcgcgtgatctgcggcgtgacggtgcgatcggccgcgccatcaacgggtag

SEQ ID NO: 337641 - DNA, 162 bp, Pseudomonas aeruginosa
atgaggagaacgtacttggattttagcaagatcattcgcgaggtgcgaatcatgactgacaaactgtcgccgccgcgcttttgggcgctttggttggttttcttcgtgattgctgttggctacctgtccagcaatcttccgtgggacaggctgctcggttga

SEQ ID NO: 337642 - DNA, 1449 bp, Pseudomonas aeruginosa
atgaacggacacgccagacactggatcgacggcgcatggctcgattccgcgcagcggggacaatccttcgacccggccagcggccagccgatcggcacctacgccgacggcgggcgggccgaggccgatgcggcgatcgccgccgctgtgcgcgccttcgaagatggtccctggaaggacgaccacgcgctgcgcgcgacagccctggaggaaatcgccgcggccttcgagcggcatgccgatgcgctgatcgacctgcttgccctggagaacggcaagatcaagcccgaggctgccttcgaggtcggcatggtgccgggcaagctgcgctactacgccggcctggcgcgcagcgaacggggcgccagcggcacgccgcgccccgacgtggtgtcgctggtgctgcgcgagccgatgggcgtcgccggcatcatcgtgccgtggaattcaccggtggtgctgatgatccgctccttggcgccggcgctggccgccggtaccaccacggtggtgaagatgccggggcagaccgcgcagaccaacgccatggtcgcgcggatcatcgccgaagcgccgtcgctgcctgccggggcggtgaacatcttcagcgaatcgggttccgaaggcgcccggcgattgatcgacgcggccgaggtgccggtgatcagcttcaccggctcgagcgccaccggccgagcgatttccgccgccggcgcgcggcacctgaagcgcttcggcctggaactgggcggcaagacaccgcacctggtgttcgacgacgccgacctggacgccgccttgcccgtgctggagaagtcgctgacggtgttcgccgggcagttctgcatgaccggttcgcgcctgctggtgcagcgcggcgttgccgaacggctacgcgaacgcctggcgcagcgcctggaaaacctgcgcgtggggccggcggcggacccgcgcagcgacatggggccgttgatcgacaaggccaacgtcgagcgcgtcgagcgagccgtacgccaggccatcgccgccggcgcgcgggtggtggtccgcggcggcccggtaaccgagggcgagctggcggccggcgccttctaccgtccgaccctgctggaggtcgatgatccggacctggacatcgtgcaacaggaaaccttcggaccggtgctgaccctgcaggtattcgagcacgaggaggagggcgtcgccctggccaaccgcagcgagtacgggctggcggccggggtctggacccgcgatgtcgcgcgtgccttccgggtggcgcggaagattcgcgccggcaccgtgtggatcaacgactgggccaaggtctacgacgaattcgaggagggcggctaccgccagtccggcctcggccggctgaacggggtcgccgccctggacgacttcgtcgaatacaagcacatcagcctgaccaccggcgcggcctga

SEQ ID NO: 337643 - DNA, 1227 bp, Pseudomonas aeruginosa
atggcaggcaagcattaccaggatgccgatgtgcatgccgcaaccctatcccgcctccgactggtattccggaacttcgagcgcgtctgtgtcgccttctccggtggcaaggacagctcggtcaccctgcaattggcgctggacgtggcacgcgagttgggacgcagcccggtggacgtactgttcatcgacctggaggggcagtaccaggccaccatcgatcacgtcagcgagatgctcgggcgtcccgacgtacgcccctggtgggtctgcctgccactcaacctgcgcaacgcctccagcctggaggaaccctactggtgctgctgggagcccggcgccgaggccgactgggtgcgcccgctaccgaagcagcgaggggtgatcagcgacccggcgttcttccccttctaccgctaccgcatggagttcgaggagttcgtcgccggcttcaacgcctggctggccagggaagagcctaccgcgttcctggtcggcatccgttcggacgaatcgctcaatcgctacctggcggtcaagcgcaggagtcgggcgaaacaatgcgcctggacgccgccgggcggctccgcgccgctggcctggagcgcgcgcgaccgggccaacccgcaggcggtgagcttcttcccgatctacgactggcgtttcgaggatctctggcgttgcgtcgccgaccacggctacgcctataaccgcctctacgaccagatgtaccgcgccggcgtgccgttctcgcagatgcgcatctgccagccctatggcgacgaccagcgcaagggcctcgacctgttccaccggatcgagccacgcacctggttcaaggtagtccggcgcgtcgccggcgccaactatggggcgcgctattgtcgccagcgcttcctcggctaccgtggcggccttggcctgccgccctccttcggcacctggcgcgagtacagccagttcctcctgcgcagcatgccgccgcctctgcgcggcatctaccagcggcgcatcgagcgtttcatcctctggtggaagcagcacgactatccccttgccatctggccggacgcggggatcccggccctggagaatcgtcgcaagcagccgtcctggcggcgtatcgcgctatccctgctgaagcaggacatggcccgctcgctgtccttcggcttctcccaggccgatatcgacagactggtccccggtcgggagaagcgctcgtga

SEQ ID NO: 337644 - DNA, 351 bp, Pseudomonas aeruginosa
atgcgatgcgttcccgttctgccggtatcgctgctggccgtgctgctgaccgcttgcggccagtcgtccgagcagcaaagggccgaagacctggccgccaccttggccgccgatcccgtgcggctcaaggcgctgcgcgcccgatgcgccgccgaccggcaagccgcaggcgaagacacctgccgcgccgccgccgaagccttccggcggcggttcttcgccggccagaccgggccggacgaataccggacgctggccgaactgccaccgattccgcccagcttcgacacgcccgccgatgacgcgccggaaggcgatgcgccgctcaccgctgcggagaacacgccatga

SEQ ID NO: 337645 - DNA, 156 bp, Pseudomonas aeruginosa
atggtcaccaccgaggcgaggatcagcagcagcgtgttcgacagcgaggcctcgaaggccagcgccgcgccgcggaagctgccctgcatgctcagcggcagctccaggctggcctcgacgccacggatcgcctcgaccgcctcgcccagggagtaa

SEQ ID NO: 337646 - DNA, 291 bp, Pseudomonas aeruginosa
atgacccgccccgcggcgcgcgcgaagcggccctgctggtcctcgtcgatgtggcgcagcagcttggcgctgagcatcggcgtaagggtcagggagacgaagccggaaatcaggatcgccaccgccagggtgatggcgaactcgcggaacagccgcccggcgacgtcgcccatgaacagcagcgggatcagcacggcgatcagcgagaaggtcagcgagatgatggtgaagccgatctgcttcgagcccttgagcgccgcttccagcggcgagtcgccctgctccaggtag

SEQ ID NO: 337647 - DNA, 162 bp, Pseudomonas aeruginosa
atgttctccaccatgacgatcgcgtcgtcgaccacgaagccggtggcgatggtcagcgccatcagggtcaggttgttgatcgagaagccggacaggtacatcacgccgaaggtaccgatcagcgacagcggcacggcgaagctgggaatcagggtggcgtag

SEQ ID NO: 337648 - DNA, 1434 bp, Pseudomonas aeruginosa
atgatcgacccgttgaaacaccgcttcgcggcgctccgcagtcgcgccgaattccactccttgcgctacgtccagcgtagcggcgagtacctctcggtgcgccgcaacgtcagcgaaccgccgcacttcagccaggaccgcggcgccatgctctgcgtacggctgaacggcgtggaagcctacgccgccaccaacgatctctccgcggccggcctgcaggccgccctggagcaggccgaacggcaagccgagcggatcgcccggcacgccctgttcgacgtccgcggattgccgccggcaagcggccgctcgcagtatcgctcgccgaaccaggacgcccctttcccctccctcgccgagtgctacgaactgctcgccgaggaatccgccaaggtgccgcgcgacgagcgtctggtgaactggagcgtattcctcgaagtcagccgccaggaacagctctacctgaacagcgccggcgccgagcaataccacgagcagcgcttcgtctatcccggcgccagcgtcaccgcctacgacggccatgacagccagacccgcagtttcggcggccaccatgccggccagcagggcggcgccgaagtgatcgagcgcctcggcctggtcggcgccgcgccgcgcatcgccgaccaggccctgcaactgctggcggcgccgaacaccccgagcggccgctgcgacctgctgctgatgccggaccagatgatcctgcagatccacgagtcgatcggccacccgctggagctggatcgcatcctcggcgacgagcgcaactacgccggtaccagcttcatcaagaccgaggacttcggtcgctaccagtacggctccagcctgctcaacgtcagcttcgacccggaaatccccgaggagctggccagctaccgccaggacgacgacggcagccccgcgcgcaaggaatacctgatccgcgaaggccgcctgctgcgtccgctcggcggcgccctgtcgcaacaccgcagcggcctggagggcgtcgccagcagccgcgccagcagttggaaccgcgcgcccatcgaccgcatggccaatctcaacctggagcccggcgacaagagcttcgcgcagctggtggccggtatcgagcgcggggtgctgatgtcctacaaccgctcctggtcgatcgacgacgcacgcaacaagttccagttcggctgcgaatggggccagttgatcgaggacggcgaactcaagggcgtggtgaagaaccccaactaccggggcatctccgcgcagttctggcgcaacctcagcgcggtgggcgacgccggcaccttcgaggtgctcggcacgccctactgcggcaagggcgagccgaaccaggtgatccgtgtcggccacgcctcgccggcctgcgtattcagcgatgtggacgtattcgggggagatacctga

SEQ ID NO: 337649 - DNA, 342 bp, Pseudomonas aeruginosa
atgggtgtccgagtcagcgtggaatccgcaagcaaagcattggattacagcctcaaacgctggacggcgctgtcgcgctatctcgatgacggcgccgtacccattgacaataattgggcagagaaccagatccggacatgggcgttggggcgcaagaactggctctttgcaggttcactgcgcagcggtaaacgggcagcggcgatcatgagtttgatccagtcagctcgactcaacgggcatgacccgtacgcctatttgaaggacgtcctcacgcgcccgccgacgcagcgggcaagtgagattacggagctgctgccgcataggtggcgactggtttag

SEQ ID NO: 337650 - DNA, 1980 bp, Pseudomonas aeruginosa
atgcgccccgacaagaaaaccgtcactgaactgtttaatgaccggcagcagtatctgatccccctctttcagcggggttatgtgtggtcgctgaacgagcaggtgcagccgctgtgggaggacctgatcgaccgcctggaggccatcgtccagcatcgggccgatgctcaagcggtgggggcgggtaagctcaggccgctgcgccggcactttctcggtaccgtggtgattggcagcctcaagggcggcagcagtgatgcggtgggcaaccgcgatgtgatcgacggtcagcaacgcatcaccaccctgcagattctgttgttggcgtttcgcgacctggtggcaccgctgggtgacgatgcgctgagctatgacctcaagccgctgacacagaatatcggcaagtaccgtcaggccagcgacacgctcaaggtgctgccgaccaatgtcggccgcgatgtgatgcaggccctggccgagctgggtagcgtcgagaagatctgcgagcgcttcccggccaaggtcggccggcagcatcaggagcgcccggcgatggtgcgtgcctacctgttcttccatgccatggtggcctgccacctgcgcggcttgcgctacgacgacccgctgccgggggccgcggctgacgatgacacccgagtagtggatgtggtgatgaactccatcgattcggacaaccagctaaaactgcctggcgccgagttgccgctcgacgccgagcgtgggcacacgctccttgccgccctgcgcgagggcttccagatcatgtcgctggagctggaggacgaggacgatccgcagatcatcttcgaaaccctcaatgcccgtggtgcgccgctgctgccgagcgacctgattcgtaacttcatcttcctccacgccacccgtaacggcgaggacgtggatgaactgtatcgccagggctggcagcatttcgacgagacggtggataccagtaatggcaagggcgccaagttctggaagcagcaggagcgccagggccgtctgaaaaactcgcgcctggacctgctgctgtaccactacgtgggcatgcgcaagtgcgaggacctgaaggtcgcccatgtgttcaacgagttcaaggactggtggcaggacgagccgcgcgatacgcagcaggagcttgcacgcatcagccatctggctgggtatttccagaccttcctgatgccggggcaggcgagccgcttcgatctgttctgccggcgcttgaagctgctggatgtgtccacggtgacgccgctagtgctgtacctgctggagcaccataaaccggattctgccgagttcctgcaggccatcggtgaccttgagtcttacctggtgcgccgctttatctgtggctacaccaccaagagctacaaccgcaccttcctcaaccgcctgctggcggagatggtgcgcgagcagaagaccgatgccgcgaccctgcgcgaaaagctgctgtccctgcagggcgacagccagtgctggccggatgacgagaccttcgcccgcgactggtgccaccgtcgcctctatcagggccgcaataccggcaaggtgcgcgcggtgctcgaggcgctggagctttcaatgcgcggtagcaaacaggagagcctggtgctgcccgatggcctgacggtggagcacgtattgccgcagcagtggcagacccactggccgctggccgaggccacaccggagaaccaggaaaggcgcggccgcctgctgcacagcatcggcaacctcacgctggtgacccaggccttcaactccgccctgagcaacgaaccctttgccgtgaagcggcaggagatcgtgaccaccagcctgctgatgctcaacacccacttccagcgctatgacgacaacgatgcctgggatgaggacgagatcgtgtcgcgggcggacagcctgtttgcctatgcgctgaagatttggccactgccgaagacacactga

SEQ ID NO: 337651 - DNA, 1575 bp, Pseudomonas aeruginosa
  misc_feature (1502)..(1511): n is a, c, g, or t
atgaccgcgttgctcacggataacctgccactgctggcgggcgcgcccaatggcatcaagaagctgcgcgagctgattctggaactggcggtgcgcggcaagttggtgccacaagacacgaatgatgagccagccagtgagttgctaaagcggattgctgaggaaaaggcacggtcagtggccgcgggaaaaaaggtcaagcagcaggctgacataaatgataaggagcaaccattctccgtgccccagggctggagctgggtgcgacttggaagttgcctagagatgatcaatggacgcgcattcaagcccacagaatggataggtgcgggccttcctattgtcaggatacaaaacctgaataaaccagatgctccgtttaactattgcgacccagatactgtcgatgatcgccatatcatcgacacagggacaatactcatcagttggtcaggcacacctgggacttcattcggggcgttcatttgggagcgagggagagcggctttaaaccaacatattttttcttgttctcaggtaggcgatgcattcttcgacaagtttctaaagctggcaattaatactcgcctagaagagctgattgctaaagctcacggcggcgtgggacttcagcatgtgacgaaaggcaaactagaggcgcttactctcgtcttgcccccactcgccgaacaacgtcgcatcgtcgccaaagtcgatgagctgatggctctgtgcgaccggctggaagcccggcaggccgatgccgacagcgcccacgcccaactggtgcaggcgctgctggatagcctgacccaggcccgcgatgccgaggactttgcgcaaagctggcagcgcctggccgaacacttccacaccctgttcaccaccgaatctagtatcgacgccctcaagcaaaccctgctgcaactggcggtgatgggcaaactggtgccgcaagcccccagcgatgagccggccagtgagttgcttaagcggattgctgaggaaaaagcgaggttgatggctggtggacagatcaaaaagcagaagaaactcctaaaggatattggctctgcagatcagaaatttgagcttccacctggctgggaggcggccagactctctgacgttgtgaatattcttaatggtagggcttataaaaaagaagagctgctagacgttggaacgccagttctacgggtaggtaacttgttcacatccaatcattggtattactcaaatctaacgcttgaagaggataagtactgcaatcccggcgacttgctatttgcttggtctgcttcttttgggcccttcatttggcagggggagcgctcgatttatcactaccacatctggaagctcgatttttacgcgcaagaccagttcagcaagaattacctttacaactttctgctagagcaaacacaggaaatcaaggccgcagggcatggtgtatccatggttcacatgaccaaagagaaaatggaaaagctggtggnnnnnnnnnncctgacaagcacaagaatattgataaggacgtcccatgcgccccgacaagaaaaccgtcactga

SEQ ID NO: 337652 - DNA, 1062 bp, Pseudomonas aeruginosa
atgcataacgacaattccaccgagaagcgcgccgacttctatcgacgcatccgccagcagcacctcaccccgctctgggaagccctgcacagcctggtcccggcgcaacccgccggcggctgccaggcggcgctgtggcgctatcgcgaactgcgcccgttcctgctcgaggcaggcgacctgatcagcgccgaggaagcggtgcgccgcgtgctggtgctggagaacccggaccttcccggccagtcggcgatcaccccgagcctctacgccggcctgcaactgatcctgccgggcgagatcgcccccagccaccggcacacccagtcggccctgcgcttcgtcgtcgagggctacggcgcctacacctcggtggacggcgaacgcacccgcatggagccgggcgacttcatcatcaccccgtcctggacctggcacgaccacggcaaccgcgccgccgcggaaggcggcgagccggtggtctggctggacggcctggacatcccgatgctgcgtttcttcggcgccaccttcgccgaaaaccatgatgaaccggtacagccgttgcgacgtggcgaaggcgacagcctcgcccgctacggcagcaacatgctgccgctgcgccatcagccgacgacgccgacctcgccgctgttcagctacccctacgcgcgcagccgcgaggccctcgagcgcctggcgcgcctcgaacggcccgatccctgggaaggccacaagctgcgctacgtcaacccggccaccggcggctgggccatgccgaccatcgccacctgcctgcaactgctgccggccggcttcctcgggcagcccgcgcgcagcaccgacgccagcgtctattcggtggtggaaggcagcggcgtggcgcagatcggcggccggcgcttcgccttcgaggccaaggatctgttcgtcgtgccctcctgggccgagctgcgcctggaagccggcgccaccgactgcgtgctgttcagtttctccgaccgccctgtgcagcaggcgctcggcatcctccgcgaatcccgcgaaaccctcgcccactga

SEQ ID NO: 337653 - DNA, 1362 bp, Pseudomonas aeruginosa
atgaaccgcacgcttcccctgctgcccgcgctggccctcggcgtgttgctagggcttcccgccagtggccaggcgacttgctaccgggtcacctcggtaggcagcgagacgaccacctcgaacacccagatccgcccaggcgaaggtaccgccggcagctggaccggcgcctgcgacacctgcaatggctcgctcggcctgcccagcgtggtcaacgtcagcgacgagagtttccagccctatccgacgctcatcgccagcgcggtggcgccgctgacccagtacggcgccaccggcggctacgaccccgaacgggtgttcttccgctgtagcgccggggacgccgtctacgagatgttttctaccaacggcgacgatctctatagcggctactacaccggcgccgacacggtgggcaacgacatcggcctgcaggatgcctaccggaccgcctggcccaacgtgctgctgcgcctgaccaacgtcgagacgggggaaaccatcacgccgatctggaaggagcgccagctctccgggctggacatcgactcgcgcggcttccagctggtcaaggcgaagaacctcgcagcggtacgcgccgagctgtacagcgcgccgctggaggcgatccgctactactcgccgacgatcctctcgcagccctattcctacacccagccggcggcctacatcgccatcaaggggccgggcctgaccgcgccgaccgtcggccaggcgcacgtgggcggcaactggggcggctggtacagcaactggccgggtgccatcgggctgtaccgctacgtgaccctgaaacgctatcccacctgcgcggtgatgacggtcaccccgcacgtgcagttcccgtccatcaccctggccgagatcgatagcggcggcgtgcgcgaggcgcccttcgaactcaccttcaagtgccagagcggcatgaccaacggcaccggggccggcgccacggcgctgggcatccgcgtgtccagcggggccctggcggccagcccggcgctgggcctggtcaacgccagtggcggactgtcctacctgctctccgaccgttacggggagccgggcattgcccgtggggtcggcatccgcatctaccgcgacggcacgccgatgacgctcctggccaacgagaactccgccggcggcagcaacgccgaggccaccggctggtaccccgccatcggtggcgcgacccaggccaacggcggtagcggcggcatcgacctgtaccgcgaaaccttccgcgcgcgcctggagaaactcgcgctcggcagccagcccggcgtcacggcggggcgagtcgaggccacggcgcaggtggttatccgtgtccagtag

SEQ ID NO: 337654 - DNA, 285 bp, Pseudomonas aeruginosa
atgacctatcgccatgaacgccgctgccgcaccggcacggccctgatggcgggcggcatggcgctggcggcgagcgccttcggtcatgcccagcccggctacgaattcgatgatcgcctgttgctcggctcttccctgggcggcggcgacctgtcgcgcttcaaccaggacggtcggatcgatccgggtcgctatcacgtcgatgtctacctcaacgagcgcttcgccagccgcagcgaagtgagtttccgcgccaaccccgccagcggcgctggccgacgctga

SEQ ID NO: 337655 - DNA, 585 bp, Pseudomonas aeruginosa
atgtcggacttccagcgatcactgcagttccaggggcggaacctgcaacgacaatggcaggaaaaaccactcttgcgcatggccatctggagcctgtgcctgctgctggttgtgcatctggtcatgctcagcatggattggagggaggaacgaggggaggaatatcgtcgtctggccggggaatggctcaagctccaggacgtttcccggcagaccgcctggccggagcgggcgatgcaggcgaagcaggtcctgaaccttcagcgagagcgcttctggcaggcgccgaatgcgtcgcaggcgagggccgatgtgcaggcctggctgaccgagcgggttcgcctggcgggcgtccctgacgcggaagtgagcgtactgcttcctcgcggcttcgagaagcaagggacgatcgcgcgtatcgaggcccaggttcgcgggcagttgcagccagcctcgttcagtcggttgttgcaggatatagaagcggagcagcgacaagtatcggtggagtttctggaactgaacaatatgttgtcgcccatgctcaatctacagttgtcgttcctgttcgtagcggcctattga

SEQ ID NO: 337656 - DNA, 570 bp, Pseudomonas aeruginosa
atgtcgcagtcttccgtgacgattatcaaactgtccggcccgctcattcgggagttcggccgggagcaccgacgcctgctcgacaccggtactgtgcaggaagcgttcagcgctctgcgtaataccctgccgggcttcaaggaagctatccagcgcctggagcgaatgggtatgcgcttcgccatcttccgcaaccgcaagaacattggtgagggggatatgggttccggcggttcgcgagaggttcggattgttcctgtgatctcggggagcaagcgtgctggtcttctccaaactgttgttggcgctgccctgattgttgctagtttttttggcgcccctaccttgcaagtcggcgttgcccttacgctgggtggcgttgtccagatgatcagcccgcaggccaagggcctgagccagtcagccgccccggagaacctgcccagctacgccttcggcagcgcgaagaacaccaccgccagcggtaaccctgtgccgctctgctatgggtacaggcgctggggcggcgcgatcatcagcgcctcgatctacgccgaagacaagatctga

SEQ ID NO: 337657 - DNA, 969 bp, Pseudomonas aeruginosa
atgactctagcaccgcgacacctgcgcatagaacaacgaggacgcgtcctgcaagtcctgctcgacaatcccccggcgaacttcctcaccacggcggtgatgcaggagctggccgacctgctggaagaccttgagcaacgccaggacatcggcgccgtcatcctttccggagcggcggacggggtcttcctgacccacttcgacgtcgacgagatcgagcgcgccgtcgcccccatcaccttttccatgccggcctggctgacacgcctgctgctggaaagcgaaagcctcctgcgccacttgcctggggcgaggaagctgctgcggcgcaccctgctggcaggcgtcgccgacatgaacctgttccatgaggtcaccgcgcacatgcgccgcatggacaaggtgttcatcgccgcgatcaacggcctggccctgggtggcggctgcgagctggcgctggcctgtgacctgcgcctgatggccgaggacgaccaggtggaacgcttcctcggccagccggaagtactcatcggcctgataccgggaggcggcggcacccagatgctggcgcgcagcctgggcgtagccagggccctggagctgtgcctggaagggcaactgctggagccgcgccaggcccttgcgctgggcctggtcaacgggctggcgccagcggaggagctactggaagccgccgacgcgctggcgcaacgcctgtcccggcgctcaccgcaagcggtgcgcctgatcaagcgttcgatctaccaggcggcttcccgcgactggacggagggcatggccagcgaaaaggccggcttcctctccgccgcctcccagggcaatacccgccgcgccatgcgcgaatacatcgaacgggtgcgcaccatcacccgggaagagcgccctttccgccgtgcggattttgacgacctgaccgaaggcaacgccatcgacatggcctacaggtga

SEQ ID NO: 337658 - DNA, 1989 bp, Pseudomonas aeruginosa
atgatagaaattcgttccttgcgtgatctgttgcgcctgctgttcatctaccagcgcgagttcaagctggcggccctcagcgcggtggtgatcatcgtcctcggcgccttcctgctgccggccaagtacgagtccaacgcacgcctgctggtcaagccgggccgtgactcgaccctgccgatagagatcagcaaccgccaggcgctggtgatgccgagcacccagcgcgaccctatcgtcgacgaagaacgcctgctcaccggccggccgatcgtccgtcaggtggccgagcgctacctcgaggtgctggccaaccggccgccgccggagggcctgtggaagcgcaccaagttctatgtgaagaaggccatcggcgcggtgttcgacgggattcgcgtgaccctggaaaccttcggcgtgatcgaggaaaccaccgcggtcgagcgcctggccaaggacctcgagaagaaattcgaggtcacccatgcggccggctcgacggtgatggagatcagcttcacctggagcgagccggaagtcgcccaggaagtggtcaaggcctggatcgagatctacatggaagagcgcacccaggcgctcggccgcaagagcctgtacgccttctacgaggcgcagactgccgacagcgcggcgcagatcaagagctacaaggcgcagatcctcaagcacctcaacgagatcggcgcatccagcatcgaggaccgcctgcaggacctgtccgagcggatcaacgtgctgcgcggagagcgtttcaactcgatccgcctgatcgcctcctccgacagcgccctggaatccacccgccagcaactcaaggggctgcccagggagatcgtcacggtgcggcagatcgcgctgaacccggcgcagcaggacctgcgccggctgctcaaccagaagcgcctggaacgcgccgacatgatgcgcacctacaccgacgacgcgccgccggtgaaggccctggacgcctcgatccgtgccctggagaaggaagtccaggacgaaggcgccaccgtgcagagttccgaggaccgcgcgccgaacaccctgaccactcacctggaacgggtcctgctggacgagaccagcaacaacgcggccctgcgcacccagctcgcggagcaggaaaagcagctcgccgaactcgaggcgcaacggcgcgaagcgctggacatcgagccgaccctggcgcgcctgcagcgcgagctgaacgccaccgagcgcaactacgcgctgtacgtcgacagcctggagaaatcgcggatcgaccgtgaactggacaagagccagatcagcaacatctcggtgatcgaggaagccacctacaaccccgggcggatcttcccgaaaaccctgctgatgctgttcctcgccgtgcccttcggcctcgccgtcggcctgctggtggtctatctctgctacctgctcgaccagcgcatccacgacggcggcctggtcgaggagaaattcggcctgccgctgtggaccaccctgccggagctgagcaacagcaccgcggagagcagcaacgccttcaccgccagcatctaccggctgtacgggctgctgccctacgcgcgcatcgaggaaaagggcctgaccctgggcctgacctcggcgcgccacggtgaaggcgtgaccttcatcatcgagcaactgcgccgcctgctggaggaaaacggcgtgcgcgtgcggatcggcggcgaaccggcccagccgggtgaagtggtattgctcgacgcgccggccctgctggacagccgcgaggccttcatcgccctgcgccgcgccgacctgatcgccctggtggtagaggcgcagaagagcaccgtgccggtggtcgagcatgcgctgaccatcctcaccacggcgttcggcaaggtcgacgggatcatcatcaaccggcgccgcttcgaggtgccgagcaaggtcctgcagaccatcgcccgctaccggagcgcgttctga

SEQ ID NO: 337659 - DNA, 888 bp, Pseudomonas aeruginosa
atgcgtgtcgatctgcattgccacagtaccgcctccgatggcgtgctcgcgcccgccgccctggtgcagcgggcccacgagaaaggcgtcgggctgctggcgctgaccgaccacgacaccctggaaggcctgccggaagcccaccaggcggccgctcgactcggtatcgaactggtcaacggtgtcgagctgtcctgcacctggggcggtgccaccattcatgtgctgggctacggtttcgacctcgacgccgctcccctgctccaggcgaccgaagccctgcaccggggccgctgggcgcgcgccgaggaaatcgaccggcggcttgcggccaagggtatgcccggtgcgctggagggcgcgcgggcgatccagcgggccctgggcgacagcggcaacgcgccggcgcggccgcatttcgccgagttcctggtccagggcggctgggtcaaggatcgcgccgacgcgttccgcaagtggctgggggccggcaagctgggagacgtcaagcagcactggccgaccctggaggaagtggtcggctgcctgcgcgaggcgcgcgcctggatcagcctggcgcacccgtatcattatgatttcacccggaccaagcgccggcgcctggtcgccgactttctccaggccggcggacacgccatcgaggtggtcaatggcgtgcagccggccgaacaggtcggtaccctgtcgatcctggcccgcgagttcggcctgatggtcaccgccggcagcgatttccacgcgccgggcgactggtccgaactgggcatgtaccgtgcggttccagaggaccttccggccatgtggccgcgtttcgccaggcattttcgcgataccgaacgtcattccgaagccaagggggccgaatga

SEQ ID NO: 337660 - DNA, 762 bp, Pseudomonas aeruginosa
  misc_feature (727)..(736): n is a, c, g, or t
ttggccaaggagcagcctaacggcattccggtagccatcgatccattggatgaaagcatcaaggccgaacttgaggccctgaaaaaaccctcactccctgaaatacagcccctcaaattcgtagctgacgttttcaagtggcctgctacagaaatgctgcttcaggcaggtgaatcggcgtactacctgcaagtcgagcgtgctgatcgtaacccagagcagctgtacataaagatcactgcgcaggataagcgacttagtttcaatttcgaccctgtgcgagagaccttgtcgtctgcatggctgtcggacgtatccttcagcgattacatttccgcaggccataaagctcaggctaccttcacccaacctattgccattcagaaaggtatttccaccaaggcaacggaagaggcattcgtccgcttcctgttaaaccaggagcccgtgcagagcttcctcaagaagtctgatgaggtggaaggcgaggaggttgtcgaggatgaatgtgatgctttcgtcgatcagacagtaaggcccttcaccatttggaaggccatgctggagacggagggcgaccaattgatgagggttgagattgaaaacgcgaccttcgaggagagccagaccggagcgctgctaatcccctatgtggcgcagaatggccgggatctggacttcaacgaggatgcaggtgatatcggcatctacctagatggtgaaagtnnnnnnnnnngttttctgccggcattcgcagcgtga

SEQ ID NO: 337661 - DNA, 1557 bp, Pseudomonas aeruginosa; identical to SEQ ID NO: 330272

SEQ ID NO: 337662 - DNA, 1263 bp, Pseudomonas aeruginosa; identical to SEQ ID NO: 330596

SEQ ID NO: 337663 - DNA, 651 bp, Pseudomonas aeruginosa
gtggtttccaacccacacgccgccggccgctggcccgcgaacctgatccacgacggaagcaccgaggtggtcgcgctgttcccggccgatgccgggcaggccgcgccgctggcaacccgcaacagcgacaagacccgcaacagctacggcgccttcgccggctcacctgatgcccatttctctccgcacgactccggcggcagcgccgctcgcttcttctactgcgccaaggccagcaggaaagaccgcaacgaagggtgcgatgaacttccccagcagcgtggaggcatggtctcgaacaccagcggccagcacataacacggcgcgatggctacgagccgcctgcagccggtaaccaccaccccacggtgaagcctacggatctgatggcatacctggtgcgcctggtcactccgccgggcggcagggtgctcgacccattcacgggtagcggcagcactggcaaggcagcggtacgcgacgggttcgagttcgtcggcatcgagcgcgagccgccctaccttgccatcgccgaggcgcgcatcgcgcacgaacttgagcgcgtcaccgccgccgcagaggaagccgcgaaaggctctgcgcagctcgacatcttccacgacactaaggagccggtcaaaaactgctag

SEQ ID NO: 337664 - DNA, 813 bp, Pseudomonas aeruginosa
atgcaaaaccgcatgatgatcaccggtgccggctccgggctggggcgcgaaatcgccctgcgctgggcgcgtgacggctggcgcctggcgctggccgacgtcaacgaggccggcctggcggaaagcctgaaactggtgcgcgaggcgggtggcgatggcttcacccagcgttgcgacgtacgcgactacagtcaactgaccgcgctggcgcagagctgcgaggagaagttcggcggcatcgacgtcatcgtcaacaacgccggggtggcctccggcggcttcttcggcgagttgtccctggaggactgggactggcagatcgcgatcaacctgatgggcgtggtcaagggctgcaaggccttcctgccgttgctggagcgaagcaagggcaagatcgtcaacatcgcctcgatggcggcgttgatgcagggcccggcgatgagcaactacaacgtggccaaggccggggtggtggcgctttcggaaagcctgctggtagagctggcgctggtcgaggtcggcgtccatgtggtctgcccttcgttcttccagaccaacctgctggactctttccgcggcccgagccccgagatgaagcaccaggtcggcaagctgctggagagttcgccgatcagcgccgccgacatcgccgactacatccacgccgaagtggccaagggcagcttcctgatcctgccccacgagcaggcgcggatggcctggaggatcaagcagcagaacccccaggcgatctatgacgagatgaccgcgatggccggcaagatgcaggccaagcgtcagcgccaggcctga

SEQ ID NO: 337665 - DNA, 1941 bp, Pseudomonas aeruginosa
  misc_feature (1654)..(1663): n is a, c, g, or t
atggccatgcactacatggccagaaagggggcgtggcgaaccgcgctcaccacgcccgcgttaaagggccaggggcgcccggaactcttgctactcgacgccaccagcgccgctaacaatacgagctcttctgccgtcaagcgtatccctgatttcttgctcttcacacgcgagaatggcttcgcagataccggggcagttattgttacagacgacccgaagacgtttttcatccttcaagcacggctcagtaaattcaagctgacattctctacaaaggagtgggccgttgaaaccagcgatgtactgctctcagcgcatcccgttgctccagattgggtaccggctcagcgcagcagctcgaatttcaatgtgagcatcgttgaccgggacgcctcccagctcgcgctagcattccaacgtctgactgcgtcagcaggcagtgaggagagcccggtctatcaggcactactcgacgcctgtctgtacgtcctacgcctgtcgaacatgccagcgggatacaccgacctgacgactgcgtcggcggaagccggcgaaggcgactacggcagccagcagaatgcctggacgcccgtgaagctcaaactcgctgcggcactggactccggcgcgctaaataaggtgcgcgatgccgttgaacgagccatcgcccgagccgaaaagctcatcgacgactggaacgatgccactccgatggcgtcacgcgtgctggccgaagtacaaaagcatgcagttgccgaccgacagggcatctcgctggtgctgccgaacaaccgatatgtgctgctggcacaacgttttctcaagcggaaactagaagcggattgggcggcagccgacgagcgcatcgagtggcacacgttgtccaccgttggcaagacgctagccagcgaccgtacgggtaagcatttcaccttcgttggcatcaatcccgacgtgctacgcattctgataacgcatccagaaatgccgcacggctcagccgtgctcgtagcctatcgccaggccgaatcaaccctcacgacgctcaccagcattaaggaagtgagggcgttcaaggcctaccgggaccgaatcaacctgttggcgcaggaactcgagcgacgcctcgcagacgtgccaaatcctctggtcatcggcaagttgcgggagatgtccctcaccttcaagtttgaagacaacagccagagcggcgagcaggcatattacaagtttgaactggaaggaggcggtaggtcgtacgccgccggatgggtctaccgtcacatgcctgatgaagacccgccgttccgccgcgctgccgctagcgccattcagcccggcgacttcatcttcgacatgagcgacgaattgcgcgccaagctggagtcgtcactgcagatgaacaatgaagacgtcagctctgtggtggaccctgtccgcatgctgctcaagctttaccacgacgacgtacaacggcgctgcgcgttgatgttcacttccacgaagcgctctgcgttggcgcgcgagattcacgccaagatggttgagctggaccccaaagcggcggactgtcggcctggtcgcgtgtattactggctggccctgcaggcgaaggacgacacgcggccccatgctgcccaagattccaagnnnnnnnnnnattccaagtatttcaaagtcttctgcaaggccttgggtatcaccgacgaggctgctgagcagcactggggcttcgttcgcaatgcgcggcgtttgaaccagtgcctggggcgagaactggtcgcccgatacgccgagattcttttccagcccgagagcgcggcgacgtatcgtaaggtacccgaagacgtcatccggcagttacagcaagaggcgttacgctgcatctatcgcgtcgaacacatcgtgcctccgccggcgcgcgtgatcacaagctag

SEQ ID NO: 337666 - DNA, 4194 bp, Pseudomonas aeruginosa
gtgcccatcctcagtaagaacccccgcgacattcatccggcctacaaggaggcggtggtcgacagcctactcaacgggctttcggcgcgactggctggccgcggtgacttctacaaggtcatctatgcagccaaacccagcgcggcgctgatgtccgaattcatcgtgccgatgccagccgaagagcgcggcggcgacgaggaagcggatcccatccgtatcagcgcgcatggcatggacttccagatccgttcggcggccacggataccacgctgggcgtttcggtgatgggtgccgtgtacgtccgcattctcccaaccgaggatgatgtgaagcctgggggtaggctggaagccacgttcccgctgacccgggaggcccgcgccgacatccgtagcaaggtcaaggacgcgctgggcaagctcgccactgagctgtcaggcggcaagacgcacccagagtgggccacgaggagctatgacgctcgcaaggccgtgtacgagtcaatgggcttgccgttcgacaaccagctagaccgcactccggcagaggaagacgccgaggcagaggacacagacgctgaaaatggcgagaacggggaaatacgtcccgctcaagaggttgccgttagcctgtccacgccagacgacttggcggacgatatccctcccccgccgaagtggctcagactcgatcttaccctgccctccttcgagttcacaccggcgactgccgaagcagatgccaagacggcaactgatgagctgaataaggctatcgccaagcagctcgcggactgggcggccaactcggacccggaaaacggtgggaagctgtggggatatcgccgagcacgagtccggccatccgacgtgcgcaattggaaaagctttctggaacgggtacgcgcctcggccctggcggtcatcgtgccgcagattgagctgcgctgggtcgttcaagctctacccgatcccgtcgatgcaacgcgcatgacagtccacttggcgctggagaattggaccgcgccgctcaccaataccaacttcaaggagctggaaccctcgctcttccaggtacaggtgaccgcctcggtgccggctgctgaccaccagttcctccacttggaccgggtcagaccgtcctaccggtacaacaagtacctcaagtaccccgcactggggttcaacggcggcgtcactctggccgtcgacggcgcgcagcaccgactgaccacaacatgggcgccgcgttacgtgctgcctcgaattatccccaccgatggcaccgttgaacgtaacatctcaaaactgtcgcaacccgactgcctggctagcctgaagccgctcatcacggcctacgaggattggctgaccgaggtcgaaacgcatccggtggaccaaggcctcaacgggccgaaagccgccgagcaactggcggccgagaaggagaagctgcactcggacctcgcggcctggcgcagtgagctgggagccatccggtgcggtctggacattttggagaagtcgcgcgcaaattggagtgggcctggcgtccagaagtcgccacttggcatcccattcgaggcatgggtgtcgatgaataccgccatggccaaggtaggcaagtcgaagggctatgacgagtggaggctgttccagctcgcgttcatcttggcgtctgtccccgctttcgcgacgcgcatctccgagttccatagcttctacactcccgacgttgctcagcatgctaacgccgtgacgctgctgtacttctcaaccggtggtggcaagtccgaagcctttctgggcctgctcgcattcgtgctcttcctcgaccgcctcaggggcaagcatcggggcgtgtcggcactaatgcgctacccgctgcgcctactcaccctgcagcaagcacgccgcaccttcaccacgatgggcgccgctgaagaggttcgccactcccgcgggtatccaggcgagccgttctcgctcggattctgggtgggcggcagcaacacgccaaattggcactccgaggacggctacagcgaagttccttccgacgccgaagttccccctaacacagaggccaagcacaaggacgttcaaccctacaaaagcgcccgcgagcgctggctaaagctatcgacgtgcccgttttgtggcaacaaggacggtagcctactggcgctgcgccgtcactcgggcactggtgcgaacgcgatggggcactattgcactgcgccaaaggagaaatgctcctggaatgctcgcttcgccactcccacgccgttgcccttctacatcgtcgacgaagatatctacgacctagctccgtcggtccttctaggcacagtcgataagctcgccgccatcggccagtcgcaagggactatccgcaagttcttcggcatgttcggtttggctccgctggttgagaccggcagtgagcgtttgtatgtgccgataaagcccaaggactgggatggccacccgggcgccggaacgcgcgcattgtttccgtcctttgcgtctggagagaagcgattctttgacccttttccctcccttctgattcaggacgaggcgcacctgctcgacgaatccctggggacgttctccggactctttgagtctgctttggaggccgcacttgaccagcttgcgccattactgaagggacagctgtcgtgtgagcccgactcgtcggtgcgccgaagaatcaaggtcatcgccgcatcggccacggtcagcgagccacagcgccaaatggccaacctctaccagcgagacaacaccattcagttcccatacccgggaccaaccctatacgactcgttctacgcaacgcccttaccacccgacgctacaccggacgatatcgaacgcgcagccatccccgtcgataacgtggaattgcgcagccactgggcgcgcgtctacgcctcagtccttaccaatgggcaccgccacaccgttgcgatggcctctgtgctcgggcactaccacgtgatgcttactcggctgtacgagcgcctgcgcagcgaggatccgactatggaagaggccgcgcgtgccgagctgattcgatgggtatcgcctggccctctgcaggcgcagtttgttcgtttgcttaccaatgcggacgccgcgacgctgctcacgctggtggacctgcaccgcatcgccctgacctatgtcaccaacaagaagggtggcgaccaggtcattgataccgagaaggtccagttcgagaagcttcaccacaccgagggttatactgaccaggccttgagttcggagctcatctcaggcgcggtgtccgccgctgacatccaggacatcgtccggcgcgcagagacccgcgttggcatcaacaagccattcccggagctgaacaacacccttcgatcggtcatcgctacctctgccatctcgcatggtgtcgacgtagaagagttcaatgcaatgtttttcgcgggcatcccgtcagacatcgcggagtacattcaggcatcgtcgcgcgtgggtcgcacacacgtgggcttctcgttgttggtgccggtgccgcagcggtatcgggaccgcttcgtgctagagattcacgacattttccaccggtttcttgagcggatgattttgccggccgcggttgaccgatgggccgagaaagccctcgtgcgggtgatgcctagcttcttccaggagtacgtatgcggcatgaacgccatcgagcacctatgcgcatcagacgacgataaaaagcgcaacagccctacgtttgcgatggcacccgacgtgcgtgacttccttgcagtgccagcaaacatgaaggccaccgaggctttcatggagaaggccctcggtctgtccttctctccttcgccggagggtaaaaactactaccgctcgctgctcaaggagcagctcacacactaccaacaggaccttggcgtcgaccggctcgtcaacggcactcgcttggtccagttctttgcagcgaggaacagcctgctacgtccgatgacatcgttgcgcgatgtggaccaacctggcctcatccatgagtccagcaccgacgcgtcatacaagcgcgtagccgacggaatgacggctcgtgcgatgactttcattcggcgaggctccggcgccgacatcgactcgacggataacgctacggagtcgcggagctga

SEQ ID NO: 337667 - DNA, 2049 bp, Pseudomonas aeruginosa
atggacctagtgttcgaacgaatgaacgaactgggacgcgcctggttcgatgccgcctcgtccgcacgcgatggtgatccaacgaaaccacgcatcctgcccgcgcaatgcgtctatgaggccttgcttgaccctacaaaaacggagttccagctaccggggcaggaccgcttctatctatgcagaccttcgcacatggagtacaccccggcgccattgacgttcgtgtgtcgcacctgcgggatgttccaggactatgagacccttgccgagctggacaaggacctggggaaccttacgcccgagcactgccccaacccgaaaaacaagggccaatgcgactgggatcagttggatgtcatcttcgtacactggtctggccattgggaggcggccttcccgggccaatggcattggagcgaccgcgatgccaaggtcgtcaagcgccgcgacaactgcgtctgcgggagctatctgttcaaattaaatcggcgctccgctggtattggcgattggttcttcgaatgcgccgcctgcgacaagcccctgtcacctaagtggctacagaacgaccgcgacaccttgcgcatcctcggccccgcgatgggcccggatcggttgaccgaagtgcggatgcaggcaacgccttatcgcgcatcgagcgcgtattacgtcaagtcagacctgttcatagacttcaaggacggcagccagcagctgctaactcgactgcgtccagggcgggaggcggagctcaaggacttcgtcgcgaagcaatatggctttgctgcgcagcccatcacggacgaggatgtgcagaaggcatgcgcaggcaatccggaatgtgtcaaggacttggcggactacctggcagctgtggaacagattcgtacacttgaggggttcgccgaaccgatgcgtacaacgctcaatggtgccatcgagatggcttacaccagtcggcagcggattctggaggatcttcgccgacgacaaatcttgcttcccaaggttgatcttccagtggcagttgtctcgaatcttcgaaacaggcagtcggcgttcgcatccaagttcgaccctttccgccttgccatcgagcatgcggcgctgaagagcacgcgcctggacgtggagacgcggaccaacgggaaaaaaccatatgtatccttcacgcggctggacgaagacctggcgccagaagacaaagacaagacggaacagttacaaagcaacacgcgcgccttgttcgacaagctgggcctggatgacatggggctcatccgcgagttcgacctgtgccgctttagcttcggctattcgcggatggagccgacgccaatcctgcgggagaagcgtggtatggacatgccagttcgcctcaacctattcccgccagtgaagcaaaacgacagctataggttccccgtttacgtagtgcagcagggcaacgaggccatctatgtgcggctcaaggaagaactcgttctcgaatggctactcagcttaaattgcccagacatgttcacgctgaatccgggcgagaggattggtgcaggcctgttgggggctgctcagtcgatgagtcctttcctggacaacctgccagaaaccacggcgccgccggtctacttctatctgtacaccctgctccacagctactcgcaccttctgatgaaacacgtgtcggagtattccggcttggatctgggctcattgggcgaatacatcttcccggctgacctggcgttcgttgtctaccgcaatggcacgactatggacctgggtaacctctcagctctttggcgcaatgctggcacggaaatgctgaccgccatgttgagttctaaggcaacgcagtgcgggacgggatcactgtgtactgagcgcggaggctcctgtccagactgcgtgatgatgccggagacgtcctgcgttgctggcaacaagctgctgtcgcggtcggtcctgcgatcgattggtggcaagcctcgtctcgataaacgaggagcgccgattcggggttacttggacatggttaagctgtag

SEQ ID NO: 337668 - DNA, 861 bp, Pseudomonas aeruginosa
gtgagcgcggtgcaggtcctgaagtttcccctgtcggtcgacctggccggcttcgtcggcctgctgcggcgtctgaacgtgccgcaccgggtcagcgaggaatccggccagcaggtcctctgggtgcccgacgagcggctcgccgagcaggtccgcgagttgtaccggcgttatcccgaaggcgatccgcaggcgaccctggaggccgcgccgcgaccggcggggcagggtttcgtccggcaactgcggatgagcccgatgaccgccgcggtgttgctgctgaccttcgtcgtcgccgctgtcacctaccttggcgacaacttcgcgacgatgcgctggctgaccttccaggacttccgaatccagggccagtacgcgctgttcacgccgttggccgagagcctggcggcgggtcaatggtggcggctgttcacgccgatgctgatccacttcggctggctgcacctggcgatgaacgccatgtggttctgggagctgggccggcgcatcgagttccgccagggccgcccgatgctgctcggcttgaccctgctgttcggcctggtgtccaacgtggtgcagtacgcggtgagcggcgccagcctgttcggcgggttgtcaggggtgctctatggcctgctcgggcactgctggatcttccagtacctggcgccgaaccaggcctatcgcctgcccaggggcgtcgtggcgatgatgctgatctggctgctggtgtgcctgtccggggtgatcgacctgctcggtttcggctccatcgccaacggcgcgcacgttggcgggttgctggtcgggtgcctcagcggtttgctgggcggcctgctggcgcggcgtcgccgttga

SEQ ID NO: 337669 - DNA, 1110 bp, Pseudomonas aeruginosa; identical to SEQ ID NO: 331257

SEQ ID NO: 337670 - DNA, 1050 bp, Pseudomonas aeruginosa; identical to SEQ ID NO: 331256

SEQ ID NO: 337671 - DNA, 681 bp, Pseudomonas aeruginosa
atggagcactattcgcacatacttctactttgcgacccttttctgcgagagtcagccgccatggagcgggctagagcacttgccgccgcttgcggcggccatctacatctagccattctggatgacttaccaatcggaatggggggaattgacagcactctacaaatacgcgctagagaagagacgagaaagcggcaagagaagtggctgaccagcaaagccgacagcatgcaagcctggggcatcaggacatcggttcaggctgcgtggactgaagatgcagtgaaagaacttcttgaaattgtgataaataaaaatgtcgatcttataataaaagacactctactcgagaaaagcttgcatcgtgcctttataacaccactagactggaagattctgcgccactgcaaagtagcaacacatttagttagctcgaccgaccaccctcttccgcagaaagtagttgccgcactcgacttatcaaagagcacgtccgaaagtgatgaattaaataatagcatcatggcatcagcaaaacaactcgcccttcaaagtaatgctgaacttcacattcttcatgcgcacaacttaagcacggacttcttagtttatgcggccggcccagtgccatggacgcccgagctacaagataaaaaaacggaatatccacagcaggaatga

SEQ ID NO: 337672 - DNA, 837 bp, Pseudomonas aeruginosa
atgcaagcgaaagtactggtggtgggcagcctgaacatggacctggtagtgcgcgcgccgcgcctgccacggggcggcgagaccctcgccgggcagtccgacgatgcctacggcgaccagttgtaccgtgcgctacaggccgagggcatcgactgccagggcgtcgagcgggtggccggggagtccagcggagtggcgctgatcgtggtcgacgacagcagccagaacgccatcgtcatcgtcgccggcggcaacggccacctgtcgccggccgtgctggcgcgccacgagcacttgctggagcaggcgcaggtggtggtctgccagctggaaagcccgctggagacggttggccatgtgctgcgccgggcccatgcgctgggcaagacggtgatcctcaacccggcgccggccacccgcgacgtgccggcggagtggctgccgctggtggactacctggtccccaacgagaccgaaagcgaactgctctgccgcctgccggtggactccctggagagcgccgggcgtgccgccgagcgcctgcgcgaaatgggcgccggcagggtgatcgtcaccctcggcgcacagggcgccctgctggtgggcgaggggcgggtcgagcatttcccggtggcgcgggtcaaggcgctggataccacggcggccggggacaccttcgtcggcggcttcgccgcggcccttgcgcgcggcctcgacgaggcggcggcgatccgtttcggccaggccgccgcggcgatctcggtgacccgcctcggcgcgcagacctcgatcccctcgcgcgaggaagtcgagcgggcgctcgctggcgaggcttga

SEQ ID NO: 337673 - DNA, 918 bp, Pseudomonas aeruginosa; identical to SEQ ID NO: 323069

SEQ ID NO: 337674 - DNA, 894 bp, Pseudomonas aeruginosa; identical to SEQ ID NO: 323071

SEQ ID NO: 337675 - DNA, 369 bp, Pseudomonas aeruginosa
atgaagcagagttcgattctggcggaaactcgccatgagctgctggacgatattgctgcacatactgcaacagtactgtctgaacatggtattgacgctggcctggctgaacaggccggccacgcggtagctgatcatctggcgaaccagtggcgcggtgccacgctatacatcccctccgactatcgccaccaggttaccaagcgtgatctccagatcctctcagagttcaacggtcgtaaccatcatgccctggcccggaagtacggactgacgcccagctctatatataagctgttaaagcgtattcaggatcggaagttcgaacgtgaccagggcaaactggacctcggcgacggcctggcctga

SEQ ID NO: 337676 - DNA, 870 bp, Pseudomonas aeruginosa
  misc_feature (550)..(559): n is a, c, g, or t
atgagtaggataagtgccgggttaactgcccagttggtgagtttcctgagcagtgaaaacctcgacacagagcgactctgcaaagaagtcgggatagccatcgacgagctaagatcgtcaaataaatttattccaagatcaagcgcccttcggttaatggagctagcagaaattgagagcggtaacccagacattggacttaaagcttaccagcactttcttccaggtgcttttcaattagtaggatatgcaatgatctccagcgccaatctaaaagacgcgctgcaggtcttagtacgtttttccaaacttctcggaaacggcttcactgtcggcctaacacaagaaaaaaatggcatacgcctgtggtacgttgacaacacagaagacagaacaaagaaatccagagtgttcaatgacgcaatattggcatcaactctcggactctgccgctggatggctgggggtaaacttcccgaaatccaagaaatagaattcatttaccccactccacaagacatctcagagcaccaacggctttttgattgcnnnnnnnnnnccctctgcgacatggactctgtagcaaaagaacttaacgtcagtagtcgtttcttacagcgcgagcttgcaaaagagggtaaaacctttaaagaaatattcaatagcacccgaaaaagactagccgaacactacttaaaaaactaccactcttactccctagaccacataagcacactacttggctttaaagagctaagtagttttcacaaggcttgccttcgatggttcggcatgccaccagggagttttcgaaacactcacacagaaactcacccatcaggagtagaccagaaaataactcatacctaa

SEQ ID NO: 337677 - DNA, 912 bp, Pseudomonas aeruginosa
atgcatatcgatctccgccagctccgccacttcatcgcccttcacgagaaccgcagcttcgtcgccgcggcgctggcggttaacctttcgcaatcggccttcagccgcagcatccaggcgctcgaacacagcgctggctgccgcctggtggaccgcgcggccaaggacctgcgtccgaccaagcagggcctgatcgtcctcgaacatgcgcgccggctggtcagcggcgcgcacaacctggccaacgagatcgccctgttcaacggcctggaggccggcgaactgcgcttcggcgccgggccggctcccgccacctggctggtgccgcgtgcggtggggcgcttcaacgtgcgttatccgaaggcgcgggtgagtttccaggtcgaacactggcaggcgctgaaccgccgcctgcaggccgaggagttcgagttcttcgtcgccgacacccggcatttcgaggccgacccgcaataccggacctcgcgcctgcgtccccggcgctggcatttctgctgccgcgaggggcatccactggccgcgcgcgagagcgtttccgccgaggagctgctgagcttcccgctggcgaccaacatcagcccgccgaacatccgcaaggtgctggtggacctcagcgggcgtcccgacttccgcccggccatcgagtgcgagaacggccatagcctgctcggcgtggttctcgcctcggatgccatcggcatcagcagcggcctcggcgacctggcgccgccgggacagggaggcctgcgtccgctgcgggtgcgcgagctgcccgacgacctcgacgaactgcatacccgctacggcatcgtcagccgcgccggctacagcctgtcgccgctggcggaggcgatgatcgacgaactgaagcgggtcgacgacgccacctga

SEQ ID NO: 337678 - DNA, 297 bp, Pseudomonas aeruginosa
atggtcggtttcctgaaccagctggccaccgggcgtggagcgggagccaggcaggtgaccggcttcgtattcctcgggcgtgcgtacgtcgagcaggtaggtggtgcggtcgtgctcgtcctgccattgggccagaccggccaggtcgaggcgttcgacgccggcgcggtcggcgacggcacgggcgcgctgggcggcggccttgcgagtgtcctgggagatcgcaccgaagcgtcgcgtctggccgtgttccagttgctgaccggccagcgtccagccgatggtgccgttgcgtaa

SEQ ID NO: 337679 - DNA, 165 bp, Pseudomonas aeruginosa
atgggcctgggcgaacgggtcctcctcgcgcacgtcgagcagcgccagctcccggcgggcgaggagagcggcgcggatatcgtggaaggtgcgtacggcgatctggctcatgcggggttctctttcgacaggtcccagatattgggcaagcggctgttggaatag

SEQ ID NO: 337680 - DNA, 957 bp, Pseudomonas aeruginosa
atgcgtcagaccctgagcctgttcctgcttctctgcctgctcgtcggccaggcctgtgccgacgagcgcgtgaccctgcgcctggccgaccagaagggcaacatgcgcgcccagttggaggctgccggcgcgctggacgacctgacctacgacatccgctggttcgaattccccgccgccgcccccctcgccgaagcactcaatgccggtgcggtggatgccggcatcatcggcgacgcgccattgctcttcgccctggccgccggtgcccggctgaaggccatcgccgtcgacaaatccgatccctacggtaccgccgtgctggtgagaggggattcgccgctgcgctcggccaacgacctgaaaggccagcgcattgccaccgggcgcggttccatcggccacttcgtcgcgctcaaggccttggcctcggtcgggctgggcgagaaggacgtcgaattccgcttcctcggcccggtggacgcgaaaatggccctcgccaatggttccgtggatgcctgggcgacctgggagccctacaccgcgttcgcggagaccgccgacaaggctcgggtactggtcgacggtcgcggcctgtgggctggcaacagcttcctcgctgctaccgatagcgcactggccgacccggcgaaacgcgccgtgctgcaggactacctgcaacgcctggccagcgcccagcgctgggcgtacctgcacctggacgagtattcgcgaagcctggcgcagatcatcggcttccccgaggacgccgcgcgcttgcagttcgaacgccggcgcttgcgttggcaggcgctggatgagcgaacgctcggccagcagcaggagaccgccgatttctaccaggcccatggattgattccgcagcgcctcgatgtgcggccgaccttcgccagcggctttgcggtcaggcaggcgtcggatgcggatatccggtag

SEQ ID NO: 337681 - DNA, 795 bp, Pseudomonas aeruginosa
  misc_feature (44)..(53): n is a, c, g, or t
atggaacatgagcaaaacgaaggtacttatgctcactcacaacnnnnnnnnnnaggctatccaaatatcgcagagatctttagcgggcgcaccgaccttttcgcgaaaaaagaagatcctacgatcaagttcttcgccgaaattgtcgagccgatgtgcgcggcttacgcctcttcgcgctatggagaaatgttcaaaatacttggttctggtcccgcgattgccaaacacgaggacaaggcgaattggcgtcgggatatggatgccctccagaagctacgggcagagggcacgatcggccaaattgtcgattttttgcgctcaaccaaacgaccgtcgccccccgaccgcgtcctgaggagtgaggaagaacttaaggcgctggatggcaccccaatccccgaggagtcatccgcgctgcaacgttacagcaagcttcgggacgttccctatcgggaagtcattgaggtagtcaagttcattgagaagcaaacctcctttgcaacacagcacagcgtcaagggcgccgagttcgaaaacgtcctggtcgtattgggcggcggctggaatcactataactggccgcagcttcttgaattgattcacaccaaggcgttgaatgccaagaacactaaaggcttctaccgggcccgcaatctcttttacgtgtccatatctcgcccgatgaaccgtctcgctgtgctcgcgacccaaacccttcctgaccccgcactcgaagcagtcaaacatctattcggtgccggtaacgtagaagcacttgaggtaatgatatga

SEQ ID NO: 337682 - DNA, 3336 bp, Pseudomonas aeruginosa
atggtgccgatttccatcttggcccaaatcgccggagttcccgagagcgccgtccgtacgtttgccacagagttcggccggccgctctttgtcaaggactcaggtctgcatttcatggacgaaccggcagagacctggttcaacgagacgttcaagcccgatgcggcttcgcttgatgcgtttcttgcaaaactaaagccgctcgcggcgaccagttcatatgtggcggcggcgctgccgcagttgctactgtctgccggccggatggacgagctgattgcgctggcgctctcgaatgagagcttgccagagctcaaccctctggagcgacgagacgtcgagctgcaacgactgatgttcgcgctcagagcatgcttgcagcaggatcggcatgttgccgccgctaagctcgcgctgaaggtcggcggcgaggtggctggcgaggctcgccagaacacgctcatccagcagaacactgacattgccagcgttctgcttgcgccagatcgcatcgaagaaatggtctccaggcgcacgttcggcggcggattccttggctcgcatcacgcctacgaggcggtgctgcttgccggaaacgatgacctcatccctgaggcgagaagcaggttgcgcatggcctgggagtcgttgatcacttggagcaagctgccacccaagcgccgcaaggaggacaagatcgacgacgccgacgtcgccgagcttgctatcggtgtgctgagattgcgaggccctgccgaggccacgcggttcctgaaaggatggagtcccaaatccaccgtactgagaaccacgaagctcgttgccgcccgacttgcggacgccggcaacttcaagcgaatcgatgagctcgccgagcacgccgacggggatgcctggatgatgctgggcctggctaccgaagcagcccgggccgcacatctgttgccggcggagccgctgcgccatctgatgggcatcttggtcgaccctaagatcaagttgcccgaagaagatctctcatggaagtctgggagcagcgtactggacggcgtccggtctgcaatcacgctggcgctccggtgcctcccgcgcgacgatgcgacttgggcggagacgttgcgccgatatcttccgtcagatccgccccgccagtttcacgatttcgacgccgagcgcgcgacgttcatccgagcctacgctttggaagccgcgctgcgcggaaaacggattgagttgattgatctggcgccgaaggatgttcgccctgagtttgagacgaagggatctcccgttagaagccaacaagcgtcccagttgcagcaagtgacagggggagtcctcccctggttcatcttggccgctgagattgcttgtggccgccagcttcccaaccttgatcacgaaatcgagcttgcgctgagacagacgaaatctgcttcgtcacgcgactatcagcggaacttcaatttggagaaggtggctgccgtcgagtgggtgcagatcctgcgcgatgcaggtcccattcagtcagttcagatcgacgcacttttgaagtgggtcgagaaaaacgaccgcatctactcgagtactctcacgaggatgtgccgagtgaccgcgcgaacaggagggctgagcgacctctcactacgactcagctccagagcgttcgatcagatcgtcgcgtcgcacagcgatgcggagacgcggattgacgatcttcaggagctggcgcgcgccatcttttgcgtgagcaagtcagaagcggctgcctatttcgacaaggcgatcgacatcgccagcaagatcggagaagaacacctctctcgatggacgacgttcctcgatctcacggacgctgcgcatcgcccgggccacgcaagacctcggaccgcctatcggctagcgcgcattgccgagctcagctacgagcacatggcccgggacaagtacatggactgggaccggttggttgagggtctggtcggcctttgcccttcatccagtctcgccattctgagccgctggcgggatcgagagttcggctttgcaggcgagctattccccgtcgcaatctacagcctgatcgaccacgggctccttccaaagaaggccgcggtcgccctgggtggcaccgtgagtggatggaaacgcgttaacgacatcaaagcagccatcgacgcagagtccgacaacaatcgaaagagatcgatcctgaggatcgcctaccgactcctccggatccagccctacgaggcgcccacctggcgcgaactcaaggctctagccgactcactggcgatgtcgcttccagatttagagaggctgcttcaggcatctgaagccaaaggagccagtgagtcggcgaccgccgcccccgcgccgtggacggggcctcgcaaagagatccaagagcccgattgggatgccattttcagcggagtcgatctccgcgacgcggctgcggttctcgcggcacggcgatcgctcaagaaggttgaccatcgttcgtacgttcgcgagttctacgaggaaggctgtcggcgcgcgacgctatcggagatcgacggatacctccgcgcaatccgatcggacgacgggttcagtgtattcagcttcatggacgtcatcaggcacctcccgcaaccgagcaagaggctcctgtccgtccgcagcgaactcaagaaggccgccctttcgttggctgcgagcgaacccaaccgtgtggggcgccgcggctggggccatgagggcccctttgatggaatctatgcagagggcatcgtcttggagaaggacgtcgcgtcagcccggatcaaggggtacctgtcgcagctcgacacgcttgatgcagaagacttattccatctggtggacccgctcgcgcgacgcttgaccagcgacgaggccgatgaagtgttgaacttcggctttgacttgctcgaagaaattcttgagggtgaagatggcgatggcccgtggaacgactcgctcgcaccgtcatcctcttgcgaggaagccttggccggctacttgtgggcgggtctggcgtgcccgtccactgcggaacgctgggaacacgcccactgcgtccgcaactgtcttgagctcgactggcaaaccctgttgtccgcgctggccactcgcgcattgagcgccgacccgcagccattcgttgaccgtggcctggttttctatgagtggcatgcccggcaatggctctgccttgcattggcgcgatggatgagccttgtgccgttgctccttttctcgcgtttcttgactccgccgcaagggagcggcatgtcgtcatccgacacttcgcctcggatgcactga

SEQ ID NO: 337683 - DNA, 681 bp, Pseudomonas aeruginosa
atggaatcactcgatcgctctaaagccgtcatcgagctcggcaagcggatcgttgccggtttgaagctcggcgacgatgttactgcccaatggatggcgcacctagtcgctgagaaaatctccgctgctgaggatgcgcccgaaaccgtgcgagatgctgcggtggccgagtgcgtagatctcatccagaaactttgggcacaccggtatacattgcctccgtacatgcggccgctgcgggagttagacccgctgctgcgcacgctcaattccttaggtgtgaatgaggcagatgaactcagatttttcgcgcgcccgcctagcagcgaagagcttgaaggtgcaacggaggacgagaagaagctcttcgagttcgcgatcgggattgattacgcagcaagggaactgctacgtcatgcactctgcgttgctgccgaacggtcagtcgatgtggtcaaaccgtggttggaggaaaccgtcaagggcagcttggacgccaccgtagaactgcggatttcaagattcgttgcagaaggtctactgaagagccaagaaaaggccaaacagcaagctatacgcgatcgaatcgatcggctggaaaattttgcgaaagcaaccttgtccttagccggagatatgagaaagacgctccctcaagacagcgaggaatcggatgactga

SEQ ID NO: 337684 - DNA, 510 bp, Pseudomonas aeruginosa
atgacgggcggcagcgttccagtcgtacacgttcaattcaacgcgctcgatgtcggcgtcggcgaaggcctcggcgagcagcgcctccagcatcggcagccccaggccctggccgcgcgcgcttggcgccaggactatgcgagccaggcggacgacgccgttgcggcggtcgaacagcaactggcaatggccgatgacctggtcatcccggcaagcgctccagagcaggcgcagcggcggtcgccggcggctttccgcgaggtcttcatgcatctgctcgaggctcagcggatgccgcagggcggggccggcccattgcaccagctccttttccgtggcgaaccagcgttgcaggattgggaagtgttccagctggaacgggacgagttgcaattccgggacggaacccgtgccgggtgtgggcatgcggagtgcctcgctcaggtcatcggggggagccggcgtttaaccggggacttcttgacgatggcggtgttggtttccgcgtag

SEQ ID NO: 337685 - DNA, 210 bp, Pseudomonas aeruginosa
atgagcacacccgtcaagaaacaggacgcccccgtcgtcccagtgccgaaggaggagaaggtgacactcaccgctcatcacacgcacgctggcacgaaatacccggccggcgccgaaatctacgtcaacaccctcgacaaggccttcctggtgcagcaccagaagatcacggtcgaaacccaggatgcggctcccgccgccaaggagtaa

SEQ ID NO: 337686 - DNA, 1272 bp, Pseudomonas aeruginosa
ttgaaaattgtacaaaaaataaccagtcagctcgattgtcccgacttcatcgatacccaccgccagcgccctcacgactttacccgccgacgccaactgaccttcaagaacctcgtcctgtttttgctcaatcagccacgcaccgccctgcaaaccgagctcgatcagttctatcgcgtgctcaaccaggcctcggccgagacccaggtggtcaccgcgcaggccttcagcaaggcgcgcggcaagctcaagcccgaggtcttcgagagcctcaaccaaacccttcagcaacagctcgacagcctcgggctgcgccagacgtggcgcgggttacgggtactcgccgtggacggctcgaccgtccatttaccgctggagtcggtcatgacgcgctttttcggctgccatagcgagtttcccgttgcccgtctgtccatgctctacgacgtcgccgacggccagacgctacacagcctgatcgtgccatccgcagtcggcgagcgcgattgcgcccatctgcacctcgagcatctgcccgctgacagcctgacgttgtttgatcgcggctaccccggacactggctgtttgcgctgttcgagcagcaccggcgacatttcctgatgcgcctgccgtgtggctacaacgcgcaggtcaaacagtttctccgctcggggcagacagaagacacgcagttcttctctgccagtcatcccgaggcgcgcctgttctgtaccgaggccggcgtcgatcccgcgggccgggtcgaattgcgcctgatccgggtcgagctagccagcggtgaaagcgaagtgctgctgacctccctgctggatcgacaggccttcccggccgaggtgttcgcggatctttaccaccgccgctggggcatcgaaacggactaccgccgcctcaagcagaccctctgcctcgacaactttagcggccgtagcgtgacggccgtgaagcaggactttcatgccgggcaactgctgaaaaacctagcgctgctgatgcaacatctgctgcaaccggtcatcgagcagcgccacaaaggccgcaagctgcgctggaaggtcaacttcacccaaggggtgtcacgcctcaagaacaccctggtcgacctgctggtacgccccggtgtgcaggggctggccaacgtgatggagttgatggccaacagcctcagcgctgtgcgcccgggccgcagcttcccgcgccagcgtatgcgcctggccagtcgcggctgcgagggctacaaaccgacgcgctaa

SEQ ID NO: 337687 - DNA, 639 bp, Pseudomonas aeruginosa
gtgcttgtagccgcggatttccatcagcacgatggcgggtatcttcagttgttccagttgcgccgcctcgatgcggtagccgcgcgcgcgcatgcccatggattcgacgtagcgcttcatgtcgagcatggagaagccctgggtgcggacgatctccgggtcggcgtgggcgagcatgccctggatcaccgcctgctcgtcgagcggggcgccgtaggccttctccaggatggtcgcgagggccgcggcgccgcagctgaaatcggtcttctgctcgaccaggtcggcgaagcgccgctcgcggatgctctgcacctgcttgtagaccaggccgccgccgggcagggcgggaaagccgagggtcgccgcctgggcggtgaggtcgacgagcagcagcagggaaaggatgagcgtgcgcatggccggttcctgtgtcggatggaaaagggttccggctggcgccggaacccctgggccaggatcagaagccaaggctctcgccaccggccgggcagctgctgcaaccggcggcgatggacagggagttgctctgctggttgccgccaccggcggcgatgttcaccccgacgttgcccgagacgttctgcaacgagttgctcaggctggcgttgttggtga

SEQ ID NO: 337688 - DNA, 1446 bp, Pseudomonas aeruginosa
gtgcgctacctggcgcagcagctcgaaccggccgactacccgaccgtcgccgatctggccggcgtccgcccatggctggaggcgctggcgcggatcgaggcgggtagcctcgacgccgccgactacgaatgcctgggcgagcgctgggacatccgccaacgcctggctgacgccctggccgccgaggggctcggccatctccgcgcggacaccccgagcgaacgcctaagcggcggcgaatgcatgcgcgtagcgctgctcggcgcattcctcgacgacgccgactttctcatcctcgacgaaccgagcaaccctctcgacgggccggcacgcgctttgctgcgggcgcgcctggcggcatgggacggcggcctgctgctggtcagccatgaccgcgaactgctggagggcatgcagcggatcgtcgagctgtcgaccctcggcctgcgcagctatggcggcggctattccttctacgcgcagagccgggaggaggcgcgcgaggccgccgaacgtcgcctggaccagcgtcgtctggagcgcaagcggcagaccctggccatgcgcgaacagcagcagcgccaggagcggcgccaggccagcggccggcgcgaaggcaagacggcgaaccaggcgaagatcctgctcggtgggttcagggaacgtagcgaggtcagcgccggcaagctgcgcaacgcccaccaggcggagcgcgagcgtctcgaccgcgaggtgcgcgaggctgcccgggaggtcgaggaggcgtcgccgctgctgctcgattcgcccgatgccgaactggcggcacagcgccggatcgtcgagttgaagggcgcggtcctgccgcatctgcgcgggccgttgcgcgaaatcgacctgctcctgagcggtccgcgacggctggcactggtcggcccgaacggcagcggcaagtcgaccctgctgcggctgctggccgggcaacgggcgccgctggcgggaacctgcgcggtgacggtgggcgccgcctatctcgaccagcggctgagcgtgctggaccacgggcgaggcgtgctggagcagttgctggaggtcaatcgcagtcgcggcgaaagctggctccgcacgcgcctggcgcaactcggcttgccggctgaacggctcgcccagccgtgcgcgacgctgagcggcggcgaacgcctgaaggcggccctggccctggtgctctacgccgaccggccggcgcagctgctactgctcgacgaaccggacaaccacctcgacctggctgcgcggcaggccctggaaagcatgctcgggcagtaccgtggggccttgctggtggtgtcccacgacccggtgtttctccggcgactgcgcctggacggggcgctggaagctaccgacgacggttggcggctgcgtccggagcattgcgtgaatggcatttcggcagcgggggattag

SEQ ID NO: 337689 - DNA, 327 bp, Pseudomonas aeruginosa
gtgcagaagagcacccagggaaaaggacaggtctcgccagtggagaagttgcgtctccgggtatcagcgatgatcagtagcccgcaggctcaggcggagcgcagggcgtcaatctggaaggcgcagggggattcggaagaggcctggcagcatgtgctggaggagttggccgaaatcgatggactcgagatgtcgctgggggaggagggagtggttacgctcacctgggaggcgggagacgaggagggcgttgaagtggtcgatgggattgaactggtgcaggagctggacatggtggttcagcgtctacatgaggagaggatctag

SEQ ID NO: 337690 - DNA, 489 bp, Pseudomonas aeruginosa
atgaagcgccggaattggaagcactgggtgccgcgctcgccagccgacgcactggacggctgtgcgcagttggccatgcagcgctacaaccgcgggatcgagcggcttgccacagaccatctgtgccagaacaacgccagcaccctctacaaatggatgggcaatggccgcctgccgctgaccatggtgctgtcattggagaaagcctgcggcctgccgctgatcacccgttacctggccgccgctcacggcaagctcctggtcgacatcccggtcggcaagtcctgcaacgccagcgacctacagcaactgcagggtgtgctgcacaacgccaccggcgcgctgatggccttctacgacggcaagcaaaccgccgaacagaccctggacgccatccgcgccggcctcgaatccctcgcttggcaccacggcaacgtcgcccaggcagaaacccctcaactggactttggagtggctgacgatgagtga

SEQ ID NO: 337691 - DNA, 315 bp, Pseudomonas aeruginosa
atggcaaacatcggcaccttcaccgcagagaaagacggcttcaccggcacgcttcgcaccctgacgcttaacgtcaaggtcaagctggttcccaacgacaagggtgacaacgaaagcgcacccgactaccgcttgcaagcggctggtcacgacatcggcgcagcgtggaaaaagaccagcgaggccggacggccttatgtgtccgtgacccttgacgatccttcgttccctgcaacggtctatgcccgcctgatcgaaggcgaggacggcgcacacgacctgatctggtcacgtagtaagtcgaaggcaacataa

SEQ ID NO: 337692 - DNA, 210 bp, Pseudomonas aeruginosa
atgagccacgacaccacgaaccgcccgcgcatggccgcgacttacgcccccggcacgatacgcgcccgccgctggcatggcgatggcgacgtgcgcggctaccgtccgcctcgcggctgggcagcctgtgccgacctgaccgacctacaccccatcacgggccgcgccttgccgcgtgccatgtggtggatcatcgaaaccaaagaatag

SEQ ID NO: 337693 - DNA, 840 bp, Pseudomonas aeruginosa
atgtacgcatccccccttgcttcgcgctttgcttcccgttccccggtattgcgcagcgactccccgctgtccgatgaccagattcaccgcgtggccccgtccatctttgcggaagcgccccacgaaagccgttcccagcgttacgcctatatccccaccgccacggtgctgaccgaactgcgcaaggaagggtttcagcccttcatggtgacgcagacccgcacccgccacgaagaccggcgcgactacaccaagcacatgatccggctgcgccatgccagccagatcaatgcccgaggcgaagccaacgaaatcatcctgctgaactcgcacgacggcaccagcagttaccagatgctggccggaatgttccgtttcgtgtgcagcaatggccttgtttgcggcgacaccgtggccgatgtgcgcgtgccgcataagggcgacgtggccgggcaagtgatcgaaggtgcctatcaggtgctgcacggcttcgaccgtgcgctggaatcccgcgagtccatgcaggccatcacgctggacgaaggcgaagccgaagtgttcgcccgcgccgcgctgtcgctcaagtacgacgacccggacaagccagcccccatcaccgaatcgcaaatcctgatgccgcgccggttcgacgaccgccgcccggacttgtggatgaccttcaaccgcatacaggaaaacctgaccaaaggcggattgcgtggccgcagcgccaacggacgccgccagcagacccgtccggtgcagggcattgattccgatattcgcctcaatcgcgccctgtggctgctggccgacggcctgcgccagttgaaagcctga

SEQ ID NO: 337694 - DNA, 1131 bp, Pseudomonas aeruginosa
  misc_feature (1072)..(1081): n is a, c, g, or t
atgctggaagataactcgactgtggtagtcggtcgaaacaacagcggaaagacctctctcaccgatgtctttgatcgcttcattggccaaagcggagctcgcttccggctggaggacttctccgcagcttcacggacaaaattcttcgaagcgaaaacactaagggaacgtggagcaaaacctgaagatgtgctgacagcgtttccaacgatcgccctcacactgacgttcgcgtacgacgcagccgcacccaatctgggccccctggctccatttgtcatcgacttggatgtcgcatgcacacaggcattggtgcgtgtggagtataagccgaccttagaaacgctccacatcctgttcgacatcgctgcgcccgcggaaggcgtagagcaaaacgctcatttcctcagatcattgcgcgacacgattcccaaggcatattccataaacgtcagcgccattgatccgacggatcaaaccaatcgacgtgattttgaaggagtctctgctctttcgactctcgtccaatgtaatttcgtccgagcacagcgcaccctcgaccacgctagccaaggcgatgctgacgtgatcggaaaattgctgagtacgcttttcaagacagcctcggccccaacagcagccgccgccgatcaagaactggcagcgaagctgaagacttccgtggaagagatcgaacgcggcgttcaaggggactttgacgcaatgcttcagaagctccttccgacgatggaggttctgggctttccgagtctcaatgacaccgagctaaggccagaaacatcgctcaacgtcgaggcgcttctttcggaccacacaagggtggtatacgcgggcgcagacggagttcaccttcccgaaggctacaacggtctagggacgcgaaatctcatttatatgctcttgcagctggagagctaccacaagatctatcgcgcaaagccaacccgccccgtcacgcacctgattttcatcgaagaaccagaagctcacctgcatcctcagatgcaagaagtgttcatcaatcaactgaacatcgcaatcaaaaaactcnnnnnnnnnnactctctgccacgtatcctgacgagcctacgtggaaagtacagtttgtga

SEQ ID NO: 337695 - DNA, 912 bp, Pseudomonas aeruginosa
gtgatcacgacacattcaccgcacgtggcgaatgccgcctcattcgaggccgtacgttatttcttgaacgaggcacccaaaacgccgaatacgcggcaaactaaggtcaaggacttcaagaaggggatggcaagtatatcggctgatgaccaggacttcctccatcaatacatgaccctgaccaagtgcgacctctactttgccgacaaggcaattatggtagaggggaccactgagcgacttctgatgccgcggctgtgcggtctcgtggacaagtcactggacgacaaacacaagctggccaggcagtacgtaacctgcgttgaggtcggtggtgcgtattctcatattttttaccccttgctggacttccttgaactcaagactctagttgttacggatttggattccaccaaaccagttgagaaagagaacaagaagggaaaagttattactacgtgggagaaatgccctgtagctgaaggtcagcgcacatcaaatgccgcaatcaaggattggttccgcccacccaacacaaaggatgcaaacggctggcagatctcgccgggtgagttgcttgcaaaatctgcaaaagaaaagatcattgggtgccgccgcatcgcgtatcagattccagaggtccccacagcagccacctgcgcgcgaagttatgaagacgcgctcgtcctcgccaacccggatcgattcgaatggcctaaggagcaagacgaggccaccgaagcatgggacatcgcaaaggggctcgcgaaagcagataccgctttgcggttcgctattcgcgaaaaggagtggaaggtgccgcgatatattgaggaaggtctcgtgtggctatccgagccaccaccaccagaacaagccctagaagtgcagaacgccccggtggtcgcatga

SEQ ID NO: 337696 - DNA, 144 bp, Pseudomonas aeruginosa
atggatggtgtcgaccaggattgcgggatgttcctcaatttcctgcgcgatctcgttccgagccacctcagtgaaggtaatgcaggctactttttgcccggattgaacaagcgcaggcccgcgctctgcgatcagccgttttag

SEQ ID NO: 337697 - DNA, 1053 bp, Pseudomonas aeruginosa
gtggcgatagaggtcctccagcgacggcggcaggatttccaggtcgaactcgcgcgcggccagcagcgcttccagcacgccgtcgcgctcggcatcgtccagcagtacctcgatgcgctggtcgtccagtctccgcgccgccaggccggcccggtgccagcgttcgagccactgcgggttatgcgggctggccaggcgcacgcgggtcggcagagccgccttgcggcgcaattcggcgaggctgccggccacttgcaggcggccgccggcgagaatcgcggcgcggtcgatgtgcgtctcgacgccgggcagcacatgggagcaaaggacgatcccggtgccctggccgcgcaggcggtcgagcaattggtagagctcgacggtggccagcgggtcgaggcccaccgtcggttcgtcgagcagcagcaggcgcggttcgccgagcagcgcctgggccaggccgaggcgctggcgcatgcccttcgagtaggttttcaggcgccgcctggcggcatggccgaggccgacctgttccagcaggcgcgcggcttcggccggcgccacgcccttgaggcgggcgaagtggcgcagggtttccgcgccgctgagctgcgggtagaaggtcacgttctccggcaggtagccgagctggcgacgcgcctccaggctcctcgcatcgtggccgaggacccgcacgcggccttcgctgggggccagcaggccgaggaccagcttgatggtggtggtcttgccggcgccgttgtggccgagcaggccgagcacctcgccgggctccaggcgcaggtcgagcccgctcagggcggtgagggcgccgtagcgcagggtcgcgccgtcgatctcgaccaggctcatggcctcggctccgcggcgggcatccgcatcagcggatggctgtcgcgcacgccgggcgagcgcaccaccgggaaggcgcgctggacccaacgcagcagctcgatgctcgggctgttcaacagcaggcgtacctgcgggtacagccagatcagccggtcgacgttgtcgttgggctcgtag

SEQ ID NO: 337698 - DNA, 333 bp, Pseudomonas aeruginosa
gtggcgtgtaccctgtatctccaagacctggccaagctggcgggtttgccgttcgatctcggcgacgcggccgagctggcgttgctgttcagcgagaacgccggcctgcaggtcgatcatctgctgattacgatctcgctcctgctcggcgacggtggcacgacttctatcagcggaaagctggagcctcaagtgatccatccgccaaagcaacagcgcgacaccaagggcagcaatagaccagaacttcaaattcatctttacgtatccacgctgactaattacccgttgcccgtaccgactttttctgatgaccagccaagcatttgctaa

SEQ ID NO: 337699 - DNA, 291 bp, Pseudomonas aeruginosa
atggagttcttcgcagctttcagccttttttcactcggtctctactccgcgcttggtattgccgcacttattgccctctacctcacttcgtacggggctcgttgcgcggactcatggctcaagggccagcccatgcctactgaccgtgttaaaccccacatcgctatcgctgcgctgttgggcctgatcgctggcagctttgttcagggcatcattgaggaaaatgcagagtgcaatgcccgtgggcaaaatctggctacgtgcttatttgaacgccttcaacagcaatag

SEQ ID NO: 337700 - DNA, 1107 bp, Pseudomonas aeruginosa
atgagttcggtctcgcctgatgcattacaccctctgccggagccgttgaccccaactgactgcgacctctcgacattcgcattcatgccactggacgttcagcgattgcttacttccgagacttgggtgcttggttctggggacgagcgcgccgctgctatgactctctggcttgccagttggcaccaggttccggccgccagcgttcccgacaatgatcggatgctcgcacacctgtcccagtgcgctcgttgggacaaggtgaaggcccatgtacttcgcggctgggtcaagtgcagcgatggtcgtctgtaccatccagttgttgctgagaaggcgctggagtcttgggttgagaagctgctgaatgccatctcgggcgccaccggtaatgctcgtcgctggggtgtggaggtagatatcagcgggcttcaggggcaactggtcgaggcggttgctgctttaaaaagcatcgccccgcaatcgcgcaccttgaagaagaagggtgtaataactcttgccacgggatcgccacccgaatcgggtagtgatcgccccccgatcacaccccaaatagaccccgaatcgggtagtgatcgcaacagacagggacagggacagggacagggacagggatatttaaaagatcaagagcaggcgccgcaacagcgtcgcccttcccctgaggccggggatgatcaaccgacggaaaagcccaagcgtgcttcccgcttgccggaagactgggccttgccggatgactggctggattgggcgctgactgagcgcccggagttcagcgaggcggacatgcgtaaggttggggagggcttcagggactactggtgctcggctgccggcaagggggccacgaaggtcgattggctggcgacctggcgcaactgggtgcgcaaggagagcgcaccatctgcaactccgcggaagccggcggtgggcagcaagcgctacccgttcatcccgcccaggggctaccagctcgaggatcacgagttctggcacccgcagatgacggacacggtgctgtccactcggacccacgacttcagcacccttgagcgtttgccggacggggagggcgcatgctga

SEQ ID NO: 337701 - DNA, 237 bp, Pseudomonas aeruginosa
atgagcttcgagaccgagctgttctacgtcacccacccgaaggcggggcgcgcgctgttggggccgttcttgagcctggaggaggcggagcacgggcggcggctaatgcatagcgccgatgccgtggtgaggtcctgcgtggtcagtcatctagacgagtttacgcgctggcacgcagctaataacggggaggtatgtcgtgcattcagcctgacgcaagggggctgccatgactga

SEQ ID NO: 337702 - DNA, 1020 bp, Pseudomonas aeruginosa
atgaccaccaccccattgcacaagcaagtgttaagtcgttattccagtgtacaagcttggctggagctcttgggtaatctggggcgtgcgccggccacccttgacgcctatggccgtgcccttgcgcattacttattgcattgcgaagggagtgggctgaaacccgaatccgcgacattcgaacaagtcacgctctacatccgtgagctgctacctggcgcaaagagcgcggtggcgaattcaaccttgcaccagcggcttactgctatccggttgtggtacgaccacctcgtttttcagggtctttgcgagcacaaccccgtgccccgcggacagcatggtcggctggcccaagtgcctggacatggagggtttgtcaggggcttgctcccacggctgattaagttgccagacattcccaccgatgagcagtggcgacactttctcagtattgcggccaggtcgtctatccgtgatcgactaatgctgtcgttggcgtatttcggggctcttcgccgtgccgagttggtggccttgcgtattgaggatttagacgttgcacaccgactgatctcggtgcgagcggaaacgaccaaaggcaaacgcagccgcgtcgtgtgctacagcccagacattgcacctgtcttgatagagcatctacatgctcttcgcggcgctggctggatgcgaggttcgttgtttcgatcagcatcagatcgtaatcgaggctcgccactgtcccgttgggcgtggagtaaaacggttgaagggtgggccaaggaagcgaaactatcgcacctgagcactcatacctttcgccaccttcggcttacccatctggcccgtgcgggctggaagctccatgaactgaccacgtatgctggacatcgagaccccaaaaccactttgatttacctgcacctatctggcgcggatttaaccgcaaagatggcgcactccgtcggcagtctcgatgctcggatgttctgtgaactctttgggtctgaggcattgctatga

SEQ ID NO: 337703 - DNA, 246 bp, Pseudomonas aeruginosa
atgatggccatgtcgtttgccctggtcgactgcaacaatttctatgtgagctgcgagcgcctgtttcgcccggagttgcgtggccggccggtggtggtgctgagcaacaacgatggctgtgccgtgagccgaagcaacgaggcgaaggcgctgggcatcaaaatgggccagccattccacgaattgcgcgatctggtggcccgggaaggcctgattgcctgcagcagcaattacgcgctctattaa

SEQ ID NO: 337704 - DNA, 201 bp, Pseudomonas aeruginosa
atgacgaaagacgaactgcgcgccgagttggagcgtcagaaacagcgatttgaagaggtttacggcggcgaggtcgtgacgtatgccgcccagtcagagccagaacggaagccctggcggaagcggccgagtctcctcgataaggcgttcgccgaggagattcgcaaggaacagaagcggcagacagatctacccagttaa

SEQ ID NO: 337705 - DNA, 948 bp, Pseudomonas aeruginosa
atgcagggaaagcctgagctagagcctctgcgcactcgcatctacatcgacgggtacaatttctactacggctgtttgcgcggcaccccgtacaagtggctggacctcctacccctgtttgaaaagcacatcctgccatctgcgttggtcaaggatgccgatggccatatccgccagtcgactctgctcccctccccttcgatcaagtttttcactgccaagatccgagagtctgtcgcaaaggctgtcgactcggtttcctcccaggcgcgctatcacacggcgcttcgcaagctgcatgacgggcggattgagttgatcgaaggctactacgccgtcaacaaaatgaaggtgaagatcgtcgacgcggaggatccggacaagcctcctcgcgaatgccaagagatccaggcctggaaggtcgaggaaaaacagagcgacgtgaatctggctctgcaggcctaccacgacgcgatgaccggccagatcgatcatgctgtcatcgtcacgaacgatactgacattgcgccggcgctggagatgatcagaactcacacccaagtgctgatcggcgtagtggtgccgaccacagaccacacccggccgccgaacaccgacctggtgacgttggcccactggaagcgggaacacatcactaccaatgagcttgcggcctgccaattgccccgcgtcatcccaggtcggaagccgacgactaaaccagaatcctggtacggtcagcctgagctactgcaggagatcctggagctagctatcccggtgcgcggtagtaaggctgcagcgttcaaatggatggagcagccgaacccgtatttagggggagagcgcccgatcgagctcgctgagacggtagagggtgccaaccgagtcctggagtacattcggaactggattgcgcagcaggcgcagttgcctgctgcagactga

SEQ ID NO: 337706 - DNA, 435 bp, Pseudomonas aeruginosa
atgcgatcgaaggacgcaccaaccactgaagaagctgcagccgcggcagaggtgctgcgcgacttacaggaagccatcgccccggccggcgtccagctggcccagctcgaaagcctcaaagtggagatcccggcccaggctcttgcagcccttgccgaggccctggatcagatcgccaaggggcgcgccgtcgacctgcagggcgttccgcccgaggtggccaccagggaagcagcagcgctgctgaaccttccccaccctcgcctgctgcagctcctcgatgacggtgcgatcgcctcacgcatggccaacggtcgccgtcgcgtccaggtggtcgacttggttgcctacaggcaggctgctcaggccgaggccagcagcgcggccatggatgagttggccaccctctcagaagacttgaagctgggttactga

SEQ ID NO: 337707 - DNA, 1146 bp, Pseudomonas aeruginosa
atgacagagaaaagtgtatcaaagacagcgctaaacgctcgcctcgcgaaactcacgcgcaatgcgcagaaggccagtgaagataaggtccagcagcaagagctgttgagcgctatccaggaagaggtatccacctcagaaaagcctgaggtaaagatccagatccctctattccctcaagaaaagtcggcgatgccaacgaagtggacccggaccagcctgttcgctgccgtgaagaaggggcgccgccgcagtttcgttaaaaccccgctggccagccgcaacgatgtctcgatcctctacaccggcgagcagctcgatgctggcgacaatgatgtcttcctgcatgcaatgagattgagccaagggctggcacctggaggccagatccatttcgttcggtcccacttcctccaagcgatcggccggcaacctggaacctcgggttacaagtggctgaaggactccctgcagcgcctcgcctccgcaacgttgttcatcgaggacggcgacgggaaaggcaaaatgtttcgcctggtgaaagacatggcctggacggaatccgattattggctagcgctcgatccggaaatcgcgaccttctacagcaagcgggaattggctttcatcgacttcgatgctcgcctgcagatgacgcatggcatgtcgcgcctgctgcagaactacgtagccagtcacgagccggggaattggcattacgccgctgttgaaaccctgcgcgacttctatgcggcgagctcttccctgaagaacttcctcgatgctcactacggtttgccggcagcactggccgagctggaggagctgggcatcattgaggatcacgagttctacctgaagagcggtcgccggatggtgaaatggtggcgtccgagtgacttcggcaaatggttgcgcgcctacatcgaggagcagccgctgggctggcaccatgccttggttgaggatctgttcggcccaagccgctatcgcacgctcaaatcgttcctggctccccgcaagggcctcaagcgtggcctccacgagttagagcgcgccggcatcatctcaaaggcagagatctaccaggagaaaaccaccagcgatcagctgctcctgaaggttcgctggcatcgtgagaaatag

SEQ ID NO: 337708 - DNA, 1284 bp, Pseudomonas aeruginosa
atggcactctgttaccattttcagtgcagtagtttgaatcaaacgcagcagagggaggcgctggagaggttgacagataacactggaacaaacgtgcttcatgaagcgacagcggcagcgcttggtttttattttcagagccagtttgcgttactgactctcatttcgcagatgactagcgaggccgctgtagcggtggagcgattagacgatgtggagctaaaggtcaacggacaaagcctgctgtttcagctcaagcattctattcagagcaatcctcccgcagtcactctcggatccgtagcgttctggaaaaccatcaaggtctggatcgacgtcctgcctcttgtttccctcgcagatactacgttccaccttgtttcagttggcaaggtaccagttgattcgccgctagccgctttgtgcgatccgaacagtgaccgccaagccctgctgctggcgatggaagaggaagccgatcgcgtaattgccgagcgggccaaggctaaggaggcgggtatcaagcttccacatactgctcgggggccagggtgcgatgcttttcttaaacttgaacccagcgctaggttgagcctgttgcgtcgagtgattattcaacaagacagcaggaccatcggacaaatacctgctgaggttgccaggcggttgcatatcattcctcgcctgcaacggcagcaggcagcggagcgcctactgcagtggtgggatcagcaagttgtattcagcttgtgtgggaagcgcgaacgagtcattcagcgtagcgaaatggagcagcaaatatcctccatcatcgcggatttggaggatggaacactggttgctgagttcacgaactttacgcagcctgaggactacgagcccgatggaatgctgacccgccaaattgagcttgtgaacgggagagcttcggatatcgctaaggctatccgcgctcaatggcgggccaaagagcagcggtccagctggatcaacaataatccgcgaatgcgctcgacaatcgcgagctatgacagcgtgctcaccgaacgctggtctgatcgccatactcagatggtggaggattgcgctgaccttgaaccggctcaggtagaagcaaagggattagagcttctgcgctggactcatgagctcgctccaaaccaagtagagcccatcgctcatggctggagcgctcattactacgtacaaggcacttaccaagtgcttgcaatcgaccttcatgtgggctggcacgcagactacctgaagcttctcaaggattag

SEQ ID NO: 337709 - DNA, 4770 bp, Pseudomonas aeruginosa
gtgtacagcctcggcaggctggatatcgcccgcgacgatgccggcaaccgtgccgccagcctgcgcaacctttccggggtgatcgagagcggcaaggacttcagcctgcgtgccagcctgatcgagaaccgtcgcgccgtgctggaaagcaagtcgggcctgtacaccgcgaagatggagcagaccgcctgcatcgaaggcgtcaacgcgggcgactgcagcggcaagcgcaacgccatctggaccatcacccagcgcgacaagaccgaggtcaccgccagcagcgccatggggcaactgctggccggaggcgacttcgccatcgacggcggcaccctgaacaacctttccagtctgatcggcagcggcggcaacctcaccgccaacctcgaagtcctcgacaaccagggcctggaaaccggcgagctggaaaccatccgcgtgctgcgtaccgctcgcggcggcgatatcggcggcatcgaccagaagtcgcgcaacttcaccaacctctactggtaccagagcgccaatttcgacccggcgcgcgcgggcgagattcccgccgcgctcaacgcgatcctcagcgactggtccttcgagtacgaattcccgagcaaggggccgaccccgatcagcagtggcgaccagtcctacgcagcggtgatccaggccgccggcgacgtcacggtcaatgccagcacgcgcatcgacaacggcgtcacccgccccggctacaccttcgtcggcagcggccgccaggtgggcgacagcgcggtgggcggcagcggggtttcggtggtcgtgccgctgacctcgcaactgccgcccgacctggcgcggcgccaggtcaacccggtcaccctgcccggcttcagcctgccccagggcgacaacggcctgttccgtctcagctcgcgcttcgccgaggacggcaatggcagcgccgcgctcggtgccggcgccgaccgcacccagggcggcagcggcgtctcggtcggccagcaaggcgccggcaacgtcgccggtacctggcagggccagggcgtgcgagtcgacggcctggctggcgcggccaacgtccagggtcagggcggcagcacgctcggcggtagcctgccgggcgtcgcccgggtccagggcgtgcccggcaacgccacgccgagcgccagccacaagtacctgatcgagaccaacccggcgctcaccgaactgaagcagttcctcaactcggactacctgctcagcggcctgggcatgaacccggacgatagcaagaagcgtctcggcgacggtctctacgagcagcggctgatccgcgacgcggtggtggcgcgcaccggccagcgctacatcgacgggctgagcagcgacgaggcgctgttccgctacctgatggacaacgccatcgcttacaaggacaagctccagctgcaactgggcgtgggtttgagcgcggagcagatggcggcgctgacccacgacatcgtgtggctggaagaggtcgaggtgaacggcgagaaggtcctcgcgccagtggtctacctggcccaggcggagggtcggctggcacccaacggtgcgctgatccagggccgcgacgtgaagctggtgagcggcggcgacctgcataacgtcggcaccctgcgcgcgcggaacgacctctcggcgacggccgacaacctcgacaacagcggcctgatcgaggccggcaagcgcctcgacctgctcgccggcgactcgatccgcaaccgccagggcggggtcatcgccgggcgtgacgtgagcctcaccgcgctgaccggcgacgtgatcaacgaacgcagcgtgacccgctacgacagcgcgctcgacggccgcacctgggagcgcagcttcgccgacagcgccgcgcgggtggaggcggcgaacagcctgaacgtccaggccggacgcgacatcgccaacctcggcggggtgctgcagagccgcggcgacctcagcctcgacgccggacgcgacgtcaccgtcgccgccgtcgaggaccgccagggccagacccgctggaacacgtcgcggctacagagcgtgacccagctcggcgccgaagtcagtgctgggcgggacctgaacgtcagcgccgggcgcgacctcagcgcagtggccagcgccctcgaagcgcgccgcgacatcgccctctccgccgggcgcgacgtgaccctggcggcggcggcgaacgaggagcatgcctacagcaagaccaggaaggtcacctaccaggaagacaaggttgcccagcaaggcacccgcgtggacgccggcggcgacctggcgatcaatgccggacaggacctgcgcctgatcgcgagccaggccagcgccggcgacgaggcctacctggtggccggcgacaagctggaactgctggccgccaacgacagcaactactacctgtacgacaagaagaagaaaggcgacttcggccgcaaggaaacccggcgcgacgaagtcaccgacgtcaaggcggtgggcagccagatcagcagcggcggcgacctcaccctgctcagcggcggcgaccagacctaccagggcgcgaagctggaatcgggcaacgacctggccatcgtcagcggcggcgcggtgaccttcgacgcggtgaaggacctgcaccaggagagccatgagaagagcaagggcgacctggcgtggcagtcgtcgaagggcaagggccagaccgacgaaaccgtgcgccagagccagatcgtggcccaggggaatctggcgatcaaggccgtggaagggctgaagatcgacctcaagcatatcgaccagaagaccgtgagccagaccatcgacgcgatggtgcaggcggatccgcaactggcgtggctgaaggaggccgagcagcgcggggatgtggactggcgcatggtgcaggaggtgcacgatagctggaagtacagtaactcgggcatggggccggcgacgcagatcgctgtcgccatcgcggcggcagccatcggtggcatggcggcagcgggagcgctcagtggtgcaggagtgggtgccagtagcttcgccatgggcgcaggagttggtgcggcaggaagcctgtcgggcacggcagcggtcagcctgatcaacaacaagggcgatctcgggaaggtgctgaaagacagcttcagtagtgacagtctgaagcagattgctattgcgagcctgaccggggggctgacggctgagtacttcgacgggattcttcagaccaagactgatccgcttactggaaaggtcacggtagacctcagcagcctatctggtgttggtcgcttcgctgccaatcaggcgatgcagaacgctacatccactgtactgagccaggccttgggccagggcgggagcctgaacgaggcgctgaagagcgcgctctacaacagtttcgcggcggcaggtttcaacttcgtcggcgatatcggccaggaatacagcctgaagccaggcgatccttcgatggtgaccatgcacgccctgatgggtggcctggcggcgcaggtcagcggtggcgatttcgccacgggcgccgcggcggctggcgccaatgaagcgctggtggccaagctagaccaggccttcaagagcttgagccctgagaaccgtgaagccatggtcactatggggtcgcaattggttggtgttctggctgcggcggtacgcgatcccgatgcgacaggcaaagctctggaaagcgctgcttgggtagcgaagaactcgacgcaatacaacttcctcaaccatcaggatgtggccgatctggataatgccttgcagaaatgcaagtcccagggaaattgccgtcaggtagaggaagagttcaaggcgcgtagcgacgagaaccggcggaggttgaatggctgcgtggctgtgggtaattgcgcggagattcgtgcggagatcgatgcggggtctacggctctcaacgagctggtggcccggcaggaaacagctaatccgggaggaagtgacagcgatatagcctacggtttcctgatgggccgaaacgtcgtcgactggacgacggctggtcagttgcacctggagcagaccgccaacctctggtggaacggtaatccacagtggcagaaggaagtcggtgcatacctggaccagacggggttcaaccccttcggaatcggcgttccggcaatgggcggtgccgctggcaaggtatcggccaaggcgctcatgaatgcgctgaaggcgggagagttgcccaaaggagaggtggccccaggaaaggctaatctgcctaccattggggcgttggcggatgctgaggcgggaatgccttatacccatccagttaagctcgccgcaaaagcgactgggacagcagggaagattaagattgaagccggcgcaatacctgacgcaaatgaagtacgtgcaggacaagggttatctggtcttgggtacgatgttacgcaccaaaccactgcgtcagctaaaggtattcaagggcagcgaactgcggacttgcatgttgatggactcggttccattgatgtgtatacgccgaagaatcttgatccgacaaagatagttcgagcgatagagaagaagtcgaatcaagccggcggagtcttggtgcaggcggacttgccaagcactgacatgtcgtccattgctgctcgtatgtgggggaagactaacgcgcagagtataaaaactatatttttccagaaaccagacggatcattggtccgatttgatcgacctgctggaggaggctga

SEQ ID NO: 337710 - DNA, 1017 bp, Pseudomonas aeruginosa; identical to SEQ ID NO: 334330

SEQ ID NO: 337711 - DNA, 318 bp, Pseudomonas aeruginosa
atgcaacagaaaacccaaaacgcgcaacccccgcgctctgctcatcaactcgcatcagacctgctggatggcctcgaagccgctgttgagaccgtcaaggggctgcgcgccatccttgcactggtccgtagagatgagcagtgcagcagttacctcaaggatatctgcacgataggactcggtcaggccgagttcgttggtgggaaccttgaggatgatatgaaacaggccgacgcagaattgttcgaactggaacgtgtcgcgacccaatccggaaatgctgaaaacgtgtcgcaacacgaaggaggtgcagcatga

SEQ ID NO: 337712 - DNA, 273 bp, Pseudomonas aeruginosa
atgagcgcgatcaagctcgggctgtctgcactgaatggaccggtatctcagcttccgccgcgaagattcgcagcgattaacccgaccacgacggtcgaagaggcgttgagcgaggcgatcgcgctgacgctaagtgtttctagcattctcggagcactgaccacctccgacgaagagcacgcgtgcttgtacgccctggagattgctgcagagatggctggcgatttggttgacgccgcgctcgactccctgcgtgaggagggccagcaatga

SEQ ID NO: 337713 - DNA, 342 bp, Pseudomonas aeruginosa
atgaacgtcgtaccgattactggccgcctccctgaagagcagccgaaagctacccatctgccgctctgcaccgtgctgacgccggagctggcccgttgcctggaagccgtcaacagcgccacccgcgccttgcgccaggccggcattccgattgagcagacgtcgttactcgatcgccgcctgttcatccgcgaagaggattcgctgcggctgcaccgccgcttccgcaacgccatccgcggcattcgccagaccactcgcgggctggtcaccgtccatgtcgtcagcctgctcggtgttgacgtggcctggacgaccccagtgaaggagcaagaccaatga

SEQ ID NO: 337714 - DNA, 1098 bp, Pseudomonas aeruginosa
atggttcacaaccggatcgacccgcctttcacccgctacctcgacagcgacggtcggcccctcggcgagttgcccgcctgggccggcgacagcgatgcgctggtcggcctctaccggcagatgctcctgacccgcctgttcgaccagaaggcggtggccctccagcgtaccgggcggatcggcacctatgcgccaaccctcggccaggaagccatcggcgtggccatcggcagccagatgcgcgccgaggacgtgctggtgccgtattaccgcgataccgccgtgcaattgatgcgcggcgtgcgcatggaggacatcctcctctactggggcggcgacgagcgcggcagcgactacgccgaaccgctggcggcgcaggactttcccatctgcgtgccgatcgccacccaggccctgcatgcctgcggggtcgcctcggcgttccgcatccgcggcgagcaccgggtggcggtgaccacctgcggcgacggcgccaccagcaagggcgatttcctcgaggcgctgaacgtggcgggcgcctggcagttgccggtgctcttcgtggtcaacaacaaccagtgggcgatctcggtgccgcggcgcatccagtgcggcgcgccgaccctggcggagaaggcggtgggtgccggcttccccggcgaacaggtggacggcaacgacgtgctggcggtcgccgaacgcgtccgcgcggccctggagcgcgcgcgccagggcaaggggccgaccctgctggagtgcatcagctatcgcctgtgcgaccacaccacggccgacgacgccagccgctaccgttccgccgaggaggtcaaccaggcctggcgcgaggagccgatcaagcgcctgcgcgccttcctcgccggccgcggccagtgggacgaggagcgcgagcaggcgctggtgggcgagtgccaggcgcgggtgcaggaggcggtggagcgtttcgagacgttcgccgcgcaggcgccgcaggcactgttcgagcatgtctacgcgcgctggccggcggtcctggaggagcagcgcgagcaattgctggagcgcgccgcgcggcggcagggaggggccgaacatgaatga

SEQ ID NO: 337715 - DNA, 435 bp, Pseudomonas aeruginosa
atgcgtacatcccaacgaggcatagacctcatcaaatcgttcgagggcctacgcctgtccgcctatcaggactcggtaggcgtttggaccattggctacggcaccacgcggggcgtcacccgctacatgacgatcaccgtcgagcaggccgagcggatgctgtcgaacgacattcagcgcttcgagcccgagatggacaagctggtgaaagtgccactgaaccagaaccagtgggatgccctgatgagcttcgtgtacaacctgggcgcggccaatctggcgtcgtccacgctgctcaagctgctgaacaggggggactaccagggagcagcggaccagttctcgcgatgggtgaatgccggaggaaagcgactggggggcctggttaagcgccgagcggcggaacgtgtcctgttcctggagccgctgtcgtga

SEQ ID NO: 337716 - DNA, 2931 bp, Pseudomonas aeruginosa
gtgcgggcctggcaggcggcgcgggagcatcaggtacaactgatcgtcggcagcgaaatccgcctcgaacaggggcccaagctggtcctcctggcggaggacctggagggctaccagaacctctgtcgcctcatcacccgcggccggcgacaagccgacaagggccactaccggctgctgcgcgaagatctgcaacagccgctcgccggcctgttggcgatctggttgccgaacgaccatggggacgagcaggctgcctggctccgcgaacgcttcccccagcgcctttggctgggcgtcgagttgcatcgcggcgccgatgacgatgcccgcctggacaaactgctcgcgctcgcctcgcatctccggctaccgcccgtggcctgcggcgacgtccacatgcacgcccgcggcaggcgagccctgcaggactgcatgacagcgatccgcaaccatcttccggtcagcgaggccggcgcctatctcttccccaacggggaacgccacctgcgtaccctggaggccctgcaggggatctacccgcaagccctgctggcggaaaccctgaagatcgccgaacgctgccggttcgatctggaacagctgaaataccagtacccacgcgaattggtaccggccggacacgacccggcgtcatggctccgccatctcaccgaacagggcatcgccaggcgctggccgaacggcgcgagcgccaaggtccgcaagcagatcgggagagaactcgagctgatcgccgaactgggctatgaaagctatttcctcaccgtgcaggacatcgtcgccttcgcccggggccggaaaatcctttgccagggccgcggctcggcggccaactcggcagtgtgcttcgccctcggcatcaccgagttggacccggaccggaccaacctgctgttcgagcgcttcctttcccgcgagcgcaacgaaccaccggacatcgacgtggatttcgaacacgagcgccgcgaggaggtcatccagtacgttttcacacgctacggacgccagcgcgcggcgctgaccgcggtggtcagcacctaccacggcgccggcgcggtgcgcgacgtagccaaggccctgggtctgccgcccgagcaggtcgacgtcctggccaactgctgcggccgctggagcgaccaggcccccagcgccgaacgcctggaagaggccggcttcgatccgcagagtccgatcctgcgccgggtgctggccctgaccgacgagttgatcggttttccgcgccacctctcgcagcaccccggcggcttcgtcatctccgagcagccattggacaccctggtcccggtggagaatgccagcatggccgaacgcacggtgatccagtgggacaaggatgatctcgacgcggtcggcctgctcaaggtcgacgtcctcgccctgggcatgctcagcgccctgcgccgcagcttcgacctgatccacgcgctgcgcggcggcaagcggttgagcatcgccagtatcccgagcgaagacccggctacctacgaaatgatcagccgcgccgataccatcggcgtgttccagatcgagtcgcgcgcccagatggccatgctgccacgcctgcgcccgcagaagttctacgacctggtgatccaggtcgccatcgtccgcccagggccgatccagggcgacatggtgcatccttacctgcgccggcgaaacggtgaagagccggtggcctatccatcggccgaactggagaaggtcttcgaacgtaccctgggcgtcccgttgttccaggaacaggtcatggaactggcgatcgtcgccgccgactacacgccgggcgaggcggacgaactgcgtcgttcgatggccgcctggaagcgtcatggcggcctggaacaccaccgcgagcggctgacccggggcatgctcgccaagggctacgaggccgacttcgcagcgcgcatcttcgagcagatcaaaggcttcggcagctacggtttccctgaatcccacgccgccagcttcgccctgctcacctacgccagcagttggctgaaacgtcacgagccggcggccttcgcctgcgccttgatcaacagttggccgatgggcttctacagccccgaccagttgctccaggacgcccgccgccacaccctgcagacacgcccggtggatgtccgccacagcggttgggattgcagcctggagccgttcggccaggcgcaaccggccatacgcctcggcctgcggatgatccgaggctttcgcgaggaggatgccaggcgtatcgagcaggtccgggaggcccagccgttcctcgacgtgcacgatctcggccgacgcgccaggctcgacgcccgggccctggagttgctggccgatgccggcgccctgcgcggtctcgccggacaccggcacaaggcgcgctgggccgtcgccagcgtcgagccgcaattgccactgttcgccgaagggaccgtcatcgaagaaaccacggtcagcctgccgctgccttcgcgcggcgaggaactgctgagcgattacgctctcctcggcaccaccctcggcccgcatccgctgaaactcttgcgtggacagctcaaggcctgccgctgccgcgactcccgcgaactggcgaaactgggacatggacgaccgatacgggtcgccggcctggtggtcggccggcagcgcccacagaccgccagcggcattaccttcatcaccctggaggacgagttcggcatgctcaacgtggtggtccggcacgacctcgccgaacggcagaggcggccattcctcgagtcccggctgctgcaggtggagggcatcctggagtcctccggcgaggtgcgccacgtcatcgcagggcgcctgcatgacctgacccctctactcaccggcctggacgtccgcagccgggatttccattga

SEQ ID NO: 337717 - DNA, 381 bp, Pseudomonas aeruginosa; identical to SEQ ID NO: 321248

SEQ ID NO: 337718 - DNA, 489 bp, Pseudomonas aeruginosa
atgctcagtcagccggcctacacgaagtttttcgataacggcacgctcaacatcctgttcaccttggcgctcggactgccgatcgccgcggcggtccagcaccggacgccggcgctgatcgtcggcgcagtgctctgcgtggccatcgcatacgcctatggttctgttatcgcgtacggcatgtggggcgtgctgctgccggcggtcctggttgtggccatacgctctcagggttcggatctcttccaggtactcgccatcggcgccggcctggtcgcactgctggcaaacggcgcgctgctggcggtgttccgcgatctatcgccagtccaatacagccaggttgccgcaatcgctgtcgcgccgttgctcggcttgctgatgctgcaggtccaggcgccgccagtgcgcccggtcggtcgctggatgtatccgttctatgcgctgcatctcctcgcgctgagttcgctcgaaatcgcctggagctga

SEQ ID NO: 337719 - DNA, 270 bp, Pseudomonas aeruginosa
atgcccctgcaccatatctcaaaaaagcatgcctccggcggccctccgggggcgctcgccgctgggcaggggtgccgggggaagagcacccccgacaccctctgcggaggcttgggtcgctacatgcgcgtcaaggggccgtggcttcggcgctacgcgcctgcaggccgcaccaaccccttgacccgcactccgctcaaaaagctaaccacggagctcctgcgcaggcaaaagagcaaagcaaaagcagcccaaaagggaaaggaatga

SEQ ID NO: 337720 - DNA, 837 bp, Pseudomonas aeruginosa
atgtcagtaaagaaacgggcttacgttccccgcgttaacggcggcggtaatttctgtgggcaccggcctgacgccccacggctggagctggtgaagccctcgacgctgaaaaatcgcccgaagatcctcggtcggctgcaggaagaagtgcagcagtactaccgttcgccctctcgtctcccctcgttgaatgcagccaatcgcagcaagcgacagcagcgcagcgagcgccgcgaggcgtgcatcctggtactcaactcaatcctggaatacaccgacctaacgtcgctgcgatgcggcgtgcctacctcaacaggattccagtcgctgacctttgagttcctggcccagtttacgggcatgggtcttcgccggattgagcgtgctgtagctgacctcaagattggcaacatcctcaccgtctcccagccgagacagctccaggaagatggatcctacaaggggcttgccgcggtgaaggcggtcaattccctcctcttcggtgcgttcggcctgctcaagtggctgaagcatgaacgccagagggcaagcgagcgcctggccaagaaggccaagaagcaaggcggcaacctcgggcaatggtcgcggagcgccttggctatcggccgcatgctggtggttggcaagcgcacgcatgacggactgccgaggcgtggctcgccagctgcatcatctcccccgcgagtcgatgcagaaacgtacgggcgaatgctcaatgacctggtgctggcattgaagcaggaagaccccagcagagacggcgcgacatgtcgccaaatcgcagaagcgatactgaccaagaaactagccagctaa

SEQ ID NO: 337721 - DNA, 252 bp, Pseudomonas aeruginosa
atgaacgtggaccgagccacttgccaacagctgtttcgccacggcgtgctgaaagccgctgtggtcgtgccatttccgatggcgaatgacctgtggacgatggagatcgagcgtgcggacggtgtgcgcgagcagctgacgatcgcccgcaagaaagatcccaagacctacaaaaccctggcggcagccatgactgacgctggccgtattggcttcaaagaggttcgggtaaagattccagaacaacactaa

SEQ ID NO: 337722 - DNA, 867 bp, Pseudomonas aeruginosa
  misc_feature (837)..(846): n is a, c, g, or t
gtggataacgctcgtgactgtgtgaccaaggaaattgttgaggccgaagacctcaagctgttggcagtggtggacacctatggctaccagtgcaccggctgtgaaactcaggctttcccgcgctcctaccgcccggaaaacctattgcgcgctcactttcagatccgcgaccctcatagcccagattgtgagacggagaaagagagcaaagttatagctcagggcaagcgcggcagtgtacagaaggagctagagacctcccccggtttatcgcctgcccgcttgcaactgattaatactcgaacaatcgtcgaccccgccttgcctcgcacagagcaacatacacagagcattggtcggcaggacactatgggcaacacagcacgcagagaaggacggcgcgctgcaaatagtattcgcccgatttgccgtgcatttttgcgctttccctacgatcggcacctctcgctcgaggtccccggcgttgctccaaatacgtatcaaacggccttcaagaaacttcgttcggatgggttggggcagttcgctcaagcgcgtgtgttctatggagagctggcatggtctcaggccgtagagtcgtccgaatacctgaccatttcgctcaatgcgggagagtggaaagatgaaaagcttacgccctaccaagtgatcgtccactggttagaatggtcagcggttgcacgcggccggctcaagaatgagctggaagtagcccgaaaggaggggatggaagccaaaaaagcgaagcaggcatctcgcagctttctcttcttcattggcaatcaagacgcaaaaaaacctgcactgttccatgtnnnnnnnnnngttccatgtgcaggaccatag

SEQ ID NO: 337723 - DNA, 138 bp, Pseudomonas aeruginosa
atgagtgatgagctttatgtttccgtcgatgtcgagacttcgggaccggtgccgggcatctatagcctgctctccatcggcgcttgcgtcgtctcagagtgcggattccacgccattcggacactcagcccacgctga

SEQ ID NO: 337724 - DNA, 1200 bp, Pseudomonas aeruginosa
gtgttgatcgtgatcgtgctgtggttcgcgaccgtgtactccggcatccatgcctccctggccgggatggctgcggggctcctgatccccgcctacgcgacgcagcgtcacaaagtcgtcgcggcaagacaactgttccgtgacttctggcagtctccgagtgccgcatcggcccacgcggtggaccgcggactatcccgcggtatctctgtgaacgagcggctgcacgagttcctgcggctgccggcggcactgctgatcgtgccggtgttcgccttggcgaacgccggggtggatctgcgtggcgggttgctcgctgaggccttcggctcgcccgtgacctggggcgtcatctcgggactcgtgctcggtaagcttctaggcatcgggctcatcactctagccgcagtccgcctcggactggggcgcctgccggtgggcgtcgggatggggagcgtgttcggtggtgcggcgctgtccgggatcggtttcaccgtgtcgctgctcatcatcgggctcgcgttcggtacgacctctgacctgggccgccaggcgacggtcggggtgctcgtgtcgatggtactcgccacgttgctggggtggctcatattcaaggtcgccgctctcaagtggggggaggagactgccgatttgccgatggtacttgagccaccagtcgatccggagctcgatcacatccgcggtccggaggacgcccagctcacgctcgtggagtacgttgacttcgagtgcgcgtactgtgcacacgccaccggatcgtgggacgatctgcgcgcccacttcggggacgacctgcggtatgtggtgcgccagttgccgcaccacccccacgggccgatcgccgcgcgggcgtccgaggcggcatcgaaccaggggatgttctggccgtggctggacttcgtgttcacccgtcagcatgcgctggagcgagaggacttgatcggctacgccgccgagctggggcttgacatcgatcggttcatcgcggatctcgacagccccgcagtgatagagcgtgttgagcgtgacctcgtcagcgcggtcgccagtggtgcgcacgtcactcctacgttcttcatcgagggtcgtcgtctgctcggcagttacgacgcccgcactctcaccgcagtgctcgaagccagtcgccgcggccctcgcactcaggaagtcccgtcctga

SEQ ID NO: 337725 - DNA, 1233 bp, Pseudomonas aeruginosa
gtggaacgcctggccggccattggcgcaacctgttgcgcggcatcgtcgccaacccacgacagcggctcggcgagttgccgctgctggatgcgccggagcgccggcagaccctctccgaatggaacccggcccagcgcgagtacgcggtgcagggcaccttgcagcagcgtttcgaggagcaggcgcggcaacggccgcaggcggttgcgctgatcctcgacgaacaacggctgagctacggcgaactgaatgcgcgggccaatcgcctggcgcactgcctgatcgctcgcggcgttggcgcggacgtgccggtcggcttggcactggagcgttcgctggacatgctggtcggcttgctggcgatcctcaaggccggcggcgcctacctgccgttggacccggcggcgccagaggagcgcctggcgcatatcctcgacgacagtggggtacggctgctgctgacccaggggcatctgctcgagcgcctgccacggcagacgggggtggaggtgctggccatcgacggactggtgctggacggctacgccgagagcgacccgttaacgacgctatcggcggacaacctggcctacgtgatctatacctcgggctcgaccggcaagcccaagggcacattgctcacccaccgcaacgcgctgcgcctgttcagcgccaccgaggcctggttcggcttcgacgagcgggacgtgtggacgttgttccattcctacgccttcgatttctcggtctgggaaatcttcggcgcgctgctctatggcgggtgcctggtgatcgtgccgcaatgggtgagccgttcgccggaagacttctaccgtctgctgtgccgcgaaggcgtgacggtgctcaaccagacgccgtcggcgttcaagcaactgatggcggtggcctgttccgccgacatggcgacgcagcagccggcgctgcgctacgtgatcttcggtggcgaggcgctggatctgcagagcctgcggccgtggttccagcgcttcggcgatcgccagccgcaactggtgaacatgtacggcatcaccgagaccacggtgcacgtaacctaccgtccggtgagcgaagccgacctggagggtggcctggtcagtccgatcggcgggaccatcccggacctgtcctggtacatccggagggtggcctggtcagtccgatcggcgggaccatcccggacctgtcctggtacatcctcgaccgtgatctga

SEQ ID NO: 337726 - DNA, 324 bp, Pseudomonas aeruginosa
atggcgttccaggctgatcggttcctctggttcaacagttccagcgggcagacagtggcgccggtttcgattgtcggcggccagatgttcatcaacaacgcgatgatccaggacggctcgatcacaaacgcgaagatcggcaacgtgattcagtcgaccgccctcggtgccaacggcgagccgctgtggaagttggataagggcggcgcgttcacaatgaacagcgcaacgtcgggagggtttatgcgtcagacggcagaggcaataaaagtgtatgacggaaacttggtgcttcgagtccagatcgggaatcttgatgtatga

SEQ ID NO: 337727 - DNA, 651 bp, Pseudomonas aeruginosa
atggcgctgtctcgcgtgaagccggcattgaggatgccgcgggcgtcttcgtgggcggccaggaaggcgtctacctcgtctatcagtagtgtcggtgcccacagctcgatggagcgatacagcgcagcgggggcaatgttcgacacctgcaagggacggttggccaacttgcccagggcggtgagcaagatagacttgccacagcgcttttccggcgcagtgatgttggcgatgggcgccacctgcaccacgtccaccagccaggtgaaggcagcccacaacgcggcagcccgcagcgtttccttgtccgcgatcacgtgccgggccagggcatgggtcacgtcatcgagcaggtctgcaccatccaccggctccggccacggctccacctcttcgaagatgctggcgttagcgggcccggcgtcgtcgtccacgcaggcggttaagcgatcgaactcggccatgcttagcaccttggcgtccttgacctgggcgcgcagccgggcaaaggcagcggggtccttggcgcgcatcttcttgagctggccgaggatggtggtctcgtacagggcgccagcatcctcctccagtctcttgagcgcatcagccacttggtcaacggtggcccattggtctgcaaagcggtcttga

SEQ ID NO: 337728 - DNA, 603 bp, Pseudomonas aeruginosa
atgactcatcggtcagtccgtcgttgcattgcgccccggcctgttggatgctgcaccgatagccgtccggagagtcgcggaccgatccaccgcgcccaggcaagagacggcccgtccctcgcggagaaccataacaatgcctgccagttccatgagccgccacgcgcggcaagtgctgaccgtcgcccagggcaagatcccgccgggcggccctgcgaccgatccgtccatcgcccgctcctggctgcgctgcctggaacagcaccatctcgatcccggccagccgatggcgccgatggtgctggagcacgcgcgcatgctcgaacgccgcgagcgcctgcaacaggtgctggagatcgccgatggcgagatgcacagcctctaccagcagctttccggcaacgaccacgcggtactgctcaccgatgcccgcggggtgatcctcaattgcgtcaacgccgacgcccagcgccagaccttcgaacacgccggcctctggctcggtgccgactggagcgagccctgcgaaggcaccaacggcatcggcacctgcgtggtcgagcggcaggccctgaccatccagcaggaagagcacttccgtag

SEQ ID NO: 337729 - DNA, 339 bp, Pseudomonas aeruginosa
atgtgcctcgcacttttccagcatgtagcgcagcgaatccagcagttcgcctttgtccgggttcataccgatgtcgtggccgatggcttcccacgcctccagaacggtgatcacctcggagcggaacccggaataccagagctttaccgcttcttccttgtgcagcgggtagccgagcccggctgcttcaagctcgtcctcggttggcccctccggccgctcctgcttctccagctccgcgaccctggccagggcggcgtcgcgctccgccgtgcggcccgaaaccagaccatcaagacgagcaatttccgcttcccgttctctgatttcgttctgtaa

SEQ ID NO: 337730 - DNA, 1272 bp, Pseudomonas aeruginosa; identical to SEQ ID NO: 337686

SEQ ID NO: 337731 - DNA, 753 bp, Pseudomonas aeruginosa
gtggaggaggatcttgccggcgtcgctgaccaggaaggcgtagccggcaccgtcgaacttcagggaattgaggatcgcggtcagggtctccagcttcatgtcgccggcggcgacgcccagcagttgaccggcgtgccgcaccggcagcgacatggcgaggatctgctcgccggtaccggcatcgacgaaaggttcggtgacgatcagccggtcggccgccagcgcgtccttgtaccaggcgcgggtacgtgggtcgtaaccttccggcatggcgtcgtaggggcgcatggtgaaggtgccgctggccgcctcgccaagatagaccgacgcgaaattgcggctgaagacgggctgttccagttgccttgcgatattcgcctcgtcgggctgctcgagcagcgccagttgcgaggccaggccttccaccaggtgcatgcggccttccagccagctctggatgttgctggcggtcagggtgccgatttccccgaggtagttttccgtgtccgtgcgcacggcctcgcgctgtcggtaatcgttgtagaggatgaagcaggtgaaggcgaaaaccaccaccagcgcggcggcgagaaggattttcttggcaaacgacagcgagcgaagcatgagcgatgcgtcctggcaaaagcctcaagaagggcggggagcccaggccaccaggtagggagcttgcgggggaaagccatgatccagcgcctgaacggccggctttgtagcatagtgccagcataa

SEQ ID NO: 337732 - DNA, 423 bp, Pseudomonas aeruginosa
  misc_feature (360)..(369): n is a, c, g, or t
atgtcaaccggtatgtttattctgcactccaactatacgccggcgggggaccagccagaggcgatagcgcgcctgctgtcggacatagaagaaggtgcgacgcaccagacgctgaaaggtatcaccggctcaggtaagaccttcaccatggccaatgtgattcatcgtctgaagcggcctacgttgatcttggctcctaacaagacgttgaccgcgcagctttatggtgaaatgaagcacttctttcctgagaacgcggtcgagtacttcgtttcctactacgattattttcagcccgaaatctatatgccgggcaccgatcgtttcattccaaaggactcggccatcaatgaccacctnnnnnnnnnnaggcttgaccttctcgaactcgtcaaagttcaatggccggttgttcttcgatga

SEQ ID NO: 337733 - DNA, 699 bp, Pseudomonas aeruginosa
atgagcggactcgacaagcgagtaggcagttacgaagaggccctcgaaggcctgaccgacggcatgaccgtcctcgccgggggcttcggcctctgcgggattcccgagaacctgatcgcggaaatccgccggcgcggggtcagggacctcacggtggtctcgaacaactgcggcgtcgacggtttcggcctcggcgtgctgctggaagaccggcagatccgcaagatgatcgcctcctacgtcggcgagaacgccctgttcgagcaacaactgctcagtggcgagctggaagtcgaactgaccccgcaaggctcgctggccgagaagatccgcgccggcggcgccggcatcccggccttcttcaccgccaccggctacggcaccccggtcgccgagggcaaggaggcgcgcgagttcaatggccgccactacatcctcgaaccggccatcaccggcgacttcgccatcgtcaagggctggaaggccgaccatttcggcaacgtcgtctatcgccacaccgcgcagaacttcaacccgctggtcgccaccgccgggcgcatcacggtggtcgaggtggaggagatcgtcgagcccggcgaactggacccgacgcagatccacacccccggcatctacgtcgaccggatcatccagggtcgcttcgagaaacgcatcgagaaacgcacgctgcgcgcctga

SEQ ID NO: 337734 - DNA, 729 bp, Pseudomonas aeruginosa
atggccaacattgctagattctttgatgagcgtaaagccatagatcttgctatcgattttgagttgaatacgattgatcttgatggtcagttggcgagcccatatattgtcaactcaatcctgatgctgatggatgttggacttattcgactgatggatctgcgactgtacaagcacgaattcggattactcaacctaaagcgcgcgagttctggtgagcaatgcctaatcgtattaatgttaggtattgcaggccatatcgaagatggttctttgattctcatagatgaacctgagataagcttgcatccacgttggcaggaggagttcatgcaactactttcgcgctcattctggagatatagtttttgtcaattcatagtggcgactcactcccctcaagtggtgtctcaaatcggtaggcaaaactcatttgtattgtcacttccaagtggttacctgcacgaaggggacagctttaaaaacaagtcagctgacttccagctggctgaattatttgacgctccgggcatgatgaatgagtacatctcaagaattacatttgatctaattgccaaattaagatcccgaaaatcagtatctgatgagatgcttcgtgacattcatcaattaaggtgtctcagacgcaagttaaaccatgaagacccaatggtaaaactgatcgattccgctgatgagctagtgtcttactatgccaacgatatctaa

SEQ ID NO: 337735 - DNA, 189 bp, Pseudomonas aeruginosa
atgctcaacaggcgcattggcagcggccctgagtcctatcggctcacgacaatagggacagttggcacgttgttcccgccggtaaaagtcgcgaatctcgcaccgcacctgctcaagatcgtcatccccccagcgcgtatgactatatcctggttcaagactaatctgagtaattatcgtctgtgttga

SEQ ID NO: 337736 - DNA, 279 bp, Pseudomonas aeruginosa
atggttcagtgcggcattaagcatccggcgcgggctaagcatcaggatgtctcacactttctggtgagaggcattctggtcccgccagtctccgggcagcaactggagccggcgaatattttcgccggcatttgccgtctgccccagggtacttgccttggctcggaccaggagcagagcctcagcaatccgcaggtgatgatcaaccgcaagcgtgttcaagcgcttggttcgcaatcggccaagggtcagacggggacgatgcacggcatccattga

SEQ ID NO: 337737 - DNA, 501 bp, Pseudomonas aeruginosa
gtggaaaccatcaacctttccgacggcgtgccgatcgaggagcatctcgaacgcattaccgggcacagggaggtggatcgcgtcatcgactatgttggtgtggactgccgcgggtttggcgcggaggctgacaagatcgtggagagcgctgttaccaacgcaatgctcaaatatgtccgcttcggcggaatgaccagtacggtcggtgtgtactgcgcaaacccgatctcgaaagacccgaaagccaagaaaggccatatggatctggaatggtccaacgcctggatcaagtcgccgcgaatgtcggctggtcaatctccgacggccaactacaaccacgcgttaatgcgggcgatactgaacgatcgcatgccttacctttcgccgatgatgaacactaagttcatcaagctcgaagacgcgcccgccgcgtacaaagagttcgacgcgggttctgcatacaagtacgtcatcgacccgcatggttcagtgcggcattaa

SEQ ID NO: 337738 - DNA, 198 bp, Pseudomonas aeruginosa
atgcgcaacgccggcggcgccgtgttcgtgaagcacggcccgttcttcgtgagccagggcggactgacggaggactggggcaagaactggaagcgcatccggaccggcagcctcaagcatgcccgccaggtcgtcggggaggagttgctacctcgctttctccagctaccgccaacccatatgaaattaagggaatga

SEQ ID NO: 337739 - DNA, 339 bp, Pseudomonas aeruginosa
atggcttacggcgaacaagccgctaagaacttagttcttgcaaaacatgatcccaaaaataaggctaaatattctaatttagagtacagagacttgtttaacgcaaacaagcatgaaatatatttcaacgacctaaaagagttaatgcggaaaaactgggagaatggatttagaaatattttttctgaggatgttgaaaaattcagttccagaatgacattactaaactccatcggaagaagtgatgctcataagaaggatgtcagcgattcggatatgcagagcttccgtggggccatgagttggctggaagagaaagttgacgactacttttcttga

SEQ ID NO: 337740 - DNA, 198 bp, Pseudomonas aeruginosa
atggcagagcaactgttcaagcgctcgatggacttcgccaccctgcgtaacgagctgatggcggagtaccgacaagagaaaggaattgccagcctggccggcaagaccctgcgtcgatggcagatcaaggcacccgtcatcgaacagaagatcatcgaggtcgagcgcgaatggcagttgcagctgtttcacgcctga

SEQ ID NO: 337741 - DNA, 198 bp, Pseudomonas aeruginosa
atggcagagcaactgttcaagcgctcgatggactttgccaccctgcgtaacgagctgatgtcggagtaccgacaggagaaagggattgccagcctggccggcaagaccttgcgccgttggcaggtcaaggcacccgtcatcgaacagaagatcatcgaggtcgagcgcgaagggcaactgcagttgtttcacgcctga

SEQ ID NO: 337742 - DNA, 1095 bp, Pseudomonas aeruginosa
atgaagaccatatctatatttaataacaaaggcggagttgggaagacaactctaacttaccacttagctcatgctcttgcaaggatgggaaagcgagtcctaattcttgatctagatcctcagtgcaatattacagcactgtcattacctcaagattggttgctaaatgtgtgggagcaagaagacccttacatagaagattttaaaaatacaagagaacgtgacgaaactgcctacaaaagaatgaatgagggcacccgcacggttcattacctgctagccccaacccaagagggaactgccgatttagaaacccttcctccacctgttgaacttgctagagatttacacctaatccccggccgactgacaatgcacttatacgaagacaaaatatctagccgatggagtgatgtttatcagggcgatcctttagcaataaggacagtgacaaaaattcgtgagctagcagagaggtattcgaaactttataattatgattttgtaattatggatacctcgccaagtttgggagcacttaacaaggtaatcatatctacaacagacggctttttaattccgtgcgctccggatatgttttcgctatatggaattagaaaccttggcaatgcactaagtgtatggcagaaacaattcaacaccatataccaacttctttctgaggaaaagcgaaagcaatttccagagcgtttcgtaagcttgctaggctttacaatatataatgcaaaaaaatatactggagtcacagagtgggacctggcaaaagctcactataattatgctaagaaaatcccagaggcgataatagaatatatccctacacagattcgcgggcatatagataaggatgttatggctacgccagttggcgggaaatctattatgcacactcacaatactttaacggggatgtctcagaaataccatctacctatgtgggatgttccaaattttccatatctaggtgatgattataatacagtggtagccaataaggctgtgtatgaatctacacttgagaaatatgtatcatttgcaggtgatctactctctcgagtttcctctttgggctga

SEQ ID NO: 337743 - DNA, 6246 bp, Pseudomonas aeruginosa
  misc_feature (4292)..(4301): n is a, c, g, or t
atgaatcgcgtcccagtgaagaccacagcaatgagcaacctgcgccgtttcagccgtagcctggcggtcgccgccctggtcctgctgccgttcgccgccgtccaggcggaagacacggtggaaccgagcggctacacgccgatggccggcgaatccttcttcctgctcgccgacagcagcttcgccaccgacgaggaagcgcgggtccgtctcgaagcgcccggccgcgactaccggcgctaccgcatggagccctatggcggggtcgacgtgcgcctgtaccggatcgaacagccgctggagttcctcaagcggcagaagaacctgcaccgggtcctggccgagggacagttcaagggcgaaggcctgtcgaacaccctggcctatctctgggacaactggtatcgcaagtcgcgccgggtgatgcagcgcgccttctcctacgagtcgcggcaacaggtcaccgaggcggtgcccgagctgaagatgggcaacgccatgaccgcgccgacgccctacgacgcgcagccgcaatacgcgccgattcccggcctgccgctggtcagccagttccgctatccgctgtgggacgccaagcccatcgagccgccgcaggacgtcaagctggccggttcctccagcgagttcatcaacgtcgtgccgggcaatgtctacatcccgctgggcaagctgaagccgggcctgtacctggtcgaggcgcttgtcggcaagtaccgcgccaccaccgtggtgttcgtctccaacagcgtggcggtgagcaaggtcgccggcgacgagctgctggtctggaccgcacgcaagcacgaaggcaccccggtgcccgacaccaaggtgctgtggaccgacggcctgggcgtgatgagcagcggcaataccgacgccgacggcctgctgcggctcaagcacgccagtccggagcgctcctacgtgatcggcgaggaccgcgagggcggggtcttcgtctccgagaacttctattacgacagcgagatctacgacaccaagatctacgccttcaccgaccgcccgctgtaccggccgggcgactgggtctcgttgaagatggtcggccgcgagttcaaggacgcccggcaatcccaggccgccgccagcgcgccggtgcgcctgagcgtgatcgacgccagcggcacggtattgcaaagcctggacctccgcttcgacgcgaagagcggcgccaatggccgcttccaactgccggagaacgccgtcgccggcggctacgagttgcgcttcgactaccgcgggcagacctacagcagcgccttccgcgtcgccgaatacatcaagccgcacttcgaagtcgccctcgacctggccaagccggacttcaagaccgccgagccggtgaagggcgagatcgtcctgctctatccggacggcaagccggtggccaacgcgcgcctgcaactgagcctgcgcgcccagcagttgtcgatggtggacaacgaactgcagtatctcggccagttcccggtggaactgagcagcaccgaactgaccaccgacggcaagggccgcgccgccatcgaattgccgccggccgagaaacccagtcgctacatgctgaccatcttcgccagcgacggcgccgcctaccgggtcaagaccagcaaggagatcctcatcgagcgcggcgccgcgcgctaccgcctgagcgcgccgcagcgcttcagcgccgccggcgagaaggtcgagttcagctatgccagcgaacagccgaccccgctcaagccgagcagctaccagtggatccgcctggaggaccgcgccaccgatagcggtccggtcgccgacggccgcttcgcgctgaccttcgagcgccccggtacctattccgtggagctgcgcgacgacaagggccagctccttggcgccaccggccactcggtgagcggcgagggcgtgaagtcggtgccgggcaccgtcgaggtggtgttcgacaagcccgagtaccgcaccggcgaggaagcctccgcactgatcaccttccccgagccggtggaggatgcgctgttgtccctggagcgcgacaaggtcgaggccaccgccctgctgtccaagggcgccgactggctgcgcctggaaaagctcaatccgacccagtaccgcgtgtggatcccggtgcgcgaggagttctcgccgaacctgaccttctcggtgctctacaccaagggcggcgactacagcttccagaacgccgggatcaaggtcggcatgccccaggtagagatcgacatcgccaccgacaaggagcgctacgaaccgggcgagacggtgaccgtgaccctggccacgcgcttcgccggcaaaccggtttccagccacctgaccgtcagcgtggtggatgagatggtctatgccctgcaggcggagatcgcccccggcatcgaccagttcttctaccatccgcggcgcaacaacgtgcgcaccagcgccagcctggccttcatcagctacgacgtggcgttgcccggcagcaccagcgcacccggacgggcgaaccgcagcgagcgcggcgtcaaggtactggagcggccgcgccgcgaggacgtcgacaccgccgcctggcagccggagctggtcaccgacgcccagggcaaggccagcttcagcttccgcatgcccgactcgctgacccgctggcggatcaccgcgcgggccatcgacgacaacggccaggtcggccagaagaagcagttccttcgctcggagaagccgctgtacctgaagtggagcgggccgactcgcttccgccagggtgaccagcccgacctcggcctgttcgtcttcaaccaaggcgaacagccggtcaaggccgagctgctcagcgggccgcctggcagccagcgcagccagaccctggagctggccaagggagtcaactacattccgctggcgcaacagccgctcagcgatggcgactggagcgccgagctgcgccaggacgggcaggtccgcgaccgcctggcggtgcgcttcaacctgctggccgacggctggcaggtggagcaggtgcagaacctcagcctggcggcggcgagcaacccgctgcaactgccggcggacgcgcgcgacgtacgcctgcgcctggccgatggcccggccgctgcctacctgggcaatctcgatgatctgctggagtatccctacggcggcgtcgagcagaccgccagccaactgctgccgctgagcatcgcctatccggcgctggccggcggcgagccgcggattcgcgaccgcctgcgcctgatcatgcagaacagtcgcctgcgcctggtgcagatggccggcccggacgcctggttcgcctggtggggtggcgacgtcgatggcgacgctttcctcaccgcctacgcctactacgccgactggtacgccagccgcgcactggagatccaactgccggccgaacactggcagcgcatcctcgagccctacgccaagcaggcgacgcagaccccgctgctgcagcgtgcgctgatcctggctttcgcccgcgacatgcagttgccggtgaacaccctgctcggcggcctgctcaacgatctggccaacgccggcgaagggcaggcgcgcgcggagccgctggaggccgacgacggcctggtgctgggcgacccggactcggccgtcggcctggccgcggcgcgagtactggcggtggacctggcacggcaactgcgggtcgcggtgcccgctccgctggccgcccaggccgagacggcgacgcagcgcctgcgtgaggccggcttgccgttcaccgatgccttgctggcctctcactcggccgtggatggccagcaggccagcgctttgctgcaacgcctggcgccggcgcaatcgaccctggaacgcgccctggccctgacctggctgcagggcgccctggcccaggcgccgcagggcaagctgccgcagccgccgaaggactggcaggcgcagcgcggcgccagcggcgaaacctactggcaatggcgcggccgcggcattccgagctgggtcgacctggacgaggcgccggcccggccgttgccggttgcgctcagctaccgcagcgcccaggcgccgagcgggcaactgccggtgcagatcagccgtcgtctgctgcgcctggtgcccggtgagggggcgttcgagttcaaggtcgaggaggttggcgacaagccgctttccagcgacgaactgtatctcgacgaagtgaccctgaacgttccggaagacaccgctctacgctacggcatgctggaacnnnnnnnnnntgctggaactgccgctgccgcccggcgcggatgtcgagcgcaccacctggggcatcaagatcagcggcctggccggcgacgaagcgaccaccctggagcgcgcgcgcaacgaaccgggcgagctgttctacggggtgccggtggacagcctgagtggcgagcagcgtttccgtcacctggtgcgtttctcccagaaaggcagcttcaacctgccaccggcccgctacctgcgtctctacgcgccggaacagcaggccctggaagccaagccggcgctggccaaggtcaaggtcgagtgattgcgttgcgcgcctggctggtcctgctgtgcgccgtgccgttgctgcttcgcgcagcggaggcgccggtccagctggcctggcgcacgacccagggctacgaactggtgagcctggatcgccagcgggtactcgagcgccggccgttgccggccgatttgcaggctccgctgggcagcctgtggaaactgttcgtcttcgcctggctgagcgacaccggccaggccgagccgccctatacctgccaggggcgcagccgcgaggaggtctactgctgcgagaatggccagacgatcggtcgtgaccgcgccctggtgcgctcctgcgggctgtatttcgagccgcagcgcctcgccttgcggccggaggcctggcgcggctactggcaggcgcgccaggcaccggcctggttgctcgatctggaacggctgcaaccgcagacgcgggtgccggttaaggagcttctggagcagttgcagcaactgccggcccagggcgaggcgcggcgggtactgctcgacgtggcgttgcaggccggcgacggccatgccgtggccagccttggcggccgcctgcgggtgaagacctggagctggctcgacgaccatgacccgcaggcgcgccagggcggtttcgctggctggctggtcgatggaacgccgctctggctcggcggcccgggaaccagcaagatgattctggaccgctacgccgaggtgctcgggcgcttcctgccgagtccgtggccggccgatccgggccgttgcgtggaagtgaacctgttcagccgctatccgctgcgctcggtcagcgatccctccggccacccggccgccgaaggcctgctgcatggtccgcagcaagtgctcttcgccaacggcaatcgactggacatcgccagcgccggcgacctcttcctgcaacgggtggatggcgtgccgcgcctggtcgcgcgggtttcgcgcgaagagtacgtggcgcgggtgctggagcgcgaagcctcggcgcagccgaaggaagccgctcgcgcgctggcggtgaccattcgcacctatctattgcaaaacgccgcgccgcgcggcgaatgcctggccatcgatgacagcagccagcgccagcgcgtggcgccgcgcccggccagcgcgccgacgcggcggatcgctgcctggagcgccgacctggtgctggccggggcgaccgtcaactatcactccgaccagcctggtccggcgcgcctgtcctggaagcacgcggtggagcaagccgggcagggactgggctacgacagcatcctcgcccaggctttcccgcgcagcagcctgagccgctgggacaacccggtggccgcctgccagccgttgccggctgccgaagactggctgcgcaagcagcgccggcagtggcgcgagcgtctcgaccgagagcccggctacgaggagattccgagtttttccgtgtgccgcctggcttccgggcggccctatgtcgatcgcgagcgcgaacgcatcttcgtccgcggcctgtattccctacaggaacgcttggacctcacccacgaatacctgcacctggccttccgcgcccatcccagcggccaggacgaaaactatgtcgaaagcctggcccggcgcctgctactggaatga

SEQ ID NO: 337744 - DNA, 174 bp, Pseudomonas aeruginosa
atgaacgacagcatccaactgagcggtctgtcccgacagctcgtccaagccaatctactcgacgaaaagaccgccctgcaggcccagacgcaggcgcagcgcaacaagctgtcgctggtgacgcacctggtgcagaacaagctggtaagcggcctggccctggccgaattgtag

SEQ ID NO: 337745 - DNA, 489 bp, Pseudomonas aeruginosa; identical to SEQ ID NO: 324248

SEQ ID NO: 337746 - DNA, 963 bp, Pseudomonas aeruginosa
atgtcgcaggtgaattccctcgttttccatctttgtaaggtgcacggatggtggcgtgtgaaggcgtgggttccgcttgtcgttgagctttcggagcaggctgctaaagaaacactgcgccccgtgcatttcagactcgcgcttaaaaagcatgtcagcgcgctgatagtggaggttgaggctcacgccgagcttccagagggggagcgattgatccatgagttgagctctgcttgcactttcctgagtgggcgggagctgagatgggcgacatttgccaagcaaggccgctccttgagccgctcggcgctagctccgatcgtttcgctcggccaactgatggcgctcgggcctgagatcaaagttttttgtgggcataaagcatcaccgccctcccgtaggttctgcgccatgtgttggcgttatgtgctgggcgcagggaagcactgcagggagcaccgcgtgccggctggcggttctgctgggcagtcatctcaagcccgagatggctactggttttgccggaagctgtcaccacagttcaacgaccatattcgagttctctccagtcatgcgcgcagagagacgctgcgttcccggtggaggaaggccattgagattgcccgggttactccatggctcaagcgctacaggccgcatgcatggggggttgtggttgggcgagttgggaggcctgacgagggctccgtgctgccggctatagtccgggctctagatgatcacggcccggagtttggtgagatgctcgagcaaagggaggctctccatcgcgatctagtggatgatcacgcagctgttttcgatcttctgcttcgggcggaggcttggtttggagcagcagcagagcgccgagcaggctggggtggaggaagagctggagcagggcggccggcaagggcgtctacgtttcccgtcagcgatgatcgcaatcgcgtcagctaa

SEQ ID NO: 337747 - DNA, 1347 bp, Pseudomonas aeruginosa
ttgattctcggaacacccaaggccgactggctcgccgaattcccgcgcctggccgacctcatcgccctgcgtccgagcgagtggttcaacccggccatcgcgccgagcgccgaagccctggccgacgtcggcctcggcgccgccgacgtggccgacgccagcgcccgcctgcagcgcttcgccccgctgatcgcccggctgtttccggaaaccgccgccagcggcggcatcatcgagtccgacctggtcgaggtcgccgccttccacgatgccctgcgccagcattacgccgccgaactgcccggccggctctggctgaaacgcgatagccacctgccgatctccggctcgatcaaggcccgcggcggcatctatgaagtgctcgcccatgccgagcgcctggccctggagcacggcctggtcggcctcgacgacgactactcgcggctggccgaggcggattgccgggcattcttcgcccgccaccggatagcggtgggctccaccggcaacctgggcctttccatcggcatcatcggcgccgcgctgggcttccaggccagcgtgcacatgtccgccgacgcccgccagtggaagaaggacaagctgcgcgcccacggcgtgacggtggtggagtacgcctccgactacagtgtcgcggtggaacagggccgccgcgaagcggccggcgatccctacacccatttcgtcgacgacgaaaactcccgcgacctgttcctcggctacgccgtcgccgccgagcgactgcgcggccagttggacgccgccggcatccgcgtcgacagcgagcacccgctgttcgtccatctgccctgcggggtcggcggcggtcccggcggggtggccttcggcctcaagctggcgttcggcgacgcggtgcactgcctgttcgccgagccgacccattcgccctgcatgttcctcggcgtctataccggccgccacgagcaggtttcggtgcaggacttcggcatcgacaaccgcaccgccgccgatggcctggcggtggggcgtccgtcgggcttcgtcggccgcgccatgcagcgcctgctcgacggctactacacggaggacgacgacgaactgttccgcctgctcgccttgctcgagcgcagccagggcatccgcctggaaccctcggccctggccggcgcgccgggcatcgcccgggtcacccgtgagccgcagggctatcgcgaacgcatggggctgacctcggcgcgcctggccaatgccacccacctggtctgggccaccggcggcggcatggtgcccgagacggaaatgcgcgcctacctggagcgaggccgctcgctgctggactga

SEQ ID NO: 337748 - DNA, 1029 bp, Pseudomonas aeruginosa
atgccggccaagctcgcgatgtccgccaacgacctgcgtcagtgcctgcgcatcgccggcggcggcaccctggggttcttcgtctgcaagctgatgaactgggactacggctcgttcttcggcgtctacccgatgctgctgctcggcctgacgccggtgatcaacctgcacatcgtccgccagttcctcgccaactcggtggtgatcagcgtcgaggtactggtgctgtacgggttgttcggcgaccggccgctgctgatgacgcctatcgtcttcggcctcttcgtctaccgcttcgccctgatggcgcgcggcccgctgttcttcttcggcgcactgagttcggtgttcctctcgatgctgctgcactttgccagctatccggacgtcgatctgttcgacatgctcgccagcaacatggtcgccacctggctgacggtggccatcgccgtgctgatgttctacctgttccccgacgtcgaaccgcggtcgccgcgccaggcgccggccaaggacgcccccagccggcgccacgagacgctgctcggggccacggtggcgaccttgtccttcgtggtcttccagaccttcgacctgaaggactcgctgtcggcgcagatcgcctcgatcctggtgttgtttcccatgcactggaagggcgtgcacttcgccgggcgcatccgcgccctcggtacgctgctcggctgtgcgctggcggtgggcttgcaggtgctgctctacgatcactacgacatcctgcccttcgtcgccctgttgctgtggatctcggcgatgttctgcgcgcgcatccacatgctggagaacggcgtaccggggatcggtttcggcgcgctgaccaccctggcgatcgtcctcggccagtacctgacgccaacccacgacatgatgtacagcgtgctctaccgatttacctcggtgtgcttcgcggtgctgatcacgttgatgacggtgctggtgatccacctgttcctcaaccgcttcgccgccacccggcactacagccactga

SEQ ID NO: 337749 - DNA, 657 bp, Pseudomonas aeruginosa
gtgaccctgtcgctggagcgccgcctggcgctgatcgaatgggcgcagcggcagcaggcatggatcatcgaggacgactacgacagcgagttccactacgccggccggcccaccgcctgcgtgcaaggcctggacgcccacgagcggacgctctacatcggcacgttcaccaagtcgctgtttcccggcctgcgcatcggctacatggtcctgccgccggcgctggtggcgccgatgaccgtcgctcgctccctgcaggacgggcacaacgcctcgctggcgcaactgaccctggcgcgcttcatcgccggcggccatttcggcgtctatgtgcgcggcatgcgcaatctctacggcgagcgcctgggattcctcgcggagcgggtgggcaagcgtctgggcggcctggtcgagccgcgcgtgccggccggcgggctacagatgcccgggctgctttgcgcgggaatcgacgaaacgcgcgccatcgcggcggcataccgcgccggtgtcgagctggtcgggctcagcgccctgcatctcgccgcgccaccgcgagcgggtttcctgatgggcttcgccgcctacaccacggacgagctggaggcggcggtcggggtcctcgcgaagaccctgcgcggtttgcgtgcgaatccctag

SEQ ID NO: 337750 - DNA, 261 bp, Pseudomonas aeruginosa
atgtgtcaaaacagtcacctccccacagtgtgggccagcttcatgcgcaaggcgcatccgcaatcgctggaaatgccgatgccggagaacgtggtgatggcctgggtcgacgcgcagaccgggcagggctcggcggcggattgcccgaatgccgtacagatgccctatattcgtggcagcgagcccgcccagggcccaggctgtgggagccagaaccccgccggcgaggtgatggactgggtacgtggctggctgaattga

SEQ ID NO: 337751 - DNA, 771 bp, Pseudomonas aeruginosa; identical to SEQ ID NO: 327543

SEQ ID NO: 337752 - DNA, 486 bp, Pseudomonas aeruginosa
atgaaacgccgcaattggaagaacgcccagccaaccaacctccggcaggccctggagtggtgcaaagaccatggccgggaacggcggcggctcagcgttgaacgtatcgccgagcagatgggactgccggaccattccgccctgtacaagtggctcgtcaacggtcgcatgccagcggtgttgattcccgcctacgaacaggtctgcggcatcaacctggtaagccgatggctcgcggccagcgcgggcaaggtcttgatcgacattccctccggccgcgtcagcagcccttccgacatccagtcgctgcaggccgtgctgcaccgtgcgactggcgcgctgatggccttctacgccgacgagcaggatgcagccgcgactctcggggcgttgcaggccggcttggaggaactggcgtggcatcgcggcaacgttcaccaacacgcccacccgcaactcaacttcggaggccctgacgatgagtaa

SEQ ID NO: 337753 - DNA, 165 bp, Pseudomonas aeruginosa
atgaagccatcgccctactacgaccgggtggtcgacgtgatggaggagttgttcaagttcaccctgctcctgcgcgagcgcacggacttcctggtggaccgctattcggagcgcaaggaaagcgccgagcagctttccgcgcgggtcgaccagcgttcgctctga

SEQ ID NO: 337754 - DNA, 501 bp, Pseudomonas aeruginosa
atgagccatgccctgcgcgccgttttcctcgaccatgcctccctcgacctcggcgatctggacatgcgtcccctgcacgccgccttcgacgagctgcaactgcatgccgccagccagccgcaggaagtcgccgcgcggctgcacggtgcgcgggtcgcgatcagcaacaaggcgccgatcgacgcgcaatgcatcgccgcctgcccagagctggaattgatcctggtcagcgctaccggcaccaacaacatcgatctcgctgccgctcgcgagcgcggtatcgtcgtcgccaactgccatggctacggcacgccctcggtagcccagcacaccctcgcgctgctgctggccctggctacgcgcctgccggactaccagcaggcggtacgcggcggtcgctggcagcaatccagccagttctgcctgctggacttccccatcgtcgaactggaaggcaagaccctcggcctggcgaactcctgccacgggtcgacgccctga

SEQ ID NO: 337755 - DNA, 852 bp, Pseudomonas aeruginosa
atgcctaccctatatgttattgccattctattcttcgttacgcctgcaatcttagggcattgcgcacgctcagctgagtctcttggctttttcacctcagacggcaagctcgatgagcgcgtcaaaacatcagaagctgcactttctgtcgccatcctctccagtatttatttctttttcacactcgcaggatataaggccgtagcgggccaagcgtcaattgcccttttaatcacagacgtctcgcttcttataatatcttctatcgctcttagcgccctcgtcttcagagccttctggatataccagaaagcatctttcctaattaaccttgtgataaccatcctgactttatggatcacctggttcgcaggctccattgcgataggctacgtgagccagaccactaatttgagcgcttcggaattcccatcagctgtgggaggtctgacgctgctgtatgcccccgttctttgggggctaatcatgtccctcgtctcgcttccactctatctaatctcgggagcggtggtagtctcaaagtcaggcaaaaaagaaaaaggcgtagcgcatagctactcttcattaatctggatgtcacttctcttgggtctggcattctcgttcacagtttcagtaagcgtattttctcgcctctctacgaccacaattttcaagaatttcgagacatggatattggttacttctggctatcctcttagcaagcatacgtgcgtcgagaagaaatccccagaagacagctttgtcatccttagcactggcgagattggaacagcaatctatgacgggaagtcgtatacctatggaaaggttaagtgcccttctgattag

SEQ ID NO: 337756 - DNA, 1293 bp, Pseudomonas aeruginosa
atgaaaaaggcagttcaccccctccgcctgatcctcaaggagaccggggatttttatgagtcgtccgaaggacggattttcatggacccgagcaacggcagattcgccgacctgtcgggtgtgcgcctgctgcgctgtggcgtcgataccgtgcggcagctgtacaacggcatgatccgcccggaagtgatggcgctgttcgatgagccggaagacatcgtcaatttcgccggctacaagtgggccaagggccgcatcggtcgagactcgggctaccagtaccgcctgcagaacgccgacatgggcctgatcctgctgatcaaaaaccacaacgtgaagctcgaaaacatcggtccgcacctcaagatcgaagtatcgccgcacgccctggatggtgccgatccgaagatcctgcagggcgtaatggatgacctggccgctggcgtgctctcagcctgtgaggtgaaccagtgcgccgtccacatcgccctggacgtgcagggctggaccccgcctgcggacttcgtggatcgcatgcactgccgctcccggcgtgtccgccaaatcagcggcatcgaccgcattgagtacgacggcaacgcctcggtctatgggcgtggtgagactttcatgttcggctcggccaacggtctgcagatgtgcctctacaacaaaacgctgcaggcgagagcgaccgacaagctcgactattgggaatccgtgtgggcctccctcaacggtgatcccttcggcgatggtgaacccgccttcaacccgctggaaacggtgtggcgtatcgaattccgcttccaccattccatcgtccagcagttctccgaaggctccacgatgtcctctggcgaggtgatcggctgccgcacctacgagggcctttgcccacacctgcaaggcctttggcagtacgcctgcgacaactacaagctgatttcccgggaagggatcttcgacgccttctggtcgctgatcagcctcgacacaaaggtccaggtagaagccgatccgctcattgaacgcactgagtaccgccgctactacaagaccgctcagggcttctccggcaagaactgcgagatgttcctgggccagttcgccagcctgatcgcacgggagcgcatcccgccaaaaaaagcgcttgaggtcgggagaacgctccccttctggcatgtgatcgaagaccactacaccgccaagggctacagcactcgcgacctcgaaaagcacgtcatcggattgatcaacgatcgctacatcaggcggggctacgcgatatga

SEQ ID NO: 337757 - DNA, 2496 bp, Pseudomonas aeruginosa
atgatcaacgatttcttcttagctatatctagcggatcttcatacgtgctggatagagccatagagaccaagccgaacgattgggcaagcatattaaccgatgtaatagcggtatctgcagcactgggggccctggcacttcccatatctctaaacgttatcgaagctactcgaagccgatataaaagcccgtccctcttgatgatttaccatcgaatatcgaatgtagaccctcaaaaactaaataggtcactcttcgcttttctttcattcgccctacttttcaagatggtatttctctccaattacgtaccccaccagtacctaatcccaccactactcgcagcactattaatattctcaacggtaatatccgacttatatcaacacctccacttcacctacaagttaatgtcggatatatcaaaaataaaagatgaattaatatctgcaatttgcattggaacaaactctaaaaattccgaaacaaccataaaattctcagtgaaaaaaccactctcctcattcagagaagtgctgcgattgcaaaaaataaaaaaactttcaatcgacccgagttcactcataccgacactaatggaaatagagacatacgagctagccagcagttatgaaaaaattgaaatagacgagagaattcaaaatcttgcgtatgaacatctacacaagctaccttccgagcactcaaagaaatttcttatccaactcctaaactcaataccgagacttctgtcagaagttgaaaacacgagagaagttgacgtataccaaaaagcagctggactatatctctacctactcccaagatcgttatttcagtgtgaagaattttcgcaacacttttttgaagctgaacgtatcgcaagatatcgagaaatagaccttcccattcacggtagatttttcagacacggccgagtttttctaaattgcttcctagacaaaggaagtatatttgtgtatcgcacattatttaaccatttcaagtcgcttgcgtggaatgcagtacactcgaaacatgaagacatacccacccttctagagaatgcaaaccaaatggtttcttggtcataccgcgaccaagggcaaggatggaacttaccccaggcgataccagagctctggagctacgaaaaaattcgagaccttgccaaagacgttgacaataactacgcagggcttatttcgtacgatgacctcaaggagaaatttgacaccctatatgtacctgagattaacaagtatttagcagaatcctgccaacccaaagatttattagaaaaacaggaaaagcttgagattacgttaacctctctctggaacgagatcggattaaaagaaatatccaacggaatggagatagaaacactgcatatactgggagtaattttagctgatgctcctgaagttttcatacaatgtagagaactgagaaaccctgcaggcgcgggttctattaacgtcggcggctcaccagtcccttcatccattgactcatgcattaaagcactaacccatgagaaaaacttcacggatcattttccttcaaatgaaaccttagaattcaagatcgttgacgctatcggggcacttataatatatgaactatggagaacaagaatatttgaaaagcctggacatgcccgcgaagagagccttcccgctatctctgtaccgaacgccaagatcagagaattaaaagctgcatccagaagagtcactacattagacaactcatttaaaaaggcactttcgaacaaggctttcacagatcgcttaggtctattggacgaccatatagattctcttaaaggtatatgtaaagacttctcagcgcagctagacatagctctatctacatctatcgagagggctatcgcacagcagccaatctcccagcaagaactagatagattcaaagatgaattcttcgaagatcttgaaaactacaaaaacaaaataccgttactggagtatattagactatctgaacccgagccattcactataactattccatatccacgagaggcattcttgcaagacacagacatccattatatgttcaatggattcgggagaacccttaaaaattaccatgactggatgtgcgctcaaatcctcttcaaatcctccacatccaccgaaacttcttcacccgccccatatggcgacctcatattaatttcaaccgaatgcaaaaaagaattagaaagcatgaatttccgcttcgaagaaagaaatctcatatggccaaacaatcgatactctgctagatatcagctaataaacatagagcaaaacaaatacttcccgctctcccgacaaaaggaccaccctataaacatcgctataaaagactcctcaaaaggcgcccctataaccattgaaacaatagaagaagatgggaaggtaatacataaaataaattattatattgcactcaatcagccctatctagaaacaataatatag

SEQ ID NO: 337758 - DNA, 315 bp, Pseudomonas aeruginosa; identical to SEQ ID NO: 324246

SEQ ID NO: 337759 - DNA, 150 bp, Pseudomonas aeruginosa
atgctcgctaacaccctgaaagcgctgctcctgctctgcctgatccaagccgcccgcaccgggccgatccggtcaagggccgcgctcccggctcgtcggaacagcttcaccgttccggcgaacggaagcacgggcggagcgcacccttga

SEQ ID NO: 337760 - DNA, 735 bp, Pseudomonas aeruginosa
ttggttgactccctgtatagagagatcatcactgccggtactcacaaggcgagcagcattaaagtcgctgaggctgccaaggtgatcgaaaatacgcagcgagatctcaatattgctctgatcaacgaactcgccatcattttcaatcgaatgggtatcgataccgaggcggtcctcaaggctgccggcacgaaatggaatttcatgccgttccgcccgggcctagtcggcggtcattgcatcggagtcgatccatattatctgactcataaagcccagagtattggctatcatccagagatcatcttggctggccgccgtttgaatgacggtatgggtgcctacgtcgtttcgcaactggtcaaggctatgctcaagcgtcgtatccacgtggacggtgctcgcgttctgcttatggggcttacattcaaggaaaattgtccagacctccgcaataccaaagtcgtcgatattgtccgtgagttggcggaatacaacatacaggttgatgtttttgatccttgggtgagcgccgaagatgccatgcatgagtatgggattacgccagtcggtacgccatcccatggggcttatgatggaattatccttgcggtcgcgcacagtgaattcaaaaatatgggcgcagaaaatatacgaaagttagggaaggctgagcatgttctctatgatctaaaatatctactcgatgaaggtcagtctgatctacgcctgtaa

SEQ ID NO: 337761 - DNA, 498 bp, Pseudomonas aeruginosa
gtgaagctccagttgccgctgccgtcggcggtgacctgcccgatcgggttgccgttgccatcggtcagggtcacgctgctgcccggctcggcggtgccgctgagcgtggtgccgttgctggggttgatcactggcgtggccggggctaccgagtccacggtgacactgctgcccgcactggtgttgccggaggcgtcggtggccgtggcgttgaccacggtgccgttgggcaacggcgtggtcggagtgaagctccagttgccgctgccatcggcggtgacctgcccgatgggattgccgttgccatcggtcagggtcacggtggcgcccggctcggcggtgccgctgagcgtggtgccgttgctcgggttgaccactggcgccgccggggcttgcgagtccacggtgacgctggcgcccgggctgctattgccggcggcgtcctgggccaccacgttgaccacggtgccgttggcgatcggcgtggacggggtgtag

SEQ ID NO: 337762 - DNA, 1410 bp, Pseudomonas aeruginosa
atgagcgctgtcatgacgcccgccggtttcaccgactacaaggtcgccgacatcaccctggccgcctggggccgccgcgagctgatcatcgccgaatcggaaatgcccgcactgatgggcctgcgccgcaagtatgccggccagcagccgctgaaaggcgcgaagatcctcggttgcatccacatgaccatccagaccggcgtgctgatcgagaccctggtcgcgctgggcgccgaagtccgctggtcgagctgcaacatcttctccacccaggaccaggccgccgccgccatcgccgccgccggcatcccggtgttcgcctggaagggcgagaccgaggaagagtacgaatggtgtatcgagcagaccatcctcaaggacggccagccgtgggacgccaacatggtgctggacgacggcggtgacctgaccgagatcctgcacaagaaatacccgcagatgctcgagcgcatccacggcatcaccgaagagaccaccaccggggtccaccgcctgctcgacatgctcaagaacggcaccctgaaagtcccggcgatcaacgtcaacgactcggtgaccaagagcaagaacgacaacaagtacggctgccgccatagcctcaacgacgccatcaagcgcggcaccgaccacctgctgtcgggcaagcaggccctggtgatcggctacggcgacgtgggcaagggctcctcgcagtcgctgcgccaggaaggcatgatcgtcaaggtcgcggaagtcgacccgatctgcgccatgcaggcctgcatggacggcttcgaagtcgtctcgccgtacaagaacggcatcaacgacggcaccgaggccagcatcgacgacgcgctgctgggcaagatcgacctgatcgtcaccaccaccggcaacgtcaacgtctgcgacgccaacatgctcaaggcgctgaagaagcgcgcggtggtctgcaacatcggccacttcgacaacgagatcgacaccgccttcatgcgcaagaactgggcctgggaagaggtcaagccgcaggtgcacaagatccaccgcaccggcaaggacggtttcgacgcgcacaacgacgactacctgatccttctcgctgagggccgcctggtcaacctgggcaacgccaccggccatccgagccggatcatggacggttccttcgccaaccaggtgctggcgcagatccacctgttcgagcagaagtacgccgacctgccggccgccgagaaggccaagcgcctgagcgtcgaagtgctgccgaagaagctcgacgaggaagtggccctggagatggtcaagggcttcggcggcgtggtcacccagctgaccccgaaacaggccgagtacatcggcgtgagcgtggaaggcccgttcaagccggacacctatcgctactaa

SEQ ID NO: 337763 - DNA, 216 bp, Pseudomonas aeruginosa
atggaagtggaagaaatcaaggctcaagacctccgcgcggcgcccccggtgttgccgtggcgggacttcgcgaactggattggcatgggggaagaccacgaaaccgtccgtggttggattcgtaagggctatctccccgcgcacaagatcggcaagcacgtgatggtcaatgttgcgctcttcacccatcagctgatggaaaaggaggagttctga

SEQ ID NO: 337764 - DNA, 1269 bp, Pseudomonas aeruginosa
atgaccgttggtgtgcctgccgagcgtatcgagaccgaagtcaacaagcgtctgcagcagaccgcccgtcgtgccaagattccaggtttccgccccggcaaggtgccgatgagtgtcattcgtcagcgctacgaagcttccgcgcgccaggaagccatgggcgatctgatccaggaaaccttctacgaagccgtggtcgagcagaagctgaatccggccggttcgccgtcggtagagcccaagtccttcgagaaaggcaaggacctggaatacatcgcaaccttcgaagtcttcccggaatttaccgtttccggcctggaagacatcaaggtcgagcgcctgcaggccgaagtttccgatgctgatgtcgacaacatgctcgatgtcctgcgcaagcagaacacccgtttcgaagtggtcgagcgtgccgcccagaacgatgaccagttgaacatcgacttcgtcggcaagatcgacggcgaagccttcgccggcggttccgccaagggcaccctgctggtgctgggctccggtcgcatgatcgccggcttcgaagaagggctggtgggggcgaaggccggtgaagagcgcgtgctcaacctgaccttccccgaggactaccagaacctggacctggccaacaaggctgccgagttcaccgttaccgtcaatagcgttgccgagcccaagctgccggaactgaacgaagagttcttcgctctgttcggcgtgaaggaaaccggtctcgatggcttccgcgccgaggtgcagaagaacatggagcgcgagttgcgccaggcgatcaagtccaaggtcaagaaccaggtcatggaaggtctgctgcaggccaacccgatcgaagtgcccaaggccctgatcggcaacgaagtgaaccgtctgcgcgtgcaggccgtccagcagttcggtggcaacatcaagcctgaccaactgccggccgagctgttcgaagagcaggccaagcgccgtgtggtgctgggcctgatcgtcgccgaagtggtcaagcagcacgagctgaaggccgacgaaggtcgcgttcgcgaaatgatcgaggaaatggcctcggcctaccaggagcccgagcaggtcgtcgcctggtacttcaagaacgagccccagctgaacgaagtccgttctgttgtactggaagaacaagtcgtagatactgtcctgcaaaaggccactgtgaccgataagcaggtatcctacgaagaagcggtcaagccggccgaagctccgcaagcggcctga

SEQ ID NO: 337765 - DNA, 255 bp, Pseudomonas aeruginosa
atggacaagaccggatggatcactcattgctttggtcgctttctgattgatctgccacctgacgcggtagtcaatgccggatactacctatggggagacagaattgagtacttagatgataaacctaccgaactggcagccagggttgatcgtcttgaacaagagtggaggccgaccaagcttatattgcaggggataattttcaagatgaagagtttggggttggcgttacgttccccaaccaccccggcgtag

SEQ ID NO: 337766 - DNA, 1053 bp, Pseudomonas aeruginosa
gtgttcaaggatctcggcatcaaggggcgcgtactgctgctcaccctgctccccaccagcctgctggcgatggtgcttggcggttacttcacctgggtccagctgtccgacatgcgcgcccagttgatcgagcgcgggcaactgatcgccgaacaactggcgccgctggccgccaccgcgctggcgcgaaaggataccgccgtgctcaaccgcatcgccaacgaggcgctggaccaaccggacgtgcgcgcggtgaccttcctcgacgcccgccaggaacgcctcgcccatgccgggccaagcatgctcaccgtcgccccggccggcgacgccagccatctgagcatgtccaccgaactggacaccacgcacttcctgctaccggttcttggccgccaccacagcctgtccggcgccaccgagcctgacgacgagcgcgtactcggctgggtcgaactggaactgtcgcaccacgggaccctgctgcgcggatatcgcagcctgttcaccagcctcttgctgatcgccgccggcctcggcgtcaccgccctcctcgccctgcgcatgagtcgcgcgatcaacgcgccgctggaactgatcagccagggcgtcgcccagctgaaggaaggccgcatggaaacccgcctgccaccgatgggcagcaacgagctggacgaactggcctccggcatcaaccgcatggcggaaacgctgcagagcgcccaggaggaaatgcaacacaacatcgaccaggccaccgaggacgtacgccagaacctggaaaccatcgagatccagaacatcgagctggacctggcgcgcaaggaggccctggaggcgagcaggatcaagtccgagttcctcgccaacatgagccacgagatccgcaccccgctcaacggcatctcagcccgcgccagcaggactacctcacgaccatccagaaatcggcggaaagcctgctggggatcatcaacgagatcctcgacttctcgaagatcgaggccggcaagctggttctggaaaacctccccttcaatctccgcgacctga

SEQ ID NO: 337767 - DNA, 426 bp, Pseudomonas aeruginosa
ttgcaggtccagttccagttgctggcggcgttggtcgccgcgggcattggccttgaacaggccgagatcggtttcgccgctgcgcaggccggaagcgaccagcgccagagtgccgttctgccgggcatcgaggttcgcctgcaggtcgaggccggcgatgcgctgctcggcgtaggcgatctgctgtcccttgaggttcagcctgccttgcggcgccgcgaggctgccagccaggtcgaggcgtccctcgaggcgaccgaagagttgcggccaaagctggccgagacggttcagggcgatgtccaggcggccttgcaggcgctggtcgagcgccccgctgccgtgcaccttgttatcccccaggcgcaggtcgaggttgcccagcgtccagcgctgcccctcgccttcggcgcgcgcctggaatag

SEQ ID NO: 337768 - DNA, 258 bp, Pseudomonas aeruginosa
  misc_feature (207)..(216): n is a, c, g, or t
atgaaactcagacccgctttcataatcaccacccttggcttgctgctcagtgctgccaatgcgctggccagcccgggccacaagaaagacagtattgggcaaccgggagacggtcaggcagtagatcgcaccatcgaagtccggatgggggacatcttcttcgaacccaaagcaatggagatcaaagctggttggaagccctggcannnnnnnnnngatcaaagcaggcgagacagttcgcttcgtcctgaaaaatga

SEQ ID NO: 337769 - DNA, 381 bp, Pseudomonas aeruginosa
atggagtccatcactgccggaaactggataggtcaccacggacgcggacttgctccgcgcgaactggaggcaactctccacgctgctcgtgacctgactgccaagcaaatcgcaaagctgatgggcatcgcgcccgggaccgtgtccaagcgattggatgatgcgcggttcaagctcggtgccaagaccatccgcggcctggtgctggaggcgtacaagcgccagattatcagccccctgtgcgttggcatcctcgccctcctggcggcagcacaacccctcctcgatgaagacccggccatgcgggcgcgccgtggcggcgaaaggaagatcgaaactcgcctgactgctcgccgcgatggcgtggcctgggtggcgtga

SEQ ID NO: 337770 - DNA, 183 bp, Pseudomonas aeruginosa
atgtacgcgatcgaccacgatggccaactgcgggtgaagcaactctaccgcctgccaggtgggggcctgcgcattcgcagcttcaacagcgaggagcatccagatgagcgctacacggcagaagatgctgccgaacacgttcggatcatcggtcgagtgttctggtattccgtgctgacctga

SEQ ID NO: 337771 - DNA, 348 bp, Pseudomonas aeruginosa
atgtcgcatcccgaaaatatcaaaccgctccccgcggtgcaagaagccaagacagccccgctgactttcggagggccgtccggcgaactctttcatatcaacgaagggaaggacgttgcgggcgcgctttatacggtcgcagagctcggcgatggtttggaagagatttgccggcggatccgcgaagatctcgataggtgtggatccgctgccgtgtgcgcggaattcagcctgatcggcttcgtgggctccatgattggcgcgctagcgcgctccgcagagcgtgggatagagcgatcgaaggcgcaacaatccactgccgtggaggctcgccatgaaaccgactga

SEQ ID NO: 337772 - DNA, 276 bp, Pseudomonas aeruginosa
atgaaaccgactgatcaactcaccgccctcaccgccctcaacgagttcgagtctttgggcggaggccgctacttgctacaggttcgctcgggcgttccggtaggagaggctcttgattcagcttcgtgccgcctttccgaggtgattgagttccttcgcgaacagtctgtggacgagcaagggctctcgcaaaactctctctatctggtctggttcttggtggagaacgtcaaggctgttgtcgatgctgccaatttgggagttctgaggttatga

SEQ ID NO: 337773 - DNA, 1218 bp, Pseudomonas aeruginosa
atgctcgacagccgcgagccggcccccagcgagttgagttcacccttggtctctgcgatctgcttcttgagcgcccgctgggcaatcgcaagctcccttgtagacagcgttccgctggatcgaagcaagcgatattgctggttcaactgcccgatagctgcctgcagttcgcgcaccctggcgactcccagggtgctacgcgcttgctccaagttgaagcggcgctgctctatcgcgctctgcttgatcgctgcggcctgttgccggaggctggtggtggccgcatcattccggcccgcctggaggtttcgatccagctcacgctggagccgctgccgttcggatgtcaggctcctcgtatccagtcccgcctgcttcaactcccggcgcatcgctccgagcttggctacctggacggtctctgcccgctccaggcttcgcaagtccgaaatggagtcccggtacgcctgctgcaattcgcggcttggcctgatcgtcgatgccagttcgttgccgagcgtgcggatctgctcgcgcgccgagcgcgcctggcgttgcgtgtcctcaagggtgctttcgagagcagtgaaatcgtttaaacgcctaagaggttgcgcgacctgcctgaccagttcggcgtattccttgcggaaacctgacacctcgcgcagcgcatcatctaggtcagcagtcagccggatctttacgtcagccatttcattcagccttcagcgcggtcaagaacagcgaccatggatattcaaggacgtggtgatgcccaagcctcaccagaacgcaaatggcgcgctccagactcctcaaggcttgtcgcggagtttcgagagacggcccagcattccgaaaaaatgcgggttcacctctttacatgcatccagcaacttggcgagttggctgggccggagatcgttaatttggctctccgtaaccgacgtcatcaggcacagatcggaaagcctgatatcttcgaagagagcattactgacgaggtcttggtcactgacctcctgcattagctttcgaacatccgcaacgctaagttcccgcacggtcaactcaacgccatcaatatcaacaacccgacttgctgtgaatgtggacattttcgactccataaaaaagaaaaccccgcaaatagcggggtccgtaactgaaaaaactatcagcagccagaagtgtcccaagacagctcacttgtaa

SEQ ID NO: 337774 - DNA, 1671 bp, Pseudomonas aeruginosa
atgaatcaactgatgccctgggacggcgaggtcgttcgcatgggctggccgtggcacggaaagatccggcagtccgatatgaaccaggtgggggaggttcttttacccaacggcagctctaagccagcgatctcatggtacggaatctgggagatgcattatacgtatctgttcgacatgggcctgccggatcaggacgacccgcaggtcgaggagcagggcgggaaatggtggggcagggcgatccttcgaggagggggagagatgaactaccagctttattatggcggagccatagtttctcaaggcgaaaactctttcaatgttggttcgccgtttcttggtgttcctatttggtgggatgaagatgaggagccgaggaagccatactatgttgatataatatttggagagagaccctgggctcctcctgaggagcgctatgcgtttatttttagaactctagctggaactgttccggatattttatatatcccaagcattgatgctatagggcagggcgaggatcagcccgagtgcgcctcaagaactagggcgacatacgatggttggggggtgggtaagtctgtaaaattttactatttcccattgcttggcgtataccagaacaagatattgatgggtgtcgttgttcagccggaaaacgatatatctggagttggctacccttctcctccaggcacatcaaaggatagcggctcgtcacctgctggggctccaagggggctgtatgggctgatagagataacaattgcgcaggacattcgtgataaggaatctgatcacagcaacaccatctctctgcgagtgattgaagaccgaaggactgcgctcggtaggccggttcataatgtcattgaccaaaagaaccctccgcaagacggggttacaacggagtactaccttgacgagtggatccagtcttctggtcttgtaaccgcatggtatgacgctcagggaaacattcagactgctcgctacaatcgccgccactacgcatccagggaggcgagttacggcccggaggttccatctagagtcgccactgagagggctagtgaggtagaacttcttgatggttcggggagcgttgtggacagcttcacgctcaaggagtcttttgaggcgcaagagctttctggtcttggtcttcagataaccaggacggtgcaggttaccggggaagaagacgacgtaaccacttatctagacccggatcatgttggcggtgtcgatgtggacgttccagctacgtttcctcctggcttgcacgttgctaacacggtcgttacttaccagtggctagttaatggcgagaacaaattaagggatcaggatcagcatcaactatggatagcagcactgagcaacaatagcgcggcactctgttacgttcgagagccatacgactacccggatggtcaggacactacaaccgttcgcgtgcgccagggacctgccgtcaagattggtggagttagtcccaacaccctcgtcgagaccattaccaaaagcaaacttcagcatcggtatcttcgaggatttttctggacgccggccgatgggtgggtgcgcgccagttgtaatccaattaccggcgaattgtctcgcggcaaagaatgcctcgaataccacactagttgggtctag

SEQ ID NO: 337775 - DNA, 1509 bp, Pseudomonas aeruginosa
atggatcagcgagccgccctcgaaaccgtagaggcggtgtcgctcggcctgaaaattggtgctgcatctgccgaggagtcggcctcagtcattacccagttcgcccaggccatcggcagtggtgtcctgcggggcgaagagttcaataccgttctggagtcctcggatcgcattgctggcgccctggcggacacattcggggtgactatcggccggcttcgcgagatggctgccgccggtgagctgacctcggagcagatcgttatcgcgctgcggaaagagctgccgaagctccgcgaggagatggcgtcgtttgccccggagattggtgcggggctgaaccggatcttttccgaaacccagaaatactgggggcgtcgcgcgaaggaaacaggcgtcgtcgactgggttgcgaaccagttgaacgatgttgccaagggaatcaacacggcgaatacgctggtaaaaaagggggagggtagcctcacagccaccctcgccgccgagaaggctcgacaagagcagatcgtgaagcgccagaacgatgctctgaagcgggctcgggaacagaacgtcgccgatctccagtctgaggttgttcggaccaaggccctccttgagcagtccaccaagaacctcaacgacgcgctttcgcggcaggcagatgtccgcaaggagtttgccgatctggtgaagggcatccaggcgacgcccacctccggaacgcagaccttcggtgatgccactgcggcccaggcctcggctcgcaacgccctgaccgctggcaacaaccaaaaggcgatcgaggaggcgcgccgcgcgcttcagatccttcagcaactgaaggacgctggcgcgaacagctacggcttcgaaggcgtggccaaggaggtggagcgcatcgccaacaaggccgcagaggtcgaggctggtaatgccaaggctgcggatgacgtcaaccgcctgaacctagccgacctcgaggagcgcatcaaggctgtgcaaaacgtcgaggtatcgttcggaatggacttcgaaagcgcggagaccttgaagcagcaggtcgccgacatcgccgccggattggctgagcagctcgtgataccgatcacgctggttccgcctccggagatgggcttgcctggcgtgcccagcatcacccccaagatacccgggtttgccactggtacgcagagcgctccccctggcatggcgtgggttggggaacgtgggccggagttgatgatgatgcgcggaggagagcgcatcttcaacgcggtgcagtcgctgcagatgtcgcagaggtatcaacgaactctccccgagatacccgagattccggcggcggcacttcagcaggcgaatccgtcggcagccatgcaaaacctgggttcgctgaccctcaacctgggtggagacgatgctggtttcaccgttttcgggacacacgacacgctccgagatatacgcaaggccgcctcgaagttcgggcggacacgcccaaaatga

SEQ ID NO: 337776 - DNA, 1620 bp, Pseudomonas aeruginosa
atgggctggccgtggcacggaaagatccgccagccgaacaatgatctggccggctacgtcaccctgccgaacggggcgacgcgcccagcaatcgcgtactatggcaactggccgatgaatcacacgcatctgttcgacatgggcctaccggaccaggacgaccagcaggtcgaggagcagggcgggaagtggtgggggcgtacgatcctcagaggcggaggcaattacgactatcagttgtactacggcggcgcgacgacctcggccgaggggcagtcctatacaggcgacgccccattcagggggctccccctctggtggtctagcgacgaggagccgcgccgcccgctgtatgtggatatctacctcaatgtggagcagggcagctactacctcgatttttggacaaagggcggaacgattcacgcccttcggaagaagataacgcttgaggatgttggacagggcgcaggacagccggagtgtgcggtaaaagatctgctcgggagcaacttcgactactggttttttggtgaaaacgtcaaactggactacctgaagctgctcggggtctaccgaaatcggttgctgctgggggtggtggtgacacagggtgacgggatgcggcagattgacccaccgcccggaacgtcggtggtcagcggttcgtccccgtctggagcccctcaggggttgtatggtctcgtcgaggtgaccattgccccggatatccgagatccagaggcggatcacagtcagacggtcacaatagacgtgatcgagaatcgccaggccgcgctcggtaatccggttcatcaggtgaccgacgagagcagtcagccgggcgatcccatcgaaaccacgctctatcgagaggaatggaaccagacctccgggttgctgaccgcctggtatgacgcccagggaaacatccagaccgcgcgctacaaccgacgccactatgcacttaaggagtaccgcaacgagcccggcgtgacgacaagaacagcgacggagcgaagcagcgaggttgcgctgttgagcggctccggatcagttgtcgacagcacagtgctgacagagcagttcgaggcgatctacatcccagggacaggactgcagatcactcggacggtgaagtgtacgggggagccggatgacgtcacgacctataccgacccagaccatacgggtgggccggtggtcaccccgccgacgacgacattccccccaggcatgcatatcgtcaacaccgttgtgacctaccagtggcttgtgaacgacgagaacatgctggccaaccaggaccagcatcaggtgtggctcgccgcgttgagcaacaacagcgcagccatctgccacatccgcgatccgttcgactatcccgaggggcagaccacaacaaccgtcagcgttcgccagggcccggccgtgcgcctcggcggcgtgacctctggaacggttaccgacaccctgaccaagagtaagcccgcgcatgagtaccggcgcggatttttctgggagccagccgaccgctgggtgcgagccagttgcaacccgatcaccggagagctctctcgcggcccggagtgcatccagtacctgaccagttgggtttag

SEQ ID NO: 337777 - DNA, 774 bp, Pseudomonas aeruginosa
  misc_feature (746)..(755): n is a, c, g, or t
atggagagtcggcagatcgtcgtgatcagtggcaaggcttgtagtggcaaaagtgggttggcccgcctacttgaaaaagaatacggctttagggtcgttcgcgaccgtcgagtgtctcaggatgctgagtggaacctcaacatgcctcagacggcactcatcgaccggcgacgcgagctgacaaaggccgagaatgcgccatggatgctggaagctaccaaggcaatctgcttgaaggagcaggatggccgtcccttggtcgttgatcatttgaactcgctctccgaggtacagcagtttcgactgacctttggcacaaacctggtgcatgttcacctttatgcgagtgagcccacactcagggcgcgttacgcggagcgatcagagcttggagagtcgtcagcctatgaccaggtcaatcagctcaatgatccggctgagatcgatgcgctgaagaaagatgcggatgtccgaatctacaccgagcgttcggattcaagcgacacgttagtgcgggtggctgcacgtttgcatctgtatacgccgcctgatatcagatgcgtggatgtgctgatcggcggtcagtatgggagtgagggtaagggcaatatcgtttcatacttggcccgtgagtacgatgttatggttcgtgtaggtggccccaacgctgggcataccgtggtcaactctgccggcacctatacctaccatcatctgccttctgggtcgcgcgacgtaactgcccnnnnnnnnnnctcctgggcccaggcatga

SEQ ID NO: 337778 - DNA, 927 bp, Pseudomonas aeruginosa
atgcccgtcccgcctgctgagtttgatctcaagccgataccccgagcggccagcccccggtccctgcatattgctgctctaccttcgccgactcggcgtgaatcgttccctgcagaacgccgccgcgcaatcgacattgtctcctcctggggagagcatgcgaagcgctggggttgggatgggaaagggcttcttatcaacgattgctatgtaaaaatcaccgctcgtgaccctgagtcgggcgatattgccgagccgttcctatgggttcggagccgtagtgcacacgtctacgactacaacttcatcgatggtgaatccctctttcttgacgtcgaccacaccgcctaccgcgtctccaacctcaactggcacctgaacgtaaccatcaaggatggcgagtgccgcactacgagtacgctgcgcatgctgcgccccatcaggttgcctaacccctacgaaaggcatgaacacgcggagtttgaggcatacgcccaagtattggagaaattggcatgtggctgggaaccggttggctacgttggccttgaacctggtgaatggtctgagcccgaaaaagtgctccccgagggttttccgatccggagcgaaatcaccgaagcgcagtttgctcgggctcttcagcgctgcgcgagagtgaagcttggttacgagctggcagaggtttggggcatatgcttccgcttcagcgatgccttcttcagtgatgccctcgacgagaccatcattcgggaggcttctgaagctttacttgcagaggttgggccggccccttacccgatctctgcccatggcaaggaattggtctcgcttaacgatcggcatggcatcaggctgaccaccaaacatggcgagctgttcttcgaggtcgctcagaccatcgcgggtatccggcgtactttttag

SEQ ID NO: 337779 - DNA, 195 bp, Pseudomonas aeruginosa
atgaagagcgatccccaggtgccggcctcggtcgacgccgcgccgtcggctgcgctgaacaaggccgtcgaggtcaccctggccaaggtgcattggcaccagggcaaggagaaggcggccggcgaaaagatcaacgtcagccctgaccaggttgaattcctgcgccgcgaaggcgtgatcaagaaggaggcctga

SEQ ID NO: 337780 - DNA, 726 bp, Pseudomonas aeruginosa
gtgaggcgctggcgagcctggctggcgggcctgctgctgggcctgccgctgttgccgtccgtcgaggccgcggtgcgcgccgaggactacggcgctttctggctgtggagcggcgtcgcgccgcagccggtgctggcgcgggccgagacgctgtacatcctgcagggacagatcagccagtcgcgccggcgccccggcgagggcgtgcggctgatcgcccagggcatctcggtgccgcgcctggcgcggggcgaggtctgggtggtgtaccgcgcccataccctgcgctggacgccgcagatctaccaggccgtgctgaaccaggtgcagcgctggaagcgtgccggcaacccggtggtcggcatccagatcgacttcgatgcgcgtacccgctacctcgacgagtacgtcgatttcctccgcgacctgcgccggcgcctgccccgcgaataccgcttgagcatcaccggattgctcgactggggcagcaacgccgagccggcggcgatcaaccggctcaagggcgtggtcgacgaagtggtggtgcagacctaccaggggcgccacagcattcccaaccacgccgcctacctcccgcgggtcagccgcctgcaactgccgtaccggatcggcctggtccagggcggcgactggcaagcccccgactacctggaaaagagcccctggttcaggggctacgtggtgttcctgctcaaccctcagtga

SEQ ID NO: 337781 - DNA, 441 bp, Pseudomonas aeruginosa
atggcgcgcaagtgctcggaaatcgtcatccagttcaagccggtgccacacagcctgatcgacggcggcggcgggccggccaaccgcctgtggataaggttgcagccggaggagcggatcagcgtgcaactgatggccaagaccccgggcaagggcatgcaactggaaccggtggagctggacctcaacctggccgaggccctcagccgcaacaagcgccgctgggacgcctacgaacgcctgctgctggacgtgatcgagggcgactcgacgctgttcatgcgccgcgacgaggtagaggccgcctggggctgggtcgacccgatcctcgccggctggcgcgagcactaccagagcccgcggccctacccggccggcagcaacggcccggaacaggcgcaactgctgctggaactgcagggtcgacgctggctggaatga

SEQ ID NO: 337782 - DNA, 1083 bp, Pseudomonas aeruginosa
ttgagtacaccagccactccaacgtcctgcgacatcctggtcttcggcggtaccggcgacctggccctgcacaagctgctgccggcgctctatcgcctgcaccgggaggaccgcctgccggccgatacgcggatcttcgccctcgcccgcagcgcgctggacaacgccgccttcctcgccctcgccgagcgcaacgtccgcgcggtggtggcgcgcagcgagttcgccgccgaacaatggaaaggcttcgccgcgcgcctcgactacctggccatggacgcctcgcagagcgcagacttcggtcgtctcgcgcggcacctgaagagcagcgagggccgggtgctggtgcactacctggcaacctcgccgagcctgttcgcgccgatcgcgcagaacctctccatcgccggcctcgccgggccgcaagcgcgcatcgtgctggaaaaaccgctgggccattcgctggactcggcgagggcgatcaaccagtccatcggccgggtgttcgacgagtcgcgggtgttccgcatcgaccactacctgggcaaggaaaccgtgcagaacctgatggccctgcgcttcgccaatgcgttgttcgagccggtctggcgcgcggcgcacatcgaccatgtgcagatcagcgtcaacgagacccttggcgtggagaaccgcggcggctactacgaccacgccggggcgatgcgcgacatggtgcagaaccatctgctccagttgctctgcctggtggcgatggaggcgccggtgcgtttcgacgccgaggcggtgcgcaacgagaagctcaaggtgctgcaggcgctgaagccgatctccgggctcgacgtgcaggacaagacggtacgcggccagtacgccgccggcaggatcggcggccaggaggtgccggcgtactacttcgagaagaacgtcgacaacgacagcgataccgagaccttcgtcgcgctccaggccgaggtcgagaactggcgctgggccgggtgccgttctacctgcgcaccggcaagcgcatggcgcgcaagtgctcggaaatcgtcatccagttcaagccggtgccacacagcctga

SEQ ID NO: 337783 - DNA, 1140 bp, Pseudomonas aeruginosa
atgtcgccgatttcagtcgttatcgccggttacgcccgttcgccgttccacttcgccaggaaaggcgcgctggtcgatatccgcccggatgacctggccgccgcggtgctcaagggcctggtggagaaactcgatctcgaccctgttctgctggaggacgtggtcatgggctgcgcctatccggaggcggaacagggcatgaacatcgcgcgcatcgccagtttccgcgccggcttcccgcagagcctcggcggcgcgaccctcaaccgtttctgcggttcgtccatgagcgctgtccactacgccgccgggcaagtcctgctgggcgccggggaggccttcatcgccgccggggtggagtcgatgacccgggtgccgatgggcggcttcaacctgtcgcccaatcccgcgttgctgcaggactatccggcggtatacatgagcatggggcagaccgccgagaatgtcgccgagcgctacgccgtcagccgcgtcgagcaggaagagatggccgtacgctcccacgccaaggcagtcgccgcgcgcgaggccggcttgctgcgcgaggagatcgtcgccatcgacacccccgccggccgggtcgccgaggatggctgcatccgcccgggtaccaacctggagagcctggcccaactgaagccggcgttcggcggcagcgtcaccgccgccacctcgtcgccgctcaccgatggcagcgccgcgctgctggtctgtagcgaggaattcgcgcgccgccacgggctggcgatcctggcgcggatcaaggcggtggcggtggccggttgtgcgccggagatcatgggcatgggtccggtgcaggcgacgcgcaaggtcctgcaacgggccgggctgggcatcgccgacatcgacctggtggagatcaacgaggccttcgccagccaatccatcgcctgcatccgcgaactggggctggacatggacaggatcaacctggatggcggcgccctggccatcggtcatccgctgggcgccaccggcgcgcggatcaccggcaaggccgccgcgttgctgcggcgcaccggcgggcgctatgctatcgccacccagtgcatcgccggcggccagggcgtggcgaccctgctggaagcggtggagtga

SEQ ID NO: 337784 - DNA, 1530 bp, Pseudomonas aeruginosa
atgaaaacgacgtcctccggaactccatccgttccacggcctgaagacgagaacctcggtgtcggcgccaacatggcctacggcctgcaacatgtgctgaccatgtatggcggtatcgtcgcggtccccctgatcctcggccaggccgccggcctcgcgcccggcgacatcggcctgctgatcgccgcttcgctgttcgccggcggcctggcgaccctgctgcaaaccctcggcgtgccgttcttcggctgtcagttgccgctggtccagggggtgtccttcgctggcgtggcgaccatggtggcgatcatcggcagcggtggcagcggcggcattcccgcagtgctcggcgcggtgatggcggcctcgctgatcgggttgctgatcacgccgatcttttcgcgcatcaccaaattcttcccgccgctggtgaccggcatcgtcatcaccaccatcggcctgaccctgatgccggtcgccgcgcgctgggcgatgggcggcaacagccacgcgccggacttcggcagcatggccaacatcggcctggcggcaatcaccctggtcatcgtgctgctgctgagcaagctcggcagcgcctcgatctcgcgcctgtcgatcctcctggcgatggtcatcggcaccgtcatcgcggtgttcctcggcatggccgacttctccaaggtcaccgaaggcccgctggtggcgtttcccacgccgttccacttcggcatgccgaccttccaggtcgccgcgatcatctcgatgtgcatcgtgatcatggtgaccctggtggaaacctcggcggacatcctcgcggtaggcgagatcatcgacaccaaggtcgactcacggcgcctgggcaacggcctgcgcgcggacatgttctccagcatgctggcgccgatcttcggctccttcacccagagcgccttcgcccagaacgtcggcctggtggcggtgaccgggatcaagagccgctacgtggtcgccaccggcgggttgttcctggtgatcctcggcctgctgccggtgatgggccgggtgatcgccgcggtgcccaccgccgtgctcggcggcgccggcatcgtgttgttcggcacggtcgccgccagcggcatccgcaccctgtcgaaggtggactaccgcaacaacatgaacctgatcatcgtcgccacttcgatcggcttcggtatgatcccgatcgccgcgccgaccttctacgatcacttccccagttggttcgccaccatcttccattccggcatcagttcctcggcgatcatggcgatcctgctcaacctggcgttcaaccacttcactgccggcaactccgaccagcagtcggtgttcgtcgccgccagcgagcggaccctgcgctaccaggacatcgccgccctgcacgaaggcgactatttcctcgacggcaagctgtacgacgcccagggcaacgaagtgccgctggccggcgacgacagccatggcgcgccgccgcgacggcgcagcgaaaccgctgaagccggcagcgcctga

SEQ ID NO: 337785 - DNA, 618 bp, Pseudomonas aeruginosa
atggcggcgaagggaatggtgttgagatccacggcggagccgccgatggcatcggtgccgtacagtgcggaggcgccgtcgcgcagcacctcgacccggtcgatggcggcgaagggaatggtgttgagatccacggcggagccgtcgatggcattgttcgccaggcgccggccgttgagcagcaccagggtcttgttcgcgccgatcccgcgcaggtcggcgaacgaggcgccgccggtggcgctgccgaccgagcgactggagttgtatacgccctggttgccggaaagccggccgatcagttcctcggtgctggtcacgccctgttggcgcagctcctcggcgcgcaggacgctgatcggcaccgcggtttccgcatcgacccggcggatcgcgctaccggtcacctcgattcgttgcaactggaccgtgggcgggtcgacaggcgcctgtccctccgccgcggcggcgctgccgggagcgagctgcagggccagcagcagggcggcgcccagcggcgggtcggtgtggagcgatcggtgcatggtcggggcatcccttgttccggtgtgtccagggatgtccgtcgagccgggggattttccagggacggcttag

SEQ ID NO: 337786 - DNA, 690 bp, Pseudomonas aeruginosa
atgtcagcagtcaagatcacgcagaagatcaagggcttcaaggtcgtcaacgaagccgaggagcaggcccttgccgccgccgcggaagccgcgtcggtggtgcagatggacgagaccctggagcgcccggataccctgatcggcgccacctacaagatcaagtcgccgctgttcgagcacgcgctctacgtgaccatcaacgacatggtcctcaatgcgggcacggcgcacgagcagcggcgtcccttcgagatcttcatcaactcgaagaacatggatcatttccagtggatcgtcgcacttacccgcatcatgtccgcggttttccgcaagggcggcgactgcaccttccttgtcgaggaactcaaggcggtattcgacccgcgcgggggctacctgaagaaaggcggcatctacatgccctccatcgtcgccgagatcggcggcgtgctggagcgccacctgacggccatcggtctgttgcgtggccctgaactggacgaggaacagcgtcttttcctcgcggaaaaacgcgccgcctacgaggccgcccagggcaccagcaaggtcgagccgggcgaaggcttccccgccggcgcgcaactgtgcggcaagtgcaacagcatggcggtggtacagatggacggctgcgccacctgcctcaactgcggacactcgaaatgtgggtga

SEQ ID NO: 337787 - DNA, 2205 bp, Pseudomonas aeruginosa
atgttgcgtacggtggccggcttcggacgccccaacaaccatcgggaggttaatcagcggatggccaagacagacgcacgcagtccccgcaccgaacgcgggaccatcgccctgcaggacgcgtcgcaggatatctgggacaagaagtaccggctcaagagcaaggacggtacgccggtggatgccagcgtcgacggtacctggcaacgcgtcgcccgcgcccttgccgatgtcgaggacaaggcctcccgcgaacactggtacgggcgcttcctctgggccctgcgcaacggcgccatcccggccggccggatcatttccaatgccggcgccctggggcacaagccggccacctcgaccatcaactgcacggtgtccgggaccatccaggactccatggaccacatcctcgagaaagtccacgaggccgggctgacgctcaaggccggctgcggcatcggctatgagttcagcaccctgcgcccgcgcggcgcctacgtttccggtgccggtgcctacaccagcgggccgctgtcgttcatggacatctacgacaagatgtgcttcaccgtcagctccgccggcggccgccgcggcgcgcagatgggcaccttcgatgtcagccacccggacgtccgcgaattcatccgcgccaagcgcgaggacgggcgcttgcgccagttcaacctgagcctgctgatcaccgaccagttcatgcaggcggtggaacaggacgccgactggccgctggtattcccggtgcacgtgaaggagcgcgacgagatcgacctcgacgaccccaacgcggtggtctggcgcgaatggccgatccaggacgactacgtccagcgcgccgacgggctggtcgcctgcaaggtctacggccaggtccgcgcccgtcacctgtgggacatgatcatggtctccacctacgactatgcggagccgggcttcatcctcatcgaccgggtcaacgaactgaacaacaactggtggtgcgaggcgatccgcgccaccaacccctgcggcgagcaaccgctgccgccgtatggctcgtgcctgctcggctcggtgaatctcacctgcttcgtcgagcagccatttggcgacgaggcgcgcttcgactgggaccgtttccgcgaagtggtgcgggtgtttacccggatgctcgacaacgtggtggaaatcaacggcctgccgctggaacagcaacgccaggaaatccttggcaagcgccggcatggcatgggcttcctcggcctgggctcgaccctgaccttgctcaagctgcgctacggcagtcccgaggcctgcgtattcaccgaggaagtggcgcgggaaatggccctggtgggctgggaagtggccctggagctggccagggagaagggcccggcgccgatcctggcgcaggactacgaagtcaccgcggaaatgcttcgcaagcgtccggaaatggccgccgatggctataaggccggcgaccgcatccgcggcagcgtgcttcacgccaagtattcccgctacatgcagcgagtcgccgaacatgctccggaactgatcgaggcgttggctgaaaccggcgcgcgcttcacccaccacagctccatcgcgccgaccgggaccatcagcctgagcctggcgaacaacgcctccaacggcatcgagccgagcttcgcccaccattattcgcgcaaccttatccgcgaaggccgcaagaccaaggaaaaggtagaggtctacagctacgagctgctggcctaccggaccctggtcaacgcccaggccctgccggacagcgacgacccggcgcgacgcctgccggactacttcatcaccgccgacagcgtcaccccggcgcaacacgtggacatccaggcggcggcgcagaagtgggtcgattcgtcgatctccaagaccgccaacgtgcccaccgactacccgttcgaggacttcaaggacatctatcgctacgcctggcaccagggactcaagggctgcaccaccttccgcttcaatcccgaggcgttccagggcgtgctggtcaaggagtccgacctggagaagacccgctaccgcttcgaactggaggacggcagcgtggtggagttcaagggcaacgagcaggtcgagtacgacggtgagatccataccgccgccaacctcttcgacgccttgaaagaaggctattacggcaagtactga

SEQ ID NO: 337788 - DNA, 924 bp, Pseudomonas aeruginosa
gtgaccctgcgtccctttgccctgctgtccgcctgcttcgccctgttcctgctggcttcgccggcgcgcgccgaggtcagcgtgctgaccagcatcaaaccgctgcaactggtcgccgcggccatccaggacggcgtcggccagccggacgtactgctgccgccgggcgcctcgccacaccagtacgccctgcgtccttccgacgtacggcggctgcgcgaggtgcaattgttctactggatcggcccggacctggagaacttcctgcccaaggtgctcgccggccgccagggcaccagcgtcgcggtgcaggacctgccgggcatgcacctgcgcaagttcgtcaatttcgaggaagaggagcatgccgggcacgacgagcacgaccatgaccatcgtcccggcatgctcgacgcccacctctggctgttgccggccaacgcccgcaccatcgccgcgcggatggccgaggacctggcccaggtcgacccggccaacgccgggcgctaccgggccaacctgaaggccttcgaggagcgcctcggcgggctcgacgggaaactccgcaaacgcctgggcaagcttgccggcaagcctttcttcgtcttccacgaagccttcgactatttcgaggaagcctacgggttgcgccataccggcgtgttcgcggtatccgcggaggtccagccgggagcacgccatgtcgccgccatgcgcgcccagctgaaggccgccggtccggcctgcatcttcagcgagccgccgcttcgaccgcggctggccgacaccctcagcgaaggcctgccggtgcgcctggccgaactggacgacctgggcgtgaacgtgagcgtggacgccaacggctatgagaatcttctgaacaacctggcaggcgaatttgccggctgtctggaaaagctctga

SEQ ID NO: 337789 - DNA, 504 bp, Pseudomonas aeruginosa
atgtacaagattgcgcccaagaccccgctggcctgccagccccatgaccacagccagtgcgtcagcaccgcgctggccgaggccgatgcgctgtgcgcgcgccagggcgtgcgcctgaccgaactgcggcggcgcgtgctggaactggtctggcagagccacaagccgctgggggcctacgatatcctcgcggtgctcagcgaaaccgacggccgccgcgccgcgccgccgaccgtctaccgcgcgctggacttcctccaggagaacggcctggtgcaccgcatcgcctcgctcaacgcattcgtcggctgcaacaacccggagcacagccaccagggccagttcctcatctgccgcacctgccacaccgcgatcgagctggaacagccggatatcagccgggccatcgtcgccggagcgaacagcgtcggcttcgccgttgaaagccagaccgtcgaggtggtcggcctctgcggcacctgccgggaccagaaggacgcctga

SEQ ID NO: 337790 - DNA, 810 bp, Pseudomonas aeruginosa
atggacaacgcgctggtgcggctgacccaggtcggcgtgtccttcaacggccaggcggtgctgagcgatgtcgacctggccatcgagcccggccagatcgtcaccctgatcggccccaacggcgccggcaagaccaccctggtacgcagcgtgctcggcctgctcaagccgcacgtcggcgaggtctggcgacggccgcggctgaccatcggctacatgccgcagaaactccacgtcgacgccaccctgccgctcagcgtactgcgcttcctccgcctggtacccggggtcaggcgcgagcaggcgctggcggcgttgcgcgaggtcggcgcggcgcacgtgctggagcgcccgctgcaaagcatttccggtggcgaactgcaacgcgtgctgctggcccgcgctctgctgcgcaagcccgagctactggtgctcgacgagccggtgcagggcgtcgacgttgccggccaggccgaactctaccgcctcatcggcaaactgcgcgaccgctacggctgcggtgtgctgatggtctcccacgacctgcacctggtgatgagcgccaccgaccaggtggtctgcctgaaccgccatgtctgctgctccgggcaccccgagcaggtcagcggcgacccggccttcgtcgagctgttcggccaggacgctcgcagcctggcgatctaccaccaccaccacgatcacgcccacgacctccacggcgaggtggtcaaggccggacccggcgccttgcctccaggcacccgcttcactcctgtccacaagcacggccccgactgcaaccatggctga

SEQ ID NO: 337791 - DNA, 789 bp, Pseudomonas aeruginosa
atggctgacttcctgctcaacgccctcctcgccggcctcgccctggccctggtggccggccccctgggctccttcgtggtctggcgacggatggcctatttcggcgataccctgtcccacgccgcactgctcggggtagccctgggtttcctcctcgatgtcagcccgaccctggcagtgaccgtcggctgcgtgctgctcgcagtgctgctggtgaccctgcagcagcgccagccgctggccgccgacaccctgctgggcatcctcgcccacagcaccctgtcgctgggcctggtcaccctgagcttcatgaaggaagtgcgggtcgacctgatggcttacctgttcggcgatctgctggcggtgagcgccagcgacctgctgtggataatcgccggcagcgcgctggtcctggcactgatctgcttcctctggcggccgctgctggcgatcaccgtgcacgaggaactggcgaaggtggaaggcctgccggtcggagcgatccgcctggcgctgatgttgctgatcgccatcgtcatcgccgtggcgatgaagatcgtcggcgtactgctgatcacctcgctgctgatcattcccgccgccgccgcccagcgccatgcccgcagtcccgagcagatggcggtcggtgccagcctgctgggactggtcgcggtgtgcgccggcctggccctgtcctggttcaaggatacccccgccggcccctcgatcgtggtcagcgccgccggcctgttcctgctgagttttgtcctgccccgccgcacggtgtag

SEQ ID NO: 337792 - DNA, 792 bp, Pseudomonas aeruginosa
atgatgtcgtccttctttcgcctgctgtccatcctggcggcggcgctgctggtcagcgcctgccagggcaatgcgtcgtcgcaaccgacgccggtggtcgcgccccaggcgcagcccgccgatccctatgccgaactgcaggaaaccctggccgccggcaagctcgaacaggccgagcaacaatggctggccctgcgcagcgccgccgccggcgacgagcgcgtcgaagcattccgccgccagttggccgaggcctacatgcagcgcggggaaaccgcgctgcgccaaggagacctcaacaccgccaccagtgccctcggccatgcccgcggactgatgcccaaggcgccggcgctgaccgccgggctggacggtgcgatcaaccgcgccaaggtcgatcccgcccgtgccgagcaggcccgacgcatgcagcaggcggcccagcagcagatgcagcagatcatccagacgccgcccgacggccaactgaagccgctgcccggcgctccccacctgatcgatccgcaagcggccagcagcgccgtgcccctgccgatgctcgacggcaccggccagggcggcctcggtgcggtgctcgacgcggtggccgcggatgtcgtcgcctaccgttgcagggtgcatatcgaagtgcgccgggacagcgactatccgctggtttccgaccagctcctggcgcgggtgaagaagctctcacccgatttcgacctgcatctcagccatgtcgtacaggccgacaagccgacccgattgatacttaccccccggaattga

SEQ ID NO: 337793 - DNA, 1008 bp, Pseudomonas aeruginosa
gtgatcgaattccacgacgtccacaagacctatcgagttgccggtcgggaaatccccgccttgcaaccgacccgcctgaacatccaggccgggcagattttcggcctgatcggccattccggtgccggcaagagcaccctgctgcgcctgatcaaccgcctcgaggagcccagcggcggccgcatcctggtcgagggcgaagacgtcaccgccctcgacgccgaaggcctgcgccgtttccgccagcgcgtcgggatgatcttccagcacttcaacctgctgtcctcgaagaccgtcgccgacaacatcgccatgcccctgcgcctggccggcggcttcagccgtgccgaagtcgatgcgcgggtctccgagctgctcgcgcgggtcggcctgtccgaccacgcgcgcaagtatccggcccagctctccggcggacagaaacagcgcgtcggcatcgctcgcgccctggcctgccggccgagcatcctgctctgcgacgaggccaccagcgccctcgatccgcagaccaccgcctcggtcctgcaactgctggcggaaatcaatcgcgagctgaagctgaccatcgtcctcatcacccacgagatggacgtgatccgtcgtgtctgcgaccaggtcgcggtcatggacggcggcgccatcgtcgagcagggcgatgtcgccgatgtcttcctccatccgcagcacccgaccacccgccgcttcgtgttcgaggccgaacgggtcgacgaggacgagcgccacgacgatttcgcccacgtgccgggtctcatcctgcgcctgaccttccgcggcgaagccacctatgcgccgctgctgggcaccgtggcgcggcagaccggggtcgactacagcatcctttccggacgcatcgaccgcatcaaggacacgccctacggccagctgaccctggccctggtcggcggtgacctggaagccgccatgagccagttgaacgccgctgacgtacatgtggaggtactgcgctga

SEQ ID NO: 337794 - DNA, 678 bp, Pseudomonas aeruginosa
atggacttcttcgaaaccatgagcttcgccaacatcgactggtacgaaatctggctggccagcgtcgacaccttctggatgctcggcggttcgctgctattcacggtggtcctcggcctgcccctcggcgtcctgctgttccttaccgggccacggcagatgttcgagcagaaggcggtctacaccctgctctcgctagtggtgaacatcctccgttcgttgccgttcatcatcctgctgatcgtgatgatcccgctgaccgtactgataaccggtacctcgctgggcgtcgccggggccatcccgccgctggtggtgggcgccacgccgttcttcgcgcgcctggtggaaaccgcgctgcgcgaggtcgacaagggcatcatcgaggcaacccaggcgatgggcgccagcacccggcagatcatctggaacgccctgctgccggaagcccgaccgggcatcatcgccgccatcaccgtcaccgccatcaccctggtctcgtacaccgcgatggccggagtggtcggcgccggcgggctgggcgacctggcgatccgcttcggctatcagcgcttccagaccgacgtgatggtggtcaccgtggtgatgctgctgatcctcgtccagattctgcaaaccgtgggcgacaagctggtggtgcacttctcgcgcaagtaa

SEQ ID NO: 337795 - DNA, 783 bp, Pseudomonas aeruginosa
atgaaaaaactgcttgctgctttctccgctgtcgcggcgctcggcctcaccgccgcccaggccgccgagtccctcaccgtcgcggccaccccggtgccgcacgcggagatcctcaacgtggtcaagccgctgctggccaaggaaggcgtggacctgaagatcaaggagttcaccgactacgtgcagccgaacgtgcaggtctcggaaaagcgcctggacgccaacttcttccagcaccagccgtacctcgatgagttcaacaaggccaagggcaccgacctggtcgccgtgaccggcgtacacatcgagccgctgggcgcctactcgagcaagtacaagaagctcgacgaactgccttccggcgctaccgtggtgatccccaacgacgccaccaacggcggccgcgccctgctcctgctggacaaggctggggtgatcaagctcaaggacaacaagagcatcaccgccacgccgaaggacatcgtcgacaatccgaagaacatcaagatccgcgaactggaagccgcgaccctgccgcgcgtgctgacccaggtcgacatggcgctgatcaataccaactacgccctggaagccaagctgaacccgaccaaggatgcgctggccatcgaaggcagcgactcgccctacgtgaacatcctggtcgcgcggccggacaacaaggacagcgacgccatgcagaagctggccaaggccctgcacagcgccgaggtcaagcagttcatccaggagaaatacaaaggcgcggtggtgccggcgttctga

SEQ ID NO: 337796 - DNA, 858 bp, Pseudomonas aeruginosa
atgcaagaactaaaacaacgcctggcctccccgcccgccgaactgactcccgcggagcgcaaggtggtgcgtgccctgctcgatgactacccgcgcctcggcctcggcccgatgacgcgcctggcccggcacgccggagtcagcgacccgacgatcatgcgcctggtgaaaaagctcggcttcgccggctacggcgacttccaggaagcgctgctggccgacgtcgacgaccgcctgcgctcgccgcgcaccctgctcgccgaacgccgcgagcggatgggccgcgacgacacctgggcgcgctacctcgaccaggctggccagagcctgcaacagaccctcggcctgacccgccccgatgacatccagcgcctcgccgactggctgctcgacagccgcctgcgcgtgcactgccacggcggacgcttcagccgtttcctcgccggctacctggtcacccatctgcgcctgctgcgcccgcaatgccgattactcgacgacggcgccctgctccccgaccagctctacgacctcggccgccaggacctgctggtcctgttcgactatcgccgctaccagagccaggcccagcacgtggcccaggccgccaaggcacgcggcacgcggctggtgctgttcaccgacatctacgcctcgccgctgcgcgaacacgccgacctgatcgtcagttcgccggtggaatccgcctcgcccttcgactcgctggtgccggccatggcccaggtcgaggcactggtagcgaccctggtggcgcgcatgggcgcgccgctcgacgaacgcctggagggcatcgaccagctccgcaacgcgttcagcagtcatcttctggaggaatga

SEQ ID NO: 337797 - DNA, 654 bp, Pseudomonas aeruginosa; identical to SEQ ID NO: 325013

SEQ ID NO: 337798 - DNA, 1332 bp, Pseudomonas aeruginosa
gtgaaccgcctgcagccggtacgcctggtcagcttcgtcaccaccgacctggccggcatcacccgcgggcgctcgctgcccctggcgaccctggaagagcaactggccagcggttgcggctgggtaccggcgaacagttcgctgaccccgcaggacctgatcgacgagagcagcccctggggcagccacggcgacctgcgcctgctgcccgacccgaacagccgggtgcgcgtcgagcagggtcccgacgccgctgcgccggcgctcgactacctgcacggcaacctggtggaaaccgacggcacgccgtggccggcctgcccgcgcggcctgctgctggccgaggtggagcgctatcgcgacagcggcctgcaggtcatcgcggcgttcgaacacgaattcagcctgctcggcctgcccggcgagcgtccggccgcggcgttttcgctgcaggcccagcgtgccgccgggcagttccccggctggctggtcagcgccctggcccaggccggcaccgagccggagatgttcctccccgaatacggccagcgccagtacgaggtcacctgccgcccggcgcagggcgtggccgccgccgaccgcgcggtgaacgtccgcgaggtcactcgcgaagtggcgcggcagatgggcctgcgtacctgcttcgcaccgctgccggcacccggcgcggtgaccaacggggtgcacctgcacctgagcctgcaacatgccgacggcagcccgctgctgtacgagcccggtcgacccaacgatctctccgaactcggcgagcactgggccgccggcgtgctcgcgcacctgccggcgctgtgcgcgctgaccgcgcctaccgccgcctcctacctgcgcctgaaaccccaccactggagcgccgcctacgcctgcctgggactgcgcaaccgcgaagcggcgctgcgcatctgtccggtggtgagcgtcggcggcaagccgctgggcaagcagtacaacctggaattccggccgatggacgccaccgcctgtccgcacctggcgatggccgcggtgctgatcgccggccgcctgggcatcgaacgacgcctgccgctgcgcgccctggccgatgtcgatccgcacggcctcagcgacgaagagcgccaggcccgcggcatccagaccctgccggcgaccctcggcgatgcgctcgactgcctgcagcgcgacgagacgctctgcgccgagctgccaaagccgctgctggacacttacctcgccatgaagcgccacgaactggcactgacggcgggcctttccgacgacgacctgtgccgccactatgccgagctttactga

SEQ ID NO: 337799 - DNA, 753 bp, Pseudomonas aeruginosa
atgccgagctttactgacaaccccgaactcggcatctaccagctgccaccctaccgcctgctcaaccccgaagggcgcagcccggtggtcctggtctgcgagcacgccagccggcacatcccgctggagttgcagcgcctcggcctggaccaggccgcggcggaagaacacatcgcctgggatatcggcgccctggcgctggccgaagagctttcccggcggctcgacgcgccattgctggcggccggctactcgcgcctgctgatcgacctgaaccgaccgctggaggcacccgacagcattccgccgcacagcgagatctacccggttcccggcaaccgcgagctgtccgagacggtgcgccgctatcgccaggattgcctgttccatccgttccaccagcgcctgacgcaactgctcgacgagcgccaggccgccggcgtgccgacccgcgtggtcggcgtgcacagttttaccccggtgtaccacggcagaccccgcccgctggttgccggggtgctttatcgcaacgccggcgcctacgccgggcgcatcctcgacggtttgcgccggcacggcctggaagtcgccggcaaccagccctatgcgatcgacccggcggaagacactaccgttccggtgcatggcgacgcacgcggtctggaagcggtgctgctggagatccgcaacgatggattgcgcacgccggatgcggtgagcgcctgggccgagcgtctgtatccctggctctga

SEQ ID NO: 337800 - DNA, 1350 bp, Pseudomonas aeruginosa
atggccatcgaacagttcggataccggcaacagctgcgccgcagcctgtccctgagcgacctgatcatctacgggatgatcttcatgatccccatcgccccgttcggggtctacggctgggtccatgccgacgcccacggcatggtgccgatggcctacctggtgggcatgctggcgatgctcttcaccgccctcagctacggagccatggccaaggcctttccgattgccggctcggtgtattcctacgcccagcgcggcatccacccccatgtcggcttcatcgccggctgggtgctgctgctcgactacctgctgatcccgccgctgctctacgtgttcagcgcgctggcgctgaaccacttgttcccggcgatccccaagctggcctggatgctgctgttcctggtctcggcgaccctggtcaacctgcgcggcatcaccttcgccgcccgcgccaacctgttgttcctgatcggagagctggtggtcctggcgatcttcctggtggtcggctaccaggcgctggaaggcggcctgggcaacggccggctgaccctcgagccgctgtatcgcccggaggccttcgatctcggcctggtgatgaaggccgcctcgatcgccgtactgtcgttcctcggcttcgacgccatctccaccctcgccgaggaggtcaagggcgatcccgcgcgacagatcggccgcgccgcgctgatcgcgctgttcatcatgggcggcatcttcatcgcgcagacctggctggccaccgacctcgccgccgggatgaacttcaagtcggcggacaccgccttctacgagatcgccgaagcggccggtggccagtggctgtcgatgctgacagcggtagccaccgcgctggcctggggtgtcaccgtgtcgatcacctcgcaggcagcggtctcgcgcctgctctactcgatggcccgcgacggcaggctgccgcgcgcgctggccagggtccatccgcgctaccagacgccgcacgtcagcctgtacctggtggcggtgctgtcgctgggaatcggctgggccttcctcgacgcaccggacgtgctcacctcactggtgaacttcggtgccctcaccggcttctgcctgctgcacctgagcgtgatcaaccactactaccgccgccagcgctccggccagtggttgcggcatctactgttcccgctggtgggcctggcgatcatcgcctacgtgctgtacagcatgagcctcgacgcacagttgctcggactggcctggatcgcggtggggctggtctacctggcgttgctgcaacgcggcgggcgccaggcgccaacggagttggccaaggatctctga

SEQ ID NO: 337801 - DNA, 1344 bp, Pseudomonas aeruginosa
atgagcgaccaggtgatcttcgtcgacgacgaagcgacgatccgcgaagcggtgcagcaatggctggagctgtccggcttcgaggtgcgcctgtgcctgcgcgccgaggagtgcctgggagcattggacaagtccttcgccggggtggtcatcagcgatgtgcgcatgcctggcatggacggcctgcaactgctcgccaacctgcaggcggtcgatcgcgacctgccggtgatcatggtcaccgggcacggcgacgtgccgatggcggtggaggccatgcgccagggtgcctacgacttcatcgagaaacccttcacgcccgagcgcctgctcggcagtttgcggcgcgcgctggaaaagcgccgcctggtgctggagaaccggcgcctgaaggagcaggccagtctcaaggaccaggtcgatgcgcgtctgctcggcgtgtccaagccgatggaagcgttgcgccggcaggttctggccctggcgcagaccccggtgaacgtcctgatccgtggcgagaccggcagcggcaaggaactggttgcccgctgcctgcacgacttcgggccgcgcgccgacaagccgttcgtggcgctgaactgcgcggcgattcccgagcaactgttcgagagcgagctgttcggtcatgagagcggtgccttcaccggcgcgcagggcaagcgcatcggcaagctcgagcatgcccatggcggtaccttgttcctcgacgagatcgaaagcatgccgttggcgcagcaggtcaagctgctgcgcgtcctgcaggagcagcaactggagcggctcggctcgaaccagagcatccacgtcgacctgcgggtgattgccgcgaccaagcccgacctgctggccgaagcacgtgccggacgcttccgcgaggacctggtgtatcgcctgaacgtcgctgagctgcgcctgccgccgatccgcgagcgtcgcgaggacatcccgctgctcttcgaacatttcgccagcgttgccagccagcgcctcggccgcgagccgcagcccgccgcgccggcggaactggcgcggctgatggcccacgactggccgggcaatgtacgcgagctggccaacgccgccgagcgtcatgtcctcggcctggagcgcggggacgcggaggaaggcggcggcctcacctcggggctggcggaacgcatggaagccttcgaggcggagtgcctgcgccaggcgctcggccagtgccgcggggacatcaaggcggtgatggagttgctgcaactgccgcgccggacactcaacgaaaagatgctgcggcatggcctcagccgcagcgatttcgtcggcgaagagccggcctga

SEQ ID NO: 337802 - DNA, 879 bp, Pseudomonas aeruginosa
atgtcgctatccccctggtcccattcctgctcggccggtttcaccctgcgcggctggcgcagcgaaccgagcggcaagccgttgctgcatttcctccatggcaacggcttctgcggccgcacctacgaaccgatgctgcgtctgttggcggaggatttcgacctctggctgtgcgacatccagggccacggcgaaagcgaccacggcggccgcttccacggctggaaccgcaacgccgagatggcggtggaggccttcgaggccgggcgcggtccctatggcgatgtccagcgactggcctgcgggcacagcttcggcggcgtcctcagcagcctcgtcctggcccgccatcccaccctgttcgcccgcgccgtgctgctcgacccggtactgttcaccccggcgatgatcggcgtgatggcgctttccgagaccctcggcctgcaattgcgcggcagcctggcgaagaaggcgcgcctgcgccgcagccagtggccggatcgcgcagccgcctacgccggcttgcgcggccgcggtatcttcaagggctggaccgacgaggcgctgtgggcctacgtggaatatgcgctgaaggagagcgacggcggagtcgagctgaagtgccggccaagccgcgaagcggagatcttcagctccttccccaggcggctgtggccgtcgctgggcaagatcaccacgccgacccgcgtgctctacggtgaccgcacctaccctttcgtcgccaagtcggtggcgcgctggtgctcgctcaacccccaggtcagcgcccacgcggtggtcggcggccactgcttcatgcaggaagacccggccgctgccgccgaacgcgtacgcgactttctcctgcccaatccatga

SEQ ID NO: 337803 - DNA, 789 bp, Pseudomonas aeruginosa
atgcgccctctcctcttcagcgcccttctcctgctctccgggcatgcccaggccagcgaatggaacgacagccgggccgtggacaagctattcggagcggccggtgtgaaaggcaccttcgtcctttacgatgtgcagcggcagcgctatgtcggccatgaccgggagcgcgcggaaacccgcttcgttcccgcttccacctacaaggtggcgaacagcctgatcggcttatccacaggggcggttagatccgccgacgaggttcttccctatggcggcaaaccccagcgcttcaaggcctgggagcacgacatgagcctgcgcgacgcgatcaaggcatcgaacgtaccggtctaccaggaactggcgcggcgcatcggcctggagcggatgcgcgccaatgtctcgcgcctgggttacggcaacgcggaaatcggccaggttgtggataacttctggttggtgggaccgctgaagatcagcgcgatggagcagacccgctttctgctccgactggcgcagggagaattgccattccccgccccggtgcagtccaccgtgcgcgccatgaccctgctggaaagcggcccgggctgggagctgcacggcaagaccggctggtgcttcgactgcacgccggaactcggctggtgggtgggctgggtgaagcgcaacgagcggctctacggcttcgccctgaacatcgacatgcccggcggcgaggccgacatcggcaagcgcgtcgaactgggcaaggccagtctcaaggctctcgggatactgccctga

SEQ ID NO: 337804 - DNA, 501 bp, Pseudomonas aeruginosa
atgggggctaattcacatggcgaaaacaccccccactcgctgcctgccgggagaacgggtaagctggccgtccccctacaccggattccgctcgtgaccctgggtaaccttttcgtcatgctcctgttgggcgccgccgcagcctggtggtggcgcgcccatggcgtgcgcgagcgggcgttactgctggccaaacagcattgcgccaagcagggcgtggaactgctcgacgagaatgtcgcgcgccggcgcctgcgcctggcccgtgaccaccgtggtcagtggcggctgagccgcgagttcggtttcgagttcaccgtcagcggcgaggaacgctacgccgggcgtatcgtcatgtatggctatcacctcggcgccatcgaattggccccgcatcgcttcgaggcggccgccgaggtcgacaacccgccggtgcatagcgccgaggtgattcgcctcgacgagtggcggcagtcccggcagaaaaaggtcggcgactga

SEQ ID NO: 337805 - DNA, 867 bp, Pseudomonas aeruginosa
atgccacgtacgccccacctgctcgccatccagtcccatgtggtcttcggccacgccggcaatgccgcggcggtgttcccgatgcagcgcatcggaatcaacgtctggccgttgaacacggtgcaattctccaaccacacccagtacggtcaatggaccgggcaggtgctgccgccggagcagattccggcgctggtggacggtattgccggcatcggcgaactgggcaactgcgacgcagtgctgtccggctatctcggcagcgccgcccagggccgcgccattctcgatgtggtggcacggatcaaacaggccaaccctcgggcgttgtacctctgcgacccggtcatgggccacccggaaaaaggctgcatcgtggccccggaggtcagcgacttcctgctggaagaagccgccgcggtcgccgactacctgtgtcccaaccagttggagctggacagcttctgcgaccgccagccggactccctcgccgactgcgtggaaatggcacggagcctgctggcacgcggtcccagggcaatcctggtaaagcacctgaactatccgggcaaggccggcgacaccttcgagatgctactggtggccgccgaccaggtctggcacctgcaacgcccgctgctggccttcccgcggcaaccggtcggggtcggcgacctggcctcggggctgttcctctctcgcctgctgctcggcgacgacctgcgtaacgccttcgaattcgccggcgccgcggtccatgaagtgctgctggaaacccaggcctgcggcagctacgagctagagctggtgcgggcgcaggatcggatcgcacacccaagggttcgtttcgacgcagtgcgcctttag

SEQ ID NO: 337806 - DNA, 585 bp, Pseudomonas aeruginosa
atgttgcgccgtctctacgactggaccctgcgcctggccggccatccccgcgcggagctggccctgggcggggtgaccttcgccgaaagctcgttcttcccgattccgccggacgccttgctggtgccgatggtcctggccaaccgggccaaggcctggcgctacgcgacgatctgcgcgatcagctcggtgctgggcggcatcgccggctatttcatcggcttgctgctgttcgagagcgtggccatgccgatcctggcgttctacggcttgctggagaacttcgaacaggtcgccgaacgctacaacgaactgggctggctgatggtgctgctgggcggcggcttcacgccgctgccgtacaaggtgatcaccattaccagcggagtgacccagctcgacctctggctgttcgtcggcctcagccttgtcgcccgcagcctgcgcttcgccgctacctgcgctttgctgttctgggctggcccacgcctgaagaccctgatcgagcggcgcctgggcatggctttcgtgctgatggcggtgatggtggtcggtgggttgatgctggggaaatacgttctttga

SEQ ID NO: 337807 - DNA, 1704 bp, Pseudomonas aeruginosa
atgcaccatacgccgttactcaccacactcgccgcggggttcgtcctcgccttcctcttcggggccctggccaatcgcctgcgcatttcgccgctggtcggctacttgctcgcgggcgtcctggccgggccgttcactcccggttatgtcgccgaccaggcgctgtcgcaggaaatcgccgaactcggcgtgatcctgctgatgttcggcgtcggcctgcacttctcgctcaaggacctgctctcggtgaaggccatcgccattcccggggcgctggtgcagatcggcgtcgccacgctgcttggcatcggcctggccaagctgctcggctggagcttcggcggcggcctggtattcggcctgagcctgtcggtggccagtaccgtggtgctgttgcgcgccctggagcagcgccagttgctggacaccaagcgtggcaggatcgccatcggctggctgatcgtcgaggacctggcgatggtcctgaccctggtactcctgccggcgctcgccggcaccctcggcggcaagaccgacggcggcgaagccagtctgctctggccgctgctgattaccctgggcaaggtcgccgccttcgtcgccctgatgatcttcggcggtcgccgggtggtgccctgggtgctggagaggatcgccgccagcggttcgcgggaactcttcaccctggccgtgctggccatcgccctgggcatcgcctatggctcggcggtgctgttcggggtgtccttcgcgctaggcgccttcttcgccgggatgatcctcaacgagtccgaactcagccacgaggcggcggagaactcgttgccgctgcgcgacgctttcgcggtgttgttcttcgtctcggtggggatgctgttcaatccgatgatcctgttgcaggagccgctgacggtcctggccaccttcctggtcatcgtcttcggcaagtcggtggccgcctacctgatcgtccgcgccttcggccatccgaacagcaccgcactggtgatcgccgccagcctggcgcagatcggcgagttttccttcattctcatcggcctgggcatcggcctcgaactggtgccggagcagagccgcgacctggtgctggccggggcgatcctgtcgatcctggtcaatccgctgctgttcatcgccatcgatcgcctgcagcaacgcaaggagcagcgcctggcggaggccgctggcggggtccgcgagatgccggcgcaggacctgccgccgccgatcctggagcgcgagcatgcggtgctgatcggtcatggccgggttggcgggttggtcagcgctcgcctgcgcgccgccgggacgcccttcgtggtagtggtggacaagcgcgacaaggccgacgaactgcgcgaacagggctacagcgtggtcctcggcaatgccgccagtcccggcgtgctggaactggccaacatcgccgaggcgcgctggttgctgatcgccattcccaacggcttcgaggccgggcagatcgccagccacgcccgcgcggtgaacccgccgctggacatcgtcgcccgggcgcatttcgacgccgaggtggactacctggagcagaacggcgccaacctggtgatcatgggcgagcgcgagatcgcctgcggcatggtccatcgcctgggactcgaccgtgacgagcgcggcgccgacgcaccgctgccgcagtcggcctga

SEQ ID NO: 337808 - DNA, 483 bp, Pseudomonas aeruginosa
atgcaacccggaaacaaccaactgtcgatgaccgtgctgatgaccccggacatggccaatttctccggcaatgtccatggcggtaccctcctgaagtatctcgacgaagtcgcctatgcatgcgccagtcgctatgccggtcgctacgtggtgaccctgtcggtggatcaggtgatcttccgcgagccggtgcatgtcggcgaactggtgaccttcctcgcttcggtcaactacaccgggcggacttccatggaaatcggcgtcaaggtcatcaccgaaaacatccgcgagcagtccgtgcgtcataccaacagctgtttcttcaccatggtcgccctggatgacgagcgcaagccggtggccgtccgcccgctggagctggaaaccgccgagcagaagcgccgcttcgcccaggcccagcaacgccgccagctgcgcgcggagctggaggcccgctaccaggcgattcgcgaagacggttga

SEQ ID NO: 337809 - DNA, 759 bp, Pseudomonas aeruginosa
atgagcacgcccgtcgttcttatcactggtgcagccggcggcttgggccgggcaatcgccaagcgtttcgcccagagtcattggcggatcgccgccacggatgtggataaggagggcctgcacgcgctgaacgcgcaggtgccgttggacgccagcggggtcgccgacctgcgcagcgcggataactgccataccctgatgtcgaagattctcgcccgcaccggacgcctcgacgccctggtgaacgccgcgggcgtctggcgcgaggggcctgtggaaaacttcaccgaggaggatttcgacctggtcctgggagtcaacctcaaggcctccttctacatgtgccaggcggcgattccctacctgaaggaaaaccagggcagcatcgtcaacatctccagtgactccggacgccaggcctaccggggttcggcggcgtattgcgcgagcaaggcggcgctgaccatgctgagcaagaccctggcgcttgaactggccgagcagggcgtgcgggtcaacgccgtgtcgccggcggatatcgccacgccgatgctcgactaccaggccgaacgctatgggatgggcaatccggatggctacaagcgcgcgctgctgaaggactatccacagggcaaggcggcgcgtttcatccgcccggaagaagtcgccgagctggtctggtatctctgcggccctcaggccgaagcgatcacgggcgccgacctggcggtggacttcggcctgtccgctggccgctga

SEQ ID NO: 337810 - DNA, 1368 bp, Pseudomonas aeruginosa
atgcatttcgccgatccgcgggaagcccgcgagttcctcgccgcacaccccgaggtgcgcagcatcgagctgttcctgatcgacgctaacggcgtgccgcgcggcaagctgctgcatcgcgacgagctgctggctgtctacgaaagcgggcggccgctgccgagcaccatcctcggcctgaccatcaatggcgatgacgtcgaggagaccggcctggtctgggacgtcggcgatgccgattgctggaccttcccgctgcccggcagcctgaccctgcaaccctggcggcagtcaccgaccggccaggtgcaggtcagcatgcatcccgagctcgggctaccggccgcggcgggcgatccccgacatgtgttgcagcgggttatccacagcctgcaggcggagggtttccacccggtgatggcggtggaactggagttctacctgctcgaccgcgaacgcgacagcgatggccggccgttgccggcgttgcagatgaatggccagcggccgcgggcgacccaggtctatggcgtctacgagctggagcagttgcagccattcctcgatgacttgtatgccgcctgcgaggcccagggcctgccggcgcgcacggcgatttcggagtacgcgccggggcaggtggaaattaccctgcagcatcgcttcgacacgctccaggcgatcgacgaaggcgtgcgctacaagcgcctggtcaagggcgtggcgaatcgccatgggttgcaggcctgcttcatggccaagccgttcgccgatctttccggcagcggcctgcacctgcacgtcagcctggccgacgccgctggcaacaatctgttcgccagcgaggacccggccgggaccccgctgctgcgccaggccatcggtggaatgaaggcgtgcctgctggagtctttggcgctgttctgtccgaacgccaactcgttccgccgcttccaggcgaacagctacgcgccgctggcgccgacctggggaatcaacaaccgcaccgtgtcgctgcgggttcccggcggcccgccgtccagccggcacatcgagcaccgcatctgcggcgccgacgccaatccctacctggcggcggcggcgttgctcgcggcggtgcgcctgggtattcgcgagcgactcgaccccggtgcgccgatcactggcaacggctacgctcaagccacccaggcgttgccgagtgactggctgaccgcgctgcgcgcgctggagggctcggcctgggcgcgcgaggcgctcggcgaggatttcctgaagatctacctggcgatcaagcaggccgaataccgtgccttcatgggcgaggtcggcgagcaggactggcgctggtatctcaaccaggcctga

SEQ ID NO: 337811 - DNA, 1395 bp, Pseudomonas aeruginosa
atgaccgccagtggcatcgccgaagccgccgtggaaaccttcatggcccgcgagcagcaacgtttccttgcgcaaaatccacagtccgtcgcgctcgccgagcgagcccggcgtgcgttgttcgacggcgtgccgatgcactggatgagcgattggtcgacaccctgtccgctgttcgtggagcgtgcccacggcgcgcgtttccatgatgtggatggccacgtctacgtggacttctgcctgggcgacaccggcagcatgttcggtcattctccggcgccgatcgcccgggcactcgccgagcagggcgcgaacggcctgaccaccatgcttccgggggaggatgccatcgtcgccggcgagctgctggcgcagcgcttcggcctgccgttctggcaggtagcgaccaccgccaccgacgccaaccgcttcgtcctgcgctgggcgcgcgcgatcaccggtcgcaaggtggtgttggtattcgacggctgctaccacggcacggtcgacgacgccctggttcgctgccgcgacggccgcaccgtgcatcgctccggcctgctcggccaggcccacgacctcacccagttcagccgcgcggtgccgttcaacgacctccaggccttggagcgggcgctggccagcgaagacgtggccgccgtgctctgcgagccggcgatgaccaacatcggcatggtcctgccgcaacccggcttccaccagaagctgcgtgagctgacccgtcgtcacggcacgctgctgatcatcgacgagacccacaccatctccaccggaccaggcggctgtacccgcgcctggaaactcgagccggacttcatcaccctcggcaagccgatcgccggcggcgtaccgtgctcggtgtatggttgcagcgcggcgatggccagcgccatgcaactggccaggacacgcgccagcgagcagagcgaaggccacggccacagcggcatgggtaccacgctgtcggccaacgccctggcgatgcgctgtatgcgcgccaacctggaagaagtgatgaccgatgccgcctacgcccacatgctgcccctggcggcgcgtctggccgagggcttccgcaggattatccacaagcacggcctggcctggtcggtgaccgagctcggtgcgcgcagcgagttccagttctgcccgcaatccccacgcgacggcgcggccgccgaggcggcgttccacgacagcctgcagatggccttgcacctgtatctgatcaaccgcggcatcctcatcacgccgttccacaacatgaccctgtgctgcccggacactcgcgaagaagacgtcgaccgcctgctctccagcctcgacgaggcgctcggcgagctgctcgccatacccggcgcgcgggaggcctga

SEQ ID NO: 337812 - DNA, 300 bp, Pseudomonas aeruginosa
atgaacgattttccgaagtggacaggccaggtcgcgctcatcagcggcgccggcagcgaactcggcatcggtttcgccattgcccggcggctggcccgcgaaggcgtgcgcctgctgatcaccgccagcagcgagcggattaggcaacgagcggaggaactgagcgcatgtggtcacgacgtgcgcgccgcgagcgccgacctgaccgacgaagcccaggtgcagggtctgctggactgggccgaagcccagtggggacgggtcgacatcctggtgaacatgccggcatggcccagttga

SEQ ID NO: 337813 - DNA, 495 bp, Pseudomonas aeruginosa
atggcccagttgaacagcgcggaacccttcagcgcagtggaagcgacctcgctgcgggattggcaactgtccctgtcgcgcaacctgaccagtgctttcctgctcacccgcggcctgctgccgggcatgcgcgagcgcggctacgggcggatcgtcaacgtcgcctccaccaccggaacccgcggcagcaacccgggcgaagccgcgtatagcgcggccaaggccggtctggtcggctggagcatgggcctggcgctggaggtggcgaagagcggcatcacggtgaacagcgtcgcgccgggctggatcgccaccgcctcgagcaccgccgaagaacgccaggccgccctggccagccccagcggacgtgccggccggcccgcagaggtggccgccgcggtggccttcctcgcctcgcccgaagccagcttcgtcaacggcgaactgctggtggtggacggcggcaactgcctgatcgaaaacaaacggagctga

SEQ ID NO: 337814 - DNA, 681 bp, Pseudomonas aeruginosa
atggccgagaatctccaggaacgactctaccaacgactgcgggaagacttgctggccggacgtttccagcccggcgagcgactgaagatccgcgacctggcgaaccagtggggcaccagcccgatgccggttcgcgccgccctgcaacggctggtggcggaaggggcgctggagggcgaggcacaacgctcgctcagggtgccgctgatgacccgcgagcgtttcctgcagatcctccaggtgcgcctgtccctcgaagggctggcggccgaaagcgccagcggccggctggacgagcaggcactggaaggactcgaaggttgtctgcggcgaatggaggacgccttgcgccgacgcgaggtacaggcctacctggaagccaacagcgaattccacctgacgctctaccgcgcctgcggcaacccggtgctgctgcgtctcatcgagacgctctggctacaggtcgggccgttcttcaaccggctgttcaccgaggccgacctctccctacgcctgaacgatttccacgaggacgccctggacgcgctacgccgcggcgacggcccggccgcgcgcgcggcgatcgaacaggacctggcctacttcggccagtacctgctgaacctcctggagctggaggcccggccacgaaagcgacaccgtaccggcgagcacgcctga

SEQ ID NO: 337815 - DNA, 213 bp, Pseudomonas aeruginosa; identical to SEQ ID NO: 319265

SEQ ID NO: 337816 - DNA, 402 bp, Pseudomonas aeruginosa
gtggaagacgtcatcgaaaaactgcgtgaactcaacgaaccggttccggtgcccctggaactgccggaagaagaactgctggtggaaatcgaggaagagctgctgatcggtattcccgccgaattccgcgaattcctcctgctggtcagcgatgtggtctacggccgcctggagccggtgaccgtgaccgatccgcactcgcacacctacctgcccgaagtggcggccactgcctgggacctgggcgttccgcgcgagctgatcccgctttgcgaggacgacggcagctactactgcgtggcggaggacggcgaggtggtgctctgggccgatggcgacctcaccgatgaaagctgggattcggtgtgggtctgggctcgcgacgtctggctggagagttga

SEQ ID NO: 337817 - DNA, 852 bp, Pseudomonas aeruginosa
atgcagcgtgttctcagcatcgccctcgccttctgcctggcgctgaccgtcagcctggatgccaatgccaagcgctttggcggcggcaagagcctcggctcggcacccagccaccagacccgccaggcgcagccggccactgcgccgaacgccactgctgccgcccccaacgccgcccgtcccgccgctgccgccagcggtgcttcgcgctggctcggcccgctggccggtatcgccgccggcggcctgctcgcctccatgttcatgggcgacggcttcgaaggcatccagatgctcgatatcctgttgatcgccctggtggccttcattgccttccgcttcatcgccgctcgccggcgccagcagaaccaggggcagccggcgatggccgggcacgcgccgatgcagcgcgaaatgccggcccaggcgccgatcttcggtggcgctgccgccactgctgcgccgagcccggtgatcaacgcgccgagctggttcaacgaggagcgcttcgtcggtgccgctcgcgaacacttcatgtccctgcagcagcattgggatgccaacgagatggacaagatcgccgagttcgtcaccccgcagatgttgcaatggctgaagcaggagcgcgccgagatcggcgacgcctaccagtccacctacatcgacaatctggtcgtgcaactggacggcgtcgacgaccaggccgacaagaccatcgccaccctgaccttcagcggtgtgtcgaagacctcgcgcttcgaccagggcgaagccttcagcgaaagctggcggatggagcgcgcccagggcgagaaccagccatggctggtggccggtatccggcagaactga

SEQ ID NO: 337818 - DNA, 1758 bp, Pseudomonas aeruginosa
atgcatgccgtcgatttcatccaggacctcgccgtgatcatgctggtggccggcgtggtcaccattctcttccaccgcctgcgccaaccggtggtcctcggctacatcgtcgccggcttcatcatcggcccgcacaccccgcccttcgggctgatccacgacgaagacacgatcaagaccctggccgaactcggggtgatcttcctgatgttctgcctcggcctggaattcagcctgcgcaagctcttccaggtcggcgccacggcgttcatcgcggcgttcctggaaatcgtcctgatgatctggatcggcttcgagatcggtcgcttcttcgagtggagcaccatggactcgctgttcctcggcgcgatcctggcgatctcctccaccaccatcatcgtcaaggcgctcggcgacctgaagatgaagaacgagcgcttcgcccaactgatcttcggcgtgctgatcgtcgaggacatcctcggcatcggcatcatcgccctgctgtcgggaatcgccgtgagcggttcggtggaaaccggcgaggtgttctccacggtcggcaagctcagcctgttcatgatcgtcgcgctggtcgtcggcatcctcctggtgccgcgcctgctggcctacgtggcgaagttcgagagcaacgagatgctgctggtcaccgtgctcggcctgtgcttcggcttctgcctgctggtggtgaagctggagtacagcatggtgctcggcgccttcctgatcggcgcgatcatggccgagtcgcgtcagttggtgcagatcgaacggctgatcgagccggtccgtgacatgttcagtgcgatcttcttcgtcgccatcggcctgctgatcgatccgaagatcctcgtcgagtacgcctggccgatcgccctgatcaccgtcgcggtggtgctcggcaagatgttttcctgcggcatgggcgcgttcatcgccggcaacgatggacgcacctcgctgcgggtcggcatgggcctgtcgcagatcggcgagttctccttcatcatcgccgccctgggcatgaccctgaaagtcaccagcgacttcctctacccggtggcggtagcggtctcggccatcaccaccctgctcaccccgtacctgatccgcgccgccgatccgctctcgcagcacctggccaacgccatgccgcagcgcatggcgaggatcttcggccactacggcgactggctgcgcagcatccagccgcagggcgaccgtgcggtgctggcggcgatgatccggcgcatcctgctgcaagtcggggtgaacctggcgctggtgatcgcgatcttcctcgccggcggctatttcgccgatacgctttccgcctggatgagccagtgggtcgcctacgatggactgcacaaggcattgatctggggcggcgcgctgctggtctcgctggccttcctgatcgccgcgtaccgcaagctcaaggctctgtcgatgctgctggccgaactcggggtcaagccggagaaagccggacgccatacggcgcgggtacgccgggtgatctccgaggtgatcccgctgctgtcgctggccggcatgatggtgctgctggctgcgctcagctcgagcatcctgccgccgggcgagttgctggtcgtagtggtcctggtcgccggcctggtgatcgcagtgctctggcgctggctgatccgcgtgcattcgcggatgcagatcgccctgatggaaaccctcgaccaggaaaagggcagccactga

SEQ ID NO: 337819 - DNA, 1308 bp, Pseudomonas aeruginosa
atggaaagcgccaacgccatttccgcgtctgcccagccccgcaccacttcgcaacgcatcaagtcgatcttcagcggttccgtcggcaacctggtcgagtggtacgattggtacgtctacgccgccttctcgctgtacttcgccaaggcattcttcccccagggcgacatgaccgcccaactgctgaacaccgcagctatcttcgccgtgggcttcctgatgcgcccgatcggcggctggctgatgggtatctatgccgaccgcaagggccgcaaggcggcgttgctggcctcggtgctgctgatgtgcttcggctcgctgatcatcgccctgacccccagctacgaaaccatcggcgtcgccgcgccgatcctgctggtggtcgcgcgcctgctccagggcctgtcggtcggcggcgaatacggcacctccgccacctacctgagcgagatggcgaacaaggaacagcgcgggttcttctccagcttccagtacgtgaccctgatttccggccagctcatcgccctggcggtgctgatcgtcctgcaacagaccctgaccgtagaacaactggaaagctggggctggcgcgtccccttcttcatcggcgcgctgtgcgcagtggtggcgatgttcctgcgtcgcggcatggaagagaccgagtccttctcgaagaagaaggaagagccgaaggaaagcctgctgcgcaccctgctgcgccacccgaaggaagtgctgaccgtggtcggcctgaccatgggcggcaccctggccttctacacctacaccacctacatgcagaagtacctggtgaacacggtaggcatgagcaagaccgattcgaccatgatctcggctgccaccctgttcctcttcatgctgctgcagcccatcgtcggcgccctctccgacaagatcggccggcggccgatcctgatcgccttcggcgtactcggcaccatcttcacctacccgatcctcagcaccctgcacagcgtcgacagctggtggggcgcgttcttcctgatcatggcggcgctggtgatcgtcagcggctacacctcgatcaacgcggtagtgaaggccgaactgttccccaccgagatccgcgccctgggcgtcggcctgccgtatgccctgaccgtgtcgatcttcggcggcaccgccgaatacgttgccttgtggttcaagagcgtcggcctggagagcggcttctactggtacgtcaccgcctgcatcgcctgctcgctgctggtctatgtgttcatgaaggacacccagaagcactcgaagatcacgaccgattga

SEQ ID NO: 337820 - DNA, 1029 bp, Pseudomonas aeruginosa
atgtcgccacagccttcacggtcgcctgaccgtttttcgctggccgcgctcgccgaagaccaccccaccgctcccgcccagggagacgaaagcgagtccctgccatgcgtgaatgcccagcgcggagaacccaacctgcgcgtggtggactgctccggtgcgcgccgcgacgaggaagtggcggtcgaggaagtgctgatcccctacgcccatggcagcgatcccgacgacgtccccggcgagccgcccaagtcgcgctggtggctgtcttccggcgcggcggtggcgatgcatgtggcgatcatcggtgcgctggtgtgggtgatgccgaccccggccgaactcaaccttggccacggcgaactgccgaagaccatgcaggtgaatttcgtccagctcgagaagaaggccgagccgaccccgcagccgccggctgccgcgccggaaccgacgccgccgaagatcgaggaacccaagccggagccgccgaagccgaagccggtggaaaaacccaagcccaagccgaaacccaagcccaaaccggtggaaaacgccattcccaaggccaagccgaagccggaacccaaacccaagccggaacccgagccgagcacggaagcatccagccagcccagcccgtccagcgccgcgccgccgcccgcgcctaccgtcgggcagagcacgcccggcgcgcagactgcgcccagcggctcgcaaggcccggccggcctgcccagcggcagcctcaacgacagcgacatcaagccgctgcgcatggatcctccggtctatccgcggatggcccaggcgcggggtatcgaaggccgggtgaaggtgctgttcaccatcaccagcgatggccgcatcgacgacatccaggtgctggagtcggtgccgtcgcgcatgttcgaccgcgaagtgcgccaggccatggccaagtggcgtttcgagccgcgtgtcagcggtggcaagatcgtcgcccgccaggcgaccaagatgttcttcttcaagatcgagaagcgccgctga

SEQ ID NO: 337821 - DNA, 969 bp, Pseudomonas aeruginosa
atgcttcgagagatacccacacacctgatcggcggccccctgggggccggcaagaccagcctgatccgctcgctgctggcgcagaagccggcgggcgagcgctgggcggtgctggtcaacgagttcggcgagatcggcctggatgccgcgctgctggccacggacgtcgacggcgtggccatcggcgaggtggcgggcgggtgcctctgctgcgtcaatggcgtgccgttccaggtggggctcggtcgcttgttgcgtcgggcacgaccggaccggctgttcatcgaaccctccgggttgggacatccgctggcgctgtggaagcagctgcaggctcctccctggtccggcgtcctggccctgcaacccctggtagtggtgctggatgccgccgcgctggcctccggccaaccgctgccggaggcacaggaacaggcgctggaagcggccggcatgttgctgctgaacaaatccgaagcgctcgacgcgacgcagcgctgcgccgtgcgcgcgcgcctgccggtcctgccgttgcgctggagcgtgcgcggccacctggcattgcgcgatctgccgaccagcgttgccggggaaggtagcgcgacgacctgggcggccctgccggacgcgcctgctcagttgggaacggtgctgcccgccgagcgaccgctgcgcgccgtgcgcgagcaggacggccagttggccatcggctggcggctggcgccgtcggtgcgtttcgatcgggtcgcagtggacgcctggctgagccgtttgtccggactgcggcgggccaaggcggtgctgcattgcgcggacggttggtatgcagcgaatgccgcgccgtttgtggataactggggcaagtcctcgtggcggcgggataatcggctggaactgatcctcgccgcaggcgcggatgaagaggcgctcgaagaggcgttcctggcgtgtcggatggtcgcggaatga

SEQ ID NO: 337822 - DNA, 369 bp, Pseudomonas aeruginosa
atgcgcccgttcctgttcttcctgtcctgcctgccgggcctggccctggccgaagcctgcatcgtccatagccaggcgaagaatctcgatgtgaaggtctgccagcagaaccgcagcatcccggccaagctgttccgcgaaggcttctgccagccacaactgcagggccagaaggtcgaggtggcgttcgccgaggagtgtccgacgggcgccttcggtgtctgccgcgacgccagggtacccaatgcgccctatcggcaggacatcttctactacggcatcgcgaccgacgcacgctacctggagccgttctgcgccagccagagccaaggccgctgggaagagcctagcgccgcgaaaaagccctga

SEQ ID NO: 337823 - DNA, 642 bp, Pseudomonas aeruginosa
atgagcgcactgccacaggaaagtctgttgccgcgccaggcgttcggcgaagacccccaggtgctggccgaggtgcttcgcgacggggtcaacctggcggtctggacacgccggctgaacccggcgctgcgcgacttcgccgccgccctggtacgcaaccggccgggactggcgctgagccagacgctggagatggaagaggaacggctacccgccttggacggcctgctcgacgcgcggcaactgccgggacaagccgatttcctcgacgacctgggctggctggtcgaggccttcttttgcctgaccggggcgcggcgtatcggcctgcgcctgcgcgttctggataaaccgatgtgcccgcgtttccatgtcgaccacgtgccgctgcggctggtcaccacctaccagggcgctgccagcgaatggctggacgagtccggcctggaccgtcggctgcttggtggagcacaggcggaagttgtcgatgaacagcttatccatagcttgtccacaggcgacgtggcgctgctcaagggcgaacgctgggagggtaacgaaggtgccggactggtgcatcgctcgccgcgagcggagcccgggctggcgcgcctgctgttgaccctggactggcttgcctga

SEQ ID NO: 337824 - DNA, 1203 bp, Pseudomonas aeruginosa
gtgaaccaacgcctacctgtcaccgtgctgtccggctttctcggcgccggcaaaagcacgctgctcaaccatgtgctgaagaaccgcgagaaccgccgggttgcggtgatcgtcaacgatatgagtgaaatcaatatcgatggcagcgaagtccagcgcgatgtcagcctgaaccgcgctgaagagcgcctggtggagatgagcaacggctgtatctgctgcaccctgcgcgaagacctgctggaagaggtcggccgtctcgcccgggaaggccgcttcgactacctgctgatcgagtccaccgggatttccgagccgatgccggtggccgagaccttcaccttccgcgacgagctggaccgcagcctgtccgacgtggcgcgactggataccatggtcacggtggtcgacgggatgaatttcctccgcgactaccaggaggccgccagcctggccagccgtggcgaaaccctcggtgaggaggatcagcgctcgatcaccgacctgctgatcgaccaggtcgaattcgccgatgtgatcctggtcagcaagatcgacctgatctccagcgagcagcgcgaggaactgctggcgatcctgcgccagctcaatgccgaggcggagatcctgccgatggtgatgggtcaggtgccgctggcgaagatcctcgataccggtcgcttcgatttcgatcgcgcggcgtccgcgccgggctggctgaaggaactgcgcggcgagcacctgccggaaaccgaggaatatggcatcgcctccatggcctaccgggcgcgccgtccgttccaccccgcgcgcttccacgccttcctgcacaatccgctgaagcaggggcggctgctgcgctccaagggcttcttctggctcgccagccggccccgcgaggctggcagctggtcgcaggccggcggcctgatgcgctacggcctggcgggccgctggtggcgcttcgtgccgaccggacagtggccacaggacgaagagggcctgcgggcgatcatgcggcactgggaggaaggcgtcggcgactgtcgccaggagctggttttcatcggccagaacctggacttcacggccctgcgcgcagccctcgatgcttgcctgctggatgatgccgagatgaacctgggcattccgggctggcagggcctggacgaccccttcgaggactgggggcacgccgcatga

SEQ ID NO: 337825 - DNA, 405 bp, Pseudomonas aeruginosa
atgaccgaacaggaactgcttgcccagcccgacgctgcctacatggacgaagcccagcaggacttcttccgcgacctgctgctgcgccagcgccaggaactgcaggcgcgcatcgaaggcgaattcggcgagctgcgcgatctcgaacgccccagcgacgaggccgacctggcttcccgcgaggaacagcggcaatggcaacttcgcctgctggagcgggagaagaagctgctcgacaagatcgacgaagcgctggagcgcctggcccgcggcgactacggctggtgccaggaaaccggcgagccgatcggcctgcgccgcctgctgttgcgtcccaccgccaccctctgcatcgaggcgaaagagcgccaggagaagcgcgaacgccacgtgcggcacaactga

SEQ ID NO: 337826 - DNA, 417 bp, Pseudomonas aeruginosa
atgcgccgcgtcctccgcctttactgcctggccctcctgctgctcgctccggcggcacaggcgcagggctttcttcccggcacccgcccggcggaatgcgcctacctgcgcaccgttctggcctgcatggatcggctgggcaaccactacagcgtcgccaccggcggcaacgacacctggctgcgcggctacgacgcggcaagcggacgacgctgggcccagaccaatacgcgctacgggcgcctgaccttcttcagcggcatcgccagcgacggggaaatctgggtcggcctcagccgcaacatcggctggaccagcgtcagccgcctgagcagttcatcgggccagcgccaacgcctgacctgcgggcgggtcagcggctgcagcgaaggccctagccgggaggctgcgcgctga

SEQ ID NO: 337827 - DNA, 1194 bp, Pseudomonas aeruginosa
atgaagcgccgtcgcctcctgcaaagcctgctcgccggcctggccctccagccgttcctggccgccagcgccaatgtacgaatccgccaggcccgggcctggaattcctcggaaagctggcgcctggtgctggaactggacggcccgccgcgttatcgaaccttttccctgcaggcccccgagcggttgatcctcgacctgcccgacgcgcaattgctcgcaacgctctccgagctgccgctggacggccccgtgcgcgccatccgcagcggccaactgggtggcggcgggacgcgcatcgtcctcgacctgcgccaggcggtcaggccgcgcagcttcgccctggaaccgcaggcaggaaagggccatcgcctggtcctggacctttatccacaggcgctggcggctccccccgagccgatgctggcgctggcccgcccgctaccctcgacgggccgcgacatcctcgtggtggtcgatgccggccatggcggcaaggaccccggcgcggtcggtagcaagggcgagcgcgaaaaggacgtggcgctggccatcgcccgcctgctggcgcggcggatcgaccgcgagaaaggcttcaaggcgcgcctggtgcgcaacggcgacgtgttcgttccgctgcgcaagcggccggaagtggctcggcgctacaacgccgacatgttcgtctcggtgcacgccgacgcggcgccgcgactgaccgcctccggcgcatcggtatatgccctctccgagcatggcgccagctcgaccatggcgcgctggatggccgatcgcgagaacggcgccgacctgatcggcaacagcggcaacctgccgctacagggccgcgacaaggtactcgccggggtgatcctcgacatggccctgagttcgaccatcgccagcagcctggacctcggccacagcgttctcggccagttgtcggacgtcaccgcgctgcaccagaagcgtgtcgagcaggccggcttcgccgtgctcaagtcgccggacatcccttcgatcctggtggagaccggcttcatctcgaatcgcggcgattgtcgccggttgatggacgaacgccatcgccagcgcctggccgaggcgatcttcgctggcgtgcagggctacttccggcaacgccctcccgccggcagctacctggcggcgctcagcgcgcagcctcccggctag

SEQ ID NO: 337828 - DNA, 897 bp, Pseudomonas aeruginosa
atgaatgccttgacgcttcccgatattgcccgccagaccaccaccgccgatcttcccctggactgggtcggcatgcagggcatcgccctccccgtgcagatcggcgggcagagggtcgccgccgaagccgatgccggtgtcagcctggacgacccgcaggcccgcggcatccatatgtcgcgcctctacctggcgctggccgaactggaacagggcgagctagacctttcccgcctgcgcgccgtcctgcaacgcttcctcgacagccacgccggcctgtcgcgtcgcgcctacctgcgcctgcgcctcgcgccgctgctgcggcgtccggcgctggtcagcccgctgagcggctggaaacgttatccactggtgctggacacgcgcctggaaggcgatgacttccaggccgaagcccatctcgagctgacctactcctcgacctgcccctgttcggcggcactggcccggcaattgatccaggagcgcttcgaccaggacttcgccggacagccgctcgatcatgccagcgtgctcgcctggctcggcagtagcgccggcatcgtcgccaccccgcacagccagcgcagcagcgcgcacctgcgcatcggcctggcggaagactgcatcggactgcccctggaagagctggcggatctcggcgaaagcgccctcggcaccgcggtgcagactgcggtgaaacgcgccgacgagcaggccttcgccctcgccaacggacagaacctgatgttctgcgaagacgcggtgcgtcggctgcaccgcgccctgcagggttatccacaggcgagccggttctccgtacgggtcgtccatgcggaaagcctgcatgcccacgacgccgtcgccgaaagccactggcagcgaggtgccgcatga

SEQ ID NO: 337829 - DNA, 561 bp, Pseudomonas aeruginosa
atgatccgcaagaatccctccggcgacctgccggtgatcgacgaatcggcctatgtggacaagaccgcgatcatctgcggcaaggtgatcatccaggccaacgtcttcgtcggtccctacgcggtgatccgtgccgacgaagtcgacgccgacggcggcatgcaaccgatcgtgatcggcgccaactcgaacatccaggacggcgtggtgatccattccaagtcgggtgccgcggtgaccatcggcgagcacagctccatcgcccaccgctccatcgtccacggtccttgcgaagtcggcgaccgggtcttcatcggcttcaacagcgtgctgttcaactgccgggtcggcgatggctgcgtggtccgccacaacgcggtggtcgacggctgcgacctgccagcgggtttctacgtaccgtccaccgagcgcatcggtccgcgcaccgacctggcgagcatgccgcgggtcagcgtttcggccagcgagttctcggaagacgtggcgcgcaccaacgtcgacctggtacgcggctacaagtcgctgcagaacgagttctga

SEQ ID NO: 337830 - DNA, 1338 bp, Pseudomonas aeruginosa
atgcaaagcctgctgatccgcaatgcccggatggtcaacgagggacaggtacgcgaaggcgatctgctggtccgccacggtcgcatcgaacgcatcgccggctgcctggaaaactgcggcgccagccgggagatcgatgccgccggacgctacctgctgccgggaatgatcgacgaccaggtacacttccgcgagccgggttatccacagaagggctcgatcgccagcgaatcccgcgccgccgtggcgggcggcatcaccagtttcatggacatgcccaatacccgcccggcgacgctgagcctcgaagcgctggcggaaaagaagcgcctcgccgccgcccatagcgtggccaactacggtttccacttcggcgtcagccgcgacaacctcgacaccgtggccgccctcgatccacgcgaggtcgccgcggtgaaggtgttcatgggcgcctccaccggcgacatgctggtggacgacctgccgaccctggagcgcctgttcgccagcgttccgaccctgctgctgagccattgcgaagacacgccgcggatcgaagccaacctggcgcgctggcgacaacgcttcggcgaacgtattccggcagccgcccacccgcgcattcgcgacgccgaggcttgctaccgttccaccgccctggcggtggaactggcgcaacgacatggcacgctgctgcatgtcctgcacttatccacagcgcgcgaattggccctgttcgaggacaagccgctgtgccagaaacgcatcaccgcggaagtctgcgtccaccacctgctgttcgacgacagcgactacgcccgcctcggccatctgctcaagtgcaacccggcgatcaagagccgcgaggaccgcgacgccctgcgcagggcgctggccggcaaccgcctggacgtgatcggcaccgaccacgcgccgcacgcctgggccgagaagcagcaggcttatccacaggcgccggccggcctgccactggtccagcatgcgttgccggcactcctggagctggtccgcgaaggctggctgtcgctggccaccctggtggcgaagaccagccaccgggtcgccgaactgttcgccatcgccgatcgcggtttcctccgcgaaggctactgggccgacctggtgctggtcagcgaactggagcacccggcgctggccagcgccatgccgctgctgtcgcgctgcaactggacgccgttccgccaccgggcattccaccatcggatcgataccaccatcgtctccgggcaactcgcctggcacgcgggacgcctgtccgacgattgccagggactgcccctgcggttttcccgctga

SEQ ID NO: 337831 - DNA, 1245 bp, Pseudomonas aeruginosa
atgcgtagctgtatatccgtcttccggccggccctgctggcgctgttcgtctcggcaagcggctcggccggcgccgacgcggctgtggaaaacccgcggatcggccgtgccgccgatctctatgaactgatcccggaataccagccggacacctaccggaacatggacaaggtctatccgacccgggttatccacaaggggaccaaggtccgtccgctgccggcgggtgcggccatcgcgccgcgctaccggatcggcggcgaggaatacggcgtcgacgatttcatgcggcgcaaccgcgttggcggcgtgctggtcctcaaggatggcaagatcgccctggagcgctacggcctgggcaacgacgaacgcacgcgctggacctcgttctcggtggtcaagtcgatctcctcgaccctggtgggcgccgccgtgcagcagggcctgctggctctcgaccagcctgtggacaagtacctgccgagcctggccggctccgcctaccagggggtgacggtggagcaggtcctgcagatgagttccggggtccgctggaacgagacctatcgcgatccgaagtccgaccgccggcagatgttcgacgcccagctcgccgaacgtcccggtggcatcctgcggctgctggcgagcctgccgcggcagtacccggccggtacccacttcacctacagcaccggagagtcgcacctgcagagcgagctgctgcacgcggcgacccgcattccggtgagcgactacctgtccgagcggatctgggcgcggatgggcatggagagcgacggcttctggcaactggaatcgccggccgggcaagagattggcagcagcggcttgagcgcgaccctgcgcgactatggccgcttcggccagttcgtcctcgaggacggggtgatcgatggtgaacgcatccttcccgaaggttgggtcgatcgtgccagtcgcgtcgaggcttcttcccacctggccccgggcaagctctacgatggcgaatacgcgctcggctacggctaccagtggtggaccttcccggtgggcgccaaggccctgcccgagcatgacggcggggccttcgaagcccagggcatcttcggccagtacctctacatcaaccgcaaggagaagatcgtggcggtggtctggagcgcctggccgaagccggagatggacgatcgcgaggaggagacctatgccttccttggcgcggcggtgaaagccctgcgctag

SEQ ID NO: 337832 - DNA, 399 bp, Pseudomonas aeruginosa
gtgatcgcgctgtgcctgggcatggccggcagcgtctgggcgacgctgccgctgcagtcgttcaccctggcctggcaacacacggtcgagaaggtgctctgggaagaagactatcgcctgagcgagcgcggcctgctgctggaagaggcccgggtgcggggcagcggggcggggatggagatccccgagggcgccgtgctgcgtgacggcgcctggcattaccgccgtggggtgccgccgctgcaaccgttgcgactggggcgcacaccggaggccggcgactaccggatctgccgtcaggggcgctgcgatgcgctggcgcgctggatcggtccaccggaccctgagcgcccggcggtcgaactctgggcgtgtccgatacgggacccgagcgactga

SEQ ID NO: 337833 - DNA, 2025 bp, Pseudomonas aeruginosa
atgagcgatcatcagaacgggctgcacctcgaggcggaaaactggccgcgcgcgctgttcgccgtggccctggccttttccgtgttccaggtcgtcaccgcggcctttcccctgatttccacccaggtcctgcgggcaatgcacgtcggactgctgttgctggtggtgtacatcagctatcccgccttcggcatacgtcgcccctggcagccgttggcctggttgctgggcatggccggcctgggcacggcggtctaccagtgggttttcgaggccgacctgatccagcgctccggagagctgacccaggccgacatggtcgtcggcgtggtgctgatcgtcctggtcttcgaggcggcgcgacgggtgatgggcatcgccttgccgatcatctgcgcgctgtttcttgcctatggcctgttcggcgaacacctgccgggcgacctggcccaccgcggctacggcttcgaccagatcgtcaaccagctgtcgttcggtaccgaaggtctctacggcacgccgacctacgtgtcggcaacctacatctatctgttcatcctgttcggcgccttcctcgagcaggccggcatgatccgcctgttcaccgatttcgccatgggcctgttcggccaccgggtcggcgggccggccaaggtctcggtattctcctcggcgctgatgggcaccatcaccggctccggcgtggccaacgtggtcaccaccggacagttcaccatcccgctgatgaagcgtttcggctacaagccggcgttcgccggcggcgtcgaggcgaccgcgagcatgggcagccaactgatgccgccggtgatgggggcggtggcgttcatcatggccgagaccatcaacgtcccctacgtggagatcgccaaggcggcgctgatcccggccttgctgtatttcggctcggtgtactggatggtccatctcgaggcccgccgggccgacctcaagggcctgccgcgcgagcagtgtccgagcgcctggggtgccgtccgcgagcgctggttcctgctgattccgttgctggtgctgatcgcgctgctgttctccgggcgcacgccgctgttctccggaaccattggtctggcgctgaccgccatcgtcatccttggttcggcgatcatcctgcgggtgtcctcgctcggcctgcgcatcgccttctgggtggcgctggggctgctctgcgcggggttcttccgcctcggcatcggagtgatcttcgttgtgatcgcggccctggccctggcctgctggttcgtccgtggcggccgggaaaccctgcgcatctgcgtccgcgccctcgcagaaggtgcgcgacatgcgattccggtgggcatcgcctgcaccctggtgggagtcatcatcggggtgatttcgctgaccggcatcgccaccaccttcgccagctacgtgctcgacctgggacgggagaacctgctgctgtcgctggtcctgaccatggtcacctgcctggtcctgggaatgggcatcccgaccatccccaactacatcatcaccagctccatcgccgcgccggcgctgctggaactgggggtgccgctgatcgtctcgcacatgttcgtcttctacttcggcatcctcgccgacctcacccctccggtggcgctggcctgcttcgcggcggcgccgatcgccaaggaaaggggattgaagatcagcttctgggcggtgcgcatcgccctggcgggtttcgtggtgccgttcatggcggtgtattccccggcgctgatgctgcaggaaggcggttggggggcgacgctctatgtcacctgcaaggcggtgctggccatcggcctgtggggcatggcttccatcggctacctgcaggggccgctggcctggtgggagcgcctggtggcgttcgccgcgggagccagcctggtcctggccttgccgatcagcgacgagctgggcttcgtcctcggcgcgctggtgatcggctggcacctctggcgccagcgtgcgcgcgaggcggtggcgtga

SEQ ID NO: 337834 - DNA, 960 bp, Pseudomonas aeruginosa
atgtcgctgagcagacgcttcggtcttttcacgcttgccgcaacggtgaccttcagtaccgcggtcttcgccgcgccgaccttcatcaatatcctcaccggcggcaccagcggggtctattaccccataggggtcggcctctcgcagatctacgggcacgatatccagggcgcgaaaacctcggtgcaggccaccaaggcctcggtcgagaacctcaacctgctgcaggccgggcgtggagaactggcgctggcgctgggcgactcggtcgccgacgcctggaacggggtcgccgacgccggcttcaaggcgccgttgaaaaagctgcgggctatcggcaatacctatccgaactatatccaggtagtggccagccaagcctcgggcatcaagaccctggccgacctgaaaggcaaacgcatttcggtgggcgcgcccaagagcggtaccgagctgaacgcccgggcgatcttcaaggccgccggcctgagctacgaggacatgggcaaggtggagtacctgccctacgccgagtcggtggagctgatcaagaaccgccagctcgacgctacgctgcaatcctccggcttgggcatggcggccatccgcgacctggcctcgaccatgccgatcaccttcgtcgcgatcccggcggacgtggtggcgaagatcgacagcccggcctaccacgccgcgagcattcccgccggcacctacgacggccaggagcaggacgtgccgacggtggcgatcgacaatatcctggtcagccactccggggtcagcgacgagctggcctaccagatgaccaagctgatgttcgacaacctgccgcgcctggtcaccgcccatgctgccgccaaggacatcgccctggacaaggcggcgaagaacctgccgattccgctgcatcccggcgccgagcgcttctacaaggagaagggcgtactgcccgagtga

SEQ ID NO: 337835 - DNA, 1185 bp, Pseudomonas aeruginosa
atgattgcacagctcccctctgagttgctgtccctgcaactgccgttgcggatccgcatcggcgatgctcaggcgttcgatctggggccggatccacaggtaaccatggtcattcgcgatccctcgctgctaaccgagatcacccatcccagcctcgatgcgctgggcaaggcctacgtcgagaagcgtctcgacatcgaaggaccgatcagccaggtcatcggtatcggcgatgccctcagcgaagcgctcggcgaacccgatggcggcgcgccgccggttcgcgaaagccacgacaaggacaccgacgccgaagccatccattaccactacgacctgtccaacgatttctaccagctctggctggatccggaaatggtctattcctgcgcttatttcgagaccggcaaggaagacctcgccaccgcgcaactggccaagctccgtcacctgtgccgcaagctgcgtttgcagccgggcgagaagctgctcgatgtcggttgcggctgggggggcctggcgcgcctggccgctcgcgagttcggcgtcgaggtcactggcatcacattgagcaaggagcagctggcgctcgggcggaagcgggtcaaggccgaaggcctggaggaccgggtcaccctcaagctgctggactaccgcgacctgccgcgcgatggtcgcttcgacaaggtggtcagcgtcggcatgttcgagcacgtcgggcacgccaacctggggctgtacttccagcaactgtacgatgcggtgcgtcccggcggcctggtgatgaaccacggcatcacctcgcgctacaccgacggccgcccggtgggcaagggggccggcgacttcatcgatcgctacgtgtttccccacggcgagctgccgcacctgtcgctggcggtggcgcggatgagcgaagccgggctggaagtagtcgacgtggaaagcctgcgtctgcactacgcccggaccctggacttttggagcgccaacctggaagccaggctgaaggaggcggctcgcctggtgcccgaggaaaccctgcggatctggcggctgtacctggccggatgtgcctacggcttcaagcgcggctggatcaacctgcaccagatcctcgccattcgcccccacgaggatggctcccacgagctgccctggtcgcggcgcgacctgtacgcctga

SEQ ID NO: 337836 - DNA, 624 bp, Pseudomonas aeruginosa
atgaacgagaccgtgtccctcgaaacacgcgaagtacgctttctctccgtgttcgacttcgacggtacgctgacataccgagacagcttcgtgcccttcctgcgcttcgccttcggcaaccgagtgttcgtccgccgcatgctgcgcatggcaggacccagcctggcctatctctgccggcgtatcggccgcgacgacctgaaggcgcgcctgatcgccaccttcctcaccgatgtgcccgtacatgtgctggaagagcgggcgctggcctaccagaaccgcttctgggaaacactgatgcgtccccacgcattgaccgcggtggccgaccaggtcagcagcggcagcaccgtgaccatctgttccgcctccccttcgctgctactcaggccgttcgccgagaagctcggggtgcacctgatcgccaccgagctggaagtggtagacggcgtactgaccggcaggatcgtcggccgcaactgccggcgcgacgagaaagtctgccgcctggagcggcactacggtccgctgacccaatactccctacgcgcctggggcgactcgcgcggcgatacggaactgctggcggcggcgctggagcgcttctggaaaccgttccgctga

SEQ ID NO: 337837 - DNA, 1206 bp, Pseudomonas aeruginosa
atgaaccagaagatttccccgccttcacagaagatcgacggcctgttcctgctggccctgtcgatggccgtgttcttcgtcggcgtgaccgaattcatgctgtcctccatgctcgggccgctggcgcaggcgttccacaccaccaccagcggcgccgcctggctgatctccagctacgcgttctcctatgcgatcgccgcgccgttgctgggctacttctccgaccgcatgcaacgcaggaagctgctgctgctcgccctgatcctcttcgcggtcgatactctggccatcgtcatcgccccgaccctggaaattgccgtcgtcctgcgggtaatcgggggcatcgcctcggcaatcatcatcccgaccaccttcgccctggtcgcggaggtggtggccccgcaaagacaggccggtgccatgggccaggtgatgctcggcatgaccctcggcattgccgccggcccggcactggccggcctcctctcggacttcttcggctgggcggcgcccttcctgatggtctcgtgcggttgcgtgctggtcttcctgatggcgcgccagcgccttcccgtgcaagccgtggcaccgcgcgccgagggccacgcgctgggctggtgcaagcaatggagcatcctcaggccactgatcgccaagggtgcctggaacggcaccggggtcgccggcctgcttctctcgggagaggtgctgcgccagcgctacggcttcagcaccgcgcagataggcatcagcatcgccgccttcggcgtggggctggccgtgggcaacctcgccgcaggttacctgcgacgctatctgaagcgcgacgaagacatgctcctgctggtgctggcgctcctggtgctatcgatgtcgaccttcatgctcctgccgctaccgttgcccgtggcgctcttctgcctgggcgcctggggcgccgcgctgggcctgggcgcgccggcgggcacagtggtactcgccttgcgctccgggccggacaagggcatggtgctgtcgttcgccgagacgttcaacaacatcgccattctcgccagcgtgcccctggctgtgcgactgctggagctgaaggggccgcccgccaccctgtgggtattgggcatcggcctggggatcggcgcctggttcaccgtgctggactggttcgccagccgcaggagcgacgaggcgctgccgttgcgcgattga

SEQ ID NO: 337838 - DNA, 1836 bp, Pseudomonas aeruginosa
atgtgtggaatcgtaggtgcgatcgccgagcgcaacatcacccccatcctcatcgaaggcctcaagcgcctcgagtatcgcggctacgacagcgccggcgtggcggtcttcgataacgaaggcaggctgcagcgctgccgccgggtcggcaaggtcgccagcctggaggaaggcctggccggtacgccgctgctcggccgcctgggcatcgcccatacccgctgggcgacccacggggcgccaaccgaaggcaacgcccacccgcatttctccagcgacgaactggcggtggtgcacaacggcatcatcgagaaccacgaacctctccgtgagcggctcaaggggctgggctacgtgttcacctcgcagaccgacaccgaggtcatcgtccacctgctgcatcacaagctgcagtccatcggcgacctgaccctggcgctgaaggacgcggtcaaggaattgcacggggcctatggcctggcagtgatcagcgcggcgcagccggaccgcatcgtcgccgcccgcagcggcagcccgctggtgatcggcctcgggcttggcgagaacttcctcgcttccgaccaactggcgctgcgccaggtgaccgaccgcttcatctacctggaagaaggcgatatcgccgagatccgtcgcgacagcgtgcgcctgtgggatgtccagggcaacgacgtgcagcgcgagaccgtgcagtaccacgaaggcgccgaagccgccgacaagggcgagtaccggcacttcatgctcaaggaaatccacgagcagcccagcgtcgtgcagcgcaccctggaaggccgcctcgggcagaaccaggtaatggtggaaagcttcggcccgcaggcggcggagctgttcgccaaggttcgcaacgtgcagatcgtcgcctgcggtaccagctaccacgccggcatggtcgcccgttactggctggaaagcctgaccgggattccctgccaggtggaggtcgccagcgagttccgctaccgcaaggtcgcggtgcagccggattgcctgttcgtcaccatctcccagtccggtgagaccgccgacaccctggctgccctgcgcaacgccaaggagctgggcttcctctccagcgtggcgatctgcaacgttgccaccagttcgctggtgcgcgaatccgacctgaccctgctgacccaggccggcccggaaatcggcgtggcctcgaccaaggccttcaccacccagttggtcgccctgctgctgctgaccctgggcatcggccaggtgcagaagcgcctggccgatggcgtcgaagccgagctggtggacgaactgcgtcgcctgccgacccggctgggcgaggcgctggcgatgaaccgtacggtggagaaggtttccgagctgttcgccgagaagcaccacaccctgttcctcggccgtggcgcgcagttcccggtggccctggaaggcgcgctgaagctcaaggaaatttcctatatccatgccgaagcctacccggccggcgaactcaagcatggcccgctggcgctggtggacagcgacatgccggtggttaccgtggcgccgaacaacgagctggtggagaagctcaagtcgaacctgcaggaagtccgcgcccgcggcggcgaactggtggtgttcgccgacgaaggcgcgggcatcgaggccggcgagggcacccatgtggtgggcatgccgcacatcggcgacgtgctctcgccgatcctttacaccatcccgttgcaattgctctcgtaccatgtcgccgtgctcaagggcaccgacgtcgaccagccgcgcaacctggccaagtcggtcaccgtcgagtaa

SEQ ID NO: 337839 - DNA, 774 bp, Pseudomonas aeruginosa
gtgatctcgaaacgtaatacgccgcaacgtcgccatgccatcctcgcgctgctttccgagcagggcgaggtcagcgtggacgcactcgccaagcgcttttccacctcggaagtgaccatccgcaaggacctcgccgccatggaaagccacggcctgctgttgcgtcgctacggcggtgcggtgccgatgccccaggaactgatcggcgaagccgcacagcccgtctcgccctacaagcaggctatcggtcgcgccgccgcggcgcgcatccgcgagcatgcgcggatcatcatcgacagtggcagcaccaccgcggcgatgatccccgagcttgggcacaagccgggcctggtggtgatgaccaactcgctgaacgtggtcaacgccctgcgcgaactggagcacgagccggtgctgctgatgaccggggggacctgggatccgcattccgagtcgttccaggggcaggttgccgagcaggtgctgcgttcctatgacttcgaccaactattcatcggtgccgacggcatcgatctcgaacgcgggacgaccacgttcaacgaattgctgggcctgagccgggtgatggccgaggtcgcccgcgaggtgatcgtcatggccgaggccgacaaggtcggtcggcgcattcccaaccaggaattgccctggagcagcatccataccctgattaccgacgagcgcctggaaccttccgcgcgcgaacagataaccgcccggggcgtcacgctgatctgcgccccggtcgagccctga

SEQ ID NO: 337840 - DNA, 510 bp, Pseudomonas aeruginosa
atgccgaagcctgcgaaatggatcgtgctggggctgctcatagcctgggcggtgctgcccgaatggccgcggatacccgtcgaaggcgccagtgcccgcgactggaatccgcgaaccttctggttcgagccctgggggcgctccggagtgcacaagggcatcgacatcttcgcccgcagcggcacccccgtacgctccgccagctacggcctggtgctctatcgcggggagatcgccctcggcggcaaggtcgtcctggtgctggcgcccaagtggcgcctgcattactacgcccatctcgatagcctcgacacctatccgggccagccggtcctcgccggttcccgcctgggtgcggtcggaaccaccggcaacgcgcgcggcaagccggcccacctgcactacgcgatcatcaccttgctgccctatccctggctggccgacgccagcacccagggttggaagaaaatgttctacctcgatcccaatacggtgctgccgagccgatga

SEQ ID NO: 337841 - DNA, 1365 bp, Pseudomonas aeruginosa
atgtcccttgaaatcgtgattctcgccgccggccagggcacccgcatgcgttcggccctgcccaaggtcctccatcccattgccggcaagccgatgctcggccacgtcatcgactgcgcgcgccagttgcagccggaacggatccacgtggtgatcggccacggcgcggatctggtgcgtgagcggatggccgccgacgacctgaatttcgtgctccaggccgaacagctcggtacgggccatgcggtggcccaggccctgccgttcctcagtgcagaccaggtgctgatcctctacggcgacgtgccgctgatccagctggacaccttgcagcgcctgctggcgcaagtcaccccggaccagttgtcgttgctcaccgtcgacatgctcgaccccaccggctacggccgcatcgtccgtgacgaccagggcgcggtgcaggccatcgtcgagcacaaggacgcgaccccggcgcagcgccagatcggcgagatcaacaccggcatcctcgcggtgccgggcaagcgccttgccgactggctcggccgcctgtccaacgacaacgcccagggcgagtactacctgaccgacgtgatcgccatggcggtcggcgacggcctggtggtggccagcgcccaaccgctggacgcgatggaagtgcagggcgtcaatgaccgcatgcaacaggcccagctggagcgtcactaccagcgcctgcgcgcggaggagctgatgcgccagggtgtgaccctgctcgatccgcagcgcctggatgtccgtggcgaaatctcggtcggccgcgacgtgctgatcgacgtcaacgtggtgctggaaggccgcgtggtgatcgaggacgacgtgcgcatcggaccgaactgcgtgattcgcgacagcgtcctgcggcgtggcgcggtgatcaaggccaacagccacctggaaggcgcggagctgggcgagggtagcgatgccggtccgttcgcccgcctgcgtccgggcagcgtgctcggcgctcgggcccatgtcggcaacttcgtcgaactgaagaatgcccgcctgggcgagggcagcaaggccggccacctgagctacctgggcgatgccgagctgggcgccaactgcaacatcggcgccggcaccatcacctgcaactacgatggcgcgaacaagttccgcactgagctgggcgacgatgtgttcatcggctcgaacaactcgctggtggcgccgctgaagatcggcgatggcgcgacgaccgcggctggctccaccatcacccatgaggttccggcgaagaacctggccttcggccgcgcccggcagaagaacctggaaaactggaagcgcccggaaaaaatcaagaagtaa

SEQ ID NO: 337842 - DNA, 426 bp, Pseudomonas aeruginosa; identical to SEQ ID NO: 319231

SEQ ID NO: 337843 - DNA, 1377 bp, Pseudomonas aeruginosa
atgagtagcggacgtatcgttcaaatcatcggcgccgtgatcgacgtggaattcccgcgcgatgccgtgccgagcatctatgaagccctgaaggttcagggcgttgaaaccaccctggaagtccagcagcagctgggcgacggcgtggttcgttccattgcgatgggttccaccgaaggcctcaagcgtggcctgaacgtggacagcactggtgctgccatctccgtgccggtcggtaaagcgaccctgggccggatcatggacgtactgggcaacccgatcgacgaagccggtcccatcggcgaagaagagcgctggggcatccaccgcgaagctccgtcctatgccgaccaggctggcggcaacgagctgctggaaaccggcatcaaggtgatcgacctggtctgcccgttcgccaagggcggcaaggtaggcctgttcggcggcgccggcgtgggcaagaccgtcaacatgatggaactgatccgtaacatcgccatcgagcacagcggttattccgtgttcgcgggtgtgggcgagcgtactcgtgagggtaacgacttctaccacgagatgaaggactccaacgtactggacaaggtagccctggtatacggccagatgaacgagccgccgggcaaccgtctgcgcgtcgcactgaccggcctgaccatggccgagaagttccgtgacgaaggccgtgacgttctgttgttcatcgacaacatctaccgttacaccctcgccggtaccgaagtgtccgcactgctgggccgtatgccgtccgcggtgggttatcagccgaccctggccgaagagatgggcgttctgcaggagcgcatcacctccaccaagaaaggctcgatcacctcgatccaggccgtatacgttcccgcggacgacctcaccgacccgtccccggcgaccaccttcgcccacctggacgcgaccgtcgtactgtcccgtgacatcgcctcgctgggtatctaccctgcggtcgacccgttggactccacctctcgccagctcgatccgctggtgatcggccaggatcactacgacaccgctcgcggcgtccagtatgttctgcagcgctacaaggagctgaaggacatcatcgcgatcctgggcatggacgaactgtccgaagccgacaagctgctggtggcgcgcgctcgtaagatccagcgcttcctgtcccagccgttcttcgtagcggaagtcttcaccggctcgccgggcaagtacgtttccctgaaggacaccatcgctggcttcaagggcattctcaacggcgactacgatcacctgccggagcaggcgttctacatggtcggcggtatcgaagaagcggtcgagaaagccaaaaaactgtaa

SEQ ID NO: 337844 - DNA, 861 bp, Pseudomonas aeruginosa; identical to SEQ ID NO: 319229

SEQ ID NO: 337845 - DNA, 1545 bp, Pseudomonas aeruginosa
atgcagcaactcaatccttccgaaattagtgaaatcatcaaggggcgcatcgagaaactcgacgtcgcctcccaagcacgaaacgaaggcaccatcgtcagcgtgtccgacggtatcgtgcgcatctacggtctggccgacgtcatgtacggcgagatgatcgagttcccgggcggcgtctacggtatggcgctgaacctggagcaggattccgtgggtgccgtggtcctgggtgaataccagggcctcgccgaaggcatgaacgccaagtgcaccgggcgcatcctggaggttccggtcggtccggaactgctgggtcgcgtagtcgatgcactgggcaatccgatcgacggcaagggcccgatcgacgccaaggccaccgacgcggtcgagaaggtcgctccgggcgtgatctggcgtaagtcggtagaccagccggtacagaccggctacaagtcggtcgacgccatgatcccggtaggccgtggccagcgcgagctgatcatcggcgaccgccagatcggcaagaccgccctcgcggtcgacgccatcatcaaccagaaagacagcggcattaagtgcgtctacgtggccatcggccagaagcagtccactatcgccaacgtcgtacgcaagctggaagagaacggcgccctggccaacaccatcgtggtcgccgccagcgcttccgagtccgccgccctgcaatacctggcgccgtactccggttgcaccatgggcgaatacttccgtgatcgcggtgaagacgccctgatcgtctacgacgacctgtccaagcaggccgtggcttatcgccagatctccctgctgctgcgccgtccgccgggccgcgaagcctacccgggcgacgtgttctatctccacagccgtctgctggagcgcgcttcccgcgtttccgaagagtatgtcgagaagttcaccaacggcgccgtgaccggcaagaccggctcgctgaccgcgctgccgatcatcgagacccaggccggcgacgtttccgcgttcgttccgaccaacgtgatctcgatcaccgacggccagatcttcctggaatccgccatgttcaactcgggtatccgtccggccgtcaacgccggtatctcggtatcccgcgtaggtggcgcggcccagaccaagatcatcaagaagctgtccggcggcattcgtaccgctctggcccagtaccgtgaactggcggccttcgcccagttcgcctcggacctggacgaagcgacccgcaagcagctggagcatggtcagcgcgttaccgagctgatgaagcagaagcagtacgcgccgatgtcgatcgccgagatgtcgctgtccctgtatgccgccgagcgtggcttcctgcaggacgtcgaaatcgccaaggtcggtagcttcgagcaggcgttgatctcctacttccagcgcgagcatgccgctctgctggcgaagatcaacgagaaaggtgacttcaacgacgaaatcgacgcgggcatcaaggccggcatcgagaagttcaaggccacccaaacctggtaa

SEQ ID NO: 337846 - DNA, 537 bp, Pseudomonas aeruginosa; identical to SEQ ID NO: 319227

SEQ ID NO: 337847 - DNA, 471 bp, Pseudomonas aeruginosa
gtgaacattaatgcaaccctgattggccagtccgttgcgttcttcatctttgtgctgttctgcatgaagttcgtgtggcctccggtcatcgcggctctgcaagagcgtcagaagaagatcgctgacggcctggacgctgccaaccgcgcggctcgtgatctggagctggctcatgagaaagcgggccagcaactgcgcgaagccaaggctcaggcagccgaaatcgtcgaacaggcgaagaaacgcgctaaccagatcgtcgatgaagcccgcgaccaggcccgtaccgaaggcgaacgcctgaaggcccaggcccaagcggaaatcgaacaggaactgaacagcgtcaaggacgccctgcgtgcccaagtgggtgccctggccgtcaccggcgcagagaagatcctgggtgcttcgatcgacgcaaacgcgcacgagcagctggtttccaaactggcagccgagatctaa

SEQ ID NO: 337848 - DNA, 258 bp, Pseudomonas aeruginosa; identical to SEQ ID NO: 319225

SEQ ID NO: 337849 - DNA, 870 bp, Pseudomonas aeruginosa
atggcagcagaaaccgcttcgggttacatccagcaccacttgcagaacctgaccttcgggcgtctgcctaatggtgattgggggttcgcccacaccgccgagcaagccaaggaaatgggcttctgggcattccacgtagacaccctgggctggtcggtactgctcggcgtggtgttcctgttcatcttccgcctggcagccaagaaggccaccagcggccagccgggtggactgcagaacttcgtcgaggtgatggtcgagttcgtcgacaccagcgtcaaggacaccttccacgggcgcaacccgttgatcgcgcccctggccctgaccgtgttcgtctggatcttcctgctcaacctgatcgacctggtaccggtggactacctgccgatgctggccgcgaagatcaccggcgacgagcacctgttcttccgcgcggtggccaccaccgacccgaacgccaccctcggcctgtcgatctcggtgttcgccctgatcatcttctacagcatcaaggtcaagggcatcggcggcttccttggtgaactgaccctgcaccccttcagcagcaagaacatcgtcgttcagatcctgctgattccggtgaacttcctgctcgagttcgtgaccctgatcgccaagccggtttcgctggcgctgcgtctgttcggcaacatgtatgccggcgaactgatcttcattctgatcgccgtcatgttcggtagcggaatgttcctgctgagtgccctgggcgtagccctgaactgggcgtgggctgtgttccacatcctgatcatcaccctgcaggccttcatcttcatgatgctgaccatcgtctacctgtcgatggcgcacgaagacaaccattaa

SEQ ID NO: 337850 - DNA, 381 bp, Pseudomonas aeruginosa
atgccaagtcgcctgccggcattcagattgctgctcgtccaactggtagtagtgcttgttgctgcgatctccctgtggatttcttggggaccggtagccggatattccggactgctgggagggatgatcgcctggttgccgaattgttatttcgcctacaaggcgttccgtttcagcggagcgcgggctgcccgggaaatcgttcgctctttctatgcgggcgaagccgggaaactgattctgacggcggtgctcttcgcactggcgttcgcaggcgtgaagccactgatggcgccggctctgttcggtgtctatctgctgaccctgatggtcagctggtgcgcacccctgctgatgggaaaaacatttacaagaccttag

SEQ ID NO: 337851 - DNA, 873 bp, Pseudomonas aeruginosa
atggcagccaagaaacgtggactgggacgcgggctcgatgccctgctgggcggctcgagtcccgccaaactgcaggaagaagccgtacaggccgaccgccgcgagttgcagcagatccccctcgacctgatgcagcgcggcaagtaccagccgcgtcgcgacatggaccctcaggcgctggaggaactggcgcagtcgatcaaggcccagggcgtgatgcagcccatcgtggtgcggccgatcgccaatggccgctacgagatcatcgccggcgagcggcgctggcgggccagccagcaggccggactggaaaagatcccggcgctggtgcgcgacgtgccggacgaagcggccatcgccatggcgctgatcgagaacatccagcgcgaggacctcaacccgatcgaggaagccgctgccctgcagcgcttgcagcaggagttccagctgacccagcagcaggtcgcggaagcggtcggcaagtcgcgcgcgaccattaccaacctgctgcgcctgatcggcctgccggaagagatcaagaccctgctttcccatggcgacctggagatgggccatgcccgtgcgctcctcggtctgccggcagaacggcaggtggaaggggcgcgacatgttgtcgcacatgggctgaccgtacgtcagaccgaagccctggttcggcagtggacgcatgccccgggcaagcctgcgggaccggtcaagagcgacccggacatcgcccgcctggaacagcgcctggccgagcgcctgggcgcttcggtgcagatccggcatggtcagaagggcaagggacagctggtcatccgctacagctccctggatgaactgcagggcgttctcgcccacatccgttga

SEQ ID NO: 337852 - DNA, 789 bp, Pseudomonas aeruginosa
atggctaaggtattcgcgatcgccaaccagaaaggcggtgtcggcaagaccacgacctgtatcaaccttgcggcctccctcgtggcgaccaagcgccgcgtcctcctgctggacctggatccccagggcaacgccaccaccggcagcggcatcgacaagcacaacctggagcactccatctacgacgtgctcaccggcgagtgcaacctcgccgaggccatgcagttctccgaacacggcggctaccagttgttgccggccaaccgcgacctgaccgccgcggaagtggtgctgctggaaatggacatgaaggaaaatcgcctgcgcaacgcgctggcgccgatccgcgagaactacgactacatcctcatcgactgcccgccgtcgctgtcgatgctcaccgtcaacgcgctgaccgccgccgacggcgtgatcatccccatgcagtgcgagtactacgcgctggaggggctgaccgacctgatgaacagcatccagcgcatcggccagttgctcaacccgacgctgaagatcgaggggctgttgcggaccatgtacgatccgcgcatcagcctgaccaacgatgtctccgcgcagttgcaggagcatttcggcgacaccctctacagcaccgtcatcccgcgtaacgtgcgcctcgccgaagcccccagcttcggcatgccggcgctggtttacgacaagcaatcccgcggcgccatcgcctacctggcgctggccggcgagctggtccgccgccagcgcgccaaaggccgcgccgcaaccgcataa

SEQ ID NO: 337853 - DNA, 645 bp, Pseudomonas aeruginosa
atgtctgcggtaacccaacaccacgccgacgaactcgcgcgcggtgctgacgagctaggcgtcgccctcgacgccgacaagcaacgccagctgctggcctacttggccctgctgatcaaatggaacaaggcctacaacctgaccgccgtacgcgacccggacgagatggtttcgcgccacctgctcgacagcctgagcatcgtgccttacgccgaggctggggataactggctggatgtcggcagcggcggcggcatgcccggcgtgccgctggccatcctgttcccggaaaagcgcctgaccctgctcgacagcaacggcaagaagacccgcttcctgacccaggtgaagctcgagctgaagctggccaacctcgaagtcgtgcacagccgggtggaagccttccgtcccgagagccccttcgatggcatcgtttcccgcgctttcagcagcctggaggacttcgccaactggacccgccacctcggtggccaggaaacccgctggctggcgatgaagggcgtgcatccgaacgaagagctggcggcactcccggaggatttccgggtcgaagccgagcacgcgctggcggtacccggttgccaaggtcagcggcatctgctgatactgcggcgcacagcatga

SEQ ID NO: 337854 - DNA, 1893 bp, Pseudomonas aeruginosa
gtggatttccctacccgttttgacgtaatcgtgatcggcggtggccatgcaggcaccgaagccgcactcgcggctgcgcgcatgggtgtgaaaaccctgctgttgacccacaatgtggaaaccctggggcagatgagctgcaaccccgccatcggcggcatcggcaagagccatctggtcaaggaaatcgacgcccttggcggcgccatggccgaagccaccgacaagggcggtatccagttccgcatccttaacagccgcaaggggccggcagtgcgcgccactcgtgcacaagccgatcgcgtgctctataaggccgctatccgccatacactggaaaaccagccgaacctgtggatattccagcaggcctgcgacgacctgatcgtcgagcaggatcaggtccgcggcgtagtgacccagatgggactgcgcttccatgccgacaacgtggtcctgactaccggcaccttcctcggcggacttatccacatcggcctggagaactactcaggcggacgcgccggcgacccgccgtccatcgcactggcgcgtcgtctgcgtgaattgccgctgcgggtcggccggctgaagaccggtacgccgccgcggatcgacgggcgcagcgtggacttctcggtgatgaccgagcagccgggcgacacgccgatcccggtgatgtccttcctcggttcgaaggaacagcatcccgagcaggtcagttgctggatcacccataccaacgcacggacccacgagatcatcgccgccaacctcgatcgttcgccgatgtattccggtgtgatcgaaggcatcggcccgcgctactgcccgtcgatcgaagacaagatccatcgcttcgccgacaaggaaagccaccaggtcttcctcgagccggaaggcctgacgacccacgagctgtatcccaacggcatttccacgtccctgccgttcgacgtgcaactgcagatcgtgcgttccatccgtggcatggaaaacgcccacatcgtgcggccgggctatgcgatcgagtacgacttcttcgatccccgcgatctcaggtacagcctggagaccaaggtcatcggcggcctgttcttcgccggccagatcaacggcaccaccggctacgaggaagctggcgcccagggcctgctggccggcgccaatgctgcgttgcgttcgcaaggcaaggacagctggtgcccgcgccgcgacgaggcctacatcggcgtgctggtggacgacctgatcacgctcggcacccaggagccgtaccgcatgttcacctcgcgggcggaataccgcctgatcctccgcgaggacaacgccgacctgcgtctcaccgagaagggacgcgagctgggccttgtcgacgatcggcgctgggctgccttcgaagccaagcgcgaaggtatcgaacgcgaggaacagcggctgaagagcacctgggtgcggccgaataccccgcagggcgacgccatcgccgagcgcttcggtacgccgctgacccatgaatacaacctgctcaacctgctgagccgccccgagatcgattacgccggcctggtggagatcaccggcgacgctgtggataacccccaggtggccgagcaggtggagattcgcaccaagtacgccggctacatcgaccgccagcaggaggaaatcgcccggctgcgcgccagcgaagatacccgcctgcctgtggatatcgattacctggggatttccggcctgtcgaaggaaatccagaacaagctgaaccaggcccgtccggaaaccctcggacaggcttcgcgaatccccggcgtcacgccggctgcgatttcgctgttgttgatccacctgaagaagcgtgcctctggccgccaactggagcagagcgcttga

SEQ ID NO: 337855 - DNA, 225 bp, Pseudomonas aeruginosa
atggagatcgtagccaacctggcggtatggctcggcggcgaatgccatgtcggacagatgatcgactggttcggcagttacgaccgcactagcgggctcagtgctcggctactgctgcgcaaacccgctaacgagggctccgagcgggatttccaggtctccgccaagcgccgcttcgagcgcctgtcgtcatccatcgatacgctggaaagcggcaacgactga

SEQ ID NO: 337856 - DNA, 1368 bp, Pseudomonas aeruginosa
atgcaagccgccaccgaaaccatcgtcgcgatagctactgcccagggccgcggcggcgtgggaatcgttcgcgtctccggccccctcgccggacagatcgccgtggccgtgagcggacgccagctgaaagcccggcatgcgcattacggaccgttcctcgatgccggtgggcaggtgatcgacgaaggcctgtcactgtatttccccggcccgaactcgttcaccggcgaagacgtactcgaactgcaggggcacggcggccccgtggtactcgacctgctggtgcagcgttgtctggaactgggcgcccgccaggcgcgaccgggcgagttcagcgagcgcgcgttcctaaacgacaagctcgacctggcccaggccgaagccatcgccgatctgatcgaggccagctcggagcaggccgcgcgcaatgcattgcgttccctgcagggcgaattctcgcgccgggtacatgcattgaccgagcaactgatttccctgcgcatctatgtcgaagccgccatagacttccccgaggaagaaatcgacttcctcgccgatggccatgtactggggcttctggaaaaagtacgcacagaattatccacagtgcagcgcgaagcttcccaaggcgccctgctgcgcgacggcatgaccgtggtcatcgccggacgaccgaatgccggcaagtccagcctgctgaatgccctggccggtcgcgaggcggccatcgtcacggacatagccggcaccacccgcgatgtactgcgcgaacatatccacatcgatggcatgcccctgcatgtggtggacaccgcaggcctgcgggataccgaggaccatgtggaaaagatcggcgtggaacgtgcgctgaaagccatcggcgaagccgatcgcgtgctgctggtggtggacgccaccgccccggaagcagcggacccgttttccctatggccggagtttctcgaccagcgaccggaaccgggcaaggtcaccctgatccgcaacaaggcggatttgtccacagagtccattggcctcgaggaaagcgcggacggccacgtcaccatcaccctctcggcgcgcaccggcgccggcctggagctgctgcgcgaacacctgaaggcctgcatgggcttcgaacagaccgcggaaagcggtttcagcgcccgccggcgccacctggaggcgctgcgccaggctggccaggcgctggagcatggccacagccaacttatccacaatggcgcaggcgagctgctggccgaggatctgcgccaggcccagcagcacctgggtgaaatcaccggcgcattcacccccgatgacctgctgggtcgcatcttctcgagtttctgcatcggcaagtaa

SEQ ID NO: 337857 - DNA, 1737 bp, Pseudomonas aeruginosa
atggacattcaacgctcgattctcatcgtcgcccttgcagtcgtgtcctacctgctggttctccagtggaacaaggattacggtcagcctgagctgcccgccgccagcgcttcgatgaacaccacgcaaggcctgccggacactccgtccgcctcgggcaccagcagtgacgttcccactgcccagagcagtgcggccggcagcgaagccgccgacaagccggttgcggtcagcgacaagctgatccaggtgaagaccgacgtcctcgacctggccatcgatccccgtggcggcgatatcgtccagctcggcctgttgcagtatccgcgccgcctggaccgtccggacgtgccgttcccgctgttcgacaacggtcgcgaacgtacctacctggcgcagagcggcctcaccggtgccgacggcccggacgccagcagcgccggccgcccgctgttccacagtgcgcagagcagctaccagttggccgacggccagaacgaactggtcgtggacctgagcttcagccacgacggtgtcaactacatcaagcgcttcaccttccaccgtggcctgaaagccgattgctcggacaaggaaaaggctcagaagaagatcgagtgcatcaatgaaaacgcctatcaggtcggcgtcagctacctgatcgacaaccagagcggcaagacctggagcggcaacctgttcgcccagctcaagcgcgacggcagcgccgacccgtcctcgaccaccgccaccggggtgtccacctacctcggcgccgcggtctggaccccggattcgccgtacaagaagatctccaccaaggacatggacaaggaacagttcaaggagtccgtgcagggtggctgggtcgcctggctgcaacactacttcgtgaccgcctgggttccgaccaagggcgagcagcaccaggtcatgacccgcaaggacggccagggcaactacatcgtcggtttcaccggcccgaccctgagcgttccggcgggtagcaaggtggaaaccgacctgaccctgtatgccggcccgaaactccagaagcacctgaaggaactctccccgggcctggaactgaccgtcgactacggtttcctctggttcatcgcccagccgatcttctggctgctgcaacatatccacagcctgatcggcaactggggctggtcgatcatcgccctgaccgtcctgatcaagctggccttcttcccgttgtccgccgccagctaccgttcgatggcgcgcatgcgcgcggtgtcgccgaagatgcaggcgatcaaggaacagcacggcgacgatcggcagaagatgtcccaggcgatgatggagctgtacaagaaggagaagatcaatccgctaggcggctgcctgccgatcctggtccagatgccggtcttcctctccctctactgggtactcctggaaagcgtggaaatgcgccaggcgccgtggctcggctggatcaccgacctgtcggtgaaggatccgttcttcatcctgccgatcgtcatgggcggcaccatgctgatccagcagatgctcaacccgaccccgccggacccgatgcaggccaaggtgatgaagctgatgccgatcatcttcaccttcttcttcctctggttcccagccggtctggtgctgtactgggtggtcaacaactgcctgtcgatcgctcagcagtggtacattacccgcaagatcgaggcagccgcgaagaccgcctga

SEQ ID NO: 337858 - DNA, 408 bp, Pseudomonas aeruginosa
gtggtgagtcgggacttcgaccgggacaagcgtctactgacagcccggcaattcagcgcagtcttcgactctccgaccggcaaggtccccggcaagcacgtcctgctgctggcgcgcgagaacggtctcgatcacccccgcctgggcctggtgatcggcaagaagaacgtcaagctcgccgtccagcgcaatcgcctcaaacgcctgatccgcgaatcgttccgccataaccaggaaaccctggctggctgggatatcgtggtgatcgcgcgcaaaggcctgggcgaactggaaaatccggagctgcaccagcagttcggcaagctctggaaacgcctgttgcgcaatcgacctcgcacggaaagccctgctgacgcccctggcgtggccgacggtactcatgcatag

SEQ ID NO: 337859 - DNA, 135 bp, Pseudomonas aeruginosa; identical to SEQ ID NO: 319214

SEQ ID NO: 337860 - DNA, 1545 bp, Pseudomonas aeruginosa
gtgtccgtggaactttggcagcagtgcgtggatcttctccgcgatgagctgccgtcccaacaattcaacacctggatccgtcccttgcaggtcgaagccgaaggcgacgaattgcgtgtgtatgcacccaaccgtttcgtcctcgattgggtgaacgagaaatacctcggtcggcttctggaactgctcggtgaacgcggcgagggtcagttgcccgccctttccttattaataggcagcaagcgtagccgtacgccgcgcgccgccatcgtcccatcgcagacccacgtggctcccccgcctccggttgctccgccgccggcgccagtgcagccggtatcggccgcgcccgtggtggtgccacgtgaagagctgccgccagtgacgacggctcccagcgtgtcgagcgacccctacgagccggaagagcccagcatcgatccgctggccgccgctatgccggccggagccgcacctgcggtacgcaccgagcgcaacgtccaggtcgaaggcgcgctgaagcacaccagctatctcaaccgtaccttcaccttcgagaacttcgtcgagggcaagtccaaccagttggcccgcgccgccgcctggcaggtggcggacaacctcaagcacggctacaacccgctgttcctctacggtggcgtcggcctgggcaagacccacctgatgcatgcggtgggcaaccacctgctgaagaagaacccgaacgccaaggtggtctacctgcattcggaacgtttcgtcgcggacatggtgaaggccttgcagctcaacgccatcaacgaattcaagcgcttctaccgctcggtggacgcactgttgatcgacgacatccagttcttcgcccgtaaggagcgctcccaggaggagttcttccacaccttcaacgcccttctcgaaggcggccagcaggtgatcctcaccagcgaccgctatccgaaggaaatcgaaggcctggaagagcggctgaagtcccgcttcggctggggcctgacggtggccgtcgagccgccggaactggaaacccgggtggcgatcctgatgaagaaggccgagcaggcgaagatcgagctgccgcacgacgcggccttcttcatcgcccagcgcatccgttccaacgtgcgtgaactggaaggtgcgctgaagcgggtgatcgcccactcgcacttcatgggccggccgatcaccatcgagctgattcgcgagtcgctgaaggacttgttggcccttcaggacaagctggtcagcatcgacaacatccagcgcaccgtcgccgagtactacaagatcaagatatccgatctgttgtccaagcggcgttcgcgttcggtggcgcgcccgcgccaggtggccatggcgctctccaaggagctgaccaaccacagcctgccggagatcggcgtggccttcggcggtcgggatcacaccacggtgttgcacgcctgtcgtaagatcgctcaacttagggaatccgacgcggatatccgcgaggactacaagaacctgctgcgtaccctgacaacctga

SEQ ID NO: 337861 - DNA, 1104 bp, Pseudomonas aeruginosa
atgcatttcaccattcaacgcgaagccctgttgaaaccgctgcaactggtcgccggcgtcgtggaacgccgccagacattgccggttctctccaacgtcctgctggtggtcgaaggccagcaactgtcgctgaccggcaccgacctcgaggtcgagctggttggtcgcgtggtactggaagatgccgccgaacccggcgagatcaccgtaccggcgcgcaagctgatggacatctgcaagagcctgccgaacgacgtgctgatcgacatccgtgtcgaagagcagaaactcctggtgaaggccgggcgtagccgcttcaccctgtccaccctgccggccaacgatttccccaccgtagaggaaggtcccggctcgctgaacttcagcattgcccagagcaagctgcgtcgcctgatcgaccgcaccagcttcgccatggcccagcaggacgtgcgttactacctcaacggcatgctgctggaagtgaacggcggcaccctgcgctccgtcgccaccgacggccaccgactggccatgtgctcgctggatgcgcagatcccgtcgcaggaccgccaccaggtgatcgtgccgcgcaaaggcatcctcgaactggctcgtctgctcaccgagcaggacggcgaagtcggcatcgtcctgggccagcaccatatccgtgccaccactggcgaattcaccttcacttcgaagctggtggacggcaagttcccggactacgagcgtgtactgccgcgcggtggcgacaagctggtggtcggtgaccgccagcaactgcgcgaagccttcagccgtaccgcgatcctctccaacgagaagtaccgcggcattcgcctgcagctttccaacggtttgctgaaaatccaggcgaacaacccggagcaggaagaggccgaggaagaagtgcaggtcgagtacaacggcggcaacctggagatcggcttcaacgtcagttacctgctcgacgtgctgggtgtgatcggtaccgagcaggtccgcttcatcctttccgattccaacagcagcgccctggtccacgaggccgacaatgacgattctgcctatgtcgtcatgccgatgcgcctctaa

SEQ ID NO: 337862 - DNA, 1110 bp, Pseudomonas aeruginosa
atgtccctgacccgcgtttcggtcaccgcggtgcgcaacctgcacccggtgaccctctccccctcccctcgcatcaacatcctctacggcgataatggcagcggcaagaccagtgtgctcgaagccatccacctgctgggcctggcgcgttcattccgcagtgcgcgcttgcagccggtgatccagtatgaggaagcggcctgcaccgtattcggccaggtgatgttggccaacggcatcgccagcaacctggggatttcccgtgagcgccagggcgagttcaccatccgcatcgatgggcagaacgcccggagtgcggctcaattggcggaaactctcccactgcaactgatcaacccggacagctttcggttgctcgagggagcgccgaagatccggcgacagttcctcgattggggagtgttccacgtggaacctcggtttctgcccgtctggcagcgcctgcagaaggcgctgcgccagcggaactcctggctccggcatggtaaactggaccccgcgtcgcaagcagcctgggaccgggaattgagcctggccagcgatgagatcgatgcctaccgcagaagctatatccaggcgttgaaaccggtattcgaggaaacactcgccgaattggtttcactggatgacctgacccttagctactaccgaggctgggacaaggaccgggacctcctggaggtcctggcttccagcctgttgcgcgaccagcagatgggccacacccaggcgggaccgcagcgtgcggatcttcgcatacggttggcaggtcataacgccgcggaaattctctcgcgcggtcagcagaagctggtggtatgcgccctgcgcatcgcccaaggccatctgatcaatcgcgccaagcgcggacagtgcgtctacctggtggacgacctgccctcggaattggatgagcagcatcgaatggctctttgccgcttgcttgaagatttgggttgccaggtattcatcacctgcgtggacccgcaactattgaaagacggctggcgcacggatacgccggtatccatgttccacgtggaacatggaaaagtctctcagaccacgaccatcgggagtgaagcatga

SEQ ID NO: 337863 - DNA, 2421 bp, Pseudomonas aeruginosa
atgagcgagaacaacacgtacgactcttccagcatcaaggtgctgaaggggctggatgccgtacgcaagcgccccggcatgtacatcggcgacaccgacgatggcaccggtctgcaccacatggtgttcgaggtggtggataactccatcgacgaagcgctggccggttattgcagcgaaatcagcatcaccatccatacggatgagtcgatcactgtccgcgacaatggacgcggtattccggtggatatccacaaggaagaaggggtttctgcggcggaagtgatcatgaccgtcctccacgccggcggcaagttcgacgacaacacctacaaggtgtccggcggcttgcacggtgtgggcgtctcggtggtgaacgcgctgtcccatgaactgcgcctgaccatccgtcgccacaacaaggtctgggaacaggtctaccaccacggcgttccgcagttcccactgcgcgaagtgggcgagaccgatggctccggcaccgaagttcacttcaagccgtccccggagaccttcagcaacatccacttcagttgggacatcctggccaagcgcatccgcgagctgtccttcctcaactccggagtcggcatcctgctgcgcgacgagcgtaccggcaaggaggagctgttcaagtacgaaggcggtctgaaggccttcgtcgagtacctgaacaccaacaagaccgcggtgaacgaggtattccacttcaacgtccagcgtgaagaggacggcgtgggtgtggaagtcgccttgcagtggaacgacagcttcaacgagaacctgctctgcttcaccaacaacatcccgcagcgtgacggcggcacccacctggccggtttccgttcggcgctgacgcgtaacctgaacaactacatcgaggccgaaggcctggcgaagaagttcaagatcgccaccaccggcgacgatgcccgcgaaggcctcaccgcgatcatctcggtgaaggtaccggacccgaagttcagctcgcagaccaaggacaagctggtctcctccgaggtgaagactgcggtggaacaggagatgggcaagtacttcgccgacttcctgctggagaatcccaacgaagccaaggccgtagtcggcaagatgatcgacgccgcccgtgcccgcgaggccgcgcgcaaggcgcgcgagatgacccgccgcaagggcgcgctggacatcgccggcctgcccggcaaactggccgattgccaggaaaaggacccggcgctctccgaactgtacatcgtggagggtgactccgcgggcggttccgccaagcagggccgcaatcgccggacccaggcgatcctgccgctcaagggcaagatcctcaacgtcgagaaggcacgcttcgacaagatgctctcctcccaggaggtcggtacgctgatcaccgccctgggctgtggcatcggccgcgaggagtacaacatcgacaagctgcgctaccacaacatcatcatcatgaccgatgctgacgtcgacggttcgcacatccgcaccctgctgttgaccttcttcttccgccagatgcccgagctgatcgagcgtggctacatctacatcgcccagcccccgttgtacaaggtcaagcgcggcaagcaggagcagtacatcaaggacgaccaggccatggaagagtacatgacccagtcggccctggaagacgccagcctgcacgtcaacgagcacgctccgggcctgtccggggcagcgctggagaaactggtcaacgagtatcgcggggtgatcgccaccctcaagcgcctgtcgcgcctgtacccccaggagctgaccgagcacttcatctacctgcctaccgtgtcggtggacgacctggctaacgagtcggccatgcagggctggttggagaagttccaggcgcgcctgaccgccgccgagaagtctggcctgacctacaaggccagcctgcgcgaagaccgcgagcgccacctgtggctgcccgaggtggaactggtggcccacggcctgtccagctacgtcaccttcaaccgtgacttcttcgccagcaatgactaccgctcggtgtcgctgctcggcgaccagctgaacagcctgctggaagacggcgcctacgtgcagaagggtgagcgcaagcgcccgatcagcgccttcaaggacggcctggactggctgatggccgaaggtaccaagcgccacagcatccagcgatacaaggggttgggcgagatgaaccctgagcagctgtgggaaaccaccatggatccgaacgtccggcgcatgctcaaggtgaccatcgaggacgccatcgccgccgaccagatcttcaacaccctgatgggcgatgccgtggagccgcgccgcgacttcatcgaaagcaacgcgctggcggtgtcgaacctggacgtgtga

SEQ ID NO: 337864 - DNA, 774 bp, Pseudomonas aeruginosa
atgtcgacagtgcaggccatcagaaccatcctcttttacctgctgctgtccgccagcgcgttcgtctggggcaccctcagcttcttcatcgcgccgatcctgccgttccgcgcccgctaccgcttcgtggtccagaactggtgccgcttcgcgatctggctgacccgcgtggtcgccggcatccgctacgaggtgcgcggactggagaacatcccggaaaagccctgcgtgatcctctccaagcaccagagcacctgggaaaccttcttcctctccggcttcttcgagccactcagccaggtactcaagcgcgagctgctctacgtgccgttcttcggctgggccctggccctgctcaagcccatcgccatcgaccgcagccagccgaagctggccctcaagcaactggccaagcagggcgacgagtgcctgaagaaaggcgcctgggtgctgatcttcccggaaggcacgcgtattccggtggggcagatgggcaagttctcccgcggcggcaccgccctggcggtcaacgccgggctaccggtactgccgatcgcccacaacgccgggcagtattggcccaaggccggctgggccaagtacccgggcaccatccaggtggtgatcggcccggcgatgcacgccgaaggcgaaggcccgcgcgccatcgccgagctaaaccagcgcgccgaggcctgggtcagcgagaccatggccgagatcagccccatccagcagcaggtcagccatccggagccgtcggtggtctcgtga

SEQ ID NO: 337865 - DNA, 537 bp, Pseudomonas aeruginosa
atgtcccgttccctgctgattctcgaccgcgatggagtcatcaacctcgactccgacgattacatcaagaccctcgacgagtggatccccatccccagctcgatcgaggccatcgcccgcctgagccaggccggctggaccgtcgcggtggctaccaaccagtccggcatcgcccgtggctattacgacctggcggtgctcgaggccatgcatgcgcgcttgcgcgaactggtcgcggagcagggcggcgaggtcggcctcatcgtctattgtccgcatggaccggacgacggctgcgaatgccgcaagccgaagccgggtatgctgcggcagatcggcgagcactacggggtcgatctgtcgggtatctggttcgtcggcgacagcatcggtgacctggaggcggcgcgggccgtcgattgtcagccggtgttggtaaagaccggaaaaggtgtacgtacgctgggcaagcccttgccagagggcaccctgatattcgacgatctggcggcagtcgccagcgcattacttcagtaa

SEQ ID NO: 337866 - DNA, 1707 bp, Pseudomonas aeruginosa
gtgaaacgcctgaaaaagacactgcacctttcaagcttgtccctcgtttccctggctctttcttccgccgccctggcggccgctccggtcatgctcgaccagggcaaggaatggaccgaaagccaccgccaggacttctacagccgcgaccagggctcgcaggtgatgcccctgccctggctcaaggcgttgcgacagccggatggaacgcctttcctcgccgacagcctggcccgctacggctatttgcccaatcccaaggcgcccgcggaaggcctgccggtgggcttcaccgtagccggcacgggcgcccggcagatggtcggcatgacctgttcggcctgccatacccggcagatcgaggtgaagggcacggcctatcggatcgacggcggtccggcgatcgtcgacttccaggcattcctcgccgacctcgatcgggccgtgggaccgctgaccagcgatgacgccgccttcgacgccttcgccaagcagatcctcggggccaatccgcctcccggtgcgcgcgacgccctgctcgcggcggtgaaggaatggtacgagccctatcacacgctgatcgagcgcgcgctgcccaaggacacctggggaccggcgcggctggacgcggtatcgatgatcttcaaccgccttaccgggctggatatcggcaccgcgccgccctatctgattcccgacaacatcaaggcggcggatgcgccggtgcgctacccgttcctgtggaacgcggcgcggcagaacaagacccagtggcccggcttcgccgccaacggcaacgacctgctcggcctggcgcgcaatgtcggcgaggtctacggggtgttcgccaccttccacccgcagaagagcaagttccacctgctgggcatggactacctgaaggtcaactcggccaacttccacgggttgggcaagctggaggagctgatcaagaagatcggcccgccgaagtggccctgggcggtggacaagcacctggccaggaaaggcgcgctgatcttcgcccgcaagaccgacgagggtggctgcgtggagtgccacggcatccggatcaaggacctggtgctttgggacactccgctgagggacgtcggcagcgacagccgccagcacgccatcctcgatggccaggtgcagaccggcgtgatggagggcgcgcggatgccgttcggccagccgctgaaggcgaccgacggagccttcgatgtactcgccgtagcggtggccggttcgatcctgcagcacttcgtgccgatcctcggtgagaagcacgatgccaaggcggcggcggtcaagccggaaagcgtgatgaccgacgaaacccggcaactgctgaccgccttccagaagccggtgcgtacccaggccgacccctacccctacgagtcgcgggtcctgcaggggatctgggcggcggcgccgtacctgcacaacggctcggtgccgaccctggaagagttgctgaagccggccgcggagcgggtggaatccttcccggtgggctcggcctacgacgtggacaaggtcggcctcgccgcccagcagacccaattcggcagctatgtgctgaagaccaccggctgcgagcagcgtgattccggcaacagccgctgcggccatgagtacggcaccagcctgtcggccgaggagaagcgcgcgctgctggagtatctgaaggtcctgtag

SEQ ID NO: 337867 - DNA, 2058 bp, Pseudomonas aeruginosa
atgatgagcgccaaggatttcctggtcgaactgggcaccgaagagctgccgccaaaagccctcaacagcctcggcgaagccttcctcagcggtatcgagaagggcctcaaggctgccggtctgagctatgccgctgcgcgtttctatgcggcgccgcgccgtctcgccgtgctggtcgagcaactcgccgtgcagcagcccgaccgtaccgtcaacctagacggtccgccgctacaggccgccttcgacgccagcggtaacccgacccaggccgccctcggcttcgccaagaagtgcggcgtggatctgcagcatatcgacaagagcggtccgaagctgcgcttcagccagatcatcgccggccaaccggccgccggcctgctgcctggcatcgtcgaggcctcgttgaacgaactgccgattcccaagcggatgcgctgggcagctcgccgcgaggagttcgtgcgtccgacccaatggctggtgatgctgttcggcgacgatgtggtcgagtgcgagatcctcgcccagaaagccgggcgcgaatcccgtggccaccgcttccacaatccggacaatgtgcgtatttccagcccggcagcgtatctggaagacctgcgcggcgctcatgtgctggccgatttcgccgagcgccgcgagctgatcgccaagcgcgtggccgaactggccgccgagcaacagggcagcgccatcgtgccgccgagcctgctcgacgaagtgactgcactggtcgagtggccggtgccgctggtctgctccttcgaggagcgcttcctcgaggtcccgcaggaagccctgatcaccaccatgcaggacaaccagaaatacttctgcctgctggacgccaacggcaagctgctgccgcgcttcatcaccgtcgccaacgtcgagagcaaggcgccggagaatatcgtcagcggtaacgagaaggtggttcgcccgcgcctcaccgacgccgagttcttcttcaagcaggacaagaagcagccgctcgaaagcttcaacgagcgcctgcgcaacgtagtgttccaggcccagctcggcaccgtgttcgagaaggcccagcgcgtctccggcctggccgcctacatcgccgaacgtataggcggcaatgcgcagaacgccgcgcgcgccggcatcctgtccaagtgtgacctggcgaccgagatggtcggcgagttccccgagatgcagggcatcgccggctactactacgccacccacggcggcgaagcggaagacgtcgccctggccctcaacgagcagtacatgccgcgcggcgccggcgccgagctaccctcgaccctgaccggcgccgccgtggcggtggccgacaagctcgataccctggtcggtatcttcggcatcggcatgcttcccaccggcagcaaggacccctacgcgctgcgccgcgctgcgctgggcgtgctgcgcatcctcatcgagaagcagctcgacctggacctggtagccgcggtcaacgccgccgtcgagcaatacggcgacaaggtcaaggccgccggcctggccgagcaggtgctggacttcgtgttcgaccgcctgcgcgcgcgctacgaggacgaaggcgtggacgtggccgtgtaccagtcggtgcgcgcgctcaagccaagctcgccgctggacttcgaccagcgcgtacaggccgtccaggccttccgccagttgcctgaagccgaggccctggccgcggcgaacaaacgggtgtcgaatattctcgccaagtccgaggacgaggttccgccgaacgtggatgccagcctgctggtggaagccgccgagaaggccctgggcagcgccgtggcgaacgccgaaagcgaagtcgcgccgctggcagcggcacgcgactatcgcgccgcgctggcccgcctggcggccttgcgcgagccggtggatacgttcttcgccgatgtgatggtcaatgtcgacgacgcggcggtgcgcgccaaccgctatgcgctgctggccaagctgcgcgggtcgttcctcggggtggcggacatctcgctgctcggctga

SEQ ID NO: 337868 - DNA, 948 bp, Pseudomonas aeruginosa
gtgagccagactacgcccgccgtgcgcaccttccaagacctgattctcgccctgcagaactactgggccgagcagggctgcgtggtgctgcagccctacgacatggaagtgggcgccggcaccttccacaccgccaccttcctccgcgccatcggcccggagacctggaacgccgcctacgtccagccgagccgccgccccaccgacggccgctacggcgagaaccccaaccgcctgcagcactactaccagtttcaggtggtcctgaagccgaacccggagaacttccaggagctgtacctcggctcgctgaaagccatcggcatcgacccgctggtccacgacatccgcttcgtcgaggacaactgggagtcgccgaccctcggcgcctggggcctgggttgggaaatctggctgaacggcatggaagtcacccagttcacctacttccagcaggtcggcggcatcgagtgctatccggtcaccggcgagatcacctacggcctggagcgcctggccatgtacctgcagggcgtggactcggtctacgacctggtctggaccgacggcccgttcggcaaggtcacctatggcgacgtgttccaccagaacgaggtggagcaatccactttcaacttcgagcacgccaacgtgccgaagctgttcgaactgttcgacttctacgaaagcgaagccaaccgcctgatcgcgctggagctgccgttgccgacctacgagatggtcctcaaggcttcgcataccttcaacctgctggatgcgcggcgcgccatctcggtcaccgagcgccagcgctacatccttcgcgtgcgtaccctggcccgcgccgtggcgcagagctacctgcaggcccgcgcgcgcctcggcttccccatggccacccccgaattgcgtgacgaagtactggccaagctgaaggaggccgaatga

SEQ ID NO: 337869 - DNA, 552 bp, Pseudomonas aeruginosa
atgccacgctgcttctggtgcaacgacgatcccctctacatggcctaccacgacgaggagtggggtgtgccgcagcgcgatcccgacgcgctgttcgaacttctgctgctggagggcttccaggccgggttgtcctggatcaccgtgctgaagaagcgcgagcgctaccgcgaggtgctgttcggcttcgacgtgcagcgggtggcacagatgagcgacgcggagatcgacgaactgatgctcgaccccggcatcattcgcaatcgggccaagctcaacgctgcgcggcagaacgcccaggcctggctggagctggatgacccggctgggttcctctggtccttcgtcggcggccagccgaagatcaaccatttcgctggtcgtgccgaggtgccggcgattaccccggaagccgaggccatgagcaaggcgctgcgcaaggccggcttcaacttcgtcgggccgaccatctgctacgccttcatgcaggccagcggcatggtcatggaccatacccaggactgcgaccgttacgcccaactcgtcggctag

SEQ ID NO: 337870 - DNA, 888 bp, Pseudomonas aeruginosa
gtggagaaattcaaaggtgccctggtggtgggggccctacgcctgttcgcgctattgccctggcgtgccgtgcaaggcgtcggggccggcataggctggctgatgtggaaattgccgaatcgatcccgcgaggtagtgcggatcaacctgtccaagtgcttccccgagttgtccgaaaccgaactggaaaagctggtcggacaaagcctgatggatattggccgtaccctcaccgaaagtgcctgtgcctggatctgggcgcctgaaaagtcgctgaggtacatccgcgaggtcgaaggcatggaagtgctggaggaagcgctggcttccggcgatggcctggtcggcattaccagtcacctgggaaactgggaagtactcaaccacttctattgctcctacgccaagccgatcatcttctatcgtccgcccaagctgaaggcagtcgacgaattgctgaagaagcaacgcgtgcaattgggcaaccgcgtcgcaccttccactccggagggtatcctcagcgtcatcaaggaagtgaagaaaggcggttgcgtagggattcccgccgaccccgagcccgcgcgtaccgctgggctcttcgtgccctacctgggcaccactgcattgatcagcaagttcgtcccgcagttgctttcacgcggcaaggcgcgtggagtgttcttccatgcggtgcgcctgcccgatggtagcggttacaaggtgatcctcgaagcggctccggcggacatgtacgacaaggacctggaagtgtctgtagcagccatgagccgcgagttggcgaagtatgtacgagcctatcccagccagtacatgtggagcatgaagcgcttcaagaaccgcccggatggcgagaaaaaatggtactga

SEQ ID NO: 337871 - DNA, 267 bp, Pseudomonas aeruginosa
atggataatcaacgacaatacccacgaaccccgctcaagtgccgaatccgtatcagtcacccgttatttggcgagctgatggcgcagacccgcgacctctccgacaccggggtctatgtcaaacacccggatctgacccagctcccaacaggcagtgtcgttactggccaggtacaggatctgccgatcgacgcgccgatcctgcagatggaagtcgtgcgagtcgatgcggaaggcgtcggcctgcgctttctcagcgaagcctga

SEQ ID NO: 337872 - DNA, 654 bp, Pseudomonas aeruginosa
atgtcagcttcttctccggcggcctggcgcggcaccctggccggcctgatcgccttccacatcttcatcatcatcgccagcaactacctggtgcagttgccgatcaccctgtttggctggcacaccacctggggcgccttcagctttccgttcatcttcctggctaccgacctcaccgtgcgcctgctgggcaagggccctgcccggctggtcatcgcccgggtcatgatcccggcgttgatcgcctcctacgtggtctcggtgttgttccaggaagcggcgttccgtggcttctccgcgctgctcgagttcaacaccttcgtcgcacggatctccctggcaagcttcctcgcctatgtgctcgggcagatcctcgacatccaggtattcgaccgcctccgtcgttcccggcactggtggaccgcgccagtcgcctcgaccatcctcggcaacctgctggacaccttcaccttcttcttcgtggcgttctggtgcagcgacaatccgttcatggcgcagcactgggtggaaatcgccacggtggactacggagtgaagctgagcatcagccttctgctgttcgtgccgctctacggcatgctactcaacggcatcctgaagatgctgccggggcggccgcagagcaacgcttga

SEQ ID NO: 337873 - DNA, 273 bp, Pseudomonas aeruginosa
atgtcgaagcaagagcgttcagtcccatcctatgtcgaatacccatacgagcaagcgatcctctacgttcaccggaacgcctctgccaatgagttgctcgaatccgtacaggagcgcctgagggctctcctcggtctcctccaggccttggaaaggatcgaagtgcggacagggcagggcgttcccattcagcgcgtggcgcacatcctggtcacgctcggcggcgatgccctgacgctgctcacggccgcgcaccgggctaccacctcctga

SEQ ID NO: 337874 - DNA, 315 bp, Pseudomonas aeruginosa
atgatcgaaggtctggaaaagatcctggccaaaggcgtggacaatgcgctgctgcgcttcggcctgggcaagggctacctggacgcgggcgacgccgaacgcgcgacggaacacctccagcgttgcgtagagcaggacccgaagtattccgctggctggaaactgctgggcaaggcgcgccaggctgccggcgatctcgcgggcgcccggcaggcctgggagcaaggcctggcagctgccgcgacgcatggcgacaagcaggccgaaaaggaaatgacggtgttcctgcgcaagctcgacagggcgagaacctga

SEQ ID NO: 337875 - DNA, 1374 bp, Pseudomonas aeruginosa
atgaaaatcatcatcctaggtgccggccaggtcggcggcacactggccgagcacctggccagcgaagccaacgacatcaccgtggtcgacaccgacggcgaccgcctgcgcgacctcggcgaccgcctcgacatccgcacagtgcaaggcaaggcctcgttccccacggtgctgcgccaggccggcgccgacgacgccgacatgctggtggcggtgaccaatagcgacgagaccaacatggtcgcctgccaggtcgcctacaccctgttcaacaccccgaccaagatcgcccgcgtccgcgagccggcctacctgacccgtaccggcctgttcgacaacgaggcgatcccggtggacgtgctgatcagtccggagcaggtggtcaccaactacatcaagcgcctgatcgaacatcccggcgcgttgcaggtgatcgacttcgccgaaggcaaggcgcaactggtcgggatcaaggcctactacggcggccctctggtagggcaggagctgcgccagttgcgcgagcacatgccgaacgtggatacccgcgtcgccgcgatctaccgccgcaaccggccgatcattccccagggcgacacggtgatcgaggccgacgacgaagtcttcttcatcgccgccaaggcccatatccgcgcggtaatgggcgagatgcgcaggctcgacgacagctacaagcggatcatcatcgccggcggcggcaatgtcggcgagcgcctggccgaggccatcgagagccgctaccaggtgaagatcatcgagcgcagcccgctgcgctgccggcacctctcggataccctggacagcaccatcgtgctcaacggcagcgcttccgaccgcgacctgctgctggaggagaacatcggcgagaccgacgtgttcctcgccctgaccaacgacgacgaggccaacatcatgtcctcgctgctggccaagcggctcggcgcgagcaaggtgatgaccctgatcaacaacccggcctatgtcgacctggtgcaaggcggcgagatcgacatcgccatcagcccgcaactggcgaccatcggcaccctgttggcccacgttcgccgcggcgacatcgagagcgtacactcgctgcgccgcggcgcagccgaagcgatcgaggtggtggcccatggcgacgccaagtcgagcaaggtgatcggtcgctcgatcaacgagatcaagctgccgccgggcaccaccatcggcgcgctggtgcgcgacgaggaagtgctgatcgcccacggcgacacccacatcgagagcggcgaccacgtgctgctgttcctgatcgacaagaaatacatccgcgacgtcgaacgactgttccaggccggcctgacgttcttctga

SEQ ID NO: 337876 - DNA, 1305 bp, Pseudomonas aeruginosa
atgaacccgcgtctcgccgcctgccaggcgctggccgcggtgctcgccggacgcgcctcgctgtctggcgcgctgccgccgcaactggacaaggtcgccccgcgtgatcgcggcctgacccaggagctggccttcggcgcggcgcgctggcaaccgcgcctgcaggccctggccgcgcgcctgttgcagaagccgttcaaggccgccgacaccgatatccacgccctgctgctgatcggcctctaccagttgctctacacgcggattccgccgcacgccgcgatcggcgagaccgtcggctgcgccgacaagctgaagaagggctgggccaagggcgtgctcaacgccgtgctgcgccgcgcgcagcgcgaaggcgagacgctgctggccgaggtcgaccgcgatccctcggcgcgcctgggccatccgcgctggctgctgaaagcgctcaagcaggcctggccggagcaactcgacgcgctctgcgcggcgaacaacgcacacccgccgatgaccttgcgggtcaatcggcgccatggcgagcgcgatgcctacctggccgaactcgccgaagccgggatcgaggcccgcgcctgcgactacagccgcgacggcatccagctcgccgcgccgcgcgacgtacgcgaactaccgggcttcgcggagggccgcgtcagcgtccaggacgaagccgcgcaactggccgccgagctgctcgaaagcgcgcccggccagcgtgtcctcgacgcctgctgtgcgcctggcggcaagacctgccacctgctggaaacccagccgggactggccgaagtgatcgccgtcgacctcgaggagagccgcctggtaagggttcgggaaaacctccagcggctcggcctgcaagccagcctggtcgccgccgacgccagggccaccggggagtggtgggacggcaagccgttccagcgcatcctcctcgacgcgccgtgctcggccaccggggtgatccgccgccacccggacatcaagctggcgcgcaagccggaagacatcgccgccctggcgcacctgcaaggtgaattgctcgacgcactgtggcctaccctggaagtcggcggcgtgctgctctatgccacctgttcggtgatgccggcggaaaacagcgacagcatcgccgccttcctcgcccgtacgcccggcgcccgcgaactggaccttcccggcccctggggcatgaaacagccccacggccgccagttgttgccgcaggtggaaggccacgatggcttctactatgccaagctgatcaagatatccgcccgttga

SEQ ID NO: 337877 - DNA, 945 bp, Pseudomonas aeruginosa
atgagccaagcattgcgcatcgtcttcgccggaaccccggaattcgccgccgagcatctcaaggccctgctcgacaccccacatcggatcgtcgccgtctacacccagcccgaccggccggccggccgcgggcagaaactgatgcccagcgcggtgaagagcctggccctggagcatggcctaccggtcatgcagccgcagagcctccgcaatgccgaggcccaggcggagctggcggcgctgcgcgcggacctgatggtggtggtcgcctatggcctgatcctgccccaggcggtactcgatatcccgcgcctgggctgcatcaacagccacgcctcgctgctgccgcgctggcgcggcgccgcgccgatccagcgcgcggtggaagccggcgacgcggagagcggcgtcaccgtgatgcagatggaagccgggctcgacactggcccgatgctgctcaaggtgagcacgccgatttccgccgcggacaccggcggcagcctgcacgaccggctcgccgcgctcggcccgaaagcggtggtcgaagccatcgccggcctggccgccggcaccctgcatggcgaggtccaggacgacgccctggccacctacgcgcacaagctgaacaaggacgaggcacgcctcgactggagccgtccggccgtcgaactggagcgccaggtccgcgccttcaccccctggccggtctgccacaccagcctcgccgatgctccgctgaaagtcctcggcgccagcctggggcagggtagcggggcgcccggaaccatcctcgaggccagccgcgacggcctgctggtcgcctgcggcgaaggcgccctgcgcctcacccgcctgcaagtgccgggcggcaagccactggccttcgccgacctctacaacagccgtcgcgagcaattcgccgccggccaggtgctcggccaatga

SEQ ID NO: 337878 - DNA, 507 bp, Pseudomonas aeruginosa
atggccatcctgaacattctcgaattccccgatccgcgcctgcggaccatcgccaaaccggtggaggtggtcgacgacgcggtgcgccagctgatcgacgacatgttcgaaaccatgtacgaagccccgggcatcggcctcgccgcgacccaggtgaacgtgcacaagcgcatcgtggtcatggacctcagcgaagacaagtccgagccgagggtattcatcaaccccgagttcgaaccgctgaccgaggatatggaccagtaccaggaaggctgcctgtcggtacccggcttctacgagaacgtggaccgaccgcagaaggtccggatcaaggccctcgaccgcgacggcaaccccttcgaggaggtcgccgaaggcctgctggcggtatgcatccagcacgaatgcgaccacctcaacggcaagctgttcgtcgactacctgtccaccctcaagcgcgaccgcatccgcaagaagctggaaaagcagcatcgacagcaggcgtga

SEQ ID NO: 337879 - DNA, 1026 bp, Pseudomonas aeruginosa
atgaggaaatcactagtcgcccttctgctccttgccgcgagcggtctggcgcaggcccaggtcgacctcagggaagggcatccggaccgctacacggtggtcaggggcgataccctgtgggacatctcggggaaattcctccgccagccatggaagtggccggaactctggcacgccaacccgcagatccagaatccccacctgatctaccccggcgacaccctcagcctggtctacgtcgatggccagccgcgcctggtgctgaaccgtggcgaatcgcgcgggaccatcaagctgtcgccgaagatccgcagcacgccgatcgccgaggccatcccgaccatcccgctggacaagatcaacagcttcctgctggccaaccgcatcgtcgatgacgagaagaccttcaccagtgcgccgtacatcgtcgccggcaacgccgagcggatcgtcagcggcaccggcgaccgcatctacgcccgcggcaagttcgccgacggccagccggcctatggcatcttccgccagggcaaggtctacatcgatccgaagaccaaggaagtcctcggcatcaacgccgacgacatcggcggcggcgaggtggtagccaccgaaggcgacgtcgcgaccctggcgctgacccgcaccacccaggaagtgcgcctgggcgaccgcctgttccccaccgaggagcgtgcggtgaattccaccttcatgcccggcgagccgagccgcgaggtgaagggcgaaatcatcgacgtaccgcgcggcgtgacccagatcggccagttcgacgtggtcaccctgaaccgtggccagcgcgacgggctggccgagggcaacgtgctggcgatctacaaggtcggcgagacggtgcgcgaccgcgttaccggtgagtcggtgaagattcccgacgaacgcgccggcctgctgatggtgttccgtacctacaagaagctgagctacgccctggttctgatggccagcaggccgctctcggtaaccgacagggtgcagaatccctga

SEQ ID NO: 337880 - DNA, 1089 bp, Pseudomonas aeruginosa
atgaagaaccattctccagccgaactggaagcacggctgcgcctgcatggcctgcccgaactgggacccatgcgcttcctgcacttgatcgaggccttcggttcggcctcttccgcgcttgccgcgccagccggcgcctggcgcaccctgggagtgcctgccgaggccgctgccgcgcggcgcagcccggcggtgcgggaagcggcgggtgaagccctgcgctggctggaaggtccgcgcaggcacctgctgatgtgggacgacccgggatacccggcactgctcgccgaagtcgccgatgccccgccgctgctgtacgtcgaaggcaccccggagactctggaatggccgcaactggcgatggtcggcagccgccgcgccagccccgccgggctgggcaccgcccggagctttgcgcgcagcctggcgcagggcggcttcgccatcaccagcgggctggccctgggcatcgatggcgccgcccacgagggcgcgctggaggctggcggcgcgaccgtggcagtcctcggcaccggcctgcgcaggctctatccgcggtgccacgaggcgctggcgcggcgcatcgtcgagggtggcggcgcgctggtttcggagctgccgctggacagcccgccgctgccggcaaactttccccggcgcaaccgcatcatcagcggactctcgctgggtgtgctggtggtcgaggcaagtcccgccagcggctcgctgatcaccgcgcggctggcggcggaacaggggcgcgaggtgtacgccattccgggttccatccaccatcctggcgcacgtggctgccaccagctgattcgcgatggcgcgctgctggtggaaagcgtcgggcacgtgctcgaagcactgcgcggctgggcgcaggcggagccagcggaagcgccggcgcaacccctgccccaccctttgctggcgctgctgcgcgccgcgccctacaccagcgaaggcctggccgccgccagcggcatgacgctgcccgacgtgctggcgacgctcagcgaactggaactcgacggccgggtcgcctgcgaggccggcacctgggtgcatcgctccggctga

SEQ ID NO: 337881 - DNA, 558 bp, Pseudomonas aeruginosa
atgatcagcagctttcgtgcgcaatgcgccgcccgggtcgtccgcgagggcggcgtgatcgcctatcccaccgaggcggtatgggggctcggctgcgacccgtggaacgaggatgcggtgtatcgcctgctggcgctgaaggcgcggccggtggaaaagggcctgatcgtggtggcggcgaacatccaccagctcgacttccttctcgaagacctgccggacgtctggctggaccgcctggccggtacctggccggggccgaacacctggctggtgccgcaccaggagcgcctgccggagtgggtcaccggcgtccatgacagcgtcgccgtgcgggtcaccgaccaccccctggtacaggaactgtgccatctcaccggtccgctgatctccacctcggccaatccggccgggcgcccggcggcgcgcacgcggctgcgggtggagcaatacttccacgacgagctggacgctatcctcggcggcgcccttggcgggcgccgcaaccccagcctgatccgcgacctggtgaccgggcaggtcatccgcccggcctga

SEQ ID NO: 337882 - DNA, 978 bp, Pseudomonas aeruginosa
atggccaagcgcatccagttcgctgcctacggcggccccgaagtcctcgaataccgcgactaccaacccgccgagccgggcccccgggaagtccgcgtgcgtaatcgcgccatcggcctgaacttcatcgacacctactaccgtagcggcctctatccagcccccggcttcccttcggggctgggtagcgaaggggccggcgaggtcgaggcggtgggcagcgaagtgacccgtttcaaggtcggcgaccgcgtcgcctacgccaccggcccgctgggcgcctacagcgaactgcatgtgctggcggaggagaagctggtccacctgcccgacggcatcgacttcgaacaggccgccgcggtgatgctcaaggggctcaccacccaatacctgctgcgccagacctacgaactgcggggcggcgaaaccattctcttccatgccgccgcgggcggcgtgggcctgttcgcctgccaatgggccaaggcccttggagtgcaactgatcggcaccgtcagctcgccggaaaaggcgcgcctggccaggcagcacggtgcctgggagaccatcgactacagccacgagaacgtggcgcggcgggtgctcgaactgaccgacgggaagaagtgcccggtggtctacgactcggtgggcaaggatacctgggaaacctcgctggactgcgtggcgccgcgcggcttgctggtcagcttcggcaacgcctcggggccggtgaccggggtcaacctcggcatcctctcgcagaagggttcgctgtacgtgacccggccgaccctgggcagctacgccgataccccggaaaaactccaggcgatggccgacgagctgttcggcctgatcgagcgcggcaacatccgcatcgagatcaaccagcgcttcgccctggccgaagcagccagggcgcataccgaactggccgcacggcgaaccaccggctcgaccgtactgttgccctga

SEQ ID NO: 337883 - DNA, 918 bp, Pseudomonas aeruginosa
gtgaccgaccgtatcgccgctgtcaaaacctacctgctcgacctgcaagaccgcatctgcgccgccctcgaggcggaggacggcaaggcccgcttcgccgaggacgcctgggagcgtccggccggtggcggcggacggacgcgggtaatcggcgacggcgcattgatcgagaagggcggggtgaatttttcccacgtcttcggcgatagcctgccgccctcggccagcgcccatcggccggaactggccgggcgcggtttccaggcgctcggcgtgtcgctggtgatccatccggaaaacccccacgtgccgacttcccatgccaacgtgcgtttcttctgcgccgagaaggaaggcgaggagccggtctggtggttcggcggcggcttcgacctgaccccctactacgcccacgaggaagactgcgtgcattggcaccgggtcgctcgcgacgcctgcgcgccgttcggcgcggacgtctacccgcgctacaaggaatggtgcgaccgctacttccatctcaagcaccgcaacgagccgcgcggcatcggcggcctgttcttcgacgacctcaaccagtgggacttcgacacctgcttcgccttcatccgcgctatcggcgacgcctatatcgacgcctacctgccgatcgtccagcgccgcaagcacacgccgttcgatgaacggcagcgagagttccaggcctatcgtcgcggtcgctacgtggagttcaacctggtcttcgatcgtggcaccctgttcggcctgcagtccggcggccgtaccgaatcgatcctgatgtcgttgccgccgcaggtgcgctggggctatgactggaaacccgagccgggcagcgaggaagcgcgcctgaccgagtatttcctcgccgaccgcgattggctcgccggccagccctga

SEQ ID NO: 337884 - DNA, 825 bp, Pseudomonas aeruginosa
atggaccgctactgcgtattcggcaaccccatcggccacagcaagtcgccgctgatccaccgcctgttcgccgagcagaccggcgaggcgctggtctatgacgcgcagctggcgccgctggacgatttccccgggttcgcccggcgcttcttcgagcagggcaagggcgccaatgtcaccgtgccgttcaaggaagaggcctatcgtctggtggacgaattgagcgagcgggccacccgggccggggcggtgaacaccctgatccgcctggccgacggtcgcctgcgcggcgacaacaccgacggcgcgggcttgctgcgggacctgacggcgaacgccggggtcgagctgcgcggcaagcgggttctcctgctcggcgccggcggtgcggtgcgcggggtgctcgaacccttcctcggcgagtgcccggcggagttgctgatcgccaaccgcacggcgcggaaggccgtggacctggccgagcgattcgccgatctcggcgcggtgcgcggctgcggtttcgccgaggtcgaagggcctttcgacctggtcgtcaacggcacctcggccagtcttgccggcgacgtgccgccgctggcgcagagcgtgatcgagcccggccgtaccgtctgctacgacatgatgtatgccaaggaaccgaccgccttcaaccgctgggccgccgaacgcggtgcggcgcgtaccctggatggcctgggcatgctggtggagcaggccgccgaggcattcttcctctggcgtggcgtgcgtcctgcctcggcgccggtgttggagacgctgcgccggcaattggcaactgtctga

SEQ ID NO: 337885 - DNA, 987 bp, Pseudomonas aeruginosa
atgaaaaccttcgcccgcctggccgccggtctctgcatctgcgccatcgccagccaggccaacgcctggtcgcaaccgacccacaagaacatcgtcaaggacgccctggccttcatgaactcctcctacgccaccgaggagatgcgtcaggcctaccggttctacgtgagcgccgccggcagcgaggcgcaggccggggagatcctcggccaggcggccttcgacgtggacgacttcaaggacacccgtctcgggggctggtgggtcggctacgaacacgcgccgctgtggggcgcggcttcgggcatcgtcaactacacctcgtactggcacttcctcaacctggcccgcgacggcgattcccatggcaacccccacggcggctacgactaccgctaccacaaggtcgacggcggcatcgccgacgtcgactggtacgccatggtctatctctacaaccgcgagctgaagcgcgaggacttcgacaccaccgaggcgcactaccgccagggcacccgctcggactggcaggagcactacggcgacttccagaccgccgccttccagccgatcgacaacctcgccacctactggttcgagcagttccgcgccgcgccttcgctgcaaaccatcggctatgccctgcacgccaccggcgacgtggcccagccgcaccatgtgtggatcacctcggccaacggccattccagctgggaaggctgggtcgacgaccactacgccagcgagaagctcaacgacccggcggcggtggccaacctggtggggcgctacgatccgagcaagagcatccgcgacctgctcacccagaccggccaggtcgcctacgcgcgtcccgagccgctctacgacaccagctacgagacgcgcctgcgggtggcgaaggagctgattcccgagtccatcgccctgaccgtcaccgtactgaccaagggcgccaacagcttcgatgcacagactgctctctga

SEQ ID NO: 337886 - DNA, 1287 bp, Pseudomonas aeruginosa; identical to SEQ ID NO: 325411

SEQ ID NO: 337887 - DNA, 603 bp, Pseudomonas aeruginosa
gtgaagcgctggctcggcgttgccctcggctgcagcgggctggcgatcgccctggcctgcgccggcgtgttgctggcgcccgccgatatggccgcttcctcgtcttctccgccgccagccaggacggttgcggcgctgcccgcggtcgacgaccgtccgccgccgctggcgccggtacgatcgcaagcggtggcaccggcgtacgaggcggagccgccggcggcggaactggatcgcgagcaggcgatccagttcatgcagatgctgcgcgacgagggcgacccgcgcagcccgccgctcggcggcctgcaaccacgccagggcgcgacggctcaggagctggccgatccgaagcagtaccaggccttcgaggaacgacagacccgcgaactggtacaggcctacaccagcggcgtacagcagataccggaaatccgcgcgcggatcgaggcggccgaacagggtggcgagcgcagcgccgaggaaatcgacgaggctcgcgccgcccttggacagttggagatgatgcgcgacaagctgcagcgggaatcgccgcaactgctgcccggcgacagcgcaccgacatcgccggcggcgccctga

SEQ ID NO: 337888 - DNA, 924 bp, Pseudomonas aeruginosa
atgaaccggcttcccacctgcctgctggccgccaccctgttcctgggcagcgcctcgctatacgccgaagaccccgcctgtgcccgcgtcaggctggccgatccaggctggagcgatatcgcggtgaccaacgccaccgccgcgtttctcctggaaagcctcggctaccaggtgaagatcgataccctgtcggtgccgatcatctatggcggcctgcgcgacggccaggtggacgccttcctcggcggctggatgcccgcgcaccaggactatcacgacaagttcatcgccagcggccaggtcgaacgcctcgctcgcaacctcgatggcacccgcttcaccctggcggtgccgcgctacgtctgggacgccggcgtacaccgcttcgaagacctcgccgcgcaagggcaacgcttcaaccgcaagctgtacgggatcggctccggcgcgccggccaaccagtcgatccagaagatgatcgacgccaaccagttcggcctcggcgactggaagctggtggagtccagcgagcaggcgatgctcgccgaactcggccgggccgagaagcgccagcgctggctggtgttcctcggctggacgccgcacccgatgaacatccgccatgacctgcgctacctggaaggcggtgagcagtacttcggcgaccgcggccaggtctacaccctggcacgcaagggctacgccgcgcagtgcccgaacccggcgcggctgctggccaacctgcgcttcgacctggatatggagaaccgcctgatgagcgacgcgctggaaggcacggcgactccggcctcggcgacccgcgcctggctcaaggccaacccgcgggtgctcgaggcctggctgcaaggggtgaccagccgcgacggcggcgacgccctggccgcggttcgcggccagccatag

SEQ ID NO: 337889 - DNA, 1512 bp, Pseudomonas aeruginosa
atgaagacctcgccgaacatcctgttcatcatggccgaccagatggccgcgccgctgctgccgcttcacgatccgcgctcggtgctgcgcatgcctcacctctcgcgcctcgccgaacgggccgtggtgttcgactcggcgtactgcaacagcccgctctgcgcgccgtcgcgcttcaccctggtcagcggtcgcttgcctacccgcatcggcgcctgggacaacgccgccgacttcgccgccgatacccccacctacgcccactacctgcgcaacctcggctatcgcacggcgctgtcgggcaagatgcacttctgcggtcccgaccagttgcacggctacgaggaacgcctgaccagcgacatctatccggcggactatggctgggcggtgaactgggacgagccggaggtgcgcccgagctggtaccacaacatgtcctcggttttgcaggccggtccctgcgtgcgcaccaaccagctggacttcgacgaggaggtggtgttcaaggcccgccagtacctctacgaccatgttcgccagcacgccggccagccattctgcctgaccgtgtcgatgacccatccgcacgacccctacagcatcccggcgagctactggaatctctaccgcgacgaggacatcccgctgccgcgccagcgcttcgcccaggaggagcaggaccctcattcgcaacgcctgctgaaggtcatcgacctgtgggacaagccgttgcccgaggagcgcatccgcgccgcccggcgtgcctacttcggcgcctgcagctacgtcgacgcgcagatcggtgcgctgctggcgaccctgcaggaatgcgggctggccgacgacaccatcgtggtgttctccggcgaccatggcgacatgctcggcgagcgcggcctctggtacaagatgcactggttcgagatggccgcgcgcgtgccgctgctggtccatgcgccggcgcgcttcgcgccgcgccgcatcggcgcttcggtatccaccgtggacctgctgccgaccctggtggagctggccggcggccaggtcgatccacgcctgccgctggaaggccgctcgctgctgccgcacctgcgcgacggcagcgggcatgacgaggtgatcggcgaatacaccgccgagggcaccctcagcccgctgatgatgatccgccgcggcgactacaagttcatctactccgagcaggacccctgcctgctctacgacctgcgcaacgacccgcaggagcgcgagaacctcgccgccagtccggcccatcgcggaacgttcgaggcgttcctcgacgaggcccggcgacgctgggacatccccgcgatcacccgcgccgtactcgacagccagcgccgccgacgcctggtggccgccgcgctggcgcgagggcggctggccagctgggaccaccagccgtgggtcgacgccagccagcagtacatgcgcaaccatatcgacctggacgatctcgagcgccgcgcgcgcttcccgcaaccctga

SEQ ID NO: 337890 - DNA, 900 bp, Pseudomonas aeruginosa
atgccgctgtccctcgacctgctccgggtattcgagtccgccgcccgccagctcagcttcaccgctgccgccgaggagctggggaccacccagcctgcggtcagccagcagatcaaacgcctggagaaggagctggcgacccctctgttccagcgcgtccatcgaggcatcgtgctcaccgacgccggccagctcctgctccgccacgtggccgccggcctcgagacgatcgatgccggcatcgccgcgctgggcgcgcgccagcgccacgaggtgctccaggtggccaccgactacgccttcgccgcctactggctgatgccgcgccttccgcgcttccaccaggcccatccgcacctggacgtgagcctggtgaccagcgagcgcggcctggccggccagcgcggcgatatcgacgtggcgatcctgttcggcgacggtcgttccaagcacggcgaagcgcaccggctgtttcgcgaggaggtgttcccggtctgtagcccacgcctggtcgagggattgcagttgccgctggccaaggcgcacctggcgcgcctgccgatgctgcatctgaagccggcgcagcacgcccgctggttcgactggccggcgttgttcgaagcgttggccatcgatcggcagccgattccggcggtgctcagcttcgacaactacaccttgctgatccaggcggccatcgccggccagggcgtggccatcggctggcgccacctggtcgacggcctgctcgaacaggggctgctttgccggcccattggcgagagctgcctgtcgcgatacgggtactatgcggtattgccggagcgcaagcggcgccagcggctggtcgacggtttcgtcgactggctgcaggccgagttgcaggccggcggcgcttga

SEQ ID NO: 337891 - DNA, 378 bp, Pseudomonas aeruginosa
atgaacgagtattccaccccccgcatccagggcttccatgctcacgtctatttcgatgcgcagagcatcgagcgagcccgggccctttgcgaagaggcggcgcggcgctttccgctgaagatggggcgggtccatgagcggccggtagggccgcatccggactggagctgccagctggcattcgctcccgaggtgttcggcgagctggtgccctggctggccatccatcggcaggacctggtggtgttcatccacccggtcaccggcaacgatctgctcgaccatcgcgaccgagccatctggatgggagccattcgcccgctggacctgtcgatcctggacgaaggcccgcaacgctatgacttcgccgtgccttga

SEQ ID NO: 337892 - DNA, 366 bp, Pseudomonas aeruginosa
atgcgaacgttcgacctgaccgccgccctgggcgaccgcgccaaccaaccggagatcagccgcctgctcgtcgcgcagctgatgaccagcaacaacgaagacacccgcaagctgcgacgcgcccaggagcgcgagcagacccaggaactcaacgagctggcgcaccgcctggcgggcatggcctcgctgatccacgcccacgccgtggaacgcgcctgccaccaactggagatcgcctgcggcgaaagctccgtgcgcaagctcgccgatgccgtcgacgacctggtgacggcactgggcgagctgcaatgcgaactgcacgactggatgacgatgaccgcgcctcaaggcacggcgaagtcatag

SEQ ID NO: 337893 - DNA, 624 bp, Pseudomonas aeruginosa; identical to SEQ ID NO: 319179

SEQ ID NO: 337894 - DNA, 807 bp, Pseudomonas aeruginosa
atgagccgcctgcagacccgcttcgcccagctcaagcaggaaaaccgcgccgccctggtgaccttcgtcaccgccggcgacccggactacgcgtcttccctggaaatcctcaaaggcctgccggcggccggagccgacgtgatcgaactgggcatgccgttcaccgatccgatggcggacggcccggccatccagttggccaacatccgcgccctcgaaggcggccagaccctggccaggacgttgcagatggtccgcgaattccgcagcggcgacagtgagacgcccctggtgctgatgggctacttcaacccgatccaccactacggcgtcgaacgcttcatcgccgaggcgaaggaggtgggagtggacggcctgatcgtggtcgacctgccgccggagcacaacgaagacctctgccacccggcccaggccgccggcctcgacttcatccgcctgaccaccccgaccactggcgaccagcgcctgccgacggtgctcgaaggcagttccgggttcgtctactacgtgtcggtggccggcgtcaccggcgccaacgcggcgaccctggagcacgtcgaggaagcagtggcgcgcctgcgccggcataccgacctgccgatcggtatcggcttcggcatccgcagcgccgaacacgccgccgcggtcgcgcggttggccgacggcgtggtggtcggctcggcgctgatcgaccggatcgccaaggcccgcgacaatgcccaggcggtcaaggatgtcctcgccctgtgcggcgagctggccgaaggcgtgcgcaacgcacgctga

SEQ ID NO: 337895 - DNA, 1209 bp, Pseudomonas aeruginosa
atgacttcctatcgcaacggccccgacgccaagggcctgttcggccgcttcggcggccagtacgtcgccgagaccctgatgccgctgatcctcgacctcgcccgcgagtacgagaaggccaaggacgacccggcgttccaggaggaactggcctacttccagcgcgactacgtcggtcgaccgagcccgctgtacttcgccgagcgcctgaccgagcactgcggcggggcgaagatctacctcaagcgcgaggagctgaaccataccggcgcgcacaagatcaacaactgcatcggccagatcctcctggcccggcgcatgggcaagaaacgcatcatcgccgagaccggcgccggcatgcacggcgtggccaccgccaccgtcgccgcgcgcttcggcctgcagtgcgtgatctacatgggcactaccgacatcgaccggcagcaggccaacgtcttccgcatgaagctgctgggcgccgaggtgatcccggtgaccgcgggcaccggtaccctgaaggacgccatgaacgaggcgctgcgcgactgggtgaccaacgtcgacagcaccttctacctgatcggcacggtcgccggcccgcatccgtacccggcgatggtccgcgatttccaggcggtgatcggcaaggaaacccgcgagcaactggccgagaaggaagggcgcctgcccgattcgctggtcgcctgcatcggcggcggctccaacgccatgggcctgttccacccgttcctcgacgacgccggggtgcagatcgtcggcgtggaagccgccggccacggcatcgacaccggcaagcacgcggccagcctgaacggcggggttcccggcgtgctgcacggcaaccgcaccttcctgctgcaggacgcggatggccagatcatcgacgcacactccatctccgccggcctcgactatcccggcatcggcccggaacacgcctggctgcacgacaccggccgcgtcgagtacacctcgatcaccgacgacgaagccctggaggccttccacacctgctgccgcctcgaaggcatcatcccggcgctggaaagctcccatgccctggccgaggtcttcaagcgtgcgcccagcctgcccaaggagcacatcatggtggtgaacctgtccggtcgcggcgacaaggacatgcagaccgtcatgcaccacatgcaacaggagtcgaaagcatga

SEQ ID NO: 337896 - DNA, 888 bp, Pseudomonas aeruginosa
atgagccgcgacctcccttccctgaatgccctgcgcgctttcgaagccgctgcccggttgcacagcatcagcctggcggccgaggaactgcacgttacccatggcgccgtgagccggcaggtgcggttgctcgaggacgatctcggggtggccctgttcggcaaggatgggcgcggcgtaaaactcaccgattccggcgttcgcctgcgtgacgcctgcggcgatgcgttcgagcgactgcgtggcgtctgtgccgagctgcgccggcagaccgccgaggccccgttcgtcctcggcgtacccggcagcctgctggcgcgctggttcatcccgcgactggaccagctcaaccgtgccctccccgacctgcgcctgcaactgtccaccagcgagggcgagttcgatccgcgtcgtcccggcctggacgccatgctctggttcgccgagccgccctggccggcggacatgcaggtcttcgaactggcgcccgagcgcatgggcccggtggtcagcccgcgcctggcgcaggaaaccggcctggcccaggcgcccgccgcgcggctgttgcaggagccgctgctgcataccgcctcgcgaccccaggcctggccggcctgggccgcgagccaggggctggcggcggaggcgctgcgctatggccaggggttcgagcatctctactacctgctggaagcggcggtggcgggcctcggcgtggccatcgccccggaggcgctggtccgcgacgatctcgccgcgggccgcctggcggcgccctggggcttcatcgagaccgacgcgcgcctggccctgtgggtaccggcgcgcctgcacgatccgcgtgccgggcgcctggcgcaatggttgcgggagcagttggcaggctga

SEQ ID NO: 337897 - DNA, 216 bp, Pseudomonas aeruginosa; identical to SEQ ID NO: 319175

SEQ ID NO: 337898 - DNA, 222 bp, Pseudomonas aeruginosa; identical to SEQ ID NO: 319174

SEQ ID NO: 337899 - DNA, 993 bp, Pseudomonas aeruginosa
atgaatgatcttttccgtaaatccgccttgccgttgatcctgctttccctcgcgggctgcgccacgcagggcaaaccgccgccgaccatctcgctcgatgagccagtgcaggcccagccgctgccggagccgcccgcgccggtggaagtggtcaaggtgcccgagccgctggcgctgccggcgcagttgaagccattgcccgaggcagaggacgccaaggccgcgccggaaccggccgacgagaaggtgcgcgtctcgcgggccaatacggaggcgcgcgtcgcgcccacgcgcgagggctacgtcaatgcgattcaggtctggcccttcactgacggtgcgctgtatcaggtctatgcggccgtgggccgcgtgaccgtgatcgcgctccagccgggcgaggaactggtgacggtggccgccggcgataccgtgcgctggatcgtgggtgatacgtccagcggtagcggcgccgacctgcgcgtgaacgtgctggtcaagccaatccgttcggccctaaagaccaatctcgtcatcaccaccagccgcaggacgtaccttctggagctggcttctacggaaaagacgtggatggcgtcggtgtcctgggagtacccgcgcgaccggatgctggctttgcagcgccaagcgcaggcggccagcgccgccgcgccggtggactccggcttgtcgctggaaaacctgcgcttccgctacgcggtcagcggtagcaacccgccgtggaagccgctgcgcgcgttcgacgacgggcagaaggtctatatccagttccccgccggcatcgcgcaaggcgagctgccgccgctgttcgtgatcgggccggaaggcgacgggcaactggtcaactatcgcttccgctcgccgtactacatcgtggatcggctgttcggcgccgccgaactccgcctgggcggagacaagagcgacgtggtgcgaattgaacgcacggacggcgttgcgcggaggaactga

SEQ ID NO: 337900 - DNA, 600 bp, Pseudomonas aeruginosa
atgacgcttccatccgccgttgccggtgcagcgggcattccgccgcgtcctcactcgcgcctgcgcgctcgcatcgtgctggcgggcctgtccgcctgcggcctcgctgcgctggcctgggcgtccttcgtgcatccactgccgcgcctgatctacaacccgtccgacagcgtggcggtcggctggtatcgcgtcgatccgctgagcaacggcaccggctcgctgccacgtcctttgtccgtgggcagcatcgtcctgaccacgctgccgccagatgccgctgcgctggccgcgcagcgcggctacctgccggcgcgcgtgccgctgctcaagcgtgtgggcgccgtcgcgccgcaggaagtgtgcatcgcgggcggcatcgtccgcatcgacggcgtgccttcggccgccgtgctgcctgccgaccgctggggccggccgctgccatcctggcagcaatgccgccgccttgaacccggcgaactgttcttgctcagtgtgaccaacccggcatcgttcgacagccggtatttcgggccggtcagcgcatccgccgtgatcggcgtcgcgcatccggtctggctggagtcccgcccatga

SEQ ID NO: 337901 - DNA, 534 bp, Pseudomonas aeruginosa
atgaccgcatccgcttcgcctgccgctggcgcggctacggctgcgctcgcagcaccttccggccagcctgccagcgcgccgttgacgcgcgtggcactggcctacaccgaaccacgcttcaagctctacctgcgcttcggcgaacccgcgcgtacgcaccagctcgaccgctggcggcgctgcgcggtgttccagccgggcgccatgttctgccgcatccgctggcaggccaacgactacggcacgatccgctggcagctcatggtgatgcaggcttgcacgccgttcgatgcggcgcagcgcattcccggcgtgcagccgggcgcacgcctgctgctgcacgccgagggcgagaatcaggtgcgcgccgtgctggagcgcatcgacgccatcgaggcgctgggcatcgcgcctatcggtgcctcgcccgtgtactggcgcacgctcgccaaccggctcgctgcacgcctgccgctgcccgaatacaccgccgagcggcacgccgcctggctgaccgggagggcgctgccatga

SEQ ID NO: 337902 - DNA, 294 bp, Pseudomonas aeruginosa
gtgctgcgcctgggtccctggcgacggctgctccggctggtcctgccgggtgccgccccgtcggtgttcgccggcctgcgcctggcgctgatctacgcctggctgggaaccatcggcgccgagtacttcatgccctccgacggcggcatcggcagcctgatgatcggcgcccagcaactgttccgcatggacctgatcggtgccggcatgctcctggtcggcctcaccggcgccctgctcaatgctctcggccaacgcatcgaagcgcgcgccacgcgctggagacacgcatga

SEQ ID NO: 337903 - DNA, 1062 bp, Pseudomonas aeruginosa
atgaaagcgcttacgtcttccctgctcggtctgttcgccgtgcctgtcctcgccggcctgctcggtgcctacgtgccgctggcgagcgccgctccgccgaaggaaatccgcatcgcggtgccggacgtcagcgccggcagctcgcactcgggtggcggcgtggtcgacgtgctctacacccggcagttgctggagaaggagttcgccaacgacggcatcgcggtgaaatggagcttcttcaagggcgccggtccggtggtcaacgaagcgttcgccaatggccaggtggacttcgcctacctcggcgacctggcggcgatcatcggcaagtccggaggcctggacagccgtctgctggccgctaccgcgcgaggggtcaaccactatctcggcgtgcagccggggtccgggatcaagaccctggaggatctcaagggcaagcgcgtaggcatctttcgtggcaccgccagccagttgtcgttcgacaatgccctggccagcgtcggtctcagcgagaaggacctgaaggtgatcaacctcgacttcagcgccgccctgtccgccctcgcagccaggcagatcgatgccacctggggcctggccgggctgttcgccctgcgcgaccgcgggctcgcggaaattccgctgagcacccgcgacctgaacggcgccggcaccctgcaggcgctgctggtcggctccggagccttcgtcgatgcccatccggacatcaccgagcggctgctcaaggtgcagttgcaggcccaggactggctggcccgcgaggagaaccgcgacgcctacatcgaactggtgtcgaagcaggccagctacccggtggtgatcctgcagagcgagtaccgtggccgcaagctgggcgacgccctgtcgccgcgcctagacgccgatttccttggccggctggatgcttcgatccaggcggccaagcgtttcggcctgatccgtcgcgaattcagcgccgagcagtgggccgcgccggaactgctggaggcggccggcaagctggcgaaggccaaggccgtggcgcaggcggcggagtga

SEQ ID NO: 337904 - DNA, 816 bp, Pseudomonas aeruginosa
atgaatctcgatagcaaattgttcgacgcgacactcgatctcgaacgcgtgaaagtttcggtgagaacgctggtgaagttatcccgccaggaacaatcggcgatcatccggaccctcaacgagtttggtttcctgctgttgcgcagcgaacagggcgaagacaggcaggaacttctcgcgctcaaggagttgttcggccgcgccgccccccacccgcgcgccgacgccgacggcatcgtgccgatcagcaatgcgcggtatgtcagcggctacctcggctccacgccgctggagcacaagctgcacaccgacggcgctttcctcgacaccccggagcaattgtgcagcctgcaatgcgtgcgcaacgcccgggagggcggggagactctgctggccagcgccggactggccttcgagcgcctgcgccggcgcatgccgaccaagcatctcggcctgctgcgcggcgacgccctgaccatcgtgcgcaagcaccagagcagcacccagccggtgttccgcctgaacggcgaggcgctgggcatcaagttccggcagaacgacggggcggccgaggtggtcgagcaccctgtggcggtggaggccttcgccgaactggtggcggcgctcgaggatccggcctgccaactgcggatcaagctcgagccgggggaaatcctggtgctcgacaacaccgcggtgttgcacgggcgcactgccttctgcgccaacgaactgcgcgagatgcgccggctcaacttcgacggccacggccgcctgcgagcggagctggaactgggcttcaaggtggggttgtga

SEQ ID NO: 337905 - DNA, 1359 bp, Pseudomonas aeruginosa
atgcaaaacctcagacgcgctgtattcgccggcctggtcgccggcacgctttccgaaggggcggccgcgacggccggggatgggggcttcgtcgaggacagcgaactgcagttcctcgctcgcacctactacttcaaccgcgactaccgcgacagcccgaacaacgccgggcgcaaccgcttcaagcccaggagcgagcgcaacggctaccgcgaggaagccacccagggcctgcgcctccagttcgcctccggctacacgccgggcagcctcggcttcggcctcgacgcccatgccatgctcggcctgcaactggacagcggcggcggccgcaccggcaccggcaacctgccggtcggcgccgacggccatcccgaccatcgctacggcaaggtcggtggcgccctcaggctacgccacggcgaaacccgcctgaagtacggccagaccaccaccagcgcgccggtgttcgccgccagcagcaaccgcacgctgtccggcatggcctacggcctgctgctggaggatcgctcgttcgacgggctgctgctcgagggcgggcgcttcaccgccgcctccggccccggcgaatccaaggtccgtggcgacatcagcaccgtctacggacgcctcggcgcctatccggtgcgcctcgacgcggtcggcttcctcggcggtcaatggcaggccacggagcggctgcaactgtcgctctacgcctcgcgcttcgacgacatctggcagcaggcctatttcggcgccagccatcgccagccgctgggcggggagcgcgcgctgcgggtcgacctcgacgcctaccgcacccgcgacagcggccagagccgcttcggccgcatcgacaccctggccagctccctggccctgggctacgaacagggaccgcagcgcatcaccctggcctaccagcgtgtccatggcgagcagccgttcgactacatggccttcggcgacgggcgctccagcgcgtccatggtactggccaactcggtgggctactccgacttcaacggaccgggcgagcgttcctggcaattacgctatgacctggacctcggcgcgctcggcctgcctgggctcagcctgcatgcgctgcatgcccgcggccgtgccggggccagcgccagcagtgccgccgagagcatctacgccggactctacgggcgtgacgggcggcaccgggaaagcgacctcggcttcgcctatcgggtcaaggcgggccccctcgccggcctcgcgctgcgcgcctcgcaggcctggcaccggggcaacgcgagctatctcgacggcgacatcgacgaaacccggctggtcgtcgattactcccgctcgatctggtga

SEQ ID NO: 337906 - DNA, 147 bp, Pseudomonas aeruginosa
atgcgcctcaagtccgtcaagctcacccactttcgcagctaccgcgccaccaccgtcattcccatcaacgaggccatgaccggcatcgtcggtcgcaatgacgatggccaatcgaccagccttgagaggtcgagctcgcttgaatag

SEQ ID NO: 337907 - DNA, 1194 bp, Pseudomonas aeruginosa
gtgagttggccgcgagtaaagctcagtgatgtagcgaccattaatccgaggcctccgagggaggttgatgagtctcaacaggtgacgtttgtcgccatggcctcggcatcagaagacggacacctgctggcctcagaaactcgggttctttctgaaaccaaaaagggtttcacctacttcgataggaacgacgtgcttttggcaaaaatcacgccgtgctttgaaaacggtaagtgtctgcgtccgggacagattcctaccgaaatagggtttggctccacagaatttcatgtcattcgccctgatggagaaaggctagatggcctttatctgttctatctcgtatggagcgagcagttccgatttcttggcgaaaagtctatgtccggcgctgctggccagaaacgtgttgggagtgactttttgagggggtttgaaatccccctcccacccctgcccgaacaaaagcgcatcgccgccatcctcgacaaggccgacgccatccgccgcaaacgccagcaagccatccagctcgccgacgacttcctccgcgccgtgtttctggacatgttcggcgagccggtgaccaatcctaaaggttggagtgtgagagaagttggagacctctgtgacgttcaaggtggactgcaagtgagcaagaagcgcgcaggtctaccggttacagcgccatatttacgtgttgcgaacgtgcttagaaatagacttgacttgactgaaattaaagaaatcgagttattggaatcggagtatcgtcgagtcaaactaattccagacgatatcttaattgttgaagggcatggaaatgctaatgaaatagggcgatgtgcaatttggaaaggtgagattgatgaggttgttcatcagaatcatctgatacgtgttcgggttaagtctaaagatgtaaatcctcgattcctaagtgactatatcaattcatctggtgggcgggctcagatgatgagagcaagtaattccacttcagggttgaataccatcagtactggagtagtaagatccacgggggttattgttccccctaaggatttgcaggataagtatgctttgattgtggaaaaaacaaacagcaatctgcttcgacagaattttgctcaagtgctgattggtgaaagtgtcttttctctaagccaaaaagccttctctggccagctgtag

SEQ ID NO: 337908 - DNA, 315 bp, Pseudomonas aeruginosa
gtgcatgtcggcttcgatgcgttggatacggttgcgcatgtgctcacatgcttcgaagtgctcgatcaaagccttatcaaggtcgtacagcctgaagatgttcccaatcctatctggctgacgagtgcatccgcttcacctaaccagcagaagtttgcagacgccctgctggccgagcatccgttcgtactcatcccatccgccgtcactcgccactcttggaacttgcttgtcagtcgcgagctggccgagggcaggtatcgaatgatcagccaagagcgcttcggcctggatacgcgtctcgttaaggtctga

SEQ ID NO: 337909 - DNA, 3261 bp, Pseudomonas aeruginosa; identical to SEQ ID NO: 334693

SEQ ID NO: 337910 - DNA, 189 bp, Pseudomonas aeruginosa
atgaggcgcggtctctggatgatcttccgctggcccctgctgctggccctgctcggcctcttcgggctgctctcggcgctgctcggcgacggcctctacgacctgctctcctggctcgccctgggcactccgctggtgctggtcggctgggtctggctgcgcctgccgcgaacccgaaggaatccctga

SEQ ID NO: 337911 - DNA, 951 bp, Pseudomonas aeruginosa
atgaattccgcgggcgaaggccggattccctcgccgatcctcgacgaggccgccgagtggctggtgcgcctgcaggacagcggctgcaccgacgacacgcgccaggcgtgcgcccagtggcggcagcgcagcccacagcacgcccatgcctgggagcgcgccgagcgcctgctgcaatgcctcggccgactgccgccggcgctggccctgccgaccctcggccgcgagcgcgggctggaccggcggcgcgcgatcaagcacctcgccctggtcctcggcggcgcctcgctggggctcgccacctggcaggccgagccgttgcgcgactggctggccgaccagcgcaccggcgtcggcgaacagcgccgcttgaccctgcccgacggcagcctgctgaccctgaacaccgacagcgccgtggacctcgccttcgacgccagccagcggctggtacgcctgctgcgcggcgagatcttcgtcgatagccgcgccgacccgcgtccgttccgcgtcgccaccgccgaagcgcggctgcatgccggtgccgcccgcttcaacgtacgccaggagatggccgcgacccgggtcgcggtactcgccgggcgggtcgaactgagcccgctccacggacgcgggcgctggctggaaagcggcgagtcggtgcgcctgggcgccgacggcgaagcgcgccggctggccttcgacggcctgccggacgcctggacccgcggcatgctgatggccgaccggatgccgctggccgaggtgctcgccgaactcgcccgctaccgtcgcggcgtactgcgctgcgacccgcaactggccaggctggcggtgtcgggcgcctatccgctgctggacctgcggcgcacgctgggcatgctgcaggccacctatccgctgaaggtgcgcggggtgaccgactactggatcagcctggtgccggcgtga

SEQ ID NO: 337912 - DNA, 507 bp, Pseudomonas aeruginosa
atgccgccggccgacgcctccctgcacgacgctgtgagccatctctaccaggaccaccatggctggctgcaaggctggttgcggcgacgcctgggctgcgcggaaaacgccgccgacctggcccaggacaccttcgcccgcctgctcgcctcgcgccgggtactggatgcgcgcgaaccgcgcgcctacctgaccaccgtcgccaaggggctgatgatcaactggttccagcgccagtcgctggagcgcgcctacctcgatgccctggccaacctcccggaagacctcgcgccgccgccggaacagcggttgatggtgctggaaaccctgcatgaagtagacgccctgctcggcagcctgccggacagggtccgccaggcgtttctcctggcgcagatcgaaggcctgaagtacgaagccatcgccgagcgcctgggcgtgtccctgggctcggtcaagcgctacatgcagcaggccttccgccagtgcctggagctgatggaatga

SEQ ID NO: 337913 - DNA, 1227 bp, Pseudomonas aeruginosa
atgaacggaagcagatccacctttctctaccttctcgccgccgccggcctggcgctgacacccgcggcccaggccgaccggggcaacgacgtggtcgcccggctcaaccagttgtacaacgacacccgccaggattgcggcggaccgtcgaagccggcattcctctgttccggcgtgctgttccgcgccacctggccttcgaccgactacatgttctacagcatcagtccgaagagccagaaaagcggcggcgtctccgcctcctacctgcgcaaggacgccaagtaccgcaagctcgcctatggcctgaagagtggcttcatcttcgacaccatcttcggtaatccgaaggaccaccaggactatgcggtgctctgttccttccccatcgacgccgccaccgacgaccgcgcccagcagggttgcaccgattcgcggcgcacgccgaacagcgtcgagaagtcctgccaggacatcaacgtcagcaccgccgagcagtgggcggcgaactaccggcagaaccgcggcgaccattcgcggcagtgctccttcgacgtccgcgacgagcgcaataccgccgccggcccggccttctaccagagcatccgggcgatggcgcagatcgccgacgaatccttcaccacccagaacgaactgcgcctggccaagtgggaggaaaacccgccgaagtcgccgtcgatcctcgccgcgttctacaccgaggacgccggcctggagggcgctcggctcaaccagatccagtggtaccagtcggtccaggcattcctcccgatcatcaacatgcgactgccgcagacccgccagcaggacgcgcagttcgcctacgacgggcgtaagcaggcgatctacccgaccagcgagaagaatgcctgcgagcgctatgtggaaagcgccacctgggtggagcgcgacgatccgggcttcaggaagaagatcatgaccctggaagtggtaccgaccgattgcgggcgcaagatccaggacaaccagaccaacaatttcttcaacgagctggtggtcgaccactacctggacagcgaatggaaggacaacccggacaaccgcgacagcaatatcggcagcatgcgccgacaactggtctgccacttcaacgtcgcccgcaacaagccagagtggaacctggaaccctcgcggccgtacacctccaacgaggactccatcgccaagggctgcaataacacctga

SEQ ID NO: 337914 - DNA, 192 bp, Pseudomonas aeruginosa
atgcgtaacggaatcgacgctgtatccgccccgctacccaccctgttcgtatctccgccggcggtcttcaccgcctccctcgagcgacttcccccacgcgctcggcaggcccccgccgcccagcgcccgccggggtcgcccggcattcccggcagcgcccggttgcagactggcgccaccacgtcccgctga

SEQ ID NO: 337915 - DNA, 1233 bp, Pseudomonas aeruginosa
atgggtatgcgagaagcgaacgacaacgcatcgggcctcaaggcccatcccctgggctcgctcgagacgatcgcgatcatcatcggcaccaacatcggcgccggcgtgctgagcatggcctacgccgcccgcaaggtcggctacgtgccgttgctggtatgcctggccctgacctgcctcttctgcatcgtcaccatgctctacgtgaccgaagcctgcctgagaacccgcggcaacaaccagctcagcggcctctcccggcgttacctgggcccgctcggcggctggctgatcttcatcgcggtggcggccaacagctacggggccctggtcgcctacatgaccggcagcggcaacatcatgctcgagttcttcggccagtacggcctcacgcgccaggtcggcagcctgatcttcttcgtcccctcggcgctggtgctctacctgggcctgaaggcgctcggcgtgggcgagaagctgatcagcgccggcatggtggccatcgtctgcatcctcatcggcgctaccctgatgcacgacgacgcccgtctcgcccacctttggcagagccagtggcaatacgtggttccagtgttcaacctggcggtcttcgtgttcggcgcgcagttcctggttccggagctggtgcgcggcaacctggcaacccccgcgcgcgtgccgcgcctgatcgtggtcggcatgctgctgaccttcctgctggtggcggccattcctgcctcggtcatcgccctggtcggccccggcaacctcagcgaggtggcgaccttgagctggggacgctccctcggccaatgggcctactacgtggcgaacaccttcgccttgctggcgatgctgacctcctactggggactcggcgggtgcctgttcaccaatatcttcgaccacttccgcctgggcagcgaaaccaaccggcgcaaacgcctggcggtgctcgccgcagtctcggtcccgccgttcctgctggcctatgcggggctcggcggcttcgtgaacgcgctgtacttcgccggtaccttcggcggcgtactgatgggcatcatccccatcctcctgctcaacgcggcgcggcgccacggcgaccaactgccggcattcagctgcggctggtatgcccatccgctgatacaggggctgatcgtcctggtgttcgcctccagcggggtctacgcgatcgcctcggcactggggatgctgcccgccagttggtga

SEQ ID NO: 337916 - DNA, 1401 bp, Pseudomonas aeruginosa
atgaaactcacgctcacccctcccctgacccccagccactggatgcgctcgaccgacctggccgacgccgcctgcgcccccctcgtcggcacccactcggcggacgtggcgatagtcggcggcggtttcgtcgggctctggaccgccatcaccctcaagcaactggagccggacgcacgggtcctgctgctggagcaggacgtctgcggcggcggcgcttccggcaggaacggtggtttcgtgatgtcctggtggccgaagatcggcaccttgctgggcttctgcagcgaggcgcaggcgcgcttccttggcgaaagcgcggagcgggcgatccaggaactcggggagttctgcgcgcggcatgacatcgatgcgcacttccagcagaagggctggctgtggaccgccaccacggcgcaccacctcgacgcctggaacgataccctcgccgcctgcgaacggctcggcgtcagtcccttcgaacgcctcgacgccagcgaagtggcacgccggaccggttcgccggtgcatctcgccggggtcttcgagcgcagcaatgccaccgtgcaaccagccttgctggtgcaaggcatgcgccgcgtagcgctggtcctcggcgtggaaatccacgagcgctgtggcgtcagccagatcgttcccggccagccggcacagctgctgagcgccggggcccgggtccaggccaaggcggtggttctcgcgaccaacgcctggtcggccgccctgcccaggctctccaggctgatcgtgccggtgaacagttccatcgcggttaccgaggcgataccgcaacggctggagcgaatcggctggaccggcggggaagccatcaccgattcccaactgatggtggactactaccgcaccacccgcgacgggcgcatcgccttcggcaagggcaccggcgccatcagctacggctcgcgcatcggccgggtattcgacgtcgaccgggagagcctggccctgaccgaggccgacttccgccgcacctatccctcgctaggcgacgtcccgctggtcgacggctggtccggccccatcgaccgtacctacgacagcctgccggtcttcggccacctgcacgagaacatccactacggcatcggctggagcggcaacggcgtgggaccgagccgcctgggcgggcggatcctcgccagcctcgccctcggccgcgacgacccgtggagccgttgtccgctggtagaacgccgctgccggagcttcccccccgagccgctgcgctacctgggtggctccctggtgcgcaacgccgtcctgcgcaaggaacgcgcggaactcgccggtaccgcgccctcggccaccgaccgctttctcgcgcgcttcgcccccgccggccttgaagacaaatcctga

SEQ ID NO: 337917 - DNA, 699 bp, Pseudomonas aeruginosa
atgagcgccacgctcagggtcgggggcctggtgcccctgaccaccctcgactaccccggcctgctcgcctgcgtgctgttctgccagggctgcgcctggcgctgccgctactgccacaacccggaactgatcgcgccgcgcggcgcggaggaaatcccctggccacgcctgctcgacttcctccgccgacgccagggcctgttgcaggcggtggtcttcagcggcggcgaggcgaccctgcaggcggccctcggcgacgccatgcgcacggtccgcgaactgggcttccgcgtcggcctgcacagcgccggcatccacccccgcgccttcgcccgggtgctggcgcagagcgactgggtgggcttcgacgtcaaggcgccggccgaggacgtcgccgccattaccggcgtggacggcagcggcgcggccaactggcgcagcctggaatgcctgctggacagcggcgtggcctacgaatgccggaccacggtgcactggggcttgttcgatagcgaacgcctctggcgcctggcgacgcgcctgcgcgcgatgggcgtggagcgcttcgccgtacaactggcgcgcccggcccgccagctcgatccgcagcttctcgcgaagcccgcgccgcagggcgctgcgcagctatggcgagaactggaagagctgtttcccgccttcgaactgcgcgacgcctga

SEQ ID NO: 337918 - DNA, 147 bp, Pseudomonas aeruginosa; identical to SEQ ID NO: 321235

SEQ ID NO: 337919 - DNA, 2028 bp, Pseudomonas aeruginosa
atgacccagccccggaaggctacctggccggccaccctgctcaagcgcaacggacgtgaagtccccttcgatcccggcaagatcgaacgcgccatcgccgccgccggccaggccaccggcgagttcgacccgcagcaggcgcaggcgctcgccgaacgcgtggtggaacgcctgccggaacgcgcctgcctggatatcgaacgggtccaggacctggtcgaacgggtgctgatggaggccggccactaccccacggcgcgcgcctacgtggtctaccgcgaacgccacggccggctgcgccgcgagcgcaagaccctggtggacgtcgccgcgtcgatgaacgaatacctttcccgcgaggattggcgggtgcgcgccaacgccaaccagggctattccctcggcgggctgatcctcaacgtatccggcaaggtcaccgcgaactactggctggacgaggtctacgatgccgacatcgccgccgcccaccgcgacgccgacctgcatatccacgacctcgacatgctcgccggctattgcgctggctggtcgctgcgcaccttgctgaacgaaggcctgaacggcgtgccggggcgggtcgaggccggtccgccgaagcacctgggcagcgccctggggcagatggtcaacttcctcggcaccctgcagaacgaatgggccggggcccaggccttcagttccttcgatacctacctggcgccctacgtgcgcaaggaccgcctcgactacgccagcgtgcgccaggccctccaggagttcatctacaacctcaacgtgccgtcgcgctggggcacccagacgcccttcaccaacctgaccttcgactgggtctgcccggacgacctgcgcgaccaggtgccgcgcatcggcggcgaggagatgcccttcgcctacggcgagctgcaggccgagatggacctgatcaaccgcgcctacatcgaggtgatgcaggccggcgacgcccatggccgggtgttcaccttcccgatcccgacctacaacatcacccacgacttcccctgggacagcgacaacgccacgcgcctgttcgagatgaccgcgcgctacggcctgccctacttccagaacttcctcaactcggacatgcagcccaaccaggtgcgctcgatgtgctgccgcctgcaactggacgtgcgcgaactgctcaaacgcggcaacggcctgttcggctcggcggagcagaccggctcgctgggcgtggtgacgatcaactgcgcgcgcctgggctatcgccaccgtggcgacgccgccggcctctaccgccagctcgaccacctgctcgaactcgccttcgccagcctggagctgaagcgcaaggtgatccagcagcacatggatgccggcctctatccctacacccgacgctacctgggtaccctgcgcaaccatttctccaccatcggcgtgaacggcctgcacgagatggtgcgcaacttcagcgacgaccgcgagggactgcacagcgaagccgggcgcgagatggccctggccctgctcgatcacgtgcgcgcgcggctggtggctttccaggagaacagcgggcacctctacaacctggaagccacgcccgccgagggcaccacctatcgcttcgcccgcgaggaccgcaagcgctatccgcgcatcctccaggccggcacgccggaggcgccctactacaccaactcctcgcaactgccggtgggcttcaccgacgacccgttcgaggcgctggagctgcaggacgccctgcaatgcaagtacaccggcggcaccgtgctgcatctctacatggccgagcggatttcctccgccgaagcctgcaagaccctggtgcgcaccgccctcggtcgcttccgcctgccgtacctgaccgtcacccccaccttctcgatctgcccgcggcacggctacctggccggcgagcacgagttctgcccgaagtgcgacgaggagctgctgcaacgctccacgcccaagagctgttgcggcggctgcggcggttga

SEQ ID NO: 337920 - DNA, 810 bp, Pseudomonas aeruginosa
atgaccgcaaccgatcagatcatggcgctcctcgaacgctgggaccgccagcaggagggctacatccgccagcgcgaggagcgctacgaggcgatgttccagttgctcgaagacctcttcggccgcgacgggcgcttcaccgccatcgacgccgcctgcggcccgggctccctcggccggcgcctgctcgaacgcttcccggcggcgcgggtggtggcgctggacgccgacgtcatgctgctggagatcgcgcgtacggcgctggccggtttcgccgagcgggtccgcgtggtggagtgcgacctcaccgatccaggctggaccgaacgtgtcgccgaagcgcgcgagtccctcgccggcgaacggcccgcggcgctgctctcttccaccgcgttgcactggctgtcgcccgccgaactcgccgggttctacgcccaggccggcgagctgctcgcccccggcggcgtgctgctgaacgccgaccacatgcgctacgaccgacgctggccgggactcgcggaattgtcccggaagcaccgcgagcgggtcctccaggcttccgtggccagcggcgcggacagttgggaagactggtggcaacgcgccgcgcagatcccccggctggccccgctgaaggcgcagcgcgacgcccatttcgcgcggcgcccgctcaggcgcgccagcgaagacgaagactgctcgctcgatttccatctcgccgccctgcgccaggcgggtttcgccgaggccgccacggtctggcagcagttggacaactacgtcgtcttcgcccgcctcgcccaggcctga

SEQ ID NO: 337921 - DNA, 1962 bp, Pseudomonas aeruginosa
atgaccccccattcctccccgcaccgtcttcctccgctgcggctggcccgcgccgtgccgttcctctacctgtttccctgcctggcgctggccgcgccggtcgacctggagccgacggtggtcagcgccaccactaccgagcgcaagctgcgcgacgccccggccagcgtttcgctgatcaccgccgaggacctgcggcggcgcccggtgcgcgacctgcaggaagccctgcgcggttcggaaagcctgcagttcaacggcgtcggcatgtcccggcggggcatcagcgttcgcggcatgtccagcgagcacaccctggtgctggtggacggccagcggatctccacctcgtccggggccatcgcccattccgacttcgacctcggctgggtgccggtggagagcatcgagcgcatcgaggtggtacgcggaccgatgtcctcgctctacggttcggaagccctcggcggagtggtgaacgtgatcacccggcgcgccaccgatacctggacgggcagcggcctgctcgatggcggcgtgcgcgaggacggcctcggcgggcagagccaccagctcggcgcctatctcgccgggccgctggtgcccggcaagctgggcctcgccctgaacggcgagagccgccgccagcaggaaaccccggacgccgacgagcgccggctctccgagctggaaggcggcaacgccgacagcggcgggctgaacctcagttggaccccggacgacgcccagcgcatcgacctcggccaccagcgcgggcgcgaacgacgctggcgcaacagcgagaccggggggccgcgctcgcgctactacgagtcgcgcgacgtgatcgaacgcgagcgctggtcgctcgcccacaatggccagtgggactggggcagcagccagctgcgcacctaccgcaaccgcctggagcggcacaacgcgcgttccgacggacaaccgccgagcaacccgcagcgccttaccgacagcgtggtcgacggccacctcagcatgccggccttcgagcggcatctcttcaccctcggcggcgaatggcgcaaggaagaactggaggatcgctcggtgaataccgccggcgacgccagcgcgcgacacaaggcgctgttcctgcaggacgagatcgccttcggcccggactggtcgctgaccctcggcagccgcttcgacaagcacgaggcgttcggctgggaaagcagtccgcgcctgtacctgctgcaccacctttccgatgcgctgaccctgcgcgccggcgtcggccgcggctacaaggcgccgagcctgaagcagctatcgccggagtatgcggcggtcggcggcggcgggcgcttcaccatctacggcaatcccgacctgaagccggagaccaatacgtcctacgaactgggcgccgactaccagggcgacggctggtcgctgaagggcacggtgttcgagaacgatgtccgcgacctgatccagaccgtctgcgtagcgcgctgcggggtgcgcggcggcgaggtacgcaactacgagaacgtcgacagggcacggatccgcggcctcgagctgggcggcggcgtggacctgccggcggacctgcgctgggaactcaactacacctacctcgacgcgcgcaaccgcaccgccggccagcgcctcggcgaccgctcccggcacctcgccaacagccaattgcgctggagccccaatgcgcgcttcagcgcccagttgcgcaccgaatacgtcggcagccaggtggcctacagcagcaacgtcggctatgccctgccggcctacagcctgtggcacctggagctgagccagaaactcaacgagaacctgacgctgcgcggcggcatcgagaacctcggcgaccagcgcctggccgacgacgacacgcacttcacctatgccgaacctgggcggaccttccatctcggtctggtggcgagcttctga

SEQ ID NO: 337922 - DNA, 477 bp, Pseudomonas aeruginosa
atgaatggtctggaaaccagcctctacgaactcacccgcctgttcctgctgccggtgctgctgttgatcctcgccgcgctggcctacgccttcgtcgccctcggcggcttcgccatggaagcctggcagcgccgtcgtgggcgctaccgctcgcgcctggcggcctggcaggcgctgcatggcggcaacagcgacgacctcgaactgtggatcatgcagcgcctggaatggctgcggatcacctcgcgcagcgcgccgatgctcggcctggtggcgaccatgatccccatgggaccggcactgctggcgctgacccgcaacgacgcccaggggatcggcgagaacctggtggtggcgttttccgcggtgatcctggccctggtcgccgccagcatcaccttcttcatccttaccgtgcgtcgccgctggctgctccaggaactgcgcgccgtcgaacgcgcgcgggaggccggctga

SEQ ID NO: 337923 - DNA, 327 bp, Pseudomonas aeruginosa
atgcgcttcctcgaacacgacgaggcggacgacccgatcctctcgatggtcaacctgatcgacctgttcctggtggtgatcggcatcctcctgatcgtcatcgtgcagaacccgctcaacccgttcagccaggacaaggtggtggtggtcgagaatcccggcgaggcggacatgcgcatgctggtcaaggacggcaaggagctgaagcgctaccaggccagcggcgagatcggcgaagggcagggcagccgcgccggggtgacctaccgcttggccgacggacggatgatctacgtgccggagagcggcggggaggccggcaagtag

SEQ ID NO: 337924 - DNA, 2280 bp, Pseudomonas aeruginosa
gtgctcgccgtggaagtaaaggtcaattttctcgataaccttcgactggaagccaggttcgatgatttcacggtgatcgccgaccagccgatccgctacaagggcgacggctccgcgccggggccgttcgactacttcctggcgtcgtcggcgctgtgtgccgcctacttcgtcaagctgtactgccagacgcgcaacattcccaccgacaacatacgcctgtcgcagaacaacatcgtcgacccggagaaccgctaccggcagatcttcaagatccaggtggaactgccggccgacatctcggagaaggaccgccagggcatcctccgctccatcgaccgctgcacggtgaagaaggtggtgcagaccgggcccgagttcgtcatcgaggaggtcgataacctcgatgccgacgcccaggcgctgctgatgcccggcaccgatgccgccggctgcacgcgcattccgggcaaggacctgccgctggagcagaccatcgccaacctgtcggccatcctcgccggcctcggcatgaagatcgagatcgcctcctggcgcaacatcgtgcccaacgtctggtcgctgcacatccgcgatgcgcagtcgccgatgtgcttcaccaacggcaagggcgcgagcaaggaaagcgcgctggcctcggcgctgggcgaattcatcgagcggctgaactgcaacttcttctacaacgaccagtactggggagaagagatcgccaatgcggcgttcgtccattacccggacgaacgctggttcaagcccggccgcgacgatgcgctgccgctgggactgctcgacggccattgcctggcgatctacgaccccgacggcgagctgcgcggctcgcacctgtacgacaccaactcgggcaatgtgcagcgcggtatctgcgccttgcccttcgtgcgccagtccgacggccaggtggtgtatttcccctccaacctgatcgagaacctctacctcagcaacggcatgagcgccggcaataccctggccgaagcgcaggtgcagtgcctgtcggagatcttcgagcgtgcggtcaagcggcaaatcctcgaaggcgagctggcgctgccggacgtgccgccggaggtgctggccaagtacccgggcatcctcgccgggatccgcggcctggaagagcagggcttcccggtactggtcaaggacgcctcgctgggcggcgaattcccggtgatgtgcgtgaccctgatgaatccgcgcaccggcggcgtgttcgcttccttcggcgcccacccgagcttcgaggtggccctggagcgcagcctgaccgagctgctccaggggcgcagcttcgagggcctgaacgacctgccccagccgaccttcgaaagccatgcgctgaccgagccgaacaacttcgtcgagcatttcatcgactccagcggcgtggtgtcctggcgcttcttcagcgccaaggccgatttcccgttcgtcgagtgggacttcacccggcagggcgaggctgccaacgccgaggaagccgcgaccctgttcggcatcctcgaagccatgggcaagcaggtctacatggcggtgtacgagcacctcggcgctacggcctgccggatcctggtgccgggctactcggaaatctatccggtggaagacctgatctgggacaacaccaacaaggccctggcgttccgcgaggacatcctcaacctgcaccgcctcgacgacgccgcgctcggggcgttgctggagcgcctggaagactgcgaggtggacgactacaccgacatcaccacgctgatcggcgttgagttcgacgacaacacggtctggggccaactgaccatcctcgagctgaaagtgctcatcggcctcgccctgaagcgcttcgaagacgccaaggaaggcgtggaggcgttcctccagtacaacgacaacagcgtcgagcgcggcctgttctaccaggcgctgaacgtggtgctggaggtcgtcctcgacgacgagctggagatcgccgactacgaggccaatttccgccgcatgttcggcgacgcgcggatggacgccgcgctgggctcggtggacggcagcgtgcgcttcttcggcctgacgccgaccagcatgaagctggaagggctcgaccggcacctgcggctgatcgacagctacaagaaactgcacgcggcgcgagccaggatgcagcccgtggtgggcggcgaggccggcgctgccgcggctggcggtctcaagcctcggcgcatggcgatccgcaagcgcaagtga

SEQ ID NO: 337925 - DNA, 2301 bp, Pseudomonas aeruginosa
atggccctggcccacactctcggcttcccacgcatcggacgcgatcgcgaactgaaaaaagcccaggaagcgttctggaagggcgagctggacgaggccggcctgcgggccgtcggccggcagctgcgcgccacccattggcaggtacagaaggacgccggcatccagttgctgccggtcggcgatttcgcctggtatgaccaggtgctgacccattcgctgaccttcggcgtgatccccgagcgcttccgggcgcacggcgaggccgggccgaccctgcataccctgttcggcatggcccgtggcgtcagcgacgacagttgttgcggcggtgcccatgcccaggaaatgaccaagtggttcgacaccaactatcactacctggtccccgagttcagcgccgaccagcagttccagctgagctgggaacaactgttcgaggaggtcgacgaggccagggccctcggccaccaggtgaagccggtgctgatcggtccgctgacctacctgtggctgggcaaggccaagggcgccgagttcgacaggctcgacctgctggaccgcctgctgccgctctacggccagatcttgcgtcgtctcgccggccagggcgtggagtgggtgcagatcgacgagccgatcctggtcctcgacctgccgcaggcatggaagaacgccttcgagcgcgcctacaacctgctacagagcgaaccgctgaagaagctggtcgccacctacttcggcggcctggaagacaacctgggcctggccgccaacctcccggtggacggcctgcacatcgacctggtgcgagcgccggaacagtatccgagcatcctcgaccgcctgccggcctacaaggtcgtctcgctgggcctggtcaacgggcgcaacgtctggcgctgcgacctggagaaagccctggaggtggtgcgccatgcccgggagcgcctgggcgagcggctgtgggtcgcgccgtcctgctcgctgctgcacagcccggtggacctggaacgcgaagacgggctggacgccgagctgaagagctggctggcctttgccgtgcagaagtgccgcgaagtcgcggtgctggcccgtgccgccactgagccggaagccgccgaggtgcttgccgccgtggaagagagccgtgcggtccaggccagccgcgcttcctcgccgcgaatccacaagccggccgtgcaggcgcgcctggccgcgatcaaggccagcgacgcccagcgccgctcgccgttcgccgaacgcatcgccaggcagcgtgccgggctcgacctgccggcgttcccgaccaccaccatcggctccttcccgcagacctcatcgatccgcctggcccgccagtcgttcaagcagggcaagctgagcgaggccgagtacatcgaggcgatgcacagcgagatccgccatgcggtgcagatccaggaacaactggggctggacgtgctggtacacggcgaagccgagcgcaacgacatggtcgagtacttcgccgagcaactggacggctacgtcttcacccgcttcggctgggtgcagagctacggctcgcgctgcgtgaagccggcggtgatctatggcgacctgagccgtccgcgggccatgaccgtggagtggatcaggtacgcccagagccttaccgacaaggtgatgaagggcatgctgaccggcccggtgaccatgctgatgtggtccttcccgcgcgaggacgtgtctcgcgaggtgcaggcgcgccagttggccctggcgatccgcgacgaagtggtcgacctggaggcggccggcatcaggatcgtgcagatcgacgaggcggctttccgcgaaggcctgccgctgcgccgcaacgcctggccgcactacctggaatgggccaccgaggccttccgcctgtgcgcctccggagtccgcgacgaaacccagatccatacgcacatgtgctacagcgagttcaacgatgtgatcgagtccatcgccgccatggacgccgacgtgatcaccatcgagacctcgcgttcggacatggagctgctggaggccttcgagcagttcgactacccgaacgagatcggtccgggcgtctacgacatccattcgccgcgcgtgccgagccgggaagagatcgtcgcgttgctgcgcaaggcggcccggcggatacccgccgagcggctctgggtcaacccggactgcggcctgaagacccgcgcctggccggaaaccgaggcagcgctggtgaacatggtcgccgccgcccgcgaactgcgtggcgacctcgcccgcggctga

SEQ ID NO: 337926 - DNA, 624 bp, Pseudomonas aeruginosa
atgaatgacttcaagtctgccctggcgcccttcccgcccagctacccgaggggcttgccgggcaaccggcggcaggtgccgatactgcatcgcgacgcagacttcctcctgcgcgcgctgcaacccgacgatttcgtccggaccagccgctacgagaacgccaaccgcgagcacctggcgccgtgggagccgctgcgcgacccggggtatttttccgtggacaacgcccgcgcccgcaccctgctacaggtggcgagcatggacgaaggcgaggcgcttctcctgctgttgctcgatcccgacgacggcgaggtgctggggcgctgcagctacaccaacatcgtccgcggggtattccaggcctgccacctgggcttttccctggccgctgcggctcagggccgcggcctgatggcgcgtgccctgcgggtagccaaccggtattgcttcgagcagctcggcctgcaccggatcatggccagccacctgccgcgcaacgcacgcagcgagcgcctgctggaaagcctcggcttcgagagggagggctacgcccgcgcctacctgaagatcgccggggtctgggaagaccatgtgctacgggcgctggtggacgctccgcgctga

SEQ ID NO: 337927 - DNA, 297 bp, Pseudomonas aeruginosa
atggcaaccgatctctacgcgctggccgaacaggtcgaggacgaagcgggttacctgcgcttcctcgccgcgctggcggcggactgggaggaagaccgccgcctcgccgccgccaacccgccgaagccgttcggccccagcccgctgggttgggagaacggcagcatcggtggcttcctcgatgccgccgcgacctggggcgaggactcccgcgacggcctgccgggctattccaggccggagaatgcctggcggcgcgcggcgcaactgatgctggcgggcaagttctatgaatga

SEQ ID NO: 337928 - DNA, 1296 bp, Pseudomonas aeruginosa
atgctcttcggcagaaaaagcagggcggtcgaaagcgccgccaaggatgaagatgtagcgtggcgactcgaggccatcgggcagaacgtcgccaccatccgattcactcccgatggccagatactgtccgccaacccgctgttcctcgcggcggtcggctattcggcggacgaactggtcggcaagcaccaccggatcttctgcgaagaggactaccaggcctctgccgcctacgtgcgcttctggaaggaactggccagcggcacgccccagcgcggcgtgttcaagcgcctgcgacgcgacgggtcgccgatctggctggaggccacctatttcccggtgaagaatgccgaaggggcggtcgtcgaggtgctgaagatcgccgccgacgtgacccgcaaccattccgaactgctcctgctcaacgcgatcaacgactccatacgccagtccatggccgtcatcgagttcaccccggacggcgagatactcgatgccaacgaaaacttcctgcgtctcttcggctacagcctcaagtcgctcaagggccagcaccaccgcatgctctgcttcgacgagttctatcgggagaacccggatttctgggcccggttgcggcacggcgaattctcccgcgggcatttcgagcgccgcacagccgccggtgagcgggtacatatcgaagccacctacaacccggtcaaggacggttcggggcggataatcaaggtcatcaagttcgccatcgacgttaccgaacaggtcaatcgcaacgaggaagtacggcgcgccgccgagctgtcgttctccaccgcggaagagaccgcgcagatttccacccgcggcatcgactccctcgaccagtccgtcgccctgtcggccaagaccctgtcgatggtcaacaccgccgtcggcctgatttcccagctcacccaccagaccaaggacatcgagaacatcgtcaccaccatccagagcgtcgccgaacagaccaacctgctggccctcaacgccgccatcgaggcggctcgcgccggcgacatggggcgcggcttcgcggtggtcgccgacgaggtgcggcaactggcggcgcgcaccagcggcgccacggtggagatcaagaacgtggtcaccgagaacgtcaagctgacccagcagatcaaccacaacatgcagaccatcgagtccagcgcccaggagaacaacaaccagatcaccaccgtggccggcatcatgcaggagatcagcaagggcgccgagcacgtggcgcgggtggtgtcgagcctgttcaagtga

SEQ ID NO: 337929 - DNA, 2205 bp, Pseudomonas aeruginosa
atgagcagcctgccacacagcaccgggcaagccctggatcgcgtcgacgggcaagccaaggtcaccggccaggctcgctacgccgccgaatatcctgccgccgacctgctccacggcagcgtggtcagcagcgacgtcgcccgcggccgggtgcgcggcatcgactgtgcggcggccctggcggtacccggggtggtcgcggtactgcatcacctgaaccggccgccgatggcgggcgacgacgagccctacaaggacgccgatgccgccgaaggcgaacccttccgcccgctgttcgacgaccgcgtcctgtacagcggccagccccttgccctggtcctggcacggagcctggaactggcccgctacgcgggctcgctgctgcgcatcgatatcgagcccgagccgcaccagaccgacctgctggccgccctcgaccaggcccatgaggctcccgccgaactgcccgccgagcgcggcgatttctacaccgcctaccgcgccgcgccgattcgggtcgaggccagctacagcacgccgatcgagcaccacaatcccatggaaccgcacgcgtccacggtcatcgtccagcccgacggcagcctgctggtgcacgacaagacccaggggacgcagaacagccaggcctacctgcaaaaggtcttcggcctgcccgccgacaaggtaagggtctgtgccgcctacgtcggcggcgccttcggctccggcctgcgtccgcaataccagttggccctggcggtgatggcggcgctgcaactgcggcggtcggtgcgcgtagtgctgacccgccagcagatgttcaccttcggctaccggccgcgcaccctgcagcgcctgcaactgggcgccgatgccgaggggcgcctgcttgcgctgggccaccaggcgacagcgcagacctcgcgcttcgaagacttcaccgagcacgtggtggagtggagcggcatgctctatcgctgcgagaacctttccctggcctaccgtctggtgccgctggacgtctataccccgctggacatgcgcgcccccggcgcggcgctggggctgatcgggctggaatgcgcgatggacgaactggcggtgcggctcggcatggaccccatcgcgctgcgccggttcaacttcgccgagcgcaacggcaacgaggacaagccgtactccagcaaggcgctgctggcctgctacgaggagggcgcccggcgcttcggttggcaggcccgcgacccacggccacggagcatgagcgaagggcgccagttgctcggctggggcatggccggcggcgtctgggaggccatgcagagcaaggccagcgcgagggcgcggctggaggcggacggcctgctgcgggtggccagcgcgaccacggatatcggcaccggcacctacacggtgatgacccagatcgccgccgacgccgctggcatggcgccggaagaggtgcgcttccagcttggcgacagtgcgttgcccaaggctccattgcagggcggctcgttcaccgtctcgtcggtcggttccgccgtccgcctggcctgcctgcgcctgcgccaggccctggtcgcccatgccagggcccgccatccggagctggccggcgccgccgaagagcgcttccgcatatgccgtggccatctggaagcgggcgatacgcgatacgccctggccgacctgctgcaagggctgccggaagacgcgttgcaggtggaggtggaagctgaaccctcggcgcggcgcaaaggctacgccaccgcgacccattcggcggtattcgtcgaggtgcggatcgatgaagccctcggtaccctgcgtgtgagccgggtggtcagcgcggtcgcggcggggcgggtgatcaacccgaagaccgctcgcagccagatactcggcggggtggtctggggcctgggcatggccttgcaggaggaaacccaggtcgaccatgcgctgggccgctgcatgaaccacaacctcgccgagtaccacatcccggttaacgccgatattggcgatatcgaggtgatcttcgtcgacgaacccgacgatatcgttaacgaactgggctccaagggcgtcggcgaaataggtatcgtcggcgtcgccgccgcagtggcgaatgccgtgtaccacgccaccggccgccgcctgcgcgacttcccgctgaccgtcgacaagttgctcggctga

SEQ ID NO: 337930 - DNA, 381 bp, Pseudomonas aeruginosa
atgaagaacgcaatggccctgaccctggccggcctgctggccgctccttccctcggcttcgccgccgcgccggacgcagtgatggtcttcgcccgccagggcgacaagggcagcgtgtccgtcggcgacaagcacttccgcacccaggccttcaaggtccgcctggtgaatgcggcgaagagcgagatcagcctgaagaacagctgcctggtggcgcagtccgccgccggccagtccttcaggctggataccgtggacgaggaactcaccgccgagaccctcaagccgggggccaccgtcgaaggcgacgcgatcttcgcctccgaagacgacgcggtgtacggcgcatcgctggtcaggctgagcgaccggtgcaagtag

SEQ ID NO: 337931 - DNA, 711 bp, Pseudomonas aeruginosa; identical to SEQ ID NO: 334692

SEQ ID NO: 337932 - DNA, 3261 bp, Pseudomonas aeruginosa; identical to SEQ ID NO: 334693

SEQ ID NO: 337933 - DNA, 1140 bp, Pseudomonas aeruginosa
atgcgcgcactcctcacccacgcctggctgttcctcggcaaatggctcggccgcctgctcctcctgctgctggccgtcggcctcggcggctgggccatcggcagcctctactacgcctggaaattctccggcccggtgtccgcggaagagcagatcgccccggacgaagcccgcatcacccaagcgatcatccaggacgccatccgcgtggtcgaacagcaccgcgacaacacccgcgtcctgcgcgatgcccacgccaaggcccacggctgcgtgaaggccgagttcaaggtacgcgccgacctcgacccgaccctgcgtcgcggcgtgttcgccgaagcgggcaagagctggaacgcctgggtgcgcttctccaacggcaacgcctacccgcagttcgacagcaagaacgacgcgcgcggcatggccatcaagctgctcgacgtgcccggcgaaaaactcctgcccggccgcggccatgacggcgagcaggacttcgtcatgttcaaccagccggtgttcttcatccgcgacatcgccgaataccggcagaacttcgccgcccaggccgacggcaagaaagccctggccttcttccccaactggaaccccgccagctgggaactgcgccacctgctgatcgccctgcgcaccctcgcccccgccccggacagcccgctgcacgccggctacaacggcatctcgccgtacaagctgggcgaacacaacatcaagttccgcgtcgtccccgccccggagaaatgcccggcctaccagctaccgaagcagaaccaggacctgcccaacttcctccgcgccgccctgtaccagcaactctctatcgaccgcacccccgcctgctacgccttccaggtgcagcgccaggacccggccaagtacatgcccatcgaagacaccagcgtcgaatggaaggagtcggacgcgcccttcgctaccatagctgacatcattgtgccagctcaggattttgatagccgggaacagaacctgttctgtgacaacctctcgttcaacccctggcacgcgctgccggagcatcggccgatcggcgggatcaaccggttgcggaaggcggtttacgaggcggtcagtgggtataggttggggagaaatgggtga

SEQ ID NO: 337934 - DNA, 480 bp, Pseudomonas aeruginosa
atggccattatcgaggtggtgagcggcggagaccgccgcagcctgatgaagcgcttcgagcgcaagagcaagcagcaggctatcagcgaactggtggatttccatctgctgaactgcgcccggatcgagaaactggaggcggagcgcaaccacctgctggcattgatcgacagccccgagctgcacgacttcgccaatggcgtggtgctggaggctgcacaccagcgcaagcgctggggcagccaacatgacgccggcaagcagccggccgactggttctggctgattggctacctggccggtaaggcgctccatgcctgcgcaaccgggaataccgagaaggcactccaccactgcatcagcagcgcggccgccctaggtaactggcacgccagccttctcggcgccgacaccaacatgcggccggggctacccacggaatcgctgccgatcagcgcaggaggctccgaccatgcgtag

SEQ ID NO: 337935 - DNA, 291 bp, Pseudomonas aeruginosa
gtgcagggcttcggtggcctggcgcaggggagcggcgtcgaggtcgaaaccgtagcccagcacatggatggtggcgccaccccaggtgcaggacaactcgacgccgttgaccagttcgataccgagtcgagcggccgcctggtgggcttccggcaagccttccagggtgtcgtggtcggtcagcgccagcagcccgacgcctttctcgtgggcccgctgcaccagggcggcgggcgcgagaacgccatcggaggcggtactgtggcaatgcagatcgacacgcatggctga

SEQ ID NO: 337936 - DNA, 630 bp, Pseudomonas aeruginosa
atgagccagttcttccagatccatccggaaaatccccagccacggctggtcaagcaggcggtggaaatcgtccgccagggtggggtgatcgtctatcccaccgactcgtcctatgccctgggttgccgcatcggcgaaaagaccgcggtggatcgcatccgccgcatccgccaactggacgacaagcacaacttcaccctggtctgccgcgacctttccgagctgggggtctatgccaaggtcgacaccggcctgttccgcctgctcaaggcgcacacccccggtccctacaccttcatcctcagcgccacccgcgaggtgccgcgcatgctcctgcaccccaagcgccgcaccatcggcctgcgcgtgccgaactgtccgatcgcccgggcgctgctggaggagctaggcgaaccgctgatgagcgtgagcctgatcatgcccggcagcggcgagccactgaacgatccctatgaaatgcgccaggtactggaacaccaggtcgacctgatcgtggacgggggctatggcggcggcgaggcctccaccgtgatcagcctgaccgacaccgatcccgaagtgatccgcgtgggttgcggcgatccggcgccgttcatgcagccggcctga

SEQ ID NO: 337937 - DNA, 891 bp, Pseudomonas aeruginosa
atgcaggacgataacccggccaacgccgacacccctccagccgaacccgccgccgagcgggtgccgctgcaactggcgctggtctacggcgaggcggtcaccgagctgccgcaggacctctatatcccgccggacgcgctggaggtcttcctcgaggccttcgagggcccgctcgacctgctgctgtacctgatccgcaagcagaacatcgacatcctggatatcccggtggcggaaatcacccgccagtacatgggctatgtcgagctgatgaaggcggtgcgcctggagctggccgccgagtacctggtgatggcggcgatgctggcggagatcaagtcgcgcatgttgctgccgcgctcggcggaagccgaggaggaagaggacgatccacgggccgagctgatccgccgcctgcaagagtacgaacggttcaagaaggccgccgaagacctcgacgaactgccccgggtcggccgcgacgtgctggtgccggcggtggctgctcccgaggcgcgggcgcgcaagctgctgccggagctggcgctgcaggagctgatgctggtgatgggcgagatgctgcgccgcgccgacctgttcgagagccaccaggtgacccgcgaggtactgtccacccgcgaacgcatgagcgaagtgctggagcgcctgaaaggcggcgccttcgtgcccttcatccagttgttcaccctggaggagggcaagctcggcgtggtggtcaccttcatggcgatcctcgaactggtcaaggagcagatggtggaactggtgcagaacgaggctttcggcgccatccatgtgcgcctgcggatagcccgcgaagcggaggaaggcgaaaccctggaggaagccctggaagacgatttcgagtga

SEQ ID NO: 337938 - DNA, 621 bp, Pseudomonas aeruginosa
atgagcgacgccccggagacctcgccggccgacctgccggccatcgaattcagctctccggggcgctttgcggtacgcaacccggcaagcgccgcaccacccgcggaacgctgggaaccagcgccattccgcctcggcgaacatgagccgctggagcgcttcgagcatccgcaggaagcccgcgcccatgccctggccctcctgcagcaggcccgccgctcgctctgcctgcacagtcccgacctggaaagctggctctatcaccacagcagcatccaggaagcctgcacccgttttctcctggccaatccacgcaatcgcctgcgtatcctcgttggcgacagcgcccaggccgtgcgcaacggccaccgcctgatcaacctttcgcgccgcctgtcgagcaactgcctgatccgccggctcaacccggactaccctaaagaggacgacgccttcctcctggccgacgaccagggcctgctgctgcgcccgaaaccggcgcaaccggcgggctacgcctgctaccgtgccgccgggcgggtgcgtcaactccaggcccgcttcgagcaggcctgggacaccagtctttccgacccggacctgcggagcttcctcctgtga

SEQ ID NO: 337939 - DNA, 672 bp, Pseudomonas aeruginosa
gtgagcttcgccgaccagggcgaagtgctgatcaacacccgcctggccgccgatgtcctcggcgcgaccaagatggatcgcccggagtggggcgcggtcaacccggacaacggtgacgtctacttcaccctcaccaacaacacgtcgcgcaccgtcgccgacgcggccaacccacgggtgaagaacgcctacggccatatcatccgctggcgcgaacgcagccgcgactatgccgggcaacgcttcacctgggacctgttcatgctcgccggtcccggcgaagacagccgcggcccggacggcaagccgctgaaccaggacaatatcctggccagccccgacggcctctggttcgacccggaaggccgcctgtggatccagaccgacatgagcggcagccagttgagcagcggcccgttcggcaacaaccagatgctggtggccgacccgcgcaccggcgaactgaagcgcttcctcaccggtccgctgggttgcgaggtgaccggcattgccgcgacgccggacttccgtacgctgttcatcaacatccagcacccgggggaaggctcgaccgccgataacctcctcagcacctggccggacgggccgggccgccggccacgctcggccaccgtggtgatcacccgcgaagacggccgacgcctgctctga

SEQ ID NO: 337940 - DNA, 444 bp, Pseudomonas aeruginosa
atgtcgatcaccaagctccccgatggccgttggttcgtcgatgtagaaccgatcaagggcaagcgctttcgcaagcggttcaagaccaagatggaggcgcagcaattcgaggccaccgcgcgtcagaagtgtgcggaaaacccctgctggacgctcaggccgaaggaccgtcggcgtctctcggagttggtcgaactctggtatgaactgcacggccagaccttgagcaacgggcatcgttgcgtggcgattctgcggttggtggcaaaggacctgggcgacccggtcgctgtctccctggagcctgcgaaagtggctcggttgcgtagccgacagatagccaatggcatgtcgggcaagaccgcgaacaaccgtcttggctacctcaagtccagtacaacgaattgcgccaactcggcgtcattgactatgagaatccggtag

SEQ ID NO: 337941 - DNA, 282 bp, Pseudomonas aeruginosa
atgcgtcccgctcccttgcggcctgccgccactgtctcgaccgctgccgcgcagccccaacgctatctcaccaacgacgaagccgccgaatacctgcgcctgtcgccgcggacgctggaaaagcagcgtgtgatcggcggcggcccgcgctttcgcaagttcggccgccgcgtcatgtacgccgtggccgacctcgacgcctgggctgccgaccgcagtttcgagacgacttccgatcccgaatacgccgagcaccactcggccgacagccgtgcgcgctga

SEQ ID NO: 337942 - DNA, 315 bp, Pseudomonas aeruginosa; identical to SEQ ID NO: 323950

SEQ ID NO: 337943 - DNA, 2061 bp, Pseudomonas aeruginosa
atgaacgccgtactcaaaaccgaagccgtcgccatcgaagccgccgcaccgctggaaatggccgacccgtccaagaacctgattctggttccactctcgcagttgctgccgcgccgctccaagcgcaacgcacgcaagaccccgcgcctgtccattcccgaactggccgcgagcatcgcccgcatcggcctgctgcaaaatctcgtcgtcatcctcgccgccgatggcgagcagtacgaagtggtggccggcgaccgccgactgaccgcgttgaagctgctggcgaagaagaagcgcatccctgccgactacgaagtggcgtgcctgctggtgcccgatgcttcggcccgtaccgtcagcctcgcggaaaacctgctgcgcgagcagatgcaccccgccgaccagttcgcggccttcgccgcgctggtcaaggaaggacgccccatcgaggacattgccgccgatttcggcgtgtccccgctggtggtgcagcgccgcttgaagctggcgaacgtctcgccgcgcctcatggccgactaccgggccggtggcgtgacgctggaacagttgatggccttgaccatcaccgacgaccacgccgcgcaggaggccgcgttctatggtgcgccggaatggcagcgcagcccgtccaagctgcgcgagcgcctgaccgagcgcgaaatcgacgccgcgcacgcgctggtgcgcttcgtcgggctggacgcctaccggcaggcaggcggcggcatccgccgcgacctgttcgcggaaggcgatgccggaacctacctcaccgataccgcagtgctggaaacgctggtgcgcgacaagctggcaacgctggccgaggacgtgcgcgccgagggctgggcatgggtggaggccgtgccgcatctggcctacgaggaacggcaggctttccagaacgccccgcgccagcgccgcgagccgaccacccgcgaggcccgccgcattgcctcgctgcaaacccgcctcgacaagatcgacgccgaactggaagaagcctgccaaggtgaaagcagcgaggacgaggccaaggccgagaaactggaacagcggcgcgatcaggtggtcggcgaactgcaagacgcggaggacgccttgcaaggttatgcccccgaggtgcgcgaggtggccggtgccatcgtcaccatcgaccgcaacggcgaggccgtcattcatcgcggcttgctgcgcgaagccgaggccaaggcgctgcgcacgctggaaaagctgcggcgcggtttcggcagcaccgaaggcgaagccgccaacgacgagcacgaggacgccgacgacgcacccaaggccgcgagcctgtccgaccggctggcgcagcggttgagtgcccatcgcacggcggcgctgcaaatcgaagtcgcccggcatccgcaggtcgcgctggccgcgctggtgcatggcatggtgcagaaggtcttgcagcccgacgcctacggcgatggactgccgctcggcgtgcgcctcacggtgcaagaccggctggaaggcatggccccggactggccggaatcgtccgccgccgtggcgctgcgcgaactgcaacaggtggcaggtgttgccttgccggaggacagcgccgaactgttcgccgtgctgctggcgaagtcgcaagacgaactggtgcggctgcttgccgtgtgcgtggcttccacggtggacgtggtgacgcctcgcgccacgccgcaccggcccggcgaggaactggcgcaggccgtgggcctcgacatggccgcatggtggcaaccgaccgcagaaggctacttcaagcacgttccgaaggccgcgatcctgcaagccgtgggcgagtacgcgcccgagcacgtcactaggctggcgaagttgaagaaggccgacattgccagcgaagccgaacggctggcggatggcacgggctggatgcccgccatcttcaagaccgaaacgccggaagccacgcaggaagaaccgcaggagcaggacgacgccccgcaggaagccgaggcaatggcggatgaacccgccgaggcgctggccgcttga

SEQ ID NO: 337944 - DNA, 813 bp, Pseudomonas aeruginosa
gtgagcgggaatcctctgctccgcggtctgggacgcataggcctgaccgtggaacagggctgtcgtgcgtgtcttggtctggccgggttcgtgggtcagatcatcgaaacatggagccgtaccgttcgtcacccgcgtcgctggcgcacgacctcggtgatcgctcaaatccagcggtcagcggtggacgccattcccatcgtggcgctactgagcttcatggtaggaatggtggtggcgttcctgggcgcaacggtgctggccaacttcggtgcgagcatcttctcggtgcatctggtcgccttctcgttcatgcgcgagttcggagtgctgctcccggccatattgattgcaggccgtaccgcaagcgcgtataccgcccaaatcggttcgatgaaggcaaatgaagagatcgatgcgcttcgctccaacgcgctcgaccccatcgagttgctggtgctgccacgcgtgctggcgcttcttgtgtccttgccactgctcacattagtaggcatcttggctggcattgtgggcggcgccactgtatgcgcactgagcttggagattcctcctgcacagttccttgccatcgtgcaggaaaaaatcgaggtgcgccattttcttgtcggaatgagcaagtccccgctcttcgcggtgatgatcgccgctatcggctgccatgaagggttcaaggtcgccggtagcgctgagtcggtaggcgaccacacgacttctagtgttgtgcaatcaatcttcatggtgatcctgatcgatgccatcgctgcactgttcttcatggagatgggctggtga

SEQ ID NO: 337945 - DNA, 1650 bp, Pseudomonas aeruginosa
ttggaacaggttgggcaccgagccgttgtgcaggaatggcggggtcgcccagacgccgtccagcgggcgggccttgtaggcgcgcagttcctgtacaccgatcggcaggtcaaagccgttcatggtcttctgctgttccggcgggatgccggcgtcccggtaggcgcgctgctcgacgaaggcggtgatgtaggccaggcccttggccgaggacagttgcgagaggtcgagttgctgcggatcggcgccgatcagctggacgttcatccgcgccagttcgtcgacgctccagccgagcttgcgcaggtcgtagcggtggtcggcgatgttgtcggcggtggtcgggtcggtgccgatcacctcggtcggcaccatgtgcatgcgccactcgggattgcgtccgggggcggcgtattccgccggttgcaccttgggcgcatggcagaaggcgcagttggcttcgaacagggcgcggccctgggaggcgcgttgcaggtcgatgcggccgaagaggtcttccggccaggtcggcggtttcagctgttgcagggtttcttccagggcgtgcaggtcatgcaggcgtacgctggaggcgtagcgctgctcgccccgcagcggctgaccgtgctcgtcgaagatctgcaggcgcgcgccgacgccgagggcctcgccgatgttgcgcgccatcggctgcatggccgagccgttccattgcacccagtcgaatttccagatgtcccagacctgcggatagctcaccggggcgttggcgacgcgatagttgcccgggtcgatggcatcgccgaagacgctgttggcgatgcgcccgaaggcgtcggtgcggccggggccttcctcggtggggtagaggtggcggcgggtgtcgttccaggcggtgcgcaggagggtgtcgagcacggccttgaagtcggcgcgcagttgcgacttgtcctgttcgtagcgttcgccgaggactttcctggcgaagcggttgaacttgaacgggttgtagtaggtggcggccatgctcgcgccgagcgcctggccgaaggcgccgccgcgcagggtcggcacggtggcggcgatggagtgcatggcggcgccgccgtcgatgcgcagcgacttgccctggtagcgcagttcgccggtgtggcaggcggcgcaggtgatgtccaggtagcgggtgccggtcttctcgtcgcggtgctggctgaagcccaccggcaggttgccggggttgaggtcgctggccttctgctgcggatcgacgaggaagccgaagcgggcgaggtattcgggggcggcgaagggttcttcggagaagggcagttcgagggcggtgaaccagtcgtagtgcaggcccttcaccagggtgccctggggcgtgtagtagaagcgctggcgggcctcgtccttccattgcggcaggtagcgtacctcgctcggcgcctggtagtggggcaggttgggattggcgacgtagtagaccaccaccccgacgaccgccagcacgatcacgccgacaaccagcagagcctttttcacggtgcgcatcaggaacgtccttgtaggccttttttgggcaccgttatgccaaggcgttggcatattggcaagctgctatcagcttttttgacaaggttttcttga

SEQ ID NO: 337946 - DNA, 231 bp, Pseudomonas aeruginosa; identical to SEQ ID NO: 334743

SEQ ID NO: 337947 - DNA, 888 bp, Pseudomonas aeruginosa
atgcggcgcgaaagtctgttggtatcggtttgcaagggcctgcgggtacatgtcgagcgcgttgggcaggatcccgggcgcagcacggtgatgctggtcaacggcgcgatggcgaccaccgcctcgttcgcccggacctgcaagtgcctggccgaacatttcaacgtggtgctgttcgacctgcccttcgccgggcagtcgcggcagcacaacccgcagcgcgggttgatcaccaaggacgacgaggtggaaatcctcctggcgctgatcgagcgcttcgaggtcaatcacctggtctccgcgtcctggggcggtatctccacgctgctggcgctgtcgcgcaatccgcgcggcatccgcagctcggtggtgatggcattcgcccctggactgaaccaggcgatgctcgactacgtcgggcgggcgcaggcgctgatcgagctggacgacaagtcggcgatcggccatctgctcaacgagaccgtcggcaaatacctgccgccgcgcctgaaagccagcaaccatcagcacatggcttcgctggccaccggcgaatacgagcaggcgcgctttcacatcgaccaggtgctggcgctcaacgatcggggctacctggcttgcctggagcggatccagagccacgtgcatttcatcaacggcagctgggacgaatacaccaccgccgaggacgcccgccagttccgcgactacctgccgcactgcagtttctcgcgggtggagggcaccgggcatttcctcgacctggagtccaagctggcagcggtacgcgtgcaccgcgccctgctcgagcacctgctgaagcaaccggagccgcagcgggcggaacgcgcggcgggattccacgagatggccatcggctacgcctga

SEQ ID NO: 337948 - DNA, 1095 bp, Pseudomonas aeruginosa
atggacgatctctcccccgattccgccttgccgcctgccggcagcgcccaggacaacgacgcgccgcgccagttggtggtctgcatcgacggaacctcgaaccgcttcggcgaccagccgaccaacgtggtgcgcctgtaccgttcgctgtcgcgcgatccgcgcagggtgctggcctactacgaccagggcgtcggcaccttcggcctgaaggaaaccctgttcgagtggcagaagtttccctcgcggatcgccggcctggccttcggctgggggctcaagcgcaacgtcgagggcgcctatcgcttcctcgccgagcactaccggcccggcgaccagatattcctcttcggcttttcccgcggcgcctacgcggtgcgcgtgctggccgcgatgctgcgtgcggtgggcctgatcgatgcgcaccagccacacctcttcgactacgcctggaccctgctcaccacccgcatgccgccccgcgacgaagacaagcgggccggcacgcgtcgccgcgggccggacttcggcctgctgggacgcttccgcaaggtcttcggccggcaggtgaaggtgcacttcctcggcctgttcgacaccgtgacctcggtgggctgggtctacgacccgctgaccgtgccgtattcctcgaacaacgaaatggtcgacgtggtccgccaggccctggccatcgacgaatgccgctgcttcttccggcagaacctctggttcggcgagaaggaccgcaagtccgacgtgttgcaggtgtggttccccggcatgcactccggttcgaagcagggcccggacccgaccgcgccgatcctgccggtgatgacccggccctggcgcctggccgagtggctgccgctgctggtctgggaccgccgcagcggcaaccgcgcctggcgctggtcgcgtggccggccgcgctcgcggccgctggaaccggtcgggcaggaaacccgggtcaagctgcaccgttcggtgcagcggcggctggacgaatgccccgactaccggccgtgcaacctgccagcgctggaacgctgcgacctcatcgacgattcgccgttgcttgacggctaccgctag

SEQ ID NO: 337949 - DNA, 195 bp, Pseudomonas aeruginosa
atgcgacgcatgatcctcccggccagcttgttgctcgccctctcctctttcgccatggccgccccgatctacaaatgggtcgacgccgagggcgtcacccacttcggcgcacaaccgccgcaaggtgcgcaagcgaccacggtgaatacccagacctgtctcttatacacatctccgagcccacgagactcctga

SEQ ID NO: 337950 - DNA, 315 bp, Pseudomonas aeruginosa; identical to SEQ ID NO: 329231

SEQ ID NO: 337951 - DNA, 150 bp, Pseudomonas aeruginosa
atgcccagcggcgtgccgctggcgtcggccagctcgcgccattcgttcacccacgaaaagcggtgcaagcgcctcccggtggtttcgcggatggaagtcgccacgctggtcgattgcagccggtcgagcgcggctttcaggcgctggtag

SEQ ID NO: 337952 - DNA, 1365 bp, Pseudomonas aeruginosa
ttgctcaaggccgtcaccgaccattacctggatcgcggctacgtcaccacccgcgcctacctgccacagcaggacctggcctccgggaccctgcgcatcatcgtcgtcgaaggccgcctggagggcctggacagctccgcgctggccagcccgcgcgaactggcgatgagctttccgggcaggaccggcgagctgctcgacctgcgcgaactggagcaactggtcgaccagttgagccgcctgccgtcgcgccaggcgcaactggagctggtgcccggcagcgaggtcgggggcagccgggtgcgtctcaagggtgagcgcgacaagccctggcgggtctccgccacgcgcaacaacgacggcgacgtcagcaccggcgagcagcagatgggcctgggcctggactgggacagcccgctgggcctggccgaccagctcaacctgcgcgccaaccgcgacgcggtgaccgaccgctggcgccattccgacagccagagcctgttctacagcctgccctggggctggtggaccttcacctacggctacagccagagcgactaccgcacgcgcaacgaggccagcggcttccccttcaagctcgatggcgacagccgcagccatcagttccgcgccgaacgcgtgctgcaccgcgacggtgtgagcaagaccgccatgagcctggggctcagccaccagcgcaccaacaactatgtcgaagacacccgcctggaagaccagagcacgcggatcaccgagacccagctcggcttcaaccatggccggcggatcggcagtggcttcgtcaacctcgacctcggctggcagcagggcatcggcgcccttggcgcgcagggtcgcggccacccgcacgcgggcgatccgaatgcgcgctacgacaagtacagcctgaccctcagctacctgcagccgttccagctatggggcgagcgcttcagcttcgacagcctggccaccgggcaaaggagcgaggacgtgctgttcagcccgcagcgcatcagcctcggcggcaacagctcggtgcgcggcttcaaggaccagaccctgaccggcgacagcggcggctactggcgcaaccagttgcgctggcggcgtgcggtggaatgggcgccgctgcggccctggctgcaggaatacggcgtggccttcgcctacgacgtcggcgtgatccgccacgaccgctacaacgacggcgccagcgggcgcatgagcggcaacgccatcgaactggatgcccgcggccgctatttcgccgccagcgtcggcttcgcccgctcgctggagcggcccagcgccatcgagcggcgcgagcacccgatctatttccgggtcgacgcgttcttctga

SEQ ID NO: 337953 - DNA, 1284 bp, Pseudomonas aeruginosa
gtgtcgatcaagatccaccacggccccaatggctcctacaagacctccggcgcgatccaggatgacgccgtgcccgcgctgaaagacgggcgggtgatcatcaccaacgtgcgcggcttcaccctggagcgggcctatcaggtcttcccggacctgcccaacacggcggaaatcatcaacctcgatctggagtcgctggaagacctcgaaaagatgcgcacgtggttccagtgggcgccccgcggggccttcctgatcttcgacgaaacccaactgctgtttcccaagtcctggcgggaaaaagacctcgaacgcttcgactaccccggtggaccggaagcggcccacgcggccgaccgccccatgggctggctcgacgcctggacccggcaccggcatttcaactgggacattgtcctcaccacgccgaacatctcctacatccgcgacgacatccgcatgacctgcgagatggcctacaagcattccaacctcgcggtgatcggcatccctggccgctacaaggaggcccagcatgacgcccaactcaaccgtccgcccgccgatggcaccatcatcgagtacaagcggatccgaaagcagaccttcgccctctaccagtccacggccaccggcaagacccaagacaccaaggcgggcaagagcctcttccggtcgcctaagctggttcttctactggcattgctggccggcactattggctttgttagctatatggggccaatgcgggttattggtgctaagcctgatccggcggcttccgcgcctactcctaagcctcttccgaccgctactgcgcctgctgctgtggctgctccagcgcgtcctgctgcgaatagctttcttcctcctgggcttgtacctgatgggcctgctgctgcgcctgttgatctgaacgcccatcccttcgccgatcggcggatttcgatcctcgcccacgcctacatgccgtcgaagggcgatatctacatgttcgccctggatgaccctgccggccggcacctggaactcaccagttggcaactcgtgggatccggctacgcgatcaagccacgcggcgagtgcgtggccgaactgctctacggggaatgggaggggaccgtcacctgtgccggctcttcggtccggccggtggcggtcgctggcgagccgccgttgctcaacctgccgccatcggcagcgggcgcccgtgagcctgacaaggtgccgctgaccatcgtccccgattccgaatacgcctcgcggccctggaggcagaaatga

SEQ ID NO: 337954 - DNA, 234 bp, Pseudomonas aeruginosa
atgtcgatcgcctcgcggcagagcgaaaccctcgccgacatccacgccctgcgcgccgaagcccggcgcctggcggaaaccgacggcccgctgccgcgcccgccgggctactgcctgttcgaactgtgcctggagtcggtggagttctggggcaacggcaccgagcggctgcacgagcgcctgcgctacgaccgcgacgaaggaggctggaagcaccgctacctgcaaccgtga

SEQ ID NO: 337955 - DNA, 231 bp, Pseudomonas aeruginosa
atgtgggtcaacggcatcacccagggcctgatgtggcgcgcggtcaacgaggacggcaccctgacctactccttcgttgaagcactggtcgcaagccacccgggcttcatcgtgcgcatgatcggcggtggtttcttcctcaccggcatgctgctgatggcctacaacacctggcgcaccgtgcgtgctgccaagccggccgaatacgaagccgccgcgcagatcgcctga

SEQ ID NO: 337956 - DNA, 612 bp, Pseudomonas aeruginosa; identical to SEQ ID NO: 322822

SEQ ID NO: 337957 - DNA, 309 bp, Pseudomonas aeruginosa
gtgctcgatgccgccctggtgttgaccatcgacccggcctatttccgcttgaaaggtggcatcgaacgctggctgtatcgcctggtgcgcaagcacggcgggcggcaggaacacggctggcaattcgacttccggcatctgcaccgcaagtccggcagcgcggcgcgcttctcggacttcgcctacgacctgcgcgtgctggtcgcgcggcagtcgctgcccggctacgtcctgggcatcgagtcgatgccggacgagaagctggaactgctgaccttccggcccgtgccgttcacggcacggggataa

SEQ ID NO: 337958 - DNA, 276 bp, Pseudomonas aeruginosa
atggtggcgctgatccgcgaggcccaggtgttccggcctgcgctgcgcgcggccttcgtcatcaaccggcgcgtcagcaccacgatcatcgggcgcgaggcgcggcagtcgctggccgaccaaccgctgccggcgctgcgcgccgaggttcgccagcgcatcgtcttcgccgacagcgtggccgccggtcggctcgcacgcgagacggcgccggacagcgccgccgcgcgtgaaatcaccgcgctggtggacgaactgctgcggtggccgacatga

SEQ ID NO: 337959 - DNA, 276 bp, Pseudomonas aeruginosa
atggtggcgctgatccgcgaggcccaggtgtttcggcctgcgctgcgcgcggccttcgtcatcaatcggcgcgtcagtaccaccgtgatcgggcgcgaagcgcgccaggcgctcgccgaccagccgcttcctgcgctgcgcgcggaagtgcatcagcgcatcgtgttcgccgacagcgtggccgctggccggcttgcacgcgagacggcgccggacagcgccgccgcccgcgaaatcaccgcactggtggacgaactgctgcggtggccgacatga

SEQ ID NO: 337960 - DNA, 465 bp, Pseudomonas aeruginosa
atgcccccctacgccctcgtctacgccctgcatgtcctggccgcccttgtctgggtcggaggcatgttcttcgcctggacgattcttcgtccggcggccgtcgccgcgctggaggccccagcccgcctgggcctgtggctggaggtgttccgccgtttcttccattgggtctgggcggcggtgatcctgctaccgatcagcggcgtcggcatgctgcacctgagcttcaacggtttcgccggcgcgccgcgctacgtacaggtaatgatggggctctacgtcgccatgctggcactgttcctgcgggtgcaggcgctgcaagtgccggaactgcgccgcgcggtgcaggcccaggactggccggcaggcgggcaggcgctggggaagatccgccgcaccgtcggcttcaacctgctcctcggcctgctgctgatagccctggtagcggcacgcccgagcctctga

SEQ ID NO: 337961 - DNA, 810 bp, Pseudomonas aeruginosa
atgcgtaaggccatgctcggattgttcctggtcgttcccctggcctgggctggcgccgcgttttcggccgaggcgccgacggcacgccagcagggtatcggcggaaccgtgaaggttcaggcgaactcggtgatgcgcctgcccaagcgggcccaggagctgcgcctgcgcagagtggagatcggcgaggatgccgccctgctgattccgctggaggtcagcgtcttgcgcatcgaggaactgcacatggcgaagaacgcccggatcggcgtggcgccgggcgaagagcgaatcagcatcgaagtcgtcagcggccgcctggccgatggcagcatcatttccgcgcccggcgcgaccggcaccttccggcaaagcgccggtaacggccgcgacctgaccttgcgcttgcaggcggtggaggtggaaagcctgctgctggacgcccgcggtggcgtcggcgcgccaggctacgatggcctggacggggcttccggcaaggcctccggctgcctctggggcagcgcgctgaaaggtggcgacggccaatccggaagcgacggcggtccgggcggggcgggcggtcggattcgtctggaagtgccgggcgattttcctctggagcgcttgcaaacccgtctgcaaggcggcgtcggcggcgccggaggcaaggccggcaaaccgggtgcggcggataacgccaccggttgctggatctactcggtggatgccggtcgtgcggggcgcagcggagaggacggcgcgaacggcgccaacggcagcgacggcagcctggacgtcgtgcgcttctga

SEQ ID NO: 337962 - DNA, 1287 bp, Pseudomonas aeruginosa
atgacgctttcccaggacatccttcaggccctggctatctttcatcttgatcgccccgaggcagactggccgattctcaaggagcgcctgctggagatcgcacatgacgccctgagcggtgcaaacagcgatgactgcctgtcggcctacgacatgatctatgacgacctgaccgtatcactcgcccaggcagcagccaaagcgccactgaacgtcgatcaacacagggccttggacatcgggcgggagatcgtaaaggccgcacaagcacgcctgaagggcaacactaagcccctcatgggagtcattgaacgcctggagggcccggagtccggaggcaccctcccccacgtgtccgcccccctatctgtaggcgcccctactgatccaatcaccttcgaggcactcgctgagctgttcatcagtgaacgtcgcggcaacgtcgaggactcgaccctacgggccatccaatctaactgccggaccctttccagcctgctgggtgatctcgacatcaggacccatacacggactgacatggtgacgctcaaggagaagatcacagagggccgtaagccgctgaccatcaacaagctactgactcagctctcgaccgtaatggattgggcgaagaacaacggccatattgagcgggccttcgacaagggcctgaagatcgagcgaggcgcagagagcgagcgcaaaccgttctccgcagatcaggtggctaccatcatggcctacgccaatggcctgccagcagacgactggaaacgctgggcgctgtcccttggcgtacttacaggagcccgcattggcgagctttatcagctcacccaggccgatgtgaagcagattggcgaagtcaccgtgatcgacatcaacaaggatgaacagggcaagacgctgaagaatgatttctcggtgcgacaggtcccgctcgtcgatggggtacacgggttctccctcggtgcattcctcgaatgggtcgccggggagccagggaagctgttcaaggcccaggcccactacttcaacaagccgctcaatgatgcgctgcgtgaaccactgggccttgccgcaggaggtgactggtcgttccattcgctcaggcactcactgtcgggcctactgaaggccgccgcgacgcctgaagtgatcgcacaaagcatcactggacatagctcgggcaacatcacctacgatctctacgcaggctctcagcgggttccggtggagaccctacatgccgcgctgcgtactgccttcgagggagccattcgatga

SEQ ID NO: 337963 - DNA, 1113 bp, Pseudomonas aeruginosa
atggacagagtctgtacgcgctgcataggcgatgatgatctgaagcagtggatgcgcaagcagggaggcccccgaggttgcgattattgcaacacatcctatgcgccaacggtcgaactgcaggacctctgcgactatatcgaatcctgcatctgccaatactggggacgtgccgtcgagcagttgccatacgagagccgagaaggtgggtatcaagggcgaacgtgggacacctacgaagtcatctttgacgagatggaacttgatttgcctttggataccaaagacagccttcgatatgcaattgccgaaggcgttggagatgagctctggtgtgattatgactggctctcacttgatcaagatgtcgccatgatctcgggctggtcccggttctgcaacgtagtcaagcacaagcgacggttcttcttccaagaacaagactacgaccccgaggatcgtgattcctattcaccactggcgatccttcatgcgatagccgtttactctgaacggcaccatctgattaagacaatccgaccaagcaccagactctatcgggctcgggatgaccttaaacaccccagataccccgctaatgaattcgggccaccaccctacaacgtctgccagagcaatcggatgaaccctgcgggcgttccgatgttctacgcctcttttgataggagcaccgcagtcaaggaggttaagcaggaaagagcagcacttggtcgcttcacaacaacgcaccctttgcgcgttctcgatctcacccaattaccaccagagcctggctacttcgctgacacagagcgtgattcagcgatgcagctcagcttccttaatcacttcgccgcaaaaatcatgcagccagttgccagagacaacttggttcacgtcgagtacgtaccctcacagattgtgactgagtttctaagggactacctattcaacggcggaaatctcgatggagtgctctatggcagcgttgcctcgcctggcaggaagaatgttgtcctgttcgttgacacattgaacgctattgccccctccgccaaccataggcatccacctctccagttccatggcgccatcatgcactcactaacgtga

SEQ ID NO: 337964 - DNA, 687 bp, Pseudomonas aeruginosa
atgaccaaccaccctcgcccgtcgctgggcatctccgtcaacacagtctttccgattgctcctcatgcctgctgccagccccatgtcgtgggtctgtgtactggccgtggggagcgaacgcggggagcaatcgaaaggaaatacgacatcatgaatatcgacatcaagcacaagcacgcaggacacgtcattgtgatcgaaggacagccattcaaggccagcgcagcaggccaatggaatctgacggagatatggcgcgcgttgaaacttgaccctaagaagtcccccggccagtggcgaacaaaagaggccaagcgcctcgaagctatgcagaatttgcacagctccaacggggcggcatcctgggcgacaaagcgggcaaccatcgagtatgcagcgtgggtctcaccagaatttaaggacatggtgttcgatgcattcgaggccgtccttgagaacccggaggtcgcccatgccttggcaaagatcatgcacgaatcagggcaccagcatagcgcggcgatattggagcggattcttaccgagaaccaagagcgtaactgcattcttcgaagcctcgccaaaggccgcactctgagcccagcacaaaaggagcgtcagcgaataaaccgcaggatcaacgctgaagccagcagacagcgcaaagcaggccgtgactggtattaa

SEQ ID NO: 337965 - DNA, 2046 bp, Pseudomonas aeruginosa
atgagcgtaagcacgcatttgccaggacggctcagaaacacaccgctcccatatagccatggtctgatgcccctctttgaagcggtcgtcaactcaatccacgcgattgccgagtccaaccccgacttcgactgcggcgagatcactatcgagatcattcgttctccgcaaagcagtttgcatttagacgataaagcgaagcgtggcgctcctcctcaagagcccattattggtttcaaggtcatcgataatggtgtgggattccatgataagaatatggagtctttcgagacgctcgacagtgaatacaaagcctcgcaggggtgcagaggcgttgggcgccttctatggttaaaggcctttgaaggcgttaatgtgagtagcacatacaaagatgggggcgatgtttggaaggctcgcacctttacttttactgcttcacgtggggttgctgatatgagtctcagtaccccaacacttcacaagccaaaaacctgcgttcacctctcaggattccggagttcttaccgagagcgcgccccgaaaaacgccagaactattgctaatagtttatttgagcactgtctttggtattttgttcgtgacggcggcgcgccaagaattaccattgtggatgatggtgaaagactgggtcttgatactgtgtttgataagtatatgcactcttcatcccagagggatcaaattgagatcaaggggaagagttttgaggttactcatctaaagctcaaggcaagtagttcaaaatctccatttattgcttggtgtgcggcaagtcgagttgtagagcaggagtccatcgctggaaagatcagcggcttgcacggcaaaatcacggactcagatggcgacttcgtttacgcctgctatgtaacatcctcatttctcgatgagaatgttcggccagaacgtattggtttcgatatcgaagagatggctggcgaactgttcgcctctatatctgtgagtcttagcgacatacgtagcgctgttttggcttcatcaggctcctatctcgaaaaatatcttgaggaaaacaagagggccggaaaggaccgtgtggagaagtttgttgcgcaacgagcacctcgctacaggcctatcctgaggcacattgatgagtccaggctcacgattgatccagctatctctgataaagaactggacctgcttcttcatcggcagctcgcggagattgagagcagtatgctttccgaaggacatgatgtaatggcctttgacagcaatcagtctccgaaggactatcaggcccgtttgagtagctatcttgagaaggcagatgacatcaaaaagtctgacttggcaagttacgtgttccatcggaaagtcatactcgatatcttggggaaagcgatagagcgaggcgatgatggcaagtacgcgcgagaagatttaatacacgagcttattgcgccaatgagaaaaacctcagatgagatttctttcgatagtctaaatctttggctcattgatgaaagattggcttttcacgattttttggcttcggataagcctatctcatcgttcccgataacaggttgtggcgagcacaaagaacccgacatctgtatccttaatgttttcgacgagccgcttctggtttccgaaagtacgcgtagcgctcctgccaatctgacgatagtcgaaatcaaacgtccgatgcggaatgatgctgctcagggggaggaaaaggaccctatagagcagtcccttggctaccttcagagaatcagagatgggaaggttttgaccgcgaaaggtcgcccgattcccaactcagacagaattcctgggttctgctatgttctctgtgacttgactccttcgattgagatgcggtgcaggatacatggtctaacgcgagcggcagatgggcttggttacttcggatacaatacaaattttaacgcgtatatagaggtaatctcttttgatggagttgtgagctcggcaagggaaagaaatcgggcattctttgacaagcttggtcttccaactaattaa

SEQ ID NO: 337966 - DNA, 1440 bp, Pseudomonas aeruginosa
atggatttcgaagaatacgagcttcaaaagttgtttgggcacgaagcggcagaggacgaagtacctgagcgattaagggagtactattttaaggggaaaacatacgctcaagtcgtgaatgacttgccattgcgaattgtagtaggtcataaaggcgtaggaaagtcggcgctttttcaggtcgctattaatgaagaagctttacaaaaccggctcacacttctgataaagccagatgatatcgtagatatcggtgagagttccgatgatttcttgaagatgattcgggattggaaggccggcattaatgaaataattgcaaaaaaagtgctgacttcatttggaatgctctacgaagggtggagagggaagttaaatcagtacggtggcgctgccctagattttctggcgtccaccattcagcaagataaagctgacttgtctccggcaaaacaggcgatcctaagggatttcttaaagcatcaaaagatttctgtttatatagatgatcttgatcgaggatggcagggtcggaaacacgatattcagcgaatttccgccctcttaaatgcaattcgagatatctctacagagaacagggggatttactttcgtataagcctgcgctcggatgtttattacttggctcgtacgtctgatgagtcaacagataaaaccgagggctctgtgatttggttctcttggaccaatcatgaaattcttgccctcttatccaagcgtatagatagctattttggcggaaaagttacagaaactgagttcctggaaaagcatcaatcccaaatgatgtcgtatctcagtcctattattgaggagaaattctcagggagaggccattggcaagatgcccccatgtaccgcgtgctaatgtcgctcattaggaagaggcctagagatcttgtcaagctgcttactctcgcaggtagagaggctaaatctaaaaactctccaatcataaccactcgaaatcttgaggctgtttttgaagagtactcacaggggcggctgcaggatacaatcaatgagtatcggtcagagcttccgactatagagcgacttatcctcggaatgcgaccgacaaaagcgcagagaaaattggggcaagggtatatatatagcacggatcttttgcttaaaaagcttaaaggaattgaagagcaagggaaattccgttgggctaatggtaacttaattgatactcagggccttgcggcgtttttgttcaagattaattttattacggcccggaaagcgatgccgtctggcatcgatcgaaaatattttgaggaaaatcgatatctttccaataagtttgttgatttcggatacgattgggaggtccatcctgcatatagatgggcattgcagcctgaggatccgattcagatctttaatgagctggagttaagttcggcctga

SEQ ID NO: 337967 - DNA, 135 bp, Pseudomonas aeruginosa
atgggtgaccgccatgatgttgtctggggctggattcgcaatggctacatcccccacgagaaggtcggcaagcacgtgttggttaacgtcgcattgttcaccagtcagcttatggaaaaggtgatgcccctatga

SEQ ID NO: 337968 - DNA, 216 bp, Pseudomonas aeruginosa
atgagcgaacaccaatcgggccccgatatttgcaccatcccggccttcgccgaaatgtgcggagtgagtgttgaagaagctgaggaatgggtgcgtaacggcaccatccccaacaccaccatgggggaaatgcaggtggtgaacatggtgcgcctccgcgttgagctgctcagtggcaaagagaatttcgaagcgggggactacagcaatgactag

SEQ ID NO: 337969 - DNA, 261 bp, Pseudomonas aeruginosa
atgagggtggtgctgatgctggtgatggttgcgctggcgggatgcgccggccaggtcgagcctgagccgcgcacggtgcgcgtagaagtgccggtggcggtgccttgccgggtgccggcggtcgaggttccggtctgggctacagtggggctgaggaagggcgacgacttgcaggccaaggtccgtgcgctgctggccgagcgccggcagcggatgggctacgagaagaagctggaagctgcattgcatgcctgccagtga

SEQ ID NO: 337970 - DNA, 159 bp, Pseudomonas aeruginosa
atgtcggtggcctggttcatggtgatgacgtcggcgggcagaccgtcgatcaccgagcgcgcctgcttgctggaaccgccgtgggacatctggatggtgatgttctcgcctttctccgctttccagtatttctggaaggccgggttgtattccttgtag

SEQ ID NO: 337971 - DNA, 1020 bp, Pseudomonas aeruginosa
atgtcccgagtgatccgttttcatcagtttggcccgccagaggtcctcaaatgcgaagagctgccgaccccggcgccggccgcaggggaagtcctggtgcgtgtccaggcgatcggcgtgagctggaaggatgtgctctggcgtcagaacctggccccggagcaggctgcgctgccgtccggtctcggcttcgaactggccggcgaggtgctggcggtcggcgtcggcgtcggcgacctgccgctgggttcccgcgtggccagtttccccgcccatacccccgatcattatccggcctatggcgacgtggtgctgatgccgcgcgcggccctggcggtataccccgaggtactcaccccggtggaggccagcgtctactacaccggcctgctggtggcctatttcggcctggtcgacctggccgggttgaaggccgggcagaccgtgctgatcaccgaggcggcgcgcatgtacggaccggtctcgatccagttggccaaggctctcggcgcgcgggtgatcgcttccaccaagtccgccgaggagcgcgagttcctccgcgagcagggcgccgacaaggtggtggtgaccgacgagcaggacctggtcctggaagtcgagcgcttcaccgagggcaagggcgtcaatgtcatccttgacgaattgggcggcccgcagatgaccctgctcggcgatgtctccgccacccgcggcaagctggtgctgtatggctgcaacggcggcaacgagtcggcgttcccggcctgcgccgcgttcaagaagcacctgcagttctaccgccactgcctgatggatttcaccggtcatccggagatgggcctggaacgcaacgacgagtcggtgagcaaggccctcgcgcacatcgagcaactgacccgcgatcgcctgctcaaaccggtggtcgaccgggtattcgagttcgaccaggtggtcgaggcgcaccgctacatggaaacctgtccgaagcgtggccgggtggtgatccacgtcgccgattga

SEQ ID NO: 337972 - DNA, 210 bp, Pseudomonas aeruginosa
atgatgcaggagctgggtgtcaccctggaaatcatcgaccgctgccaaaaccacttgttaggcgggtccaaggtgcgccggcactatctacatcacgactatgccaaggagaaaaccgaagcatggcatcagcttggagacaaactggcagcaatcctagccagcagcgcaatcagtgatagcagcagccaatcgctatccgcaccataa

SEQ ID NO: 337973 - DNA, 744 bp, Pseudomonas aeruginosa
atggccgactccagcatcagcattggcaaagtcatcaccactagcaccagcttcgttgacaaagcagttgagtttcgacacttcatgctattgatctcgtttctgctggcgttagattcctgcttgatgattttctacaaaaagaatcttctacaatcattcgaccacttgagcgcgcccgaagtcagtgtcgcaggagcgctagttttcctaggaatttttgcattcctgatggccttattctttcctgttttacggcatgtgttactagcagctactacatggattaaaatttactgcccaaccaaaggtgaagaaagaaatcatgactttcgctacccgagcgccgcgcgtcgcgaagcgttaattgagagagacaaattaatcattgagctacttgaaaaacaggacgaacaaaaaagcaaccacgaaaccaacatgaacattagttttggcttagtgattatgttcgccattgactacctaactttaggaactgaccatacattgacgctagcgcaaactgcggccacgataccgggcatcatctcaggcttctggatcagcctcttaatccagattgcttttggtatattcatagtttttttattagtggtacttacgatgtctcttacacccgacactagcgaaaaattctacctacctgagtccgatatggagaaggctgtacggacagaaagagaacggaaaatgaagagcccagcaggtgtcaacctaggttaa

SEQ ID NO: 337974 - DNA, 1035 bp, Pseudomonas aeruginosa
gtggctaagagcgtgatgtttgccgttgcaggttctggcaaaaccacgacgctcattgagcgcctgaccctagatcagcgtgctttgatcatcacctacacagagaacaactacgcccacctgcagcgcagcatcatccgaaaattcggatttctacctcccaatatatccctatttacctactttgggtttcttaatggcttctgctacaggccgcagcttgagctagctttgggcacgcgtgggctgagcttcataacgccgccggctcacacacggacatttgctcgtactcggatggagtactacaaggacggcaaggggtatctgttccacaaccgcctggccaagctgcttcaggtcaaggggactgtccctcggctcattgcacgagttgagcgtttctacgaccagctttttgtcgatgaggtccaagattttgcgggccacgacttcgatcttttgctcgccctgatgccagctcaggtagacatcctgctggttggcgatttctaccagcacacttttgataccagccgagatggtcccaccaaccgtacactgcatgacgacatccagcgttacgagcgccgttttagtgatgtgggcgttcaggttgacaaggaaaccttgagccacagctggcggtgtggaaccactgtgtgcgacttcattacaactcatcttcaaatcaatatcgggtcacacaggagcgatgaaatggcgattgttcctgtgatcactcaggatcatgccgacaccgtccatgctgacccgggagtggtgaagctcttctaccaggagagctacaagtacggatgccatgcgttcaattggggagcgagcaaaggcatggatcacttccaagatgtgtgcgttgtactgagcgacaaaaactggaagctctatcttcgaggcagctttgaaggtctgcctgcccagacgcgtaacaagctctacgtagcgtgctctcgtgcgcgaggtaatctctatttggtgcacgaaaagcacttcagggcttttaaggccacctga

SEQ ID NO: 337975 - DNA, 1563 bp, Pseudomonas aeruginosa
atgcccactattcgcaagctgattcttcagaacttcaagcagtttggccggctggatctggagtttgatgagcgccataacgttctgattggtgataacgagacaggtaagagttctgtgcttcttgctctggacttggcattaagcggcagtcgaaatcgagtcgagaacctcgggtttgaggccttgttttgcaagtctgtcatcgaggcgtttcttgatggtccgcgtagcatcgaccaactgccgacgctcgttatcgatgtgttcctggcggaaggccaagacgaaggtctttacggtgttggcaatctggctggacaggagacggatggcattcggctggcgattgagccggtgcaggactacggtgcggagattcgtgcagtgcttgctcagcccggccgtaattttccattcgagtactacgccgttaagttccagaccttcgcccgaaatccttatgcgagcttcaaccgaccagtgcgccatctcctgctagacagctctcgtatcgacagcgactacgctgcccgggaatatatccgctcggtgttccacttccacgccccggtggaggttcgatatcagctggaaaatgcgtatcgcatgggtaagtcgaacttcaaggacaaccatctggctgggcttaacggagaactagagggctttcagtttgaggttcgctcaggtgcccgctcaaacctcgaaaccgacctggtgatttcagaggacggtattgctctggagcatcgaggtaaggggcggcagtgcttcatcaagacgagctttgctctcaacacgcgccgagcccaagccggcttcgatgtcatgctgcttgaggagcctgaaaaccatctaagcaataccttgatgaagcggttggtcaacgagctctccaagaaagacggaactcaactcttcatcgcgacccatagcagccacatctgctctcgccttgatctgcgcaacgcgttactgctcgggccaggtcagcgtagtggcacgctcaggcagctgtccgaggatacagctgccttctttatgaaggcccccgacaacaatgttcttgagttcgccctgtcccgcagggtgattcttgtcgagggcgatgcggagttcatcctcctcgaggccttttacacgaagctgacggggtgccttcctgccgaagacgatgtccatgtgatttccatcggcggtaccagcttcaagcgatatttggagcttgctgcgctgctgaacatcaaggttgcagcgttaagagataacgatggcagctacgaggaaaactgcgttgagaactacgctgacctagtgaccgagcatgccaggatctttgctgatgctgacaaccagcgcagtacctttgaaataggtctgtatgccgacaacacagccatctgtgacgagttgtttgctccagggcgaaggaccctgacccctcagcaatacatgctggcgaacaaagcggaagccgcatttgagttgctgggcaagaaagcggatgagctggttgttcctggctacattgcggaggcaatcgcgtggctaagagcgtga

SEQ ID NO: 337976 - DNA, 624 bp, Pseudomonas aeruginosa
atgctcatgcaaaacctaaagtctctgcacgaaagcatgaaaactcagacgaatacacacggagatgtaattgagctgcagcgtttcagaagcgtgcagggctcagctgtatttgagtgcattttctccacgggggaacggccttataagctgtcgctgacatcacgcggaacagaaaagcatccgaagtccgaattctttttgtttgatgtatccgacgagtacacgatccccaactattttcatggggatactcatccgagactgcttgagcttctaaaaacgcagggaggcctgacaggcaataggctttatcctgcagacttcttggcacaacttgacgccaatgttcccgtgacggcaacgattccggctatcccaagctcagactatgtgctcgcgaaccgcccggatttgaccgatgagcgtgacaagccatattggagccattggtccaagccgcgtagcaaagctgatggctcgcctggacaggtctcctcagaaaaccaagagaagacagcgacactacttggctcggcagctctgacctatagccgcactatgcggatgtcctcgtgctggagcccggtgccaacaaacaagaactggcgtcagtctagctga

SEQ ID NO: 337977 - DNA, 765 bp, Pseudomonas aeruginosa
ttgatcgacttccattgccatgtagatctctaccccagagctagggaagtacatgctgaagctctgagtcgcaatgcattcacgtggctggtaactacgagcccgaaggctttccaggcaacgagctcggtgcttggtcaccacgaagcaatgctgatcagcccgggccttcaccctgagatagtcggtgagcgcttccaagaattggacctcctgacagagttgattgatggcgccattgctgttggtgaaatcggtttggatggctctaagaggtatgcctctagctacctaaagcagaagcaagttttcgctactgccgtgaagcgatgccatgacttgggagggcgtgcgctcagcatccactcgaggcaggcggtttcagaggtgttggcgctactcagtgagttccctgatcacggcatcccggtactgcattggttcaccggtacggcatcagagctcaaggccgctgctgggcaaggctgctggttcagcattggccccgcagctttccattccgcggctgggaaggcactagccaagaagcttccgaaagatagggtccttcctgaaagcgatgggcctttcgcgcagttggaagggcgtccagtgatgccctgggacttcgacattaccgtcaatctgctgagcgaggcttgggcgctaccaccgctagaggttcagcaccagttgttgagcaacgccaaggctctgcttagcctgataggtagcaaagcttcagcgcatatccccacccaataa

SEQ ID NO: 337978 - DNA, 1266 bp, Pseudomonas aeruginosa
atgaataaggttctgtgctccaaagcggaaaggattccgcagcagctacaagcagacgagagagcgttctcgtacttcaagggagcgagtcgcaatggtgtcggcgcaattgccaaccgctggcatggggcattgaagagaacaggattccgtccttcaccagcagtttgggacttcgttcagttctgtcttgcggtctgcagcgctgatctggctagcccccgaagcaccagtgcagatgggtggacccgtgcgatccagctcaccgtgggtctttgtgagccgctacggtgggttcctctaaagcatcgccttgaggaaatgctcaaggttttaactggcgactattggaccctcattttcaacgacgcaggggttgagccgcctgatggcgatggtgcttatctccagaacgactgcgtgtctttgctatcaggtgggctcgatagtctgattggcggcatcaatttggccgcggaacaaagacgtcctctgttcgtttcccagcttgcgcataaggactcggcacggcagcgggactatgcagggctgcttgcgggcgctggctcgcattaccaatggagccatggcatcagtttcaaaggggcacgtgaggcttcgactcgtgctcgatccttggccttctatgcgtttgccgtgctcgcctcgacgaagatcaatctgcccaggccgcaaatttacatccctgaaaacgggtttatctgcatcaaccctccactggtccctggccgagtctcgagcctgagtacgcgcacgacccatccgcttttcatcggaacgcttcaaagcgtgctcgatgagctcgggatatccgttgagttgatactgccttatcgcttccaaaccaaaggagagatgatgcagggctgtctcgatcaggacaggttgagagagttggcttcggactccacaagctgcgggcgcttccggacttataatcgccagcactgtggccgttgtgtgccttgtctgatccgtcgagcagctttcttggcgtggggaccaggaaccgatcaaaccaactatcgctttccgtcagtactaggcagcgataagtcaggcggtcctgatgatcccatggcagtagctctggctgtgctcgatgccaagcagagagggctggatcgatttctgggcggcacactggcctttgcacctattgaggagcgtccagactatcgccgagtcctgcagcagggacttgctgagctggaagccgttcttgttcaggaccaattgctttga

SEQ ID NO: 337979 - DNA, 834 bp, Pseudomonas aeruginosa
atgggcacttcaacatccagcagtggcggccgtgcaggctctccttttgatccagaatggctttctccagatggagctgctcccagtagcaccggaggcggagccgaatctggctctgaccaggggggcgctgagggagctaccgccggcgaagcgcctgcggctcccgagaatgttatagccccgggccgccggttcggtcctgcccgctcgcaaatgggctcgtacctcggaaatggcagtcgcgatgatcttcggggcgcgactaggagcatggtctcgaaggggatgggtggagcaagccgtgctgcttcgaccatgcgaagtaccgccagaggagccggggccctaggtcagtttctgatggctgctcgcgatggcaccgatcagcgagtgacagactgggtagcgcgttgccgatcggccaatctttccgcttctgacttggcgcttgaggtcctgaaggaggttttttccggatcgggcagcattgacgaagactcgttgcgtgatgccggcgcagaggcgttagccaagctctacgagaatcatccggatatagacattctggctcccactgatgagcagattgctgaagtgatggggctgacaatcgctatccaaatctgccagcgcatcgatatgcagctcgggcagacctacgaaaaactcgtgcatgacccggcactgatccaagagcgccgagctgacataagggaatgggtctgggcggaagtacgggtcgtcatggaggagaagaaagcttcgcatgcggatccgaagagtttggctcagtcaatcctccaatccgcgttgcaggtgtttgccgaatga

SEQ ID NO: 337980 - DNA, 1872 bp, Pseudomonas aeruginosa
atgtggcatgacaacgagacagcgattgactacctgaatttcggcgtagtggctgatgcatgcgcaagcatgttgacgcgagctgatggagagccgatatccattggtgtttccggtggatggggaactggcaagtcgtctttggtgaagatgattgcagctcgactgaaggctcccgccgaagctgcagctgatgcgagcgacaagccacgaaataccttcgttgtcctcactttcaatccgtggctgtaccaagatttcgagtcagctcgcagtgctctgcttcagatcgtaggcgatgagattgttcggcttgccaaagagaaccagaccatcgctgacaaggtcgctgagctatggcggcgcatcaacctgctcaggattgctcagctgagtggtgaggccgcactgacactgtcgactgggattccgatcggtgcccttggcaaaacattcaacgctattgctggcttcttctcttcgccggaaaagtcaggcgaggtagcagtagatgctgagggcatcacgtcggcggccaatggtttgctgaagccaagtgaaccgttctccatgcccgcgcacatccaggccttccgagacaccttggaagagcttctcgccgaactcgaaatcaccttggtgatttttgtcgacgacctggatcgatgccttccacaaaccgcaatttcaacgctcgaatctattcgtctactgctgttcattcgccgtagcgcattcgttgttgcggccgacaacgacttcatcaaggccgctgtgaaagtccattttgatggagcgggcatttcgagcgacgtagcaaccaactactttgacaagctcatccaggtcccgctgaacgttccacggcttggcctcaacgaggcgaaagcctacctagtgctactccttcttgagcgagaggccaaagctggcacattcaccagcgctcaattcgaaagcgcgctcaaactcattcccgataggctgcgaaacagctggaaaggcgagacgattaaccaagagtttctctacgagctggtcggaacaaatgaagcactacgaggcttgatggatcttgcagaggggctggcatcacttctccatggctcttcagcagtcaatgccaatccccgactcatgaagcgcttcctgaacacggtttatctgcgcgaggccctttctgcgccgcaggggatcaagctagatatcgcagcattggcgaaatggcaccttctggagcgctgtgatgaatcgcttgcagaggcgattgctggccaagtccattcagacaatgacggtagggtgcaggtccttgctgatgcggaaggcgtggctgctagccaaaccggattgcccgacccctttaaggacaaccccttcactaggcagtggctccaactgcctccagcactcggcacggaagatctccgtccactgttacacctgagccgcgactcaggtactcgtgacttcggtgatgacaacatgacgcctgattcacgcaagcttcgtgatgcgctgaagacagcaaggagcgggcatcaatctctcacggaccttatgaataaagttgggcctgatcagactgagctggccatggtcaaggcgtggcagagctgcgccactgtgcgcaactggaagcgtaacgaagacactgtgatgctcgttgagtgttgcaaggcattccctcaccttgggaaaaaggcagccagcctgttggagcaagcgcctctaaaactagtcggccccggctttattccaaccctaggtacccataagtgggcgcgcgaggtattggagcgttggaagggtttaaacgagctatctggtccaactaaaagggctattgagcagctaggggcgaagcactga

SEQ ID NO: 337981 - DNA, 384 bp, Pseudomonas aeruginosa
atgaaagcgactccgttgagcagtaccggcaagactcgcccggcactgcgcctgatcagtaccaaggaactgccccgcgaagactggctggctgtgcgcaggcaaggcatcggcagttctgacgcctcggccgcagtcggcctgaatccctacaaatcgcaactggagctgtggctggagaaaaccggtcgcgacgccaagctgccgaaggccgacccgcatgacgagcaaagcccgatgtactggggcaacgtgctggaacccatcgtggcctggcactacagcaagcgcaccggcaacaaggttcgacgcatcaacgccgtgctgcagcatccaaatcccgagctaccctggatgctggccaacatcgacaccgcgaggtga

SEQ ID NO: 337982 - DNA, 2277 bp, Pseudomonas aeruginosa
atgacacgcaagaaaggcccagaatcagcccaggatcggcccagcccacgaactgaaaaccctttcttccacatcccattttctccgatggacctcagttcggttgagcgtgcacccggtgggggcaagaagcttctggtaccggtggatgatgaataccgaaaaactctctcgcaaagcttaatgcgagccgcattagcgttgtctgatgaacgggaaaggtatccatcgcagctatcgacatttgtcttccggcttagagagaaagggatagcgaagtcccaccggccagtagagctcactgaagagacaggattgcaacctgcaggtcacgccagagttgacgagatgttggtttctgccgatggaagcgctatttctgctctgagaaacgctattttgacgcgcagaacaaaagtcattaccgctaacctcagtgctattgaagggattgagccctggggacgggctcgtcgtaaccctggcggctccgctgagctacaacaaaagggtcgtggtctgctgaggcttttccagtatcagcggacggattttaacagcatcaaccaggaagccatccttcgattgttgaagtcgctgaatattgactactcggagatccccatcgggagaggtctgcctcttattgcgctacggcgcattgatcgactcgacgactcagatcttgatagattgctggactatcctggtgtacgacagatttacgctgagcctaccttctacagtcataactcggtagttgtcccggtaagtgctgtatcaggtagtgctgcttctcccgctagttctgtctatcctacggtggcagtcttcgatacaggggtaagcagagacgcgttggcaataaccggctgggtgaaaagtcgagatacttacgttcttccgcctgacacgaatttcgagcacggcacggcggtcgcctccctcgtggcaggtgcggctcatttcaataatggacacccttggatacctacgacacaggcgtatatacatgacgtatgcgcgctagaagctgcaggttcatccttcagtgatttggagttgagactgcgagaggcggttcaacgccgaccggatatcaaagtttggaatctttcgctcggcggcgctgcatgcgacgagcaaagcttcagtgaaatgtctatggcgctagatgaccttagcgacaaatatggagttctcttcgttgtcgctgctgggaactatcttgatcagccgcgccgaacgtggccaaatcctgcgcagcttgcggatcgcgtttcttgtcctggtgagtctgtccgagctctaacagtgggatcgatctcgcacgttgacgctgctgggacgctatctgcggcagggcatcctacgccatattctcgctgtggcccaggcccagtctttacacctaaaccagatatcacccatgtaggaggtggcgttcatgcaccttgggcagtaggcccgagcagccttcaagtactcacgccgaataatcatttggcctacggcttcgggactagctacgcagcccctatcgcatctgcaatggccgccaacgcctggttggcgatgtccgggcatgggacgttgacgccaacccctgcactggtgaaagccttgcttatccattctgcgcagttgtcgtcacccaattacgtggcattcgagcgtcgataccatggtgtaggtagaccagaggcgatattgaagtgtctgtatgacagcgatgatagtttcacattggtttttcaggcggatctagtacccggaatgcgatggcgtaaagctccatatccaatccctgatgctcttattcataacggaaagtttcgaggtgagatcataattactgctgcctactcacccccggttgatcctggtgctggcagtgaatacgttcgagccaatgttgaattaagctttggcgaaatcgacggcaataacattagaggtaaagttcccatggatggtgaagaggggcaaagtggttacgaagtcgctcaaatagagcatggaagtaaatggtcgccagtgaaagttcatcgtaagagctttcctaatggaacagccgttgaaacttgggggctgcaagccacggccatgcttcgagctttcgaaccagctcttacgcatgcgcttcctgtgaccatcatcgtcacgcttcgtgctctagatggaaacccagatgttagaagtgacggagttcgggcgctgacgcagtccaactgggttcatgccgtacttcctgtacgcatgcctatccgcacttga

SEQ ID NO: 337983 - DNA, 1185 bp, Pseudomonas aeruginosa
ttggaacatctctccgaaatactgaaaatccttgacggtgccttgaaagccaatgccagcatggcctccaattatgcaggtcttcttgccgagaagctggagcaggcaggagatggtaagcaagcgcgcatgattcgtgagcggctcgcccgagcacctgtcgcgctagcaaatgctcaggatgcttcgagcggagtcagttttggcaaccttccagtagacggtgaaagccatttgcacacggtggacgtaagccatccaatggaagatgaaactcctcttctcctaccgagcgcgattgcttcacgaatcagtgagttcatagcgaacgtccagcgctacgacgagcttgcgcgcgtgaatgcagcgatgccaagtaggttgttagcctacggcctccccggcacggggaagactaaactggcccgttatatcgccgctaagctcaggctgccgctgcttacagtacgctgcgatactctagtgagtagtctcctagggcagacgagtagaaacctgcgaagagtttttgaatttgcacaacaaagaccttgtgtacttcttctcgacgagtttgatgctcttgcgagtgctagggggaatgatcgagatgttggagagcttcagcgcgtcgtcatcgccttgctccaaaacattgatgcgatagctgagagcaccgtcgtcattgctgccacgaatcacgatcgcttgctagatccagcggtgtggcgacgtttcggtttccgggtgcctatgccaattccagacactgccttgcgtaggcagctatggattcagttcctgttaccgtataccactgaaagtattgacgtggatcatctagctagtatttccgcaggtattaccggtgcaaatatcgaacaggtttgcttggatacgaagcgagcgactgttctagcgggtgcaaaggaaattagcgagctagagctagtacgaaggttaggtttaaatctcgccataaccagtggcatactgctatcgactgtcgaggctgagatttactggttgcgagaatggtctcccaagcatttttccttgagagcactcgcaaagctttacggcttgtcgacaagatacataggcaaagtcatcaaggaaggcaccgaccatgacacgcaagaaaggcccagaatcagcccaggatcggcccagcccacgaactga

SEQ ID NO: 337984 - DNA, 267 bp, Pseudomonas aeruginosa
atgctgatcgttcggctggaacaggggtggacccttaagcttgataggcaggttggcagttcggggaagcacggcatttggtcgttccactgtgctgaaagcacctatactcctgctcccgctgagctactgcgtcatgcggccattctgccggcagagcccaaggatgggcaaaaggtaaaggtggctatttgcgacacgcgcatgccgcaggacgaatggcggcctgttgggaacggcgttgcgacctatgaggccgagcgctga

SEQ ID NO: 337985 - DNA, 252 bp, Pseudomonas aeruginosa
atgcgatcgaagagcaacgttttggagaactacaacatgcgcaagctatcaatgatcagcttactgctgacttggctgctgctcggcagcggctgcgggtccgtatcacccacgtcggttgtacctctatcggcctgcctgtcggaaccgccggcgccggcgtggatgatggagccgagtacgccgaacttcacccagcgactgcggcagatcttgcccgtctcgcagcagatgccgaccagtgtgcagtga

SEQ ID NO: 337986 - DNA, 348 bp, Pseudomonas aeruginosa
atgaataaacggatgttgcccgggctgcgcgcccatgttgatcagctcttgcgcgatggctggtggatctccgcacgcgatccgctcaccttgaaacgcgggtccgaccgcctgcagtgcctggacggcatgctggtcggctcggctcagtcaaacctcgatatcgaactgagggagctgcggcgccggcccggtcaccagaccatcgctgatgaacgccatctgcccagccggcaccgccgtgccccgagccgcaatcacaacgttgtttcgcaggcggacgcggcaggtgccggcgccctcgtcgacatcgatcacctcccccaccgtgcgcgcgccgcccggtaa

SEQ ID NO: 337987 - DNA, 270 bp, Pseudomonas aeruginosa
atgaaccggatactcaacattctgattccccgcttcatcaccgagcgggtggcgctgctcgaagcaactgccggccacttggagattgcctgcgccatctccgacgtgcggccgaacgagcggttcgacgggatcgccaccatacgatccttcaacctgctgggcttcgccttgttccccaagatggtggacggccctcatccatggccagttcaactccactcgaccccagccaacggccacaccgaacaaccagggagcagccaatga

SEQ ID NO: 337988 - DNA, 789 bp, Pseudomonas aeruginosa
atgactcccacgggttcacaggggatctcgcaatgcaggaagatggtcgctcgaagcctgacgaatgcgggccaccgcctcgctagaaaagcgagaaaggccccgccccttctcagcctccgaggaatcgaaactcggatcacgcaaaaggcggtcgaccagcatcctcaactcagtggtgacgaagcgaagttcaatccaaccaatagatgcttcggactccggtatcaggtgaaacggcaattcaatcaaaagagcctctgcgcgcctcaagccaagcaatgccaactcgatatcttcgtgcgcagaattgctttccaagagtacttctatagcaacctggttgacgttgtttgcgtatctcgcgatcgccaccactttcttaagtgcctctgcctcctgcttcttgagcagttcaatttgatgccggctttgagccgatacaacccatatcgccgcaacaatggctccaatggacccaatcgcctgcacccaagccggcatttcattcactcgccctaccgaagcaaggatgacatgcaagctccaccccaagaagctaagagaaagaaaaatccatacaacccaaatacttgccaacttcacactttccggaactctgacgctccccatcgcctgcatcccttaataatccaaactcacgaaagcatgagggtagcttggccgaatgattggagggaaactctcatgaacgagtccccccgaacgcatcactcttacccagtctcgcaacaacaagacagaggggacccatcatgcgtagcgtag

SEQ ID NO: 337989 - DNA, 672 bp, Pseudomonas aeruginosa
atgtccgtcaaatttgtcctcttcgatgcattcggcacgcttgtccgcatccccaaagccatccacccctaccgtcaaattctcaaagagggcatccgccagggtcgcagaccgcgaccagatgacctgcaccacatcatgggtcgcactctgagcctgagcgatgcggcagagcacttcgggatcaagatcccggcagatcgcatggccgagattcaaggtgccttggaagcagagctggacagtatcgaagccttcgaagatgggattcgagccgttgagcgattgcaggctgagggcatcaagattgccatcgcgtccaatctagcagccccatacgcagcgcctgtccggcgtctgtacccaaccatggatgcctatggcttcagcttcgctgttggagccctgaaaccccagccattcctgtatcgcgctacttgcgaactcttgggggcggagaccagcgatgcctgcgaagaaaacgctgtgctgatgattggcgattcagacaagtgtgaccgtgacggccctatggccgtgggcattcggggatttctgctgaaccgcaatggggggaaagatttcgccaacctcgatgagtttgccgacgcagttttgaaggcgtcctgccccatcgtttcccctgtcagaccggcacttcatcgctcctga

SEQ ID NO: 337990 - DNA, 1824 bp, Pseudomonas aeruginosa
gtgatcaagaatttgatattgcgcggcgtttcgagctactcccccgagcaaaactcccagatcggcccactcacgaaagtgaacatgttctatgggcacaatggaacgggtaagaccacgatcggcaactaccttcaagatccttctgacctgctgtaccaccagtgcaagacccagcctgtctcggtggaacgtggagtgatggtctacaaccacacgttcatggagaccaatttccacgcaagctcacagcccggcatcttcacgctcaatgaaggaaatattgacgccgagaaaaagctgctcgcggctgaagacgcactcaaaaagctaatgcttgaacaccaggccgaggtggcagcgggcaatgggttcggggagtcccagaaatccaataaagcggatttgctcgatcagctatgggccctcaaaagaccgttcgataccgggcctctgcgatactgcttcgcttctctcaacacaaaggaacggcttggggaaaagctacgcaccctgtctcttgtgccgtcgccggatgatttctcagcgttggcggcggaggcggaacagttgcaatcagccagtgatgctgagctgcctggtatacccacaatccggtttgcggatgcggacgttgaagccagctctctgctatcggaggccattgccggctccggtgactcctatctttcagcattgatcaccgacctggggaacaccgattgggtcaagcgagggttgcagtacccgcagcgggaagagtgcccgttttgtcagcaaactctaccttctggattttacgaagaaatccagaaggtgttcgacaagacgtatgaacagcgcatcacccaattgaaagccctgaaaacgcggtacgaaggcggcgtgactcgcttgaaaacccagttcaagcgtcccgaatacgacgcgcctgagtatcaactgctgattacgaaactcgatgctctgctttcgcagaatacgcaaaagctggatgccaaagtggccagtccttcaatggctgtggcactggagcctaccgggttgatcatggatgatctcaccgacttgattgcggaaggtcaaaggaaaatcgatgctttcaatctcaaggtgaaagacaaggaaaaccacttggaaaaaatcaagtcacgcttttggatctgcttcagatccagttgcgatgctgtcatcgcatcggccaggaaggtgcacgaggagcttggggtcaagaaggaagcgaaacgcaagctggcggatgagatccgtctcaagtcacaagctcaccaagatgtcatcgccgagagtaaagccaagatcacgaatattgatcaatccgttggcagtattaactcgtcacttaccgcattgggcctgaacggctttgtggtggtcagggaggacggggagttgccgcgctaccgtctgcagcggcctgatcagcaggctggggtattcaagacgctcagcgagggtgagaagactctgatttcattcctgtacttcctggaagtttgtaatggcgagctcgacgaaaaaagtggcaagctcaaaagtgagcggatcattgtcattgacgatcctatatcaagcctctttcacaactatatttacgacatcgccacaatgatccataggcgagtgctgagccccaaggaacgctttaaacaagtattcatcctgacgcacaatttgttcttctttcatgaaatgctcaagcacctcaggaagtccgacgaatactcgttgttccggatcaccaaggcagcccacagcatgatcacaccgatgaaggccagtgacgtacagaatgactatcaataa

SEQ ID NO: 337991 - DNA, 1158 bp, Pseudomonas aeruginosa
atggagctcccctgtctgttcgcgtacgagggtacgcaacacaccatgagagtggggaaggttgaggtaaagcttcgtagagacggcaaaattttgtttgctcgaccgatcattgatgagcgaattgcacccattgaatttgcgcagatcaaacctcatcaagccgctcttgatattcgggattgggagatcaatcgcacgcactgggcggtcaaggatgaagacctttttgccattcttcatcgcgcaggtattttgccggaagggatggttggctcgaaagtcaccaaggaagatcttcctgccacctcgccaccggaaacccaagctgacagcgtcggtgccttcattgaacatgtttttcgactaaaccatggccgtcgcgaggttttttatcgagggcactcgaacagcaaaaagtatcgcttggaaccctcgatttttcgcagggatcaagatggtaacttcgtataccgagatgctgaagataggatgtatcgggaacttctggtttccaactccctggatttcagtggcgatatctataccttggatcgcctggtgcggatgcagcattactcgctgccgacacgattactcgatatcacatcgaacccattgatcgggttgtacttctgctgtaagagccacttagatgatgctggagaggtcatcgtgctctccatggatcctggttatatcaaatacttcgattctgatacggcgagttgtattgctaacctgtctcgtttgtcgaaaggcgtcagggactcaatcacattcgattctgaagacgtagatgtttttaacgatcagcgggcattgaagcagttgcttcattttatcaaggaagaaaagccattctttgaaccccgcttggaacctgggcatctccgctccgtgttgtgcgtcaaaggaaaacacaccaatagcaggatctcatttcagtcaggagctttccttctgttcggtgatgaagcggtgttggatgaggaaggtacttccgatattacgcttcaccgcatagcggtaacgaacaagagaagtattttgaaagagcttgatcggttgaatataaacgagagtacggtgtttccctatatagaaagctcggcgaagtacattgctcaaaagttttccttccaagccagtgagtga

SEQ ID NO: 337992 - DNA, 1068 bp, Pseudomonas aeruginosa
atgcgcgttccggtctatcccgaagatctgctcccccaagccgccttcaaaagactcgccaaactcatccagaaacgatggccaggccaatcacccgtccagctctcttttgcccgagagaccctgtcaaagggactagggtatgccaattaccacgctctcatgaaagagtccgtcaactggcctcgggatgcagaaacgcctgtcctgagtaccacgcacgcccagctcgcggctgagtttttttcggtattggccttggccgacgacacctcagtaccgcgcagcgtgcttgacccttttgtcgagacgctcccgttgaaagcgcttagcacgttcaagggggctgcctcacgaggcgtggaagtgaccaagagcccaatgcctgatttcaaccagactgaaatctgttctgtgaacaccaccgccccagcgtccgaagtcccgtgcttcacgtgtccaccgataacgcacaagccatcgaggctccaagccattgcgttgggactggatgtcttcactcacagtgatgcgataaagcggatcgtcgaaaactcaggaagccttcgcgaccggagcctttttgcattgctggagacagggcttcgggggcatgtcatccttggtgccaaggtttccgaacttgtcagcttggaaacccaaatgctttcgagcaaagagatatccattgagatcacgaaagcgaaaccaccactacttcttgcgaacacagcagtaatcgagaagtacatcagcgaggaaaatctctctgccgatgactatctcttcccgagtgatgaccggaagcaacccatgtcgacatcgcaactgcttcggatttttcagtcgtgggaacgagaagctcaactccctcgctcaacactaacgccgagcacattgagacgggcagctatggcacagctagcaggttccaccctaacgcaacagcctggcaagcgaatcgccgatcagctgggtcactcttttagttccatgaccgaacactacgtttcacttgctacaacagccgttgatgcggccttgaaaaccaagaagcgtcgtacctaa

SEQ ID NO: 337993 - DNA, 690 bp, Pseudomonas aeruginosa
atgctgataaaattgctaaaagctttgatgcgctacacagtgccgatcattgagaaaatgagtgcactttttgcccactgctccgctatctgggcttcgggaatgttcagggccgaacgcgacgaagacaagcttcgcatggcgtgtgcggagctcctctccaacgccctgaactccatggttggcgcggcctacatgcttcgaggtggcttcgttttgcagcctgggccggtcgtgcgctcagccattgaaaccatggctgtagccctccatctcatgcagtttccggaagactttaagaaataccaagagcacaaattcgagtctccgcgcgccgtttctagtgccaaacgcgtcttccctccattcggccatatctacggtttattgagtcgagaattcacccatatcggaactttgcataagcaattcacacccattcgtgaatatgccggtactgaggaatcgttgcagttaaatattcaactcctgactggaggtttatggttgtgctacgtatcctgcgaactcgtgtttttggactgcgtagctcaaccaagatattggcgtgaacttcctgaacaagttgaaggtaagactgcttattcttacgagcccagcgacgaggagcgaacttggatggcggacttcctgggcttggataatccggtcttcggaggagatgcctga

SEQ ID NO: 337994 - DNA, 903 bp, Pseudomonas aeruginosa
atggccaagaaacccaaattctacgctgtcgtccacggacggaaactagggattttcaatagctgggaaggtggggctcgcttgtccattgaccgctttccggaagcgaaacaccagtcgttcgcaacgcttgaactcgctgaagagtggtaccgccagaacacccccacaccaggctcgaaccactcaccggttctccacttcaacacgcaagcgtccgcgcaacagacgaccgtcactccgcaacagcctcaacagccgcccttggacggcgtggttgccaaggactatgtcgtctatctgatcattgatcccgtgacggaggagcccttctacgtggggcagacaggcgacttcgaaggccggcaacgaggccatcttaggaaagccaatcacgactgcaaacgcgcggcagcgaagatcgcccagatactcgatgacgggatgaccccggcattcaaagtcgtggaaacctgcgaatccaaagaggcctcattggaggccgagacacgctggatcgagcactgtaccgccaggggtatcacggtttggaaccgcacgagggagcatcgccaaatccaggcactgcacatgaagcccagagtcgagcttgatcaaatcatcggagacggccccttcaccctcggcccttaccaatacgactccaggtttgagctgaagagcaagctcaatgccttcctggccaagtcttcccaaggcgcgatacagctgcgcatggccactgagaagctcaggttgatctggaaactcacccgccaggcaggggaagtgagcgaatttcgcatcgtcaaggacgaatccaagcatcagctcgaagcagtcctcgtgtcgggatcaaccgtggattttgactacgccgccgcgatcgaccgcctcccctaa

SEQ ID NO: 337995 - DNA, 357 bp, Pseudomonas aeruginosa
atgctgatcaagttcgacctcaaccataatgacgcgcaagccctgttgcaccattgcgaagagcaccagccaagctctgatgatttccgagaaaatgctcgcctcagagaggccttggaaacgctcgcagaggcgatcagtgacgcgatgaacacaagcaaggacagccctgagtcgtcggaagcgattgacccgcgtgtgcttgatgcagccatggcgttgttcggcgacgaaaagagtgcggtggactggctatcgaagccctcgcgagcgttgggagcgaaacgcccgagggatgtccccgtcgacgacgccttgacgcttcttgcgcgcatcgagcatgggttcggtgcctga

SEQ ID NO: 337996 - DNA, 1269 bp, Pseudomonas aeruginosa
atggtgtgttatcaatgtgtgcacgacccctttctagggaggcagatccagcgcactggggcttcctctcaatgcagcctttgcgactcgaaacgcaagtgcgtgccactcgctgagatcgtctctcgtgtcaccgaaatccttggtacctacatcacaggaggtgatcaagtttggcgttggagcggtggtcggattgatcatcaagaaggcgagagcatcgaacattgggtgagcgaaatctttggctgcgacaacatcgagccgatcgtggctgcagtgtgccggcgcctgacttcatacagtgacgacattcagtacaccaggcaacgtttcagcttggatgacatcggccaccaatggtgcgagttccaggaaggcatgaagcatggaatccgcttcttcaacgacagcgccaaggcgtttctggactggatcttcaaagatctggacaagtactcagcctcatctgatgagcatgctatggtgcgattgctcacacctgaaggttctccatcgatctaccgcgcccgaacctgcatgagttcggaaagcgtctccgagatcacagctgatcctgcacgtaatctcggtgcgcctcccaaggagcgagcaggtgaaggcaggatgaacccggcaggtgtccctgccttctacggagccttcgagcgcaagacctgtgtcgccgagcttcggcccccggtcggcggcaccgtggtcagtggagagttcaggttggtcagggaggtcaaggtgttggatttcggacgcttcgaaaaagctgacctcgggcccatgccaagcttctttgactccaaataccattcaaaggtgggccgtcgagatttcctgaggtacctgcatgacgcaatcacggtgcctgtgcttcctggagcagagcgcgactatctgaccactcaagtcatcgctgagtacctcgcgacccactgcaagccccgaattgacggtgtgatcttcaagtcggtgcaggaaagcgacggtagcaacattgtcttgttctcgcacgttgcctgcgctgccactgcattgattggaaggattcagaacggctttatgatcagaggccccaaggcatccgaggggccttgtatcgagtatgtcagtgacagcctcgtccatcacgggattcagcaggtgaagtactacacagatgatcaggcgctgccggaggataaacggctgccagtgcagcgtgcgcatccgttgcccatgagaagcgaagggctgctggcgaatgaggacttctga

SEQ ID NO: 337997 - DNA, 231 bp, Pseudomonas aeruginosa
atggcaggcaaaggcaaaaaccaacacgtggtgaagcgtgacgatggctgggcagtccggggcgaaggcaactccaaggatacatctcaccatcgaactcaacaggaagccgccgatgcggcacgggcgatcgcgcagaatcaaaagagcgaagtgctgatccatggaagggataacaagatcagggagcgggactcgtacggtaatgatccgcatccgcctaaggggtga

SEQ ID NO: 337998 - DNA, 216 bp, Pseudomonas aeruginosa
atggctgtcatcagcgactatctcgccgaattggcacgacgaggcattctgtcagttcaagtggctgagactgacgcccgctactttatggacatgctcgatggcggggtactcctgaaacagatcagagccaacggcgagccgctcgcccgcgaggagatcgagcagatcgtggagcgcaccgtcgacgccttcctgcgatcgctccggcactga

SEQ ID NO: 337999 - DNA, 471 bp, Pseudomonas aeruginosa
atggatgttaaaggtcgtgccactgcaatcgatgtgtgcgaaaatatattgcgtgaagacttcaagtataacgaggaacacggtacctggggcagcatcaaccggatcatcgagagtctgctgggacgcaccactgagcttgctgatgtctacgtcgagctgtatgccgctctagcagagcaccccagggcgctggagtcattcttcgacgttttcacagtcacggtgtactcctggaatcctggaaagatcaaagaagctcgtgagaatagggataagctaaccgaattgaatgtacgaattgcaaaagtttcagagttgctatcggagttgctctcgcagcgcaccgaggttaaagagatgtccagttttaccagtgataccttctaccatattatggatgtcgttgaggatgcttctgaggataatgggcttttcaggtctcatctgaaaaaaagttggatggcttga

SEQ ID NO: 338000 - DNA, 639 bp, Pseudomonas aeruginosa; identical to SEQ ID NO: 325732

SEQ ID NO: 338001 - DNA, 153 bp, Pseudomonas aeruginosa
atgattgctgagtacatctactttcgtgatgaccagtatcgttttgacagcataaacgcggactgccccgctatattcctgggcaaggacgaggtcatctcagtcgagtacgtcggcgccatcataaagagctccctcttccatcccgcctaa

SEQ ID NO: 338002 - DNA, 132 bp, Pseudomonas aeruginosa
atgatctggtcattggtaaggatggaactcaaccccgcccccaacctgcaccaatcgcatggcgcggaccaccagttatgggttcagccaaaccggatcgagatggtttctttgagcttgatgcagccgtag

SEQ ID NO: 338003 - DNA, 1599 bp, Pseudomonas aeruginosa
ttgccattcgaattcggagactacgtgctcgaccaggagcgccgggaactgaccctgtgcgggcaggccgtggtcgtggggccgcaggtcttcgacctgctgctgcacctcgtcaggaaccatgaccacgtcgtcagcaaggacgacctgctcaaggtggtgtggaacggccggatcgtctcggaatccaccatcaccagccacatcaacgcggtgcgcaaggccgtcggcgactccggcgaggagcagcggctggtgcgcacggtcccgcgcaagggctaccgtttcgtcggcgcgctcaaggacgccggaccaggcctggaacggcaaagcgcctggagcgacctcagcgatgcggtcccgctcgtcgcgaaggaaggcacgccgcccgcactcgacctgccggacaagccctccatcacagtactgccgttccagaacctgagcggcaacccggacgaggactacttcgccgacggcgtggtggaggacatcatcgccgccctgtcgcgcatccgttggctgttcgtcatcgcccgcaactcgagcttcacctacaagggccgcgcagtggacgtccgcggcgtcggccaggaactcggagtgcgctacgtcctggagggcagcttgcgccggtccgggaacaaggtccggatcaccgggcaactgatcgacgcgacgagcggagcccatctctgggcggaacgtttcgaaggactgctcgacgacatcttcgagctgcaggatcggatcgccgaaagcgtcgtcggcgccatcgcgccgcagctcgaacgggcggagatcgagcgggccaagcgcaagccgacggaaagcctgggcgcctacgactactacctgcgcggcacggcgaaactgcataccggcacccgggaggccatcgaagaggcgctgcggctgttctacaccgccatcgagcttgaccccgagttcgcctcggcctatggcatggccgcctggtgccacttctggcgcaagttgaatggctggatgcaggaaccggcgcgggaaatcgccgaaggcgagcgcctggcccgcctggcggtggagcttggtcgcgacgatgcggtggcgctgacccgcggcggacatgcgctgggccacctggcgggtgacgtcgatggcggcatcgcgctgctcgacagggcccgcctgctcaaccccaacctcgccccggcctggtacctcggcggtatcctgcgcgccctgcgcggcgagacggaaaccgcgatcgaggacctgctccatgcgacgcggctgagcccgctcgacccggaaatgttcaggatgcaggttggaatggcactcgcgcatttcttcgccgggcgcttcgacgactcggcggagtgggcggaaaaggcactggggaacctgcccagcctgctggccgcggcggccctgctggcggccagccacgcgctggcgggacgagcggacgaagcgcggcgggcgatgggacgcctgcgggccctcgactcatcactgcgcctctcgcagttgctccactggctgccgatcaagcgtccggaggatctcgcgcggctcgcgacgggactgcgactggccggcctgcccgaatga

SEQ ID NO: 338004 - DNA, 750 bp, Pseudomonas aeruginosa
atgaagatagtcatcatcggaggcactggcctgatcggagcgaaacttgcgcggaatctccgcgagcgtggccacgaggtgcttgccgcagcccccagctccggggtcaacagcatcacccgcgagggcctggcccaggcgatggacggcgccgaggtcgtcgtcgatgtggcgaacgcgccgtcctgggaggataacgcggttctcgagttcttcgagacctccagccgcaacctgctggcggccgaggccgcggccggggttcgccaccacgtcgccctgtcgatcgtcggcagcgagcggcttcccgagtgcggttatttccgcgcgaaggtcgcccaggaaaacctcatcaagtcttcccaggtcccctatacgatcctgcgcgccacgcagttcttcgagttcgtcggcggcatcgccgagtcggccgccagcggcgaggaaatccacctgtcgccggcgctgttccagccgatcgcctcggacgacgtggcggccgcgctcgccgacgtcgcgctcgctccgccagtcaacggcacgctcgaggtaggcggccccgaggcgctgccgctcgacgaaatggccaggcgctacctgcgggcgacccgcgacagccggcgggtcgtggcggatgtgcacgcgcgttactttggcgccctgctcgacgaccggtcgctgacgcccgccagcgacgcgcggctcggcacgcttcgtttcgaggactggctcgcccgttcgcaggcctag

SEQ ID NO: 338005 - DNA, 1599 bp, Pseudomonas aeruginosa
atgtacacgcgcttcctgctggccattgccgtggccttgctctcgatagccggcgcgtctgccggcgaccgtctgccgggcaaggtgacggtggtgttcgaccaggccctgccgaacgttcccggcaagagcatgaaggtcgtgctcgtcgactacgcgccgggtggggcctcgccatcccacacccacccccgttcggccttcatctacgccacggttctcgaaggcgcggtgcgtagcggcgtcaacggctcgccggccaaggtctacaagaccggcgagcacttcatcgaagagcctggctcgttccacgacgtgagcgcgaacgccagcgacacggcgccggcacgcctgatggcggtgttcgtgctcgacagcgacgagggggcgctcgtcacccccgcgggcaaatgcccgatccgcgcgtctggcgatgtccggcagcctcgggccatgcccctgggctgccggcgacggcgcttcccagcaggacagcagaagatgaacgcacacgaggacaaggccgccatggctagcgatggagactccgggctccatgcgctggccgcgcggcggcacaagagaaagcggctcggtctgctgttgtgcggcgcagccctggcggtgctggcggcgggctggctgatcgccgggccgttcgccggcacctcgaccgacaacgcctatgtccgcggcgacgtcacctcgctcgcgccgaaggtggccggctacgtcacggcgctggaggtcggcgacaaccaggtcgtacgggccggcgacgtgctgttccggatcgatgaccgcgactatcgcgcgcggcttgcgcaagcgcaggccaatatcgaggccgccgaggcccgcctgggcgatgtcgatgcgcaaaccgggctccagcgcgcgctgatccgccaggccgaggcccagcggcgttcggccgtggccgagatgaacctcgcggccaagacccacgctcgcagccgcaagctcatcctcagcaacgccgtcagccaggccagcgtcgacgagagcgcggcggcgcgctccagcgccgaggcggcgctggcggcggctggcgccacggtagaggcgcagcagcagcgcatcgcggtgctcctggcccagcgtgaggcggccctcgccgccctggcccaggcccgggccgcacgcgatctcgcccggatcgacctggacagcacggtggtccgcgcgccggtgggcggcgtcatcggcaaccgccaggtccgcattggccgcttcgtgacgccgggcgtttccctgctggatatcgttccgctcgacgatgtgtggatcgtggccaatttcaaggaaacccaggtggagcatatccgccccggccagcgcgtccggatcaccatcgacggctatccgagcggggaactcgaaggcgtggtcgacagcttcgccgccggcaccggctcggcgttcagcctgctgcccgccgacaacgccacgggcaatttcgtccgtgtcgtgcagcgcgttccggtgaagatccgcttcgccgccaacccgctgcccgggcgcatcgtgcccggcctttccgcacgcgtcgaagtcgcccggagcgcgggaccgtga

SEQ ID NO: 338006 - DNA, 1632 bp, Pseudomonas aeruginosa
gtgagcgggacagccgcgctcgtggtggcgcctcgcatgccggcagccggtgtactcctggtcgcgggcatcctgcttgccgcgctgacggaggcgattgccggcaccgtgctggcgttcggacgcagcgacatcatgggcgatgcccatgccacgcccgacgagttcgcctggctggatgtcggctacacggcgctcaagctgatcgggttcatgaccgctccctggctgatgagccgcttccactggcgccgcgtgatcatcggcgcgaccctgacgatgggcctggcctgcggtctcgccgccgtcaccgcgcggctggatctgctggtggccctccggctggtccaggggttcgccggcggcaccctgctggtcggcgggcagacactgttgttcctcgcctgtccgcgggcccggcagccgttcctccaggccctgttcgcgatgggcgcggtggtgacgcccgcctcgctcgccccggccctgcagggctggttggtcgatagccagtcctgggcgtggatcttcttcagcgtcgttccgctggccctggcggccgcgggactgctgctgatggcggacggcgagatacccgtcgccaggccccgtccgttcgactggatcggcttcgcgctgctctccctggcccttggctgtttcagctacgtccttggccagggcagccgctgggactggttcgaggagccgcacgtgctgtggctgagcctggctgggggggcgtccctgctggcgtttctcggccagcaggggatggccggcgggcgtgccctgctcgacttcgacctgttcaggtcgagcgacttttcctttgccttcatcgtcagcttcgtcgccggcgcggcgttgttcggcagcgcctacctgatccccgcgttcgccctgtccgtgcttggtttcacgcctaccgatggcggtctgctcctgctgccgagcggcgccttgttcatcggtgcgctgctggtcgccgcctacctcatgcaggttcgcggcgtcgcgccattcgccacggtgcccttcggaatcctgatgatcatggtggcgatgtggatgctgtccggctcgaccctggaaagcggtgccgacgacatgatggcggccgtcctgctgcgaggcctcggccttggcttcctgttcctttccatcaccctgatcgccttcagcgacctcgaccgacggcaccttgcctgcggcatcggcctgttcaacaccggccgccagcttggcggactgctgggcgtcgccgcgctgcagacgctgatcgaccagcatgtggtggccaacggcgcggtcctcggcgccaacctcggcaccggcggtgccgcgctcatcgagcggttgaccaatacgtccgccatgctggcgctgaaagggatggacgcggcggctgcgaaccaggcggcgaccagcctgctcggccgcgccgtgacggggcagtccacggtgatcgccttcgacacggcgttcaacgcggtggccctgctgttcgtattcgccgccccgctgctggtcgggatcaagattggcttcgcgaaatacgcgaaggcgcacgccgcgcgaacggaaacccaggacggtccgccgcccgcccgggcagctgggaaacgctag

SEQ ID NO: 338007 - DNA, 390 bp, Pseudomonas aeruginosa
gtggcctggaccttcagcgacttccgcttccgcggcggcgaattccagggcaagcgcatcgccggcgtaccacgccaaccatggtcggccgagctgctctaccgtcagggtccctggagtctcgggccgaatctgcgctggttgccccaggacaccccgaccgaccacaccaacacccgcggcaactaccaggacgcctatgccctgtggggcttcaaggcgagctacaaggctcgcgagggactgagcgtctacctgctgggcgacaacctcgccgataaggtctacgccagcagctacgtgatccgcaatcgtgccgacgccagccagccgacgttcctcagcggcaacggtcgcagcctcagcgtcggagcggagtacagcttctag

SEQ ID NO: 338008 - DNA, 156 bp, Pseudomonas aeruginosa
atgctcgccgccgtcggcatccgcccggagtcgctcagccgattgctttccgactggcagcaggccggtcgcatccagggccggctgcgccagtggagcttgcgcgagctgtccttcctgcaggacctggcgagcgcggcggtgcgttcgttctga

SEQ ID NO: 338009 - DNA, 606 bp, Pseudomonas aeruginosa
atggaagtcgaaacctggctgctctatctgctgacctgctgcggcatagcgctggtgcccgggcccaacgccctgctggtgctcacccacggcgccctgcatggcaatcgcaggacgctgttcacgattgccggcggcgtgaccggcttcatcggcatgatcgccctgtgcgtcctcggcctcggcgtcctgctgaagacctcgatgctctggctgggcgccttgaagatcgtgggcgcgctctatctcatctggctcggtatcggcctctggcgcgcggagccggtggcgctcacccatggagcagcttgccggcagggcgacgcctcgctgttccgccagggcctgctgtcggccatcgtcaatcccaaggccctgttgctcttcaccgcgttcatcacacccttcatcgagccgcagcgaagcctgctcctgcaaacgacggtcatggcgctgacctacgcggcggtggagttcgtcgtggagttcggcgtggccagcgccgcgcatggcgtccgcccctggctggcacgggcagggcggcgtttcaaccgggtctgcggcggcttcttcgtcgccttcggcgcgctgctgccgatccgctag

SEQ ID NO: 338010 - DNA, 867 bp, Pseudomonas aeruginosa
atgcctcgggacctgcagatcgattggctgaagtgcttcgtcgcggcggtggatagcggctcgttgtccagcgccgcgatcgaggtacaccggtcgcaatcggcggtgagcatgcagttgaagaaactggaagccgccctgggccgccaggttctccgtcgcagcccccggcagctggaattgaccgaggatggacaggccttgctcggctacgcgcggcgcatgctcgccttgcacgccgagacccaggccgcgttcgccgaagagacgctgaccggacgcattcgcctgggcgtcgcggaagactacgcggcgcactatctcacgccggtcctgaggcggttcgcgccgcggcacggcggggtggatatcgaactgacctgcgaacagtcgaccgccctgattccccgcgtggccagcggcgacctcgatctggcccttgtctcgcgcgacagtccccgacgcggggccttcctcttccaggagccgatggtctgggtcggcgcgtcgcagttcgaactgtggcggcgcgacccgctgcccattgccgtctacgaggaggccagcctggcgcgtcgttgcgcggtcaacgcgcttggcgcgcaggggcggcggtacaaggtggtctacaacagttcgagcctggccggccagatcgcggcggtggaaagcggcatcgcggtcgcggtgctgacgcgctgcagcgcgccggcgcacttgcaggtactgggacgggaacatgggctggggccgttgcagccgatggacgtcgcggtctatcgaagcaaggcgtcgcgcacttccagggccgtggacagcctgcgcagcttcctgatcaggacgctcgcttcgcccgcgccggcctga

SEQ ID NO: 338011 - DNA, 621 bp, Pseudomonas aeruginosa
gtgaataatattgaattgataaagacccttctccccgtggtaacttttgccctagggattctggccactcccatagtagaggcaataaaggaaaaaattaagtggaaagctatctataaaaatttaattctggaactggaggatgaactggctgagctccccgcaagattgctaaaaatgtcggaaacacttgccggccttcaaggactgaaggagaaatcagtccagccagggaaaccatttaaatatatccctcgaaaaacagaaatttactttctcaaagcctccactgaagcagccttcaggcgtctagataaaaatcagcggtatgcaattaaatcacttttcactcaaatcgtcgccctcgacaaatacgtcgaaagcatgaatgggatggaggtgtcaatgaagacgctagacgaatgtatcaaaaacgttaagcgctacttgtatactggtagtagcatgcttaacaccatgcgaactgttgcgcggaattcatccgctctattagatcacaacgataacgatatagtaaacaaagttcttgcggagcttagtattgaattaaccacagatgacttgataattaaagggaaaaccattgttctgaaagattga

SEQ ID NO: 338012 - DNA, 726 bp, Pseudomonas aeruginosa
atggctacaacaatggaagatattatttatgacgaaatgattgactctttctgtgctgaggaaatcatgaaaaaagctgccaaagctcaatgtatttacatttttgttgagggcgattccgaagaggctatttttcaaacgctccttgaagagtgcgggctggattttgaaaaacatggaatcgttgtagcaaactacaatggcatcggaaatctcagaagctcaatccgactcttgaggaaaacattgagtcacgacaggccaattatcgtgacttatgatgacgaccgaccaggaaaaagagaaacccaacacattgatgataaactaataactttatttaagatccctcaagcccctgttgttaaatatccaaatggaagcgcggggggatcactcgaagaagcttttcctccggagttgtttatcgaatctagctttaagtgtgacgtgattttaaactccaatcaacgcttgagagaaaacttctctaccatatttaacgcgagagaaccatggttttcccaattggcaaattttgtcgaagctagaggcattaaggccggatcaataaacaagataagactagctgaacatatggccgaatcatgcgatccaataccagaaacatttagagagctagctaaggtagcattaagtctacgagaacaacacccagtgaaaagcccaaatgatgttgacctagattttttgaatgatcgatag

SEQ ID NO: 338013 - DNA, 225 bp, Pseudomonas aeruginosa
gtgcgccgtctggccgtggccggcctgggcctggcgcggctggccgcgttccaggtgcgtgaggacatagccgccggccgcctgattcccgtgctcgaggcatacaacccgggcgacctggaggaggtccacgccgtctacgtcggccagggcggctatctgccgctgcgcgtacgggcgttcctggactttctggcggagcgcgtcgatatgagccagggttga

SEQ ID NO: 338014 - DNA, 339 bp, Pseudomonas aeruginosa
atgcgcaacgtcatgctgatcaccggagccagccgcggcatcggcgccgccaccgctctgctcgccgccgagcgcggctatgcggtcgtcctcaactatctgcgcaaccgcgaggccgccgaagcgctgcgccagcgcatcgagcgccagggcggcgaagccctggcggtggcggccgacgtagccgaggaaggcaatgtcgagcggctgttcgccgccatcgacgaacgtttcggccgcctcgatgtgctggtcaacaacgccggcgtgcggaagcgcagacgcgcctggaaaacatcgacgcggcgcgcctgcacagggtattcgcgaccaacgtga

SEQ ID NO: 338015 - DNA, 960 bp, Pseudomonas aeruginosa
gtgcaaatcgccctggcgccgatggaaggtctggtggatgaaatcctccgcgacgtgctgacccgcgtcggcggcatcgattggtgcgtcaccgaattcatccgcatcaccgatcgcctgctgccggccacggctttccacaagctggcgccggagctgcgcgacggcagccggacccgcgccgggacgccgatgcgtgtgcagttgctcggctccgatcctgcgtgcctggcggataacgccgcgttcgcctgtgagctgggcgccccggtgatcgacctgaacttcggttgtccggccaagaccgtgaaccgctcgcgcggcggcgcggtattgctcaaggagccggagctgatgcacgacatcgtcgccgccgtgcgtcgcgcggtgccgagcgagattgcggtgacctcgaagatgcgcctgggctacgacagtcccgacggcgccctggattgtgcgcgggccctggccgacggcggctcggcccatgtagtggtgcatgcccggaccaaggtcgatggctacaggccgccggcgcactgggagtgggtggcgcgggtggccgaggcggtgcgcgtgccggtgttcgccaatggcgaagtgtggacgctcgacgactacctgcgttgtcgcgaggtcagcggggtggaggacatcatgctcggtcgcggcctggtctcgcgtcctggcctggctcggcagatcgccgcctggcgcgatggcggcgaaatccgcgagatgccctggagcgagctgttgccgctgctgcgcgacttctggctacaggcccggcacaagctcgccccgcgctatgccccggggcgtctcaagcagtggctgggcatgctcacgcgcacctatcccgaagccgtcgagctgttcgcgcggattcgccgggaaagcgattgcgaaaccatcgaccggctgttgcaggtgtcgttcagccaggcggcctag

SEQ ID NO: 338016 - DNA, 654 bp, Pseudomonas aeruginosa
gtgatactggctggagacgtcgacaagaagactcgcggtgtccagtgggccaatgaggcattcgaatgcaccgttgcatacatcctgggcaaccatgagctctacggcggtcatctcgatcgcaccctgcaaaaaaagcgggatgtggctggacccaatgtgcatgtgttggaaaacgaggtgctagaactcgccggcgtcagggttatcggcacgatgagctggacagatttttcgagtacgggcgaccaggttgccgctagcagcatggcgagagagtggatgacagatttcaaacagatcaggactgatagtaactatcgtcgcatccgccccgatgatctggtcagccgaaatcagctggccaaggcgtggctgactgaacaattgaatcagtcctatgaaggcaagacggtggtcgtgacccaccattgcccgtcctcggttgtggccggaaatcaacatgaggagcatctcaatgccgcttataccaacgagtgggcaagcctgatcgagaaaagtgatgtatgggtcttcggccacacccaccatgctgtcgatgtaacacttgccggctgccgattgatttcaaatccgcgcggttatccaaatgagcctacgggtttcgatccgttttttgagattgagatctga

SEQ ID NO: 338017 - DNA, 816 bp, Pseudomonas aeruginosa
gtgccaattgcgctaactgagagtaattacaataagaaaacgagccgcaccaagccctatgtgtggaacaatgggcaagaggttaagtcgtacgctctctgcccagcctgcgtaaatccagttctcttggtaaatcgtcatgtcgcgaagaccgatgccaagattctctatgccaagcatgcaggacgctctattcctggcttagccgaccacgatccacaagcctatgaaagctgtccattccacaatccggaacgctttgacagtaaaactcgccgcaccaacaaggtaagcaacgacgaaatccgagaagccctgatcaaccatattcacctggtgatcaagatcttggaaacggccacaggtattgcatatagcgatggtctggtagaggccatgctaaaagacttcggcgctaaccaggggcatcagtacaaagcgatcaacctgtataacctgccattcggctttgcctacatgacggaagctcaggacatgtacggattgaaggtggataattatcttgccgagcagatcactgagaactcagtcggattcgaggtcgggcagtatcgtaaagtggtgcgcaagaaagacaccaagggcacaagtctgcgcttctacttcaataaccatcgactaggggagtcgtctgtaggggatgactcaatcgatctcgtcgttgcagaaatacataaccccactcgcacgtcgacgatcgtttgctcgaaggccatagagttcaacagcgaatatttcttcaacacgtacatgcggcgtgagcggttgcgcctgcttgcgctgcagtacctgtag

SEQ ID NO: 338018 - DNA, 246 bp, Pseudomonas aeruginosa
atgagctttggagtcacaaaatactgcgaccccctccttttcaaagaaaaaatctgcttcagtgattgtctgcgccagtttcttcgtgcgaacaccaccctcccacatcgactgcaaagatggaaaaatcgttccatcgggatagatatgcatctggattttcgggtgcaaaccaatttgactcatggcctgcaaaaggaaaagctcaatgggggaatcgcacccccaaatcttaaagggttttga

SEQ ID NO: 338019 - DNA, 792 bp, Pseudomonas aeruginosa
atgagatgcagtcgatgttcggcaatgcatttgtatttgaaaatagagacgctctatataataaagttttcccgaaaaaatacaccgaccaatttggagtttaaagctgaggttttgacagatccaaaatcccaaaattacctcggtgcattgaatcttcatttatccgtgttaagagactatgccaaaagtcctggaggaaccgatgaagatggccggtggctaatgggaaagctcatcaacctgagtgaagccttagaccttcgtatggtaaacgaggttgcagagggagatcttgaatttaaagggaaaagaacgccagtaaatatctatggggctgacgaatttgttatggttgccacagctatttacgattcgttcatgttttacaccgggaatgataaagcggagaggctgctttttccgatggggcgatctgcaaatgactctctgatggaatattttttgggacgagaagaatttccagagattgttaaggttttgaaacctttgcccggcttggaaatgttggagcgaatttattttgatctctgtggaatcgaaactgaacatttcggctacctagaacccctttatgctcagttgatggaaatatttagtagtccaacaggtgtgcaaaaactacggaataacgtctactttgccgatttgctcgaaacaggccgtagatgcaccgctaaagcattggctaggtcggagaagggtgcagatgattatgataagctcaaagtgatatctgaagaccttgatattctgattgcactgaaataa

SEQ ID NO: 338020 - DNA, 1485 bp, Pseudomonas aeruginosa
atggatttcaacactctggaagagcgcctggcggactatggatcgggtggatatcttttcttagaagcattcattatcaaactccttcaggtcgagggacagcagttagggcagaaggttgagggtcaagacagccatgtttcagcttttgacgccattgctccaagtggtatcggtgaaatttcttcaccgctggtagtggaaatcgtattttctgtttccccgtcaaagctcgatgctaccgttgaaaaatttagagggcatgctagtcgcggttacagtttgctgatcattgctccaaaaatgtcagacctgaagaaaagtatttatatcaatgaagaaaacccacaagtggacaagcttgtctatctatggggggggaaggaagtcaacgagctgatgcagaagcataaggaggctgtagaaacgctcacctctaatttgttttctctgcgtttaaaaatggctgcggagcgtactgtcaggtcgtggaaggaagatcgtgatcagttagtaaaagcagttgctgaaaaataccgagcaggcaggttttctttaattcttggcgctggagtatctagtagcgctgggttgcctgattggaatactctgctgaattccttatttgtttctatgctatcgcaggaaaatttcggcggcccccacggcgacccggttaaggtatctgaaatcgtcgccaggctaatggaagtagatgggccgtccacattgatgttagcaaggtatatccggaaagggcttgctgtgggctcacctgtagaacagcaagggtttgttgatgcgatcacccatcagctttatgctttgcgtgacaagaaattcccagtccaatcagagctgatttcttctatcgcgaagctatgtaccccgactcgaaccggtgccaacgtaaaatctattttgacctataactttgacgatttcattgagagggcgctactctcgcgctcgttggtacataaaagcgtgttcgaagagtttgagacaccaagcgctgaagaactgcctgtataccatgtgcatggttttttaccggaggataggcagcgctactccaatctggatcgatgcactttggttttctctgaggaaggctatcatcagatttaccgtgacgcctatcactggtcaaacttggttcagttgaacagcttcaaggaaagctcgtgccttatgatcggtctttcactgaccgatccgaatctgcgccggctattggagatcgcgtccaaatcgatcgaggagcccaaacacttcgctttcatgcggcgtttgacctccaagaaattcatggaaggggcgagtggcaagcctctcaaaatctcaaatgctgtggttgagcgcttccttgaaagacaccatgccaccaacgaagagcttatgcgtgagctaggagtgagcgtcatctggtacgaggagtatggcgacatcccggaaattttgagcaagatacacgccgggtga

SEQ ID NO: 338021 - DNA, 813 bp, Pseudomonas aeruginosa
atgcgcatctgggaatcccgttcgaacggcgacccgctgagccttcccccgcgcctgctgaccgccctgctcggcgcggtgacggacgacgaacgaccgcgcctgccgcaggcgatgctcgacctcgcccggcatgaggtcgaggtgatcaattgcgccttgttcctcctccccgacgcccacggcaggccgcagttcctgagtcacgcgcaggtggtcgagccgagtacggtgcagggcgccggccaggcctacacggacggtttctatcgacgcgacctggccctgcagagtgccctgaggcggcgcgctcgaggcaacctgctgctgctccagggggtagacgacattcccgaccgcgcctatcgcagcgcctgctacgaagaagtgaacacggcccagcggttttccgtgatccgcccgctcgacggccaagcgcacctgatgctgagtttctaccgctccgcacgcagcgccccgctcggcgctgccgaagtgcgctacctcggcgcgctggcggaggtcctgatcgaggccggggtccagcactgccgggcgcggccgaccgccctgagcaacgccgcaggcgcgcttcgccgccttcaggacgaagccggggtgcgcctcagccggcgggaaaacgagatcctcgactgcctgctgcgcggcatgacccaggaagccagcgcaaaggcactcggcatcgcccccacttcggtggtcacctatcgcaaccgggccttcggcaagctcggcgtggcgtcgcggcaagacttcttcgctcgcctgctggaacagcgccccaacgcctga

SEQ ID NO: 338022 - DNA, 687 bp, Pseudomonas aeruginosa
atggcccagcccgacctgacgctcttctacagtccgaaagcctgctccctggcttcccatatcctcctggaggagagcggactggcctttgcgccggtagcggtgaacatccgcgccggcgacaaccgcagccccgaatacctgcgcctgaaccccaagggtaccgtaccggccctgcgggtaggccagacgatcgtcaccgagtcgccggcgatcctcgcctacatcgccgacctggttccgcaacgggggctgttgccgccggtcggcaccttgcagcgagccgtcgcccaggaatggctgaatgctgcctccggctccctgcatggcgcctaccgcgcgatcttccgcccgcaacactacgccggggaccaggaggacgcggctcgggcagtgcgcgccagggggcaggcgctgttgcacgaagcgctgctgcgggtcgagcggagcctcgaaggaaagccctatgcgctcggcgaagcgttcagcgcggtggatccgtatctcctggtgttctacctgtggagccaggatgagcgggtggactccgcgctgctcccgagcctgcctcgctatcgggcgctggccgagcgcctgtggcagcggcccagcgtgcatgccgcgattcgccgggaacgggaggtacgccgttacgacctgccggacttcctggaggtcgacgcatga

SEQ ID NO: 338023 - DNA, 309 bp, Pseudomonas aeruginosa
atgagcctctactacctgcagaaagccatctatcacgccaatcgcgatccccaggcgctgctcgactaccagcagcggcgggatgacttcatcgcccgcttcgacctttcggacgaggagcggctcgccctggccgctccggacgtggggctgttgtacgtgctcggcgtgaatggccagctgttgatgcacttcgccgccagcaacggctacgactggccggcctacattcgtgccatggaccagggactcgcgcgctatggcgcggttcgcgcaggactctacgcctgtcggggaggtgcgtcatga

SEQ ID NO: 338024 - DNA, 849 bp, Pseudomonas aeruginosa
atgagtctggttttcgccgcctcctgcggacacgggcccggcatcaccgcacgccgggaaatggccgaccccgggcatcgcgaacagatggaggccgcctacgagcgcctgcgcctggcattggaggccgcccgcccggacgtgctggtgatcgtcgccgccgagcacttcgccaacttcttcatggacaacatgccgtccttcgcgctcggcatggccgattactacgagggccccatcgaggactcggagtggctgcggattccccggcgccgagtgccgggacacaaggacctgtcgcggcgcctgatcgacggcctgatgcagcacgtcgacatcagctactgcgaggagtggaagttcgaccacggaatcatggtgcccctgcacctgctgtgtccgcacaatcgcctgccggtgatcccggtcaacatcaattgccagtgcccgccgatggcgccgttgcaccgcgtctacgccttcggccaggccttgcgccaggtctgcgagtggatgccggagcgggtggcggtgctctccaccggcggcctgtcgcactggccctgcacgcccgactcgggcgccatcaacgaagcctgggaccgcgagttcctccggcactggatgcgtaacgaccgtgagcggctgctggcgtacaccgacgaggagatctaccgtgacgccggacagggcggctacgaaatccgtacctatatcgccatggccggattggccggcggcgccggggcggaactctggtgctaccagccgattccccagtacgcccatgccgcggtggtgggccggatccgcctggaggaggcgcgccgcaaaggcgacccacgctga

SEQ ID NO: 338025 - DNA, 207 bp, Pseudomonas aeruginosa
atgaaaatcaccaacgacaccaccacctacgaagtggccgagctgatgggttcggaggctgacgaactcgatggacgtatcatgatggggctgctcagccgcgaatgcgtggtagacactgacgacctgagcgaggatcaatggctgactctgatcgacgagtcgcagaaggttcgccgcgagcagttcgaaagcgatgaagcctga

SEQ ID NO: 338026 - DNA, 1692 bp, Pseudomonas aeruginosa
atgctctggaccactgcctgccctgactggtggcggcgcttgagtgctggtgaatccatcattccaccgccgctctttcctgaggaagccgaggaggggctcagcgtcttccgagaactgaagatcgtagacgcacccggctcaccgacaatcgaggtcgcgtgcgccccctgggtgctcgacttcgccggcgccatcttcggcagctacaacaatgagaccggccggcgattgatcaccgagtacttcctctgcatcccgaagaagaactcgaagtcgaccatcgcagccgcaatcatgctgaccgccttgatccgcaactggaggtttgaggccgagttcatcatcctggcgccgaccaaggagatcgccgacaacagcttcaagccggcggcggcgatggtgaagcacgacgaagagttgtcggatctgcttcatgttcaaccgcacctgcggctgattacccacaatcagacgggagccaccctgaaggtagtggccgctgatagcgatgtggtcggtggcaagaaggccgtcggcgtgctgatcgacgaggcctggctgttcggcaagaaccccaaggcgccggacatgatccgtgaggctacgggcggcctgctgtcgcgtccggaaggcttcatcatctggctgaccacccagtccaacgaaccgccggcaggcgtgttcaagtcgaagctgacctacgcccgcggtgtacgagacgggcgcatcgaggacaaccggttcctgccggtcatctacgagttccccgcggagatgatcaagagtggggaggcgaggcgcccggagaacttccacctagtgaacccgaacatggggttctcggtcgaccgtgcgacactcgaacgcctgttcatgcaggctgagcaggacggcgaggctgaggtgcgaggcttcctcgccaagttcctcaacatcgagatcggcctggcgctgatgtcgaatagctgggcgggcgcagagcattgggagaagcgggtcgatagaactctctcattccaggagctgctgcgccgctccgaggtagtggtggccggcatagacggcggcggcctcgatgacctcctaggcctgactttgctcggccgcgaacaccagacccgccgatggctgcactgggcgcacgcctgggcacacgagatcgtgctcgagcgccgaaaggacatcgccaccaagctcctggacttcaaggccgacggtgaccttaccatcgtcgccctacctggagacgacgtgaacgagcttgccgacatcctgtgtcgggtgaaggcggctgggctgttccccgagaagcaagcgatcggcgtcgaccaggccggcatcggcgacatcgtcgacgagctaaccaccgaggaacgcggtttcacgatggagcacatcgtgggcatcggacagggctggaagctcaatggagcgatcaagaccacggagcggaaggtcgccggtggcgagctcgtgcatggcggccagccgctgatggcctggtgcgtcggaaatgcgcgcaccgttcaggtgggcaatgccctcgccatcaacaagcaggtcagcggcaccgccaagatcgacccgctgatggccacgttcgacgcagcaacgctcatggcgctcaacccctcggcttgtgatgagggagatttcaacgacttcctgaaggcaccgatcatcgtatga

SEQ ID NO: 338027 - DNA, 855 bp, Pseudomonas aeruginosa
gtgggcgatggtggccaccggcgccgagtccagctcgaaggcgatgtccgactccggcttcgggttctgcgggttctccgacaccggcgccgcgttgttggtgaagccggtttcacgcacgaactcgatcgaggacgaagtggtgcggccccagttcagcaggtcacgcaggaacaggcgctgctggagcggctgcaccatgccgacgcgctgcggctggatcagatcgccagcggagccgggcaggctggtgatggcagcgcggaccgggacggtcagactgtagttgccgctggcctgggcttgagcggcgaatgcgctgtagcgctcatcgttggtgaaggtctcaccagcagactctgggcgatcatcgccgcggctgccgccgtcgagcttcacgatttgctgctcggccgcttgcaggcgggcgttcagttcaccctgagtggtcaacagctggtcgacggacgccttggtctgctccgacatctggacgtgggccttgaggtctttttcggcctgttccgcgtagcggcgcagatcatcaccgacgttcttcaggtcagcctgaacctggcgatactcgcgctcgatgtcggtgtcttcgcccgcgcggccaaactgggcatgggctgcacgttgcgggaagcgtgccggctcgatgaacatcgagctgaacgccaccacagtgaggctagccagagcgctgcccgccatgacgacatcggtcatgggagtgacgagaccgaccgccagcgggatcagcatcgcaacagcgattaccgccaggatcagcggcgcagagagtttgaatcgtttcatgggtgtctccttaggatctcttggggaacgtga

SEQ ID NO: 338028 - DNA, 1233 bp, Pseudomonas aeruginosa
atgaagcccaagacgaagaagccaagccggctaaaggctgccgtgctgggctggctgggtgttccggtcggcctaacggatgagacattctggaatcagtttggcaccaacgtcgccggccagcaggtcaatgagtgctccatcctcaagctgtcggcagtctggtcctgcacgcgactgattgctgaaacgatctcgaccctaccgctcggtctctatgagaagaccagcaccgggcgcaacccgctgccgaatcacccgctgtacgacatcatccattcccggccgaacgcagactctacggcgtcggtgttctgggaggcgatggttgtctccatgctgctgcgcggcaatggcttcgcggagaagaagttcctcggtgggcgcttggtcgccctggtgttcctgccgccctcgcgcttggcgatcacaagaggctctgcagggaatcggatctaccgcttcactgagcgcaacggaaaacagcgcgtcatccctgagtcttcgatcttccggattccaggcttcaccaccgacggcgactgggggctttcggccatcgagtacgggagccaagtgttcggctctgcgctcgccgccggcaacgcggccaacagcaccttcgagaagggcttggcgccgaccgttgccttcaccatgcagcgcgtcctcaacaaggagcagcgctccgagtttcgcgagagcctggccgaggtcagcggcgccatcaacgccggcaagtcgcctctgctcgagggcgggatggatgccaagaccatcggcatcaacccaaaggacgcgcagctgctcgaatcgcgcgctttcagtgtggaggaggtctgccggtggttccgcgttcagcccttcatggttggccagtcggagaagtcgacgacctggggaaccgggctcgagcaacagatgatcggcttcctgaccttcaccatcctcccgtggctgactcgtatcgctcagtccatctgcaaggatctgctgtcgccgatcgaccagaagacggtctacgccgagcacagcatcgaaggagtgctgcgcgctgacagcgcgggccgcgccgccttcctgtcgaccatggtgaacaacgggattatgacgcgcgatgaagctcgcgcgaaggaaaacctgccgctgaagggcggtaacgctgacgtgctcaccgtgcagaccgcgctgatccccatcgaccagctgggcaagacccccgcaggcaactga

SEQ ID NO: 338029 - DNA, 858 bp, Pseudomonas aeruginosa
atgtccataagagcaatgccagccgcgcgcgtgggcgcgccggcggctggcctgcgtttcgacctgtcggcccgcgccatggagcgctggaacccggcggtgcaggctgccaccgagcaagacaacaccatcagcatcctcgacatcatcggccaagacttctggagcggtgagggtgttaccgccaagcgcattgccggcgccctccgggccatcggtgaaaacgacgtggtggtgaacatcaacagccctggcggcgacatgttcgaaggactggctatctacaacctgctccgtgaacaccccggcaacgtgaccatcaaggtgctcggcatggccgcgtcggccgcctccatcatcgccatggctggtgatgaggtgcaggttgcccgcgccggcttcctgatgatccacaacgcctggacctgggctgctggtaaccggcacgacttccgcgaatttgcggagtacctggagccattcgatgcggcaatggccgatgtctatgtggcccgcaccggcctcgatgccaagaccgttgccacgatgatggacggcgagacctggatcggcggtagcaaggcggtggagcacggattcgccgattcgctgctcgactccgacgaggttgccgccggcaatgagaagcccactgccaaggcagtgcgccgcgtcgagaacgcgctgcgcgcctccggcatgcccagatccgaggccatgcgcctgatctccgaattcaaagccagcctgagcgactcggctggccgcggtgagcgtgacgccaccgatcccggccgcaaggccacccgactgcaggttgaacccctgccgcgcctcgcttacccaacgagatcctga

SEQ ID NO: 338030 - DNA, 954 bp, Pseudomonas aeruginosa
gtgagcgatggtggccaccggcgccgagtccagctcgaaggtgatgtccgactccggcttcgggttctgcgggttctccgataccggcgcggcattgttggtgaagccggtctcgcgcacgaactcaatcgagggcgaggtggtgcgcccccagttcagcagatcgcgcaggaacaggcgctgctggagcggctgcaccataccgacgcgctgcggctcgatgttcgcgccagccgaacccggcaggctggttatggccgcacggaccgggacggtcaggctgtagttaccgctggcctgagcctgggcagcgaacgcgctgtaacgctcgtcattggtaaaggtctcgccagcggattccgggcgatcatcgccacggttaccaccgtcgagcttcacgatctgctgctcggcagcctgcaggcgggcctgcagttcgccctgggtggtcagcagcttgtcgacggaggccttggtctcctcggaaagcgcgacgtgggccttgaggctcttttcggacgcctcggcgtgcttgcgcaggtcgtcgccgacggtcttcaggtcagcctgaacctggcgatactcgcgctcgatgtcagtttcctcaccggcgcgaccgaactgcgcgtgagcagcacgctgcgcgaggcgggccggctcgacgaacatcgagctgaatgccaccacagtgaggctggccagcgcgctgccagccatgaccgcattggtcatgggagtgacgaggccgaccaccagagggatcagcatcgcaacggcgatcaccgcaaggatcagcggtgcggaaagtttgaatttcttcatgggtgtctcctcaggatctcgttgggtaagcgaggcgcggcaggggttcaacctgcagtcgggtggccttgcggccgggatcggtggcgtcacgctcaccgcggccagccgagtcgctcaggctggctttga

SEQ ID NO: 338031 - DNA, 1698 bp, Pseudomonas aeruginosa
atgacgctcaactacagcaacggttcgccggccaatgcgttgcagaccggctccggaaatgcagcaatcggcccgcgtgggctgcgctatcggatcacggcgtacagcgcgcagcaactcaccgtcgagcggctgaccagtgcgggcggtgtcgatgttgactggccaggattcaccgctctcaattcgtctacgtcccgagtcaccattgatccgaccagcctagaagggggctggcgcggtcccttcccggcgtgcccagtatcggagaagaccaacttcgtcgagatcgacgtattttgcccggaagggctttgcggtgtaggcagggaagggcagatctaccagatccgcacctattacgacatccagtggcgagacatggccatcggcggcgcatggacgacggtcagtaagaaccatgccggcagttctctcgaccagcagggttttacggacggcatctcgctgccgtacatgatgcggcccgagtttcgcatcagaaaagtgttcgtcaaccagggcggcaactcaacatccgagtaccgagaccgcacccagtggtacgggatgcgcgcgcgcctccaggctccatcgtcctacgccggcgtcacgacaatggccgtcaggtatcggtcgtctgaccgtatcgcagcgcagaccgaaagccgcgtttcggtggaagctactcgcatgctaccgactcggcagaacggtgcatggacgagcgagatcgctacgcgagacatcgtcccgttcctctgctacatcgccaaagagcgcggctacacagacgccgacctcgacctagaagagctcaatcggcttgacgccatctggaaggaccgcggcgacacgttcgacatgatctacgaggacggtaaggtcacggtcgcgcaggtcatggacgatgtgcttgccgccgggtatgcggagaagacgatcaagcgcggcgtgatctccgcagcccgagacgaaccaaggaccacattcgggcacatgtactcgccgcagaacatggatggtccgctgaggatcagcatcagcgctccgtctgaggacgactatgacggagtcgatgtggagttcgtcaatgccaacggctggatcgaagataccgtccagtgccggctgcccggcgatgtcggcaggaaggtcgagaagatcacggctgtcggtgtcacaaaccgcgatcgcgcctggcgctacgggatgcgccgccggatggctcagcgataccggagaacagagtattcgttcgataccggcctcgactcgctgaacagcgagttctgggactacgatgcccttgccggcgatgttcccggccctggcctggcacagagcgcatacctgaaatcgttcgtgatctctggaaactcggtcctgatcgagtccagcgagccgctcgactggtcactgctgaactcgccagcgctctacctgcggcgcccagacggaacggtttccggtggatatccggcatcgaggattgacgactaccggctgagcattcccagcatcgatttcatccctgatgtttcttgggagatcgaacctccacacctgctgcttgggaacccatacccggccctgatcagttccatcgatcccaacggcaatacctcggcatccgttcgtgcggtgaactacgaccccagggtctacacctacgacaacgccagcgccccaaactga

SEQ ID NO: 338032 - DNA, 189 bp, Pseudomonas aeruginosa
atggcggcgaacaccaagcagaacgagacagacgccagggtcaacctgcgttggttccctgatctggacatgacctggcgcctcctctggcagggccagcccttcaccattaccggcgccgacacggatgccacggggcgcaaggaatggcgcctgcgctgtgcgacaggagtcaccgacggtcgatga

SEQ ID NO: 338033 - DNA, 543 bp, Pseudomonas aeruginosa
atgacgcggttcggtatcacttcgccggtgcgcgcggcggcgttcctggcgcagatcgggcacgagagcgcccagttgacccggctggtggagaacctcaactacagcgcccgcggcctggctgcgacctggccgagccggtacctcggcgccgacggccagcccaacgccctggcgcagcgcctggcgcgcaacccccgagccatcgccaacaacgcctacgcctcgcgcaacggcaatggcgacgaggcgtccggcgatggctggtgctaccgcgggcgcgggctgctgcagatcaccggccggtcgaactaccgcgccgccggcgccgggctgggccagccgctggagcaggaacccgagcttctcgagcaaccggagtgggcggcgatctcggcggcctggtggtgggccagtcacggcttgaacgacctggccgaccgcggcgagttcgccgccatcactcggcgcatcaacggcggcacgaacggccaggcggagcgcctggcgctgtgggagcgggcgaagagggtgctgtcgtga

SEQ ID NO: 338034 - DNA, 219 bp, Pseudomonas aeruginosa
atggccgacaacttcttcgagctcggcgggcattcgttgctggcgactcaggtcacggcgcgcatccatgccgagctggacatgaatgcccccctggtcttgctgttccaggccgagactttacaggcctatgcgacttcgcttgaaggctacaaacctaccgacgcagcggacatcgacgagctgcgggaattcatgagcgaactcgaggccgtctga

SEQ ID NO: 338035 - DNA, 750 bp, Pseudomonas aeruginosa
  misc_feature (173)..(179): n is a, c, g, or t
atgagaaagtctcggtcgggcgtcgtgttttttggtgttgcggcccgaatcactccgccaggacctggcctcggcgccgccggcgagctgggtgttgccactggcaacactccgccaggacctggcctcggcgccgccggcgagctgggtgttgccactggcaacactctgcnnnnnnngcctcggcgccggcggcgagttgggtgttgccactggcaacactccgccaggacctggcctcggcgccgccggcgagctgggtgtttccactggaaccacttcaccaggaaccaacctcggcaccgccggtgcgtttggtgtttcggcccgaaacactctgccaaggatcgacctcggccccggcggcgagctgggtggtgcggcccgcaccactctgccagatcccggcctcagcgccggcggcgaactgggtggttccactggaaccacttcaccaggaaccaacctcggcaccgccggtgcgtttggtgtttcggcccgaaacactctgccaaggatcgacctcggccccggcggcgagctgggtggtgcggcccgcaccactctgccagatcccggcctcagcgccggcggcgaactgggtggttccactggaaccacttcaccaggaaccaacctcggcaccgccggtgcgtttggtgtttcggcccgaaacactctgccaaggatcgacctcggcgccgacggctatcaacttctcccactcaagagaaaccgaaagatgtgtga

SEQ ID NO: 338036 - DNA, 1047 bp, Pseudomonas aeruginosa
atgcataaggtcaaactggcagcgatcacctgtgaacttccggctcgcagctacgaaaacgacgatccggtgttcgctgcggtaccggacctcagcgagtcctggtggcaattctggggcgtcaatcggcggggctatttcgacccgcggaacggcgagaacgagttcagcctggtggtccgggccgccgagcgcctgctgcgcagcagcgataccgcgccggatagcgtggacatgctgatctgttcggcttcctcgccgatcatgaccgacgccggcgatgtcctgccggacctgcgcggacgtctctacccgcgcatggccaacgtgctgtccaagcagctcggcctgagtcgggcgctgccattggattcgcagatggagtgcgccagcttcctgctcaacctgcgcctggcagcgagcatgatccgccagggtaaggccgagaaagtgctggtggtgtgcagcgagtacatctccaacctgctcgacttcacctcgcgtacctcgaccctgttcgccgatggctgcgcggtggccctgctgacccgcggcgacgatgacagctgcgacctgctggcttcggccgaacacagcgacgctacgttctatgaagtggccaccggtcgctggcgcctgccggaaaacccgaccggcgaggccaagccgcggctgtatttctcgttgttcagcgacggccagaacaagatggccagcttcgttccgaccaacgtgccgatcgcgatgcgccgggcgttggaaaaggccggcctgggcagcgatgacatcgattatttcgtcttccaccagccagcgccgttcctggtcaaggcctgggccgagggcatcggtgcccgtcctgagcagtaccaactgacgatgggcgataccggcgtgatgatctccgtttccatcccgtacaccctgatgaccggcctgcgcgagggcaagatccgccccggcgatcgtatcgtcatggccggcgcagccactggctgggggttcgccgcccaggtctggcaattgggcgaggtgctggtgtgctga

SEQ ID NO: 338037 - DNA, 1035 bp, Pseudomonas aeruginosa
atgtcgaaaaagtcccgctccagactctggttcctcgtccacagctggctggccctgcccatctggttcttcgtcctgatcgtctgcgtcaccggcaccctggcggtggtcagccaggagatcgtctggctggccaacccggaaatccgtgccagcaagccaagcgactccgccgaaccgctgagctacagccaggtcctcatcagcatcaatcaggcccggcccgagctgaaggtcgaatcgatcgaacgccccgacgagtcccacttcgccctgaccgtggatgtcagccatcccgacggcagcagcgctgcgctctacgtgaatccctacacaggtgccatccagggcaagagcccgcacttcgatttccgccagttcacccgcgccctgcacggctggtggctgatgccgttcgataacggctacagctggggctggtacctggtctcgctactcggactgccgatgttggcctcgctggtcaccggtctggtggtctataaacgattctggaagggtttcttcagaccacgcctgcgcatcagccagggcgcgcgcatcttctggggggatttccaccgcctgagcggcatctggtcgatctggttcatcgccgtgatctccatcaccggcacctggttcctgatccaggcgatcctcgccgacaatcacatcactctctccagcgaaggcccgccgccggtcatcgcccgcagcgaggtgccgctctcgccttccggccagccggctgtgcagatcgacctcgacgaggccgtgcgcatcgccactcgggacatttccggcttggaagccagcgggctgttcctcccaggcaacgcctacagcccgctctatgtctatggccgcggctggtacccgctgatgtaccagtcggcagcgatcaatccctacaacggcaggatcgagtcttcccgcctgctcggcgaccgcaccccgctggagttcgtcaccgaatccatgcgccccctgcacaccggcgatttcggcggtatctgggtcaagctgatctag

SEQ ID NO: 338038 - DNA, 612 bp, Pseudomonas aeruginosa
  misc_feature (571)..(580): n is a, c, g, or t
atgaaaataataataaataatgatttcccggtcgctaaggtcggagcggatcaaattacgactctagtaagtgccaaagttcatagttgcatatatcggccaagattgagtatcgcggatggagccgctcccagagtatgcctttacagagccccacctggatatgggaaaaccgttgctcttgcgttcgagtggctacgccacagaacagccggacgtcctgcagtgtggctttctttaagagccagttcttacagtgaatttgatatctgcgcagagattattgagcagcttgaaactttcgaaatggtaaaattcagccgtgtgagagagggtgtgagcaagcctgcgctcttgcgagaccttgcatctagtctttggcagagcacctcgaataacgagatagaaacgctagtttgtttggataatattaatcatgacttagacttgccgttgttgcacgcacttatggagtttatgttaaatacaccaaaaaatatcaggtttgcagttgcaggcaatacaataaaagggttctcgcagcttaaacttgcaggcgctatgcgggagnnnnnnnnnncgggagtacaccgagaaagacttggcctttag

SEQ ID NO: 338039 - DNA, 600 bp, Pseudomonas aeruginosa
atgagccgtttcgtccccgctgaccgagacactgcgtacctgctgtcgccctcggtggacgaatggctgccggctgatcacctggcacggttcgtggtcgaggtcatcgagcaactcgatctgagcgagctgaccggccagtacgccggccggggttcggccgtgctcctggggctgctgatctacggctacgccaacggcatgcactccagccgcaagatcgaacgcgcgacctatgactcggtggcgtttcgctatgtggcggccaacacgcatcctgatcacgacaccctggccacgttccgccggcgcttcctgaaagaggtcgagtcgctgttcgtccaggtgctgatgctggcgcgcgagatgaagctgctcaagctgggtcatattgcgctcgacggcacaaagatccaggccaacgccagtaagcacaaagccttgtcctgggcgcacgccaacaagatcgaggcgcagttacgccaggaagtccagcagttgctggcgctgaccgagagcagcgaccgtagcgccatccccgatggcatggaggtgccggcggagaacatcaagcgcttgcatgtgctgcgcgcgatgtga

SEQ ID NO: 338040 - DNA, 543 bp, Pseudomonas aeruginosa
atgatgtcgcaggcgatgaggaagatcactggtaacctgaagaactccaatactatgtgtatcttcattaaccagattcgtatgaagatcggtgtaatgtttggcaacccggaaaccaccaccggcggtaacgccctgaagttctacgcctcggtgcgcctggacatccgtcgtaccggcgcggtcaaggaaggcgaggaagtggtgggcagcgaaacccgtgtgaaagtggtcaagaacaaagttgctgctccattcaggcaagcagagttccagatcgtttacggtcagggtattagcaaggcgggtgagatcgttgacctcgctgttgctaacaactttgttgaaaagtcaggcgcttggtactccttcgaaggtaacaagatcggccaaggtaaggccaataccatgaaatggctgttggaaaacaaacctactatggacaagctggaaggtatgattcgcgaaaagttgatgtctaagcctcaggctgaaacctctgcacgtctcgcaacccaagaagaactggctgacgactattga

SEQ ID NO: 338041 - DNA, 1008 bp, Pseudomonas aeruginosa
atgaacatagcgccactcaaggtctctctgctgtccctcgccctgctcctctcccccgttgccagcctccccgcccatgcggcctgcaccgccaacctggccctgcaacccgccagcagcctgcccgcgctcggcgggcgcctggtctaccacagctatatggagtacggggacggctcctcgaacctctacctgcacgatttcaagagcaagagcacccgccagctcaaccagcccggctggaacatcgaggacccgatgaatgcgcatttctccccggacggccgctacctgaccttcatgggccgccagaatggcgcctggcacgtgttcgcctgggccatcggcggtacccaggcgccgagcaacctgaccgcggccatcggcggtcgcaacgaggacccgaagttctccttcgacggccgccaggtcgtgctcaagcacgagggcgacatccgcctcgccaccctggtcttcaatggcgatggcagcgtcggcgtgagcgcctggaaagccgtgaccagcgatggctggagcaccgaggagtcgatgccgttcctcaccccctcaggcaagtacgtggtctacgcgacaggagccggcgacagcctgcgggtggtgcgcaggaacctggagaacggccaggtcagccccctcgccaccccggccgcggggggccgcgactattacccggtggtacgcgactacaccgcctacgtcctctcgcgtacccagccggccggcaacgaccagttggccatggtcgtacccaacagcccgcccggcaccccggcgatcctgccgctcaaccactgccagggcgacaattccgatgccgcgccggtgaacgaggactacctgatcttctccagcacttcgttcgacccgacctacagcctgctcctcggcgacatcgccgcggcgcgggtctggcgtctcgacccggcgcagatcaacctgcccgacggtcggcagaagctcggcgccagctataccgcggcacgctga

SEQ ID NO: 338042 - DNA, 1206 bp, Pseudomonas aeruginosa
atgcttgagaaacacagagttctggattccgctccagagtacgtagataaaaagaaatatctctggatactatcaactttgtggccggctactccgatgatcggaatctggcttgcaaatgaaactggttgggggattttttatgggctggtattgctcgtatggtacggcgcacttccattgcttgatgcgatgtttggtgaggactttaataatccgcctgaagaagtggtgccgaaactagagaaggagcggtactatcgagttttgacatatctaacagttcctatgcattacgctgcattaattgtgtcagcatggtgggtcggaactcagccaatgtcttggcttgaaattggtgcgcttgccttgtcactgggtatcgtgaacggactagcgctcaatacaggacacgaactcggtcacaagaaggagacttttgatcgttggatggccaaaattgtgttggctgtcgtagggtacggtcacttctttattgagcataataagggtcatcaccgtgatgtcgctacaccgatggatcctgcaacatcccggatgggagaaagcatttataagttttcaatccgtgagatcccaggagcatttattcgtgcttgggggcttgaggaacaacgcctttcgcgccgtggccaaagcgtttggagtttcgataatgaaatcctccaaccaatgatcatcacagttattctttacgccgttctccttgccttgtttggacctaagatgctggtgttcctgccgattcaaatggctttcggttggtggcagctgaccagtgcgaactatattgaacattacggcttgctccgtcaaaaaatggaggacggtcgatatgagcatcaaaagccgcaccattcttggaatagtaatcacatcgtctctaatctagtgctgttccaccttcagcggcactcggatcaccacgcgcatccaacacgttcttatcagtcacttcgggattttcccggcctgccggctcttccgacgggttaccctggtgcatttttgatggcgatgattcctcagtggtttagatcagttatggatcccaaggtagtagattgggctggtggtgaccttaataagatccaaattgatgattcgatgcgagaaacctatttgaaaaaatttggcactagtagtgctggtcatagttcgagtacctctgcggtagcatcgtag

SEQ ID NO: 338043 - DNA, 825 bp, Pseudomonas aeruginosa
gtgatcagtatggaaatgatgggcaaaattcgccggatgtatttccgcgacaagctgtcgctgcatgagatagccaagcgcaccgggttggcgcgcaacacgattcgcaagtgggtcagagcacccgaggcgaagcagccggtttaccaacgccgcgcgatcttcaacaaactcagcccttatcacgccacgctggagcaggcgctgcaggccgattcgctgcgccccaagcaacagcggcgcagtgccaaggcgctgttggcgcagatcaaggccgaggggtacgacggtggctacagccagctcaccgcgtttatccgcgtctggcgcggggaacagggtaaggcgttgcaggcctttgtgccgctgagctttgcgctgggtgaggcgtttcagtttgactggagcgaggaaggcctgctgatcggcggcatttaccggcgcatgcaggtggcgcacctgaagctctgcgccagccgtgcgttctggctggtggcgtatccgagccagggccacgagatgttgttcgacgcccatacgcgcgcgttcagcgccttgggcggggtgccgcgtcgaggcatgccggattatgtggcgcgccacataatccggcttatgttcccttcgccattatgtggcatcggctcggcggccccacgagtgacgggggcgttcgagccgagggggcacataagaatcacagggaatcgagccatttcagcaagtcgacgtcccggtgccaagcgcctgattgggaggatgccgccgaggattgatcgggtggaacgcacagggcgacggcagcctccttggttcggatattga

SEQ ID NO: 338044 - DNA, 201 bp, Pseudomonas aeruginosa
atgcacctgctgcaggccggagtcgacctcaccgttatcgccctgtggcttggacacgagagcccagtgacgacccacggctatgtcgaagccgatctggccttgaaggaacgggccctcgccgcaatcgcgccgcccgaacttcggcgcacgcgctaccgcccaacggatgccctgctgaagttcctgcaggggctttga

SEQ ID NO: 338045 - DNA, 579 bp, Pseudomonas aeruginosa
atggttaaaactgtcagcctacccaaacctgcacctgatctcttgctgttgcacattgagctgaagtggatcacaccgacgatctggcgtcgtttcgtagtccctgaaaacattaccttgggcaagctgcatcacgtgattcaggtcgtgatgggctggagcgacagtcatctgcatgagtttgaaatagcaggtgaaaaatacgggattcccgattctgatggctgggggccgccggtgaatccagaagctcgcaagacattggtcaaagcgctgttcggtaaaaagacgtttgactatctctacgactttggtgacagctgggatcaccgaatcaaagtcgagaaaaggctacctgccatcacagcccctcaactgccgtattgcattgaaggtgccaatgcttgcccaccggaagatgtaggtggggtgccgggttacgagggttttctagaggccatggcagaccccaagcatccagaacacgacgacatggtgggttggtacggtgaaatatttgagccggcggcatttgactgcgagcgcgtgaatcagtggtttaagaggatcaaggcttga

SEQ ID NO: 338046 - DNA, 360 bp, Pseudomonas aeruginosa
atgctctatctttcggatgtccagcctgcctattgccctcagtgcggcaaacccatggagccgaggctgcatggttgggaagcccaggatcgtttctataacgctaaacagccttttctctgcgaatgcggcgcacgttatcttctcagggagaatgtcgttgccaatgcgctcgaccatgccgagtcggtaggcggtgatgctggcttcgaccgtgccgctaggatgaacgtgttctccgagttgtacgtgattctcggtgctctcgatgcccccgaggctgtgctggaccaggtattagccgcagccgaaggtgatttgctgccttactccacgttgctcccattcgagaaggaatag

SEQ ID NO: 338047 - DNA, 1287 bp, Pseudomonas aeruginosa
atgatacatgtagcaaaagctccgcgtcttgacttcctttttaatcacggccacaccacacctccgtctcttccaatgctttttgactcccgaggaaacttttgctgggagctcaatagctaccttacgagtatcggcggtggtgccaacagctatggggtccggccagcaattaaaacagtgttcagccatgctgatactctaaacgtcttccagaaatacatagaacgcaacaagttaaccattcttgatgtcactgacgaaaccctttacgacttcgttaagtacaaacaaaactctagaacggcaaactcgaccacaatcaagaaaattgtccgacgcatattagctctattagagcacacgcaaaaagaaaacaaattccagaacctacttaccactgaccctcgcgcacataactttcaaattaatgctacagaggacttctacagacttaacaggcggacgccactgcgttttctaacccatccctgcctagatgaactaagggatactccgaccaaaccaacaagcttcataagaaacaatgaactgaacgcatggcatgaagcaattcacgactacacatccaaccagtatataattgatagatggtacatccttgccacattactcgaacacacaggcagccgaatagaagaagccattaacatcccagcaagctccattattaatgcctataaaaataacggccctgtaacaaacatccccgttttaaaaggaaaatacaaaggttgcttacgccaggtactaataccgagaaccgagcttcaagaaatctacaaattcgttctactcactcgttccagccatcctcacagcgagcttcatgacaggatattcgttagcgaagatactggatatcctctggcgcgcaccacctttaactcctattacaacgtagtcatcaagacttcaagacacgcagaactcctcaaaggtatctcctatcataacttccgccaccgatacttcaccatattagtcgccaagaacatcagtacgctttcaaaaatgtcgaaagccaatattctagacgtagcgatggccatcgctcgcaaaaactcataccacgcatccaagagcacactctctacttatatccatctcacacaagatgctgaaatacaagacatcctgaaagcagaaccaaatgcgtccacgaccctccatgcgatccaaagcattgtcgatgcaactgacgacagatcccctgatgagaagctcacggcaataacggcattgatacaagccaagctctcttga

SEQ ID NO: 338048 - DNA, 609 bp, Pseudomonas aeruginosa
  misc_feature (4)..(13): n is a, c, g, or t
atgnnnnnnnnnngccatgagcttgagattataaagcgcccaatacctaaagtcatttgggacttcattaacgagtacatagagtttatggaggatcgccacccaggcatgacctccatctggccctccggctcattcaaaggaaaagatcgcagtgaaatgactctactaaaaaaactggatcaatactccgattggattcaagtacctaagataggcgaaactagatggtatgcacgacctcatcagttcaggcgtttcttcgccgcctttttcttctacctaagcggcagtacagaaattgaaccattgcgctggatgatggggcacattgaacctagcgtgaccctttactacgccaatatcgcgaaccagcccggttgggagcgagaaaccttagaattcttaatagactacttggaggggcatgtaggcaaaaacgtattagtcgacgaagatctacaagaaaattttgctgagtgtgagcttgaaatcaaacttggcgaccacgccttattatctgaacaccttcaggaactggcaaaccatcgcgaaataagactccaaatcatcaacaacaaaaaaatctttgtgtacgcgagtaaataa

SEQ ID NO: 338049 - DNA, 1308 bp, Pseudomonas aeruginosa
  misc_feature (1292)..(1301): n is a, c, g, or t
atgaataatgaaaaaatcaagaagagctctccatctacagcaacctcccaagcgatccttcctagttggatccaccccaactcctcaaatatgaagtggtatcttcctcgcaccggcaccaaggttacagtttcggaagatccgaacagcagtcgctatgtaaagcttagctttgactaccagctatttgatgggtcatccacatcagatctgatatggaatttatttatcagagatttacaatcatcagcgatagccctcatcgaaagctcaaagtcaaaacgaccgtgcgcattagtcggctttgttagaacggcttttgaaattgccgaccatgtgtatgaagccaggcaccgcttaaatcagccccctaaaatcgtcaccctagccgatatcaccctggaagacataaagaccttcctagaagctcacgacctcacgctcatggggataaatttactcaatctcgacacgcagttagggcctacgccaagaggccgcgaaaacattgcatcctgcatttcaggaatgcacataccacccataacacaaaagatcttaatccagaaacttaaaaataacaggtctgacatctgccgggaattcacctgtacgcactcagcaaatgaagagaatgaagagaatgaagagaatgaagaggacacactcagcatctccacaatccaaaataaatgcaccaacttaacctacctacactccactaaagaatatcaaattcattcctttaaggtaggaacgcacgacatctcagatgtaattaacagcatgaccggcagatttgtagataaaagccaaaccccactgatgcctacaaatattgcatttcactacatcagcaatgctattgtttttcatcgcaactatgcgccacacatccgagcctacataaagcaactggacaaccattacaacagagaaattatagataaatatgccgcaagcacaattagatcaaatgtgcacattttcaagaagcaaacctttgaggctgtaccaatccccaaggcactacaacatctaaacattaaaacatatggtaagtgcggcagcaacagaggtggtatttattgcaactcgattatgcgcgaacacatctccactgatgaactaattgatttttacgctatcacaacacgcatccttatccatactttttcagcttgccgagtattgagtaccgccttgctcgacgctgactgtcttacaatttcaaaactggatggcttgtgggatctgaagcttaaaatcccgaaagccagtaacagccatgnnnnnnnnnngccatga

SEQ ID NO: 338050 - DNA, 1749 bp, Pseudomonas aeruginosa
atgagcaggatgcgggaagatttggtcgatagtatcagggcttgctgccctgaggacatcctaatctgggtagaaaagcatcctccgaagcgccgggcgcccctcatccgcgtttttttcatgatcgctcacgaacttgattcagagtggtatcggaaccctgtggcaatcaccaatgcttgccgccaatttctctctcatcgacgcagtgcaatatccgaaattacaggcaagccaatcaaagaagtcaccgtcatctctgactacaccgccgttcgttattacttgaacaggcttcaaaaagccaaaaagctacctagcaatgcgctgatcctaccagtcccaaactcgacagacgtattctcagaaaaagaatgcaacattcttggctatctgaccttggaacatgccattcaagcgaattcaatggaaaacgctcttaacgagattgcccatcaaatcgaaaaacatagaactgtcattctctccaaatgcaagcgcattgtagcagagggttatgcacggtttttggaagttccaggcatgattcgcagaagcgatgtggccgccatccgactcacaaaagacaacctagatcctaacctgagaggatctcgctctggccaacatataagctttttctcaccatcacatccaaatggcttcagcaactctgttgcgtacctagccacagaacaagatggtctatttacacgcaaatctttccctggcgcgcaccacatttattcctggtctactacgaaaatcaaatcctacctgggaattaccgaagagtttgctgtggcggccatgtgcatcatcattgacgaactcgggataaatgttttcgacttagcaaatgcccaagtcaagaaaacaaaagatggtcaatttgtcaccatccgagaagatggcggcataactatcaccacccttaaacctagggctaacaaattaattgagcgccacgcaccaaaagctacggacgagattgaaatcgatgcagaaagtatagacgcccatactgcgctatggatgctattgcaaatgagagtccagcactccaaagccttgaattccaactatcttttcgtcatggatggttctagccctactcgccacggggatgaacacctctaccgtatcttagacacgagacgtaaaaacactttcaaagcaatcattgattcgctgccttcatgggtagctgaagctgaaccaaccatgcctaaaattagggtttcacgaggactgctgaaatggattgagagtggtggagacactttggaaacgaccatttacctaggaaattccctgctaacagccctgagaaactacatcccaccttcaattcaagaatttgtttaccgaaagagaatacgtgaccatcaaaaaattcaactactaatagcagaagatatctcaacccactccccccgcattaagaataataattacgagtgcgccaagatgcagtttatcgaggctgtgaaatttttaagaactaacagccgccacacgacaacccacaacccaggtcaagtattctgtttcctttgctcaccagaagcaattgggttgatagtctcttacgcgacatatgggacaaaacaagagctcatctcgacttgcaagaaaatcatcacaaaaatccaagacgaaggcagtcgaaagatgatcaagctactggcggacgctactccgataccaatgaactttgagcttcttgaggtacacgtaaatgaataa

SEQ ID NO: 338051 - DNA, 171 bp, Pseudomonas aeruginosa
atgaaaattcgttcgcaagtcggcatggtgctgaacctcgacaaatgcatcggttgccacacctgctcgatcacctgcaagaacgtctggaccagccgcgaaggcatggagtacgcctggttcaacaacgtcgagaccaagcccgggatcggctacccgaaggaatggtaa

SEQ ID NO: 338052 - DNA, 792 bp, Pseudomonas aeruginosa
atggttgcaatatttgagttggtgaaagatccctacgagcgaaaagccagggttattcctgggttgttagtttcactgccgttgcttgtgcctttactgtgtgtgtatggagcaaaacatcccgtcctcacgagtgtaattgggctcctcggtggatgtggagctatctacgccctagcgagcgtagcgcggggacgtggaaagaagcttgaggaaaaattgctaaagcaatggggtggcatgccgacgactttagctctgcgtcaccgggataaatttttagacagtgtcagcaagcagagataccacagagaaatttcaataaaactacaaattgacatgcctagtgagcaggacgaaagccttgatcctggcaaggccgatgatttttatataggtgctacaaagcgccttagagagttaacgcgaaatgataaaaatttgctactgaaagaaaacattgcctacggttttcatcggaacatggttgcaatgaaagatgtcgggatcttgtcctgcctgtgtggattaggatacggagggttaattgcgggcgccattcgagccgagccgccttattttgaacctatatacttggtaaatcctgggcttgcatcggggctgacaatcttgatttcggcttctttgctgttggcttggctattttacttcgataaggacgcagtgaagcgaatgggctttgtctatgcagagcgcctattcgagtgccttggcacattaccaaccccaagggccagaaaggtgccagtcaagactgaggctcagtcgtaa

SEQ ID NO: 338053 - DNA, 138 bp, Pseudomonas aeruginosa
atgcaccaggtctgtaagcccgccgagccggctgatttgagcatgaatatctgcggctccgacgtcctcatcagccgcatgctcattctggatgagccattcgagctgagtgacttccttttccactacggcaattag

SEQ ID NO: 338054 - DNA, 1371 bp, Pseudomonas aeruginosa
atgaagacccgcagaactgacggtgagcgtcgtgttagccgcagcgccgtttcgtcgcctgatgtcgctggctgcatgaatttcgacaccagcatcatcgtgctttcaagctttgaggcgccggcggcgtcttttttgcggaaagccatgcgtgcacctaggaaaaccgaccccaacgatccagccagaattgaagcccacaggctcatagttcacgaggtcacgcactacctggacctgacaactaccctatggggcctggagttcctggtgcgtagggatcttgcactggccggcttggcgctcggttcgcatgatggtttgaaggtggccatgctcaatttctcagagcttgagatgcactgggagttgaccaaggtccaccaagagaccgccctcacagacctagagcctgtttgccatgtgcactacagccaacgccacggtgccatggtgacggtcgtcatgtacaagcatggtgagcgcgtggcggagacgccactcagtatgctgtcgctactggaagcaaacgcgctagcaagtgaagttgatgccgagatccgctggtacaccatcaagcacggctgcctacctgaacatcatgaatcacggattgcagctggcctggccggggtcttaagaagtcccatgcgactcgaatacaacgtgctgcacatcatcgtacttcgttacttcccgggattggatcttgctgcccgggtgaagctgatcatggcggtcaccagctttacgctcaacctatctacggcagagctatcgcggatggccaacggcctctcctaccacctcgatggcgaggcttgggaagcaatctgcatggatatgcgtagaggaatgtctcggcacatcgtggctttcaagatcattgagatgctgcatcggtacgcgaccgcgatcgatgttagctacgaggcgttttctgtagctatccaacagaagcatgaagagttgattcgcgcgagcctgaacttcactggtgtcctgcctgggggaatgaacacttaccgagggctctcagacatcgaagcgaaagtcctgctgcgcgtccttcgtagtcataaaggctgctacgagccagttggacacttgcaagcgatcacacggaatcgccgagtgcgcgcccgtgatctgtctacggctgctggactccggcgttaccgtttgatggacctggttctaggcgatgacagcgttatccgaatgcctacaaggctgagggctgatgtgcacaagctcaacgactctgtgcttgatcggggtggcgctgagtttttgaggcagattggtaaccccgagatccctcagaagttccacatgccgccgggcacgcagtgggtgaacttgggatag

SEQ ID NO: 338055 - DNA, 495 bp, Pseudomonas aeruginosa
atgaagaaactgattactggcttcgccctaacctgcctggcaaccacggcttttgcagcgagtgatgtgtacaagctcgacgtacagctcaccaaggatggtgcagttgtaggtgcctactccggcatcctcgacgacaacgtcactgggcactatgaaaattcacagatccggccgatcaccgattcgattgagatcgatgctaatggcaacagccatgagatgagcaaaccgatgaaggtgggcttcatctttagtgggaccccgcggaagatgtctgacggtaaggtgcttctgtcctacgacttcgagtacacccagctgcttgatatgcgttaccagccagttgccgaaaacgtcaacatgctcctgcccgacaccgcaacccttgcgttttcctcatcgatgttcaccgaaaatggtaagccggtagtggtcaagtctgagaaccaacggggcaagtttgaactcagcatgaccgtcactaagcagtga

SEQ ID NO: 338056 - DNA, 426 bp, Pseudomonas aeruginosa
atgaagtatctctccctcctcgctctcagcctcgccgcgctgactggctgcactacccatctggcaaccggccagaagcaagagctggcggtctatgaaagcaaaggtctggttgtcgaggagaaaagcgtagcaaccgctgcagtgctcggcttgctaccaggtgtaccgtactgctatgtgcgtagctatggtctgtgcattgcgaccataccgctctacccgttcctggggccgctgtggcaaccgttcgatgtggccggggctgcaaaatctgagaattactacgcgacaaaaatcgctgtcgagcgcgagaaagccaaagcgcttcgagagatcgatcataagctcgaggacaaacagttgacctacgagcagcacatccgtgagcagcgcaccatcgaggcgcgctactcggcatattga

SEQ ID NO: 338057 - DNA, 453 bp, Pseudomonas aeruginosa
atgagtaaccccactgcaatcgaagaacctgtgatggccaaggccatcgagccggcgaagacgaagatcctcattgtggatgactctccgactgacacatacgtcgctcgcaaagttgctgagcaactgtttgatgaggttcggaacgtccatagcgttcaggagatgttcgtcgagctcaagaccttccgcccggacatgtgcacgatggatatcaatctatccgaccacctgaacgggatctcgctcgttgcagagttgcgcgcttctgatgatgacctgagtgtaatgcccatcgttatggtgtcttcacggcaaacccctgccgacaagcagatcgccgagaatgcaggtgcatccggctacatcgttaagcccgtcaccgttgaagcacttcacgaaatggcctgcaagttgatccccgggttcaagccggtttcattcacgaagtag

SEQ ID NO: 338058 - DNA, 876 bp, Pseudomonas aeruginosa
gtggtggccggctcggatatggccttcaatgacgcttggcgcccctttagtgagcagaagtctgaggctgcgggtgtttacactgtgcagcgcactacgctcgagctgatcatctccacctgccatgccttttatgagcatgttgccgacatgggccatgcagttcggaatcctttctcgattaagcagcgcagcaggcttaccggccagaagccgcagcagcgtaggagcaagtcgcttacccagcttgagtgggactatctcctggacgtggcccgtgagatggcagactcgaaccccaagtacgagcgcagcctgttcatcgtcgtcgctctcttctcgatgtatctccggattggagatctggcaggaagtgacacctggcagccaacaatgggttccttcttcaagcggaagaattgctggtggtttgctgcatgtggcaagggtggggtccaggctgagatctcagtgaagcccgatttcctggagtacctgaagcgttatcgggaaagtcggaacctctcgccgctgccggcctccggtgagaacacccccttgctgaccacaaatagcggacgcccgggcctatcggcgcgacagatccgctcgcttgtgcaggaggtgtttgatcaggccatccaaaagatgctttccgaagggcgctctcaggatgagtgtgatcagctcaagagcgcaacagttcactggctcagacacactggggcgacgtttgatgctgagttccggccggtaaagcatctgcagatggatctccgccacgcaagccttcagaccaccaccgacatctattacaactcgatcgacgaggagcgggctgccagcaatagtgggctaggcatcaggcgcgggtga

SEQ ID NO: 338059 - DNA, 897 bp, Pseudomonas aeruginosa
atgggtgaggcaagacaacgcaagctgcaggctgcgaaggaatctgcgagcacagggccaaaaccttggccgctaagcaatccggacattcagcgcgaactggaagcttggtttactagcattggggtcgatgcaacccgacctggcatccacgacacgcctgagtttctgcatgcggaagctcggtaccctgacgcgctgaacaaggtcgcccgtctagtagaggccagagcctacaccgaggaagagctcgcccaggctgagcggaagatactggtcgctgccgaggcagtcgcgagacgtgttgcgcaagatggacgcccaggcctgtgtgtcgttgcgtcaggtgttctgtccaggatgcttgatgtgctgcaggtctggaattacacggcgaagagcaacctcacggtcaccttcccgcctgcaatttctcgctcaccgcggtacttctactcggtcgattcaggcgactttgcagccgctcacgcggttgtcgtcgccccgccctttgttgtcgtcgacgtcacggttcgccaccaatcctatgaaacggcggccatggggcaatatctgccggcgatcgccagcacgaaagattacaagccctatcgagtgactgctgatcaactcatatctcccgagttcagggcaaatctacagatgcacaggttaagtgcggatgcgtatctgacgcagcgaaagccggagatgctcgagcttatgcgtcacctaccttcgcgccaggtttcgcttgaaaacggcagtcttggctacgggatcgttgctgtcaccggatatcaggagcgtctgagcgaaatgcagggagagttcatcagcatcgatggactcactccgcagcagatcttcgagcaggacgttttgccaaggctctga

SEQ ID NO: 338060 - DNA, 873 bp, Pseudomonas aeruginosa
atggcggtaggagtacctgagaaggaggtctttgcagccgcagatgcggtcctggagcggggggagcgcccaaccgttgagcgcgtccgctcagagctcggccgcggcagtccggctagggtcggcgcattgctagacgagtggtgggcacttctggcgcagcgccttagcggtgaggcgcgattaccagagctgccgccagccgtctctcaagcgtttgtcgggatatggaagcaagccattgccctcgccgaaggggtagccgagcagagcctggctgagcagagggcagtgttagccaaagaacgagagaggctggctgaggtagaagacagttctcgccaaagcgccgcgacctaccgacaacaagcatctgaggctgttgctgctcgattagccgctgaaggtcgactggccgatctcgaactcctcttagcggagaggcagcatgtcattctcgatctgcagcgccagcgggacaacgtgcttggcgagcgagatcaagcattgcagcgagagtcgatcctgcaggagcagctgcggtcttcgcatgaaaagcacgaagatgagcgcaaggcacaagagacctatacccgcggcgtcgaagagcgcgctcatcaggaggttgaccgggctcgcgaagaaaccaaaaggcatcttgcagaggttaagtccttagctcgacagcttgagcagctccagcaacgcctcgatgaggtgcaagatgagctgggtaaagggaagctgcgcgaagcggccctgcagggccgcgcagacgctatggaggcccagttgaaccaacgatccaaggctaggccttcagcgcgcccggctaaagctccaaaggctcaagggaaagcgccaggcaagtaa

SEQ ID NO: 338061 - DNA, 1137 bp, Pseudomonas aeruginosa
atgaataatacagatgaactgcagctagtggaaatcctccaacttgagccacaagcgctatccctggctgcgcaggatgcggtggctgactttatggatgccggcaccgctgcaaacacggtgcgcagctaccgcagcgccctctcgtactggtctgcatggctgcggctccggtacggagtgacattaggcgacatgaagctacccgcggcggcagtgatccagtttgtcgttgatcacctgcttagggagaagaaggacggcacttgggctgtggagttgccagacaccatcgacgcggcgcttgttgcggccggcgtgaagtcgaagatcgggcctctgagctacagcacagtccgccatcgactatctgctctgggtaaatggcatcaagtgaatggttgggaaaatcctgtggcggtgccggcagtgacgacgctactgagcaatgcccgcaaggcgcagtcgcgcagtggtatcactgtgcgcaagaagacagctgctgtgcagcagcccttggaagcaatgctggcgacgtgtacggatggcgttcggggcgtgcgcgatcgagcactcatcctgttggcatggagtggtggacgaaggcgctcagaggtgaccaacctacagattcaggatgtccggcaactggatcaggacacctggctctatgccctgggcgcaacaaagaccaataccagcggtgtacgtcgagagaaaccactccatggacgtgcagcacatgctttgaaagcctggctcgatgctgctccggctgacacaggcccactatttcgaaggatgtaccgaggcgggaaggtcagcccacacggtctttcatctgaccaagtagctcgcattgtgcagcgacgtgcgaagcaggctgggttagatggtgactgggcagcgcatagcttacgctcgggctttgtgaccgaggcgggcaggcagggggctccactgggcgacgtgatggccatgacagagcacacgagcgttgaaactgtcatgggatacttccaggccggttcgctgcttaatagcagcgtcactaggctcctatcggacaatccacctggtggacaaaacgtaggcccaggtgactcagtgcaaggagcctcgctaccagaggtgtaa

SEQ ID NO: 338062 - DNA, 645 bp, Pseudomonas aeruginosa
gtgaacatagatcttgcccgggccctggttgcaacactgccagtagggctgcccaacctcttcaatccttggcgagaagcatgctcagatgacacggagctgaatggccctgagattcgcatcagtcgcctggctgaacacctggactgccagccacggctgattctgtgcggcgaggcgcctggacacctcgggtgtaggtcctctggggtggcattcacttgtgaggagcagttgcttgctggtgccattcccagggtcagtaggcctggaggccgaatctcaaccacatcagagcccttgaaggaacaaagtgcgagagtggtatgggccgcgttgtatcagcacaggctggagagtgatgtcgtgctttggaatgcactgcaggcacatccccacgaaccgggagccccattctcgaatcggacgccatcaggaagtgagttccagcatggaaagcgggcgatcgcattgcttcgcgaggcataccctaaggctgctttcgtggcgatcggaagaaaagcagaggggctgttagcctcggccgggatcaaagacgtctattcagttcgacaccctgctagaggtggcgaaaaattattcaacactgggattgcagaactggcaggaaggctgacgccttag

SEQ ID NO: 338063 - DNA, 216 bp, Pseudomonas aeruginosa
gtgtacggagcgaagctggtcaagaaagttgtgaaagaaatggaggttgcccagggcatcacctacagcgaagaccagatcgatgctgttttgaactccccagcctttggcgagatgctgaagcgcgagatccgcagccaggacaagtacggattctgcgatgatccggaaagcccgacctgcaccttcggtacccaagagtcggactacaagtaa

SEQ ID NO: 338064 - DNA, 1338 bp, Pseudomonas aeruginosa
atgaccccatcgacaattacaaacgctttgcagcgcaacagtcgtgagcaggaagcggcggtacgttctgcagagaaagctctttcttccgcccgtgagctgggcattgcactggagcagcgcgtactcaactgccttggtgagatcgcttccgttcagctggagaacccgactcagtgcaccagcgaagtgcgcagcgagatgaaccagcgccgcgatgccgagaaccaactgcgggccgaactttcgagcaccgagatctccatcagcaacctgaacgagatggagcgcgcactcaacgctgatctggagaccttggtcggccaggtcaaccaggcgctggccggcgacgaaacctacctgcagctggtcgaccgcaagatgaaggccgctgaagcggcacgtcgtcacgaacagtctcgggttgagattaagtccgagtgcgctgggaagatggatgcctatcagcagcctgtgttcgtttatctgcgcgccgccaagttcggtaccgaggaataccgcagccgtttcctcatccgcgccctagagcgctggcttgccgccaagtccaattacctggagaacgcaagcaactactcgatgctgagctcaatgctggctggtgttgatgagcgctctcgggagctgaaggcggaatttgaggaagctgatgcagcgctgaagcggcgcgtggactctgcgatggcagccgctggcgtgcctggccagcaaggtcgcctcgatgcaattcgcggcaagatcagcgatagcaagcagacggcaaatgttatgcaccggcgcctgagtgattttgccgccggccgcgactcccattcgcaacgcgcccacgagattctcatgcgctcgatgaagggcatgtccttcacggacatccaggatctggtgagccgttccgcttcaacccgcgacgattccgcggctactcagctgcgcagcctgaacctgcagctggagaagcaccggaaggatatcccccgactcgaggccgaactggaggaggcggtcaacgcctacgagcgtgctaagaagcttgagcgcaacctgcgcgactctgactacaccagctccggcacccggtaccgggatgatctggacatcagctcgctgatcattggctacatggccggcgagctctccagctctagagttgcagaccaggtgcgcagctcacgcgaagtagagaggcacactacctacagaagcgatgacgacaacgatcggggtggattcggatttgggggcggcggaagctcgttctcaacctcgggatcgattggcggtgacagcggcagcttcagtacctccgacagcttctag

SEQ ID NO: 338065 - DNA, 255 bp, Pseudomonas aeruginosa
atgatcagcatgaacacctatcggcacaccttcgtagcgacctgcccctcggacggggagtcgatcatctaccggctcgaaatcaaggcgccgaaggtgatcatggtcgagcacatcaggactgcgactgcactcatcaagaagggctaccacgagcagatcgctgaccaactgcatgaccgtttcggcggtgagcagcggatcgtggccacgcaccaaggcgtcgagattgagacgctgaggctggctgaatga

SEQ ID NO: 338066 - DNA, 726 bp, Pseudomonas aeruginosa
atgatccactaccacggcacacctattggcggcaccttgagcgacaagtcccgctttctggctgggcgtcacgccctggtgccgtttcccaggcaggacgatctgggcatcgttgccgagacctgccagtccttcgtcttcgataacggggcattcaccgtgtggaagcaaggcggccagctcgacgtagacggctacctgcactgggtcgatgactggtatcggcacccagggtttgactgggcgctgatccctgacgttatcgacggcgacgaggaggccaatgacaggctactggagcagtggccgactcatttgccaggggttccagtctggcacctgcatgaatcgctggaacgtttgcagcgccttgctggggcctggcgcaccgtcgccatcgggagttcagggaactggagaaccccaggcacagcgtcatggtggaagcgcatcagcgctgccatgggggcaatatgcgatgagcacggtcggcctcgttgccgtctgcatggcttgcgcatgctcgaccccaagatcttcagtcggctgcccttcgcgagtgccgactctaccaatgcggcagtcaatggtggcagcattgcccggtttgggatgtacgtccctcctacagccgggcagagggccgaagtgatcgccagcaggatagagagccacaacagcgccaacctttgggtacccgattcgcagatcgagctgtcgctatga

SEQ ID NO: 338067 - DNA, 1368 bp, Pseudomonas aeruginosa
atgaccgacattctcgacctgccggactggaacgtcctgacctcccgtctcgatgacggcacctacaccatcgaggcggagtacaccctgccgctccaggcctgcaccaagtgcggcgtagtgggcaagctgtaccgccacggccccaaggtcgtcacgtatcgtgatagccccatcaggggtgcccacgtgcagctggcggccaaggttcagcggtacaagtgccgagagtgcggcggaacgtccttgcagccactgggcggggttgaggttgaccgccggatgaccaagcgctgcgttgagttcatcaagacgcagtgcatgcgggacacgttcaccaggctgtctcaacacatcggctgcgacgagaagaccattcgcaacatcgccaacgattacgtcgagcacatgaacacccagttcaggccatacctgcctaactggctggggatcgacgaaaccaagattgcgggtgacatgcgctgcgtcctgacagacgtgggccgcaacgtgcctatcgatatccttcccagccgcgatcaggacaccctagcgcgctggctggcagccttccctgatcgctcaacgctgcttggggtggccaccgatatgtggcggccatacctcaacgtggtgaacatgatggccccaggcgtgccggtcgtgatcgacaagttccacgttgtcaggatggctaactatgccttggacaagacccgcattcggcgaggcaaggcccaaggcgtcaaggtcaacaaggagtggaaacgcagcaaggtactgctcaacaagagcgctgcgaacctcactgacaagcagtccttcaacctcgatatgtggctggacaatgaccccgaggtcgcccagtcctaccagctgaaggaagacttctatgccctgtacaacctgtccaaggcggacgctatccctgccatggagggctgggttcaacgggtgaaggcgagtgacgtagctgctgactacaaagacctgctgtcagccctgaagaactggcggcagcagatcgtcaactacttcgatcaccccatcaccaacggctacaccgaagccctgaacggcatgacgaaggtcatcaaccgcaacgggcgcggctacacgttcgagatcatcagggcgcgcatgctgttctccaacaactcccgcgcaggtcagtcaccggaatggttctgcgtgagctgcggcggcttgttcttcgaggatgagcgggccgtctggttgcctgttgaggatggagacagccgcaggcactgcctctgcgtggaatgcaacgagcgctcgattacacacgccaaggagttctacgacaaccttgatgagttcttcgaatccacaccattttccgaatag

SEQ ID NO: 338068 - DNA, 1833 bp, Pseudomonas aeruginosa
atggtaagcaaaaccctgccctcgacggcgacgccgccattaggcgcgcctgcaaagtacacagacttcaaaacaaacacctacatcattggcttcagcgccagcctttacatggtgctgctaataactcccatgatcacaaccaagcttgtcgagcagtacagtttaagcgcgtcggccgtcgggactttgttgttcattgagatcggggccttcagtttcgcgacaataccgtcatacttctggcttcgccgagtgaatctcacgcgtgccacctggatctttggcactaccgccgtgatgggtaacgtgctttccggcctggtgggcagctatgaactcctaataatatttcgggtagtggcggccgtggcggcagggtcgatcaccgtgatcatcctgacaatggcacggaagacaaaaaatccgagccgcagctatgccctgttcctggcttctcagctaggcatggccgctattttccttgccgcctacccggtcctgttcgaaaatcgatcggtctcagcaatctactacgccctggccctcctggcgcttgtgtgcctccccttggccggactgatcgatcccaacacatataagcgcgaagcggccgcagagaaagctgagcaatctccggcatcagaccgcacctctaagcggctggatctgacgggcgccatgggcttggcaaccatccttcttttctacatctccctcagcggtgtgtgggccttcatggctgccagccggcccgagatcatggggcgggtgctgggcatcgtttaccgcgtcattgccacgcacctggtcaagaaagcgggccatacccaccaagtggccaagacgggcgcggtcaccctgatccagcgttttggatcggcgctcaatctgaatgttcacttccacatgctgtttctcgacggtgtgtatgtcgagcaatcccacggctcagcgcgtttccgctgggtcaaggcgccgaccagcccagagctcacccagctgacgcacaccatcgcccaccgggtgggtcgctatctggaacggcaaggcctgctggaacgggatgtcgaaaacagctatctggcctcggatgcggtggatgacgacccgatgacacccctgctggggcactcgatcacttaccgtatcgctgtcggttcacaggcggggcgaaaggtgttcactttgcaaactctgccgaccagtggtgatccgttcggtgacgggattggcaaggtagccgggttcagcctgcacgccggcgtggcggccagggccgatgaacgcaagaagctcgaacggctgtgccggtacatcagccgcccggcggtatccgagaagcggctgtcgttaacacgaggcggcaacgtgcgctaccagctcaagacgccgtaccgggacggcaccacgcacgtcattttcgaaccattggatttcattgcaaggctggccgccctggtaccgaagcccagagtcaacctaacccgcttccacggggtgttcgcacccaacagtcggcaccgggcgttggtcacgccggcaaaacggggcaggggcaacaaggtcagggtggctgatgaaccggcaacaccagcacaacggcgagcgtcgatgacatgggcgcaacggctcaagcgtgttttcaatatcgacatcgagacctgcagcggctgcggcggcgccatgaaagtcatcgcctgcattgaagaccctatagtgatcaagcagatccttgatcacctgaagcacaaagccgaaaccagcgggaccagggcgttacccgaaagccgggcgccaccggctgagctgctcctgggtctgtttgactga

SEQ ID NO: 338069 - DNA, 1602 bp, Pseudomonas aeruginosa
gtggccgagtacaaggccatcatgacgttggcgctggccgggcatagctacagcgagatcgtcgccgccgtcgggtgctcgcgacgggagatcgcggcggtgaagaagacgatcaccgcgtacggcatcaccgccggccaagcggcgtcgatgaacccggccgagatcgccgggatgttccccgacgggcgcaaacgcgtctcggaggactacaccaagcccgattttgatcgggtgctggcgtcgatgaagttcaaccggcacttcaccatccagcaggcctggggcaaatatctcgcggaccccgtcggggccgggaagaagtacgggtactcccagtactgcgccctgttcgccgaccacgcccgcatcaaggacgtcgtggccacgctgcatcacgaacccggcaggacgatgctggtcgactgggccggcgacaccctcgaggtcctcgacgcggtcaccggtgaggtcaccaagctgtacttgttcgtggcggtgctgccgtactccggtgcggtgttctgtcgcggttttacggatatgaagtccccgtcgtggatcgacgctcacgtcgcagcgttcgacttcttcggcgggacgccgcagatggtggtgcccgacaacccgaccaccgccacccaccggcaggccaagggcgaggcggccagggctgtcaacgtccgctaccagcaactggccgaccactacggcaccgcgatcgtgccggcgcgggtccgcaaaccccgcgacaaggcagccgtggagtcagcggtggacgtggtcaacaagcgcgtcatcggctacctcgccgaggaggtgtggaccaccgtcgaggccctgaacgcggcgatcgacgaacgggtcgcggagatcaacacccagattcgccgggctgacggtacgacacggtgggagcgattcgagtccgatgaggcgccgctgctggcggtgctgccagacgacgggttcgccacggtggagtggaagcagctcaaggtcggacggaactatcacgtctcctgcgattcgcagtactactcggtgccgtacaccttcgccggtcaactgctgcgagtccggttgaccgcgcagtcggtgacgctcttcgacggtgaccaggtcgtctgcgagcacccacggcgccacggccgcaaaggccagtactcgaccgtgctcgctcacgccccgaaggagcaccagggtatcgacggtctgtggtcccggcagtggttcaccgaccgtgcccgcgggttcggccccgccactgagcaggtgatcgcccagatccttgatcgtcacgtgatcgaggcgcagggctatctggactgccagaacatcctcgaaactctcggcaagcgcagtcgccagcggctcgaggcagcctgccaggtactgctcaaccagaacagtgccggtagctacagcgtgctcaaacgcgtcatggcgagcatcgactccgaccacaaggcgccccgacccgtggtcccggcggcggccacacgaaaaccgccgccaccggccggggcccgagacgacagcgccgttcaagtccgctcggccgatcactatgcgcgcggccgcagcggggagggcgtgtga

SEQ ID NO: 338070 - DNA, 768 bp, Pseudomonas aeruginosa
atgttcaccgagatcgatcaccagaagttccgcaacctacgcatcacgcacgtggcgacccggttcgaggagctcatcagcgatgaggccaatgacgagctcaccccggagcagatcttcctcaccgccgtcgacgacgccctggaccagcgccaagcccaccggatcgacaagctgatccgcgccgcgaagttcccgatcccgcaggcctcgatcgcggagatcaactaccaggaaggacgcgggatcaccccggtgcggatgaaacgctacgccgggcacaactggaggcaagaccccaccaacctgctggtgctctcgccgaccggcggcgggaagacatacttggcctgcgcgattgggatcgccgcctgccagaacgggcacaccgtcacctacgcccgcatggacgaactcgcccggcggctggtcatcgcccgtggtgacgggatccgccaccaaaaaatgctcaacgacctgtcggacgtggaactgctgatcatcgacgacttcctcaccgtgggcatcgaccccgaggccgcgaacgacctgttcgccgtgctggccaaccgggagcaccggctgccgacgatgatcgcctcacaatcccgaccggcgtactggctcgaggccctacctgaccgggtggccgcggactccatcgtcaaccggctggccaacaacgcccgcgagatcaacctcggcgaagtcgacatgcgacgccaacgcgacgaccaagcccgggcgaccaccggctactgggagtaa

SEQ ID NO: 338071 - DNA, 870 bp, Pseudomonas aeruginosa
atgcatgcctcacagcgccttcgcgagagccacttcagtgttcagatcgaaagcggaagtgcctctgtcgctgacctgttgcccgagtggacgattaccgaccgggtaggtgtcgtcgtccacgagccattgggggcgttgggggcgagcctgctgatccaggcagcaatctcccgcttctacgccttcgacccccagcggcgggatcacgctgcgcagtaccccccaatatttatgttccatgtcggagggcggttcggggaccacagccccatggacttttggcctcctcgccgggaggtgttcttcgatgatcccgacaatccctatgaggttctcggcgctctccgagaccgcggcattacccggttgctggtgccggaaggggtcgccaccggtttggactatgcctatgccgcacccagtggctggacagatattcactccgcccgtgagcaaacggcctccgcattcgtctactccgcctctggacgtgtaggcggacatgatgtgcagttgagcacaggggaaaagcaggtcgagtccatggtcaccgacgttctccgggtcgaggcgatgatcgagcagtttgagcgttctagcgaccaggatctactggaccttgaactgggcccgtctacgccggccgacctccacggctggctgcgcatgttcgtcgctcgcagcggtgaggtacccgcagcatatcgacgaagcatagaagctgcccgcaaagagaaggtcgcacggggcgacttcacgcagacgtatcgcagagtttcggtcgatgaggcacttggcctactcgtgcccgcagagcactcaaccggcattcccgctgcatctgtgaagcagcccgcacacgcctga

SEQ ID NO: 338072 - DNA, 1005 bp, Pseudomonas aeruginosa
gtgactgattaccgattggtgatgtcgctactgctgcagggaaggtcctaccgggacatcgaggcgattgcggggtgctcgcaccgcacgatcgccaaggcgaagaaggtctgccacgagcacgggttgaccgccacgagccaggtcgacgtgctcagcgccgaggagattgacgcgttgttcgccgatggccgcaagacgccgtcggaggagttcgtcgccttcgacgtggccgcgaccgtgaagaagcgcacgggcaagaagaagctgccactgcgggtgctgtgggcaaactacctcgacacagacggctcgccggggcagcggcactacagctaccagcggttctgccagattgtcggcgagtacgtcgaggtgaacgagctgacgatgcggatcgcccacgtgcccggacacacaatgcaggtcgactgggccggcacgaagatggcgatcttcgaccccatcaccggaaccaagaccacagtgtcagtgttcgtggcttcgctgccgtactcggggatggtcttcgcctgcggctgcctggatgagaagatgccgaactggctcgacgcccacctgcaggccttcgcgtacttcggcggcctcactcaggtaattatcccggacaacgcctccaccgcctcgaaccagatcagccgcggtgaccgagctcgcgacgtcaaccgcgagtaccgggacttcctcgagtaccaccacaccgccgctgtgccgaccaggtcggcggcaccccgcgacaagggcaacgtcgaggccggggtgaaggtggtgacgaactgggtgatcggccgcctcgccgaccggcggttcgccagcctcgacgacctgaatgaggcgatacgtataggaagaataaacgcccgtttcacccaagtccaacagctttggaccgcagttgactctttcgacacccctgcgatgcaacccaatccggctgacggggagccagcaacgctgaaaatttaccctcctctttcccactag

SEQ ID NO: 338073 - DNA, 219 bp, Pseudomonas aeruginosa; identical to SEQ ID NO: 246804

SEQ ID NO: 338074 - DNA, 945 bp, Pseudomonas aeruginosa
atgatgttcgcgattcgttttctgcagttcccgctggtggccctggcattggctgtgaccggtaatgtgtgggctgctgacgcgcaggctccggctatcgccctggagagcgcacagcatgcgccactggtcgcggtgagccaggtgggccggcgtctggtcgccgtgggtgaccatggcattgtcgtgttgtccgatgatggcgagacctggcgccaggccagcagcgtgccggtggacggcttgctcactgccctgagctttatcgatgagcggcagggctgggcggttggccatggcggggtgttgctgcataccgaagacgggggtgaaacctgggctctgcagcaactcctggaggagcagccggtattgctttcggtgtggttcgagaatgcccagcacggcatcgtcgttggggcatacggatacgccgcgcagactcaggatggcgggcagagctggcagcgactgagcgtgggtgccgatggtgacgactatcacctcaaccatatcttcgccacccgtgatggcagcctgttaatcgccgctgaggcggggaacgcctatcgctctgctgatcgcggtgccagctggcaatcactcgacaccggcgtcagcggctctctgtggagtggtgtcgggctgcgtgatggtcgagcgctgctggtcggcatgagcgggcgggtgctgctcggcgacagttctggcaaacgctggcgcgaactgagcagcggtacggtcgaggcgatcaccgatgtcgctcaactggccgatggccgcgtcgcgctggtcggcaatggggggctggtagcgctctcggatacaaaggtggagcgcttcaacgcatctcagcgtgaggaccgcctgaacatctccgcattggcgccgctcactgaaggacatctgctgctgtttggggcggcaggggtaatacctcaatag

SEQ ID NO: 338075 - DNA, 2361 bp, Pseudomonas aeruginosa
atgttggttttcctggtgtcggcgctcgagcgctttttctttcgccatcgtctggcgactcttggcctgctggccgtcattaccctgatcatgggcggctttgcgtcacgcctggaaatgtcggccggcttcgacaagcagcttccgcaacagcacgctttcatcaagaccttcaaccagtaccgcgatgtgctgttcggtgccaaccgcgtcatcgtggtgctgcatgccaagcagggcgatatctggaacaagcaggcgatgacccgtctgtacgacctgactcagaccttgttcttcatgccggggatcgaccggcgcagcgtgacctcgctgtggacgccgaatacccgtgcggtgcagatcaccgaggagggcatgaaggccgaggacgtggtaggtggtgatgtcacggtaggcactttggacgaccaagccatagctggcattcgtgagcgcaccatcatcggtggcttcgtcggcagcctggtcgccaacgatcattccggtgccatggtggtagcggagttggctgatccggatccgcaaaccggcaagcgcctgaactatctggagttcagccagcgtctggaagacgaggtgcgcagcaaatacgcagactccaactacgacgtgcagatcattggtttcgccaagcagatgggggatatcggtgccggtgccaagagcgtggtggagttctttggcctggctttcgtactcaccgcgctggcggtttattggtatacccgctcctggcggctgaccttcctaccattgttctgctcgctggtctcggtggtctggcagttcggcaccgtcactctgctgggcttcggcctcgatcctctggcgattctggtgcccttcctggtgttcgccatcggcgtgtctcatggggtacagcaggtcaatttcatctccaaggaagtttgcaccggggtagatggcatgaccgcctcgcggcgcagcttcaccggcctgttcatccccggcacgctggcactgatcacggctttcgtcggtttcgccaccctggtgctggtgcccatcccgatgatccgcgagctggccattaccgcttcggtgggggtggcctacaagatcattaccaacctgatcatgctgccggtgctggccagttatttcagcttcgacaaggcctatgtggcgcgtgtcgaaaggctgcgagccaggcgtgatggcgccatggtcagccttgggcgtatcgccgagccgcgaaatgcggccatcggcacgttgctgtgcctagcgctgatggcgttggcggtatggcagagccaggggcgccatgtagggcatgtgctgccaggggcgccggagctgcatgcagactctcagtacaacagggatgtgcagagtgtggtcaaccactttgccctgggcctggacctgttcaccgtggcggtggaaacccctgcaggcggctgctaccgcaacgatgtgatggcctatgtcgaccgcctgacttggtatcttggcaatgtgcccggtgtgctctcggcgcagtccctgccggcgctgaccaagctttcggcctccggcgtcaacgaaggcaaccccaagtgggcagcgctgccgctggatgagctgtcgctaggcgaagcggttcgccaggtgcccgaggccctgcgcctgtacaacgcagactgcacactgctgccgatcaacctctatctcaccgaccacaaggccagcaccctgaaacaggtagtgcaggcggtcgaggattatcgggccgaacataagttggagggggtgacggtacgtctggccagcggcaatgccggcgtacaagcagccacgaatgagattgtggagacctcagagctgccgatgatgctctacgtctacctgaccatcgtgctgctggtgtttctggtgtaccgcgactggcgcgccatgatcgcctgctgcctgccgctgaccctggcgaccttcctcggctactggttcatgaaggagctggatatcggcctgactgtggccaccctgccggtgatggtgcttgccgtgggcatcggcgtggattacgccttctacatctacaaccgcttgcagatgcatctcgccgcagggcagcacatcgtcagcgcgttccagcaagccttgcgcgaggttggggtggctacggtattcaccgccttgacgctgtccgtcggcgtcgccacctggtcattctcggcgctgaagttccaggccgacatgggcctgctgctcaccttcatgttcatggccaacatgatcatggccatcaccctgttgccagcgctggccgtggtactggaaatcctgattccgcggcgggggccggtgcgtgctcccctgatcgcgcactga

SEQ ID NO: 338076 - DNA, 1863 bp, Pseudomonas aeruginosa
atgaaaaagcaaaaaacatgcggcgcggctgcgctgcaggcaaagccgtgcctgcataaccctctggcgttgtcgatcgcgcttgcatctggcctgctctggactcagccgagctacgccgttctgttcggcagtgaggaagggatatccggcagcttcgactccacgctgtcatatggtttcgccacccgtttgcagtctcccgactgtcatttactcggtggtgacagtggtgggtgcaatcccggcaccaacaacgagcttggtcggtactacaacctgtcgcgtggcaacggctatgcgaacgccgatatcaactacagcaatgccgatgacggcaacctgaactacgacaaacacgatgtgttttctcacgtgctcaagggaactcatgaactaagtctgcgcttcggtgatggctggagtgctctgggtcgggtggcttgggccaaagacttcaagatggacaacgtgcgcaccacggaactggacgaccaggccgagcgcgatgccaccgagcgcttcgatctgctcgacctgtgggtagcgaaaagctttgatatcggcgagatgcccgccaaggtcaaagtgggcaaccaggtaatcagctggggcgccgagatcttcgtgcccggcggcatcaaccagatcaacgccctcagcctgcccaagtaccacacgcctggaacccagctgaaggaggtgttcatcccggcaccgatggcctccttcaatatcgggctgaccgagacgctgagcctggaggggtattaccagttcaagtggaatgcctactcgctcgatccggtgggaacctacttctcctcggcggatatagcgggagaggggcgtcgcccgatctactacccgacgaacttcgtgaacaatatctatggcccgctgctcggactcacttgcgccgatctgacgccaaccggtcagtgcggtgcccccggtatcagtggtctgagcgatgccgatctggtggcttttggtctggcgattccctacgccggcgagcgtgaggcgaagaacagcggccagtatggcgtggcactgcgctggaccgcggagagcatcggcaccgactttggcctcttctaccagcgctaccacgacaagacacctttcgtgggctacaccgcgcggagcaatccgaacaacctggtggtggacaactatttcatcaactacggcgaagacaaggatctgttcggtctctccatgagcaccatggtgggcccggtagctgttgcgggcgagctgtcctatcgtcccgatgacagtgtcggtatcgaccccaccgttcccttcggtagtgggctcaccggtagctacaacaagtacagcgtgttcgataccggagtgaacaagggctttgtcgaagaggaaaagtggcagggggacatcaatgccatctacaccttctcggccagcgatccgcttggctttatccccagcgcactgggggcctcccagggcttcatcatggccgaagcagtggtaacccattacccgggactggataccagcggcaaggtgccttacttcctgcccgattactcggtaccaaacaaaacgtcctggggctatgtggccgagatcgggatgaactatcccaacctcttcgacagcggcgttaccgtcactccgcagctggacttcagtcacgacgtcaacggcaccacgccgaatgcgatgccgtttgtcgaaggtcgcaagtcgctgaccacctctctgctgttcaactaccgtgaccgctggaagggcggcctgcagtgggtgcagtactggggcggtggcgacaacaacctgatggctgatcgcgacttcctcagcggcaatatttcctactcgttctaa

SEQ ID NO: 338077 - DNA, 1362 bp, Pseudomonas aeruginosa
atgaaaaacctccagttttcacttttgggtggtgcgctgttggcgctccttggtaccagtcacttgcaggcggcaacctcgcctgacctgagtaagctcgggagtgagctaaccccgattggggcagagaaggccggtaatgccgatgggagcatccccgcctggagtggcggcttgattcaagcccctgctggatggtcgcgagggaaaggagatccatatgccagtgaaaagccgctgtactctatcgacgcgagcaatgtggccaagtaccagaattctttgccggaagggcaggtcgcgctgatcaagacctatccgggttaccgcctggatgtctatcccacgcaccgcagctgtgcgattccttccgaagtggctgagcgctccaaggcgtatgccggccaggcgcgtattggcagcgatggctggcgcctggagcaggctgtcggcgccgctgtgccattcccggtaccgcagagtggcatcgaggtgatgtggaactacaagctgcgctacatggccaaggggcggcgtgcgcaggtctcgatcctgcttcgtgagaaggggggcgcgctgaccgagattcggcaatgggtgcatgagtactatccctataacgatgctgctgtgagggacccgagcgataccggcggaatcgaggccaagctgctctctgacgtactgtcaccttcttcccgggcgggcgagatgtatctggtgcactccttcctggataaggcgcagagctcgtggatctacttccccggacagcgtcgtgttcgtctggctccttccttcgcctacgacaatccgattgccggcacggacaacctgtacttcgtcgaccagatcaacatgttcaccggcgctctggatcgttacgacttcaagctggtcggcaagaaggaaatgctggtgccgtacaactcgtacaagctggtcgacaagtccaacaagtatgagcaactgatcggccaggactacctgaatcgcgacgtgcagcgctacgagaagcaccgcgtgtgggtggtcgaggcaaccgtcaaggccgacaagcgccactccttcgccaagcgggtgttcttcttcgacgaagatagctggagcctgctgcatgtcgatatgtacgacgccaagggcaatctctggcgcgtgcaggagggcagcctgtgggccgatcccgagatccaggcctgcacaagcttcgagtacgtcagctacgacctgatcgcccgccgttacatcgccgacggcttcactcaggaaggcctgtcgctcgatctcggcgcagggctgcaagggcgtgtgagcgacaagatgttcaactccaacgagctgcgccgtcgcggcgagcgttga

SEQ ID NO: 338078 - DNA, 993 bp, Pseudomonas aeruginosa
atgaaatccggccgcacagtggtttccgaaaacttcttccgcagattcaaggaagtgtttgccccctatctatccatgcttgacgtcgactctcgcgtcttagagcgcgcagacatagagatacccgtcgagcaatatctagctctatgggaagctgcgggaaaggtcaatcccaatgttgggcttgagctcggcatgcagtccgagccagacgacatcggcgcactcggccatgccatacactgcgcgacaacggttgaaaaagcactgctgacacttcagcaattcatcatcgtcttcgcccaagaatcgaatataaagctggagttcgatagtcgaacgatctgtattgaatacggtgttacctatcccaccgtcatctccaaacgccaggactcggagttcgccattgccgccatcttgcggcagcttaacttgatcaccgctagcaccatccgccccactcgcgttgacttcgcacatagcaagcctgcggacatatcggcgcataaactgctgttccaatgcccgatccacttcaatcaaccggccaatcgaatctgcctccccatagagactttgcaactgccagtggctcacggtaacgagcggctgtacaaagcccttgagccttatctggaaaaagagcgccaagtacgcaccgttacggatgaactactgccgcaaatcacccggatagtcgccgccgaaatgagcagcggggccccttctatcgacgaaatatgcgatcagttgaacctgagccggcgtacgctccagcgtcggctgaaagagcatggaatcgaattctcaacgctgattgaagatgtccgtcgagagctcgccctctcgtacatgaaggaatcgaactactccatgacggaaatctctctactggtgggctattcagaatcggcctccttcacccgagccttccgacgctggaccggacaatcgccccagcagtatcgcgcggcccacctggcttcctga

SEQ ID NO: 338079 - DNA, 1371 bp, Pseudomonas aeruginosa
gtgagtagcatcgaacaatcgtgggacgtcatcatcgtcggagcgggcgtgtctggcctcagggccgcactcgacctgaaaaaagcaggccagcaggtcttggtgcttgaggctaggaaccgagtgggcgggcgctcgatgcccggtaccgtggccggccacacagtcgactttggcggccaatggcttggtgctgatcaccacttgttccgtgagcaggcgcaaagccttggtgtcggaatctaccctcagcataccgagggcaacaacctggtcagcctggatgacagcatccagtcctatggttcgcaggtgcccaagttgccctggtcctcgttgctgagcctgggaatcgctgatcagatcttacagcatgacctgcgacggctcggacacctcgcaccatggcaggctgataacgccgccgaactcgacagggagtcgctcgaggcctggatcgacagaaaggttcacaccaaagccgccagaggcctgatacaactgatcgccaaggccattctgtgcgcggaaccctctgaggtgtcctacctcttcttcctggaggtactgcgccaaggtcatgggctggaaacgatgatcggagtgaaaggcggcgctcagcaggacaagtttgtcggcggcgcctggcaagtacctaagcgcatggccgacctgctcaccgaacagatacgactcaattgcccggtgcacgctatcgagcaggacacccagggcgtgcgcgtgctctgtgcccagggcacgttccatgctcgacgggtaatcatgacagtgcccccggcacttgcttcccgcattagctatgaacctgcgctaccggccaaacgggccagcctgatcaggcgcatgccgatgggctgcgtgatcaagattcatgtggcgtatcccacacccttctggcgctctcgtggcctgagtggtgcggtgattagccctaatcgcgcgcttagcatggtcttcgatcaaacgccgctcaatggcgaggtcgggatactcgtcggccttatcgaaggcgaacatgccgttgagctcagcgagattgggcccgatgcccgccgagcgcgcgtcatggctgatcttgtgcactactttggcgctgacgcggcccagccactggagtacgtggaccacgactggattcatgagacctggacagagggcggctacggggcccacatgccaccgggagtcatgacgacctacggcgaggccattcgcgagccgcatggccgcattcactgggcagggactgagaccgccacggagtggatgggctacttcgagggcgccatgcagtccggcatccgagccgccagcgaagtgctcgaagccgagcgccaaacagccgcctaa

SEQ ID NO: 338080 - DNA, 1431 bp, Pseudomonas aeruginosa
atgaacaccgcagcccagattggccatgccttaactagcgaagcagaggctgtgcgtatattcaccttgcaacgggccgcgcatcgcgaacatcccatccccagcctggagattcgccgcaagaatctcaagcgtctggaaatgatgctgctggagaaccaggacgccatctgtgcagccatcagccaggacttcggcaaccgcgcccaccaagaaaccaagttgctcgaactgttcctgacggtcgatggcatccgcgactgccacaagcgcttgtccaagtggatgaagccgcaacgccgcaacggctctatttggttcttcggtgcccgtaactcggtgattccccagcccaagggcgtcgtgggggtcgtagccccctggaactacccactgtttctggtgatggggccggtaacaagcgcactggcagcgggcaatcgctgcatggtgaaaatggccgcgaactctcgtcatctctgtgcactgctacagcgccttgtggctcagaatttcgacgagcacaccctggccatcgtgcctggtatcagtggctcggtcttctcaagcattcccttcgatcacctgatctttacagggtcggccgaaaccgggcgctgggtcatgcgggccgcggccgacaatctgacaccagtaacgcttgagctgggcggaaaatccccggtgatagtcgccgaggactttgacctaaagacggcggccgcgcggattctgcagatgaagacggtcaacgcaggacagacctgcgtggcaccggactatctgttcgtccatgagagccagctggaggcattcgtagagcactgccgcgccatcaccccccagcgctacccgtcgctgctgacccaagactacacctcgatcatcgatcagagcgcttatgggcggctgatggagtatctcgacgacgccgaaagcaagggcgctcaaatcatcaatctgctgcccggcagcatcggtaacgaagccgtccgcaagatcgccccggtcctggtgctaggagctaccgatgacatgcgcgtcatgcatgaagagatcttcggcccgattctgccgatcaagacctatcgcaacctggatgaggcgctggactacatcaagaaccgggatcagccgttggccctctacctgttcaccaatcaacgccagctacagaaacgggtagtagccctgacgcagtccggcggtgtcgggatcaacgactgcgggctgcatgccgcccagcatgacctgccgtttggcggtgtcggtgccagtggcatgggccactaccacggctacgaaggcttccttgagttctccaagctgcgcccgatcttcaagcagttttcgcgcccggcatttccgctcctgtatcccccctacggagcgctcttcgaccggctgattaagctgatgctcgggcgctaa

SEQ ID NO: 338081 - DNA, 1365 bp, Pseudomonas aeruginosa
atgaccgctatcaaagactcgcatctggaaaaccagtccttctggcaacatgactacggccactactcgcctaacgccgcactcacgcagaacctgaatgcggatgtcgccatcattgggggcggattcaccggcctaaacaccgcctggcagttcaagaaagacaaccccaatgcgcgcgtggtggtgctggaaggcgccatcatcggtttcggcgccagcggtcggaatgccggattcagcaccaagctctttggcctagagcctgagatggtgctgctgcgctggggcaagcagaagatgatcgatgcccaccactacctcaagaaagctgtagcgcatacccagaacctgattgagacccacggttttcaatccgactactgccataccgggatggtcaggatcagctactcgcaacagcagttggaccgcatgaagaaaacttatcagctgctccaggatctgggcattgatggggatctgacctggcagaacagagaccggattcgccaggatttccactccgaacgtttcatcggcggcatctacgaaaccgacacggctcatctcaacccctgcaaacaggttcgcgaactcaagcgcctggcggagtcggcaggggtggaaatctatgaggccagccctgtcactcgcatcgaaagggctgccacggcaattacagtcgcgactgaaaaaggccgcgtggtcgccgacaaagtcgtgatcgcaactaatgcttactcgcgcgaggtgccggatagccgcacgctcaaggcccggcagtacccgctgtggacctaccagatcgtcacagagccgctcaccgccgcgcagtgggaaagcatcggctggaaggaccgacagtcgttcggggataaccggcagatgctgcattactaccgcccgaccgtcgacgggcgaatcgccatgggtggtggtgatgcgatcgtgtacaaaaccggcgcgctggttgagacgccgtctgcgatgagctggaagcactgcgaggctcacctgaagtggatctatccccagctgaaagatgtccgcatcgactaccgctggggtggacctgtatcggtcaacgtcgacatggttcctgaaatcagctttgtcgatgacgagcgcatcatctacgcagggggctgcttcggtcacggtgttgcactgacccacctcaatgggcgcaccattgctgacctgctcaacggccagaagaccgagctgacggacttctggatcgtgaacagaaaatccatctccatgccgaacgacaccctttccttcctcggtggccgcgtcgcccgccaggcgctcaaagcctgggactggtgggaggagcgcagcttgaaggacatttga

SEQ ID NO: 338082 - DNA, 777 bp, Pseudomonas aeruginosa
atgagcgccagtgctctgcgctaccaaccgaggccggatcgcaaccagagcctgcgcgagcgcattgtggccctggtccatcggcatcgccgctatggcgccgcgatgatctatttgaagctgcgccaggctggcgaggtggtcaaccacaagcgtgtggagcgcctgtatgccgaagcccgcttgcaggtgaaaaggcgtaagcgcaagaagatcccgattgcagatcgacagccgctgggccgccctcgggccgccaaccagatctggtcgatggactttgtatttgatcgcacggctgaagggcgtgtcatcaagagcctgaccgtggtggatgatgctacccatgaggctgtcgccatcgtgccagaacgagcgattggcgggctttcgttgacgcgcatcctagatcgcctggccatgtctcgcgggctgccgaaggccatccgcacagacaatggcaaggagttttgtggtcgcgccatgctgacatgggctcatcagcgaggtgtacagctgtttctgattgagcccggcaaacccaatcagaatgcctacatcgaatcgttcaacgggcgctttcgtgatgaatgcctgaacgaacactggttcaccagtctgccgcacgccaaggtagtgattgagtcctggcgcagggaatacaacgaagagagaccgaagaaagggctgggtgggttaaccccattggcctatgccgagcaactggcctccaaagccgttacattgacccagggctctaaagccagctgctactga

SEQ ID NO: 338083 - DNA, 126 bp, Pseudomonas aeruginosa
atgagtgtgtcggatgccaagcgcctgaaggagctggaaagcgaaaacacccggctgaagaaaatgctcgccgagtcgatgctggagatcgaagtcacccgcgaggcgttgcgaaaaaagtggtga

SEQ ID NO: 338084 - DNA, 2862 bp, Pseudomonas aeruginosa
atgacgctcaccgtgcgcggcggtacctccaaaaccgaccagcgcgaggcctggtaccaggcgcgcaagaagctcaatgacctgagcctcgagttgcccgacggcgtgatcggcccaatcgtcaacgacgaatacggcgacgtgtacggcctgatgtacgccataaagggcgacggtatcggccatgctgagctgtccgatgtggccgaggacatcaagcggcgcatgctgaaggtgccgatggtcaagaagatcgatgtcatcggcaagcaggccaagcgcgtgtatgtcgagttctcccatgagcgtctggccgcgctgggcatcaccccgctggccatcgccgacagcctcaagagccagaatacgctgctgcctgcgggccagatcgacacccgcggcgaccgcgtcatggtgcgtgttagtggccagttcgccagcgtagaggccatccgcaacgtgcccatctccgcaggtgggcgactgatcaggctcggtgatatcgctaccgttacccgcggcttcgaggatccacccgtctacacggtgcgtcacaacggccagccggtgctgatgctcggcatcaccatgagtaacgatggcaatatcgtcgaccttggccaggcgatggacgcggcagttgccaagatccagtccgagctgccctatggcgtggagctggagctggtggccgaccaacccaccacggtgaaagacgcaattcatgactttgtgcacgcgctggccgaagcactgattatcgtgatcgtggtcagcttggtcagcttggtcagcttgggctggcgcgccggcctggtggtcgcgaccacagtgccgctggtgctgggcggcgtggcgctggtgatgctggcgatgggctggaacctcgaacgcatctcgctcggctcgctgatcatcgcgctggggctgctggtggatgacgccatcatcgccatcgagatgatggtggcgaagatggaaaccggttgggaccgcgtgaaggcggcggccttctcctattcggcgactgccatgccgcgcctgaccggtgcgctgatcaccgtggtcggctttctgccgataggtctgtcgaagtccaccaccggcgagtacgccggcggcatcttctggatcgtcggcgccgcagtgctgttttcgtggatatgctccggcatttttacgccctatctcgcagtcaagctgctgcctgacgacttgggtaagcaccagcatggcggtaatccgtacgacgccaagttctaccgtaacctacgtcacctgatcgatgttgccatcgagcgccgctgggtggtcatcggcgcaaccttcggcgccctggtcttggccctagtcggcatgcagctggtgccgcagcagtttttccccaacagttcgcgtcctgagctggtcgtcgacctacgccttaaagagggctcttcctttgcggcaaccaccgaacaggttaaacgtatggaggaaaccctggcgaaggacgaggacgtgcgcttctacaccgcttacaccggagctggcgcgccgcgcttccttctctcgctcaaccctgagctgcccaattcaggctatgcccagttcatcgtcatgaccaagaacctggacgcgcgcgagcgagtgcgcaagcggctgatgagtacggtcgaccagcagttcccgcaaacctgggtgcgtgtgacccggctggagttaggcccacccgtcggttacccggtgcagtttcgcgtcgtcggccctgacactcagaaggtgcgcaagatcgctcgcgaggtggagcatgtggtcgcgtcaagcccgaaagtgcgtgacgtccagctcgactggaacgacccggtgcgcacattgaaggtacagttggatcaggacaaggcgaatgcgctaggcctggcgccgaccgacgtggcgctggtcactcagagcgtgatgaatggcgcgaccctgtcgcagttgcgcgagagtgaggacttgatcgatatcgtggcgcgtgccgtgcccgaggaacgcctgagcctcgacaccctgaaagacatcaacctctacacgcgccaaggcagcgtagtaccgttgtcgcaggtggcccaggtgagcaacgagctggaagaaccggtgctgtggcgacgcaaccgcgacatggcgatcaccgtgcgcgccgacgtcaaggatggcgagcagggtgtgtcggtgacgcaggagatccggccgcagttaaaggaaatcgaggccaaactgccctcgggctaccgcatcgacgtcggtggtgcggtggaggaaagcgacaaggccaaccaggcgttactggcagttgctccgctgatgatggtcatcattctgctgctgttgatgctgcaattgcagagcttctcgcgcatgtggatggtggtgctaaccgctccactgggcttgattggcgtggtgccggcgctgctggtgtttcaggcgccgctgggcttcgtggcgatccttggcatcatcgcccttggcggcatgatcatgcgcaactcggtgatcctgatcgatcaggtgcaagtcgagatcgccgaagggctcgatgtgtggggcgcgatattggaggctgccatccaccgggctcgaccggtgatgctgacggcgctggccaccgtgttggcgatgatcccgctaacacgcagtgtgttctgggggccgatggctatagcaatcatgggtggcctcagcgtggcgacactgctgacaatcttcttcgtcccggcgctgtacgctgcatggttcagggtgcgccgccaaccggcagctgatgcattcattggcgaacaggcgcttgatcatgctaggtcgaacttaggcgagttgttcagggcttggcaaagataa

SEQ ID NO: 338085 - DNA, 339 bp, Pseudomonas aeruginosa
atgaaactgatcatggcgataataaaaccattcaagctcgacgatgtgcgcgaggcgctctctgcggttggcctgcatggattgacggtcaccgaggtaaaaggctttggccggcaaaagggccattccgagatttaccggggggcagagtatgtcgttgacttgattcccaaggtcaaagtcgaggcagtggtcaccgacgatctctgtgatgcggctgttgatgcaatcatcaaagcagcagccaccggaaagattggcgacggcaagatattcgtctgtgatgtggaaaaggccgtacggattcggaccggtgaaatggattcaagcgcgatttaa

SEQ ID NO: 338086 - DNA, 1320 bp, Pseudomonas aeruginosa
atgacaaaacttatgcagttctggaggaagggggcaaccgccgcgctggcttcactggcgacgggtgtggcacaagcagcggatgcgccggtgcttaacagtggcgatacggcgtttctggtggtgtgctcgttggttgtgttgctcatgaccttgccaggcctggcgctgttctacggcggcctggcgcgcagtaaaaacgtgctgtcgttgctgatgcagatttttgctggcgcttcgctgatgagcgtgctgttcgcgttatatggctacaccctgaccttcacggacggcggtagcctgcaggcgtttatcggtggttgggacaagttgtttctcaagggcgttggccccgatgcgctgacgggcaccatccccgagttgctctacttcctgtttatgttgctgtttgccgcgatcacgcccgtgatcatcgccggctcctttgccgagcggatgaagttctcggcggtgctggtgttcctggcggtctggctgaccatcaactacatcccgatggcgcacatggcctggggcggcggctgggtcttccagctcggcccacaggattttgctggcggtaacgtggtgcacgtcaacgtcggtatcgcctccctggtcggtgcctacctgatcggccggcggcgtggctacggcacctcggcgctgaccccgcacaacatgaccatgaccatgaccggcggttcgttgttgtgggtgggctggttgggcttctgcggcgggtgtgccctggccgccaatggctttgccatgctggtgatcgtcaacaccatgctcgccagttgtgccggtgcgttggcgtggatgctggtggagtggaagcaccgcggcaagccaagcatgctcggcgccatttccggcgccatcgccgggctggttgcgattaccccggcctgcggctatgtcggtccgatgggcgccatcgtgctgggcattgtggttgcgccgatctgtgtgtgggcggtggaaaaactcaagccgatcatcggcctcgacgatgccttcgatgtattcggtgtgcatggtgtcggcggcatcatcggtggcttgctgaccccggtgtttgccatgacggcattgggcgggcagggctttctcgctgaccgcagcctgctggatcaattgcaggtcaatggcggtgtcttgctgttcagcatccttttctccgcagtgaccagctgggtcgcgttcaagatcgcggcggccttgtgcggcggcttgcgtgtggaagacgaggctgaggtcgatggcctggatctctcggcccacggcgaagtcggttatcggtactccaactga

SEQ ID NO: 338087 - DNA, 780 bp, Pseudomonas aeruginosa
atgagcctgctgcagcgctggcaggccgggtgggcgcgcctggccagcgtattgcgccggcagcgcagcgacagcctcgatcaactgccgctggcgttggtgcgcctggatgccgatggctgtatgtcgcagctcaatctcggctgggaggcgttaactggctaccgggcgggggagtgtctgcagcgcagtcatgcgcagtttctccatatcgaggaccggccgctgtggttgcaggggctgcaggagctgcgcggcaaccctgcggcgccgccttttgttcaggtgttgcgttacctgacccgcgctggcgagttgcgttgggtcgaggcgcgggtgcgacgtcagggcagcggctttatcgccagcctcggcgatatcagttcgcagatgctactgcgtcaatcgctgcaggcgcgccaccgcagcttgagcaacctgctcgatggcttgccgttgatggtctatcgctgccgcaacaaccggcactggagcatggaatacgtcagcgctggctgtctggcgctgaccggctattcccccgagcaactgatcgacagccagagcctgaccttcaacagcctgattcaccccgatgaccgcgaggatgtctggcgcgcggtgcagttgggtgtggatgagttgcaggtgttcagcatcgagtaccgcctgctgtgcagcgatggcagcgaaaaacgcgtgctggagcgtggctgcggaatttattcggatgccggcgatccgctcggcctggaaggggtggtgctggagcgtctgtaa

SEQ ID NO: 338088 - DNA, 687 bp, Pseudomonas aeruginosa
atgaaaacgccgctgaccctgctgttgattgatgatcacccgttgctgcgccgcggcctggccgagctgttgaatgcctgtgacgattttcaggtgatcggcacggcggccaacggcctggccgggatcgagctggcccgcgaattgtgtccggcgatgattctgctcgacctgcacatgccgggcatgggcgggttggcggcgctcagcgaactgaagcgggtgcagcccaacagcctgatcattgtgctgaccgcctccgatgcccaggacgacctgctggcggcgctgcgtggcggtgccgatggttacgtgctcaaggacagcgagccggagcagctgctcgaatacctgcaaggctgcagcgccgggcaggtgcaggtcgatacgcgcctcaccggcctgctggccaacagcctgcgcggcgaaagtggcagtgccttgcgcggcgtgccggtggacgccgagctgaccgagcgcgagcggcagaccctggcgctgattgccgagggtctgaacaacaagctgattgcccgccagttggggatcagcgacggcacggtgaaaatccatgtgaagcatctattgagcaagctcaatctgcactcgcgcctggagctgtccgcctgggcccatcgcggtggttttgtccgccagttgggcgagcaaaccggaggcggtcaatga

SEQ ID NO: 338089 - DNA, 1014 bp, Pseudomonas aeruginosa
atgttgcagcgtccgggtagcgaggcgccgttgctggagttgctggccgggctggctgattgcctgcgcgcccggcaggcgttgctgttgctgccggaagcggggcaaagcgtctggcggcggattggcgaggggcactgcatgggcgattgcccgctgcatgccggcaacacgcggctgccggcagccgacagtgtggtgctgtgtgtggattgcctgcgcgcgggccagtaccggttgatttgtgtgctgaccatggaggagggcgctccgggcgccttgctgctggagttcacgcggatgccgagtgtggcgctgcgccgtgaattggccgaggtcgggcggctgctcgccgagaccctgagcgtgctggccgaggaccgccagcagcgccgccgtgaactggtggccgagcgcggcgtgctgtcgcgcgagttgcatgactcggtggcccagcaactgagctacctgcagattcgggccagccgcctgcaagccttgttgccggcgtctgcgcagcccgaggcggtgggcgccatgctggtcgatttgcgcgacaccctggcctcgctgcatcgccaggttcgcgagctgatcgccacggcgcggctgaccatggatggctgctccctgcgccaggcgctggaggcctcggtggaagaattctcgcggcgcagcagttgcgtgttttctctggacaaccgcttgcccgccgagcgcattggccatgaggcggaattgcaaatcctgcagatcgtgcgcgaggcgctggcgaacgtggtgcgccattcccatgcccggcatgtgcgcatcgccttgctcgatgcgccgcaacaaggggtggaaatcctggtggccgatgacggtatcgggctgccggaggtcttgccggaagatgcgcattttggcttgcgcatcatgcgtgagcgggccagcgccatcggcgcctcgctgcagatcagcagcagcccgcaccagggcacgcgggtgcacctgctttggagtgatggatga

SEQ ID NO: 338090 - DNA, 1368 bp, Pseudomonas aeruginosa
atgagcaaacgcgttgcgattattggtgcaggcccatgcggtctggcccaactgcgagccttccaatccgccgccgccacgggcgccgaaattccccagttggtctgctacgagaagcaagccgactggggtggcatgtggaactacacctggcgcaccggcctggatgagcatggcgagccggtgcacggcagcatgtaccgctacctgtggtcgaacgggccgaaggaatgcctggagttcgccgactacaccttcgacgaacactttggccggccgatgggttcctacccgccccgtgaagtgctctgggactacatcaagggtcgggtggaaaaagccggcgtgcgcaagtacatccagttcaacaccgccgtgcgccaggtcagcttcgacgccgagagcaagctgttcaccgtcaccgtgcacgactacagcaaggacgaaaccagcagcgccgaatttgattacgtgatctgcgccagcggccacttctcgaccccgagcgtgccctacttcgagggtttcgagcactttggcggccgtgtactgcacgcccatgacttccgcgacgcgctggagttcaagggcaaggacgtgctgatcgtcggcagcagctactccgccgaagacatcggctcgcagtgctacaaatacggcgcccgctcgatcaccagctgctatcgcagtgcgccgatgggctacaaatggccggacaactgggaagaaaaaccgctgctgcaacgggtcgccggcaaccaggcctacttcgccgacggcagccacaagcacattgacgcggtgatcctgtgcaccggctacaagcaccacttcacctacctgccggaagacctgcgcctgaagaccgacaaccggctgtggccgctgaacctgtacaagggcattttctgggagaacaaccccggcctgctgtacctcggcatgcaggatcagtggtactccttcaacatgttcgacgcccaggcctggtatgcccgcgacgtgatcctcgggcgcattgccctgcccagccaggccgagatgcacgccgaagacctggcctggcgcgagcgcgaagaagcgctgcagaacgcccaggaaatgttcgagttccagggcgaatacatccgccagctgattgccgccaccgactacccgaacttcgacattgccgccgtcaaccaaaccttcctcgaatggaagcacgacaaatacgaagacatcatgggctatcgcaacaaatgccatcgttcgttgatgaccggcaccctcgccacgccgcaccacaccagctggctggaagccctggatgactccctggaagcctacctggccaacgaaccggccggcctcaaggtcgtcggttga

SEQ ID NO: 338091 - DNA, 2346 bp, Pseudomonas aeruginosa
atgaacctgcccgtgatttccaggccgttcgagccggcgctgtttgcccgcgaaccgagcctggagcgccatcgcgttgcccccggcggcctgaccgtgatcgccctggacgcaggcgaccgcctcagcgtcagcgacattgaaggcgatcaacgcgccgaactgctggccttcgacgagcagggccgcgaagccctggccgccctcggcctgagcgccgatcctgcggcggactttattgcccgccagctcaacctgggcagccttgatgcggtgcatgtgcgcctcggcctcagtcgccgtggcgtcgattgccagcacctgccccgcgccgcccagctctgggacgaacacagccccgcgggtttcagccgccagctacaggcttcggcgccactgctggtgattgtcgccgcccccggtggcccgagcgcggtggacagccagcgccgcgccagcgaattgcgcctgctgattacccgcgccaacccgcgcagcatcctcaccccgacactgccggcgccgctgggcgaggtgatcgatgagttcaccatcagccctggcaccgcccgcgactacaccgtcgctgccgggcaatatatccaggtgctggatgtggccgggcgccagtgctcggactttatcgccttcaatcgccgttgcctggacagcggccgcgagatcgacctcgaccccaccgtgacccgcaccctgaatggcaacgcctatccgggccccggcctgttcagcaaattcttcgaccgcgacctgcaaccgatgctggaagtggtgcgcgacaccgtcggccggcacgacaccttcgccctcgcctgcagcgcccgctactacgaaagccagggctacttcggccacgccaactgcagcgacaacctcagcgccgcagtcgccgcccatggagtaaccccacggcgcggctggccggcgatcaacttcttcttcaacaccggcatcgatgcgcaccagcacctgaccctcgacgaaccctggtcgcggcccggcgactacgtgctgctgcgggccatgaccgacctggtctgcgccagcagttcctgcccggacgacatcgacccggccaacggctggcagcccaccgacatccacattcgcgtctattccgcacaggagcgtttcagtatcgccatggccacgcgcaagactcccgatgccgacccggtactgacccggcagagcggctttcaccccggcacctcggcactcaccggccagttcatcgactaccgtggctggtggctggccagccactacaacggctacggcgccatcgaggaataccacggctgccgcgagcgcgtggcggtcatcgacctctccgcgctgcgcaagttcgaagtcctcggtccggacgccgaggccctgctcaactactgcctgacccgcgacgtacgcaagctggcggtcggccaggtggtctactcggcgatgtgctacgagcacggcggcatgctcgacgacggcaccctgctgcgcctcggcccggatgccttccgctggatctgcggcgaagactacgccggcgtctggctacgcgaacaggcagaaaaactcggcatgaaggtgtggatcaaatccgcctccgagcagatccacaacatcgccgtgcaagggccgaaaagccgcgagctgctcagccagatgatctggacaccgggcacccagccggcactggcggacctcggctggttccgctttctcaccggccgcctggacgactacaacggctgcccgctgatggtttcgcgcaccggctacaccggcgaactgggctacgaaatctggtgtcacccggacgatgccatgcaggtctggcagcgcgtctggcaactgggcgaacccttaggcctggtgcccttgggcctggatgcactggacactttgcgcatcgaggccgggctgatttttgccggctacgacttcagcgaccagaccgatccctacgaggccggtatcggtttctgcgtgccgctgaaatccaagcaggacgattttatcggccgcgatgccctgcttcggcgcaatgccagcccccaacacaaactggtcggcctgcagctggacggcaacgagcaggcccaccacggcgactgcgtgcacgacggccgtgcgcaaatcggcgtgatcaccagcgccacccgttcaccgctgctgggcaagaacatcgccctgtgccggctggatgtcggctactgcgagcccggcacacgggtggaaatcggcaagctcgacggccaacaaaaacgcatcggcgcgaccgtggccgacagcaccatcgcctacgacccggacaagagccgcgtacgcagttga

SEQ ID NO: 338092 - DNA, 990 bp, Pseudomonas aeruginosa
atgtggttcaaagatgcttccaaggaactcgccagcgacctcagccaactgctgtcgcaactgattgccgaacacgccaccgacgtcccccaacactccggtctgcaacgtcatccgcagttgctcaacgtgctgcagcaactgacccggcgctggcaggagcacacccaatttctgcaccaggcccgcgccacaccaccggcgccgtgcacggcggagcaataccagcaattgcgccagcaactggccgatgcgcagcagcacagccagcaaagcgaacaggaactgctgaactgccacgcacaactggccgcagccagcagccggcaaagccagtggcagcaggatgagcaagcctgggagctgaccaagcaaaccctcaccgaaggctgctgggacctcagcgtggtcaacggcgacgccgaccacccgaacaatgtgattcgctggtccgagcagttccgcaacctgatcggctacagccgcacggagttcgccgacggctgggacagcttctttgccgtggtcaacccgcaggacctgaagaccgtcatgcaggtattcggcgactttatcgtcgatgccaagggccagccggcctatgtggtggagtaccgcatgcgccacaagagccgtggcgaaatctggtaccgcgaacggggccgctgcctgcgtgacagccatggcgtgttggtgcgggtgatcggtgcagtgcgcgacatcagtgacgagaaagccgccgaagccctgcgtcagcgcgaacagaacagcatccagaacacctaccagcagatctcccaggtcgccggcgcgatcaagggcatcgccgagcagaccaacctgctggccctcaacgccgccatcgaagccgcccgcgccggggaacagggccgtggttttgcggtggtcgccgacgaagtgcgccacctggccagacgcacccaggaatcggtgcagcaaatccaaaccatgctccagcagcgcgactaa

SEQ ID NO: 338093 - DNA, 1341 bp, Pseudomonas aeruginosa
atgctgcaggactgttttggctgccggctgacggttagcgatccactgtcgctggaactctatgatcaggccctggagcagttgctgaccctgtccgctgaaccggcccggcagctgcaacgcgccacgcaattagaccccagtttattgatgggacacgtgctgcaaggcttgctggcggtcctgggtacggacaaggcccggctggtcatggctgagcgcgcgctgagtgaagcccgtgggctgaagaccaataacccgcgtgagcgtctgcatgtggccgcactggcggcctggtgcgaaggccgctgggccgcggcggtggcgctgtgggagcagattctgctggatgaaccggccgatgccttggccatgtttgcggcgcatcagggcgattttctgctcggccagtgcaccgagctacgcgaccgggtggcccgccgtctgggctttatcgacgccggcacgccgctctacggccattacctgggcatgtatgccttcggcttgcaggccaatggtgcccatgcctgtgccgagcgtttcggccgccaggcactggaggcctgcccgcgtgatgcatgggccattcatgccgtggcccaggcgctggaggtgggtggacggccgcaggagggcattcactggttggcggagcgccagggcgactgggccgagggcaatcgcctggccgtgcaccattggtggcacctggcgctctgtcacttcgattcccaggcctggccccaggtgctggcgctgtacgaccagcatattggccgtgactcgctggccattcaggatcatcaggatgccgccgcgctgctctggcgcctgggcttgcagggcgtggatgtgggcgaacgctggcaggcgcaactgtccttctggcaggcccatatcgaggaccgctggtatggcttcaatgacctgcacgcgatgctcagttttgtctcctgtgggcgcttcgacctggccgatcagctgttgacggtgatggcggaaaccgccgccggtcacgatgacaatgcccgcaccacccgccacgccgcgttgccgctggcgcgcggcctgtatgcctttgcctgcggtcactacagcgaggcggtcgagttgctggcccagttgcgccacagcatggtcgccctcggcggctcccatgcgcagcgtgatctgctcacgcaaaccctgatctgcgccgcgcaacgggccggccagccgcgcctggccctggcgctgttgcatgaacggctggcggccaagcccgactccaagctcaatcagcactggctggtgcgggtcaaatcggcccgtggccgggcggtgatggtgggggtctga

SEQ ID NO: 338094 - DNA, 348 bp, Pseudomonas aeruginosa
atgttcagtggcgtaagcgccggttggtggtttttgctggccgccggcatctgcgagatctgttacgccgcggtcatccccagaaccgacggctttacccgcctgtggccgagcctgtattgcgcggcctttatcggcctcagcctgtacctgctggccctggctatgcgcaccttgccggccggcaccgcctacgcggtatgggtgggtattggcgcagtcggcaccgcgatttatggcatcacctacctgaatgaatcggccagcgtggcgcgggttgcctgcctggcgctgattctctgcggggtggtgggcttgaaactggtcggttcgccgagcgttacctga

SEQ ID NO: 338095 - DNA, 1131 bp, Pseudomonas aeruginosa
atggccaattcctggcgcatttccgcccttgccgaacgtcatcgcgcattgggctcaaacctcgaagactggagtgggatgggcaccgcctggacctacgacagtgacctcgccgaccagcacgaagccatccgcacccgcgccgggttgatggatgtgtcggggctgaagaaggtgcattacgtcggcccgcatgccgagagcctgctggaatatgccaccacccgcgacatctgcaagctgtacccgggcaagtcggtgtatgccggcatcctcaacgaggcgggcaagtttatcgacgactgtatcgtctaccgcaccggccccaacgcctttatggtggtgcatggttcgggcaccggctacgagtcgttgctgcgttcggcccagggtcgccaggtggcggtgctgttcgatgacgacctgcatgacctgtcgctgcaaggcccgctggcggtggattttcttgccgagcatgtgccgggcatccgcgacctgccgtacttccaccacctgcagaccaagctgttcgaccgcccggtgatgatctcgcgcaccggctataccggtgagcgcggctacgaaatcttctgcaaggctgccgatgcgccgctgatctgggacgccattctggagaagggcaaggccatgggcatcatcccctgtgccttcaccgccctggactggctgcgggtcgagagctacctactgttcttcccctacgacaactcggagatgtatcccttcgccgatcagccggcgggcgacaccttgtgggagctgggcctggatttcaccgtgtcgcccggcaagaaggattttcgtggcgccgctgagcactaccggctcaagggtaaggaacgtttcaagattttcggcgtgttgctggacggtgagcaggcggcagaggccggcgacaccctgtgggccgatggcaagcaggtggggatcatcacctgcggcatgtattcgcgcctgaccggcaagtcgatggccatcgcgcgcatggacgtgccctatgccgagcagggcgcgccgctgcaggtcaagggcagccttgcggtggcggccatcgcccacaccttgccgttcgatgacccggataagaaaaaacgcatcgccaagggctga

SEQ ID NO: 338096 - DNA, 1026 bp, Pseudomonas aeruginosa
atgtccgttgtgttcaagccggtggaaagctaccgggacgatttcacctaccgcaacagcccgcaggccatcgcgcgctttcccttcccgttcccgcaggacagttacatgtactcggtcaacctggagccgggtggcagcggggccgctgattcggtgttcgagcactggttcgatgtcgacgagcattacctctcggaaaccgccgagcgtgcgcgcgtgctggagcttgatccggaccgttgcgtggtaatgccgcacatggcccaggccgcctgggatgcgctggaattgctgatgacccacctgtcgaccgattaccccgagcacttcagcctgcagcgtgacggtgatcagtggcactggagcaaccgtgcgctggggatcgagcaagccttcacctttggcgacccgaccacattgccgtgcgagccgctggagtacatcacccgccaggcccagggcgactttgccatgctcgatcagcgcgacggcaacctgtttatggatgccggcatggtcacctgcccggcggactggtcgatcaagttcgatgccggcatgagctttacccaatggcatgcgccggtgccgatggcccatcagctcggcgtgttcgagcgggcgctgaagcacctgatgaatattcaggtgggccagccggtgcgccgcttgaactggaccatgaccatcaacccgcgcatggacacctcctcggaaactttccatgagtggggccatgagcgcggtgaagtgaccgccgaaaatgtcgcccgcagggtgcacctgcgggtcgaactgcagttcatgccgcgcctggcgcgcagcaatgccctgttgtttggcattcgcacctacctgatcagccttgaggaactggccagcaacccggcctgggcctgccgcctgcaccgcgtgttacgagacctgcccgatgccatcgccgactacaagggcctgaccttgtaccggcagacggtggtcgactggctggcccagtacgaccccgaagtggtcgccgcctga

SEQ ID NO: 338097 - DNA, 945 bp, Pseudomonas aeruginosa
atgagctcgctattgaaagtacgggtcgccgaggtgcgccagctgtcgccggtcgtgcgcgaatttaccctggtgccggtgaccggcagcctgccggggttctccgccggcagccatgtgcaggtggtgctgcccatgggcgagcgcaccctgcgtaatgcctattcgctgcttagcgatccggccgataccggccactaccggattgccgtgcgcctgcaggaaggctcccgtggcggctcgcgctttatgcacgagcaggtgcaggagggcgatgagctgcaggtcacggccccggccaatctgttcccgctgcattcccaggccggccaccacgtgctgctggctggcgggatcggtattaccccgtttctcgcccatatcgctgaactgcaggcgcgcggtgcgtccttcgagctgcattacgcctttcgtggcgagctgacggcggcctatgtgcaaagtctggctgagcagctgggcagtgccttgcatctgtatgactcggccgccgggcaacgcctggacttggcccaggtgctgggcaaccagccgctgggcagccatgtgtatgcctgcggcccgcagaacctgctcgacgcgctgcgtgcccaggccgcggcgctgggctgggcagacaagcgcgtgcactgggaagcctttgccgccgccgagccgggacagccgtttgtggttgagctggccagcaacggtcagcgcatcgaggtgccgggcgattacagcctgctcgaagccctggaacaggccggggtggcggtcaacagcctgtgccgcggcggcgtttgcgggcagtgcgtgaccggctacctgagtggtgaggtggagcaccgcgaccatgtgctcggcgcggccgagcgcacgagccaactgatgccctgtgtttcccgtggcagctgcgccagcacgctgctgcttgacctgtaa

SEQ ID NO: 338098 - DNA, 516 bp, Pseudomonas aeruginosa
atgagttttcaagcaatgcccagtaaaccggtctatgcgccggctcccaccgctctggccagtggcgcctgcctgctggtcagtcaggcccagggcctgccgattgcgtcctcaatcttgacgcaattgatgcagaccgccagtgacctcgacaccctctgtgcggcggattgcggtgcggcgtttaccgcgcgcgtgcagcagtggctggcccaggccgccgttggggcgcgcctgtatgtgtgcggcgacgaggcgtttgtctggcaggtgcatggcctggcccggcaggctggcttgctcaatgaggatatcgagctgttcaagtgcggtgcgacccgcaagctgttctgcgtgcattgcgccgccttgcaggacatcgacgagtccaccgccgtgccttgccagagctgtggcgtgcagttgtatgtgcgcgagcatttctcccagcgcctgggcgcctatatgggcgtttgcctgaacccggattacccactcggggaggctcggccatga

SEQ ID NO: 338099 - DNA, 822 bp, Pseudomonas aeruginosa
atgaaagcaatcgatgcatgggcacaacctgctaatggttgcctgcgcgagaaaatgcctgaggttgcacgcctgtttgagaaatcaggaagtggtcatttgctcgaccaagcaatgagcccatccgaaaccgtggcgcatatggatgaagctggcgtagaaaaattaatgctggcggcttggtgccgcccggaaggctgggtgaccagtaacgatcagatcgctgattacacccgtgcatactcagatcgctttattggcgtagctaccgtagacctaagcaagcccgttgctgcggtacgtgagcttgagcgggcggtattggagctgggctgcaaggcgctacgcatcgttccatggctgtggaagctggcccccaaccaccgtctttattacccactctatgtaaagtgtattgaactggacattccattctgcactcaggtcggtcacaccggcccattgatgccgtcggaaacgggtcgcccagttccatatttagatgaggttgccctggacttccctgagttacgcatagttgctgggcacataggtcacccttggactgatgagatgattggcttggcctggaagcacgacaacgtttttatcgacacatcagcctatctgccgcgctactaccctgcacaattgctgcaattcctacaaagctacggcagccaaaaggtattgttcggaagcaatttccctcagctctccctgtcgcgctgcatgaagcaggttcaggagctagggttgagccctgaagtcgaagcacaattcctttatgaaaatgcacgacgcattttcaagcttccataa

SEQ ID NO: 338100 - DNA, 1326 bp, Pseudomonas aeruginosa
atgagcgacaaacatcccccggtcctgcgcgagtccgccaccttcgaccgcctggccatccaggaaatccagcgcgccgccgaaaccggcatctacgacatccgtggtggcggtaccaagcgcaaggtgccgcatttcgacgacctgctgctgctcggcgccagcatgtcgcgctacccgctggaaggctaccgcgagaagtgcggcaccgacgtgatcctcggtaaccgcttcgccaagaagccgatccacctgaagattccggtgaccatcgccggcatgagcttcggcgcgctgtcggccaatgccaaggaagccctcggccgtggcgccagcatcgccggcaccagcaccaccaccggcgacggcggcatgaccccggaagaacgcgggcagtccaagcacctggtttatcagtacctgccgtcgcgttacggcatgaacccggatgacctgcgcaaggccgatgcgattgaaatcgtcctcggccagggcgccaagccgggcggcggcggcatgttgctgggcatgaaagtgaccgagcgcgtcgctggcatgcgcaccctgccgatcggcgtcgaccagcgcagtgcctgccgccatccggactggaccggcccggacgacctggcgatcaagatcgccgagatccgcgagattaccgattgggaaaaacccatctacgtgaaaatcggcgccagccgtccgtattacgacgtcaaactagcggtcaaggccggggctgacgtgatcgtgctcgacggcatgcagggcggcaccgcagccacccaggaagtgtttattgaacacgtcggcattccgatcctctgtgccatcccgcaagctgtggaagcgctgcaggaaatgggcatgcaccgcaaggtgcagctgattgtctctggtggtatccgcaccggcgccgacgtggccaaggccatggccatgggcgccgacgcggtggccatcggcacggcggcgctgatcgccctgggcgacaaccacccgcgcctggacgacgagctgaaaaagctcggctcggccgccggcttctacgacgactggcagaacggccgcgacccggccgggatcaccacccaggacccggagctgtccaagcgcctcgacccggtggaaggtggccggcgtctggccaactacctgcgcgtgctggtgctggaagcgcagaccatggcccgcgcctgcggcaagtcgcatctgcacaacctcgaccccgaggacctggtagccctgaccgtggagtccgccgccatggcgcgggtgccactggccggcactcgctgggtgccggggcagggcggctactga

SEQ ID NO: 338101 - DNA, 684 bp, Pseudomonas aeruginosa
atgaaaaccatcgatctttccattgccagcgtgcgcgacctcaaccaggccctgcacgaccaagtcaacaacgtcgaagaccgtgagtgggtagtcacccacagcgacggcaagcacaacctcgcggtgggtgtgaacgaggcggtgtccatcgatatccaggggcatgccggctactactgcgccgggatgaaccagaaagcctcgatcaccgtgcacggcaacgtcggtgtcggcgtggccgaaaacatgatgtccggcatggttcgggtcaaaggcagcgcctcccaggccgctggagccaccgcccatggcggcctgctggtgatcgagggcgacgccggggcgcgctgcgggatttccatgaagggcatcgacatcgtggtcggcggcagcatcggccatatgagctgctttatgggccaggccgggcgcctggtggtgtgcggcgatgccggcgatgcgctgggtgattcgctgtatgaaacgcgcatttacgtgcaaggcagcgtcgagtcgctgggctccgattgcatcgaaaaagagatgcgcgccgaacacctggaagagctgcaggagctgctcgaccgtgccggtttcaaggccagcccggcggcgttcaagcgctacggctcggcccgtcagctgtacaacttcaaagtcgataacgcatccgcgtactga

SEQ ID NO: 338102 - DNA, 906 bp, Pseudomonas aeruginosa
atgtgtggaatcgtggggttgtatctgaaaaacaaggcgctggagtctcagcttggcgccttgttcgagccaatgctgcaggccatgaccgatcgtggtccggacagcgccggctttgccatttatggcgatgaggtcaaggacggctgggtcaagctgaccctgcaggcgaccaccgaaggcttcgactggaaggccctgatgggcgcgctggaagggcgttttgggtgctcgctggactggttccagaacgccagcgccgccgtactgaagatccaggcagccgaagcgccggtgcgtcaggccctcgccgagctggccccgagcgtacgcatcatgagcgccgggcagagcatcgaaatcctcaagggcatgggcctgccggtagaaatctcgcagcgcttcggcctggccaagatgaagggcagccacatcatcggccacacccgcatggccaccgagagtgcggtgaccatggaaggcagccacccgttctccaccggcgccgacctgtgcctggtgcataacggctcgctgtccaaccacttccgcctgcgccaggaactcaagcgcgaaggcatccacttcgaaaccgaaaacgacaccgaagtggccgccggttacctggcctggcgcctgcaacagggcgattcgttgcaggaagccctggaccgctcgctggaggcgctggacggtttcttcacctttgccatcggcacccgcaacggcttcgcggtgatccgcgacccgatcgcctgcaagccggcaatcctcgccgagaccgacgactacgtggccatggcctccgagtatcaggcgctgtccagcctgccggggatcgaacacgccaaggtctgggagccggcaccggccaccatgtacatctgggaacgcgagtcagcttaa

SEQ ID NO: 338103 - DNA, 1335 bp, Pseudomonas aeruginosa
atgttgcccagcgaaacacagcgaattatcgaccagcacggtatcaaatacgtgcttgcccagtttgtcgacatccacggtgcagccaagaccaagtcggtgcccatctcggggctcaagaccgtcgccgaagaaggcgccgggttcgccgggttcgccatctggggcatgggcatggagccccatggcccggactttatggcccgtggcgacctatcgaccctgaccccggtgccgtggcagccgggttatggccgcgtggtctgcgtcgggcacgtcaacggcaagccccatccctatgacagccgctatgtgctgcaacagcaggtgcagcgcctgagcgacaagggctggaccctgaataccggcctggagccggagttcagcctgtttcgccgcaatgccgagggcaagctgtgcccggtggatgccagcgataacctggaaaagccctgctacgactacaagggcctgtcgcgctcgcggcagtttcttgagcgcctgaccgagtcgttgcagccggtgggtttcgacatctaccagatcgaccacgaagacgcctgcggccagttcgagatcaactacacctacagcgacgcgctggagtcggccgaccgtttcaccttcttccgcatggccgccggcgagattgccaatgacctgggcatgatctgctcgttcatgcccaagcctgaccccaagcgcgccggcaacggcatgcacttccacctgtcgatcgccagcgccagcaacaagaacctgttccatgacgccagcgacccgagcggtatgggcctgtcgaaactggcctatcactttgccgccggcctgctggcccatggcccggcgctgtgcgccttcgccgcgccgacggtgaactcctacaagcgtctggtggtgggccgctcgctgtcgggctcgacctgggcgccggcctttattgcctacggcgacaacaaccgttcggcgatgctgcgcattccctatggccgcctcgaattccgcctgccggatgccggttgcaacccgtacctagtcagcgccgcgatcatcgccgccggcctggatggcatcgaccgccaactggaggcgggcgccgcctgcaacgaaaacctctacggcctgagcctggaagagatcgccgcgcgcggcatcaagaccctgccgcagtcgctcaaggaagcctgcgacgccctggaagccgacccgctgtttcgcgaggtgctcggcgccgagatcgtcgacgagttcatcaagctcaagcgcatggagtgggtggaatacagccgccatgtctccgactgggaaatccagcgctacaccgagtttttctag

SEQ ID NO: 338104 - DNA, 600 bp, Pseudomonas aeruginosa
atgacgacctcaaccgacactcagccacgcctcaagcttgagcaatacctgggcatccagatcaaacgccagcgccaggcgcaggagctgaaaattgccgacgtggcgcgcatagccgggatcagccagggcatgctcagcaagatcgaaaacgcccaggtgtcgaccagcctcgacaccctcagccgtctgtgcgacgtgctcggcatgccgatgtccaagctgttcagtcagtacgaccagcaaggcagcggcgcgctgctggtcaaagccggtgaaggcatggaggtggtccgccgtggcaccgaaaagggccacacctaccacctgctcaaccacacccgtgggccgaagaagaccttcgaggcctatatggtcgacatgggcgacgccagcgaggagttcccgaccttctcccaccccggcaccgagttccttcatctgctcgaaggtgaactggtctaccgccacggcaaccagctctaccccatgcaggccggcgacagcctgaccttcgacggcgaggtgccccatggcccggaaaagctggtgcaggtgccgatccgcctgctgtcgatcatgaactacggcaccgactag

SEQ ID NO: 338105 - DNA, 831 bp, Pseudomonas aeruginosa
atgccagtgcctcccgtcgccgtcgatccagccgctccccgtattgcgcccttgccgggcacccagagcctcgagcgggcttttagcctgctgcgcgcgattgccgccggtggcgaggcgggtgtcagcctgcaagccttgtgcgcggccagcgactggtcgcgggtgactacctaccgcttgctgcaggcgctgcgccgccagggctttgtgcgcagcggcgctcagcgcgggcattacctgcttggctatgccttgttcgccctcggtgcccaggccggcaatgccagtggtttgcgcgagctggtgcgaccggccctgctgcgcctgagcgcgcgttttggcgacagctttttcctgctggtgcccgacggttatcaggtcatgtgtctggaggtgctgcatggcgagcagccggtgcgcagctatagccaggccgtcggcgggcagatcccgatgggcgtggggcagggttcgcaggtgctgctcgcgcatatgggcaggcgcgagcgagcggagattctccagcacaatgccgcgcagttacgcctggactacggcctcgatgcccagctgatcgccggcaccctggacagtgtgcggcgtctgggttttgcctgtggcttgccggaccggcgtctgcccggctacaccggcctagcagtgccgattgtcgatgccggtgggcaggtgctcggcgccctcagttgcgcgctggcgcggccacggatgacggcggcgcggcgcacggcgctggccggggcgatggccgaggaagtgcgcgggttattgctcaaggccgacggtctgctacgcctggagcggccgtag

SEQ ID NO: 338106 - DNA, 1305 bp, Pseudomonas aeruginosa
atgtacccgcatatcgagtccgtcagcagtgaccagcaactgccccccgccaccgacgtggccatcatcggtggcggcatcattggcgtctgcgcggcctattgcctggccgcccgtggcattgccgtagtgctgctggagaaaggcaccatcggcgccgagcagtcctcgcgcaactggggctggtgccggagcatgggccgcgacctggcggaagtgcccctggccatggccagcctgcgcctgtgggatgagtggcaagcgcgcttcccgcaggacctgggctttcgccgcagcggcatcctctacgccagcgaaacgccgcgccagctcgccgaccaggcgcagtggctgcaggccgccagccagcttggcgcccgtgcgcagatcctcgaaggtgccgaactgcgccgggtgctgcccgaaggcgcgcgcagtggctgggccggtgccctgcaggcgccgctggatgggcgcgccgaaccgcacctggccaccgcgcggattgctgccgccgcccgccagcagggcgcgcgcctgtttagccgctgcgcggcgcgtggcatcgacacccaggccgggcgcgtgcgcgcggtgatcaccgaacacggcgagctgcgctgctcgacggcgatcctggccggcggcgcctggtcgtcgctgttctgccgcaacctgggcattcgcctgccgcagctcaaggtgatcgcctcggtgctgcgtacccagccgatgccgggcggcccggaacacgccgtcggggccggcaactacgcgtttcgcaaacgcctcgacggcggctacagcatcgcccagcgcagcgccaatatcgccccgatcaccccggacagcctgcgttactgccacgacttcctgccggccctgggcaagcagtaccgcgaactgcgcctgcgctttggccgcaccttcttcgaggaatgccgcctgccgaaccactgggccctggaccaggtcagcccgttcgagcgctgccgggtgctcgacccacaaccctcggcggccattctcagggaagcccaggacgcgctcagtgcggccttcccgttctttcgcaacctgcgggtgcagcagacctgggccggggtgatggatgtcaccccggacgccgtgccggtgcttggcccagtcgccagcctgcccggcttgcacctggccaccggtttctccggccatggcttcggcatcgcccccggcgccggccacctgctggcagacctgatcgacggcagcccgctgctggtcgacccgacgccctttcgctgcgcgcgcctgatccacagctga

SEQ ID NO: 338107 - DNA, 867 bp, Pseudomonas aeruginosa
atgcaacacacccagaaccaatacatcatcaagatcagctgcccggccacctccggcatcgtcgccgccgtgacctcctacctggccgacaacggttgctacatcagtgaaatggcgcagtttgacgatgagttcagcggcaccttcttcatgcgtgcggtgttccgcctgaacaagggccacgaagatgacctggccgtcatcgagcagggcttcaccgatatcgccaccaagttcgacatgcactgggagctgcacagcctggccaaaccgatgcgcgtgctgctgatggtgagcaagtacgaccactgcctgagcgacctgctgtaccgctaccacaagggcgagatggacatgaccatcaccgcgattgtctccaaccacctggacctgcggccgatggccgagcgcgaaggcatccgttttatctacctgccggtgaccaaagacaccaaggcgcagcaggaaggcgagctgctgaagatcgtcgaagaaaccaagaccgatctggtggtgctggcgcgctacatgcaaatcctctcggatgacctgtgcaagcagctcaacggccgcgcgatcaacatccaccactcattcctgcccggcttcaagggcgccaagccctaccaccaagcctgggatcgtggcgtcaagctgatcggcgccaccgcccactacgtcacctccgacctggatgaaggtccgatcatcgaacaggaagtgcagcgcgtcgaccacgcctacctgccggatgacctagtggccatcggtcgcgatacggaaacggtggccctgtccaaggcggtgaaattccacattgagcgccgggtgttcctcaacggcagcagaacggtgatcttccggtga

SEQ ID NO: 338108 - DNA, 915 bp, Pseudomonas aeruginosa
gtgaacacagcccaattgatcgacggcaaagccgtcgccgcgcaagtcgtggacgaggttcgcgaagaagtgagcgcactgcgcgcccagggcatcgagccggcgctggcggtggtactggtcggtgatgacccggccagccatgtgtatgtgcgcaacaaggtgctgcgcgccgaggaagtcggcatccgctcgctggagcagcgcctgcccgccgactgcagcgccgagcaactgctggctgtggtcgaggcgctgaacaacgatgtcacggtgaatggcatcctcgtgcagctgcccctgccagcccacatcgatgaaaaccgcgtgctgcaggccatcgacccgaccaaggatgtcgatggtttccacagcgaaaacgtcggcggcctgagccagggccgtccggtgctgacgccctgcacgcccgccggctgcatgcgcctgctgcagcagacctgtggcgacttgcgcggcaagcatgcggtggtcatcggccgctccaacatcgtcggcaagccgatggccgccctgctgctgcaggccgactgcacggtgaccgtattgcactcgcgcagccgcaacgcgcgggccctgagcagtcaggccgacatcgtgatcgccgccgtcggccgaccacgcatgatcgacgccagctggatcaagcccggcgcagtggtcatcgatgtcggcatcaatcgcatcgaggaagacggcaagagccgcctggtcggcgatgtcgacttcgccagcgtcgccgccgtggcctcggccatcaccccggtgcccggcggtgtcgggccgatgaccattgccctgctgatgcaaaacacgctgaccgcaacccgtcagcaacggctcaactcagcggccgcgccggccatagcggaggcaacatgcctttcaacctgctga

SEQ ID NO: 338109 - DNA, 1242 bp, Pseudomonas aeruginosa
atgcctttcaacctgctgaaatatggcttgtcctcggactacccgattgaggtcgatctaccgccgccctgcgaactcaagtcgtcctacgacgtggtgatcatcggcggcggcggccacggcctggccaccgcctattacctggccaagtaccacggcatcaccaatgtcgctgtgctggagaagtcctacctgggcagcggcaacaccgcgcgcaacaccgcggtgatccgctccaactacctgaccagcgaaggcgtgcgcttctacagcgagtcggtgaagttgttccagaacctggccaacgagttcgacttcaacatcatgtattccgagcgcggccagctgaccctggcgcacaccgatgccacggtgcgcgccttccgccagcgcgccgaagtgaacaagcacttcggcgggcgcaccgagatgatcgaccgccagcagatccgcgagctggtgccgaccctgaacatggaccccggccacctgccggtgctcgccgggctgtggcacatggacggcgccaccgcccgccatgacgccgtggcctggggctacgccaagcaggcagccaagcgcggggtggaaatccatcaactgactgaagttcaggatctgctgatcgagcacggcaagatcgtcgcggtaaaaaccaaccgcggcacggtcaagtgcggctgcgcggtgcaggcgattgccgggcacagctcgctgctgatggccaaggccggcatccgtgcgccgatccacagctacccattgcaggcgatggtgacccagccgttcaaaccctttctcgacccgctggtgagttcatcggccctgcactgctacgtgcagcagaccggccgtggcgaagtggtaatcggcggtggctccgacccttacccgctgtacaacacccgctcgaccctggaactcaaggaaggcctgctggcccacgccatcgagatgttcccgttcctggccaacgccaagctgatgcgccagtgggccggaatcaccgacatgaccccggactacagcccgatcatggggctctcgccggtcgacaactactacctggatgccggctggggcacttggggtttcaaggccacgccgatctgcggcaagaccatggccgaactggtggccagcggtggccgcacgcctgatttgatcaaaccgtttgcgctggaacgtttctcgacctttcaacaggtcaacgaaatgggcgccacggcagccagtcactga

SEQ ID NO: 338110 - DNA, 309 bp, Pseudomonas aeruginosa
atgaagatcatgccctgccccctgaacggcccgcgcaatatcagcgaattcacctacggcggcgaactcaagcagatgcccgatccggccacctgcagtgacgcccagtgggccgactatgtattcaacaccgacaaccgcgcgggcctggtgatcgagtggtggatgcacaacgcctccagctactggttcctcgccgagcgccacaccgtcaccgacgagatcatccgcaccttcgatgcgaaggaactcttcacccagcgcgtcgacttcagcgcgccagccaagcctcaggaggtcgtcgcatga

SEQ ID NO: 338111 - DNA, 2907 bp, Pseudomonas aeruginosa
atgacttcgttcagccgcctacccgcaccgatgggcctgctgatcgaccgcgatcagccgctcaatttcagtttcgacggcaagccttaccagggtttgcagggcgacagcattgccagcgccttgctcgccaacggccgctggttgctctcgcgttcgttcaaataccaccgtccgcgcggcccgctgaccatggccgggcaagacgccaacaccctggtgcaactgcccagcgaacccaacgtcctggccgacctgcagccgctggccgccggggttaacgtcagcgggcagaacttcgccggctcgctggacaacgaccgcgacgccctgctcggcaagttctccaaattcatgccggtgggcttctactaccgctccttctacaagcccaagggcatgtggaaagtctgggagccgatcatccgcaagaaggccggtctcggtgcgctggcgctggactaccagcccgagtaccacgacaaggctttttggtttgtcgatatcgccgtggtcggcgccggcccggccggcctgaccgccgccctgaatgccgccaatgctggggccaaggtgctgctgatcgaacagcagtcctacctcggcggcgccctggcctgggcccgtttcgacattgccggccagcgcgccgacgccctgcgccacgccctgctgacggccgtggaaggccatccgaatatccgcatcctcaaggacgccacctgcaacgcctggttcaccgacaacttcctgccggtgatccagcacaaccgtctgtacaaagtgcgcgccaagcagtgcatcgtcgcctccggggcctttgaccagccggtggtgtttcgcaacaacgacctgccgggcgtgatgctggccagcgccgcccagcgcctgatgaagctctacgcggtcaagccgggtaagcgcgcggtggtgctgaccggcaacgacgacggctacctggccgccctcgacctgcacgaacagcacgtcgaagtggccgccgtgatcgacatgcgcgcccagcctgacgatggccaactgattaccgccctgcagacccgcggcatccccctgcactgcagcagcacggtgtacgaagcgctgcacagcaagggcatgcgccacatcaccggcgtcgacgtgcggcgtatcaccggcaaaggcgaagtggccagcagcggcctgcagctcgactgcgacctgctgtgcatgtcggccggctacatgccggtttaccagctactgtgccaggccggtggcaagctcagctatgacgacagccaggcggccttcgccttgagcggtctgccgcagaatctcagcgttaccggctcggtcaacggccgccatcacctcggcaacctgctgagcgaagccgcccaggtggccgccgccgcctgcgcccgcctcggcctgcaagccgagcccgtgcaggccgagttcgtcagcgaagcgcgggtcaactttgactggccgattttcccgcacccacagggcaaggatttcgtcgacttcgatgaagacctgcaagtgcgcgacatcatcaacgccacccgccacggctaccgcgatgtgcagttggtgaagcgcttctccaccgttggcatgggtccgtcccagggccgtcactcagccctgccgaccgcgcgcctggtggccgcttcgacccaccgcagcgtcagcgaaaccggggtgaccaccgcccgcccgccgtttgtggcagaaaaactcgcccacgttgccggccgtggtttcgacccgtaccggcagaccgccatgcaccagcgccacatcgagttgggcgccaagatgatgcccgccggcgtctggcagcgcccggcctactacggcaagccgcatgagcgcgaagcctgcatgcaggccgaagccctgcacgtgcgcagcaaggtcggcctgatcgacgtgtcgaccctcggcggcctggatgtgcgcggcccggatgcggccgaactgctcaaccgcctgtacaccttcagtttcaccaagcagcccgtgggccgctcgcgctacgcgctgatgaccaatgagcacggcgtggtgatcgacgatggcgtgtgcgcacgcttcgccgacaaccacttctacctctccgccaccaccagcggtgtcgaccgcatctaccagcagatgctgcagtggaatgcgcaatggcgcctgaacgtcgacatcaccaacgtcaccgcggcgctggccgccgtcaacctggccggcccggatgcacgccgggtgctggccaaactgtgcagcgacgttgacctgtcggccgccgccttcccttacctgggcgtacgccagggcaccgtcgccggcctaccggcgcgtctgctgcgggttggtttcgtcggcgaactgggctacgaaatccatgtcccggcgcgctacggcgaagccttgtgggacgccctgatggccgccggcaaggacttcgacattcgtccgttcggggtcgaaacccagcgcctgctgcgcctggaaaaaggccacgtgatcatcagccaggacaccgacggcatgacccatccgggcgagatcgacatgggctgggcgattgcccgcagcaagccgttcttcgtcggcaagcgctcggtggaaatcctcgaagcgcagccgatgaagcgcaagctggtgggctttgtcctgccggccgattcgcccaagcccctggaaggccatctggtgctcaacggcgccgacatcagcggcaacgtcacctcctgcgaatactcgcaaaccctcgaccagatcatcggtctggcctattgcgcgttctcccagagcacgccgggcagcacgctgccaatccgcgtcgaaggcggccgtgaggtgcaggccacggtggtcagcctgccgttcttcgacccgcaaacccaacgccaggagctgtga

SEQ ID NO: 338112 - DNA, 681 bp, Pseudomonas aeruginosa
atgaccactctgcacgcccacgacttttctgaacgcagcccgctgtaccgccgccatgcccacgccacgctcggtcgcctgggcgacagcgtgatcgtcgcgcactacggcgaacacgcggaaagcgcgcaactgcaacgcagcgccctgatcgacctgaccaacctggcccgcgtcggctttcgcggtgcccaggccgccgagtacctgagcgccaagggttatcagttgccgacggccgccaaccaggccctgacccaggccgacggttgccatgtggcgcgcctgtcgcaaaacgaatacctgctgctcggcggcctgcgcgacgccggggcacgcatcgcccgcgaggaagccgactggcaattcagcgagcaggccaactacctgctgccacgccaggacagccacgcctggctgctgctcaccggcgcctgcggccccgaggtaatggccaagctgtgcggggtcgacctgcggccgacggccttcccagtgggggccgtggcgcagacctcggcggcgcggatcaacgtgattgtgatcaacctgccggaaggtgagctgccgtgcctgcagatcctctgcgaccgcgcctcgctgagctacttctgggatgccctgctggatgccatggccgagttcggcggccagccggcgggcatcgacgccttgctctga

SEQ ID NO: 338113 - DNA, 789 bp, Pseudomonas aeruginosa
atgaacaacgatgaaccactcacgcaggaaaacgactaccgcgtgcccgcgctgcagcgcggcatggcgattgtgcaaatgttcagtgcccagcaacgcaccctgggcatgagcgatatcgccgagcgcctgggcctgagtatctcggcgatctaccgcatcgtgcacacgctcaacgagatgggctacctgcgcaagctggcgaaaaacacctatgagctggggccccaggtggtgtccgacggcttcagttatctggccagccgcgacatcgtcgacatcgccctgccgcaccttaatgcgctgcgcgaccgcacctcgttgtcctgtcatctgagcattcgcgagcagaccgacagcctgtacatctaccgtgcgtttgccgcccagcgcctgtcggtgaacattcccatcggcacgcgtattccctgccactgcacggccatgggccgggtgctgctgaccggcctgagcccggccgcgctggataacctgtaccagcacatacgcctggatgactacccgccgccggcaccgaaaaccctgccggaactgcagcagctgatcctcaaagaccgcgagcgaggctgggtgctgcaccgctcggactattcggtggcgatcgcctgcggcatccacaaccacctcggtgaagtggtggcggcaatcaacctgtccggcccggaaagcgtgatggacagcccggtagcgcgcgaacgctttcgcgaatccctgcaggaatgcgcccaggccatcgcccgcgaattgggtgggaactcgattaaatag

SEQ ID NO: 338114 - DNA, 1770 bp, Pseudomonas aeruginosa
atgagtgagccaactaggcttgtgtctacgcacattgggaccaatggacacaccactgctcgtgtgacgatgagtccaactagtaacaaggttcgtgccgaaattactgcccctccggatcaggcgattccggttgtttttgtgccgggcatcatgggtagtccgttattgacgtcgaatgcggaggctggaaggttacttggggaaaacaatcgttgggcttggtttccagacgatggcttggggtgggtggcggggtttactgcgaaaagagggtaccgtcatctgagcccgacagagcggaaattgttgcttgatcccgacactacacggccagtctcgtctcccgaggatgcagatcgtgaagttgtttccgagcacattactactctgccgttgcaggaggcacttagtcgtggttgggggtcggtgatgatcagctcgtacggcggcattctcaatttcctagaagcgcagcttcgcttcatcatcacctcgaagggggaggtgtatccgggggtgcaaggtgcggtgccgcacaacccagaggtgtgggggcagctcaatggctatcaagtactcacaaaggagatgttgcgggaggctgccgagtttcgttatcccgtctatgcagtgggctacaactggctgcagaccaacggcaaagccgccgactatctggcgggaaaaatcgaagccatcattgatcgttgcaggaaagaacttcgagtcaagtgtgaccatggggtgatactggttacccactctatgggagggctagttggccgaatgtgtgccaaacgctatcccgctttgattcagggagtagttcatggcgtgcagccagcggttggagccggaacggcttatcgtagggtgcgtgcggggtgggaggacttcgccggaagcatcgggcttggtggaactggaaagaaaattatgccggtatttgctaatgcagcaggcccattggagcttttgcccaatcatcgctatggggccggttggctgcgcatcacttgcgagggcagagttgtcgcacaactaccggaggcaggtgtggggaaggcggatccctatatgcaaatttatatggagcctcgagcgtggtggcgcttggttgatccgctttggattgatccggcggtcaataaaataaaaggtcccgcagcgcttcaagcacttcagaaagcctgggggcgctatggaatgcgactgggcgaggcaaagcattttcacaccgaactcggtagcagctatcaccctaatacatactcgcattacggcgcagatgaaggggaaatggcttttcatcgcgtcacatggaatcttcagccgcaaatgatcgctgcataccgcaaggacctgcctcctacccgagggcccgtaccatcgaccgttcacgctatagggttgcgtatgtggcgcgatgaccacgaggggacggcttatctggttaatgatgctgatggacaggatatggtcatgcagcatggagtgggggtcatgcgaagcactaaaggcaactcttatgttgggaaaatacaggggcaagaccaagtaggtgatgcaacggtacctgcgcattcttccgaagactcggcaaaggccgctgttttctccgctcgtatgacagggtttgaccatcaggcctcgtacgataatcgaatggtgcaaaacgtcactctgtattcggttctatgtatcggtgcgttggcagtacgaaaagaggccgaaaaatccacgacaactacagaaatacccgcatga

SEQ ID NO: 338115 - DNA, 726 bp, Pseudomonas aeruginosa
atgaataatacaaaatttaacccggtcgaattaggtagccaagctttttgcatgaatgcgatttttggtaaagataaaacgtttcaacacggtcatgcaaaagcggttattggtgttcatgtagttgatataagcacgaagcacctattgatcacagataacaaatctacattgtctaatgtccaatatttattgaaagactatttcgcatcttctcaatatcaagacgctacccataagaaatttcacatcattgatcttgatcagtatgattacgatgcggcatctataaggctcactagaacgcataaatttaagccggtttcatctttgtctaaatgccagaaacttacgaggataataaccagtaaaaaaccatcatcaaatgggatagagattgatccagtattgagaatggcttttgaaggaatgttagagcctgacgactttttcaaatttcaagaagtccgcacagagtttagggtttcgatttcacttgtaaaaaatagaaagttgatcaaaaaaatgactgtcaacattggctatttcacgttgatcgttggttcaaagccatatgactatcaagaagaagacagcaagcagaaaaaggccactagaccatcattatctagcccagtgtataaagatgatggtatcgagtttatggctacttttaacgaccgtaaaaaagactatcgagatatggtcgatataattaatatttaa

SEQ ID NO: 338116 - DNA, 3243 bp, Pseudomonas aeruginosa; identical to SEQ ID NO: 335180

SEQ ID NO: 338117 - DNA, 135 bp, Pseudomonas aeruginosa; identical to SEQ ID NO: 324426

SEQ ID NO: 338118 - DNA, 1800 bp, Pseudomonas aeruginosa
atgactcgtcgcctgacctatcacaagctgctccatcgagacggtttatggcgcatcgcagacctcaaatacatcgttcaagcggactcaaatcttcaatccaatctggatagagccgcctcaagagaggatatccgggtccaagtcgctatcggaaaggtggctgaggctggagaaaaggaaaaattaaaaaatctcacaatcgtcgaggtgccaattggagacctaccgctgcttcggcggaataggctcatccaagatggctacctacgagatgaacagtacgaactggagaaagagtcagaactacacctgaccctcgatctctcgcctgagaatctgaattttttcaaacgtttcgacaaagaaaactcaaaactcatccttaaaagaacaaaatatagtacagaggaagacagagaattactgtttgtaggcatcggctacagcggcgacccctacggcataataatttcctgcactgatatcttctcattcttctatgctaactccaccttcctaactcaactcattctaagcgagtcgatcttagatccagagtccaccgtctacgacagtgagaagtcgattaaaactgggcgcttccgcaagatatggctaaaagaaggtgttccctcgaaagacgctcgccatctggcaatgctgctcttcgatgattatgcattagaagccactcaaagcatttatcaacacagagaccccgaagggcgtaaatcgggaaagtgggctatccgcgccacaccacctatcatggggaaagttaagctcaagcttaaaggcagatactacggcagtcgtttggtagtaactgaaatcatcaaatgcggctggatacccccattcgataatttggaatgggaacgcgacaatagatccagcccgtccaaatctggtccttttaacacagagccagcaaggaagctgatagatgtagactcaccagaagaaatttcggacgaaccaggggaccgtagaacgcttccaagtgaagtcaggcaagcccatctcggccatagattccctcgcctaaaagcagtctccctaaaacgatcaccgcggcctgcccctagcgataaagaaggcgctcgttacgttagggaatatgtaccaactaaagaggcgtccaccgctttgggcgggtccggcccaagcaagcgtagagctgacgctagagggccagaagagctccagccggaatcattgaagaagcagagagagctggaaaacgttcaactcgaagcaaaagatactgacgatcagtgtgtctcatctgcattgatgctgcttgaagcacacaacagtaatctggcctgggtcgactttctcaatccaggcttcgcgaatacgacactgatgagtggcaaggaacgtattccactctgcttattgccaagcatggttgacaagaaagagaaggcttggctctacagcgatgagcctaaattaagacaacgggccgcactcatagccagagtcgaatttagagacgaggtgcgctacgtatttgagctacaaaagcgaatgacccaaaatatctcaacagcgcttatttggagagaaccgcagggtgaaataaaaaatttcctgctaaaagatctgttactgctaattgcaggaccgaccacatctactgagcgcataaatttcacaacaacacattgcctgcagtggggtcgctgtaagcataaagccctgaacggcacgctatcgcaacgtgccgaggagtttttacaccgccttttcgacacctccgctctccaagaggaggatggagactag

SEQ ID NO: 338119 - DNA, 2424 bp, Pseudomonas aeruginosa
gtggctacctacaagcatctgagcattacccgggagcatttggataaccctcgccggaccaagcagccccctttctttgtaactcgtgctgatccacgtggccatggccagaaactcaatgcttacttcgcaacagccgcggggcaggccaggagccaaattggctccacggaaacatcccctttcgtcctcaagctcaagtacgagggggctctaaccttcgccaagctgtctgtgcacgggttggagttcatcagccaagaggacaagcagctctgtgtagtgttcgctacagaggctggcttggcgcagttcgtagatcatctgaacaagctcggcgttctcgatgctgtcttgacctacgggcagatcctggaggcgatcgctggcattgaggcatggtctgcagaagaccggatgagctgggctcttactcatatcggtttgccccagaccgcagccttcaagctcgatgtggagctttggcctctggaggtcgcgaaccaccccagccgaattcgattaacaactgcttttgagcattggcttgagggtgtaggcatcagatggctcgacagggtcaatctggatagccttctcatgtaccgggttgaggtgaatcaagaccaagcgcagatgctgctgaaccatcgtgacgtacgtcttgtcgacctgatcccggccacagggatcagcgttcagcagctgacgcgagatatcaacgcactgcctccggagatccctcctccgttgatgggggcatcgcgcgtgtgcattctggatagcggaatcaacggcaaccatccgctgctgcggcctgctatggctgaaagcgcctccttcgttgatgaggagggggagtctgatttggctggccatggcacggcagtcgcaggtgttgcgctgtatggtgacgtcgaggcgtgcgacgcaagtaatttctggcggccgcagttttggatctacaacggcaaagtgatgaagaggtgtcctcagaccgggaatgcgatttacaacgagcattcccttgaggcttcccttactcgggccgttgagcacttcgtggagcttggttgccggatcttcaatctctcgctggggaacagcaacgcgccctacgacgggatgcacgtgcggggcctggcctacatcctggatgtcctagccaggaggcataacatcctgtttgtcgtgtcgaccggaaatttctgtggctcggataaccctgcagttccggtcaatagctggcgggatgagtaccctgagtacctgctggcggagcagagttcgataatcgaccctgcacctgccatgtcggtactgaccgttgggagcatcgctcggcataacgctacggctgacacccagcgcttcccggaaatccatcagctctcgccagcatctgaaaatcagccatcgccctttactcgacacgggccttccgtaaaaggcgcattcaagccagatctcgtagcaacgggtggcaacctagcgtgcccaatgagaccggcgggtgggcagtggcgccaggtggagagggggcttggtgtgctgaccttcaaccacgagttcgtaggcaacacgattttcaaggaagttagtggaacgagcttggcggcgccctatatcactcacctggctgcgcgcctactcaacgaataccccgagtcatccgccaacttgctccgcgctatgttggtgaaccaggcatacctgcctgaagaggttgctacgacattctctcaggccttcaagaaggcctataaagaggacaaaaacacctacaacagagacgcggcaagggatgttgccggctacggtgaggtgagtgaggccgacctattcaggtcgtccgacagcactgtcgttttgctctctgagcagaccattgaaaaggactcgagccagttttttgagttgcctttgcctgccgaattcctgcgcacaggaattgccacacgagagctgaccgtaacgctggcgtactcgccggcagtacgtacgaccagggtggaatatctggcgacccagatcagcttccgcttggtgaaaggcacctcgttggatgaggtgcaaaagcacttcaaccaagtcagcaaggccgatgtcgagtcccgaaatgacgacgcagttcccaatcgcgacatttcggcccagcagcgaagccggggcaccgtccagtcgtcgcgctggacgttcaagcgtcgaaatcccaatgaaaagtggtttgtggtggtggtcaggcaggatcgcgagtggaaccatccagatgtgctcgatgaagagccatacgcgctggttgtgactgttgcagacagggataacgagagcgcccagctctacagccagattcaggctgtgatagctcagcaagctgaggtgcgtgaacggcagcaggccgagcgcctgcagagccgtggctga

SEQ ID NO: 338120 - DNA, 942 bp, Pseudomonas aeruginosa
atgggggatgcagatgcatttcgccgtgcttcgcaagccgttatcgaagaagagcgccagaaacaacaccatctcctcgcgaacgatttagagcagattctctacggcggcgacgtcaactcgcgtgctgccagcaacaaccaacgcgcccactacgacattccgactgataaagagcgcggcctgcctctgctggatatcagaacccccaagcgctccctggaagaagtaattctgcccccaagcagtgcggctgccttggaggaaatcctagaagaaaaccgcagagatgatgtcctgcgcagctatgggatgaagccggctaccaaggtcatcttcttcggccctccaggatgcgggaagaccttggcggctgaggtcgttgcattcgagctcgatcgaccgctggccatcgttcggctggacgctttggtgtcctcgttcctcggtgagaccgcggcgaatcttcggaaggtttttgacttcatctcccagcattcgctggttgttttgttcgatgaattcgacgccattggcaaagagcgcggcgatagcggcgaccatggtgagttgcgtcgggtcgtaaacgctgttcttcagatgatggattcttatgaaggcagcagtgtgattcttgcggctacaaaccacgaacagatcctagattcggccatttggcgtcgatttgatgagtccattgagttcccgctcccggatgagaagcagctagtagacattctgtctctgaagctacgtgggatacggcgccagttcgatattgacgacaaggaagtaatacaggaatttaagggtaagagcggggccgatatcgagcgagttatacggcgcgctgcgaagcgaatgatcctgagagggcaagagttcctgaccatcaaggagctgaaaagcgcacttgtgcgggaggatctcaggaagttctga

SEQ ID NO: 338121 - DNA, 363 bp, Pseudomonas aeruginosa
atggcacaagataaagtatcaataagaatttcaaaagaagacatgcagaaatttaacgaactcgcttctagtctttcaatgactaaaacagcaataatcaaaaagattgttaatgatggctttgctcaaacagccgaaatcacaaaccctacgttactcacctctatcgaaaaaatcgaaaaaatgcttggctcaatcggaaccaacttaaaccagatggctaagaaggtgaacgccggggcgtcattcacagaacaagacgtgaacactctaaaacaaatcatcgctaagtttgaggcacttgaaaccgttgttattgataagaacgtaaaaacggtgattaaaaagagaggttcaaaatga

SEQ ID NO: 338122 - DNA, 1659 bp, Pseudomonas aeruginosa
atggcacgtttaatctcataccttcggatgtctacaagcgagcaattgaaaggcttttcgcttgaacgtcagcgaaaactgatcgctgattttgccctaagatatgggctttcgctcgatgaaagtcattcaattgaagacattgggcgttcgtcgttctccgacgatgcggagcaaaggcagcttgctcggttcttcactgacctagacgccgggaaattttcgcccggtgatgtgttcgcactcgaaaacatcgaccggctgacccgtcgcggccccattgatgccatcttgaaggtcaatgcgatcatttcaaaagggttgaagctggcgatcattagcaccaatgaacaaaaaataattgaagatgtaaatgacgttttcaccattatcaatttatccattgatgccgcccgttcgcatggcgaaagcaaaaacaaaagcaacaaaggtctgtcaaattgggaagaaaaaagacagcttgctgccagtcatggcgtagcaatgaccgcacaagccccggcgtggcttgataccgaaagcttttatgtaatggacgaaagcaaaggtatacagattaaacgccgccgctacgttctcaatcctgaaaaatccgaaacggtcaaactaatctttgacctctatttaagcggcaatggttcgcttaaaatcaaaaatattttgaatgaacgaaatatcccaacctttaaaggtgccgaatactgggaaccttcaattatttcaagaatgttaagaaatcccgccacttttggattttatcaaccccaaaaacaaggcaccgggaaacgtgatctaattcccgcaggtgaacccattgagggctatttcccggccattgtgagccgtgaaacctttgagcagtgtcaacgcatagggttagaaaataacaagcggaaaggccgtaaagggaagctattcaccaacctttttacggggttgttgaagtgtgtcgattgcggcgaaggtgttcaccttcttaaccccggaattgataaacgtgcaaaaataccaaaatcaacaaactacatcgtttgtcgtaagggtaaatttacacgcgaatgtattttgaagcgtttgcgttatgacgatttcgaagctgtcatgttgaacgccattcaagaaatcaatcttgctgacgtattaaacgaaaataacccacttgaacagctaatcaagcaaatccgagcgattgaaatcaagatcgagaaaaatcaaaagcttcttgaaaactttcaaaagtcatttgttgaaaccggcgatcttcccgctttcatgatcgaagccgctaagaacgcagaaacagccaataaatcgctagaaattgaacgcatcgaactacaagcccaaatttcacaattaaacgtctataacgccaatattgaaaacgcaattgaagaacttaaaaacaatggcacatatgaaacccgtgcaaaaataaaccttttgctacatgaaattataaaaagcatcaatattgatttcgagctattagattatgccattattttcaaaaatggcgtgaagcggttcgttaatgatggcattattcaaaatgtatttattgccgaaagattaagcgagcaatcttttagagagtttgaagaaatcctaaactataagccgcccgtaaaagcctaa

SEQ ID NO: 338123 - DNA, 3588 bp, Pseudomonas aeruginosa
atgaaacggaccttcagaaaacttcgcaaacccgagcaattggctaatgatttttctagtggctgggatcaaggatcgcgtgctgaaggtatcgactggggtgagctactaaaatacccccgagtcctcttggtctccgaagcgggggcaggtaagacctacgagtgccagcaacaggctgccgctctgttcgatcgagccgaagctgcttttttccttcccctcgaagctgttgcggcaggtggtattggctctgagctgtatgggcctcacttgctgcgctttcaacaatggcaggcttcatcgtctcaggtcgcctacttctttctggactccatcgatgaacttcagctcgttcataagtccttcagggaggcccttaagcgcttggcccacgatcttgagggggccctcggtagagcaacaattgttgtgacatcgcgaccagtggcgatagaccgccgcgcttttcaagaaattcttcctgtaccgcaacctgcacgcgaagccctcaacggtgagcagtttgttcgcattgcggttcatggctccttggaagggaagcatgatcagcctccgccattcattgaggtcgaacttcttccacttaccaacatgcagattattgaattttcacgcgaccaaggagttttatccccagaggcactgctgtctgccattgacgctagacatgccctcgattttgctcgccggccgcaggatctcattgagctctgtgacgattggcgcgagcacggggagattcgctcccactttgagcaagtcaagaatcacgcactctctcggctcacggcgcgaccagatagaagggagcaagccgacctgtccatcgagaaagcctttcttggtgcgcaacggctcgctttggctgtcatccttggccgacggctaaccatccgttatagcgccggggccgacacagagaactcgggggaggcccccattgatccacgcttattactgtcggactggggggcaaaggagatcatcgcgcttttggagcgccccatatttgcagagggtgggtatgggcgtgttcggttccaccatcgttccgtaatggagtatctggctgcgcgtcagatccacctgctaatcgagtcagggaagctttctggatccgcagcgaagcggctaattttcggcttaacctacaccaataaaaagttgcttaagccatcaatgcgtccggttgctggctggctctcattgcttcgcccagacgtattcgacgaggtattggaggtcgagccaagcacgctgctaactcatggtgacccagagtcgttgactgagttacaacgcgagcgtgccttgcttgcattcgtcgagtgctatggaaagggtcagtggcgcggccttgtagtaccagatctccaggtagccagattggctcaggcagcgctttcagacacgattttgaccgcgtggaacagtggcgtagagaatcccgaagttcgcgaactcttgctaagactgatctcagccggccgactcggaaagtgcgcggatcttgctgcctctattgctctcgactccaattgcagcgaggaggagcgtttcgaagcgcttgttgccctatcgaacctggaagaccagcgattggaagcgctcatcgaagccgtcgtcacgctcgctccaagctggaccgaacgtatagctcgttgggttgggtcgtacctgtatccggaacacgtcagcgacgcgcagttgcttcagttactggtcaatgtccgcggcggctctagatacagtggtgactacgcggcccgcatcgcccgggtcatcgagaaagctgagctgagcactaaccggctcgaagctctactccctggtttgctagcacttacacgcagcaatatcgaggagagagatgaccagcttgttgaccggagcgcacgactagaagcctcagccattctgcgagccctctgcattcgcctactagagcatggtgcctacagctccgaattgatccaggcgtcagtactggtgctgcgggtttcggaaacgggttcagccctgcgaaaaggaagcaccgagcttcgcacgctccttgaagcgcttccatcggccaacaggcggcaagtttttgaagccgacctttcctgcatcgccatgctcgagtcgggaaaagtcgtgcggaatcgattggtacgacttgtctacgacggcgctctctcctatacacgggagaaggattggcagtgggttcttgatgcgctgtcagagcgtgaggctccagcggatctccgcactgtcctacttcagctggccgtgcattttgtacccacatgcagtggtgattcagacttcatcagcatccgaaaagcagcggcagattcgcaagccctgataacggagttgaacgaggctatcgaggccaacaagccaagcgaggccactctccgcatacaggacgagcaacgcaagcgaaaggagcggcaggaaaagaagactttaagcctgcagcaagaatggctcgctttctggagtgaagtcgcaaaacggcctgcattggcactagcgcctggccgcttgcacacgaccatatggaatctttggattgttttgcgcaacaaaggtggaggaagcgaagagggccgatgggatcgtgcattcttggagatgcacttcggacatgaagcgacgagtgccatccgacaagctttgtccgcctattggcggagcatgactccgtcggttcgcagtgagcgcaaagccggagaaaagaacacctatctggtggtctggtcgatcggtttggtggggatctatgcagaggccgaagatccaacttggacatccaggcttaatggtgacgaagccgagttggcagcacggtatgcgctactcgaattgaatgggctgccaagctggttggtagctttggtgaaagaacatgccgtttatgtagaaagcatccttggtggcgaactcgatgatgagctggcagagccgcctggcaacgggcggtggcattcgaccttgctccaggggctgcggtacggccccgcgcagatagccaagctcctccagccgcgactgtctgcctggttaggcgggcctggcgaaaatctgatgcagcttccgcacagtgagtccggcgaaaacaaattggatcaagtggttcgtgttttggccactcacggggatcaatcagtccgtaccgaacttgaagacctagctgccaatcaggttgagactgcaccagatacccctttcctcttcttctggcttccagtgctctgtcgtgccaacgctgcacgcggcactgcgaagttgcttgatctcctgggcgaatatccggtggaacaggacggtatcgccgtccgggcaattgggagccttttcaacgagcgatcgaatgactcaactgattggagttccctaacagctgacttgcttctgaagctgacgatttccatccaccgccatgtcaagcctgaagacgatcttgtgcatgagaacgtctactccccaggtccgcgggactatgccgagaacggacgacgatacgttttcgaagctctcatgcaagcgagtgggcggcgattttcaaggtag

SEQ ID NO: 338124 - DNA, 1113 bp, Pseudomonas aeruginosa
gtgctggctcaggcccaagccgtgaataaatttgcaaaacaaaattttgcttttggttggctgtatgtcgcgaggtttcaacaagccctagcaagcggaaaaatgggctgggcgaggcagattataactcaagcacgcacagacagtcgcgcgcagatgatggaatccgagtttacttcgaaaatgtttgacgctctagagcttgagttacattatgaattgcgctgcttggacacctcagaagaaaagctctccaaaattttagagttcatttccaatcacggggtgacagacgtgtttttttccgtatgccgtgctgtgtcagcttggcggcttggaaggagtgacctaaatggctccattgagatattggagtgggcgaaggcgcatgcggttgaaaaaaatctaccaagattggaagttatgagccaaattgagatctatcagcgcttagtctgtcaaggcataacgggcataaataatttaaaaactcttgaagatcataagattttctccggacagcactcagcccccctaaaagcacgcctgctgcttgttcaatcactagtgctttcccgagatcggaactttcatagtgccgcgcacagagcgttattggctattcagcaagcccgtaaaattaacgcgggccagctggaagtccgtggattattgtgtttggccggagcgcaggcaggtgccggtgatttaaaaaaggctcagcttaacattgtttatgcagtggagatagcaaaacagcttcaatgctttcaaacagttcttgatgaagtatgtttaattgagcgaataataccggcttcatgtgaagccttcacagcagttaatttagatcaagcgattggggcttttagtcttccgcgaatagttgagattggaaagtccgcagagaataaagctgacgctttattgacacggaagcagattgctgtcttgaggcttgtaaaagaggggtgctcaaacaaacaaatagcaacaaatatgcatgtcaccgaagatgctataaagtggcatatgaggaaaatatttgccaccttgaatgtagtgaatcgcacgcaagcaacaattgaagctgagcgtcaaggaattatctaa

SEQ ID NO: 338125 - DNA, 1158 bp, Pseudomonas aeruginosa
atggcaatcgttgttgttggcgctggtacagctggagtaaatgctgcgttctggcttcgtcaatatggttataaaggggaaattaggatttttagcagggagtctgtggcgccttatcagcggcctcctctatccaaggcttttctgacaagtgagattgcagaatccgcagtgccattaaagccagaaggtttttatacgaataacaatattaccatttcgttaaatacaccgattgtatcaatcgacgtggggcgtaagatagtttcttctaaagatggaaaagaatacgcgtatgaaaaattgattcttgcaacaggtgctagcgcacgtaggttaacctgcgaggggtctgaactgtctggggtctgctatttacgcagtatggaagacgccaaaaatttacgtaggaaacttgtggagagtgcgtctgttgttgtgttgggcggcggagtaatcgggcttgaagtcgcctcagctgcggtgggcttagggaagagggtcacagtgatagaagccgccccgcgtgtaatggcgcgcgtggttacgccggcagcagcaaacttagtcagagcccgcctggaggctgaaggaattgagttcaagctgaatgcgaaattaacgtctataaagggcaggaatggccatgttgaacaatgcgtacttgaaagtggagaagaaattcaggcggatctgattgtagttggaatcggtgctatcccagagctagagctggcaactgaggcggcccttgaagtgagtaatggtgttgtggtcgatgatcagatgtgtacatcggatacaagtatatatgcaatcggcgactgcgcaatggctagaaatcctttttggggaacgatggtacgtttagagacaattcataatgcggttacacacgctcaaattgtcgcaagtagcatctgtggcacatcaacaccagcaccaaccccaccacggttctggtctgatcttaaagggatggcgctgcaaggacttggtgctctaaaggactacgataaactcgttgttgcaattaataacgaaactcttgaactagaagtccttgcgtacaagcaggagcgactgattgcaactgagacaataaatttgcctaaacgtcaaggtgcgcttgcagggagtataaaattacctgattag

SEQ ID NO: 338126 - DNA, 339 bp, Pseudomonas aeruginosa
atgatgcgtcccgacaccaaggtgcagaaggtctgcctgtatccaaagcccgtcgacttccgcaaatccatcaacggcctgccgttgctgttcgtgttcctcaatcgcacccgtagccaggacaagatcctctactgggagcgaaaaggtttctgcctctggctcaagcgcttggaagccgagcgcttcaagaccaagcacaatgccggcgatacgcgcgccgatctggacctgaagcgccaggtgcacgcccaggtttttccggaagccttgtcaccgctggccgcaggcggtacccgggctggtgtcgatgtggtcgaatggctgcggcggttgtga

SEQ ID NO: 338127 - DNA, 279 bp, Pseudomonas aeruginosa
atgttgagctcaacattactcgatgactggggcctggccccgttcaacgccgaacaacggcgcgacatgcttgaactgttggacgaccgctacggccagcgctcaaccatcgtgaccagccagatgccggtggacagttggcacgaattgatcggcgatccgaccttggccgatgccatcctcgaccgcctggttcacaacgcttaccggatcaatctcaagggcgaatcaatgcgcaagcgggcgaagaaattgatgacgctgggcacctcagactaa

SEQ ID NO: 338128 - DNA, 1443 bp, Pseudomonas aeruginosa
atgcataagatggctgaatttgcttattttgaaagggagcatgttgttgccttgagcaaggtgtactacgagctgcataaaaaagaaataaatataagttttatagtagggcaggtgcagagggctcgtagacaaactacagctgtaaacagtttgtggaagggtgataaagctcttttaagattactgggaaagggcttgattcttgagctgtctgaagcttcagaaataaaacttgggctgctcgagaggtatgcaagtagcatttataaagatggattaaaccctgggcatattgaggaaatgaaacgacttgtaagttggccctacacgaactctaatcgcttcgggattgaaattgcagatatttccaaacgcgttaaagcttacgtgtattttcttgttgtatcaattaattgtctcttttttgttgttatttttcttcttatgaaaaagactcgcagttcaatagatgaaatagttcatgtcatgaatgatatgtcaagaggtgatcttacatatcgcactataccgagcaatgacgaagtgggtaaaatgcagtcttcaatcattgcgatgggggctggggtaagcgccttgattgaatcaataaaacacatacaaggtgatctgtttaattcagcgggcgaggctttaaatatttcacaaagcacgtcaaacgatatatgtgaccaagcaggtaagatcgacgaatttgtcagtgcgctatcacagatttctttcgctataactgaaacttcaaatgcggcaaataagtcctcagcactatcatctgaggggcggcagttggcggttcatggtcaaaaagctattgaaacagccgtatcatctataaatgccttgtcacaacgagttaatgattcacatgtggctattaaatgcattgaagctgatattgcaaaaataggtaaaatcattgaaattattgatcaaatcactgatcaaacaaatctgctggctttgaatgccgcgattgaggctgcacatgcaggcgaggccgggaagggctttgctgttgttgctgatgaagttcgaagcttagctcaacgtacaaataattccacttatgaaattcaggcgatgattgcttctttaaataaaggtatattttttgctcttggtgtcatgggagactgtgtcgttgaatcaaaaaatagtgttaatgcagcaagcgaagctagtagatcaattgagaagattgtagattcagtatcccaagttatgttgcagattgcacaagttgcaactgtttcagaggagcagagtgctgttgtaaaagacatgctggataatgcaaatattattagagaaattgcggcaggagttgagttgggtagcaggagaatttcggaggtaaatcagtatttagttaagttggctggtgatttgggaagagcagcaaaggtatttaagttgtattaa

SEQ ID NO: 338129 - DNA, 660 bp, Pseudomonas aeruginosa
atgactgagctttcgccatttggcacggcaaacactccactcgcgcaccacgtagatttatctccagatgaaaagctttcactgcgcaaaagccaagggcgcccgccttacggtgtcgagttaaaaatcgttaatgatgaggggattagactacctgaagatggtcgaagtaaaggcaacctaatggcgcgtgggcactgggttattaaagattactttcatagcgatcctggttcgacactctcagatggttggttttcaactggagacgtggctaccatagattcggacggtttcatgacaatctgtgatcgtgcaaaggacattataaagtctggcggtgagtggatcagtacggtagagctggagagtattgcgattgcgcaccctcatattgttgatgctgctgttatagctgcaaggcacgaaaaatgggacgagcgacctctcctcatcgcagttaaatcccctaattcggaattaacaagtggtgaggtatgtaattatttcgcagataaggtggctagatggcaaattccagatgccgctatctttgttgaagaactgccacgcaatggtactggcaagattttgaagaatcgtttgcgcgagaaatatggtgatattttattgcgcagtagttcttctgtctgtgaataa

SEQ ID NO: 338130 - DNA, 1281 bp, Pseudomonas aeruginosa
atgacgccgcagcagctcaccgaggagtacatcttcacgcacgatctccgagaagccagcgcgaagatctaccgcgccgcaaccaaagcgctactcaagcacttcggccccacggcaaccgtacaggacgtggatcacagggccgtcctgggatggcggcgcaaggtactggaacaaggcctgtcgaagcggagctggaacacgtactcgaaccacctgcgcacgatctggggctacgccatcgagcacgagctggtgacgcactcccaggtcaacccattccgaaagaccaccgtgattccccccaggcgagcaagcaaaactgtcgccgccgaagccatcctgcgcgctcgcagttggctcagcatgcaagtcggcgccgagcgctgcaccggcgatcgtgcacgcatcactcccgcctggttctggctttgcacgtttgaggtcttctactacaccggcatccggttgaatgcgctgctgtgcatccgcaagcgcgacatcgactgggataatcaactgatcctcatccgcggcgagacagagaaaactcataaagagttcgtagtgccaataacggaggggcttgtgcctcacctatcgcggctcctgcaggaagccgagaaagccggattcgccgatgacgatcagttgttcaacgtcaaccggttctcaccgcattacaagagcaagacgatgaactccgaccaggtcgaggccatgtaccggaagttgaccgagaaggttggggtgcggatgaccccgcaccgtttccggcacaccctggccaccgacttgatgaaggcacccgagcggaacatccatctcacgaagtgcctgctcaaccactcgaatatccagaccacgatgagctacatcgaggccgactacgaccacatgcgtgccgtgctgcatgctagaagcctggcccaaggcgcgctggagaacgtcagaaaggtggattacagcggctccccgcaagcctctgccaaaccgaagccatgcgggcaacctctcgctcgagtgggtgaagtgccgccacctgaggccaggacagaaccgtcagaaccaagggagcacacacaagagacaggcattcagggagatgcaaccgcgtgggaagaagcgctaccacagccacctgacaccttcgagcaaagcgtgctgttcactctgatggctcaacacctatcgaaccgtgccgccacggcctccgcggcttccaccgcaacaagcggatctggtggatggggatctaccgcccgaagcagtctcgcctag

SEQ ID NO: 338131 - DNA, 1920 bp, Pseudomonas aeruginosa
atgtttcaactcctttcctggatatccaggaagccgtcccccaccccaccaaccaaagctgccgctgggggattcctcccgcctctgagcagtatggagctgctcggcacgcctcggcgccggcagctactggagaacatctggcagcgtgcctcgctatccaagcagcaattcgaggagatctaccggcggccattggccaactatgccgagctggtccagcagctcccagcttcggaaaaccatcaccatgcccatccaggcgggatgatcgatcacggtctggagatcgtggcctatgcactgaaggtgcggcagacttacctgctcccgatcggcgcagcgccagagtcacagtcagcccaagctgaagcctggtcggccgccgcggcttatggagccctggctcacgacataggcaagatcgtcgtcgacctgcaggttgagctgcaagacggcagcacctggcacccttggaacggaccgatcaaccagccctaccgcttcaagtacgtgaagtcccgcgaataccagctccacggcgctgcatcagcgctactcatccaccaactgcttccgcgcactgcactcgactggctcagtcgctttccagagctgtgggctcaattgatctacctgttcgcggggcagtacgagcacgccgggatcctcggagagatcatcgtgaaggcagaccaagcctccgtcgcgcaggagttgggagggaatccggatcgagcgctggctgcaccgaagcagtcgctgcagcggcagttggcagacgggctgcgcttcctggtgaaggacaaattcaagctgaatcagccgggcggcccgtccgacgggtggctgactcaggacgcactctggctggtgagcaagcccgcggccgatcagttgagagcctacctgctggctcagggaatcgaaggggtcccctcctccaacgcgccattcttcaacatgctccaggaccaggccgtcatccagacgaacgccgaagacaaggccatctggacggccacgatagacaatggtgccgggtggagaaacaagttcacgctccttaagatcgctccagccttgatttgggctgaccctgccgagcggcctgattcctacagcggatcactcgtagttgaagagggcaacgcctcccctgaaaagccggaaacgacctgcgaaatccccaacgatccgattgaacagcgacaggcgccagaagcaaagatgacgctccgccagcctgcgccgaccattgcgaaaccgtcaaacgacatacaggcgattgcgaaaccctcaactgatgatcaagaagaaacagacgatttgtacgcacttcttggtaatatcaattcgccaccagaagagctagacactagccacgactcgccggctgtttctcctacgaacacacgcggggaggagaacctacagcagccactagggaccaaggagccaatagattgcgctcctgaagcaattgaagacgtatttatgcctagcagaagcactgatctgggacagggattcgttggctggatgaaatctggcatcacggcccgtcgcctgttcatcaacgacaccaaggctttggtgcataccgtcgacgggaccgccatgctggtcacgccaggaatcttcaagcgttatgtccaggagcatccggaggttgaaaagctggcccaggccaaggagaccgccggctggaagctggtgcagcgcgcgttcgagaaacagggtcttcaccgaaagaccagtaagaacctgaacatctggaccatcaaggtttcaggtcctcgcaagacaaaagagctcaaggcttacctgcttcaggatcccaaactgctgttccctgtacagcctctggacaacccaagcctcacggtcatcaccgatgccgaaggggatgtcgaatga

SEQ ID NO: 338132 - DNA, 1659 bp, Pseudomonas aeruginosa
atgtacgactatataatcgttggtgctggatctgcaggatgtgtgcttgctaatcgtctttcggccgacccctctaaaagagtttgtttacttgaagctgggccgcgagatacgaatccgctaattcatatgccgttaggtattgctttgctttcaaatagtaaaaagttgaattgggcttttcaaactgcgccacagcaaaatctcaacggccggagccttttctggccacgaggaaaaacgttaggtggttcaagctcaatcaacgcaatggtctatatccgagggcatgaagacgattaccacgcatgggagcaggcggccggccgctactggggttggtaccgggctcttgagttgttcaaaaggcttgaatgcaaccagcgattcgataagtccgagcaccatggggttgacggagaattagctgttagtgatttaaaatatatcaatccgcttagcaaagcattcgtgcaagccggcatggaggccaatattaatttcaacggagatttcaacggcgagtaccaggacggcgtagggttctatcaagtaacccaaaaaaatggacaacgctggagctcggcgcgtgcattcttgcacggtgtactttccagaccaaatctagacatcattactgatgcgcatgcatcaaaaattctttttgaagaccgtaaggcggttggtgtttcttatataaagaaaaatatgcaccatcaagtcaagacaacgagtggtggtgaagtacttcttagtcttggcgcagtcggcacgcctcaccttctaatgctttctggtgttggggctgcagccgagcttaaggaacatggtgtttctctagtccatgatcttcctgaggtggggaaaaatcttcaagatcatttggacatcacattgatgtgcgcagcaaattcgagagagccgataggtgttgctctttctttcatccctcgtggtgtctcgggtttgttttcatatgtgtttaagcgcgaggggtttctcactagtaacgtggcagagtcgggtggttttgtaaaaagttctcctgatcgtgatcggcccaatttgcagtttcatttccttccaacttatcttaaagatcacggtcgaaaaatagcgggtggttatggttatacgctacatatatgtgatcttttgcctaagagccgaggcagaattggcctaaaaagcgccaatccattacagccgcctttaattgacccgaactatcttagcgatcatgaagatattaaaaccatgattgcgggtattaagatagggcgcgctattttgcaggccccatcgatggcgaagcattttaagcatgaagtagtaccgggccaggctgttaaaactgatgatgaaataatcgaagatattcgtaggcgagctgagactatataccatccggtaggtacttgtaggatgggtaaagatccagcgtcagttgttgatccgtgcctgaagatccgtgggttggcaaatattagagtcgttgatgcgtcaattatgccgcacttggtcgcgggtaacacaaacgctccaactattatgattgcagaaaatgcggcagaaataattatgcggaatcttgatgtggaagcattagaggctagcgctgagtttgctcgcgagggtgcagagctagagttggcatga

SEQ ID NO: 338133 - DNA, 303 bp, Pseudomonas aeruginosa
atgaaataccgggcgctaaactgtgagctctatgattttatagagacaatctgcatgtatcattcctttctagagttacaaacagtagacggcgtcaatatcaaggccatagctttaaccaccaagacaacagccaataaagaagagtatcttcagctggagtcgcctggtttcatccaggaggtgaggctggacatgatctctgtaataaccttattggatgggagttcaaatggacagaggaaagaatttaccagcagaccggacaacgatgtatgcgttccagacgcgcacgagcgataa

SEQ ID NO: 338134 - DNA, 1062 bp, Pseudomonas aeruginosa
atgccccgcctttccgccctgctgttcctcgccctcgcaccctggctggcccaggccgaggagaccctgcgcgtctacaactggaacgactacatcgacccgcaggtgctcgagtccttccagaaggacaccggcatccgcgtcgagtaccacaccttcgccaccgccgaggaactggacaaggcgctgcgcagtggcgaggcgatcgacgtcgccgtcccctcccacgacaccctgccggccctgctgaaggacaacctgctgcggccgctggacttcacccagctgcccaaccgcagccatctcgaccgtcaattgctgagcaaactggccgcggtcgatcctgacaatcgccacgccgtcccctatctatggggtgccgtaggcctggccatcaataccccgcaggccgaagccgcctatggcgggccgctgcccaacagctggagcctgctgttcgacgccagccagagccagcgcctgaaaagctgcggcatcagcctgctggacgcgccggacgaaaccctggcgatcctcctcaactaccagggccgcaacctcggtcgtactgcgccgagccaggtacgccgcgccgccgaggcgctgcacggactgcgaccgaacctgcgctacgtcgacagcgagcgctacatcgccgacctcgaaggcggtcgcctctgcctggccatggcctgggtcggcgacgccctgcgcgcggccaaggcgggccagccggtaagtttcgaggtaccgcaggaaggctcggtgctgttcatcgacaacctggtgatcccggccggcgcccagcatccacgcgaggcgcaccgtttcatcgactacctgatgcaaccgaagatcgccgcacagatcaccgccgccaccctctaccccagcggcaacgccgacgccgccggcttcctcgatcccgccctgcgccagcaaccgggcctgtatccggaccgcgacaccagccgccgcctgttcgccctggaaacgccgccggaaaagctccggccggtggtcgacgagatctggaaggccttccgcggcgccagccactga

SEQ ID NO: 338135 - DNA, 975 bp, Pseudomonas aeruginosa
atgcaaaaaaccttttccgaagcagaatacgccggcaagaaaaagctgactcgacgcgaccggttcctcaacgaaatcgatcaactggccccttgggcgttgctgggagcccagatcgcgccgttctatgccgacaacaccggcaagcgcggcaggcccagtattggcttgtcacgcatgttgcgcctgtacgtcgtgcagcaatgcttcggtctttccgatgagggcacggaagatgcggtgtacgacagccaggccgtgcggctgtttgtcgggattgacctgagccacgagtccgccccggacgcgaccaccctgctgaagttccggcgcttgctggaaacacaccaactcacccagaagatcttcgccgcgattaaccagcatctgagcgccaagggcttgctgctcaaagaaggcaccatcgtggatgccacgctgatagcggcgccgccttcgaccaagaaccgtgaaggcaaacgcgacccggagatgcatcagagcaagaaaggcaaccagtggcacttcggcatgaaggcgcacatcggcgtggatgctgcgaccggtctggtgcatagcctggtgaccaccgcagccaatgttcacgatgtaacgcaggcccatgcactgctgcatggcgaagagagcactgtgtttgccgatgccggttacgttggtgcgcaaaagcgtgaggaaaaccaggacacgccagttgaatggcaaatcgccatgcggcccggcaaacgcaaagccttaccggatacgccagaaggaaagctgctcgatcaactggagttcctgaaggccaaggttcgcgccaaggtcgagcacccgtttcacgtggtgaaaaaccgctttcatcatcgcaagactcgctaccgtggcctggcgaaaaacactgcgcagatgttcagtctgtttgggctggccaatctgctgctggccaagaggcatttgataccaataacgggataa

SEQ ID NO: 338136 - DNA, 189 bp, Pseudomonas aeruginosa
atgaacgaagaaaattgccaagcaatgcttgaacatttcagcattagaatttactcattacaaaaagaattcgacgcttacaagaatgaccagatgatcccaagcgatgaaagaaaagccgcaatgttcgaccgctatcaccgcattagagcgttaaaattagagttgctttacttgaaattgatttga

SEQ ID NO: 338137 - DNA, 981 bp, Pseudomonas aeruginosa
atggcattggtgggtagacgcaatggccgtaatttcggctacggcaggcaattgagctacgcagggccgcaagcgctgaaagacatgttcggcggcggccactacggcacggtgaaggcacactgtgatcggtggcaggcattcgtgaaatggtgccgctccgaacaggggcccggcatcaatgattcgcggcagattgatcgagagatcttggtagattacgcagcgtacctgcgcgacctggttatgcgcggtgatcttgctgtcagcaccgcgcaaaaccggctgtccagtgttaaccggaccatggcggcgcttcgcggtgatcagtacgtgaaattgcccagcccgagcaaggcgttgggtatgcagcgcaccgaggttcgacagtcggtgccgcagggccaagaccgcgaacaggttaaacagatcgtcgatgtgctttgcagccatcatcaaatgcgggccgccgcgatggttctgttggcgcgagccaccggcatgcgtttgcgtgaggccatcctggctgacctgccacggctaagccgcgaggctaacgacctcggcagaataaacattcaggacggcaccaaaggtggccgcgccggtgcctcagcgacacgttggattgcggtggacgaccatgttcgaggtgcgcttggattcgcacggcaagtatcgcctgcagctagccgcaacctaattgcgccacacgaaagctatctgaatgttctgcaagaagtcattcgtccagcacgggccatcctgcatgcgcacaagctcaaaggctttcatgagctaagagcggcgtacgcatgtgaacgctatgagcaaatcacccaacaccccgcgcctattaacggcggccaatgttgccaggcatataggaacctagatcgtgaggccagaaggcaaatcagctatgagctgggacacggtcggatcgatgtgatcgcggcctacattggaggacggtcatga

SEQ ID NO: 338138 - DNA, 963 bp, Pseudomonas aeruginosa
atgaatcgtcaaagcagtcctaatgaactcaagacaattctgcatacgctgatatctacttacagtccagctatagacgacttaatgattaagacaaatggtacgtcttacttcgcgcattttttagagccagacataaattctatacagtcatttcaccaagaggatcagttcaatgaaatgatcaaggtttacttgatagggattcttgaacgatgccacctgacgtgtattacatcactggcacgaaccaataattggctaaaatcttcactctcacaattagaaagcaataacttattaggattttccgcttcgctgcgcggtctgctggaagccacagctgatgctcatgatgcaacattaatcacgcttaaatacttatataactgctttccgtttatatatcttcgcacagccaaatcaaatacctcagcaaagcctatagttctggaggagctggaggacaggcttatccattacacatatgcacgcaaacatcctaaaggttcaactcctcttccacatcacacgaataaatcaaatgctgactatattaaagctatagagcagcatggcgccactggagcaatgcaactctatagcaagctttgcgagcttacacacccagcctcaccctctataagctgcttccttcagcagtcagataaacatatttcactggatttttcgcaggaaaaacaaataatcaatggattgctaagtgagtattcgctcacgatagaacgaatagctacgctcaccattaattcggcgcttacgtcactcatcatactaaaaaagatggggctcagaacaccggcgcccgcagaaagttctttttcttatagtgcggacatatcaaaaattcttgggcgtatcaatgatttcattgacaaatcaagtcgtgatggttttatttttgcagagagcatgtggcacacaaatcccactcggatatag

SEQ ID NO: 338139 - DNA, 3888 bp, Pseudomonas aeruginosa
atgtctgctgctggctcctgtttcttcttcacgtggaattcgcgagctcaatcatttcttctggagatgcaggtgaacgactctctatctcaaccagatttgcaatccctgcttgaggcgatggccgataaggctgcctgggcgacttccagtcactctttgggtgatgtcgcgaaggataacgctgagcttgtcgccgaactcgcaaactttgagcgggcaggcacagtggctttgctagctagtctgctaacccttcctgcacatcagccagaatgtttacgactggagttactggttgcacttgccctcatccactgccaaggccctcaggtcgccactgccgacgacgcacgccgctggtatacgtctattggcgcatcgaacagtgtagttggggaagatccagcagaggatgtgttcgtgtcaatcgttggtaacgtcaagggcgattaccgcattctggaaggaatttgggaggcctcaggcttttatacacagctgatggtcgacattgttttcgctatgcctgacgagggatactttatccctcttaagcggtccatccaggcgcttctacagctttcggacgttatctgcgccaactctggtctacgtcggtttgagccgggtggtcaaactagctccggctcgcttgagaccgatggccttgacgcgagtgttctccgtacacgtgtcactttgacgaagggcatgctacggtcggctggtatagcgattgctgatctatccccatttattcttgatcacacacaaatcagtaccctagctagccaggcgcccagcgcgggggtattggagcagcgtccgttgtttcgtgtaggtgatggccttgtcgtcgtgctgcctactgctctatccatcgcgcttcgtcacgcggtgatagcgttcgcagtgcggaagggagagttgggcaacctcgacagggcgttggctagtgtccatgcgcgcactttgtctcaaatgcctgcatttggtagcggtacgcggatgcggttgtcctgggataaggataagacaacccgatcggcgactgtctactcctcagtcgacgtgggtcacttcatggtgctccagttcgtcctgccctccatgcagcaacacaccaatgaaggcttcagcagcatgctccggctcgatgaggaaacagcgaatctcctcgacgaacgggctgcaaaaaccgctactgaacttgccggccaccccgactttcagcgtggcatagtcgtgcgtgtaggttgtggctggggggcggggtttgtcggctcggttcccgagctacctgcagaatggcagttcgagtggatgactagcgcagactttttccggttaggttcactgcccgatatgtccgcacttgccttctggcgcgtgcaggacgccgaagaaataatagcgcgagccggtgtgcgaataatcaatgtcaacggcattctcaaccttcttggctgggcacgcgccaacgacggccatatggttccgcacaatcaactgccggaagggcgtatcaccccagagcgccctctgatgctgacaatcccaacagatctgattcgtgacgtgcggatggcagcagacatggggtatgactggcaccgtatttgtgacaacaacggcaggtggcatcgtgttatgcggccgtcagcggctgacttcttcccaaccgaacgcgaaagcaggtgctatgcgtccatcgatgaccttgaagcacatcggctaagttgtgtgtatgaggggcagtgcaacctctgggtgatgattgaagcacctaatgctcaagatcacatgctccttgctgagttagcgaagatggtacgcacttggcttgggcgaattggcgaggcggttgaagccattggtgagcagagaacaaggaagtccgtgaaggtctacctgcactttgaaggcgactgtgatgttagtcggttccaggatgagcaggtgccacttgacctaaataccttctggagtatcgagcgtgtccgtgaacagggcgctatacgggtttttctgaaagacgggtatcttgcaggcttccagacgccggacaaccgcgcagaacgcgctttagtacgcgcccttggcactgcctttgccacagttttgcgtatcgatgcaccgagcgagcaagggcttgaaatcgagcgaatagcgattcccaataacgtcgcccgtagcttccatattatgaaaacgttcgacttcagtgaccgtgtaagtggttccctgagtcgacaccttctgactgttgagaacaccgagtcaggtgcggccagagttgggctaggctggcgttcggttgctagcgatgctccggcccaatacgtgggtaagaaggcggtcggcaagctcctcaacgacgtagtagatgtgctccttcatgacatgcaggaagaactttctagatttgatcgtttgaaaaccctcgaccgcctgcttgagaactgcgaaagggcacgaagcgaagaaaatcattggcatcggacggccgctgccgtcctcggactgcatgccggtgaggaaggagtcgaggatacgatcgccaagcagttgggacgttttgctggtgcggcactgacctctaggttagtaatcgaactggccatttgcgcttgccccaataagggggggatggaaccctccgacatggcgcttggtcgcctcctcgcgcaagcagcactactctttcgcatcggcggcatgtcggacgctgtacgtttcggggcgctgccggccgaggtccaaatatctcccttaggtgaccttcttttccgcgacgagcttggagggatggtgcttgagcctttgctgtctaaggcgactaacgagcggttcgaagctcatgctgcaagattcgagcagcattacgcaaaagcggaagacttcgaagaattgactgatgaggacgaatgttgtgccccgaccacggtcgaagatgacaccgagacctttctggcactctggaagtcggagatggggtttacgctcgaagaaggcctccgtttcgtccatgcactcgagttaattggcatatcgaaacagacggcaattttcactatggagaggagccagttggatcttgcgggtaagtccgccgggcttgacgataatgtcacatccgcttttctcgaccaattcatcctgcgaactcgcccaaagtgggatgaggtgaccgacgcgtttgacctatctgatatctacccttggcgctttgggcgacgcctatccgtagtagccaggcctttgttacaggtggaggacagccaagacccgctggtgatcgtatcgccgggacaactgggtaactctctgcattatctctttaacggcgcacatacagggcgactcaaacgagagtttttccggactgacgggatgagagatgaatggctgggggacgctcgcgaggggcacactttcgaaaaaacattggaaaaaaaactgctagacgcaggatggaatgttcggcgcggcattagcttccctgagatactgaggaggaatctgacgacaaacccaggcgatattgatctgctagcttggcgcccggaccgtaaccaagtgcttatagtcgaatgcaaggacctttcacttgctcgtaactactcagaagtcgcatcccagctctccgaatatcagggtgaagacattaagggcaaaccggacaagctcaaaaggcatctgaatcgtgttgcactggcgcaagagaatcttcctgacctagcacgattcacatcagtcaaagatctcgaactggtgtcctggctcgttttcagcggggtatcccctgttgcttacgcgcagtcgcagatcgctgcactgcaaggtacgtatgtcgggcggccagaggatcttttgaaatactga

SEQ ID NO: 338140 - DNA, 3069 bp, Pseudomonas aeruginosa
atgacgtcaggagtttccgcctgggcaatacggcgccctatcccaacgttggtgctgttctgcgtgctcacgctggccggcatcgtcgccttcggccaactgccggtgaacgccaatccctcggtggctttcccattggtcaatgtgacgattgtgcaaaccggtgcaacgccctccgaaatggaatcctccatcactcgccgcatagaagatagcctggcaggcctgcctggtgtccgtcacatacagtccactatccgttcggcagtcagcgaaacaaatattgagttccaacttgggaccgatcccgacagggctgcaaacgatgttcgtgcgcttatcggccagattcgcggttcgctcccgcaaaccattctcgagcccgtgattcaacgagtggatgtcgaaggtggcgccatactcagctatgtagtgacgtcatccacccggtcggtactggagctctcgcgatacatcgacgacaccatcagtcgggaaatattggcgattcgcggtgtacaacgcatggcacgcttcggtggcgccgaacgggagcttcgtattcagatcgacccggcgatgttgactcaatatgagttgagcatcgaagagttcaacgcccaactccgcagtacccatacggaaacacccggcggttacctggaggatgctggccagcgtctgatgatccgcgtaccggcccgccagacgtcgctggagtcactgagagaaatgccgatagccctcgcccagggaaactggctaccgttgggcgagctggctgaagtccgagacgattcaagcgaggcccagggttttgcccacttcaacggcgagccgacggtgggcttttcagtatggcgcagtaagggagccagtgacatacaggtcgccgaccgtatcctccagcgactgacctccctacggacgtcatatccggatatcaacatccgcgaggtttcatcgaccgtagactacacgcgagctagttttcgcacagccatgcagacattgatcgagggtgcattcctgactgtgctggtggtcctgctctttctgggtgactggcgcgccaccctgatctccgcgatagccctccccctatccatcattccggtatttctggtcatgctgggactggacttcacgctcaacagcattacgatgctggcgctgacattggtaataggcgtggtggtggacgacgccattgtcgagatcgagaacatcgatcggcatatccacatgggtgagcgcccctaccgtgcggcgttgcaggccgcagacgccattgccctggcagtattggcaacgaccttgaccattgtcgcggttttcgcacctgtgagtttcatcggtggagttgttggccagtattttcgccagttcggattcaccgcggccatagcagtgctggcttccctaatggtcgctcgactgctcatacccttgctggccgcttatttcctgcgccccgcacggaccgcgatccaaacaagcaagccgtcccatgggcgcttgctacaggtttacctgcaactactagcatgggccctgcggtaccgaggcccaaccctggtaatggtatgcgtgccatttatgctgtcactattactgatggcaaaattgccaagcggctttctacccatcaatgacaacagtctggcgttattacgggtggagtttcctaccggtagtgcgttggtagaaacccaatcgatcgctcgtcgggttaccgaaatgttacgtgcacacaaggatgttaagcatgtattgacgaacgcagacggtctcaacgaagccattttcaccatcgtactcaagcccaccaaggagcggcggttgtcccgcaaggagttcgaactggatatacaacccgtgttggccaagctaccaggcctgcggttccagttcctagccgagggtggaggtcgcgaagtctctgtgatgttgagcagtcacgatcctcttgcactggccaggactgctcatcgacttgccagcgaaatgcgcagcatgccgcgactcaccaatgtacagcccagcctggcccctccccgcccggaactagtcgtacgcccgcgattcgcagacgcggcacgactgggggtgaataccgacagtatcggtaatgcgctacgcatcgctactacaggagagatcgacgcacaatccgcacaatatctgctcgcagatcgactgctgccgatgcgggtacgcttgggcgacagcgtccgctccgacctcgacgtacttcgggggttacgcttgcctaccttgtctggcgaaggcagcgtgcccctcgcagcggtagccgacatcgagtatgccgagggcgagtcacgcatcgaacgctatgaccggcaacgaagcgtcactctggatgcgaatctcgcttccggctcgctaggtgaagcacttgacgaaattctggccctaccgacgttcggcgcactaccacctggcgtacagcgcataaatcatggcgactccgaatacatggaagagatgttcgacagtttcgcagtcgccatgggtgccggcatattggcaatgttcgcaatactaatattgttgttccgtgacttcctacaaccactgaccatcctctgtaccttgccattgtcactgatcggtgtaattccagcgctatggctaatcggtgccgcaattgatctgccagcgatcatcggcatgctgatgctgatgggaatcgtcaccaagaacgctatcctgctggtcgatttcacccagaacggcatgctgaacggcttggatcgtcagtccgcgctaatggccgctggagcggcacgagcacgcccaatcatgatgaccaccgtggccatggtggcaggcatgctcccggcagccatcggtttcggagctgattcgggattcaggattccaatggccgtcgcggtgatcggaggtttggcaacgtccacattgcttagccttgtctgcgtaccagtagggttctcctgcctggacgacctccaccattggctgaaacctcgtttggagaaactgacgacgatcaccccggcggacctcaaggaaacgcaataa

SEQ ID NO: 338141 - DNA, 537 bp, Pseudomonas aeruginosa
atggaagcccaggtccacaccagcggcagacagggtctccaatcgggctcggtacgcctgctcagtaccggagtggatctctcgaccggttatggtcactcacgcatcgccatgaccgagcaaccgtcgtccttcatccgtctgggtagcgtcggcagtgcacgtatcattctggcccagcgcgatgtactggcagtggatatccgcgcactgcgctacgccaaccagcccgatcgggaacaggagccagtacaaccctttgtcttcgtggtggacgccaatcgtgtcgcacgtaccccggtacaactgggcatacgggagggcggctgggtggaggtacgtgcaggcttgagtcccagcagccgtgtggtaattgctggcgccagcctgctacagcatggtgatgtggtccatcttcatgaggtcgataccgagactggcacggagagagtgcaacgcaaggagctaacacgccgccccaccaaggccgggctgaaaccgtggaaatatccgctgatagtaagagccgggatatga

SEQ ID NO: 338142 - DNA, 1203 bp, Pseudomonas aeruginosa
atgattaccgacgaagtttcgccaaccgcacacagccacgagacactatggcggtggatcagcctgcgaatgatctcgctcgcttttatcgccctggcattggtaggcgggggcatgtggtaccgcttcgccttatggaatgccaatctgcgcgaagcgattcccgaaccagtcaggcaagagcttcaaattctggaggctgcgcccgaaaagaaccagatacgccttcggcagatatatggtgagcatctgtacggggattatttcgcgccgaacgtgattcgagaagacatgctcttcttcgtcggcctggtattactcgccctgcccctgattgttgcggggggcgtctgggtatcgttcaggttgtctcgccaactcagcgcggtcgccctatccgccggcgagatagcccagggtaactttgcatccagggcctcactggtagcgcatactccacctgcgctgcagaatctaacgaccaacttcaaccatatggccgcacgacttcagtgctacgaccgagaactgcaggagtccagtgccgccatcgcccatgaactacgcactccgctgaccgccgctgtcggccgattgcagggaataatggatggcatattccaagctgattgcaagcagctggaaactatcatgcgccagttgcatcagctatcccggctgaccgacgatctacatctgttgtcaatggcccatatcggtaagctcgagctcagccaagatgaaatcgccatgaaggaactgtgcgaggaacgagttgcctgggcgatcctacctcagaatgctgaccattttcggatacacctttcggtttcggagcatctgaaaatatgggcagaccgtgaccgcatcggccagctactatcggtgttgatcgacaatgcgcttcgctatgctgcaccgggcaacgaattggttctgcgtgcagactccgccgacggcattatgaccctgctggccgaagaccgcggtcccggtttcgcaagggaacacctggacagggtatgcgagcgcttctggcgggcggaaacttcgcgttcgcgacatgctggtggtagtggcctggggctctcgatagcttcggcgatttgcgcggctcatggcggagatctgacagctatcaaccgtcgcgatggcggcgcacagatccgaattcgcattcctctgaatattccttccacctag

SEQ ID NO: 338143 - DNA, 711 bp, Pseudomonas aeruginosa
atgagccagcaacgcatcctgatcgtcgaggacgatatcgacagcgctgaagtaatggcggcttacttgaagcgggacaatttccagactcagcacgctgccgatggaaagcaagccttggaacttcacgcacgctggcggcctgacttggtgttgctcgatatcatgctgccgggtctgagtggcaacgaagtcctgggagcaatccgccgccacgcaccaacaccagtgataatggtgacagcggtcggtagcgacacccaacgaatcagctcattgctgtatggcgcagacgactatgtgatcaagccatacaacccgagtgaagtggtcgctcgcgtgcacgccgtattgcggcgttggctggggcatgctttatccgcggcgggacggctgcgccatggccagttagttctggatatcgacgcagcactggcctatatagaggtgaatgccgatgacgacagcaagcagattcctctcgacctgacacggaccgaatttcatcttctctcgctgctgatggctgctcccagcacgatgttttcccgcagcaagctacttgcgacctgcctcccggaaagcgacgcaatggagcgggtgatggacgtgcatatatacaacctgcggcgaaagctagaactggcaggtatcaccgatgtgctggtcacggtgcgcggcctaggttaccgcttcaggaatcccacatga

SEQ ID NO: 338144 - DNA, 816 bp, Pseudomonas aeruginosa
gtgaactacaacgacaagcgtcttatagcggtctgcggcggcattttgctgctgggcattgctggtactgcgaccgcccaaaccgagcacgattcggaaccgcgttcgcaacgagattcagaaaacagcctaggcctcggagtcggaattgcccctgagtatctgggagccagggatagccgagttcagttggtgcccatggccgtagtcatgcaagggcccttttacctggacagtaccagaggtgtgggctatcgccatgaaacccggtccggtttgttctttggccagtcgctcaattgggatccggggcgtaccgatcatgactccaagtcccgtccaggttctgatcggctacgcggtatgggcaccgtcaaaggctcgctaatcaccagtctggaggtgggatactacttcgcaccatggttggcagttcgtgccgaaagcgagttcgcactgaccgagcgtgatcgtggcaatcgcttcagccttggcctggaaggtggtttatggagcgagggaaagaacgatatctggtactcgactaatgcctacttctccgatgggcgctttgctcaatcctatttcggagttacctccgatcaaagtgctgccagcgggttctctcgctacacgccggatcgaggtttctacggctattccgcttcgatcaactgggaacatcgtttcgacaaacattggtcggcgttgatcagcgtcaatgccgtcagcttggccgacgatgcgcgcaagagccccatcgtgcaggagagtctcaataccttcgccctgggggcaattaattacatcttttga

SEQ ID NO: 338145 - DNA, 1269 bp, Pseudomonas aeruginosa
atgaatatggaaagccaagtatccgatgatcgttgggggttcaagcagtttgtcaagtcatcggtgtcagagggttttttgcgccctccggtaatcatgcagggtatgtctggtccgaacatcacgcgtgatggccagccattcgtcaacttctctggaataaactatctcggctggcagcaggatgagggcgtcttggcggtgttctgcgactcggtcatgcgttatggactgtcgaccggcggttcccgtgctactcaaggcatctgcgaacctcaccatcggcttgagcgaatacttagcaagcatcatgggaaggataaaacactgacctttgcgtcggggatgctcgccaatttggggttcatcaatgcgatgacggccaaattcaacttctcttccaccagcaagatcgataatcgtgatgcggtattagtcttcgaccgcgattgccattggagcctatggaaggcggcagctcacctgaaatacggcgagcagttactggcattcaagcataatgatgtcgccgacctgaggcggattctggcgaaactcgggaacaagaaggcgattgttgttttcgagagtatctattcatccgacggcagtgtcgcgccgatcggcgcgatcctcgatgcgtgtgaggaggtcggtgcgcttagctatatagatgatgccaacggtttcatggtgtacggtgaatcacagagaccattctacgaagacttccagcacatgcggcgagctgacttcatcatggtttcgctgtccaaatcggttggtctcgagggtggtgccatcagtgccaacgccgagttcatcgaggcttttgaagtactcagtggtacctcgatcttcactgcggccatccagccaccgactgcatgtgcggccgcaatgatcattgagcggctacagtccgaacctgaaatcatggacgcctatctgcggcgtacgctcgagtttcgccatcgcctgttcgatttgggcttaccgttgaatgaagaaccatccttcattacttcggtcctgatcggcagtgacgtcagggccgaggagatgcgtgaggcgttggagcaggaaggcttctgcgtccctattttccgctacccggcggtgaagccgaatcaggcattgatgcgtctgatcctgcataaggatcatgccgactcggatgtagagcgtttcgccaactgtctcaagatgctgctggatgcatccatcgacgatatgaagtcgatggaccgcgtagctctgtggaattga

SEQ ID NO: 338146 - DNA, 951 bp, Pseudomonas aeruginosa
atgcaagccctcgagtcgagcgggctggactgccgatttctctatgccgttgccttggatgactctgccgtcatcgctgttgcactggcaacgctctggcgtataccgctgctaggtggattgggggtgcgcgtcttgaccacaggcagtccggtcaataccggctcgccgctgatcgtggcggctggtatcgatcccgagcaggtcgcggagccgcttttgcgagcgatggaggcgaaggctgccgagcttggtgtgcatctcttcgttggtagggatctgcctacggccgatttcgccaacctgccgcgtctggagcgactttatgcatgtgcatatctggagttggtctggtccgactttgagcggtacttggccagccgccgcaagagcaagtcgatacgccgggatatgcgagctatcgagaaagctgggtacgttctggaggttcgcaagggtaggcgtctgagtgaagacgaggcggagcgcctacagcaactctggctgcagctctaccacaagcatcgctcgccggaccagatactgatcacgaaagccttctttcagcggatgagcgagctggaccatgcgatctggctgttactgctcaaagacgggcatatccaagcatttgatttgtgttttgccttgggcgacaccctggagtctacctattgcggcgtcgacctcgtctccagcggacgtcttgccgtacatcgggtgatgggctacgagatcgtccgctatgcgattcaggaaggcttcagaaccgtcaatttcggtatttctaatgaacagagcaaagtcgaagcgggttgtcggctccgtgttcagtatgcgtgggtcgaggcctatcccaaatggctgggcgggatacttcggccgatagcactcaaggccatcctgcacgattgcgctaccaatgcgtcggatcaagacgatgcagcgtga

SEQ ID NO: 338147 - DNA, 1218 bp, Pseudomonas aeruginosa
atgaccgtgggtgttggcgggagtacccctgcgcaggcgctggagcgtctgcggaacatgatggacggcgcgcagccgatcggcctggcgtcttaccgtgcgcgcatcgccgcggcacaggcgtggatgagcgagcatggcatcgccgcggcgtacctgcatgcaggcagcaacctgcgttacttcagcggcgtgcaatggcaccccagtgaacgtctggtgggtgcgctgctgcccgccgagggcaccctcgaataccttgcgccgaccttcgaggaagggacggtgcgcgacttccaggtggtcgacggcgccatccacacctgggaggaacaccaggatccctaccgcctgctgctcgatcgcctggaggcgctcggcgtgggtgagcgcagcacggtcgcactgtgtccgagcctgccgttcggcatgttcgagcgcttgcgccaactggcgccgggcaggaacttcgtcagcgccgcgccgctgatcgaccagggacggatgcgcaagtcggccgaggagctggcgctgatgcagcgggccaaggacatgaccctggaagtgcagaaggccgcggcgagcattctccgtgaaggcatcagcaccaccgaagtcgccgagttcatccaccaggcgcaccgcaaggtgggcgcgcccggttcgaccttctgcatcgtcctgttcggtgccgccagtgccttcccgcatggggtgaagcatgcgcaggtgctgaaggatggcgacatggtgctgatcgataccggctgccaggtgcacggctaccagtcggatatcacccgtagctatgtgttcggcacgcccagcgcacgccagcgcgaattctgggggatggagcgcgacgcccagttggcggccttcgaggccgcgcgtctgggccagccctgcgaggcggtggacgccgccgcgcggcgttcgctggaggccaacggcctggggccggactaccgcctgcctggcctgccgcaccgcaccgggcatggcatcggcatggatgtccacgaaggcccgtacctggtgcgtggcgatcgcacgccgctggatgtcggcatgtgcttcagcaacgaaccgatgatctgcgtgcccggcgagttcggcattcgcctggaggatcacttctacatgacggaggaaggaccgcgctggttcacccaaccgagcccgtccatcgacgatcccttcggcctcggcggctga

SEQ ID NO: 338148 - DNA, 1101 bp, Pseudomonas aeruginosa
atggatctacaggaaatcattaagaaaagcaaaattcttaagcctaaaagtcaaaaaaagatgggcgaaaacttgcttcatttgatagatcaaatagaaagctccgtaatattagagggaccttaccgcttggttatagattccaatataattatgcgattcgaatcatatcgacaaggggttatctccgaagggctactttcgattctattgacgtttatgcttattagacgattaccttaccgtttcgatatggtggtaaggccaacggttttctatgaatatctcaggcaaaaaaatctgacaagcagccatgagcactggcgtaatttcaaagaattaaaagatctagtcgaggaggagctaggtgctaagctattttttgatggaattgagacatatcaaggcactgagcattatctaaagttgatacagagtgattcagacaaaatcgctaaagccctaaggttgtatcaagaaaaaaactggaggttcaatttcgttcagcaggcaggccgcggttttgtaggcatgctgctatctgatccaaggttcatattagtcccgccggcgttcgctgctgaagctctatactcccccttaggcttggagtatttcgacgagcgaaaagctagtcgtttctttatcgaatatattgaaaagaatctcattgagtgtgagcataatgacaaggaggttattgaaagatatagcgataaaaaagattttttgttcaccaaaattctgaggcttactcctaaagggaacttggtggggttggcggatctagatatatacaccacatgcaatgttcaaaatcaattttcggatcagagccactctcgttatgcgccagcatcggcaggcctcacaatcgataaaaatctagctctagcattgagaggggcgacctcacaccacatcacgtcgggagaaatcaactgcggacctgataatgaaaacgacattgatgcaaaaatggacgcgttccaggaagagcataagcgcatgcgggaaagtgaaaaacgccatcgtttagcgtgggaaacaagtaaagcatttatggtagatattttggcaaaaggcgcttttagatcgtag

SEQ ID NO: 338149 - DNA, 1476 bp, Pseudomonas aeruginosa
atggatgcgaccaaacgaaaaattcgaatttatttttcagattttttcgatgtgagccgggaaaagattgaatcttatggggcattcaatatctccctaatcaatgacctacccttgtttgtggatccatttttgctgttcaatagtgacgatacaacctatcaggaactgcataaaaaaataattcaatatatgcttttcttaaaaagcaagtcttctttagcgttaccttccggcctaataaagagctggtatctattccctgaagtcaagcaaaattggtttgggtttagcaagtcgggaaatagtgggcgcgggctaggcccatctttcgctaaatctctgcaagtgaatttcaaaggtgtgttctctgattttggtaatgaaacgaacggggcaactcatataggcaagctcacactagtcaaacacggagttggaaaagaccaaattagtgactttacctgcaacttaattcatggatttttggctgaatacacagagaagttcgcaaagaaatacatcaacccgaccaagcttcagaaatttactattaaaaaagcggagtttaattacgcaactgaatcgtggaagtcaaaacagtatttgctaccaaaattcgggggtgagcatgtattgcttactccagtggatattttaactaaagacgaggcgtggatatctcacaaaggatttatcgaagacttcagccaagtagttggcagcgtacccaatgatcagctgcgcgaccaaataaacttatacttgactaaggttatgccggcagaccctacgaaagatgaaagggctatcgctttcgaaaaaaccattttgcaataccctcagctgatggatgtttacgttagtctacaggaggccaacaaggatgttgcaagttcatctagcttcgaaaaagtctctttggcccagaagctatttgaagagaacttgctgagactagtagcactactagacaaaactaagttctatgatgctgaacccaatagctacgaagcgggcatgcaacgagtccagtttctcaagcatgtcattgaaaaacaggacggctaccgccttttttacatcaaaggcgtcccaatttcacgcgaaagcgatttgcaaattatgtttaaacttacgtggtttgcttctaagtttagcgctgacgcagaggtgaacaatggccggggaccagctgatttcctagtatcttatggcagtcaagacaaatcaataattgaattcaaattagccaaaaactcgcatatggaaaaaaacttgcgcaatcaggctaaaatatacagcgacgctgccagagcaagcaatccgccaattatggctattctatactttaatttcagcgagcgagataaagtacagagaattatgaccaagaatggtttatccgacacaaaacacatcgtacttatcaacgccatgccaaaagagtcggcctcgaaggctgacattgactga

SEQ ID NO: 338150 - DNA, 225 bp, Pseudomonas aeruginosa
atgatcgactggagtaaagtgataaccgccgagcaacgggcgcaggagcgccagaaggccgagcacgacgcagtgtttgttgcgagggcccgtgcctaccggaaagagagtgacccgctcaagaccgaggctgaattcgatgcgatcaaggccggcaccgagccggactactctgactggatcgccaaggtagaagagatcaaggggcgatacccacttccttga

SEQ ID NO: 338151 - DNA, 1050 bp, Pseudomonas aeruginosa
atgccttggtattccacaggcacggtttccgtcgtcctcaattcggacacggtgaccggcagcggcaccgccttcagcgccaatgcgcgcgccggcgatgccttcagggggccggatggccgctggtacgagatcggcaatgtcgccagcgccaccgtgctaaccatcaagcccgcctatcagggggccagtgccaacgcccaggcttattcgatcacaccggtgcagggttacccgaaggcgctggcggaccagtttcgcgatctcaacaaccagtggggttctcttctggcggccgtaaaaccgtgggcgatcgcgtcgacaggttcacaagcgcaggtcgacatggggatcactgaagtcggtcgtgccctcaatggcgcgtctaccgcggctaacgcattacggtatctgggaggcgtgacttcgcaaatggcgtttactcgttcgtacgcagactcgaatgcgcttcccaacgagtgcggctttttcgggattggactgggaccgtggtccaacttgccgccgggtatcgacgcactgaacccgatcggctccgctatctaccagaacgtctatgacgccagtaccgcctaccagctgttcattccccgaacttcgaacattctctacttccggcggaaggtcgccggcaattggcaagcatgggtccgtatgctctccgatgcgcagttgctgggtacagtggcgcagtccagtggagcgcccattggggcgatcatggagcgtggaagcaacgcgaacggacagtatgagcgcttcgccaacgggacacaggtatgcaccgtgagcctgctcggcgcgaatgatcgtgtggccggacagggctacaccttgacgctacccgcgacgtttacaggcgattgggcagttggggtttcggttagctgggcttcgcactcattcaacccggcggcaaacaacggcatcagggttgcgtatgccaacggcaatgcgctgacgttcatcctctcagaaaacctggggacaaaccgtttgatcttttcgtgtgtgggaaggtggttctga

SEQ ID NO: 338152 - DNA, 1035 bp, Pseudomonas aeruginosa
atgcccactccgccctggtctccccgccgcagcgccatcagcgcgcacctgctgatccagttcggcatcgaccgcggcctcggcctggagcagtgcctggcgggtagcggcctggatattcgcctgctcggcgatccctccggggaaatcgacgcggcccaggaactgagcgtcgtgcgcaacctggtccggcacctgggcgacgcctgcgcgccgggcctggcggcaggcctgcgctatcacctcaacgcctatggcatctggggcttcgccctgctcagcagcccgaccttcctcagcgccgcgcaactgggcctgcgctacctcgacctgaccttcgccttccatggcatccgcctggaggtacacggcgacgaagcgcacctggtgctcgacgacaccggcattcccgaggacctgcggattttcctcctcgaacgcgacgccggtggcgtgctgcgcatccagcgcgacctcaccgggcagcgcctgccgatcctccgcgccggcttccgccgcccgccgcccgccgaccccacgccctacgtgcgcgagctgggcctgtgcccggcgttcggccaggcggataaccgggtggtcttcgagcggcatttcctcgacctcccgctgcccggcgccaacctcgaggtggcgcgcgcctgcgaggagcagtgccgcgccctgctcgcccgccgccaggtgcgcggcggcctggccggacgcatccgcgaccgcttgctgaggacgcccggccacttgccggacatgcagaccctagccatggaactgcacctcaccgtgcgtaccctgcgtcgccgcctggacgacgagggcagcagctaccgcctgttgctcgacgaggtgcgccaggccctcgccgaagagctgctggccaccggcgcgatccgcctggaggagatcgccgagcgcctcggctacggcgaggtgtccaacttcatccatgccttcaggcgctggaagggcatgacgccgcgccagtatcgccagcggcttgcgcgcggcgacggggcctga

SEQ ID NO: 338153 - DNA, 1476 bp, Pseudomonas aeruginosa
atgcacaacgagtcccgccttgaagcccccttgcgggtgctggtggtcggcgccggctttgccggtctcggcctggcgatccgcctgcgacaggcaggcatcgacgattacctgatcctggaaaaggccgccgacgtcggcggttgctggcgggaaaaccgctacccgggcgccgcctgcgacgtcccctcgcatctctactcgttttccttcgagccgaaggccgactggtcgcgcaagttcgccccgcaggcggaaatcctcgactacctgcggcattgcgcggacaagtaccgtctgcgcgagaagatccgtttccactgcgaggtggaggaggcccgcttcgacgccggcagcggcgaatggcaagtacgctgcggcgatggccagacgctgcgcgcacgggccctggtctgcgccaccggccagttgagccggccgctgctgccgcgcctgcccggcctggagcgcttccagggtccggcgttccactcggcgaactgggacgccgaggtcgagctggccggcaagcgggtcgcggtgatcggcaccggagccagcgccatccagttcgtcccgcggatcgccccgcaggtgcggcgcctgtcgctgttccagcgcagcgcgccttacgtgatcgccaagccggatcgcgcctacgccgactgggaacgccgcctgaaggcgcgctggccgtggctgcaacgtctggatcgggggctcaagtacctgcaccacgaatcgcggatgctcgccttcgcgaccttcccggcgctgatgaaggtgatgcggctgagcttccgtcgccacctgcaccggcagatcgccgatccgcaactgcgcgcgcggctggtccccgactacccactgggctgcaagcgcatcctgatcagcaacgactattacccggcgctggccaggagcaatgtcgaactggtcgacacgggcatccgcgaagtcaccgaagacgccgtggtcggccgtgacggccgccggcacgaggtcgacgcgatcatcttcggcaccggcttcgccgccaccgaattcctcgccccgatgcgcatcctcggcctcgacggacgcgacctgcggcaggcctgggcggatggcgcggaagcctacaagggcatcagcgtcagcggcttccccaacctgttcatcctctacgggccgaacaccaacctcggccacaactccatcgtctacatgctggaaagccagttcccctacgtgctcggctgcctgcgccagctccaggcgcagggcctgcgctacctcgacgtgaagcccgaggtccagcggcgtttcaacctggaggtgcaacaggggttgcgccacaccgtctgggagcgtggctgcgacagttggtacaagaccgccgccggcaagaacaccaacaactggccgggctacaccttcgtctatcgctggcgtacgcgccggccggagcttgccgactatgacctggcccgctga

SEQ ID NO: 338154 - DNA, 1206 bp, Pseudomonas aeruginosa
atgaacttcccctggcgcgacggcaaccgcgtagaactgctgatcaacggcgaagagtactttccgcgcctgttccagtgcatcgccgaggcgcgccgggagatcctcctggaaaccttcatcatcttcgaggacgaggtcggccggcagttgcaggaagccctcagcgccgccgccgagcgcggtgtcgaggtgcaggtcacggtggacggctacggcaccgcctcgctcagcccggactacctggccaggctgaccgcctccggggttcgcgtgcacctgttcgacccgcgcccgcgcctgctcggcatgcgcaccaacctgtttcgccggttgcaccgcaagctggtggtgatcgatcgccggcaggccttcgtcggcggcatcaactacggcgaggaccacctggtgcgtcgcggcaacatggccaagcaggactacgcggtgcgcgtcgagggcccggtggtgcgcgatatccgccaggcctgcctggcgctgctcgaaccggacgccgactacccgccgttgcggccgtcgggcgccgggcagccggcgcgggtgcgcctggtgatccgcgacaacgaccagtccagcgacgacatcgagcgcgagtacctgcaagcgatccgccaggcgcggcggcgcctgctgatcgccaacgcctatttcttccccggctaccgcctgcttcgcgagctgcgcgatgcggcgcgccgcggcgtgcgcgtcgacctggtactacagggcatgccggacatgccgctggtgcgcctgtgcagccggctgctctacgactacctgctgcgcgagggcgtgcgtatccacgaatactgccagcgtccgctgcacggcaaggtcgcggtgatcgacgacgactggtcgaccatcggttcgagcaatctcgatcccctcagcctgtcgctgaacctggaggccaacctggtgatccacgacgtcgccttcaacggccagctctaccagcacctgcgcgagctggcgcgccgccactgccggcgcatcagccgccgccacgccaggcgcggttactggtggcgggcgccgctgatcttcctcggcttccacttttcccggcatttcccggccatcgccggttgggtacccgcccatctgccgcgcctgaaatcgctggagccgcgtccgtcgcggcgctggcaggaacgccagggccagcggggcaacccatga

SEQ ID NO: 338155 - DNA, 306 bp, Pseudomonas aeruginosa
atgagcgccgacgaaaaacgcatacgagagttcgcctaccagatctgggaatccgagggctgccccgacggccaggccgaacgccactgggccatggcccggcaactggccgaagcggaagccgccgcggcggcaccgaagaagacccgcggtcgggccaaggccgccaaggaaaccccggccctgctgcaagcgccggccgccaagccgcgcaagccgagggccgcgtccccggcgcggcccgccagcgaaaaaccgacggcggccaagccgcgcagccgccgcaagcccgaagcgggcgaatga

SEQ ID NO: 338156 - DNA, 2055 bp, Pseudomonas aeruginosa
atgagtgacgcacgcctggccgaactggccgccgccgtgggcctgcaactcgactggcaggacgccaacggacggccgcagcgggtcgacccggaggtccagcgcggcctgctggaagcactcggctatccggcgcagagtccgcaacagatcgaacagagcctggccgcgctggcccggctgcgcgaggacagcgccaacctcggactgctggtcggcgaatgcggccagccgctggagcaagcgctcggccccgccggcaccccgggcgaactggtctacgaggacggcacgcggatcgccctgcgcctggacgccgaaggccgcctgccggcgcaggcccgcagtggctatgcgcagctgtcgctggagcagcgggaatgggcggtggcgatggcgccgccgagctgtccgtccctggccagcctcgccccgggtcgctcgcgtcgctggggactggccgcccaagtctatgccctgcgccgccccggcgacggcggcctgggcgacagcgccgctctcgaggacctgctgcgcagcgccgcgcggcatggcgccgacgcgctggcgatcagcccgctgcacgccctcgccgaggccaacggacatgcctacagcccctactcgccgtccagccggctgttcttcaatgtcctgcacgccgcgccggcgaccattctcggcgcggcggcggtggaacaggcgatccgtcgcgccggcctggccgcggagatggcccgcctggagagcctggagctgatcgactggacagccgcggcggacctgcgcatgcgtctgctgcgccaactccaccgcgacttcatcgagcgcgccagtcccttgcgccacgacctcgccgaattccgccgcgaagccggcgaggccctgctgcaccactgccgcttcgagaccctgcaggcgcacctgggcgccggccccgactggcgacgctggccggagccgctgcgccgccccggcgagccggcggtggccgcgttctgcgccgatcatgccgaggaagtggacttccgcgccttcggccagtggctgacccaacgctgcctgcaacatgcccagcgccaggcgcgcgaggccgggatggccatcggtctggtcgccgacctggcggtgggcgccgacggcggcggcagccaggcctggtcgcggcaggaagagctgctcgccgaagtgaatgtcggcgcgccgccggacatcctcaaccagtccggacaggactggggcgtttccgcgttcaatcccgaaggcctgcgccgccacggctaccgggcattccgcgagatgctgcgggccaacctggcctggcccggagggctacgcatcgaccatgcgatgggcctgcaacgtctctggctgatcccgcgcggccagccgccccacgccggcgcctacctgcgctacccgcaacgcgagctgctgcgcctgctggcgctggaggccagtcgcgcctcggcgctggtcatcggcgaggacctcggcaccgtgcccgaaggcctgcgcgaggaactggcacgccgccaggtgctgggtacccgcgtgctgctcttcgagcggcgcggcgaacgcttcgtgcccccggcgcaatggccggcggacgccatggccaccaccagcacccacgacctgccgagcctcgccggctggtggcggggccaggacatccgctggcgcgtccgcgccggccaccgtagcgccgaggaatgcgcggccgacctggaactgcgcgccgaggagcgccgggccctggccgccagcctcgaaccgtcggtcgatcccgaccccgccgccgaagtgccgctggacgcctgcatcgactatgtcggagcgacccccgcgccgttggtgctgctgcccctggaggacgccctgggcagcctggagcagccgaacctgcccggccccggcgacgcccacccgaactggcggcggcgctggccggaaaacgccgcgcaaatgctcgaaacgccgcaggtcgaccggcgcctgcgcctgctcgaacgcagccgccgggacgccggggaggacgcccatgactga

SEQ ID NO: 338157 - DNA, 1107 bp, Pseudomonas aeruginosa
atgactgaaaaacatctgttgaaaccactggttatcggcgaactgaaactacgtaatcgtgtgttcatggctcccatgactcgctcccgagcggtacggccgggtgatattcctgatgaacagacagcgttatattacgctcaacgtgccagcgccggactaatcatcagcgaaggcgcaccgatttctgcgacggccaagggctatcttttcacgccgggactctacagttccgagcaactggcaggctggcgtaaggtaacgtctgccgtgcatgccaagggtggacgtattgctgcgcaattgtggcatgtcggacgtatttcccatcattcagtgttgcctcccggttttcagccagtggcgccttcggccatccgtgccgacgccacggtgtttgccctgactgaaaccggcgagccaggacgtgttccggtggacgagcctcatgcattgaccgagcaagaaatccagaacgtgatacaagagtttgtcagagctgcggccaatgctattgaggccggttttgacatggttgagttgcatggtgctaacggttatctaattaaccagttcctgtcgccggacagcaacactcgcaatgaccgttacggtggttctatcgaaaagcgatcgctatttaccctggaaatcttggatgccgttgctgcgaaaattggcgctgcgcgtattggtctgcgcctttcgccgtggtcaccacagttcatcaatgatattgacggcagtgtgctagccgaagaaaccaccctgtacttggctcatgcactcgagcagcgaaggattggctatcttcacctagcggagtggggaccagatgtttaccccaagggctttcgcgagaagttacgcaagacctatgggggagtgattgtggtgtgcggtggctattctcaggaaagcgccaataccctgctcgcgagcggagtggccgacgcagtggccttcggtcaggcgtttattgccaacccggatttgcccgaacgctttgctctcgacgcgccactggcccaagcagatcaaagtgtttggttcggtggcgatgagcgtggctatacagacttcccgtctatggctgaaagtatttag

SEQ ID NO: 338158 - DNA, 231 bp, Pseudomonas aeruginosa
atgggccgttggggcaactgccaggacaatccaccgatagcgcgtctattccggagcctgaagccggagtggattccatcaatcgggtacatgacgactcaggaggctcagcgggacatcagtcgctacctgatgcatcgctacaactgggtcaggtcgcatcagtgcaacgacggactaccgtctgcggtggccgaagaaaaactcaatccactgttcgggatgggttaa

SEQ ID NO: 338159 - DNA, 2277 bp, Pseudomonas aeruginosa
atgggtgaataccgcaagctctggtggacgctgctggccgtgctggcggtgaccttcggcatcctcggttacttcggtcgcgaggtttatcgccaggcgccgccgatcccggacgaggtgcgcagcgttgccggcgaccacctgttcagcggcactgacatccttgacgggcagactgcctggcaaagcgtcggcggcatgcagctcggctcgatctggggccatggcgcttaccaggctcccgactggactgccgactggctgcaccgtgagctgaccacctggcttgagcttggcgcccgcgagcagtacggcaaggccttcggcgaactcgacgaagaccagcaggccgtgctgcgcaatcgcctgcagcgcgaataccgtcacaaccgtgcccggaacggtgtactgacgctgagtgagcgtcgtgtcgaggcaatccgccagaccgccacctactacgtcgcgctgttcggcgatgacccggcactgcagcacagccgccggagcttcgccatgaaggagaacacgttgccgagcctggagcggcgtgaagagatgacccacttcttcttctggaccgcctgggcggccgccaccgagcgcccggactccgtcgccacctacaccaacaactggccccacgagccgctggtgggcaaccagccaaccgccgagaatgtcatgtggtcgatagtcagcgtggtgctgctgattgccggcgtcggcttcctggtctgggcctgggccttcctgcgcaaggaagaggaagagccgcatccgccgctgcacgacccgatcagtctggtcggcctgacgccttcgcagaaggccctgggcaagtacctgctgctggtggtggggctgttcaccttccaggtcatgctcggcggcggtaccgctcactacaccgtggaaggccaggacttctacggtctaccgctgtcgcagtggttcccctactcgctgcttcgcacttggcacatccagagcgcgctgttctggatcgccacaggcttcctcgctgccggtctgttcctcgcgccgatcatcaacggtggcaaggacccgaagcaccagaagctgggcgtcgatatcctgttctgggcgctggtcgtggtggtgctgggctccttcgtcggcaacttcctggccatcgcgcagatcctgccgccacagtggaacttctggctcggccaccagggctatgaatacgtcgacctcggccgcttgtggcagatcggcaagtttctcggcattgcattctggctcgcgctgatgctgcgcggcatccttccggcgttccgcaaacccggcgacaagaacctgctggcactgctgtccgcctcggtgatcgctatcggcctgttctacggcgccggcctgtcctatggcgagcgcaccaacctatcggtgatggagtactggcgctggtgggtggtgcacctgtgggtggaaggtttcttcgaggtcttcgccaccaccgcgctggccttcatcttctccagcatgggcctggtgagcgtgcgcgccgcgaccaccgccagcctggcctcggcctccctgttcatgctcggcggcgtgccgggcaccttccaccacctgtatttttccggcaccaccacgccggtgatggcggtgggcgccaccttcagcgccctggaagtggtgccgctggtggtgctaggttacgaagcctgggagaactggcggctgaagaaccgcgccgcctggatgcaacgggtgaaatggccgctggcctgcttcgtcgccgtggccttctggaacatgctcggcgccggcgtcttcggcttcatgatcaacccgcccatctcgctatattacatccagggcctgaacaccacgccgacccatgcccacgctgcgctgttcggggtctacggcttcctcgccctaggcttcaccctgctggtgctgcgttacattcgcccaggcctggcgttcaacgagcggctgatgaagacagccttctggtgcctcaacggcggcctggtgctgatgctctccaccagcctgctgcccatcggcatcatccagttccacgccagcgtcgacgtcggcctctggtacgcccgcagcgaggcgttcatgcagcaacatctgctacagaccctgcgctgggtgcgcaccttcggggatgtggtgttcatcatcggcgcactgtccatggtctggcaggtcatcattggcgtcctcgctcccctaagttcaacggctaccgcatcggtgccaggaggtgtcgaacgactggattaa

SEQ ID NO: 338160 - DNA, 1569 bp, Pseudomonas aeruginosa
atgacttctcacaaaaagggtcaagatgacccgattagggtaaaaagcacctcattcctgaaccggctcctggcggacctgccgagcgacctccccgctgccgtgcgactgcaacggctggtggcctccctgcgcgacgagttcaactgcagcgcagtggtactgttgcgcctggatggcgatcgcttgcagacccaggcggccgtcgggctggacctggaagtgctcgggcgcagcttccaggtcgagcgccacccgcgcctggcgcgcatactcgaagagggcgaaccggtacgattcgccgccgacagcgaactgcccgacccgtatgacggcttgttgcaggacagccccgccactcccctgcccgtgcatgactgcatgggcatgaccctgagggtgcagggccgcctgtggggcgcggtgacgctcgacgcactgcgccccggcagcttcgacgcctcggtggcgcggcgcctgcgcgagtgcgcgccactgatcgagacggcactgcgcatcggccagttggaaaacgaagtacgcggcctgcgcctggcgcgtagcggcctggtggagccggcggtggagtcgcagaacagcatcctcggcgacagcccggtgctgcgtggcctgctcaaggaactgaagatcgtcgccgacgccgagttgccggtgctgctgcagggcgaaaccggcgtcggcaaggagctgttcgcccactggctgcatgccaattcgccacgggcgcgccagccaatggtccacgtcaactgcgcggcgctgccggaaaccctggccgagagcgagctgttcggtcatgtgcgcggggccttctccggcgccacccaggaccgccagggccgcttcgagacggccagcggcggcaccctgttcctcgacgagatcggcgaactgccgctggcgatccaggccaagctgctgcgcgccctgcagagcggcgagatccagcgcctgggcgccgaccgaccgaagcatgtgaatgtgcggatcatcgcggcaaccaaccgcaccctcatcgaggaagtgcgcgaggggcgtttccgcgctgacctctatcaccgcctctcggtctacccggtgcacatcccgccgctgcgcgagcgcggccacgacgtgctgatgctcgccggacacttcctcgaactgaaccgggtgcgcctggggctgcgctgcctgcgcctgaccgcggacgccgagcgcacggtgctggcgtacgcctggccgggcaacgtgcgcgagctggaacacgtgatcagccgggccgcgctgaaggtgctcagccaggcggagtcacgccatgcgctactgagcatcgaggcggccggcctgggcctggaggtgacgactcacccagctccggcgagcgtgccggcagcgatcgccggcgagacgccctactccctgcaggctgcggttgacagctaccagcgccagttgctgcaggacgccctgcagcgccacaacggcaagtgggccggcgccgcccgcgccctggagatggaccccagcaacctgcgcaaactggcgcggcggctgaacctgctctga

SEQ ID NO: 338161 - DNA, 1425 bp, Pseudomonas aeruginosa
atgagtaccgatgtcatgacgagttcgatgagtttcaaccgcgcgctggtggagaagtacgaccgccccggcccgcgctatacctcctatcccaccgcgccgcaattccatgacgccttcgccgccgacgactaccgggcggccgcccagcgcagcaacctcggcagcagctctggcagtgaccagggcccggccaagccgctgtcggtctatatccatatcccattctgcaagagcctctgctactactgcgcctgcaacaagatcatcacccagaagacccaccgcgcggtggaatacctggactacctcaagcgcgagatcgccatgcaggccgcgttgttcgacggcagccgaaaactcacccaactgcacctgggtggcggcacgccgacctatctgaccagccaacagttgggcgaggtgatggacagcctgcgccagcacttcaacctcgacgaaagcgacaaccatgagttctccatcgaagtcgacccacgcaccatcagcgccgagcgcatcgccgagctgcgcgcgcagggtttcaatcgcctgagtttcggtgtgcaggattttgacgaacaggtgcagcagtcggtcaaccgcgtgcagagcgaacaacaggttttcgaactcgtggcgacagcgcgccaggcgaagttcaagtcggtgtccgtggacctgatctacggcctgccgttgcagaccgtggcgagcttcgacaccactctgtcgaagatcatcgccctgcgccccgaccgcatcgccgcctacagctatgcgcacttgcccgagcgggtgcgcgcgcagcggctgatccgtcgcgaggacatgccgccgccagagcgcaagctggagttgctggaactgaccatccagcgcctgaccgaggtcggctacgtgtacatcggcatggaccacttcgccctgcccgacgacgaactcaccctggcccgcagcaacggcaccctgcagcgcaacttccagggctattccacccacgctgactgcgacctgatcgccctcggcgtgtcgtccatcagcaaggtcggcgacacctacgggcagaacgtcaaggagctgtcgcagtactacgcgcggctcgacgaaggcctgctaccggtgcacaagggctaccgcctgagcgacgacgaccgcctgcgccgcgaggtgatcaacgcgctgatgtgccatggccgcgtggactatgccccgctggaagagtgccatggcattcgtttcgccgagtatttcgccggccccttgaaacagttgcaggagcaggccggcgacggcctgatcgaactgcatgacgacgccctggtgctgcttccccagggccaactgatgatgcgcagcgtggcaatggccttcgacgcctatctgggtagtgcgcagcaggagcgcttctcgcgcaccatctga

SEQ ID NO: 338162 - DNA, 339 bp, Pseudomonas aeruginosa
atgcgtgaagtcattgcgttgtgcagcatgctgttgtgtgcgtcggccctggcggacgaagtcatttccgaggtgcccgacaataccgtcggcacaggtttcggtgccggtgccggggtgctgctgggcggtgcgctcggtgggccggtcggcgcgctggtcggtgccggaatcggcgcattcggcggcgccgaggcgcaggaagccagcggtagcagcggtcatgcttacgtcgtgcgcgatacccagggccgcgaacgtactgtgcgttcgcccaatgcccaattccaggtcggccagcaggtgactgtcagcggcaatcggctcaagccgctgtag

SEQ ID NO: 338163 - DNA, 585 bp, Pseudomonas aeruginosa
atgcaacgaattacccaacaagacgtgttaagcgcgcgcgaggcgcaactgcaaagcctgctactacgcggcatggcagaggatgcggcggcctatcgcgagtttctggcggtattgaccatacatgtgcgcacctttctgcggcgacgattgacacagcgcccggacgaagtcgaagacttactgcaggaggtgctgctggcggtacacaacgcccgtcacacctaccaggccgagcagccgttgaccccctgggtgcaggctatcgcccgctacaagctggccgatcatttccgtgccttcgcccgccgtgatgcgctgcacaatccgctggacgacgatggcgacctgttcaccaacggtaatgaggaacccatacaagccagccgcgatctgggcaaactgctgcagcaattgcctgagaaacagcgcctgccgatcattcatgtgaagctggagggcctgtcggtggaagaaaccgcgcaactcaccggtctatccagttcggcagtcaaggtcggtatccaccgagggctaaaagcactggcgaggatgattcagggaaagtctaacgataacaactga

SEQ ID NO: 338164 - DNA, 1416 bp, Pseudomonas aeruginosa
atgcgtgccctcgccggcctgttgtgcggcctgctcggcctggttcccggcgccgccgcctacgagccggacgtgttcggcaccgccggccaggtcgccggccaggcggtctacgacctcggcggcagcggtttgccctgccgcggcgggccgccaccgaccgagctgagcctggaggaagccatcgagcggatcctctgccacgacccgcagacccgcctcgcctgggccaatgccaaggcccaggcggcccaggtcgggatcggcaagtccgcctacctgccgcgcctggacggccgtctcgacgccagtcgcggctacagcgacatggattatcgcgacgccccctacctctccggcgacggccatcgccaccggcgcggcgccagcctccaattgagctgggtgctgttcgacttcggccgccgcagcgccgccctgcgcaacgcccagcagttgctgctggcggccaacgccagccaggacgcgaccctgcagaacaccttcgccctcgccgcccaggcctactacgacgccctcgccgcccagcgcagcctggccgcctcgcggcaggtcgcggagctggcggcgcagaacctggaagccgccgacgccaagtaccgggccggcgccgccgccctttccgatcgcctgcaggcgcagaccgcgctgtcccaggcgagcctcgcccaggtccgcgacgaaggcgccctgagcaacgccctcggcgtcatcgccctgcgcatgggcctggcgccggataccccgctgcgcctctccggcgagctggaggcgcaacccgacaccggcttcgtcaaggccatcgacgagatgctcgccgaagcccgccgcgagcatccggcactgctcgccgcccaggcgcggctgaaggccgccgccgcctcggtggaggaaagccgcgccgccggccggccgagcctggcgctgagcgccaacctggcacgcagccacagcgaccaggcaatggcgttcaacggtgacacccgcgaacgcgaccgcagcatcggcctgcaactgaacatcccgttgttcgaaggcttcgaacgcacctaccaggtccgcagcgccctggcccgccgcgaagccagcgaagcggagctggccgacaccgagcagcaggtttcgctggaggtgtggaacaactaccagtcgctcagcgtcgagacccgcagcctggcgcgcactcgcgaactggtcgaacagtcgcggcaaagcctggaggtggtgcagggccgctaccgctcaggggtcggcagcatgatcgagctgctcaacgccctgaccgcctacgccagcgccgaggaccagcacatccgcgccctcggcaactggcagacctcgcgcctgcgactggcggccagcctcggtcgcctgggcttctggagcctgcgctga

SEQ ID NO: 338165 - DNA, 1098 bp, Pseudomonas aeruginosa
atgaacgcacacgaggacaaggccgccatggctagcgatggagactccgggctccacgcgctggccgcgcggcggcacaagagaaagcggctcggtctgctgttgtgcggcgcagccctggcggtgctggcggcgggctggctgatcgccgggccgttcgccggcacctcgaccgacaacgcctatgtccgcggcgacgtcacctcgctcgcgccgaaggtggccggctacgtcacggcgctggaggtcggcgacaaccaggtcgtacgggccggcgacgtgctgttccggatcgatgaccgcgactatcgcgcgcggcttgcgcaagcgcaggccaatatcgaggccgccgaggcccgcctgggcgatgtcgatgcgcaaaccgggctccagcgcgcgctgatccgccaggccgaggcccagcggcgttcggccgtggccgagatgaacctcgcggccaagacccacgctcgcagccgcaagctcatcctcagcaacgccgtcagccaggccagcgtcgacgagagcgcggcggcgcgctccagcgccgaggcggcgctggcggcggctggcgccacggtagaggcgcagcagcagcgcatcgcggtgctcctggcccagcgcgaggcggccctcgccgcactggcccaggcccgggccgcacgcgatctcgcccggatcgacctggacagcacggtggtccgcgcgccggtgggtggcgtcatcggcaaccgccaggtccgcattggccgcttcgtgacgccgggcgtttccctgctggatatcgttccgctcgacgatgtgtggatcgtggccaatttcaaggaaacccaggtggagcatatccgccccggccagcgcgtccggatcaccatcgacggctatccgagcggggaactcgaaggcgtggtcgacagcttcgccgccggcaccggctcggcgttcagcctgctgcccgccgacaacgccacgggcaatttcgtccgtgtcgtgcagcgcgttccggtgaagatccgcttcgccgccaacccgctgcccgggcgcatcgtgcccggcctttccgcacgcgtcgaagtcgcccggagcgcgggaccgtga

SEQ ID NO: 338166 - DNA, 996 bp, Pseudomonas aeruginosa
atggccaacgaggtgtacgccaacaacatggagatctcctgcaaggcggcgagcggcaagtccatcgcggccttcccggacgtctgcttcaccccgccgcaggcgccaccgacgccgatgggggtgccgatcccctatcccaatacgggtttggcaaaggatacgaccaagggaacccggaccgttcggatcacccgcaaggaagtgatgctgaagaacaagagctacttcaagaccagctatggcgatgaagccggacgggcgccgaaaaaaggcgtaatcaccagcaagatcaaggggaaagtgtatttcacatcatggtcgatgaatgtgaagttcgaaggcaggaatgtcgtacggaacatggatctgacgacccataatcatggttcgaaaccagggaacagccctccaacctcatattcggacggcatggtggtttccaaagacgacccaggatgcaagaagctgcaaaaagatatatccaaggagcacaacaacctgccgggttcaatgaaggcgatatatgtagatgacgatgccaagaagaagtccaccctagcggttgcgaatatccaggaaggcaatagaggacatagcggagtcagcgctacgcgggtggttgcggcgagaaaggcgcaatggggcagaaagtattcgaattacgcaaagggtaaaaaagttggcgaggccagcagtatcaggcgttgtggtgatgggccggaggggaagcccttcgagtacaaagagaattctgcccgtcccctgcaggggcatgcagaagccaaggtcatcgaagagtggtttgagaaaggtggcagtaacccccagggaaccttgttgctcaatgtctctcgtccctgttgctctgagtgcgcacggttgatcaggtgggccaactgcggaaagaacggtgcgcccgactgcaatcgaataaaggtttgtgaaaatcatcaagacaaagaatccctggacagcctgaggtgcgaaaaatga

SEQ ID NO: 338167 - DNA, 645 bp, Pseudomonas aeruginosa
atgacgttcaagcttccgaactatattcccgtggaatatgcaagggcgcctgccgattattcgtggagcgagtgggacccctacgatgagtttggagattcggatccggcaaccgaggcaacgctttccggactttcggatcgcgccatcagcgcctattgcattggctgcagcgagtgggtagtggctcgtttgcaggcgtttcacgaagatgccaggcctttctcataccttgaggcgctatgggtattcgagacgacggatgacagaatctggttgcccgaagagctggatcaagaggagtggcaggggaaggttctgggggccatgggactgtcgctgatgacggtactgaactccgtctatggcgtcgaagatgatacgtccgcaagcgatggtgcgttggcggagctgcttcctatgcatgttctacccaatcaggacgcttttctgagctggagatgcgacgtcctgaaacggttggcggttctctacccgagaaaggggaaggcgtggggagatcccgtcccgagagaggttctggaccctgggattcccctcgcgcagattgatgcgcaggtagcgatccagcgtttcctcgcgactgtcgatttgcagaacaatccctatatcaggctggtgtag

SEQ ID NO: 338168 - DNA, 720 bp, Pseudomonas aeruginosa
atgagtctgttaaccaccccgctcgaatccgtcgaaggcgccgtcatctggctgctggtcggcttttccgtggtcacctggggcctggccctggtcaagggcgtgcagttcgcccggcagaagcgccaggaccgccagttccagaagcagttctggagcgccaccagcctcgactccgccggcgagcaggcgcaggacaagcagggcgccggcgcccgcgtggcccaggccggcttcgccgcgatccaggtgcaggacaacggccagcccgacctggcccagtcgatcaaccaccaggaccgtctcgaacgcgccctgcgccagcagatccagcgcgagcggcgttccctggagtcgggcctggcggtgctcgcctcgatcggctcgacctcgcccttcatcggtctgttcggcaccgtctggggcatcatggaggcgctcaaggggatcagcgcggccggctcggcgagcctggagaccgtggccgggccgatcggcagcgcgctgatcgccaccggcgtgggaatcgctgtcgcggtgccggcggtgctggtctacaactacttcctgcggcgcctgaagctgaccgccgccgacctcgacgacttcgcccacgacttctacagcctggcgcagaagagcgcgttccgcgtcatcgtccatccctccgccgcgcgccaggccggcaacccctcgcgcaacgtgaaggaggcgtcctga

SEQ ID NO: 338169 - DNA, 486 bp, Pseudomonas aeruginosa
atgcacagcgaacgcgtccgttatgtgttggtgcccggttggtacggctcggaagacgcccattggcaaagtcactggcagcgcgcgctgcccaatgcctcacgggtcgagcaacaggactggatcaccccgctgcgcgccgactggatcgccgagctggacgccgagatccgccgccagcccgggccggtggtgctgatcgcgcacagcctgggttgtgtgacagtggcgctgtgggcggcccaggccgagcgccgggtgcgcgaccaggtacgcggcgccctgctggtgggttccgacaacgaccaggcctgcagcccgcagcgcgccatgcacctggcccgcgcctggggcgcggagacggtgatcctgcccgaggccgggcacatcaacgtgaagtccggccacggcgcctgggaggccggctaccgtcacctgttccgcttgcagtacctgatcgacagccaggctcgtcgccgcgcctga

SEQ ID NO: 338170 - DNA, 999 bp, Pseudomonas aeruginosa
ttggaactcgccgcaccagagggtttcgatgtcgcggtcgcgctggctgtcgcggttggcgttgagggcgacggcgcgcagttgcaggcggccgttgtcggccttgccgccgacttccaggccgtagccgggggtggcgggtttgcgcaggacgaccctgccggtctgcgcccaggcggtggccatgccttcgcggacttcgtagccgaggctggcgaggccctggagcacggcctggcggcgggcgagggcggcctgttgctggaggtgggcggtgaggatggcattgcatcgctcggtgagttcggcgagttgctgcggatcgctgtcgggctggcaggcggcggcgcgctggagcagttcggcgtgttcggcggcgcccagggcggcgacttcgctggcgaggtcttgcaggtgttccaggcgctggcgttgctgctggtgttcgcgggcggcctgggcgaggtcgaggaccaggctgtcgagcagcaggttgcggcgctccgggcgctgttcggcttcggcgcgggccagtcgctcgaggaacgcttgggcgctggcctcgccttgcagcagttgcagttcggcgatgtgccggtcgatgcgcgccaggcgctgttcgcgcggggcgtcctgttgctggcgggcgcgccactgttccagggtgatgggcgtttcgtcggtcttcaggcgctgggcgagttcgtgctgggctgcgctgaggcgttcctcggcgggggcgctggcgagggcggcgaagccttgggcgagcagggcttccgcgtcgtcgcggagggcgccgtcggccagcgcttgcagggtttgccggagtgccgcgctggcggcatcgggcctggcgtcgagggcctggagcagggcgctggcgttttcctggaggcggcggtgttgctggcgcgtttccgcggcctggcggatggcgcgctcttcgcgttcggcgaggtcgcgcttgaggaattcgctttcgatcttcacctgtag

SEQ ID NO: 338171 - DNA, 354 bp, Pseudomonas aeruginosa
atgagcgaacccggcgacgatgtcgtcctgctgttttcctatggcaccttgcaggacaaggctgtgcaactggccagtttcggccgcgaactgaacggtcgcgccgacgccctggtgggcttccgcgaagactgggtggagatccgcgaccctgccgtgctggccgccagtggcaagacccatcatccgatcgtccagcgcagcggcgtggccagcgaccgggtgcccggcacgctgttcgagatcactgcggaagaactgcgtgcggcggatgcctacgaggtgtccgactacacccgcatcggcgtcgaactggagtccggggcgcgggcctgggtctacgtgaaggcctga

SEQ ID NO: 338172 - DNA, 2226 bp, Pseudomonas aeruginosa
atgaccctcccttctcgccgcagccccctggccctcccccgcaagcccctgctccgtgccgcctgcctgtggaccctggccgcgccccccctgacagcagccaatgcgcaaccccgggaagcgctgtcccactccgacaggttcgagcagaccagggacgaagaggcggccctggcgctgcctgccgacaccgtcaccggccgctcggaagacctttcgaccgaggactcgggctcctacgcgacggcaaagagccgcgcgggaaccggcctcaccttgacgccacgggagacgccccagtccctcagcgtgaccacccgccaacgcatggacgaccagcagttgaactcgctccgcgacgtgctggagaacaccaccggggtctcgtcgaccatgctggacagcgagagggtcagctactctgcccgcggcttcggcatcgacagcttcatgtacgacggtattcctacgaccgccaacgccatggcgccgggggaaggcatgctggacacggcgttctacgaccgcgtcgaagtggtgcgtggcgcgaccggcctgctgcagggcatcggcgaaccctccgcctcggtcaacctggtccgcaagcgtccgctgaagacgttttccgcctcggcgagcctgggcctgggacgctgggacaaccagcgcagcacgttcgacctctcctcgccgctcagtacggatgaaagggtgcgcgggcgcatcgtcggcacctacctgaaccgcgactccttccaggaccactaccggcaaaagcgtcaggccttctacggcgtgctcgatatcgacctcaccccggacaccaccctgacactggggcacgagtaccagaacaacgaacccaagggcgtcacctggggcggcatgccgctgttcttctcggatggcacgcgcaccgactggtcgcgttcgaagaacccggccgcacgctggaaccgctgggaaagcaggctgaacacgacgttcgccagggtcgagcagtccctcgacaacggctggaccttgcgcgtcaacgccgaccacaaggaaagcgacgtcaacagcgacctgttgtcgatgaacggttacccggaccgcgcaaccggcctgggctggatgcccgcggccctgaacggcggcgtcgaaacccgtcaggacagcctcgacctgctggccagcggcccgttccagttgctgggccgcgagcacgaactggtcctcggcggcagcggctcgcgctccaggtcccatagcgactacggcctgaacttcgcctccagcgccgatgtcagcagtatccatacctggaacggccgcttcccgcgccaagacttcccgccgggcccgacgatcgctaccacgatcaagcaaagcggtctcttcggcgcgctgcgtctctccctggccgacccgctcaagctcatcatcggcgcgcgcagcagcaactacgagatcgacgagagcaatgacaaccattacagaaagaccgggcgggtctctccgtatgtcggcgtgatctatgacctggacgacacctactcggtctatgcgagctatacggaaatcttcaagccacagtcggcctaccgcgacagcggcaacagggtgctgggtcccgcagagggaaagaacaaggaaatcgggatcaagggggaatacttcggcggcctgctcaacgcttcgctcgcggtgttcgagacccgcctggatggcgtcgcgcaactcgacgccggacaggtcctgccggacggcacccaggcctaccgtgcgaccaacggtacgatatcgcgcggtttcgacgtcgaggtacagggcgaaccccttcccgactggaacctctacgccgggctctcgcacttcaacgccgaggatggcgacggctatcgcctgaactcccaggttccccgcagcaccgcacgcctgttcacgacctaccgcctgccaggcgactggagccggttgacggtcggcggcggggtcaactggcagagccgcttctaccaggaggcctccaatccccagcggcaaagcgtgaaggtcgggcaatcgtcctatgccctgacatctctcatgacccgctacgagctttccgacaccaccagcctatcggccaatataagcaacctgttcgacaggaagtactacaccaccgtgggcttccagaacggctacctctatggcgaaccacgcaacttcatggtcagcctgacctacaggatgagatga

SEQ ID NO: 338173 - DNA, 1746 bp, Pseudomonas aeruginosa
atgatgtacaagaccttctcccgcctgctgggcgacgatgcgcccatcttccaccgctacgcctggatggccgtcgttctgggcctgctcaacggcctggtcatcaccgccctggttccgatcctgggtcacctgctggccggcgacgcccacggcgccggactctggctcctcgcgctgggcacagggctcgtggcctgctgggcctggcgtcgccaggtcgagcaagccagcgtggcgctgcgcgtcaccgtactccgcgactgccgccaacgtatcggcgatcacatcgcaggccttccggtcggctggttcacgccgcagaacaccgcacgcctcaatcacgccatgacccacggcatgttcgaactgtccgagttgcccggccacctgttcactccgatcctcagcggcgtggtgacaccgctggtcttcgtcgtcgcactgacggcgctgcactggccgctgggcctgatcgcgctgctggcgttgccgatcctggccgggatattcgtgctcagcgcacgcctgggccaacaggcggacgaggcgttccacagcagtgccgcccataccagccaacgcatcgtcgagttcgcccaggcccagtcggtgctccgcgccttcagcgctggcaacggcagcatggatttcctgcgacgcgccatcgatcggcagcacgcggccggctcgcgtttgctctatgtttcgatcgcctcggtcgtgctcaacgcctgggcggtgcaactggcgttcgccgccctgctgatcgccgccgcgctctggctgagcagccagttggggatggagtcacaggccgacacggccgtcgccgtggtcgcctcgctgctgctggtgaaccgcttcatcgacccgctgctcgacatcgccggctatggagaggtactgcgcagtgcgcgcggccaactcgacgcggtagccgaggtgctggacgagaaaccgctggccgagccgctcgaaccgaagttcccgaccgatggctcggtggaactgcgcggcgtgagcttccgctatgcgcccagcgcgcccgaagtgctgcgcggcgtgaacctgcatatcgcagagggcagcatgctggcactggtgggcacctccggctcgggcaagagcacactggcggccctggtcgcacgcttcttcgatgtgacggccggcagcgtgctcatcgggggcgtcgacgtacggcaaatgagcagcgagcaactggccgggcagatcagccagatattccaggacacctacctgttccagggcagcatcgccgacaacattcgcatcggcaaacccgatgccagcgataacgaagtattggaggcggcccggctggccggcgtggcggagatcatcgagcgcctgccgcagggcctggacacgccggtaggcgaaggcggcatgcgtctgtcgggcggcgagcgccagcgtatctcgattgcccgcgccctgctcaaggacgcccctatcctgctggtggacgaagccaccgccgcgctggacgcggaaaaccaggcggccatcgccgaagcgctcgcgcgcctgcgcggccgccggaccctgatcgtcatcgcccaccaactgtcgacggtcgcgatggccgaccggatcgccgtgctggaggacggccgggtggtcgagtccggaactcacgcgcaattgcaagcgcagcgagggcgctacgcccacttcctgacccaacggcagatcgccaagggctggcgcatcgcctga

SEQ ID NO: 338174 - DNA, 1818 bp, Pseudomonas aeruginosa
atgagcacccttgaagccaacgacacgccggccaacgagcctgcgccgctgggccagatcctgcgcccgatccgtagccgcctgatctgcgccgccaccctggcaggcctgggtgcagcgctgacgctggtgccgctggccggcatcgcccatatcgcacagatcgcgctcggcgctgtcgccacccatgccaccgaagccacggtccacggcgaactctggcggacggtggccctcagcatcgccagcctgttcggcggcctgctactgatcctgctggccgaagccacggcgcacgcggccgacaaccgcctgacccaccacctgcggctagccgcggcgcgccggctggcgaaggtgccgctgggctggttcggctcgcgctcgtcgggcgagatcaagcacgccatgcaggacgacatcggcaccctgcacgacctgaccgcacatttctacaccaccctggggcgcacgctcggtgccatcctgacctcactggtctacctgttctcgctggattggcgcctggcactggtagcgctgctgccctacgtaggcgggttgctgctgatcggttcggcgatgaacttcagcgaacgtcagatgcaggccttcggcgccggacaagcgcgcgtggacaatgcagtggtcgaattcgtcaacggtattccggtcgtcaagaccttcggcgcaggcggcaaggctcacggcaactaccgtgccgcggtggacggtttcctcgaagtgtttctccagttgctacgcccgacgctcggctccatgagcatcgccaacgcgctgatggcgccggtcgcggtgctgggcgtggtgctcgcggcaggcacgctgttcgtgcacctcgactggatgaccccggcggcagtgctgccctttgccctggtggctcccggggtgtccgctcctctgatgctgctgatcttcgtcgcgcacggcctggaccccgcaaagggggctgccaagcgcgtacatggcctgctccggaccgcgctgctggaacaacctgcggcggacctgcggcagcgccccagcagcagcgagatccgtatcgagcagttgagctacgcctacgatgcgcaacacaaggtgctcgaaaacctcgacttcacactcgaacccggcagcgtgaccgcgctggtcggcccctccggcgccggcaagtctaccctggcacgactgctgctgcgcttcttcgaccccagcgaagggcgcatcacactgggcggagtggacttgcggaacctcgaaagcaccgagttgtaccggcacatcggtttcgtcctgcaggaagtgcggctgatccatgccagcgtgcgcgacaacatcgcgctgggccgcccctcggcgacccggccggaaatcgagaacgccgcacgcgcagccaatatccacgagcgcatcctgagccttccacgcggctacgactcggtaatcggcgaggacgcgcatctctccggcggagaacagcagcgcgtgagcatcgcccgcgcgttcctgctgaacccacccgtcctggtgctggacgaggccaccgccgcgaccgacgccgaaaacgaagtggccatccaggaggcactgtcgcgcttcgccaagggccgcacgctcctgatcatcgcccatcggctggataccgtgatgcatgccgaccgcattctcgtaatcgacaacggcagcatcgtcgagcagggccgccacgacgcgctgctggcccgccacggacactacgcccgcctgtgggaacgaggcggctatcaggatgcgcaggcagcgcaaagaaccccacaccaggtagtgcaatga

SEQ ID NO: 338175 - DNA, 837 bp, Pseudomonas aeruginosa
atgctcaatgccggaaacgaatcgaactatcccgatctcatcgaccgcccggtggtggtactcggcctggaaatgccaaccgccagttgggagatgccgttccataaccaccgcaaggcgcagctcatattcgccgacagcgggctgatcaccctggaggccgatgccggcatctgggtggtgccgccgcaaggagccgtctggattcccagcggcatgccgcaccgcgccagcagttgcggaaacgccgagggcttcgcggtgttcgtcgaagcggatgccgcggtcgaactgcctggcagttgctgcacgatctccgtttcgccgttcatgcgcgcgctgctggaacgcactgcggcgctacccgcgcactatgacctgggcggcccgcaggcacgcctgatgcaggtgttgatcgacgaactgatcgccgcgccgcaagagtgcctgcacctgcccatgccggtcgacccgcgcctgcgcaaactcgccgacgcgatgctggcggccccggcagagcatgccacgctcgacctctgggccagccgcatcggcatgagcgagcgcaacatgtcgcgactgttcgtcgccgaaaccggcctgagcgtgagcagatggcgccgccggatgcacatcatcacggccttgcccctgctcgcacagggccatctcatccaggccatcgccgacgacctgggctacgacagccccggagccttcgtgactatgttccgcaaggccgtcggagtgcctccgcgacgtttcctggcgcagcgcacggcacggctcggcgcccccctacacattcctgccgggagtctccatgagcacccttga

SEQ ID NO: 338176 - DNA, 381 bp, Pseudomonas aeruginosa
atgaatatcgacacaaccgagtatcccatcgtacgtatggaaaacgcccgcgccaggcccgtcgaagaggtgctggagtgcatctcggaacttctggcccgcggccgccccttcgtgttcgtcagccaggatgctcccgacgacgacgccgaggagcacatcgatacccgacgcaagatcgcttcctggatgaaggccaaccggaccgagatccgccgtctgatcaagggccatctgcagattgtctcggagccggaccagcgcgatgggatgcaagcgttctcggtggtcttcgctaggttctggggctaccccatgttcgtcgtcgccagtgtcgaggccgcccgcgccaaggccgaatcgctgctggccggtgcctga

SEQ ID NO: 338177 - DNA, 1728 bp, Pseudomonas aeruginosa
atgtctccgcagaatccagtcaaactagactggactgactacgatggcagaatctggaagtttcggctctgggtctatgaggttacgcatgggggcggttttcgcgacgagaaagaaagccgcattcagattaccaatgccccctccaaggccgacggcatggaccagggcggcgccattgatcttattatgggctattcacccagccgacgggtgctcgttgcgtacgaccgccgctggctagaaaaacgcatggaaaagggtgagggctccccctccgtgcaggtcagggaagacgaaattcaggcggcgctcaccaagggaatgcaccactttaaaaaaggaggggtggcttttggcgtcgccgacattgtcaccctgacccccgagtacttccctgagtacctgagaaaccacaaggctttgctgacgggtgcgatggaggccggatctgtgacaaccgtaaccgagagcccaaatggctcactttggcagttctgcctcgaccgaggtttttacttcgacccggacttactggctcggtatgtggcctcccttgccgccaagccattcgtgattttggctggtgttagcggcaccggcaaatccaagatggctgagcttgttgctgagtactattccacaagtcagacggcgttagcccctgcaacggcggcgcatcctgacccagtcgccagcaatgcattcgtttttgacgccgagaaggcggcagccgacccttcccgcttcgccttggtacctgtgcgaccagattggatcgacaatcagtcaatcatgggcttcgtcaatcccatcactgggaaatatgaatcgacccaagccctggacctcatgctccgagcgtctaaggcgctggaggaggcggacgaccaatcttctgcgtctcgctactttatgctgctcgatgaaatgaacttggcgcgcgtagagcactatttcagtgattggctagcttgcgccgaaagccggcgctaccaggacaagaacataactcaacaaccgatccccctacatcggcacgctacagccgcagcgcacctcatcggccctgatggcatctataccgaggtggacgtgcctaacgccctggagatcccgacgaatctcgtcgtgacaggtaccgtcaacgtggacgaaaccaccttcggatttagccccaaggtgctcgatcgctccatggtcatcgagttcaatgacgtagaccttaatggcatgcgatatggcgtagccgccgccgacttgccagcctatcgctttcccaaggtgcttccccctttccgcctgccaacaacggagaatttcaagagccttcctctggaggctcacgaccaccttgtagcgatcaacaagatccttgagaaggcccagctacacttcggctatcgctccgcagccgagattagccttttcatgcagatctaccacagcatcctgccagaggatgtcgacgacgcggcaatgattagggcgcttgatggagccctcctgcagaaggtcctcccccgcatccaaggaaaccgcgcccgtattgaagaagccctgtgcacgctgctctggtacttccgaaacctagcagatccggaggagaaccaggatgtgcagacaattaaacgtgacgacgtcgcgaagctacccaagtcgtacagccggggctttgaaatgcttgagcgcttgcgcggctttggcttcgtgacattcttcaaatga

SEQ ID NO: 338178 - DNA, 1593 bp, Pseudomonas aeruginosa
atgacaaaggtcgccttccgctatcgcgcccggcgtgatagggaatcgttaactgcagtcgcaggcgacgtgcttatgctccttgagaatattgagtacgtccttgaattcccaacccctccctccacagccgagcttggcgacttgactgaggtgggctatgagcccatcagcgacacaatgggcgtactggcattcaagaattttgtgggggcaactacgctggcaggcgttcgcctgcacgtaacttcaagcaaactcggaaacaacggtgtcgcggacttgctagagcaggtttcgaggctgtcctctagcctggtcttcggctggcgttcccaggcaggctttgcggccaaggcatctggagaacagcgatcacccatcccttttcaccaactgcaactcctacgcgaattcatcctgcgacgtccaccaggcgctcgtctgcaggacttttttgagattgcggagcgcaatcccacgcgacgtttttttctggagcgcccagtggttcagacagcaaaggctcgtaacttcgatgcgcgctccgtaatggacatattcagtcacccagaacgactggtggcgctctccggacacgccgcagtgaagcgcagcccacttgccgctgccctttgcatgggcacctcccccacagaacacttccctacccatgtttcagttccttcacgacgcctcacgtacgacacgccggaaaaccgctttataaagcacctggtagccgaatgcctcaccatcgtctatcgactgctggatgaaaagaatctgcatccgaaaatgcatgccgactgccgagagatggcaacgattttggagtcagccagccgcgcactgttcctcgaagaggtgggaatccttacttcgttctcagggccaacccaagcccttgccaagtcagagggctacaaggacctgttggagctctggatcgccctaagtgaacaccagtctcttccatcgtcggcgagagaaattcaacggtttctgcagggcaaggatattgccctgctttacgagtactgggtgttcatcaaagtactggaggctgtttcagcggcctcaggccatcacaccgcccctgtggtagtttctcgaaacgacctaggcgaaaggctcgaccgggggctgcacgtgcagctgtcggcgaacatagctgtgtcattcaacccttcctacaaccggtcctcaggctccgcctattccactccacttcgaccggacgttgtggtaacgcttgggacataccgctatgccttcgacgccaagtatcgtctgcagtggctgtccccactggaggatagccaggatgacgaggcaacgtttgtgcgggcagacatctacaagatgcacacctatcgtgacgcaatcaccgccatgcgcgcagcgttcgtgttgtatcccggcagtgagttcgtatttttcgagcgcgcaatggggcgcaggaacgcgccaaacgagattgtgacctttgacggtgtaggcgccattccggcaaagccggaaggcgctgagccagcagttctcttggaagtaatgcgggctctactcaaagagcacaacctgcttccttga

SEQ ID NO: 338179 - DNA, 3891 bp, Pseudomonas aeruginosa
atgacgacgaagtcatggtcagcaggtgcagccatcaaggcgcggcgtaagtcgatggggctgtcgctcgatgaaatggggaataagcttggtgttagcaagtcgttcatgagctacgtggagtctgatgatcgtgcgttgacagagtgtcaggctgaggttctgtcttctattttagggctcccgattgatctgattcttctgagtgcgggtcgcttacctattgatgtaaagcaggctattacagttgacgctgcggaagttacggcctcggtgcgtcagcaatatgagcagcacgcgcttaaataccctgacagaccgctacagccattgcccccggtaacgcagcacaggggtgtgaatttctctcctgcaggtattcccgagcgcgttgcagtcagtaaggcgactgcagagtatcgggcgcacagctaccacaccaaggtgccacctgaggccatcaggcccttcattcgcgcactaaccaaaccgggggatctggtgctcgatcctttttctgggtccggtatgactggcgtagcagccctttcggaggggcgaaatgctgtgctgtcggatctttctcccgctgctgtccatatctcacgaaactacacaagctggtgcgatcccgttgagttcgagcgtgccatggctgatgtggctaagctggtagagcccacgatgcgttggctttaccatcctgttaagcagccaggcgtaactattgaatacaccacgtggagtgatgtatttcaatgcaacgaatgccagaagagcattctgtattgggatgttgtgcatattgctggcggtactgacgcccagggactcacctgcccgcattgtgattcctatgcgcgtaaggcggatttgctatggttggctgaacagcctgtgctgacacattactccagcggtagcaatcgaatctcgacgcacgagctaactcaagatgagttggaactgatagaggaggccaatgcagcgcctatcccttactggatgccaaaggtgccatttggtcctgagcgcgaaatgtggcgcgcctcccatgctgcgatggggataaccggcgtaagcgatttctttactcggcgtaacctccatgctctggcggctcttcgccatgcaattgttaccgcgtcggagggcaggctgcgggaggctcttatgtttgccttcacggcctgcgtaaatcgagcctctcgccgctatcaatggaatgcgaaacggccgaccaatgtaatgtccgggacgctctacatatcctcgctgcgttacgagtggaacgtgtggagtctttttcgtcgcaaggcggctgacgtaagacgctattttgagggctttccggaggctgatacaactgttcaggtgatgaatagaacggcaacggacctatcctgcattccggatggttcggtttctatggttttcatggatccgccttttggctccaacattttctactccgacagctcgctactgtgggaggcttggcttggacatcttactgacaatgccgaagagattgttgtcaacaaaagtcgaggcagagtgggtggtggcaagacgttagacgattatggtcaattgatgacgagggcctttacggaggtggcgcgcgtgttgaagccgggtggctatgccgtcttagccttctccaactcggatgataaggtatggattgaggttcagaaggctatggcggcggccaagctcgagacagataccgtccatattctcgataaaggtcaaccctctattaagggggtgaagggtgtgacaggaaaagaaaatgtcacaactctggatctgctgataacaatgcgtagcccggtaacggcggcaaagcctagtgcgaataatgcggcgtcccctgcttttgtcgatgaggcagtaaaagcctttttgcaagccggtgggggccgcactgatgatatctactcatctgttattcaggtgctactagctaaaaactacagcctttcgggaattacgatgccgaaaattgccgaacggtgcgcgcgtcttggtgcggaggaggtgggaggaaagtggaccttggtaagggctaaaactaaggaaaaaagagacttagttaaagaataccttaactctaacagcagtctccctgtggcgacgttaagcgcagctccgaagaaggctccgtcgacgcccttagtagcgggggggcgtaacagtgctctctatacggcgcatagctatcacactaaggttccgcctgaagccatcatccccttcattgaacactttacgaagcctggcgatgttgttctcgatcccttctgcggctcagggatgacaggggttgctgctgctctggttgggcgtttggccatcttgaatgacctttcccccgcagccgtacacctcgcctggaatcattcacatccttgccagccaactgagttggatgaggcctttgccgaaattgaggcgaaggtgggagggaggatgcaggagatctatggcacaattgacgagaagggggagcccgcgttgctccactggacgatgtggagtacgcgccacaagtgtccgcattgtggcaagcgattttccctctgggacactgttgatcgctccgagggtagaatgggcgcgtccgtggtgtgtccctcatgtaagcatgggattacaaggcggaacctccagaccatagactcagtgcctgtgtggcttgcatacgaaacagcaagtgggcagcgccttgagcgaaaagctgggaaggcagacattgctaaagcgctggcattttctcgagatggtatcgaagactggtatccgtcagttgatattggccgtgaccgtgagatgtatattcgctgcgcgctgcaaaataaaggcgtgcgcgaagttgctgacttctacacgaaccggaacctgctggcgctatcgctaatctggggggctattggcgagatcgccgatcaacggaagcgctttgcgatggcgtttgctttcactaataccgcctggcacggcacgcgcatgcgtcgttacaacgctagaggtgggcagcggccactcacaggcacgctgtatatccctcagctttcttccgagtgcaatgttttggaggtgatgcgcaacaagattgctcagctgaagaagtattacgcaaccttccagccgactgccgcgcaggcaccgttcgttctgaatggcagcgcgaccgatcttgagaagctgcaggatggcagtattgattatgtgttcacggatcccccctttggctctaatcttttttatgcagattgcaatttgatctgggagtcatggctgggccgaatcactgatccaatcaatgaggcggtggtaaataagtcgctttctgtgattgagggaggaaagacgctggagggatatgagaccttgatgacaggggcaatgcgagagattgcgcgtgtcttgaagccaggcggttgggcaacggttgttttccataatacggatggggaagtttgggctgcgctacagagtgcagccaaggctgcaggcttcgagtttcacgaggcggcgtcactcgaccgaaaacagcaaagccacaagggctacaaggggcgtagcgggcaggaagatgtagcgcatttcgacgtagtaatgaacctgcgcaagccagagaaagtgaaggtcgcaacgtcgaagaaagaggctaagtccttcgacttggagtcgttggtttcggaactggtggcggatccgaagtttctctcccgaggtttgcaaggcattcatgcagaggttatgcgccgcctggtctctctggaggcaagtgtcttcgtagactatgccgatgtccgagctatggtggagcaagtgcagcagaagaaagagtcaaggaagcaggttgtgctctttgagtag

SEQ ID NO: 338180 - DNA, 387 bp, Pseudomonas aeruginosa
atgactaccagcaaagacaaaaccatcgaagtgctcggccaggagcggcgtcgccgttggagcgccgaggaaaaactggccatggtacgcaagagcctggagcccggacaaagcgtctcggtggtggcccggcgcaacggcatcaactccaaccagctgtttcactggcgcaagctctaccaggacggcagcctctcggcggtcagtgccggcgaagcggtggtgcccgcttccgagttggccgatgccctccagcagatccgcgagctacaacggatgctgggcaagaagaccatggaagccgagatcctcaaggaagcggtagagatcgcccgctcgcgaaaaaggattgcgcactcacccttgttgccgggggacgaccagtga

SEQ ID NO: 338181 - DNA, 573 bp, Pseudomonas aeruginosa
gtgaaggcggtcagtgagagtctcggtgtggcgcgctcgcaattgacggctcgactcaaacagcctgctccgggagagcgatcgcgtcgacgtcgaacgctcaatgatgtcgccctggtcgagcagatcaagcaggcagtcagtgcgttgcccagctatggctaccggcgagtctggggcctgttgcggcgtcagcatgagcagcaggcccaaccaccggtcaacgtgaagcgggtttaccgcgtcatgcgtgaccacgatctgttgctggaccgccaacgcaagcagccgggagtggcgcggcgtcacgaaggtcgtgtggcggtggacgcgagcaatacccgctggtgttcggatggcttcgagttccgctgcgaggatggcgaaaagctgcgcgtaaccttcgccctggactgctgcgatcgcgaggccatcagttgggtggccagcccacatggctacagtggcgacgatgtccgcgacgtgatgctggaggctgtcgagcaacgcttcggtgacgagctgccggcatcgccagtgcaaaggcccggcagatcggcctgctccccctaa

SEQ ID NO: 338182 - DNA, 1056 bp, Pseudomonas aeruginosa
atgtctgcaatatctgaaatcatcgccgcactgcagggagccggaattacagcaaccctgtcgggaccacaccccactcagggagtggtcgcgaccgtagatgggcacccacgtgaattgagactctatgcctggcaggtaacagataacggacgagcaaccggtattgctagacctgccgacgagcgccgcatccaagccattggcagtcaagccaagttgattttggcatcagcacagcccgagaccgtcgtactaggctggtgcgacgagttctctccggagccgctaattgtggcctttcatccgtacaacgttgcacgcagggtaaatggaaagattgagcgcaagctggctgctggcgccgacgacgcaagagcgtcagacagtcaacagtttcggcaagggttgcttgatgatgcttatgcgaacggacttgcggttggccgcaaccagcacggggagcatgtattagccatgaggcccgaacacttccttgactacctcagccagcacaagcccaactatcaccccagaccagccccccaggacaaccttccaccgaccagccatacaatggccgaacttgtgaccctgacagagttggaagaagctgaacctgcagatgctgttgctacggacctaccagcagcatttgacccagcaatgattgaagacgggcgcgaacgaattgcacgcgaaatcgttattcgacgaggccaagccggattccgcaaccagctactacggacgcacggacgctgcgccatgtcaggctgcaccgtaacacccgcccttgaagccgcgcacatcgtgccgtaccagggcccatggacaaaccacccatccaacggacttctgctgagagcagacttacacacactgttcgatttggggctcctatcagtagaccacgagaccctccgaatacttgttgccccagacttagatggaaccgaatacgaaggactacgagggcagccgctgcatgttgaccacgacagatctcccaacagagaagcgcttctggcacaccgaaacctcgcgagactgtga

SEQ ID NO: 338183 - DNA, 2352 bp, Pseudomonas aeruginosa
atgagcaccaatcaatacgggggcttcctcaccgacaagggggccgccaagcaggtcgaggctgcatccggcggcttgcgacggaacatcacccacatgctgatcggtgacgccggcggtgcgcccggccagacgccggacccggtacccagcccctcgcaaaccaagctcgttcggcagcgctatcgggtcaagttgaaccgcctggtagccgctgacaacaatcccagcgtgttgatcgccgaggcgatcttgccgcaggacgtgggcggttggtggatgcgtgagctgggactggaggactccgatggcgacatgatcgctgttgccaactgcgcgccgagttacaagccgctggtgaacgaggggtcgggacggacgcaaacggtgcgcctgcatatcgcgttcagtcatgcggaaacggtcgatctgctgatcgacccgaacgtggtcaccgcgacggtggcggatctgcaaaatgcgctgctggaagtgcgcgcgaccaacgacgcgaccggacagatgacgcgaggcacagacggaaagctggccctgccgctctcgctgagcctgacaggcattgccgccggcacctatcgcagcctcacggtcgacgcgaaggggcgcgctaccagcggcagcaaccctaccaccctgggcgggtacggcattaccgacgcgctggccaagagcgatgctgtcgacgtgccggcgccgaataagctgctgcggctcaacgctgccagccagttgccggcatcgattaccggcaacgcggcgactgccaccaagcttgccgttccgcgcatgctgtcgtttacaggggacgctacggggagcgcatcgttcgacgggagtgccaacgcggctgtagcgctgaccctggcgaattcgggggttactgctggtacctatgccaagatcacggtgaacggcaagggcctggtcaccggcggggcgcagctttctgcggcagatattccggccctggatgctggcaaaatcgtttcgggagttctgcctgtggctcggggcggtactggcaacaccattggccaggccgccacggcggtgaaactcgctactccgcgcactatctccgtggtgggtgacggaaccggcagcgcatcgttcgatggcagcgcgaatgcaagcctctcgctagctctggcgaccaccggcgttggggcgggaacctatacgaaggtcagcgtcaacaccaagggcttggtcaccggcggggcgcaactcgccgcagcggatatcccctcgttggatgcctcgaagatcgcgaccggccagcttgatcttgagcgcttgcctttggtgtcgcaggggttggccaccgctgttcctaccagcatagatcccaactcagtggtcattccgttggtgctgacaaagcatgcgaatgggccggtggcggatcggtactactacattcaaacgatgttctatccgaccgtggggggcaacgctgtccagattgcggccgggtatgccggcgtggctgacatgtacgtgcgttatgcgtactcagcgacagccacgacggacccgactaagcgggaatggtcggcctgggtccgctgcgacctgggaggggcgttcgctcatgcgccggatggcgtcctgggtggcggcgtcaacttggattcaatgattgcgtcgggctggtggcatcaaccgttcagcgctaatgcacagaacggagcgaactatccggtgggcgaggccggcatattgacggtgcatgctccaacgtcctcgatgatctatcagagctatcgtggctacgccgccggcggcgtgtattggcgctgccgctacaacggatcgtggtcagcctggtaccgcgcatgggactcgggcaacttcaacccgggcaactacgtggctaagtcggagtattcgtgggcgtccttacctgggaagcctgcgaccttcccgccaccggcccacaaccatgacgcaggccagattacgtcaggcatcctcccgctggctcggggcggccttggggcgaacaatgcggcggcggcgcgtagcaatatcggtgctggcaccatcgccacggcgtccttggggtcgagcggttggtggagggacaacgatacgggttacatccggcaatgggggcgggtgactgtgccgggtgacggtagtgcggcgatcacctttcctattcccttcccgaatgtctgcctgggcggcttcgcgggtcagaccgccaatttccaccccggcactgacgcgagtacggcgttctatgggcagacgactacgggggcgaccgtcgagagcggctatcagatgcaggctgtgttgctatgggaggcctttggcagatga

SEQ ID NO: 338184 - DNA, 270 bp, Pseudomonas aeruginosa
atgtccaaagaaaggtacgaaaacctttatcgactgcatactctcgaaggagagttggcctactccctgaccatcttcggcgacaaacttgccaaacgagagggataccgaagcggcctggatggaatggaagcgatccacttctacttggtgcataagttcggctggcccccggcaaaagtccgtgcaatgagttcggaggacattcggttcatcctgcaagaggaaatgcacggtttcacccttccgaaagccgccgttttccgctga

SEQ ID NO: 338185 - DNA, 564 bp, Pseudomonas aeruginosa
atgaaccggatactcgacattctgattccccgcttcatcaccgagcgagtggcgctgctcgaagcaactgccggccacttggagattgcctgcgccatctccgacgtgcggccgaacgagcggttcgacgggatcgccaccatccgatccttcaacctgctgggcttcgccttgtttccgaagatggtggacggcccacacgcatggccagtgcaactccacccgagcaacaaggactcggcggatgcaatcaatctcccgccctgcccctggtgcgagggccctccagtcgtgctggttgctcgcacgttctcacccttcggaacggtccgggaaatgacgacctacgggtgcgagggcctggacgtcgacgcctatgtgttctgccacgaatgcggctgcgaaggcccgaagtgcgaagacgtgatcttcaacgccgaagacttccgccgcgtggaacgcgaaggcgcccgcctctggtctgagcggaccagccggaaccggcatctattcgattcgaacgcggccgatggccactgcgtctacccgaggagcgcccaatga

SEQ ID NO: 338186 - DNA, 2994 bp, Pseudomonas aeruginosa
atgttttcagagcaatttatttcactaagcgacatatatcttgcctatcgcaaggcaaaatcagaagctttctatgacaaccttcaccccagcgctatttcatatgtagagttcgagaggagcttgcagaaaaatattgagtccatttaccagttgataacaaatggctctagtgagtggtggcaaagcaaggacttaattggcggtcatctctatgttcctaagtcacttgacgactctccttggaacaacattgagtcagcgcactttcgttccatcgaccctaatctagattgggagcaaagattctctgacaacaataagctcaggctcgaggcgaagtatcggctaatcatcaccccaacagtagctttccaaataatttctgctttgtggataataaaggctggtcacaaatttgaagaaaagctagataaaaacctatctttcggaaacagacttcgacgtaaaaaacatgccctcgaagacttcggcccatttaatgggccagttaatgaggattcatccggtcttttttccccttacttctcggcgtacagaaactggcgccagaaggggctggatacgatgcagcaactggttaaggcagggggctctgtaactgctatcaccatggacttggcaggcttttaccataatgcatctccaaactttctgcttaaaccgtccttcctgaaagcaatcaacgtaacactgagtcctgatgaatttaagtttactcagttaatcctaaaatctattgaatattggtacaaacaaaccccggactttatggatcgaccggaaggggctttgccagtggggctatctgcatccaaggtaatttcaaacgtattgctattcgagctagatcagcaaatacaaagcggaattaatccagcttactacggaaggtatgtggacgatattttcctagtgataaacacgccggactcatcgccaagcggaaatcaagttcttgagtttatatcaaaaaatgtgaaatgcataaaaattgatcgagcagcaggcaagccgccaggattaaaaatcaaatttaactatgcttcagattctgatttaaggtttacagcaagtaagcaaaaaatatttagcctgtcatccgagcacggccttgacttgatcaatcaaatttcaagtcaaattagagcgcagtcaagcgagtatcgcatgctacctgaggtgcctagatcctcagccgaaatggcagacaaagcactgctagcatcttcagatgcgtcattgatcgcagatgccttacgaaaagcagatgtagtatcaattaagcgacttggactatccctactcataagggatattgaaagctactcatccgacttggctcgtcctgagtggatggaactaagaacacaattttacgggctcgcacacagatacctagttacaccaagagggctgtttgaactgttcggatactataagagagttttctcacttatggtttctaactacgacttcagtgaggctgaaaaattcatcactaatttgtactcatgctttgatctcatacaaaaaaccacgacccaagaaaagggaagagcgcaacgtatacatctatgcaaggcttactttgaaaaggtccttcttcaggcttccttgcaagccgccggggccaaaaattttgacaaatggcctcagctccgtcttttgctgaaaaaactattcgaccactcggatagtcacagaatagatataaaaaagaaaaaccttaaagcactaactgaaagtttcctgcttgcagacctaggaggaaggccatataaggaatactggtactatggccaggatcaggatatcagaaaggcgagagttccaagaagtatcgatgttcgtcgagtattacgactagcgtctatccgtaaattccagaaatcggctgatcttaaattgccgcactggcctgctcttgcatttccgactcgtccgctaaatgttcaggagattgcgctaatatcccccgcaactctagatgataatcttcttttccgtcgaagtatttgggggttgcggggggcaaaagtccggactaatagttttattggacgcaacataggtgatgatggctattacatatctatcccagcaaagaaaaaagaaaaaacctacgttgcactcaccaattttgaaaccactgtacgtcaattccaaggggctttagcaaaagagcctgatagaagtcttattagatatgaaaaagtcaaccgattaataaatagtatcttgcgtgcaagccggcagtcagactatgtagtcttccctgagtgttcattacccaggcgctgggcaatgagcgttgctgcaaagcttgcccagcagggtatttctctaattgcggggattgagtattacgatcataaaaatggtggtcgtatcattagaaatgactcccttgtttcgctggcaactaggtggccaggctacccaagcaatattgtgtttatgcagccaaaattgcgcccttcacacggagaggctgaacttattcgaaaagctaaagcccgacaatatataccaaaaaaagagaatgagattttgccaatctatgagcatggcaaatttcatttcggtgtactcatttgcagtgacatgactaacccggaaaacagagttcgctttcagggaaaagtagatggcctatttgtactggagtggaaccctgacgttaaaacatttagcttcttggttgaaggggcggcgcatgatgtgcacgcctttattgtccaggtaaacaataggctatatggtgacagcagggtaagagcgccatatagagtagagcacatgcgtgactcggtaagaataaagggtgggattgaagactatttcgttatagctgagcttgattttaattccctaagaaagtttcagcggaagcgaaatatgaatgataaggaggctgttttcaaaccaacccctataggatttaaaatgtcacctagaagaaagagataa

SEQ ID NO: 338187 - DNA, 798 bp, Pseudomonas aeruginosa
atgaatatctctgtgcaaggcacgcgcacagcatatagaggcagtgcagacagtggacgcatcctgatcagcactgacctcgcggaatgtgaggtcgacagcctagagaggatgatgttcatactcctggttctgggccacgagacagcacacctactcaacgtgcatggcgggtttcgagatgagtccaaccaagacaccaaggctcttgaagtatgggcagacttcttcggcactaaggtagccatggtggcaatgacgattggcgacaagatacaagacatggtgaccgggttacccggcgggaaggagacgggtgcgcgcgtggaggcgattggcgcggcaatcggcctattaggaaagacgtatttcgagaccggaagtacccgatatgagcccgcacctgttcgtgtggcgacttgtgttgcgggcgtcatgtctgcactggacacgttttggtcgttgaatggtatcccccgcaacgtagggcgttcgatgtcgctgcaactgcggctgtatcagtcgcccgcaatgcgcttggtgctcagcaaagtgggagaagtggaaggcgcgggcgttcctgagcgcggtcagttctcgaccattcgacgaattcatcagcacatccagagcgacagagcctccataacagtgggcatgcttcctatcccatcggcttggctgcacactaactatgagggaagcgagcaggagcgcatggcggaagcagaacggcagcgggataagctgaaggaagagctcgcaaagcttgggctggctctgcctgagggctggtaa

SEQ ID NO: 338188 - DNA, 690 bp, Pseudomonas aeruginosa
ttggctctggtgagcatcgacctgctagataagaaagagatctacatcaagagcctctatttcaactcgctgaaggagatatccgaagagctcgccaagctgctgaaacagtatgaaaatttagagcgtgctgcatcagacgtgggtgagctcataacaatagttcggactcagatccggcagtaccggaaaaagctgatcaccgacatcgagattcccttctacatttactccggtaagatcctccagacccatcaggctgggcttggccatggcatattcatcaaagacccaacgggtgaagatgagctgaagaacgtgcgcctcgtttccaactgggaaagcgaccacgatattctcaacaccatgagctccgggcagatttccgctgtagtcatcgctttgactctggcactgcatcgggtctactctactaagttttctagcattctcatcgatgaccctgtccagactatggacgacattaacatggcctctctggtcgaggtgctgcgtaacgacttcagcgagaagcagatcatcctgtccacgcatgaggacaaagtagctaggtacttcacctacaagtatttgaagcacagcgagaacgtcaaaatcatcaaccttatgcaaaggaaagagtacgttccaagcaacaaatatctctacagatcggaaagcgccagctaa

SEQ ID NO: 338189 - DNA, 714 bp, Pseudomonas aeruginosa
atgataagtatcatcaataacatcttatccagcaatggttataaacaggtcgacatggagacttctctcgataatgactccatctaccttttctgcccatccgagagaagcaagcgggaagagtacttcgtcactatacagctccaaacgcaatccgacgcagcggcacagaagatactagaagagaaagcgcaagagctattcgaggcaatcagcaactcgggaaaagtagaccggcccttcgagaagaactgcaccatgcttatctgccacgaagaggaagggatcagcaggcaaacaatacttgccctcgaagaagatcagtataattttaagaagaacgttatcacctacaccccaggggacctcgcaactctaaaagcccacctctcagagggcgggataaagaaaataaccaatgacgccataaatgagataatcaattcagaaggcggaagaaactttctggcatttaagggcaatcacccgaacagtaaaggctactattcgctcacactaaagactgcactcaagttgccatttattacttacagcccgcaggaacagcaactcaccaacttgagtagcgagatcgagaactctctcagcccacatcaatcttcgatctacagtcaattgatggaatctgaggcagaatggactgatgataatatccatcatcaagtcgcgaaaatttggggaggcttggcatga

SEQ ID NO: 338190 - DNA, 1434 bp, Pseudomonas aeruginosa
atggctttcgatgcgtctccttcttggagcggcttcaattaccaaggtaaggtcgctctctactacgccctaaggctgataaacgcaaagcctgtaggcgcagatctgtcgagttacagcttgatgcttgagtccactgaggacttcgagatccagcacgatggagatcccgtctctttccatcaagtcaaagcatataactctagcacttacagtgactactccgatgctctgttcgggattatcctggaactatgcaagcaaccaggcgttaccgggctaatccacacttggaagttaataaaccccaagcctggctttcagaacctgacaacatcgataagagatgacctgaacaccattctcgctcagtaccaaaatacaaatcccaagattgggagtacggtgctcgaaaaggccgtttccaatgaaacaagtattcctaagcaagcagccagattaagggccgccttcaagggtaagaccgcagatcagttatacgcgcatttagactcgatcctgaatggcaaaaataacgctctagccagacttgattcttatcaatatgacgatggcaacaggttctgcagcctagacaacatcaacaccaagataaagtcggaaatctctaacgcactgactatcagagagaccattgtcacatctgagcatctggaaaaaatcttccactgtttcctagggatgatcgaccaatacatcatccatcggcacaagaccaaacagcaaggcacgaaaatcccaataacctttgaggagatagttcgagcccttgacgtcgaccatgaagatattggcaaagaatacctagcctgtaaatttaaagaaaaatttgcctatttgatcgatgaatacatgggcgaccaagacgactatgcagatccaggccaaggcgaacagtgcaatctaaaagaagcaaaaaaacttctactaggcttaagcgccacggatctatggtcgcactatcgaggcttctcgcctcaaatttatcttgatcatactaacaacacggaaaatgcctttgcaacaaacctagaaggcattcgacatgtgcttataaaagctctacacgccatcaactttcagcgcgcctcgcataacgaggtcaagtataagtttacgtatcgcacaacaacgccgccgcatcagcattacctaccaaccaccattacaaatgcagcacgggttagccagacaaaaagaaaaatcatagacaatccgagcatgagcgagatactattcgaagttgaaaatcttatatacggcggtttggaatctcactcattctcgcccacattgatggtgcatacagaggctccgaaaccagaaaacgcagacccccgctctaaaagagacgaagtcttgaattttataaccctagtccctatagcgactgcgaaggatgaattggcataa

SEQ ID NO: 338191 - DNA, 183 bp, Pseudomonas aeruginosa
atgttcgatgacgttatgccccaggagaaaaccagcgccattggagagcgcatcgacttcagcaagaatctcaggaaggtttttcgaaacctttcgatcaagctcgacacccaaatccggccgcacagccccaaccttaaagatacgatctggctgaccctccttgccggggacaacttctag

SEQ ID NO: 338192 - DNA, 123 bp, Pseudomonas aeruginosa
atgttcaccgtgcggctgttaagggcctcgatattggcgcaggaggcgctgatcttctcggaaagctcgttcatcgcgcggatggtctgctcgaccacctgtttgccgtcctcggcctggtga

SEQ ID NO: 338193 - DNA, 129 bp, Pseudomonas aeruginosa
atgaaacgcaagggcatcatcctcgccgggggctcgggcacccgcctgcacccggcaacgctggccatctccaagcagttgctgccggtgtacgacaagccgatgtctactacccgctcagtaccctga

SEQ ID NO: 338194 - DNA, 465 bp, Pseudomonas aeruginosa
atgctgatcggtgcgctgctggttctcacctgggtcatcctcctcgtccgatacccggccaaggccctgccggtgtccctggcggctctcgccgggctgggcctggtggcggcctgggtgatctggcaggacaacgacgaaagccgccacctgcaacgccaggaactgcgcctgagctatgcgccggaacgctgtccggtggaccggccgctggcggtcgagctgaagaacggcagcgaccgtccgttgctggagctacgctggaggatcgccgcctaccgccccggcgacagcgtcaacctggccgacaccagcttcgacagcccgcgctaccgggcgccgaacgccctgctcggcggcgacagctggcacgactgcctgccgctgccgccgctgcgtccgggctatcgcgccagcaccctggaattccgcgccgaacgcctggacgggcgtttcggcaactga

SEQ ID NO: 338195 - DNA, 366 bp, Pseudomonas aeruginosa
gtgatcaaggccctggacatggcctacaaacagcgcggcaagccacagcaggtgctgttccattcagaccagggcagccagtacgccagccgcctgtttcggcaacggctctggcgctatcggatgcagcagagcatgagtcgccgagggaattgctgggataactcgccgatggagcgcctgttccgcagtctgaagtcggagtgggtcccgtcaacgggttacctgacggcgcaggaggcccaacgggacatcagtcattacctgatgcaccgctacaactggatcaggccgcatcaattcaacgacgggttagcacctgcggtggccgaagaaaaactcaacccactgtccgggatgggttga

SEQ ID NO: 338196 - DNA, 624 bp, Pseudomonas aeruginosa
atggcacaggcaacgatactcgaccggctacgcataatgggagtcgcgctttcagcaggcagggaatggtgtccagcagaggtgttggaactcctatgtgaccagagactgctgcatcctaaagcacaaaaacttcgccaccacactcccatccctgcggtgacggcgcttcatttgtcaaggcatggtagccttcaggttgaacctaatgggtaccagtcgcccttcgataataaagaatccctgactcctatatttatagatagtatccgtgacatacaaatctgctcgatcaccatgaatttcacgcacagcattaggactcttcgttaccagaaagggctctgcacctctcagcttcttcagagcctcagcatcatcagtctggaactccatcaaaaaatagcgatagacaaacggaactgtagccccaccagagtcatacaggacctcgtatatagccccgccatttccaaccactttaacagagacaatccttgttggagaaggcatacttggcgaagtgaaatatatataaccaaacagccccagagccaaacacgagagccctatcagagcaaaattagtaccctttcgacttcgcatagtctattcccgccttaa

SEQ ID NO: 338197 - DNA, 999 bp, Pseudomonas aeruginosa; identical to SEQ ID NO: 325525

SEQ ID NO: 338198 - DNA, 201 bp, Pseudomonas aeruginosa
atgagtgacttgccgcagaggcctaaggccgctgcgagcaaccacccagccgagcgtggcactgaacagggcactgatgaccaatccaatccagaaccatcgttgcagcgtgtcgaaaaagtgtgtgtgattggtgacgtcaagaatcagcaaagctgtgagcggctcagcctgatcgagggtgtccgaaattttgtgtaa

SEQ ID NO: 338199 - DNA, 1281 bp, Pseudomonas aeruginosa
atggatccgctcccctactggtctctgagcaaggtcatcgcacaagggatccatcagccattccagggaagtgactcagaggccgtggatgccctgcaccggcaactgtccgccagcgttacttcgcaaatgctcagtgacgtacctcttggcgccttccttagcggtggcgtcgacagcagcacaatcgtggcccttatgcaggctcggcattcccggcccgtacagacgttcaccattggcttcgacgagcccggctacaacgaagcggaacacgccaaggctgtcgcccagcatctcggcacccagcacaccgagctttacgtcagggccgaagacgcactcgcggtggtgccgtgtcttcccggcatctactgcgagcccttcgccgatagctcacagataccgacctacctgatcagtcgcctggccaagcaatccgtaacggtcgctctcaccggcgatggtggcgatgaactgtttgccggctacaatcgctatctcacggcatgccaggcatggaacaggttgcaacagcttccactggttgccaggatgacgctcgcaaaactgctgagcgctctgccaccggcgatgtgggacagcctgttctctctcgcaagccccttgctaccctcgaagtaccgtttgcgcacaccaggagacaagcttcagaagctcgccggtctcatggcgttttccagtgaagaggacttctacaaggatctggtcagccactggaagaagcctacgaacctcgtcatcggcagcgaggaatcggcttccgtcttttggaatcttgacagcctccccgagatggaaagcttcgaacaatggatgatggccatggatacccggacctacctggccgatgacatactggcgaaggtcgaccgcgccgcaatggccactagcctggaaacccgcgtcccgctcctcgatcatcgcgtggtcgaactcgcctggaaaatgccactgaacctgaagatcagaaataacgacggcaagtggttgctgcgccaggttctttaccagcacgttccccgggaactgatcgagcgtcccaagatgggattcgccatccctctggacacctggctgcggggaccgttgcgggagtgggccgaaagcctcctggctgaggaacgcttgagacgcgagggctacctgcgcccggagccgattcggcgagcctggcaggagcatctcagcggaaaaagaaactggcaaggcccgctctggaatgtattgatgttccaggcttggctggaacatcaatga

SEQ ID NO: 338200 - DNA, 1047 bp, Pseudomonas aeruginosa
atggaagccaacaagaagaaggcgctggatgcggctttgtcgcaaatcgagaagcagttcggtaaaggcgcagtgatgcgtatgggcgaggagccaagagaacctattccggctgtttcaactggctctctcggacttgatattgcacttggtattggtggagtacccgaggggcgtataattgagatttacggtccagaaagttccggtaagtccactttgtgtttgcaaattgtcgcacaagcacaaaaacttggaaaggcctgtgcatttatagatgccgaacatgcgcttgatccactgtatgctgaaaagcttggagttgatcttgatagcttgttggtatcgcaaccggatacgggcgagcaggcattggaaattaccgatatgctcgtgcgatccggttctatcggagtcattatcgtcgactcggtagctgcattggtgccgaaggctgaaatcgaaggcgaaatgggtgactcgcacgtgggcctgcaagcccgcttgatgtctcaagcgctgcgcaaactgactgcaagtgtaaaacagaccaataccatcctggtatttattaaccagattcgcatgaagatcggtgtgatgttcggcaaccccgaaactacaactgggggaaatgcacttaagttttattcctctgtgcgacttgatattcgccgcaccggtgccgttaaggatggcgagaccgtgattggcagcgaaacccgcgttaaggtcgtaaaaaacaaggtggccccaccgtttaggcaggcagagttccagatcatgtacggtgctggaatctacaagatgggcgaacttatcgatctaggtgtgcaagaaaaactgattgaaaagtcaggtgcttggtacagctaccaaggcaacaagatcggccaaggtaaggcaaacgctgcgcaatggttgaaagataacgagcaggccgcacaagagcttgagaagcagatccgggacaggctgcttagtgtcactccagcagccaaacgaactggcagccctatttctgaagttccagaagtcgaatattga

SEQ ID NO: 338201 - DNA, 813 bp, Pseudomonas aeruginosa
atgcagcgctggcgcaaagcctaccgccccagacgcaaattgctgccaggctgtgagcgctccgaacggttcgctcatatgctgcgtgaacgtttgtctcccgagcagattgccggcaagctgcgcagcatgaacatacccaacctaagaaatgcctacgtctgtcgcgagacgatctacaacgcgatctatcccctgcccgtcggtgagcggcgcaaggagctgatcatctgtctgcgtcaaggtgagacgacatgcaggccgcgttctggtggtgtagatcggcgcggcctgattcccaagatagtcagcatccacgtgcgcccgacggagatcaaagaccgcttgatgccgggccatcgggagggcgacctgatcaagggcaaggccaacgtctctgtggtaagtgccttggtggaacgcaccagtggctacctgatgctgaacaagatgaacgacgcgacggcgacctcggcgttggaaggcttcagtccggcgctcaatcgcatgccgctggcgatgcacaggagcatgacctacggccagggtcgggagatggtgagacacgtggatatcacccagaagaccggcgtggcgatctacttctttgacccgcatagcccttggcaacgtggcagcaacgaaaacatcaacggcctgaaacgccagtgcctgcccagaggaatggacttgtcggtatacagcaaagaacagttggatgccatcgcactgcaattgaacatgcgtccgcgtaatcgcttcgacttcaagtgtcctatcgaagttatgggcgaggtaatgcatgcggcatga

SEQ ID NO: 338202 - DNA, 2082 bp, Pseudomonas aeruginosa
atgctcaaactgaagaagggatacaccgagcgcgatttcggtaagtatactgaaagccttggtcattacttttgcaatgctctcgtatctgcatacgaaatattctggccagataatagctcaactgaggtcacttatttttatcccatcattaaatttttagatttcttggccgaagatggttcgcaagaagaactcaggaatttcttgaaaactggtgagatctcagatctaggcgaatcgtacatcgttgtgcttttccataatctaatgagcggctttcgcagtaatcttgataagttagagattgaaaatcgaacaaaaaatacctatgcggccggcgtacgagcgttcgttcgccatcttgcaaatcgtggtgtcgtaccacatggcttgtacatcaaaggcttcaagtttgagcgtggaataggctccactctgcttgatgtgaccattcataaagaggttgacatccaagcgctgatttctcagcatcaggatacgttgatttccgaagggcttgatgatctcgaaggtatggaaagccttctttcaaatctatttaatgaggcaggtgcctgtgctccgctggaagattcgtttgatattattgaggcatctgctcgcgtcttagatagtcgcttggaagtattgaaaagcgccagtgcggatttagtcgtacagcactataaattacttcaggatgcagagcagtgggtgaagtgtcaagcatatcaacggaaagcgaaaggcttgagggatatgtttgatcagcctggcatcggggtaattggtggccaggcggcaaaagttaggggtgaggaatacgccatcataatggatggctgtgctctgcaagtgatagttacttactgtcatatctatcatggcggaatttatccttcagatgaggatgcttcctactcattcttgtctagccgcatacaaaaaagcagtatcaccatatctgatgttagaagcgcccttggatattcgcgtgaagctcgtgtggctgcgtttgtatggctctcgatcaaatatgcaatcaaccccgatgctctattaaatctcacaacgaactgccttatttccacgggcaatgatggtcagtatcagcttgtctggaataagttacgcaaagggactgagaatcaggagtcagtagttgtaaattcgcgaatggacggggttacacttacttgcgataccttgacagccgttgatgttgttgagtatctgaaggtatgcactaagcatattcgcgcttttacacgcgatgaagatcgcaatagtttgtttattgggttctacaaaaactatacaaaaggaactggcggtgagcgagtgtatgtgccgtcaaagctcgcgcttaacacaatcaataatagtttcaaatcgctctgtcgagaggtctccggagagcgctggtcgagtacactaaaagcgctgcgtggcagcgttcttttgttgactggccttgtaacccgagatgccatgcaggtaatgctggtcggtcgtcatagtgacttgacgatggcagcgaagtacacccaccacctgcctgaaatactgcgccgtgaaaaaaaggttcgcgaatttttggactggtttgaaacagtattgaccgtcaatattgatcagtttgcagagaaagtcggtattgatcccgaggcttatgatatacgcaagcaaaggattctcaatcagcagttcggcggcatacattgctcagatcccatggccggcgtacagcctggcacgatagagggggaagtctgtcatcgcatcgataagtgcgtcagttgctcgaatcgccgtagtttgtttcttgccacaaaagaaaatattgccaatgttatccactggcgcgaggtgctggcaaaagccgaagagagcttaggggaagtggagttttcaaggtggagtctgtggaagttgttcgtgagttcaattctcgacaggctctacagtgcgcgtgaacaacgcagattgcttactcaagcagaagagtattgcaatagccatcagaatccatatattgatgttatccctgttttcgtcatcgaagaggctacagtatga

SEQ ID NO: 338203 - DNA, 2262 bp, Pseudomonas aeruginosa
atgagtgtcattagtttgaatgcttacagaagttacttcgatgatgagcgcggcctaagtgatcttggctcttattacgcatcctggtttgtcggtgcgtcgcgttttccagataatcaatgggttgtagaggataaaacaggccaacagattatccgctttgatgttgccgtggcgcctaatgaactgcttacggataatgaagatctctgttatgcggttaagctttcggcataccttgcgcgcgctattactcatgacagaaagacaggcggccttttgtccggtgcttctcagtataagtatgtcaataacattattaaccacgttcgctggctcaggctccaaggtgttaatcatctttccagtgtgaatgatggcgtatttgcattttttagggattcaattgctaatccgttgtatgtgcgcctgaatcttgaagatcgtttgcgagaaaagcttgacgaattgcagggtattcctgcttgtcttgagcaatacaaggtgttccgaagcagggttggtcatgtcgaatttaataataacaaactaagcgaagctctcggtgttagtgataggcttctaggaagcgccggatcaccgatggtagtgatgttaaccaattttcgtcagcataatggtttttacattaaaaatagtatcaaggatcgttatgcagggggtagtgtcaaggaaactgcagagactagcagtcaagactcaatccgcaaagaactgacgtctatatcaaagctgtatcgtcagtgccagatattcaaagacctttttcctgttagccagcggatacccgaggattactttcagaaaaataatatcaatccccaaaaaatatccaaaaatatgggccgggccggcgagcgcacgcgcgatattccgcagccaattttctttgagttgatggatcgggctattcgctgggttgtggattatgccgagccgctgcttgaacttgactctcaagcgctcgcgcagtacgaagagtacgttagtcaagtagggcgcggcgggaaagaagtgcataaggtgcactatgcgtcgaaaaaaatgcgcttctggcttagcaaacaacttgagtggctggatggccatccgggcagtccatatcccataagtgggtttacaaaagatacttctgccaagaaatttgaatcggtcttgcctgctgagcaaattcaaaatggtcacgcacttcgtgctcaaggattgacatatcaggagataggcgagcgcttgggtgtgagcaaagcaacagcacataatcttattactaagggggttgctgttagcggtgcatcgcttaataagtgtctgtatcacttactcccaaccgcctgcttgcttgttatctattgtttcaccgccaggcggcaattcgaagtcgaatcgttgcaagcaggatgctgtgtggatactccgaacggcccggttatccgcatgtactctgccaaggtttatcaagaacacgagtattttccggtcacgaagcttgttgctaaagcggttcgcgtgcttgaggccctgactgagccggttcgcaatggagaaagccagtcgttacttactttcccggcgctaggtggtggggaaattaattattggtcaagcggcaaagtcaacgaattcgctgagtacgtcggcgttccagacaatgaaggaaccccttggcagtttagcgagcaccagttccgccgcttcttcgctatgatgtttttctacaagtttgagtccggtgatcttgcaacgctgtcctggcacttgcgtcacacagattttgaaatgaccgccaagtacatcacggacaaagacttccgcagagcttttgaagagatcaaagcagaacgcattgtatcatttgcacagtctgctgctaatgcaagaactgaagcgctctgcggaaatatgcagaaagaactgggtgattttttcagttcgtttgatgctgtttcagagagtcgcgcagaaaaaatgattgggaaggttgaggaaatcggctacattcttaactttgtgcctgacggtgcatgttttggccagacgccgaccttattagagcgcagtaagtgcctcatggatgatgctgttcaaacatcttcggcttgccgagggtcgtgtgttggatgccctaatttgctgggctttgagactggcatcagtgcggaagatgtcggcttggttcttgatcctgcatcgtcaccgatgcttaaagcgtttgccgacagacagggggctcacaatgtctaa

SEQ ID NO: 338204 - DNA, 480 bp, Pseudomonas aeruginosa
atgtctaagcatgttagtgaagcgaaccggcaaaagacagagcagaagatacagcgcaagctcaacggtctgaagcactacatcgaaaacggggtggccgattttccaattccgaagaagttcaccctcaactggtttgctgccttggcttctgagccctacgagagcgtctctaaggccggtgatcaacttaggacgggttcagccactcacgagcgtgtgatctcgtcactggcgagcgcacagtcggttttggagaacggcagggctgagcagggcatttgtctcaagtcaaagcgaattagcgaacttgacgcgaaggtaaaaaaatatgaaacgatggtgcctggcttgtcgcaaaccatcgttgaattgcttgatcaggtgcgtgaacttgagcagcgcatctccttgcaacaagcccaatgggcagacaagcaattcagtgtcaacaagctcaagggaggctcaaatgtatga

SEQ ID NO: 338205 - DNA, 1209 bp, Pseudomonas aeruginosa
atgtatgagctattgccgacgaaaaatggacagcacatcgttattgatgagtcgggagtgcttcagcgtcacgtaactcaatatttgcttgatcttgaaagcgtacagtgtcatgagaaatcctatgttcgtcagatcgcatatcgactcaaggcgtggttgaactggcttggtgcacgcgatatttacgatgtcacagacaggcttttgtgcaagtatcgtgatgagctaaagatctctggcgaccttgaagcaaaagctattaattaccgagtttcatccgtctgcgccttctattggtatgccgaaaacacgggcttgtgtcgtggagtgatcggttctaacgacatgctaagcggtcgagtgtttcgtatcgtcgtaaatctgacgacgcaagcgagtagtgcgaactataaaattccttttttgcttggaactgttcagcaggcaagaaagcgtattccgtccgcagacgaaattgcagccctgaaagatggcattgctgataaaactttggaatgtgggcacccgctcgccgaagaaattaatgtgcgcaatcaattgatgcttcgttggatggcggaggcaggactgaggcgcttggaggttgtatccctgcctgtgagtgcaattccgaccaagttcaagcccggaaccatggtgatggtcactttgaccaaaggcacaaagtttagcaaggtacgtgacgttgaggtcgagtcctctctgattcaagagacccttgattacattgcgtatgagcgtccggagatagtccgaaagtgccatgctggccatgatcctggcgttgtgtttgtcagcacttataatgcaaacggcggcacgtttactgcgcaagctatcaccgacctgctcgattctgtagatagtgaaatttcgccgcacgcgctgcggcgctatgcgttgacacgttatgctgcttatctgtatcgcattcagctgtcgctttacaaagccggcgagaacgccgaaatagacaggcgtagcatcgagttgcggctaactcagcaagcgggtcataaaaaagtttctacaacattcagatcatatgtcgatgtggctatcgcaatgactttgtctgattctgggatcagctcgctcgaggagtgtcgtatactgctgcaaacacagctttcgatgatcacttcccagatcgaaacggcgagatcgctcgcaaaagaagtgtaa

SEQ ID NO: 338206 - DNA, 474 bp, Pseudomonas aeruginosa
atgcgtaaaatccgtgaggtgttgcgcctcaagttcgattgcgggctgtctgtccgtaagatctcccgcagtctgggcataggccacagcagtgccggtgattacctctgtcgctttgccgccagcggtctagcctggccctgctcgttgtccgattccgaactggaacagcaactgttcccactggcccctgcggtgcccagtgagcagcggccactgcctgattggtcttgggtgcacgccgagctgcgtcgccccggcgtgaccctggcgctgctctggcaggagtatcgcctgagccagccgcagggttttcagtacagctggttctgcgagcactaccgggcctggcagggcaagctggacgtggtgatgcgccaggaacatcgcgtcggcgagaagttgttcgtcgactacgccgggcagacggtgccggtgatgggcactactactcggtgccgtaccaactggtga

SEQ ID NO: 338207 - DNA, 489 bp, Pseudomonas aeruginosa
gtgaagaaacaactggtgaagaaacaactggaagtacgcctgacagcgcgcacggtggagtgcttccacgccaatcagcgggtggccagccatcttcgctcaccgcacaagggccggcacagcacacaggccgagcacatgcccaagagccatcgcgagcacgccgagtggacgccacaacggctgatccgctgggctgagcagaccgggccgaacacggccggcgtgatcagccacatcctcgaacggcgcatccacccaacccaaggctaccgggcctgcctgggcatcctgcgcctgggcaagacccatggcgaagtgcgcttggagttggcctgccgtcgcgccctcagcctcggtgcgtgcagctacaagagcctcgaatcgatcctgcgccagggtttggaaagcctgccgttggctcaagccaacctgcccctgctgccggacgaccacgccaatctgcgcggccccggctactaccactga

SEQ ID NO: 338208 - DNA, 399 bp, Pseudomonas aeruginosa
atgccccttttcctgagtccggtcgcctctggcttcccctcgccggccgaggatcacatcgaggccaccctgtctctggacgagctgtgcatccgacacccagccgccacccatctactgcgcgccgccggcgacagcatgcagggcgccggaatcttcgttggcgacgtgcttatggtagaccgctccatcgagccgcacgccggcagaatcgtggtggccaccgacgacccgtgcgtcgctacaccgccagtgactgccgagcgggtgatgggcgtgatggatacgatcaatgcgcgatggggacggggaatcatgcgatctgcaggggtgccggtgaaaccggactgggggcatgcggcgggagatcatgagcccgagctatacgacgcggattga

SEQ ID NO: 338209 - DNA, 282 bp, Pseudomonas aeruginosa
atgacagagacccataaagacaccatttgcgatgtatgcgctaccgctacgagggtgccgggatacggcgagcagttcgggacgctccaggcgctctggggctatggcgcagggcatgatggcgaacgctatcgagtcaatctatgcgaaagttgctttttcgcggcgctagcgtttttgaagcagaagcgccgcacgcagaatctgttcagcgatgagcagccctgcgaggaacgcccattcggactagtcgcccgtgatgactactttggcgattcgtag

SEQ ID NO: 338210 - DNA, 618 bp, Pseudomonas aeruginosa; identical to SEQ ID NO: 323475

SEQ ID NO: 338211 - DNA, 1092 bp, Pseudomonas aeruginosa
atgtccggcaacacctacggcaagctcttcaccgtcaccaccgcaggcgaaagccacggcccggcgctggtcgccatcgtcgatgggtgccccccggggctggaactgtccgcccgggacctgcaacgcgacctcgaccggcgcaagcccggcaccagccggcacaccacccagcgccaggaagccgacgaggtggagattctttccggggtgttcgagggcaagaccaccggcacgccgatcggcctgctgatccgcaacaccgaccagaagtccaaggactactcggcgatcaaggacctgttccgcccggcccatgccgactacacctaccaccacaagtacggcgtgcgcgactaccgcggcggcggccgttcctcggcgcgcgagaccgccatgcgcgtggccgccggggctatcgccaagaaatacctggcgggcctgggcatccaggtgcgcggctacatgagccagctcgggccgatcgagattccgttcaggagctgggacagcgtcgagcagaatgccttcttcagccccgacccggacaaggtgccggagctggaggcctacatggaccaattgcgccgcgaccaggattcggtcggggcgaagatcaccgtggttgccgaaggcgtgccgccgggcctgggcgagccgatcttcgaccgcctggacgccgaactggcgcatgcgctgatgagcatcaacgcggtgaagggcgtggagatcggcgccggcttcgccagcatcgcccagcgcggcaccgagcaccgcgacgaactgaccccgcaaggcttcctgtcgaacaatgccggcggcatcctcggcgggatctcctccggccagccgatcgtcgcccacctggcgctgaagccgacctccagcatcaccactcccgggcgctcgatcgataccgccggcgagccggtggacatgatcaccaagggccgtcacgacccgtgcgtcggcatccgcgccacgccgatcgccgaggcgatgatggccatcgtcctgctcgaccagttgctgcgccagcgtgggcagaacgccgacgtgcgcgtcgacacgccggtcctgccgcagctgtga

SEQ ID NO: 338212 - DNA, 984 bp, Pseudomonas aeruginosa
atgaagacctccatgccgcgcgccctcctcgccctgttctgcctgctcgccagcctggcccacgccgctcccaacagcatcctgcaccgcccctacgacctggacaccgggcacggcgtgctgcgcggctccttgctgctgccgcgcagcgccgtgccgccgccggtggtcctgctggtcgccggctccggtcccaccgaccgcgacggcaacaaccccttcggcggcaacaaccgctacctgttgcgtctcgccgaggccctggccgaacgcggaatcgccagcgtgcgctacgacaagcgtggagtcgcccgcagcctggcggcggcgccgcgcgaggaagacctcagcgtcggcgtctatgtcgacgacgtggtcgcctggagcgagcggctggcccgcgacccgcgcttctcccggctgatcctggtcggccatagcgaaggcgcgctgatcgccagcctggcggcgcctcgcacgccggccgaggaattgatcgccatcgccggcagcggccaacccatcgaccgggtgctgcgcgagcaactgcgcggtcgcctgccgccggcacaactgcgccaggccgactcggtgctggcttcgctgaaggccggcgagacccgcggcgatatcccgccggcgctcgccagcctgctccgccccagcgtgcagccgtacctgatctcgctgttccgcgaagacccggcccgcgcgttcggccgcctgcgcatcccgaccctgatcgtccagggccgcaatgacatccaggtcggcgtcgccgacgccgaggcgctccagcgagccaagcccgactcgcaactggtgctcatcgacggcatgaaccacatcctgcggatcgccccgagcaccggtctccagcagctttccgcctacaacgacccgaacctgccgctggcccggcaactggtcgaggcggtcagccgcttcatcctgcgcggcgcagaggcggaaaaaggccgctga

SEQ ID NO: 338213 - DNA, 780 bp, Pseudomonas aeruginosa
atgatcgatagcgatacccaaccggccgcagaagaagccgagaagaaaccgccgcacccctgggccgaactggccccggagcatttccgcctgctccgcctggcgccactgcccaccgaccgcgcgaccggcgcccgccccctgcgcttcgtccagctcggcagggtcgaacggcacagcgcggaccagagcctgctgcgcctgagcatccaggtgccaggcctgatgctgcgcaaggagcagaacctgctggaggtctgggccgatcatcgcaacaaggaagtacgtttcggttcggacgccgggctcagcctggaacccttgaaccgcgggctgggccgtttcctgctggcccaggcgatcgcctgggcgcaacgacgctgggcccactacaaggtggaaggcggcgcactggcgctgaaggatggcctgaccgaagacgcacgcctgcgccgcgaccatttcatccgcgcccagggcttcgacgtcagctatgaggaccagcggttgctcaaggcccgctacagcgccggccgggtcagtgagctgcacagcgattggcacaaggacaaggtgcagatcgtgccgctgctggacgccgcggcgatgctggaacaggccgagcagaccctgcaggcccaggatgcggagatccgccaactggaacagcgcatcaaccactaccgccgcgacgacaccagcctgcgcttcaccatcgcctgcctgaccgccttcgcggtgttccaggccggcctgctgatctggatcgccactcactga

SEQ ID NO: 338214 - DNA, 915 bp, Pseudomonas aeruginosa
atgtccgagtcccgtctgctcaccctgcgcgactacatccgctgggctgtcagccgtttccacgccgccggcctgttcttcggtcacggcaccgacaatgcctgggacgaggcgcgccacctggttctgggctccctgcaccttccctgggaaatttctgacagctacctggattgtcgcctggaagacgatgaacgcgccgagttggcggaaatcctccggcggcgcatcgaggaacggattccggcggcctacctgctgggcgaggcctggttctgcgggattccattcagcgtcgacgaacgcgtgctggtgccgcgctcgcctatcgccgaacttatcgaacagcgcttcgcgccctggctgccggccgagccggcgcgaatcctcgacctctgcaccggttccggctgcatcggcatcgcctgcgcctatgcgttcgagcaggcggaggtggtgctcgccgacctgtccttcgatgcgctggaggtggccaacgtcaatatcgagcgccacgacctcggcgagcgggtctacaccgtccagggcgacggtttcgccgggcttcccggccagcgcttcgacctgatcgtgtccaatccgccctacgtggatgccgaggatttcgccgacatgccggcggagttccatcatgagcctgaactcggcctggcctgcggcgacgacggcctggacctggtgcgacggatgctcgccgaggcggccgaccacctcagcgagaaaggcctgctgatcgtcgaggtgggcaacagcgaggtccatgtgcaggcgctgtatccggaagtggacttcacctggctggagttcgagcacggcggccacggggtgttcatgctgtccgccgcgcagtgccgcgagcaccgggaactgttccgttcgcgcttggaaaagtga

SEQ ID NO: 338215 - DNA, 2643 bp, Pseudomonas aeruginosa
atggcgctcacgctcaagctttaccaaaaccgtgcattgaccagtcttgaaaaattccttgatgcagcgcggctcgaaggaccgtcgaaggcgtttgaggacaacgtcgatgttgggttagtcagtgattataaattgatgcccggattgccggatatcccatacgtctgcctccgcatcccaacgggtggaggtaagacggtaatgggtgcccatatcatccaaatctgcggatcctcttaccttgagcgtcagcacccggtggttctctggatggtgccaaccacgcagattaagactcagacaatcgaagcatttcgcgatcatcggcacccctaccgccaagagctggatgatgcttttggcggccaggtagcaatttttgatgtggctgaattcacccgcatacgtccagccgatttagtgaccaaagtttgcgttgttatttctaccgtggcagctctaagggtggacaaagaagaaggacgtaaggtttacgagcaccatgaagatcttgagggtcatttcactggttctgcggcggaactccaacatctcgacaagggcaaggatggaaaggcggtagcctcattcgcaaatcttctcaagctgtatggtccgttggtcatcatggacgaagcgcataatgcgactacgccactctcctacacggtgtatgagcgtcttggtccaaaagctgtggtggagctgactgcaacccctgatgtgtccagttcgaacgtattggtaagcgtgtccgcattcgagttgaaagcggaaaatatgatcaaatttcccgtaatcctcaaagagcataacggtgaatggcaggttgctgtcagcagtgctgtagcgagacgtaaaagcctcgccaagacagcgcttgatgagcctgaatatattcgtcccatactgctcatccaagctgagaacgccaagagtgaagccactgttgaagaggtcaaacggcaccttgtcgacaccgatggtgtggacgaaaaagcgattgctatcgctactggtacgcaacgtgaaatagatggaatcgacctgtttgctaatgactgtcccatcgaagtcatcattaccaagcaggcgctgaaagaaggttgggattgctcgtttgcatacgtcttctgctcggttgctcaggtgaaatcagacaaagatattcagcagcttctaggacgtgttctgcgcatgccatatgcggttccgcgccgccaggacgcgatgagcaaagcctacgcccacgtcaccacagatacatttggacgtgctgcaggtgagctgacccaatcgctcattaatattggtttcaaccccatggaagctgctgctgccatccgcaaggagaagcctccggagctggcattgcaaggcggtcaagtaggtacgcccgagcttccagtatcgagggttgtcttagcaaaggctcctgatttctcgaagatcccagaacgtgatcacgaacgggttctgtttgtactcgatgctgaagggcctggtggagtagtcgagctgaaagacgaactggactttcttacggttgaagccatcgtatcgacggttataggtaaggagaaaaaagcggcagttgctgctgaggttgaaaggcatcagcaagctacggtagcagccaaagctcccagtgaaaggggagttctgtttcaggttcctcgcttgtattcagtcgagcaaggcgagcttgagctggttgaccgtggcgcggtttcagcgtcgtttaactgggatttgctgtcatccccaccggaccttacatccttccactttgacgaatcgagcatgaccttcgaggtatatctcgacgataaaatggttcagttccagaatgtgaaagacgatgtgggcacgtaccttcccggcttcgcgcaggaccgtaccgcatcagacttgattgggtggttggatcaggagattcgcgagccatcaatcaagcagccggttctacgtgaatggttacgtcgggcggttacagggttgattgaggaacggggcttctcgctttcgcagcttctgaaaggtcagttcattcttagaagaaagcttggcgagcaattgttgctggcgaagaaaaacgcctatgacaaaggatttcagcaggcgctgttccatgatgacttggagctggttacgtcatctgaaccagatcatgcgtttacttatccagcagacatggctctgtacccggctacctcgtactacgcaggatcattcaagtttaagaagcactactacccatttccgggcatgctcccttggaaaacagcgaagggtgacgacgcagaggaatatctctgtgcgcaggcgatcgagctgctggatgaggtcgaattttgggtgagaaaccttgttcatattacccagttttggatgccgacggcgagtcaacgtacctatcccgatttcgtggctcgtctcaaagatggacgcctgtttgtcattgagtacaagggcggcgaccgcgtaagcaacgacgacagtaaagagaaacgcttaatcggtgagttatgggctaagaaatcaggcgggaagggtgtgtacctgatggctcagaaaaaggacgagcagggtcgtgggttgcgtgagcagctacttaatgccattaacaaagctccctga

SEQ ID NO: 338216 - DNA, 1512 bp, Pseudomonas aeruginosa
atgccactactgtcttggtgcaaccgtgatgccgacctgacgcgggctgccctagcgccgtaccgtctgctggagccggttgctgaaatgtcctatggagagccggactctccgaacatgctgatcgaaggcgacaacctcgacgcgctgaaggcgttgcttccttactacgccggtcaggtgaaatgcatcttcatcgatccgccgtacaacacgaagtcggcgtttgaacggtatgacgacaacctagagcattcgaaatggctgtccatgatttacccccggctggagcttttgcgtgagctgatgagtcaggagggttcgatctggataaccattgatgataacgaggcccactaccttaaggtcatctgcgacgagatttttgggcgtaagaatttcatcgctgaaatcatatggcagaaacgcacgtcccgtgaaaaccgcgctgcggttgggtcgtcccacgatacgatgctcgtatacgccaaaatggaagcttcgaagtggaagaagtatagaaacctgcttcctccgaacgataaaggctatggtaatcccgacaaagatccgcgtggtccgtggcgatctattccgttttcagcgcaaggttttagaccaaaccagatgtacccaattgttagtgattctggcgaaacccatttgcctcccaaagggcggtgctggggtgcactggagtcggaattcaatcggtatcgtgcggaaaaccgtgtttactttcccaagaatgggaagggtaagcctcgcctcaaacggtttccatgggaagacgaagggcttgtacctatgacgttgtggcatgccatagacgctggtaccaccgaagaggcgaagaaggaaattttggcgctgtttcaggatgtggaggcgttcgacactccgaagcctgagcgcttgctgaggcaggttctggaggtggcaagcaagcctggagatctcgtactggacagctttttaggctctggcactaccgctgccgttgcacacaaaatgaagcgtaattggataggcattgagatgtccgataatgctcgtcttttctgttcccctcggctgcggcaagttgtaaacggtgagcaaggtggcatctctgaagtcattggctggaatggtggtggtggctatcgatattacaaattgggagttccggttttcgatgatactggtcatatccgagaagggatttctttcgagcaattggcagctcacgtttggttcgccgaaaccggcacagctcgctcgtcatccgctgagaaatccccttttctcgggaagcatcatggcacctcttattacctcctcttcaacggcatacttggcgatttgaccgcgactggcggcaatgtactcaccaagcggatcctcaaagctttaactaaaaccgaaggaccgacggtgatatatggtgaagcttgcgcaatctcttctgagcttcttctggaatcgaaaatcacctttcggcaaaccccatacgacatcaaggctcgctga

SEQ ID NO: 338217 - DNA, 339 bp, Pseudomonas aeruginosa
atggcgcagctcctcgacgcggccttgttgctgggccagcagccgctcgcgcagtacagcgggcgctgcggccggcaggccagcatcgaacgggctttcgcggcgcaggtggacgatgtgcgcggcgcggatcatgatcttggacggcacgcagccgacattgacgcaggtgccgccgatggtgccgcgctcgatcagcgtgacgcgggcgccttgctccacggccttcaaggcagccgccatcgccgcgccgccgctgcctatcacagccacgtgcagcgcttgttcaccgccaacatgcttcgtttcgccaccgagccagcccagcgccttgtctag

SEQ ID NO: 338218 - DNA, 174 bp, Pseudomonas aeruginosa
atgctctccggcgatttcgcaggcactcagatcctgaacatcgagcgactaaatatacaaatcaacctggccggaggtaattcccagatcgaggacacccgaagcatcaacctagatcaacttgaccccagcatcgccaaaacgctacgcaaacatctcaaccggtcgcaatga

SEQ ID NO: 338219 - DNA, 1005 bp, Pseudomonas aeruginosa
gtgcctgtcatcgacctgcgcagcgacaccgtcacccagcccaccgccggcatgcgcgaagccatggccgcggccgaactgggcgacgacgtctatggcgaggaccccacggtcaaccgcctggaggccgaactggcggcgcgcctgggcttcgccgcggcgctcttcgtaccgaccgggaccatgagcaacctgctcggattgatggcccactgcgagcgcggcgacgaatacatcgtcggccagcaggcgcatacctacaaatacgagggcggcggtgccgcggtgctgggctcgatccagccgcagccgatcgacggcgaggccgacggatcgctccacctggacaaggtcgcggcggcgatcaaggccgacgatttccacttcgccaggacccgcctgctggccctggaaaacaccatgcagggcaaggtgctgccgctcgactacctggccgcggcgcgcgccttcactcgcgcgcgtggcctggccctgcacctggatggcgcgcgcctgtacaacgcggcggtgaagctgggcgtagacgccagcgagatcacccgacacttcgactcggtgtcggtgtgcctgtccaagggcctcggtgcgccggtgggctcggtgctttgcggcagcgtcgaactgatcggcaaggcccgccgctggcgcaagatggtcggcggcgggatgcgccaggccggcctgttggcggctgccggactgtacgccctcgaccaccaggtggcacgcctggccgacgaccacgccaacgccgcgcgcctgggcgacgggctgcgcgaactgggctatgcggtggagccggtgcagaccaacatggtctacgtcgatgtcggcgagcgggcggtcgcgctgcgcgacttcctcgccgagcgcggggtgcggatcagcgcggcggcgcgtttgcgcctggtcacccacctggacgtttccgccgagtccataggacaagtactggatgccttcgcggcctttcgtcgctcataa

SEQ ID NO: 338220 - DNA, 1224 bp, Pseudomonas aeruginosa
atgatcgatttctggctcgctgccggcctgctgctgctggcggccctggcattcctgctgattccgctgctgcgtggccgtcgcgcccaggccgaggaagaccgtaccgccctgaacgtcgcgctttatcaggagcggatcgccgagctggccggccagcaggccgccggcacgctgaccgccgagcaactggagaatggccgcgccgaggctgcccgcgaactgctcgccgacaccgagggcagcggcgaagagcgtagctcgcgcctgggccgggcggtcccgctggtcgcggcgctgctggtgccgttggtcgcgctcggcctgtacctgcattggggcgccagcgacaaggtcgagctggcccgcgaattcgcccaggcgccgcactccatggaagagatgactgcgcgcctggagcgcgcggtacaggctcagccggattccgcccagggctggtacttcctcggtcgcacctacatgacccaggaacgcggcgccgatgcagcgcgggccttcgaacgcgccgccgaactcagcgggcggcagccggaagtgctcggccagtgggcgcaggcactgtatttctccggtggcaagaaaatgaccgcgcagatcaaggccctggccgacgaggcgctgaagggcgacccggccgaagtgaccacccttggcctgctcggcatcgccgccttcgaagagcagcgctacgccgacgccatcggcttctgggagcgcctggtgtcggtgttgccgaacgaggacccggcacgctcggcgatccagggcggcatccagcgcgcccgcgagcgcatgaccgaggccgggcagactccgccggcgccggccgcgcccgctgccgccggggtgaccctgacggtgaaggtggatatcagcgacgcggtgaagggccaggtcaaggccgacgacagcgtgttcgtcttcgcccgcgccgtcggcggcccgccgatgccgttggcagtgaagcgcctgaccgtcgccgacctgccggccgaggtcagcctgagcgatgccgacgccatgatgccgcagctcaagctcagcggtttcccgcaggtcgagctggtggcacgggtatcccgcgccggcaacgccatctccggcgagtggatcggacgcggcaaaccgttgtctactgcccagtcgtcggcgcaagcgctgaccatcgacggcccggaccagccccaggcggcccggccataa

SEQ ID NO: 338221 - DNA, 1323 bp, Pseudomonas aeruginosa
atgcaggcgctgcatctgcaagcgttggagcctgtaatcgaaagcaccagcgatccgaagtcctatggatttcgcccggatcgttcgactgctgacgcaatggttgagcttttccacctgctgtcgccgcaaacggcgccggtctggattctggaaggcgacatcaagggcttcttcgacaacatcaaccacgaatggctgtgtcggaatgtctcgatggacacgaaggtactgcgcaagtggttaaaagccggggttatcgaccggcgacaactcatggcaacggaagccgggacgccgcagggtggaattatttcgccctgtctggccaatgccactctgaacggtctggaaactcagctgaaacgtcatctggcgaagaagctaggcatcaagaaggccgagaagaccaaggtgcagtgtgtacggtatgcggacgacttcgtgatcctggcggcttcgaaagaggtgctggaggaagaggtcaagccctgggtagagcaattcctgtcagtacgaggggttgagttatctcgggagaaaacgcgcatcacgcacattcaccagggattcgatttcttggggtggaatttcaggaagtacgtgccgaagtcaccacgcaggaaggccaagctgctgatcaagccctcgaagaagaacgcctcggcgttgtatcggaaggtgcgcgagatcatcaaaagtagtggggcactgacgcaggaagcgttgatcggccaactgaacccggtactgaaggggtgggcacaataccactccccggtcgtggcaaaacaaaccttcagcaggctggatcatctgatcttttggcgaatctggaggtgggcgaaacgtaggcatccgaggaagtcggctgattggatcaggaataaatacttccgatccataggcgggcagagctgggtgttcgcgtacccctacaagaatggtaagggagaaaagcagtaccgccggctataccagctggcgggaaccgcaatcgtgcgtcacaagcgtctacctggggcttacaacccctatgatgtggcgcacgagctgaagtgggaggcattgagagttcaacggatgcagcacaagctgcgttatcgggggcaaatactcagtatcttccgcagacagcagggactttgtgctctgtgcgggcaagcggtgagtaaggaaacgggctggcacgatcaccacgtcatacggcgtgtggacggcggctcggatactttacgtaatcgcacactgcttcatcccaactgccatgcgctggctcatagtcggcaaaaagatacacctctacggtttagtggtttatag

SEQ ID NO: 338222 - DNA, 549 bp, Pseudomonas aeruginosa
atggatctcgaccgtctctacctgccgcattggcagttcagcgaacaccaccagcggctgatcgacgcgccggccgcagcggtactcgacgcggtggaagacctgctgcgcttcgacgacccgctggtgcgcgccttcctcgtcctgcgcgaagcgccgggaaggctggccggcctgctgggccggcgcaacgacctggccggccgcccacgcttcggcctgcatgagttcacccgcctggagcgccgcgccgaccaggccatcgcctacggcctggtcggccgcttctggcgcgccgacttcgccctggaacgcatcgcggacggcgagcatttccgctgctacgaccagcccggagtggccaagctcgtgctgtgtttccgttgcacgcccagcgccagcggtaccctgctgcacacggaaacccgggtgttctgccccgatcgcgccagccgcctgcgcttcaccccctactggttggcgatccgcccggtcagcgggctgatccgccggcgcctgctggcgggcatcgagcggcgcctgggctga

SEQ ID NO: 338223 - DNA, 1581 bp, Pseudomonas aeruginosa
atgcgcctcgccgctttctccctgttcctcgcccccctgctgctcgcccagcccgccgccgctgccgccttgagcgtgtgcaccgaagccagccccgagggcttcgacgtggtccagtacaactcgctgaccaccaccaacgcctcggccgatgtgctgatgaatcgcctggtcgagttcgacgccggcaaggggacggtggtgccctcgctggccgagcgctggtcggtgtccgacgacggcctgagctatcgcttcgacctgcgccagggtgtgcacttccacagcaccgcctacttcaagccgagccgtacgctcgacgccgacgacgtggtgttcagcttccagcgcatgctcgatccggccaatccctggcacaaggtggcgcagaacggcttcccgcacgcccagtcgatgcaactgccggagctgatcaagcgggtggagaaaagcggcgaccaccaagtgctgttcgttctcgaccaccccgacgcgaccttcctgccgatgctgagcatgggcttcgcctccatctattcggcggaatacgccgaccagttgatgaaggccggaaccccggaaaagctcaacgccgagccgatcggcagcggcccgttcgtgttcaagcgcttccagaaggacgcggtggtgcgctacgccgccaaccccgagtacttcgccggcaagccggcggtcgacgcgctgatcttcgccatcaccccggacgccaacgtgcgcctgcagaagttgcgccgcggcgaatgccagatcgccctgtcgccgaagccgctggacgtggagagcgcgcgcaaggacgccagcctgaaggtcgagcagacgccggccttcatgaccgccttcgtcgccctcaatacccagcatccgccgctggacgatcccaaggtgcgccaggcgatcaacctggccttcgaccgcaccagctacctgcaggcggtattcgaaggcagcgccagtgccgccaccggcatctatccgccgaacacctggagctatgccagggatattcccgcctacccgcacgcccccgaacaggcgcgcaagctgctggccggcaagcagcttcccgagctgaacatctggacccgcccgtccggcagcctgctcaaccccaacccgagcctcggcgcccaactgctccaggccgacctggcggaggccgggatcaaggccaacatccgcgtcatcgaatggggcgagttgatccgtcgcgccaagaacggcgaacacgacctgctgttcatgggttgggcaggcgacaacggcgatccggacaacttcctcactccgcaattcagctgcgccagcgtcaagtcggggctcaacttcgcgcgctattgcgaccccggcctggacaagctgattgccgacggcaaggccgccagcagccaggaacaacgcaccggcctgtaccaccaggcgcagaaactgatccacgaacaggcgctctggctgcccctggcccacccgaccgccttcgcccttacccgccaggaggtgcagggctaccaggtcaatccgttcggtcgccaggatttctctcgggtcgccgtgaaacgctga

SEQ ID NO: 338224 - DNA, 516 bp, Pseudomonas aeruginosa; identical to SEQ ID NO: 335791

SEQ ID NO: 338225 - DNA, 1683 bp, Pseudomonas aeruginosa
atgaccaaactacaaatcgtcggcatgacctgcgcctcctgtgtcgagcatgtgaaagaggccttggagaagatccccggcgtgcatcgggcggatgtttcctacgccagcgggaaggccgaactgaaggtcgacgagggcgtaagccgtgaacagatgcaggccgccgtcgaggccctggggtatcgagcggcgttcgaagacgccacggcacctacccgctcaggcctgctcgacaaggcgcggggctggttgagcggcagcattggcgccgggaaagatggcgacaggctccacgtggcggtcatcggcagcggtggcgccgccatggcggccgcgctcaaggcggtggaaggcggtgcgcgcgtcaccctgatcgagcgcggcatcatcggcggcacctgcgtcaacgttggctgcgtgccctccaagatcatgattcgcgccgcgcatgtggcccatctgcggcgcgagagcccgttcgacgccggactgtccaccacgagcctgaccgtcctgcgcgagcggttgctcgcccagcaacagggtcgtgtcgacgaactgcgccacgccaagtacgaaggcattctggagagcacgccggcgatcaccctggtacgcggcaccgcccgtttccaggacggccgcacgctcagcgtggaactggccgagggcggcgagcgcatcgtcgccttcgaccgctgcctgatcgccaccggcgcgagcccggccgttctaccgattcccggactcaaggacaccccgtactggacctcggacgaggcgctggcgagcgacaccattcctaagcggctcgccgtgatcggctcctcggtggtggcggtggaactggcgcaggcctttgcccggctgggcagcaaggtcacggtcctggcacgcagcacgttgttcttccgcgaagatccggccatcggtgaagcgctgacggcagccttccgtatggagggcatcgaagtgctggaacacacgcaagccagccaggtgtcccacgtcgacggcgagttcatcctgagcaccaatcatggcgagctgcatgccgaccgactactcgtcgccaccggccgcacgcccaacacccaaggcatgaatctgcaaggcgccggcgtgaagctggacgaacgcggtgccatccagatcgactcgggcatgcgcaccagtgccccggatatctatgcggccggcgactgtaccgaccagccgcagttcgtctacgtggcggcggccgcaggcacccgtgcggcgctcaacatgaccggcggcgaggcgaagctcaatctcgacgccatgccggccgtggtgttcaccgatccgcaggtggccaccgtgggctacagcgaagcggaggcgcaccacgccggcatcgagaccgacagccgcaccttgaccctggataacgtgccacgcgcactggccaacttcgacacgcggggtttcatcaagctggtcatcgaggaaggtagcggacggctcatcggcgtgcaggcggtggccccggaggcgggcgaactgatccagaccgccgccatcgccatccgggcgcggatgacggtgcaggaactggccgaccagttgttcccctacctgacgatggtcgaggggctgaagctcgcggcgcaaaccttcgccaaggacgtcaagcagctgtcctgctgcgccgggtaa

SEQ ID NO: 338226 - DNA, 417 bp, Pseudomonas aeruginosa
atgaacgacacggcaagcgatctcggcagtcgcgacagcctgcgcaagacctggcaggtaatcagcttatgggggctgcctgccgtcgtggcgaccatagcgcttgttctggcggatcgacgccctgcgttgttcctggcagcgagcgccgcgctactcgtgatgggcggcgcctgcctggtcaacgccgcgcgctgtcgccgccttcactgctacatcaccgggccgtatttcctgatgctcgcgctgggtgcgctgctggcttatgggtttgccccaaacggcgagtatcactcccggctgtggttgctcctggcactaggggttacgccattgctcatctggctacctgaacgcctagccggaaggaaatatctgagcgccctagtttgcggggaagaccgggagtgtcggtga

SEQ ID NO: 338227 - DNA, 363 bp, Pseudomonas aeruginosa
atgaatgcctacaccatatccagactggccgaggacgcgggcgtcagcgtgcatgtggtgcgcgactatgtgctgcgtggcttgctgcaccccgcgcggcgcacggagagcggttacggcattttcgatgagcggtccctggcgcgtctgcgcttcgtgcgcgccgccttcgagtctggtatcgggctcgacgaattggcacggctctgccgggcgctcgatgcggacgatggcgccgacttgatcggctgcgtcgagtgcctgctccggctagtcacggcacggcaggcggccttagccgcagtggcaacccagctggccgggctgactcattgcgccggcgaaggttctgcctatgcgtaa

SEQ ID NO: 338228 - DNA, 237 bp, Pseudomonas aeruginosa
atgcgtaacgccgatcacgttgagtcaagcaaggtcttccgctggcgtgcttacacctggggcgtgctcgccgcgctcacctgcccttgccatctgccggtgctggcattgctgctttcggggacagcggccggcgcgttcgtcagcgagcagtggagcctcgcgacgctcgtgctggcggttttcttcatcctcttcctgcgagcggcattgcaggcctttcggaagcgaccgtga

SEQ ID NO: 338229 - DNA, 213 bp, Pseudomonas aeruginosa
atgaacacaaacaacacctccaccatcagctgctgcgaatgctgcaaggacattccccttgacgccgcactgacgccggaaggttccgagtatgtcgtgcacttctgtggcctggagtgctatcagcgtttcatgtcgcgagcagataagagggcggcatccgagcctgatcacccctgcacacaaaaggtcagtacccgtcaggacggctaa

SEQ ID NO: 338230 - DNA, 384 bp, Pseudomonas aeruginosa
atgagcatcacgatctacaccaaacccaagtgcctgctgaccgtagctgtcgctgcgctgctgctggtcgacccaagcctgattttccgctgggtaggcatgccactaggggccgacggcatgctccttggccgactcctcggcgctacgtatctggctgtcggtctgggcttctggtttatccgcagtctcgaagacctgccacggcgcgattcgctgttgctgatcggctccgatctcgtgtgcgccggcatcatcgttcacgcggtgatggcgggggtgatgaacccgctcggctgggggctggcagcggtctacctgagttcagccctgggctttggctggtgcgccagccaggttgctggcaggccggcctgcgcctga

SEQ ID NO: 338231 - DNA, 393 bp, Pseudomonas aeruginosa
atgaatggccgctacgcctttcagctgttcgccgcactcgggctgcaggggttgatcaatctgcccgcgcaggccgctgaagcgtgcgacccggctgccggccagaagctcttcgaaacccgttgcacaacctgccattcactcgccgaacacaaggtcgggccaaaactcggtgatgtgttcggtcgcaaggcaggttcagccccgggtttcacctatacgccgacgctggagcaggccggcttcacctggaatacggaaaaactcgacgccttcctcagtggccccatgacgttcctgcccggcaccgccatggccttcggtggcctgcgtcaggcagaggatcgtcaggcccttacttgtttcctcagtcaacaaggaccccactcatga

SEQ ID NO: 338232 - DNA, 1458 bp, Pseudomonas aeruginosa
atggcagagcatgagaacggcgcccaaggcgtcagccgtcgcaagtttttgcacggcgccggagtgggcgcggtggctgtcgcaggggcgggcgtaatgacccctgccatggcagcgtcgggcgatcactgcaagaccgcgggttgcgactatgacgtggtggtgatcggcggcggtttcgccggtgtcacggcggctcgcgacagtcgcaagaacggctacaagactctgttgctggaagcgcgcaaccgcctgggcgggcgcacctttacctccgagtttgacggtcacaaagtcgaaatgggtggcacctggattcaccaggcacagcccttcgtctgggccgagaaagagcgttacggcttggaggtgctggaaactccggtcagtggcgtcgcgctggacaaagaagagtatgtggtcaaggtcggcgacacgacccacacgttgagcggcgagcaattgctgccgctgtacgaagcactggatgccttctacgccgaggcgcgccaggtctgggaccgcccctacgacgctcaatacacttggaacgaaatcatccgccgtgacaagcgaactggccagcaacgcctggatgagctcaagctcaacccggtgcagcgggtggcgatcgacagcttcgtcggcgcgacagcgcatgccccgctggaccagacgtcctacgtcgacatgctgcgttactgggcgctttctggctggaacctgcagggtttcaacgacgctgtcgtgcgttacaagctcaaggacggcaccgtcggcctgatcaataagatgatcgaagacggcaagccggaagtacgcctgtcgaccccggtcaaaaaaatcgaagacaagggtgaccacactgtggtgaccacccaaaaaggcgaaaaaatcgtcgctgccagcgtcatcatcgcattgccaatgaacgtactgccaaacctggaattctcccctgcgctggacccggtgttgatcgaggctggcaagcagaagcacagcggcaaagggatcaaattctacatcaaggccaggggcgggtttaccaagctggcgaaggtcaccgccatggccgactccaactacccggtcaacctggtgatggcgcactacgtgagcgacgactacacactcttcgtcgccttcggcaacgatccaagcaaaatcgatatctttgacatcaaaaccgtccaatcgattctggaaccgctcttcccaggcatccaggtcgagagtacccacggctacgaatggaccctcgacccttacagcctcggcacctacgccagctacaaaccggagtggttcgagaagtattacgcgcacttccagaaggacagcggccgcatcttcttcggccagggcgaccacggcgagggctggcgaggctgcatcgacggagccatcgctgccggcggcaaggcggcccagagaaccaaggagttgctgggatga

SEQ ID NO: 338233 - DNA, 1011 bp, Pseudomonas aeruginosa
atgtccagacccagtgcccagaccatcttcgccgagagcttctttcgcgtgaatgcacaactgttcgccccgttcctggccgaggccggcctggacgagcgcattttgcatacccccgatgtggaaattcccgccgcgaattatgtcgagctctgggagatcctcggacgcaaagtggatgcgtcgatcggcctgcgtatcggcatccagactgtcagcaccgcccttggcgcctatggtcaaacgatacgcagtgcgccgaccatgctcctggcgctgcggtgcatgagtcatttcgccgtggtgtttgctcatgctattcgggtggatttcgaaatcgacggggggcaggtcatcctgtcttaccagtgcaccgatccgaccatcacgcggcgccgccaggactccgaattcaccattggcttcttcctcagccttctgcgagagatcaccgagaatccgcgattgacgccgcagcgggccgacttcgagcatgaaaggccgaccgattggtcgttacatcgagacgtgcttgcgtgcccgctacatttcaagcagtcggacaaccgcctttatttcccgattgaattgttggagatgccggtacgcaccgccgatccacgcctgttccaggcactggaacccttcctcgaacagcagcggcagatcagggcacccgttggcgatctgctcgccgaactggggcgtcatatcgccagcagcctgagcagcggcggggccagcctggaaatggtggcgcagagcatgggcctgggaccgcgcacactgcaacggcgtctggctgagcaccaggtggaattcaggctgctggtcgaagacgtgcgccggtcactggccgaagcctatgtggcgcagaaccattacagcctgactgaagtcgccttgctgcttggttacgccgaatgcagttcattcagccgagcttttcgtcgctggactcaagtctctcctcagcaatatcgcctgcaagccaaggccaacctcgcgtaa

SEQ ID NO: 338234 - DNA, 177 bp, Pseudomonas aeruginosa
atgaaaacaataataatgctgtgtgtcattgcctcactgatagcgatggtggctgtcgtcaccacacgatttgacgacgtctcgctggagtcgctgcaccaggcccggaatgaatgccaggcggtgaatccctacgcctgcctcagaccatcggtgaattttgcctcgctgcattga

SEQ ID NO: 338235 - DNA, 546 bp, Pseudomonas aeruginosa
atgagcaacgcaacaatggccatcgtcggtgacgaagcaaccgttacgcccaccgaactgggctggacattcatccgctggggccttggcctgttcatcaccggatttgcagtcggtttcattccgatcctgcactacatggtcggcgctcaacagggagatgtcggcccggtgttcctcaagaacgtcacgctgtggtggggctgccccgccgtcctggccgagatgacgctcaaaaccggcagcctcggcatgatcgctatcgggttgtgctatctggccgcgatccgccaaggcgcggtgcacagcatttgcggccttgaacgcattgcggccaaactttgcgcatacggcttgatcgccgaactggtgactgccggcgtgggtttttacgtcggcaacaagatctggccgaatttctatttcgaaccggtgcaggtcggaaagaacctgtggctcgctgcgcagggactcagcatcctcgtctatttcgtcggcatttgttatgcggtcgctggcgtgcgcagagcggcggcgcaacggtga

SEQ ID NO: 338236 - DNA, 489 bp, Pseudomonas aeruginosa
atgacggctgtggaatatcctgcgtggattcgcgagctgcatgagagtgagatatttggtgaagcccttgcactcgcgctgatcgaggtggcgaaaagcgaacgcgatcaataccactttggtactttgctgcaacttgaaaccgaaacaaaagcgcgcttgcggcccttcttgttcaagtacggcgtacctctgagcgagaacatggacctgagtggtgttggagccattgtcagcgcctatcagtcagccgctaacctccaggagttttccggcggcattaaacctgttgttgagaacttcctgtcgcgctttgaacagatcgcgcgcatttgccccgaagaggatcgcgccatagccaagtcaatggttcgtcacgagtcagccatcctcaaatggctgaccatggaaagcacgtgccatccgcgcggctcgctggatgacatgatcggagagttgcgctaccccttgccgacaattgaagtttag

SEQ ID NO: 338237 - DNA, 2439 bp, Pseudomonas aeruginosa
atgggtaataactacaacctcgatacgatgccggtgattcgcgagctcaagggcttcgatgcacgctccggcaacttccttgaacgcctgattttcaacaaccgtctgctggtggtgctgacctgcctgatcgtgacggtgctgctgagctacttcgccgtcacgcggctgacgctcaatgccagcttcgaaaagatgattccgcagagtcagccatacatcaaaaactacctggaaaatcgtcagtccctgcgtggcctcggtaacaccgttcgggtggtggtggaaaacactgaaggcaacatctacgacccgaactatctggaggtgctgaagcaggtcaacgacgcgttgttcctgacaccgggtgtggaccgggcgtggatgaagtcgctgtggacaccggccgtgcgctggaccgaagtcacggaggagggctttcgtggcggcccggtgatgccggattcctacgacggttcagagaacggcgttgagcaactacgcttgaacattgcccgttccgggatcatcggcagcctggttggcaataacttcaagtcgagcatgattgtagtgccgttactggataaggatccggtcacgggcgctgacatcgactatcaccagttctcgcggatactcgaagagcagctgcgcgacaaatttgaatttgcaggctccagcgcgaaacacaagacgggtgaggagggcaaaggcccgatcaaaatccgtgtcatcggattcgccaaactggtgggcgacctgatcgatggcctgctgctgatcatgctgtacttcggcgccgccgcgctgatcgccaccgccatcatttatgccttcactcgttgtgtgcgcagcaccgcgctggtgattctgtgctcggtggtggccgtggtctggcaactgggtttgatcaccttgttcggttacgcacttgatccgttttcgatcctggtgccgtttctggtgttcgccatcggcgtgtcccacggcgcgcagaaaatgaacggaatcatgcaggacgtcggacgtggcacccatcaactggtcgccgcgcgttacaccttccgccgcttgttcctcgccggcctgaccgcgttgctggccgatgcggtgggctttgcggtgctgatgctgattgacatcccggtgattcaggatttggcggtcaccgcgagtattggcgtggcggtattgatcttcaccaacctggtgctgttgcctgtgctgctgtcctattggggggtcagtccgaaggccgcggcgcgcagtttgcgacaggaaaacgaggaactgaaaggcaaaggcctgggcagtctgtggagtctgcttgaccgcttcactgaaaggcgctgggcgacggtggcggtggtggtggccggtctgctggctgtgggtgggttcatggtcagcacgcacctgaagatcggtgacctcgatccgggcgcaccggagctgcgcgccgactcgcgttacaaccgcgacaacgcgtacatcactgccaactattcgctgtccagcgatcagtttgcagtgatggtcaaaaccgccggtgaaggctgcctgaagtacgaaaccctggtggaagcagaccgcctcggctggttgctgcaacaacaaccgggcgtgcagaccaccgtatcgctggtcaacgcggtgcggcagatcacggcgggttcctatgaaggcaacccgaaaatgctgaccatcgcccgtaaccagaacgtgctcaattacggcgcgcagcaggcctcggtgaacaaccctgaactgttcaacagcgattgctcgatgatgccggtgattgcctatctctcggaccacaaggccgaaaccctcgatcacgtggtgaaagtcgctgatcaatttgcccgcgaacacagcaacgacgaccgccagttcatgctcgccgccggcagcgccgggatcgaagcggcgaccaacatcgtcgtgcgcgaggccaaccacaccatgctgttctacgtgtacggcgcggtgatcgtgctgtgtttcatcaccttccgcagctggcgcgcggtggtggtggccgtggtgccgctgatgctgacgtcgattctctgcgaagcgctgatggtgtggctgggcatgggcgtgaaggttgccaccttgccagtgatcgccttgggtgtgggcatcggcgtcgactacgcgctttacctgctcagcgtccagttggctcagcaacgtgccggcctttccttgaccgaagcctacaaaaactctgtcgcgttcaccggcaaagtggtggcgctggtgggcatcacgctggccgcaggcgtcatcacctgggcctggtcgccgatcaagttccaggctgacatgggcatcctgctcacgttcatgttcatctggaacatgatcggggcgttggtgttaattcctgccttgtcacatttcctgctccgacgcgcacattaa

SEQ ID NO: 338238 - DNA, 1059 bp, Pseudomonas aeruginosa
atgaatgcatttagatggataacgctggctgcgctaggcgtggcattggctgtgccctttacccgagcggtgatcgccgcggagtttgtcgatccgctgtcgagtccggcgattcagagtgaaaaagccgttcacgggatgttcaccggattggcctctgcgggtaaacgcctggttgccgtgggccagcgtggccacattttttattcagatgacaacggcatccgctggcatcaggctcaggtgccggtaagctccgatctagtggcggtgcagttcccgagcccgacgcagggctgggccgtcgggcacgacggcgttgtgttgcacagcgataacaacggtgaaacctggacgcgccagctcgatggccgtcagatcgggcagatcatgcttgaccactatcagcagcaagcggcaccggatgacgcgttattggctgatgctcaacgcatgatcgaggaaggggcggataaacctttcctggacgtgtggttctctgatgacaaaaccggctacgtggtcggcgcgtttaatctgatttttcacacccaggatggcggccggacctgggttccattaatggaccgcaccgataacccgggagcactgaacttctacgggatgcgcgccgtcggcgatgacctgttcatcgtcggcgaacaaggcctggtgttgaaactggacctgacgagccaacgattcgtcggcgttcccaccccctacagcggcagctttttcggcatcaccggcaaaccgggcgtcgtgctcgtttatggcctacgcggcaatgtgtaccgcagtgtcgatcacggatcgaactgggacaaagtggagctgggcctgtcctcgagcatcaccgcgagcacggtcacggcagacggtcgaatcattctggtcagtcaggccggtcatatgctgatcagctcagatgacggcgcaagtttcacgcagcagccacaagaacgcttggacccggctgctgcggcgcaagccaccgggtcaggctccgtggtcgtcgcaggcgcccagggcttgcgtcagttgcctttcgaatga

SEQ ID NO: 338239 - DNA, 1362 bp, Pseudomonas aeruginosa
atgaagttcgtcaacacgcttttgttcactgccttgaccgttgccatcgcaggcgcggcacacgcagccgtttcccccgatgaagcggcaaaactggccaccagcctgaccgccgtcggcgcggaaaaggccggcaacgccgacaacaccattccggcctacaccggtggtatcaccacaccgccggccagtttccagccgggcagctccttccgtccggacccttacgaggctgacaaacctcgtgctgtgatcgacggcaaaaacgtcggtcaattcgccggcaaattgaccgcgaccacgcaagagttgctcaagcgttatccgacattccgggtcgacgtattcccgacccatcgcagcgtggcattgccgcagcgcctgctggataacaccgcgaaaaacgccgtcggcaccaaaacccttgagggtggtgtcgcccttgaaaacgcgctgccgggcgtaccgttcccgatcccgaaagatggctatgaggccatgtggaaccacctgctgcgctatcagggttatgccaccaacttcaaatacgactcctggaacgtcgacggttccggtacggcgattctggctacgtcgggtaacgcctacctcgaatacccgctctacgatccgaaacgcacggaaccggcgaaagagaccgacctgttcttcaagaccaagctctattaccaggccccggcccgtcgcgcaggggaagccatcctggtgcaggatgcggtcaacccgctgaaaatggagcgtcggggctggcaatacctgccgggtcagcgccgtgtgaaactcgccccggacatcgcctacgacacgccgaaccctggctcggccggcgcctcgacctatgacgatgcctgggtgttcaacggtgccttggaccgatacgacttcaagctggtcggtaagaaggaaatgattgttccgtacaacacctacaagttgaactatcacaaggaagcggcggacatcaccacgccgcacttcgtcaatccggacttgatgcgctgggagctgcatcgcgtgtgggtggtcgaagccacgctgaaaccgggcaaacgccacatctacagcaaacgcaccttctacctagacgaagacagctggatcgccgtcgcttcggatgaatacgacgccagcggcaaattgtaccgcggctcctttgcccacctggcttacagctatgacgtgcaggcgccgaactccgacaaccacatgatttatgactttgtctcgggcagctacaacatcaccggcatctacggtccgtacggcggcgtcaagtacatcgacccgctttcgaaagcgctgtgggcacctgagtcattggctggcaccggtattcgctaa

SEQ ID NO: 338240 - DNA, 1830 bp, Pseudomonas aeruginosa
atgaacaaaaataataagatctgccatgcaaacctccgcaaggggttgctgacttccgccgtcctggcgggtctgggcataacaccggcacatgcactggaaatcgacacagggaacgaagacctggcggttcgcttcgacaacacggtgaagctcaactacgcccagcgtgtggaggcacccaacagcaagctggcccattcgtggaacaacaacgacggagatcgcaacttctcctccggtagcgcggtctctcagcgcatggatgtgctgtccgaactggacgttgtttacaagcagaaggctggctttcgcgtcagtgcgaatacctggtacgaccatgcctacgacgatgtcggcagtgacaatgcatcgaccaaccagctcaacagcggcgtaccggattcacgccacgtaagcggttacgccgatcgttactacaacgggccttcttccgaaattctcgatgccttcgtgtttggcagtacggaaattggtgatgattcgctgctgagtggcaaggcaggcaagcacaccctttactggggcgagagtctgctggcctttgctcacggcaacagttacggccagtccggcctcgacctttccaaggcgttggcagtacccggaaccgaagccaaagagctgttcattccgcgcaaccagttgtccgccagctttacggtcaacccggaactgaccctcgctgcgcaatacttcctggattgggacgccgcgcgactgccggaatcgggcacttacctggggttcaacgatggcattcaaaatggcgggcataatctgtcgttaattgctgcacaaaaccctcgctttggtacgcctggcccgctgggtgtcaatcagtttttgcggcttaacaacggccacaccttcaccccggacaaccatggtgactttggcctgatggccaagtggagcccggagtggctgcaaggcacgctgggtgtctactaccgcaaaacctccgacattctgcccaatctggccttgcagcccacggctgtcggtcctgcgcaactgatctccggcaacatcggcagctacaaccagttctacgtcgatgacatcgatatctatggcctcagcctgtcgaaaagcatcgccggggtgagtgtcggtttcgacttgaactaccgcgagaacatgcccctggccagcgtggcgggcagtgtcagcccggctgcggccgccgccaacgtccccggcttcattggcagttttaatggcgaaaacggcgtcgcccgcggtaacaccgtgcatgcggtgctcaacggtctgactacctttggcgacacgccggtctgggacagttcttcgctgctggtcgagctcgcttacagccgttggctggacgtgactgagaacaaacaactgttcaagggtgaggactggtaccacggcaccgacaaggttaccaaggacaactacatcgtcggcgtcaactttaccccgacctggtatcaggtgttccccggcatcgatatgttcatgccgatgacttacaacgtcggcctcaatggcaactctgccgtccagttgggcggtaacgaagacgccggcagttattcggtgggtgtcggcatggacgtccacaaccagtaccgcttcgacctgaaatacgtggacaacttcggtccattcgacacctgcagttcgccaggtagcgctggcagtcagggagacggcgctgcaccgggtgccaacggccagtacaactgcacccccggtcaaaccaccgccttcggcggaaccccgtcccagctcaaggatcgcggcatggtcactttgaccttcaaaacgactatctga

SEQ ID NO: 338241 - DNA, 1164 bp, Pseudomonas aeruginosa
atgagtgaaagagtgctgatcgccggcgtgggtatggtgtcatttttgccgctgggtggctgtgacagccacgcggcgttggcgggccaggccgtgcgttcgacgctggacgatgcacgaatcgattatgacttggtcgatcaggtttttacctcgtgcgtacagggtgacgtaggtaccggagcagagatgctgtcccgcatcggctattcgggcatcccaattttcagtctcagcgatggctgtgcatcggccagcagtgcctttcagctggcccgcaacagcattctttgcggtgaagccgagtgtgtgttggtagtgggtgtcgagtgcatgcccgcacagatttccaatcgcgaattttttggtttgaaggatcccgcccgtgatctgttcaaggatgacgggcaagccagggattccatcgttttactcgagcgacgatcgcatccagccgtactttttgcggctcaaaccagttggctgttgactcgcatgggcattaccgagcgtagcttcgatgacgtgctcggtcgggcgcgtgccctggctgcggtcaatccgaatgcgctgttgaaccgcgtgaaggatcgcgatggctggctccctccttacctttgcccgccggcctgcggtgcggcggcggtcttgctctgctccccggcctttgccctgcgctttggtgctcggactgacgtgagcgttctggcgagtgccaggggcagcgattgcatgtcggaacaagagtccggctgtgtgctggatgtgctggggcgggcgaccacccgacgcgtggcgcaacacgcttatcagcaggcaggactgggccccgaagacattgatgtagtcgaactgcacgaccaaagcgtgggtgacttcatggtcaacagcgccgcactgggcttttgccgagaggaagaaatagaccatttcgtacagctcggtcatcgcctcaaaggacagatgaacgcattgaacccgtcgggcgggctactgggacgtggtcacgccccgggggccaccggtctggcgcaattggtcgaactggtctggcaactgcgtggcgaggccaagggccggcagattacaggtgcccgtacggcactccaacacagtaccgccctgggtcgatccgtgtcagtaacgcttttgcagcgcacttga

SEQ ID NO: 338242 - DNA, 336 bp, Pseudomonas aeruginosa
atgatttctactatttcaatgacgacggcatgtatggtgtccatgcgcttcggcaactggaaagcggactattgcgaacagcgcgagcccggtggattcaaagtttggagcgaacccttcgtgtgcttgagggtgccgaaaagtttcaacctgcgcatggatccgtgtgaacgtgccgacgtggtatccgatcagtactatgactggagtaccaagaacgtatacctgactgaaattgcagtgatgaagtcggctaatttcctgcaaaccttcatcgacttccacctagccaaaaaccggccagcttcagcatcgatcagatccgagctgcggtag

SEQ ID NO: 338243 - DNA, 927 bp, Pseudomonas aeruginosa
atgttgcaggtcgccaatgcgcatatgtccaggcaaggaatgccaccatccggactgtttgaatggcatttcatatcgcaaagcgggcagcctgtacgtacgagcaacggacttgaactggccatgcggccactaccgcagcaccagaattacgatctggtctttatcccaagcctgcattaccgaggctggcagcatttccagcaatttctggccaatcagataaccgtgcgcgaatggctaatcaagcaatgggagcagggtgcatggctgtgcgcgaattgcacgggcacctttctgctcgccgatacaggcatgctcgataaccggactgcaacgactacctggtggctggaggggcatttccgcgagcgatttccgaaggtcgatctgcaaatgcgccccttggtcaccgagtctgagcgactggtgtgcggcggcgcacacgccacatttctgttgcaatcgatccacgtgctcacccaattcgcaggaaaggcgatagccatgcagtgcgcacgcagcatgcttatcgacttgacccaaacgacacagacaccgttgcaaccgcttatcgccgacaacacccacaatgatccgttgattcaacaggcacagaagtggctacaggatcatttggcggagcagatacgcatgaaagacctggcgacgagattggcagtcagcgaacgtacactgatacgccgcttcaacaatgtgcttgagctgtcgccgctgacctatttgcagaacttgcgcatcgatacggcacgagcgttactggaggccggggacctgagcaccgagcgaatcgctcaatatgttggctatagtgacatcagctcgttttcccgcttgtttcgtgagcgtgttggatttacgccgggttcgtatagagccagatttcagttatcaaaagtggattag

SEQ ID NO: 338244 - DNA, 1227 bp, Pseudomonas aeruginosa
atgacccagacgacgattccccgctaccaagacacgctgtaccacgacctgaatacctcgcaggaaatcctcgtcattcgccaggaggttcgtcgcttcgcggatgagcatgtcgcaccggtggcttatgcaattggtcataccgaggaatctgtcgaagccttcccgcgggacctgttcgccaagatggccaaggcaggtctgttcggcattccctttgctgccgacgtcgggggacgcgggctcaagtacccgacggccgccactgccgtgatgatcgaagagctggcgtaccattcgaattcggtggccgccatcgttgacgtgcattgcattctcgcgggcaatgcgctgaatcatgggtcagactcgatcaagcaacgctatctcacgcccctgctcaacggcgacaagattgggagctttgccactaccgaaccggatgccagtaccgacctgagcatccaggccatgagcacctacgccatgcgtaccgaaaatggttacatcgtcaacggtcgcaagcgcttcattaccaactcacccgtcgccgatttcgttgtggtgctctgtgtcgatggacagcgcatgaccgagctggtggtcgaactgaattggccaggcgttcgtgtgggtgagccagacaagaaaatgggcaaccatggccaactgacggcggacatctacttcgacaacgtcaaggtgcccatggagaacgttgttggccagccgggtcacggtctcaagatagcgttgcaaacgctgacctatggacgcgtcgggatcgctgcgagcgggaccggcatggctcaggcgctgtttgatcacagcgtcgaacgactcaagacccgccgggctttcggcaaggccattgcgcagttccagcactggcagttcaagctggctgagcgcgcgactgaaatcgaaaatgcccgcaacctgtacctcaaggcggcgttgcgtatggatgaaggacatgcgttcccggaacccgaggccgcgatggccaaatggtatggcactaacctcgccggtgaatttgcccgtgatgcggtacagatttttggtggttacggcttcatgcgtgaactggcggcagatggttcgcactaccgagtcgaggagatttaccgcgattgcaaaatcgccgagatctatgagggtaccaatgagattcaaaagttggtcatcgcacgcggcatctttggtaaagacatcacaggctga

SEQ ID NO: 338245 - DNA, 714 bp, Pseudomonas aeruginosa
atgaatatcttcattatccatgcacacaacgagtcgcagtcgttcaatacagccatgaaaaacctggccgtcgaagaactacaagcgcaaggacattgcgtagaagtttccgacctgtatgccatgaactggaatccggtcgccagcgcagccgattttggtagtcgcgccaatgccgactacctgacctatgcactggaacaacgtcacaatcattcgcaacagaccctggcagcggatatccaagaggagctggacaagttgctcaaggctgatcttgtgattttcaacttcccaatttattggttctcgatgccggcgatcatgaaaggctggatagaccgggtactcatctccggcgtttgctacggcggcaagcgcttttacgaccagggaggtttggctggcaaaaaggccatgcttgccatcaccgtcggcggtcaacctcacatgctggtcaaggacggcgtccacggtgaactcaacgatatgctcaagccgatcctacgtggcacattggcttataccgggatggcggtgttaccaacctttgttgcgcatcacgtgccgtacatctcccaagaggcccgcgcaaacttgttggagcaatatcgtcaacacttgagatcgctggagacgctagagccccttacgttcgtctcgatcaatcagtttgacgaaaagttgcatccaatctccgctacgaacatctaa

SEQ ID NO: 338246 - DNA, 447 bp, Pseudomonas aeruginosa
atgagtctcttcgcactgaatgagatccccctttacaactcagatctcgaagcgcagatgctgcctgcatcggtggcggtgctgaaagatgctatcgaacaagccgatggcttgatcatctgctcgcctgaatacaactacggcacttccggcgtgctgaaaaatgcactggattgggcatctcgcccgggtttcaactcaccgttgaaaaataaacccgtgctcatcatgacgtcttcaccaggcgtgcttggcggggtgcgcgcccaggcacaattgagagagacgctatcagcgaccctttccagagtcattcgcggccctcagatagtcattccgggcgtcaatgaaaagatccaggacggcagatgcattgatgaaaaaacgtttgagttcatgcttgccgccgttgatgacttgattagtgaaatcaaagcagcctcgtag

SEQ ID NO: 338247 - DNA, 777 bp, Pseudomonas aeruginosa
atgagttcaagctgggcagatcaggtggcgcttgtgagtggagcgggcagtgagcttggaatcggtatggcaattgcccatcgtcttggggctcaaggggccaagctgatcgtcacggcaagcagcgcacgcatcaatgagcgggttgcggagttacgcgccgccggcttcgaagcagagggtcgaccggtagacttaactcaggaaactcaggttagtgagttcgtcgcttgggctgaggccgtctggggccgcatcgatattcttgtaaataatgccggtatggcgatgcaagggagtccagaaccgttcgccgagttcacgaatacgagcctcgaaacctggaatctttccatcgctagaaatctgacaactgcgttcctgttaactcaaggggtgttgcctgggatgcgggctagaggatatggccgcatagtgaacatcagctcaaccacaggcacacgagccagtaatccaggagaggctgcttatagtgcagcaaaggccggaatggtagggatgaacatgagtcttgctcttgaggttgctcatcaaggtatcactgtgaattcagttgcccctggttggatagctaccgggtcgagtactcctgatgaagtcaaagcagcacgctctacacctctcgggagagcgggtcgaccagaggaagtggccgctgccgttgtattcttggcttcacctgaagcgagttacatcaccggtgagttgctcgtggtggatggaggcaattgcttggttgagaacaaagcttattaa

SEQ ID NO: 338248 - DNA, 138 bp, Pseudomonas aeruginosa
atgccacgcatgtttaaggtctataaaaaccctaaaactggcgaagtcgtcgaaaccaaaggtggcaaccacaatcaactgaaagaatggaaagcggaatacggctccgacaccgtcgagttttggctgaccaagtga

SEQ ID NO: 338249 - DNA, 1386 bp, Pseudomonas aeruginosa
atgacttccttagatatagacctcttactgaccgcattggtgagcgtcctggtgctggtggcgctcatcgtgtcgcgtctcaaaatgcacccgctcctggccttgctagtagtttccgttggcgttggctttgcaaccagtatggagccagaaaccatcgtctcccacttgatcaccggcgccggaaagacactgggggcagtaggggtcgtaatcgcgcttggagcgatgctaggcaaaattcttgctgacgcaggcgtcacagagcaggtcgccgaggtcatcctcaagcgaacatcggatcggatgataccttgggccatgatgatggttgcatttgtaattggcattccgatgtttttcgaggtgggcttggtgatcatgctgccgctgatattcagcgtggcgcgaaagctggaaagccaggctcgcttcaaaggttcagcgtatgtgtatgtgggtgttccggtgattgcggcacttgcagccatgcacgggatggtaccgccgcaccctggccccttgacggccatcgccgcgctcaaaacctcggttgggcccacaatgctctatggcttccttgcggctattcctgcaatgattttaggcggcccgctttatggcgcattcatttcgccgcgcatgagcactcggcccgatcaggttttgctagatcagttcaccctagctgaaaaagccgacgatcaaccaagcaccagcgtatgccttggcgtgctggcagccttgctaccggcgatcctgatgctgattcatgccgtcgctgagatggtattacccaaggacaatgcgatcctgaaaatggctagtttcttgggcaatcccctgatagccatgctcctaggcgtgctgttcgcaggggcaagtctggtactcgcgcggggcggcgatgcggggcaattgcgcgaatccctgggcaagagcctcaagccaatcgcctcaatcatcatgatcatcgccggcggtggtgcctttcaggagctgctgaccagcgccaaggtgggcgatgccattgtgcacctgactcagcagtctgcgttccctccgctgatcttgggttggttgatcgcgatgttgctctcggtatctaccggttctgccactgtaggtatcgttggtgctgctggcttgctggcgccgcttgcaggtgctgatcccagcctcaacctgcctctgcttgccttgtccataggctgcggctcgctgttcttcaactatgcgaaccatgcgggcttctggatggtgaaggaatccttcggcatgactatgggcgaagccaccaagaccatttcggtggttcaatccatcgtagccgtggtcggtttgattgtggtgttgatgttgaatgcggctgtcacggtgatttga

SEQ ID NO: 338250 - DNA, 831 bp, Pseudomonas aeruginosa
atgactgacacctgttctacgccgatcaccggcatcgactcccatgctcatgtgtttagccgtgatctaaatctggtcggtgcacggcgctatacccctgactacgacgccacgcttgagcagtatctgacgcacctgcacgctcatggtctgagtcatggcgtattggtgcaaccgagctttctcggcaccgacaatagctaccttttggcggcgttgaagcaagcgccggagcagttgcgaggcgtggttgtgctggaaccaggcgtcagtcgcgccatgttgaatgacatggatcacctgggcgtggtcggcgttcgcttgaacctgatggggaaggcgttacctgattttcgtaacagtgcctggagagagtttttcagccacattgctgatcttgaatggcatgtcgagttgcatcgggaggtaaaggatctgccgggactgatccatcaattgacgccgttcggtttgaagttggtgattgatcactttggtcggccggatgccaattcgggcgtcgatcagcccgggttttgcgagttactggagttgggatcgaaaggttcgatctgggtgaaggtatcgggaatctatcgtttgggaggtacgccgcaacagaacatcaatttcgctcgaatggcattaccgttgttggaacaaagtttcggcctccgccagttggtatggggcagcgactggccgcatacgcagcatgagcaaagcatcggtttcggcaccgtagtcgatcagttgcaagccctggaattttcgacgcagggtagctattcgttgctggtgcaagcacctcgaaggttattcgggttttaa

SEQ ID NO: 338251 - DNA, 1302 bp, Pseudomonas aeruginosa
atgtttagctggtatcgccaagtcactcctcgggagcgcaaaacgttttgggcctgcttcggcggatggtcgctcgacgcactggaagtacaaatgttcggcctggcgattccggctttgatcgccgccttcgccctgaccaagggcgacgcggggctgatcagcggcgtgactctggtcacttcagccatcggtggctgggtaggggggacgttgtccgaccgctacggccgggtgcgaacgctgcagtggatgattttgtggttctccttttttacctttctctccgcgtttgtgagcggcttcaaccagctcttgatcgtcaaggcactccagggtttcggcatcggcggcgagtgggcagcaggtgcagtattgatggccgaaaccatcaatccgcagtatcgcggcaaagtgatgggcaccgtacaaagtgcctgggccgtgggttgggggctggccgtcggcgtgttcacactgatctattcctttgtgccgcaggacatggcgtggcgcgtgatgttcctggtcgggctgctaccgtcgttcctgattatctgggtgcgtcgtaatgtcgaggagcccgacagcttccagcgtctgcaaaaagaaaacgccatcccgcaaagtttcttcaaatccttggcaggcatcttccgccccgagttgatccgcgtaacgctgttcggtggtctgttgggcctgggtgcgcacggtggttaccacgcggtgatgacctggctgccaacgttcctcaagactgagcgcaatctgtccgtactgaactctggcggctacctggcggtgatcatcttcgcgttctggtgtgggtgtgtggtcagcggctttttgatcgaccgtattggccgacgcaaaaacatcgtgctgtttgcgctttgctgtgtcgtcacggtgcagagttatgtgttcctgccgctgaccaatacccagatgctgttcctggggttcccgctcggctttttcgcggccggtattcccgcgagccttggcgcactgttcaacgagctgtacccagcggatgtacgcggtgccggtgtcggtttttgctacaactttggccgggtgctctctgcagtattcccgttcctggtcggtcacatgagcgactccatgtccttgggttcggcgattggcatcgacgcagggattgcctacggggtggcggtgatcgcggcactttgtctgccggaaacccgtggacgcagcctcgaggcttcgagtgcatcagtgccagcaacggtcaacggcaacggcaacggcaacgagagtgcccgggcctga

SEQ ID NO: 338252 - DNA, 732 bp, Pseudomonas aeruginosa
atgaattctctatccagtgatgttcgcctgccgctttaccaacgcctgcgtgaccacttggctgagcaaatcgccaacaatcgctggcgtccgggtgaggccattcccaccgaagccgcgctttcagcggaataccaactgtccactggcaccgtgcgcaaagcggtcgacgcgctggtcagtgagggcatcttggagcgacagcaaggtcgaggcacgttcattcggcggccgcagtttcaatcgtcgctgttccgtttcttccgttttcaaaccgctgccggcgaacgccaggtgccggagagtcgcatcctgtccatcgaaccagtggctgcaccctcggcggtggcccaggcgttgggcctgcctgttgagtcgccggtcattcgcatagtccgggttcgtctgcttgatgttcagccggtgctcgccgaagaaatctggctaccgcgtaaccgctttgaggcgctgctggagatcgacctgagcagcaaagggccgctgctttatccgatttacgaagaagtttgcgggcaggtcgtcgcctatgccgaagaaacactcaccgccgaatccgtgaatgacgtgcatgcacgattgctgcaagtcccgatcaacagcccggtagtggtaatcgagcgtttggcgcgcgattacgccggtacaccgctggagtggcgtcgctctcgcgggcatgccgagcacttccgctacagcgtggatattcgctaa

SEQ ID NO: 338253 - DNA, 900 bp, Pseudomonas aeruginosa
atggtacctatcgattcgtttcaaggcgttatcacgttcgtcgtggcggcgcgctcgaccagcttcacccaggctgccgagcgcctcggggtgtccaaatccgccgtgggaaaagccattgcgcgcctggaagaacgcctgggcacacagttgtttcatcgcacgacgcgtcgcatttccctgaccgcggatggtgaggcgtatttcgtggcctgctctagcgcccttgaagaaattggtgccgcagagagcgggttggggcccggtggtggtgagccctccggacgcctgcgagtcgacattcctgtggcattcgggcgtcgggtcgtggccccattgctgtttgagatcgccaacaaatacccggctttgcaactgaacctgacgttctccgaccacctggttgatcccttcgaggagggcatcgatttgctggtccgctttggagaactgcaagacaccagcggtctggtggcgcggcggctgactcgacaacgctgggccatttgtgccgcccccgactacctgacgcgttttggagttccgcagaccctggaagatttgagccatcaccgttgcattgtcgggcatcgacgcggccagccgttgtcatggcgggtcatgcaggcgggggagaccgttcgatatgcgccacccacgacccatcagattggcgacggggaagtcatgattctcgcggcagtcgccggcacgggcttgtgccagatgccacgtagcctgttccaggacgatatcgaagcgggcaggctggtggaggttctgcaagggtatgaacccgaacctgtcgatgtgcatgctgtatggccaaaggtgtctcacctgcggccgaaggtcaggtatgtggtcgatgagctggtcaagctatgtgcgcattggtag

SEQ ID NO: 338254 - DNA, 198 bp, Pseudomonas aeruginosa
atgcccgtcgtacgtgtgagctggttcgaaggtaaagaacatgcacaaaaagccgctgttgccgccgacatcaccgaaagcatcgttaaacacaccggtacagatgccaattacatctacgtcattttcgaggacgtcgcggcttcggattgggctggcgccggcaaattgttcggggacgcgcccgagaaaccctga

SEQ ID NO: 338255 - DNA, 354 bp, Pseudomonas aeruginosa
atgcacccacatatttcctgcctgttctccctcgctgtaaaacccgaagcgtttccagagttcaaggcgctgatctcgaacatcgtggcagccacccgcaccgagcccggcacgctggtttacgaatacagcgtcaacgaagacaacagcaccgttcacatccttgaacgctataacgccgatgccgtcgtcagtcacgtagacaccaccttcgcaccgttcggcaaacgtttccttgagctgtgcaccgtttccagtctggttgtctacggcacaccggatgcgcaagtccgcaaacgcctggacccgttcggcgcggtctacatgacccctttcgacggcttcagtcgctaa

SEQ ID NO: 338256 - DNA, 615 bp, Pseudomonas aeruginosa
atgtctggtattgctgaagtaattaagtcccgaatttccgccaacagttatgacactgagcgcgagctgacggatcaacaggttaccgacctgatcgatctggctacgcacgctccctccgccttcaacctgcaaaactggaagttcctggcagttcgcagcagcgaagcaaaggcgcggttgctgccactggcctacggacaacagaaagtcatggatgccgccgtgacctttattgtctgtggcaccctcaatccccatgaaaccctgccatcagccctgaaaccgacactggatgcggggatcattgatcaggcgatctacgacatgtgggttggcgccgctcaaggcatgtaccaggacaacccgcagctacaacgcgacgaagcgatccgctccggctcgctggcggccatgaccctgatgctggccgccaagggtcaagggttggtatcgacgcccatgatcgggttcgaccagtcggcagtggcgcaagcattcggtctttccccgacggaaattccagtgatgttgatcaccgtgggctatcccggttcagccaactggccgcaaaagccgcgtaaagccgttaacgacgttctgcagttcgtgtaa

SEQ ID NO: 338257 - DNA, 1131 bp, Pseudomonas aeruginosa
gtgtttgcagcgggtttcgctatctttaccctcgcctcgatcggttgtggcctcgccgacagcatgaccatgctgatcacgatgcgggtggtgcagggcatcggcgcggccttcctgataccgacatcacttaccctgattcgcgtgtcatttcatgaccccgatgcacgtcgtgccgctgttgcgctctggggcgcctgtggggggattgcgttggcagccggacccgtgatcggcggccttatgatcgagtacttcggctggcgaagcgtatttctgctgaatgttccgatcggcctgctcgctgtcgggctgatcctgtgctacgcccccgtctcccctcgggtttataagcaggtcgatcttccaggccaggtcagtattgcgatttgccttgcttcgctgacctatggcttgaccgaatccagtgccaaaggttgggccagcgaaacaatcaccgccatggccattgccgcgattagtgcggcggcatttgttctgatcgagcgccgggtaaaacatccgatgctgcccgctcacctggcgaaaaacaaagtgctggggagcatggcgcttgcaggcgctgcgatcaatctgacgttttatggaacggtcttcgtttttagcatctactttcaagccttcctgcactacgacgcattcaaaacgggattgtcgtttatcccgctgacggcggtgctgacactttctacgatgctctcgtcacggttcgccaggcggttcagtgccactcgtattatcacgacgggtttcaccatccagatcgctgggtttatcgcactgtcgcaaaccacgtctaacacctcgctgtggttgctcaatggtgcgctgatgctggtaggtattggcagcgcaatgtcagtaccgtccattaccaactcgatgctgtcctcggtcacacagcatgacgctggcatcgcctccggtctgatggcctctgctcggcaactgggcggggtgatcggcgtcgctgtgttcggcacgatgatcgctcatacggataaagccgctttttctgccgggctatccagcgcgatgctgttttcagcattggtcctgggagtctgcatcgctgtaaacctgtacgcagcctcccctcggcgtaaataa

SEQ ID NO: 338258 - DNA, 954 bp, Pseudomonas aeruginosa
ttgaaatacccactgaacaatcaatcgctgctctcgctgctcggcgaagactttcactttccccatgaaatccctggccaaccggttcgggtttctgacttcgaaggcctgaaactcaacagctttgtcaccagcgacggcgttaacctcgcctattgggaagccggtgcgggtacgccgctgattttcatcccggggtggtcagccaacggcgcgttgtattttcacctcatgcacatcctcagccagcattatcacgtgtacgtgctggatgtcagaaaccagggattctctgaaaaggtagcctttggcaaccggatttcccgatatgccatggacgtgaagcaatttgcagatcacttgggcgtatcccaagccgattactgcggttggtcgatgggcgcgtcgatcctgtgggcctatatcgacctgttcggtacacaaggcatacgcacgttgagcatcattgaccaggcgccctcggtttattgtcatgaagactggaccgaacaggaacggctgcaagccggggcgtttaccacctcgccagagcgcatgattgcgtcctacgccaaaggagcgcccaccaaccaactgatcagcgcgactcgggtgctggaacgggccattgccttggactcaccctattttcacaacgctatcagcctggctcaggctgtggtgaaggatgacatggcattcatggagcgcgtgctgttcgatcacgtcaccaacgattggcgggatgtcatccagacaaagattgatgttccaaccgccattttcaccggcgaatacagcgactggctggacagccaacgctggatgaattcggtcgtcgcgggatctgcgctgcatgtgtacaccaaggccgaacagggcgatcacttcctggcgctgaagaacccggaaaagttcacggccgacctgcgaggctttctgggtaagtgctga

SEQ ID NO: 338259 - DNA, 900 bp, Pseudomonas aeruginosa
atggacagagcactggagatgcaggttttctgcaccgtggtcgataaaggcagttttgtcggggcggccgaaccgctggagatgtctaaggcggccatttcgcgttatgtgagcggcctggaagaacggctcggtgcgcggctgttgcatcgcacaacccgccggctttcattgacggaggaggggcgtcagttttaccaccaggcgcgtgaagtcctggcgctcatggatcaggccgaggaggccgtatcgtccaccgctccggaacccagtggcgttttacgggtgaatgcaccggtcagtttcggtgtgctgcacttggcgccgctatggggcgacttcatgaaggcctaccccaacgtcgagctggacatcagtttgaacgaccgactggtggatcttgtggaggagggcttcgatgccgctgttcgtattgctcgtatggaaagctcttcactgatagggcgccgtgtggcgggcacgcggatgtgcctgtgtgcgtcacccgactatctggcgagccaccctcaagtgcgcacgttggcagacctggcagagcacggagtgattgcctataccaacttcgccagcggcaatgaatggcagttcatgggccctgacggcagcgaaaatgtgcgcacccgctcgattgttcgctgcaacaatggcgatacctgtcgcagtattgccttggcggggggcggcattgccttgcagcccagcttcatggtggccgaggatttgcgggcgggtgacctggttgagatcctgcctgagtaccagtccgtcgaactgggtatctacgtggtgtatcccacacgcaagcacctggcgaccaaggtccgggtgctgatcaattttctcgctgagcgatttgcccatcctcaatgggaacagtag

SEQ ID NO: 338260 - DNA, 630 bp, Pseudomonas aeruginosa
atgaaaattacagtagtgggtaccggcaacatgggttcggcgttcgccaaacagttgtccagtgtcggccatatcgttcgaatcaccggccgcgacatcgacaaggccaaaaccctggccgctcagtttgacaatgtcagcgcttatccagctgcggaggcactgggtgacagcgacgtcgttgtcgttgcaactgcctatgaagatgccgccaaagccctgcaaagcctgggcgacctgacgggcaaggtggttatagacatcaccaacccactgagcgccgactatatgtcgctgactctcggtcacgtgacgagcgctggcgaagagattgccaaagcagtgcctcaagcccaagtcgtcaaagcgttcaacacgctgtttgcccaagtgcttgccgatggtccgacattcgccaatgaccaacgcggcagtgtgtttgtcgccagcgacagcgagcgcgccaagcagaccgcgaccaccctggcacacagccttggctggaacacggtggacgcgggggcactgatcaatgcccgctacctggagccattggcaggtctgaacatctacctcggttatggcgccggcctgggcacttccatcgcccctgtctggcttaacaagtaa

SEQ ID NO: 338261 - DNA, 822 bp, Pseudomonas aeruginosa
atgaacacgtcgttccccctgttgtttgtgtctcacggtgcaccactgtttgccatcgagcctggtctggcgggtcaacgtctggccgaactcggtcgcgagctgccgcgacctgacgccatcgtcatcatctccccgcattggatgacccgcggcgaaatcagcgttacagcgagcaccgcccctgaaaccattcacgatttcggcggatttcccgacgccttgtaccagctgcgctaccccgcaccgggtgctccggccctcgccgctcatatcgtgggtctgctacagaatgccggatggaaatctcggcttgacgcccgtcgaggtctggaccacggcgcctgggtgcctctgctttatctggcgcctgaagccgacattcccatcgttcaggtctcgatgcctgccggccttgacacttaccaggcctggaaattgggcaaagccctcacgccactgcgcgagatgaacgtgttgatcgtggcttccggaagtctgacccataacttgtatgagtttcggggggctgccagccatgaggctgactacgtgaaagagtttgctgcctggacagcccaaaacctgcaggcgggcaacaccgatttgctactggactataggcagcacgccccttcagccgaacgcgcccacccgacggatgaacattttttaccattgctcatcgcccttggtgcggcgggcgaacgatatgaaacgcgtgtcttggaaggcggcgtgagctacggagtgctggcaatggacagctacctgtttacctcgaacgacaatgatggatctgaatccattcaaactagttaa

SEQ ID NO: 338262 - DNA, 672 bp, Pseudomonas aeruginosa
atggttgacacgattttttctgacgctgcccgcgaaccgcaaacgggcctgtttttccgcaaagggtgcggtacttcggcgcccaagggccgcctggttttgctgcatggcgtcggttcaaacgaagcgaatcttgcctcattggccgcatcgttgcccgaggaactggaggtgattctgcttcgcggtccgctgcaagtcggcccacagggcttcgcctggtatcaggtgaacttcaccagcaacggcccttcgttcaatcaagagcaagcagagtccagccggcacctgctccagcgtttcatcgatgcactgcccaagctgccgaccgtgatcgccggcttcagccagggcggcatcatgagcgcgagccttggggtcaccgagcccgagttggttgccggtttcgcaattttaagcggacgaatgctgcgcgaacttgatcccaggatcgcttccgccgagcgactcaagtcggtcagcgcgttcatcgctcatggtcatcaggacaacgtcctaccagtgacttgggcgaaagaatcggacgcctggctgagtcgaatcggtgtcgcccacgaaacgcatttttacgacatggcccacgagatcatcgctgaagaactggcggatttctcgcaatggctgacccacacgctgtcactctccaagtaa

SEQ ID NO: 338263 - DNA, 327 bp, Pseudomonas aeruginosa
atgatcgactcacgcaccgctccgtatgccgcactcgttatgcgcctagccctcggcatcatgttcatggctcacggcctgaccaaagtgcttgtgttcactccggcaggcaccgcaggcttttttgaatccatcggatttcctggcttcctggcctacccggtcatggcctttgaagtcatcggtggcttgatgctggtgttgggtgtctatgcgcgctgggtggccgctctggcggtggttcaactgttcgttgccgcgaccgtccacttcggcaatggctggagcttcaccaacgccaatggcggctgggagtatcctgtttag

SEQ ID NO: 338264 - DNA, 126 bp, Pseudomonas aeruginosa
atgctggccatctcgcggagcgctgacgccgcgatgatcgtcttaatagccgacgaaagcttggtgacagtcgtgttgagacgtgccgcctcgctatcagcacgccgcatggttgcctgcatctga

SEQ ID NO: 338265 - DNA, 864 bp, Pseudomonas aeruginosa; identical to SEQ ID NO: 320642

SEQ ID NO: 338266 - DNA, 336 bp, Pseudomonas aeruginosa; identical to SEQ ID NO: 330329

SEQ ID NO: 338267 - DNA, 816 bp, Pseudomonas aeruginosa
ttgactatattaatttttaaaatttacttggtgatagaaatgagtcgtagctcagttattgttgaggttcgtgggcgagttggattgattaagataaatcgtcctgatgttcttaatgctttgaatgacgatattgttgatgggatttctgatgcggtcggtttatttgaatccaatgatgaagtaggctgtatcgtcatcacgggagatgacaaggcctttgcggctggcgctgatgttggatttatgaagtcattcgactatatgcatgcgtacaaaacaaattttatatcccgtaactgggagcggcttgctaactctagaaagccagtgattggcgctgtggcaggttttgctctgggtggtggttgtgagcttgcaatgatgtgcgacattatcattgctgctgagaatgcaaaatttggtcagcctgaagttaaacttggtattccgccgggcgctggaggaacgcagcggttaactcgtgccattggtaaagccaaagccatggacttgtgtctaacagcccgaatgatggacgcgtttgaagcagaaaaatctggacttgtagcacgtgttgttcctctagaacatttattagatgaggcaattagcgcagcccaaaccatcgcaagtttttcactccctgtcacgatgatgatcaaagaatctgttaatcgtgcattcgaaactagccttgcagaaggcctgttgtttgaacggcgcatttttcattcggccttcggtttagaagaccaaaaagaaggtatgagcgcgttcctttctaaaaggaaagcggtctttcaacaccgatag

SEQ ID NO: 338268 - DNA, 849 bp, Pseudomonas aeruginosa
atgaaaatgcaaaaaattggggttcttggtgccggtatcatggggagtggtattagtcaggtttttgcgctgagtggatttaacgtctcgctgattgatatctccgctacagcgcttgatcgagcgatgggaaatatgggcaaaagtctttcgcgactgctcgataaggaaaaaatcactagtcaacaaaagatggatgctctttccaggattcgaacaggtgggagtctaacagatctggcaggttgcgacgtcgtgattgaggcagcgaccgaaaatcttgaattgaagttgcagttaatgacccagttagacgctatcatgcggccggaggccgttttggcatccaatacttcttctatttccattacgcgactggctgcagccacgacgcgacctgaaagagtggtgggattacatttttttaatcccgttccggtcatggctcttgtcgaagttattcgcggtcttcagacaagcgaaatagtattttcttcgatggaggcgttagctagagcagtagggaagacgcctatcaaggtaaagaatagcgccggttttgtcgttaatcgtgtgctttgcccaatgattaacgaagctgtgttcaccttaagcgagaaccttgcctcggcgtcagaaattgatgaggctatgaaactaggtgctaatcatcccattggcccgctggcgctatgcgacatgataggtcttgatgttcagttggctgttatgcaagttctatttgaatcctttaaagatcctaagtatcgtcctgccccacttcttgtggaaatggttgaggccggacacctagggcgtaaaacaggtcgtggcttttacgagtattaa

SEQ ID NO: 338269 - DNA, 615 bp, Pseudomonas aeruginosa
atgatcgaattctggctcgctgccggcctgctgttgctggtcgccctggcttttctgctgattcccttactgcgtgggcgtaaggcgcaggccgaagaagaccgtaccgcgctgaacgtcgccctgtatcaggaacgtctggctgagctgcaaggccagcaggccgctggtgtgctgactgccgagcagttgcaggccggtcaggccgaggccgccagcgagctattggccgataccgaaggcgtggaaaggccccgcgaatcgcgagtgggtaagacgctgccattgctcgccgcagtccttggcccgttgttggggctgggcctgtacctgcactttggcgccagcgacatcgtcgaactgacccacaaactctccctgctgtcggtgtccatagaagacatggctcaccgcctggaacgcgccgccgccgcgcagccggattcgctggaggacctgtgtcctattccagaagagctgttagcgtgcgctcagaaaactacgattataaataagatctacttttcctgcgttgaaaaaggcggcgaagccgttaaagagtggattctcaataaccggggatcctgtgcggggttgaagtacatgcttgcgtga

SEQ ID NO: 338270 - DNA, 483 bp, Pseudomonas aeruginosa
gtgaagcatctgctgatcgcctgcctactcggcctgagcctggttggcctgagccgggccgccatcgacacctaccagttcaaggacgaagccgaacgcgagcgtttccgtacgctcaccgcggagctgcgctgccccaagtgccagaaccaggccatcgccgactccaatgcgccgattgccacggacctgcggcgggaaatcttccgcatgctggaggagggcaagagcaacgccgagatcgtcgacttcctggtgctgcgctacggcgacttcgtgctctacaaacctccggtggatacccgcacctatctgctctggttcggcccgttcgccttgctcggcctcggcgcccttgggctcggcgtgctggtgctgtgccggcgcaaggtggaggacaatccggcacaggttgccttgtcgaccagtgataaccagcgcctcgatgcgctgctcaagcaaaactcccaggaccccaaatga

SEQ ID NO: 338271 - DNA, 534 bp, Pseudomonas aeruginosa
atgaagcggctgattctgctgttaccgctggtgttgttcctcggtgtttcggtctttctctaccgaggcctgttcctcaatccgcaggagctaccttcggcgctgatcgacaaaccgctgccggccttcagcctgccggatctgaagaacgagcagcgcctgatcagtgagaaggacctcaaggggccggcgctgatcaacgtctgggccacctggtgcccgacctgccaggccgagcaccagatgctcaatcgcctggccaaggccagtgtggtgatccacggggtcaactacaaggatgacggtgcggccgcgcgccagtggctgcaggactacctcgacccctatcaggtcaacgttgccgacccgcagggctcgttgggcatcaacctgggtgtctacggcgctccggaaaccttcctgatcgacgctcagggcatcatccgccacaagtacgtcggcgccatcgacgagaaagtctggcgcgaggagctggcgccgcgctaccaggcgctgctggaggagaaaccgtga

SEQ ID NO: 338272 - DNA, 1989 bp, Pseudomonas aeruginosa
atgaacttgaatctgatggtgcccgagctgggccacttggcgctgatcctcgccctgtgcctgacccttgtgcaggccagtttgccgctgatcggtgcctggagtggtgatcgccagtggatgagcctggcgcagccggcagcctggggccagttcgcctttctgctgttctcctttgcctgtctgacctggtcgttcatggtcgacgacttctccgtcgcctacgtggccagcaactccaacagcgccttgccctggtactacaagttcagtgccgtatggggcgcccacgaaggttccctgctgctgtgggcgttgatcctggcgggctggaccttcgccgtgtcgatcttctcccggcaactgccggaagtgatgctggcccgcgtgctcgcggtgatgggcatgatcagcatcggcttcctgctgttcctgatcctcacctccaaccccttcgagcgcctgctgctggacatgccgcaggacggccgcgacctcaacccgctgctgcaagacattggcctgatcgtccatccgccaatgctgtacatgggttatgtcggcttctccgtggccttcgccttcgctatcgccacgctgcttggcggcaagctggatgccgcctgggcgcgctggtcgcggccgtggaccatcgtcgcctgggccttcctcggcatcggtatcgccctgggctcctggtgggcttattacgaactgggctggggcggctggtggttctgggatccggtggaaaacgcttcgttcatgccctggctggttggcacggcgctgatccactcgctggcggtgaccgagaagcgcggcgtgttcaagagctggaccgtgctgctggccatcgccgcattctccctgagcctgctcggtaccttcctcgtgcgttctggggtgctgacctcggtgcacgccttcgccaccgacccggagcgcggcgtgttcatcctggcgttcctgctgctggtggtcggcggttcgctggcgctgttcgccgtgcgtgcgccagtggtcaagagccaggtcggcttcgccctgtggtcacgcgagaccctgctgctggccaataacctggtgctggtggtggctgcctcgatgatcctgctcggcacgctctacccgttggtgctggatgccctgagcggtgccaagttgtcggtcggtccgccttacttcaatgcgttgttcgtgccgctgatggccctgctgatgctggtgatggcagttggcgtgctggtgcgctggaaggacacaccggtgcgctggctgctcggcatgctcgcgccggtcctgctcggcagcgctgcgctgggtggtctggccacctggctgttcggtgaattcagctgggccgtgttggcggtgttcctgctggcggcctgggtgctgctggccggcgtgcgcgacctgctcgacaagacccgtcacaagggcctgctcaagggcatcctgagtctcaacagcagctattggggcatgcagctggcgcatctgggcatcgccgtgtgcgccatcggcgtggtgctggtcagccagagtagtgccgagcgcgacctgcgcctggcacctggcgagtcgctggaactgggcggctaccgtttcgtcttcgagggcgcgcagcacttcgaaggtcccaacttcacctcggacaaaggcaccatccgcgtgctggaagacggcgaggaagtggccctgttgcatccggaaaagcgtctgtacaccgtacagaacatgccgatgaccgaggccggtatcgacgccggcttcacccgcgatctctatgtggcgctcggtgaaccgctggaagacggcgcctgggctgtgcgcgtacacatcaagccctacgtgcgctggatctggttcggcggcctgatgatgggcctgggcggcctgctggcggctttcgacaaacgctaccgggtcaaggtcaaaacccgcgtgcgcgatgccctcggcctgaatggggtggcagcatga

SEQ ID NO: 338273 - DNA, 453 bp, Pseudomonas aeruginosa
gtgaacggggtccgcaagaaacgcctgtatatcgtcctcgccatcctcatcggtgccggcatcgctgtggcgctggccctgatggcgctgagccagaacatcaacctgttctacacgccgacccagattgccaatggtgaagcgccggtcgatacccgtatccgcgccggcggcatggtcgccgaaggttcgctgcaacgcagcggcgattcgctggacgtggagtttgtggttaccgacttcgccaagaacgtcaccctccgttatcgcggcatcctgccggatctgttccgcgaagggcagggcatcgttgccctgggcaagctgaatgccgatggcgtgctggtggccgatgaagtgctggccaagcacgacgagaactacatgccaccggaagtgaccaaggcgctgcaggaaagcggtcagctgcagccaggcaagagcgagggctaa

SEQ ID NO: 338274 - DNA, 177 bp, Pseudomonas aeruginosa
atgagtttctcttccttcagcgaattcatcgccatgggtaatcatggcccctacgtgtggtcggcctacggcatcggcattgccgtgctgcttctcaatgtcgccctgccgatcctggcgcggtgccgttacctgcaagacgaggcgcgccgtttgcgccgggagaaacaactgtga

SEQ ID NO: 338275 - DNA, 756 bp, Pseudomonas aeruginosa
atgaactggacctggtttcacaagtggggctcgcccaagtggttctacgagatgagcgggcgctggctaccttggctggccgctgccgctgtagttctgctggtggttggcctggtctgggggctggcttttgcgccaccggagaagtaccagggcaacagctaccggatcatctacatccacgtgccggcggccttcctcgcccagtcctgctatctgctgattgcggtagccggtgccgtggggctgatctggaagatgaaactggcggatgtcgccctgcagcaggctgcaccgatcggcgcctggctgtgtttcatcgcgctggtgaccggtgccatctggggcaagccgacctggggcacctactgggtgtgggatgcacggctgacctcgatgctgatcctgctgttcctctatttcggggtgatcgccctgggtagcgcgatcagcaaccgcgacagcgcggctaaggcctgcgcggtgctggcgctggtcggtgcggtgaatatcccgatcatccagaggtcggtggagtggtggaataccctgcaccagccggccactttcaaggtcaccggcaaggccagcatgaatatggacatgtggctgccgctgctgatttcggtgctcggcttctactgcttcctcggtgccgtgctgctctatcgcatgcgcatagaagtgctcaagcgcgaggctcgcagcagttgggtgcgcgccgaagtcaatcgactggtggagggccgggtatga

SEQ ID NO: 338276 - DNA, 2166 bp, Pseudomonas aeruginosa
ttgtttccgaaccgaatacctattctatggaaaatgactcttttggtcggcctctgtcttttggggattgtggctttgttggtagggcattcggtctatcgaatgagcacggatacatctctgataaagtcaagcgtgactcaaatgctggagacggcagctcaagagcgcatgaagaaagaagccgaagtacaagcgctaactatcaagaattatttgatgtcgtactatcaggagggtctgagtttttctagacacgttttgcagcagcggaggcaggcggaagtactaaaattgagcgcgcaggtcctgcgagagagcctccatcatcaggttgagcaaactttgaaggccagcccgcagttgcttagtatttatttggttttcgaaaaaaacgctatcgatggcgctgatgatttatttttaaaccgaggtgaagtgggtagtaatgaggcaggacgttttgcgccatattgggtgcagagggacgggcatgccagtagtcaagtagtgtctgaagctctaattgctgacaccactcctatgctggatggttctcctttcaatgcgtggctcagttgtcctaaaaaaaatctcaagccatgcctgttaaatccgtatttcgatgatagttcaggtcagcgaatgctaataacgaccttggcgttccctgtcatcgaggacggtaagatattggcgattattggtatggacatcagtctagataatcttcaacaactcgctactgttgacagccacgatctgtatcgtgggcgcggctccatcagcattgtcagttccgccggtctgctggctgcgcacagtcgcgatataagtttactcggacaaagccttgagaaggtctatccggataatggcaatgccttattggcattgcagcgccttggcaaagtaagtgtgcagcaggggcgggataatctacagttgattgcaccagtgatgcccattccaaatagcgagccatgggctttactactcgatgtccccatgcggtctcttttggctccggccttatcgttgcagcaagatttggatagacgtaacgcaaaacgtacagtgttggagttagtacttggtgccgttgcagcaactattggtttgatattggtttggctggcggcgttgggggtaacccggccgattctacgtgtagcggccatgctaaaagacattgctgtcggcgaaggggatcttacacaccgtttggtttatacgcgtcaggatgaactaggtgaactggttggctggttcaaccgcttcctcgataagcttcaacccgtgatcgctgaggtaaaacgcttggttcaagaagcccgtaacacggctgatcaatccgccatcattgctaatcaaacaagttctgggatggagcagcaatacagagaagttgatcaagttgcgaccgcatcccaagaaatgaccgcatcagcccatgaagttgcacgcagtgctgcgcaagctgccgatgcagcacaaggagtcgacttggcgaccttggagggccttgaggttataaacaacaccgcaaccgccattgagcatttgtcgaatgagatgagtgcatccatggaagaaatacgagatttgactagtcgaagtgatcagatcagttcagtgctggatgtgatacgtgccattgcggagcaaaccaatctgctcgcgctaaatgcagccattgaggcggcacgggctggcgatgcggggcgtggcttttcagtcgtcgccgatgaggtacgaagcttggctcgacgcactcagagttccgttcaagaggttcgcttggtgattgagggattgcagcagcgcaccaaggatgttgtcagctcaatgcatagtagccatagcaaggtccaaggcagtgccgtacaggtggcgtttgctgtgaacgcgttgcagcgtattggtgattcggtatccatcattaccaatatgaatttacaaatagctagcgcagctgaggagcaaagtattgtagttgaagaaattaatcgtaatgtcgcagcaattcgcgatgttacagagtcgctctccatgcaggcgcaggagtcagcgaaaatcagtaataccctgaacggacttgctaatcatcaacaggcacttatggatcagtttgtggtgactccaggtgcttccgatagccgctaa

SEQ ID NO: 338277 - DNA, 1407 bp, Pseudomonas aeruginosa
gtgttggtcaatatcaatcccgcctatcggtccagcgaaactgaatatgccctcaagcaatctggttgtcgttggctgatttgcagtgattttttcaaaagctctaactatcacgaaatgctttataagctgttgccggagcttaagcgttccgaggtgggggcggtcaacagtgagaaattgccggagttgcgcggagtgatcacgctcagcgagcagccggccgagggtatgttgtcctgggcggacttgcttgggcgcgctaaattgattgaccgtcagcaattgattgagtgtggaaggcaattgcagttcgatgatccgatcaatattcaatacacctcaggcacgacgggggcccccaaaggcgcaacgctcagtcattacagtattttgaataatgcttatatggtgtgcgaaagtatgcgcctcaccgagcatgaccgtctcgtgattcccgttccgctctatcattgtttcggcatggtgatggggaacctcggttgtgtgactcatggtagtacgatgatctatcccagcgcttcttttgaaccgttggcgacccttcaagctgccgcagaagaaaaagcgaccgctatgtttggtgtgcctaccatgtttatctccatgctggatcaccccgagcgtatggcattggatctgggcagtctgcgcaccggtatcatggccggctccacatgccccatcgaagtgatgcgacgggtcatcgaggacatgcatcttaccgagatgcaaatagcttatggcatgaccgaaaccagccctatctcgacccagaccgggcctgatgacgattttacccaccgtataaccagtgtcgggcgtacccagccacatttggaaagcaagatcatcgacgatcatggtcggatagttgcgcgcgggcaaatcggcgaactctgcacgcgcggatacagtgtgatgttgggctattggaacaatcctcaagcgaccacggctgccgtagatgcagccggttggatgcataccggggatctcgcaaccatggatgatgatggttacatcagcatcgtcggacgtaacaaggacatgatcattcgcggaggtgaaaacgtttatccgcgagagatcgaagaattcctgtttactcatccagctgtggcggatgtacaagtaatcggtgtgccagatgaaatctacggagaggagattatagcttgggttaaattacatcccggccaccaagttgatgctgaatccctgcgcgactattgcaaaaatagaatcgctcacttcaaggttccgcgaagtttcaaattggttgacgaatttcccatgaccatcagtggcaaagtgcagaaattccgcatgcgggaagtgagcattgcggagcgccagagtacggctctcagtactagtacatag

SEQ ID NO: 338278 - DNA, 1119 bp, Pseudomonas aeruginosa
atgcacagcatcaaagcctgcggcttagccgcgtttgccgccctgagtgtttgttcgttcaatgttctggccgatgaaaatacagcccttgtagccggtcatgagtacatggtgacccccaactacccaaataaccttcacgtcatcgacttggccaccgataccctgttgaagacctgcaagacgccaggggtttttgggcccggcacggtacagatgtcgccggatcgcaagatcgcctacgtgctgaacaatcgctacgccgacatctatggcgtcgagctggatagctgcaaacaggtattccacgccagcatcagccagcagccgggtgagaaagccaaatcaatgttcgcctttacggtcagccacgacggtaaggagctcttcgctgttgccaatccgaccttaaagcttaacgaccgctatgtggtgcagcaaccacggctagatgtgtacaagaccgacgctggcatgaaggccaaaccggtgcgcagcttcccggccccgcggcagctaaccatcatgcagagcggcgacgatggcactttgtacgtggccggggcggatgtttacaaggtcgatgtgaataccggtaagttcgatgtgctgatccccagtcgtcactggaaacgcccgaactacagtgcaccggacgtgctttacgtgtggaaccagcaaacatacacccgagacttcactttgctgtacacagcggcgaaatacaaggacaagaatcaggatctcgctagcgcagactatgtgtatgggttcttcaatgttgacttgaaaacaggaaagactgaagtcactgatttcggccctctgaccgaaatctattttactggcatgcgttcgccgaaggacccgaatctgatgtttggtgtgctgaatcgcttggacaagtatgacatcaagcagaagaaaaggattcactctgccgccctcgatcatacctactactacgtctccttcaacaaggatggcagcaagatttatttgtccggagcggctaatgacatcgctattttcgatgccgatagcatgaaacgaataggtaatattaaattgcccggaggggatatggcgttgaattcatcgcagatatttattcgttaa

SEQ ID NO: 338279 - DNA, 324 bp, Pseudomonas aeruginosa
atgaaacatctcaaggcaatcaataataaagcccagaaactcgatcaggccgcagccgaaaatcgtattgaagatgtcgtggcgatgagttccgtcgccggctgttcatcgaccactgatcctggttgggaaatcgacgcttttggtggtgttgcgtcgctgtgccagccgatggaggccgacctgtatggttgctccgatccgtgttggtggccagcccaggtgccggacatgatgagcacctacccggactggaataaggatgcccagacgtccgccgacggatggcgcaacctcggcactgtcttcccgaaagacaagtga

SEQ ID NO: 338280 - DNA, 1431 bp, Pseudomonas aeruginosa
atgggcgctatcttgagtttggtcgaacgcaacctgcacgaagtgcatgtcgacaccgaccgcatgctgttccatatccccagcagttcgctgttcgccagcgatgagctgaccggtaccatcatcgacactttgcgcggccccggctgctcttcggatgacttaatccaacgcttggctgcacggttcaacggcgaggaaatcaaagagactctgcgtgagctgatctccttggagctggtcagcgacggctcgtcattgacgccggacatcgcgatcaaacgggtcgagcgcacggcgatcaacaccgtggtactcaacgtcaacaccggctgcaacctgagctgcacctactgctacaaggaagacctcgacaagccgtccgccggcaagaagatggacgtcgaaaccgcgatcgcctcggtggaaatgctcctgcgtgaatcgccggatgaagagcgttttaccgtggtgttttttggtggcgaaccgttgagcaaccgcaagctgatcgagtacatggtcgattactgcgagaagcgtttccgcgaggccggcaagttcgtcgaattcgtcatgaccaccaacgccacgctgctcaccgaagagaccgtggactatctgaatgcccaccgtttcgggctctcggtcagtatcgacggacccaaaaccgtgcatgaccgcaaccgcatcactgtgggcgggcagggcacctatgacgtggtgcggcgcaaggccgaaatgctgctgtcgcgttacaacagtcgtccggtcggggcgcgggtgacgttgacaaccggcgttaccgacgtcgaaaccatctgggatcacctgttcaacgagctgggattcgccgaggtgggctttgctccggtgacgtccggcgatatcagcagcttcaacctgaccagcgacgaactgattgaagtcttcgccaacatgaagaagctcggtcggcgttatctggaagccgcgctggagcatcgtaatatcggtttttccaacctacaccagttgatcaccgacatccatgaaggccacaagaaagcactgccatgcggcgctggcctgaagatgctcgcggttgatcacaagggcgaactcaacttgtgccatcgctttaccggctcctcgctgccgaccttcggcaacgtgcatggcggcgtgaagcaggttgagttgaatgactttctgtcccagcgcctggatcgcaccaataccggctgcgaggattgccagatccgcaacctgtgttccggcggctgctaccacgagagttatgcccgttacggtgacccaacccacccgacttatcactactgcgaactgatgcgtgactgggtcgattttggcatcgaggtctacacccggataatgaccaataaccctgcgtttatcagcagttacatcactccgcgcaaggcacactga

SEQ ID NO: 338281 - DNA, 1581 bp, Pseudomonas aeruginosa
atgaagagaaaactccgattagggcttagtaccggcctgatgtgtatagtcacgtgcatggcgttgtattcacagcccagcctggctgctcgagacgccaaggccatcctcaatgaaacctgtcgaggctgtcacacgccggaggggaatgatgctctgagtcgtatcagtcaccagcgtaaaaccccggaaggctggctgatgagcatcgcccgaatgcaggtcatgcatggcgtgcagatcagtgatgaggaccgtcgtaccctagttaagtatttagccgatactcaaggcttggcgcccagtgagacggaaggcgtgcgttacgctttagagcggcgtctcaatacggtcgaaaaattcgacgatcaaacaagccagatgtgcgcccggtgccactctggtgcgcgggtcgctcttcaacgccgcccggccgaggaatgggaggagttggttaacttccatcttggccagtggccgtcgcttgagtatcagcttttagcgcgtgatcgtgagtggttcgatattgcccgcaaagaaatggtgccactgctggctaagcgctatccgctggacaatccagcctggaaaaaatggctcagtacctcaccgaacgccgaagcgcttgttggtgaatggaacttcagcggtcatctgccgggcaaaggtgaagtggctggtgtgatgagtgtggcggctgacggccgcgacaccttcaaagtcaacgtcaaaggccaatacgccgacggaagcccgttcaacggcgacgggagtgcgattctctacaccggttacgagtggcgtggcagggtgaagatcgacggcgtgaccatgcgccaggtattcgccgcccagggcgattccatgcagggccggatgttcgaggccgagcatgacgagcgcggccttgattttgtcgcagcaaagcagggcagcaaccgcttgctggctgtgcagccaggctatctcaaggcgggcagcgaagccgaagtcatattggttggcagcggaatggtaggcacgccgaacttcgggaaaggggtggaggtggtcgaagtcctcgagcagagcgctgaccgtatcagggtcaagctcaaggccgcagtcaatgctcagccgggtcttcgcaatgtcaccattggcacactgaaggggccgaccctgtcggtctacagcaacttctccgagatcaaagtggtgcctgcgttttcggtggcaaggatcggcggcggcggtggttcgacaccgaaggtccagggccgtttcgatgcggaagcctggggcaaggacgctgagggcaaaccgtatcgcattggtatcgtcccggcacagtggtcggtcgctgcgttcaatgaacgcgccgaagaagatgaagacgtcaagttcgccggcacgatgcacgctgacactggcgtgttcactccgggggatgccggaccgaatccggcgcgcaaaatgtccaccaacaatgccggcaacctcaaggtgatcgccgcggtcgacgacgcagggaagaccctaacaggggaaggccagatgatcgtcaccgttcaacgttggaacaatccacccattccttga

SEQ ID NO: 338282 - DNA, 1491 bp, Pseudomonas aeruginosa
atgtcgtttacgagcctacatccggacactacagcgtttatccaacgagatccgcgtatgcttatcgggggcaaatgggtcgaagccgccgatggtcagatcatgtccctacgcaatccagccaccggagaagaactctgcgttgtgccacgtgctacggctgaggacgttgaccgcgcggtgcttgctgcacgtcaggctttcgatgactcgacctggacccgcacacgcccccgggagcgccagaaccttctatggaaactagccgatctgatggagcgtgacgccgatgttctcgctcagctggaatgcctgaacaacggcaaaagcgtaatggtggctcggggcatggacgtgcagctgtccatcgatttcctgcgatatatggcaggctgggcaactaaaatcgaaggtagcacggtagatgtttcggtaccgctcatgcccaacgatcagttccacagcttcatccgtcgcgaagcggtgggggtggtcggtgcaatcgtggcgtggaacttcccactgttgctggcttgctggaaactgggccccgcgctagccaccggctgtactgtggtgctcaaacctgcggatgaaacgccattgtcggccctcaagatggccgaactggccttggaagccggttatccggagggcgtgtttaacgttgtaaccgggactggcatcaccgccggctcggcactgacccataatcctctagtagacaagctgaccttcaccggctccacggctgtgggcaaacaaattggcaaggtcgccatggaaaccatgacccgggtcaccctggaactggggggtaaatcgccgaccattgttatggccgacgccgagatgaaggcagcagcagcaggtgccgccagtgcaattttcttcaaccagggccaagtatgttgcgccggctcaaggctatatgtgcaacgcaagcatttcgataatgtcgtagccgatatcgccgatatcgccaatgccatgaaactgggtaacggactggatacatccgtagagatgggcccattgatttctgcacgccagcaagatctagtttacgggtacatcgaaaagggccgcgaaagcggtgcaacgattgcctgcggcggcgagcaatacgggcctggttatttcgtcaaacccacggtaatcgttgatgtcgatcagaagcattcgctggtacaggaagaaatttttggccccgtgctggtggcgattccgttcgatgatgaagccgatgcattgcgcatggccaatgacagcccatatggattgggtgcaagcatttggtcgaatgatctggcagcggtacaccggatgatcccacggattaaatcgggctcggtgtgggttaactgccacagcgcgctggatccggctctgccatttggcgggtacaagatgtccggagtcggacgtgaaatgggatttgcggcgattgaacactacaccgagctgaaatcggtattgatcaaattataa

SEQ ID NO: 338283 - DNA, 1290 bp, Pseudomonas aeruginosa
atgattttagttctaggtgcaggccccgcgggcgctgcggttgccctggggctgcggcggctcggctatgaggtaacggtggtcagtgaatggcgcaggtttgcggcgctggaaggtgtttccctgcgcgtactggacgccttgcgcaatgccggtttacaccatgcgctggcttcctcggctttgccatctcagcgacaggtggtgtgggacgggcagcaatatgtgcagaatatcgaatttctattggatcgtcctagcttcgaccaggggctgcgagaggatctgcgttcggctggcgtcaggttgattgaggggcgtgtgtcgggcgttcgaacctcggcaaccgggcatcacgtcgaaattgagggaagtgcaacgctaatcgcggaattcttggtagaagctcgcgggcgtcaggcgccggcgcttggaaaaggcctgcgcggcccggaaacagtcagtctgctgaatcgctggcaaggcgcgccgggcgcagcggccagtgcggtagaaagtctggcaggcggttgggcgtggatggctcggcgtgccgatggtcaatgctactggcaatggacggtggacgttgccagcgccgacttgcccggcaaagcgaagctgctggattactgtagtgatcagcgccgaagttctatcttggcgcagacgtttttttgtgctgagccgtcatccgatgtgcaggtacacgcccgcagtagcaccgcaattttgagcccgcaggtttgcggcgataattggattagagtgggcgacgcagcgatggcggtagaccctttgtcaggcaatgggatattccaatcgttgtcttcatcgctgcaagcgccggcagtaatcaatacgttattgcgtaaacctgaacggtcggtgcttgcacagcggtttcatcagcggcgagtggagcagttgtttttacgcttcgcacgaattggccgggatttttacattactgagcagcgctggcaggagcagccgttctggcagtcccgccggcaatggcctgatgccgaagttgcccacgccgatgcggatttcagtgcccttagcattgagcgggcgccagtgctggcagatggttttgtcagtgaggctgaagtggtgattactgcggatcaacctctgggcgtctggcatgttgaaggcattgagctggcaccgttgatacggcgtttaagctctgagcccgtaaagcaggtaatggcagggttaacggcagagcaaggcaggatgatcaaagggtggttgttggcgcatggctttaaaccgtga

SEQ ID NO: 338284 - DNA, 678 bp, Pseudomonas aeruginosa
atgaaacctgaactacgaattggcgtggtggacagcgggtattcggaggcacagcggatacaggtgatggccgcgcgtcagttctcgttgctggccgatggagtggacgaaagtgatgtgcgcgacgatgcgctcggtcacggcagcgcggtagtcgaagccatcagtcgatgcgcgccttctgcacacttttgcgtggcgcaagtgtttgatcggcgaggcgtcaccagcgccctgcagatagcgacggcaattgactggctggtggctcaaaacgtgcgcctgatcaatttgagcctcggcctgcgccaggaccgcgagctgttacgcaatgcctgtgcggcagcagtgtcacgcggcattctgttgtgtgcttcaagtcctgcacagggggagggtgtatttccggcgaattatccaggggtgctgcgggtgaccggcgatgtacgttgcgctgaccatgagtggtcatggcttgacagccctcaggctgattttgcagcgtgtgggcgcggagtcaatcccgcccaatccggtgccagttttggctgcgcaatgttgagtggtcacatagccagttatctgctggaacagccaggcgcgagcaatgaccaagtcattgcgtggctgcgcgaacatgccagctattacggccctgagaggcgcgtgagaccatga

SEQ ID NO: 338285 - DNA, 1719 bp, Pseudomonas aeruginosa
atgcagcgcctcattgcgcgactgatcgacagtcccaatcctgaagctctgcaaaccgcattgagctggctctacagctttgtccggcctcactggttggcgatcatcggcttgctcggcttgtcgatctgcgcctcgctgctggtgcttgtgcagccatggttgatcaagttgctgattgacgatggtttattggggcgcgacttttcgatggtggttcagattgccggcttgatgattttagccggcctcttgggcacggccctttcgggcgttaatcgttacctgcacacacgtttatccggacggattttattctcgctgcgtgacgatctctatcggcacctgcaaaccctgtccccgagtttttacgggcagcggcgtattggcgatttgatgtcgcgactcgacggtgatgtcgccgagattcaacgcttcgccgtagactcattgttttcagcagtatcaagtgtgatcggcctaatctgcgctgtggtgatgctgctgacactgtcgtggaaattagcgctgttggtattggtgttgattcctctcgacgtcatttggctacgctggatgcgcagaaaggtcgagcgcgatgtgaggcagttgcgcgagcgatcggcagacttatcgtcgtttatggtggaaaccctgccagtgatgaagttcattcaatctgccggtcagcagcgaagggagtcaactcgactggagttacttgggcagggctacatgagccaattgctgcgcctgcaggtcactgagtttttcacccaggctgtgccgggcacgttgacatcattgtccagagcctgcgcgtttttgattggcggttattgggtagtgcagggcacctggcagctcggagcgctgatagcgttttccacctatcttggcatggccgtcgggccggttcagagtttgcttgggctatatgtggcaatccagcgaatgacggtcagtcttgggcgggtcatggaattgcgcggtgaagtgccggcggtgctctccccactcaacccccaaccgataccgactgacggtgacctgcgtttcgatgcggtgcacttcactcaccccggacgtcggagcaccttgtgcggcattgatgcgcggattccctatggcttgaaggtcgcgcttagcggtggttccggtgtcggaaaatcgacgttgatcgaccttttgcagcgtcatcatgatccgcaatcaggaagggtgttgttgggtgaggtcgatctgcgggaatttgacctgcttgagttgcggcgacggattgctgtggtaagccaggatattgtcctgtttcggggcagcctcgcggataacctggcctatgcggtagccggtgccagtcgtgaagccatcgccgaggtggcgcggctggcacaactcgacagtctgattgcctcactacccgaagggctcgacagtccgctgggcgagcgcggtcagcagttatccggggggcagaaacagcgcatcgctattgcccgagcgttgttgcaggaccctttaattctcgtattggatgaagcgacatcagcggtagacgaagccaccgaacgtgaagtcatcgctgccattgatcaactatttgtcggccgtacacgaatcttgatcagccatcgcccctctactttagccaatgcggatctgcgttttgaattgcttgatggcgtgcttatatcaaagacggtgttacatgaaacctga

SEQ ID NO: 338286 - DNA, 1902 bp, Pseudomonas aeruginosa
atgttcaagaaaacaataatgaataaccttcgacccgaagcccacttggctcgtgaaaaattgcaccacgatggggctattccggatggattgttgcgtgccgaaattgatgcttcatggcggcgcagcatggaccatggcgtgcctttcaatgctggatacgaactggagcagcaatcccgttcgcatgttgaggctttaaccgctagcaatcgcttgctgattgatgccgcactgccagcaatcgactacctggccgagcatcagggcaagacgggggtgattatcctcgccaacgcagatgccaccatcctgactatcgaaggtcgcgccgaccgcctaaaagacatgggcatagaggatatcgtccgtggtgcctgctggagcgaagccgttcgcggtactaacgcgttaggcactgcgctggtggaagcccggccaacagtgattgattgcggcgagcattatctcgatcgccttaatgaaatctcctgcgcatccgtgccgattcattgtccacagggcaatctcgtcggcgtgcttgacctgacccgtgaggggccgcttgggcgcatccaagagagcactgcactattgtcaatggccgtcagccagattgagagtcgaattttcatcgccagctaccccgacgaaatagtcttggcgtttcacagctgtcgccaataccttgagtcgtcctggcaaggactgatggcggtgagcttgggggggcaggttcttgcggtcagcgcccaagggtgtcagttgcttgatgctgaacgttcgatgctcatcggcagacgttgcgaggagtttatgggcattgacggcgtgcagttgctgtcacagttacatcaaaccagagtgggtaacctgcggactgtaaaaggggattttttttacaaaattttgcgcgcgccgcaacgttctatcagcgtgggcgttccgccgcgaaacaccgtcaaagttaccccgaaacaacctcagcttgaatccctggccggtactaatacccgttttgcacgcgctttgcgcatggcgcgccaaggcctggctaatgagttgcctgttctgctgctgggtgaaaccggaaccggtaaagaagtgatcgcccgcgcgctgcatctggctggaagccgttgcgaaaaacctttcgtggcggtgaactgcgcggcgattccggaaggtttgattgagtcagagctttttgggtaccgcgacggtgccttcaccggttctcgccgtggcggtatggtcggtcggttgcaacaggcccacggtggcactttgttcctggacgagatcggcgacatgccgttggccttgcaggcgcgattgttgcgtgttttgcaggagcgcaaagtggccccgctaggtgccggcgaagaacagagcatcgacatagcgctgatttgtgccactcaccgcaaccttaaacgccaagtggaaaacaaacaatttcgcgaagatttgttctaccgggttaacggcatcagcgtcatgcttccggccctgcgcgagcgtgatgatgtggcgcgcctgataactcagctgttggtcaagcttggggcaccgaatgtgctattggacgagaacttgaatcgtttgcttctggaataccattggccaggcaacatccggcaattagaaaccgttttgcgcactgcgctggccatgcgtgagccaggcgagagttttttgaccgtggagcacctgcccgacagtttgctcgatgagctttataccggtgaacggccgccgaccggcagtattcgcgagaatgaactggagcttattcgccattccctcgacactcaccaggggaatgtatccgcgactgccgaaacgctgggaataagccgtgcgacgctgtaccgcaagctcaaaaagttgcgttcttga

SEQ ID NO: 338287 - DNA, 612 bp, Pseudomonas aeruginosa
atgtcgccacttcgtgtctgcgttgttgcctgcgaaggcatgagcctgtttcacctttccgtaccggcaatggcactgggcgcagcgggcgagcgcgcgggcggccctcacttccgccctgatgaaaaggtcaccacttcggctggcacggtagccgttatcgattgctgccttcatttactgagtcagcgccacgatgcggatgtggcgagccggattgcacggttgctggtgacgccaacgcatcttcaagggggcaggtccagtgcatcgaggagccggttcctcagctgccgagtgagagccgcctgtctaaagtactggcatgggcacgcgagcatccgcaggatgccttatcgttggatgctctcgctgactgatgtggcccatatgagccgccgaatccttgctcgtcggtcggcattgacaccaaattgtcgcttcgccagcagttcgccgcccagctgggtactacaccgtagtactatcgacgcacgttttttcaggcgtcgcgtgaacgtcacccataaacaggctgggtggtttgacggcccagcccaagaccttcattgtgatcgctgggccaggcggacggcccattggctgagttga

SEQ ID NO: 338288 - DNA, 549 bp, Pseudomonas aeruginosa
atgagcaattgtgcagtggtggtaatcgacctgcaaaacgaatacctaccaacgggcaagttgcccctcagcggcatcgaaagcgccgtcgccaacgcggcaaaggtgatcgccgatgcccgcgccaaggacataccggtcatccacgtccgtcatgagttcgcccgcggagaaatgccggtgttcgtccccggcagcgatggcgtgcagatccagaccgccgttgcgcctcagccgggcgaaccggtggtgttgaagaactacccgaactccttccgtgaaaccaatctcaagcagttgctggacgagcgcagcgtagagaaactagtcgtggtcggtgccatgagccatatgtgcgtcgacgctggggtacgcgcggcggccgacatgggctatgcggtcaccgttatccacgatgcctgcgccaccctcgacctggatttcaacggggtccaggtgccggcggctcaggtgcatgccgtaatgatggccgccctcggtttcgcctatgcgagcctggcatcgactgcagagtatctcgccggctga

SEQ ID NO: 338289 - DNA, 990 bp, Pseudomonas aeruginosa
atgctgaatcaaccgcaaatcgaactaggtattgtgctttacccctgcgtccagatggcgactgtactcggcctgaccgatctgttcgacatcgccgggcgctacgatgacgcagagggcgagccccgccgcccgccgctgcgcatcagccattggcagctgggcgaaaccggccaggcacccaagcgagttcacgattcccaccccgacgccagctgtgcccccagcatgctgatattgccgccgagcctggaggcgccgatttccgccgaggccgctcggccctatcgggattggctgtgccaacaaaaccaggccggagtcaggctggcgtcgatatgcgccggggcttttctactggctgagaccggactgctggccggacgcacggcgaccacgcattggatgtatgtcgagcactttatgacccgcttcccagatgtatgcttggatgtggatcagctcatcatcgacgccgatgacatcatcaccgccggtgggctgatggcctggaccgacctgggactacggctgatcgaccgctacctgggtgccagagccatgatcgataccgcccagatgctggtcatcgacccgccgggccggcagcagcgttactacagcgccttcgcgccgcgactgaatcacggcgacagcgccatcctcgccgtgcaacactggttgcaggagaccgctgccgaggaggttgcactggccgacctggcccaacgcgccggccttgaggaacgcacatttctgcggcgctttcgcaaggcaaccggcatgacgaccaccgattactgccagcagatgcgtgtcggccgggcccgcgagttgctgcagtccggccgcctacccatcgagcgggtcgcctgggaggtcggctacgcggaccccggagcattcaggaaagttttcacccgcgtcgttgggctgtctcccagtgcctatcgacgccgctttggcatggatccaggcgctgtgcgctga

SEQ ID NO: 338290 - DNA, 315 bp, Pseudomonas aeruginosa
atgaagatcacagcgatggagcagactgagtcggtcagcgatgttctgtgcgacgtttgtggcgagagcacgcgcgtcgaagggtatggattgcaattcggcactcttcgtgccagttggggctatggttcgacccacgatggcgagcgctatgaggtggatctttgcgagggttgctttttcagaaccatttccgggctcagacgagagcggatggtgaacttcatgttcggtgacgacgaccaggatcttagtgatttcgggcttgttgctcgggatgattttttcaatgacacgggtagttcacgctcctga

SEQ ID NO: 338291 - DNA, 438 bp, Pseudomonas aeruginosa
gtggacagcgtttcgatcctcggccccgttgcaccctccccgacggctattccatttttcctgccgaccgtccccgctgggtttcctagccccgctcaggaccacttggagcagcgaatctcgctcgacgagctattccgcctgcaccgtccacagatctatctcgctcaggtttcaggccatagcctgacgggcctcggcattctcgacggcgacctggtgctgatcgacaaagcactgcaaccgcgtcgcgaagacgtggtgattgcctgccttaacggggatccgttgatcaagattttcgacattgagtcgcagcaggtggtgctgcgctctgctaatccggcttacccgccgcgttacgtgctggaaggtgaagagctacacatctggggggtttatataggcctgtgccggcggggtcgcaacggtggctga

SEQ ID NO: 338292 - DNA, 1617 bp, Pseudomonas aeruginosa; identical to SEQ ID NO: 330923

SEQ ID NO: 338293 - DNA, 159 bp, Pseudomonas aeruginosa; identical to SEQ ID NO: 324424

SEQ ID NO: 338294 - DNA, 198 bp, Pseudomonas aeruginosa; identical to SEQ ID NO: 324423

SEQ ID NO: 338295 - DNA, 330 bp, Pseudomonas aeruginosa
atggatctggtcatcctcgacgaactgggttatctgcccttcagccaggccggcggtgcgttgctgtttcacctgctatccaagctgtacgaacacaccagcgtggtgatcaccaccaacctgagcttcgccgaatggtcgagcgtgttcggcgacgccaagatgaccaccgccctgctggatcggctgacccaccactgccacatcgtcgaaaccggtaacgagtcctatcgcctgcaacacagtagcttggcggcccaggccaagatcaaatcacgggagcgaaagcgtaagggcggccaggaaccggaggacgatgagccgttctga

SEQ ID NO: 338296 - DNA, 330 bp, Pseudomonas aeruginosa
atggatctggtcatcctcgacgaactgggttatctgccgttcagccaggctggcggtgcgttgctgtttcacctgctgtccaagctgtacgaacacaccagcgtggtgatcaccaccaacctgagcttcgccgaatggtcgagcgtgttcggcgacgccaagatgaccaccgccctgctggatcggctgacccaccactgccacatcgtcgaaaccggtaacgagtcctatcgcctgcaacacagtagcttggcggcccaggccaagatcaaatcacgggagcgaaagcgtaagggcggccaggaaccggaggacgatgagtcgttctga

SEQ ID NO: 338297 - DNA, 591 bp, Pseudomonas aeruginosa
atggctcgcccggtcaacctcgaagtcagatcccgtttgctgtcgattggccgccaggtggttcacaaccgtggcttcaacggctgcggcgtccaggacatcaccgccgctgccgagattcccaagggctctttctacaactacttcgccagcaaggaagacttcgcggcagagatcctcgaggaatactggacctcgatcgaaacccgccacgggccgatcttctacgacgcccgggtcaagccgctggagcgcatcggccagttcttccaggccctggtgctcgagcacggcgagcatgaatacagcctgggttgcctgattggcaacctgtccctggaaatgtccaatggcagcgaacaaacccgcaagcgtctggccgatgtgctggcgcgctgggaaggtttgctcgcgagctgcctgcgtgaagcgcagcagcgccgcgaactctctgaaactcacgacgccgaagcgctggccagtgtcatcgtcgaaggctgggaaggtgcggtcatgcgcggcaaggtcctgcgcgacggtgcacctctgcagcgtttcgtatcgatggtcttgcctcggctattggagtga

SEQ ID NO: 338298 - DNA, 702 bp, Pseudomonas aeruginosa
atgagccatctgtacgccgaccccgccgaacccgcactgcctgccactggtttcaagctcgacctgagcaaagccgccctggtggtcatcgacccacagaacgacttcctcagccctgccggcgccagttgggcggtgttcggtgagagcatcgtcgagaacaacaccgtcgaaaacctggaaaaactgttcaaggccttcaaggctcacgacctgcccgtggccgtgtcgccacactattactacccgcacgaccacgactggcattttggcggtccgctggaaaaggtcatgcacagcatctgcatgttcgatcgcaagggaccgaacaccctggaaaacttcgaaggctccggcgccgatttcctcgagatctacaagccgtacattctcgacggcgagaccatcatcgcctcgccgcacaaggtctacggcccggaaaccaacgacctggcgctgcaattgcgcaagaaaggcgtgtcgcagatcatcctcgccggcatggcggccaacctttgcgtggaatcacacctgcgcgaactgctcgaacagggctttgaaatagtcgtggtacgcgacgccaccgccggcccgcgcctgccggatggcgacggctacctggcggccatcatcaattaccgcttcctcgcccacgggctgtggaccaccgaagagactatcgcgcaactgcaaccggcttga

SEQ ID NO: 338299 - DNA, 225 bp, Pseudomonas aeruginosa
atgctcgcgatggcggtgtgttgggtgagtcataaccaagtcattcagcccaccgtcatccgcctcaccacgcgccgaatcatcggcgccgccagcaccaccaccggcaacatcgatacccacgacagcgcccacgcgttcaaccagcggccggcaaaggccaggtcgagcgcatggggtgtggtggcgatggcggccgcgaccgcgcaggtcaggccggattga

SEQ ID NO: 338300 - DNA, 1053 bp, Pseudomonas aeruginosa
atgagcacattgcgcactacagctttccaactcgcgagtctggccctgttcatcggtagcgccacccaggccatggccgaggacatcacgttcgtatcccagggcggtgcttatcaggaagcccagagcaaggcgatcctggagcctgcggcgaaaaagctcggtctgacgctcaaacaggacagctcgcccaaggcctacccgatcatcaagacccaggtcgagagcggcaaggtcacctgggacgtggtggacctgcccactggcgactgcatccgtggcgaagccgaagggctgttcgagaagctcgaccttgcgctgattcccaatgccgcgcaaatacccgacagcctcaaggacgaatacagcgtcggctacatcagctactccacggtgctggcgtatcgcacggacgcgttcaaaggcgcggacgtacccaagacctgggccgacttctgggacaccaaaaaatacccgggccagcgctccctacgtaacctgccacgtccaaccctggaaatcgcgctgctggccgatggcgtgccgatggacaagctctatccgctggacgtcgatcgcgccttccgcaagcttgagcagatcaagcccgacatcgccacctggtggacgtccggcgggcagtcggcgcagctgatcagcgacggcgaagtggacatgatccaggcctggaacggccgtatcaccgccgtacaggccgccggcgcacccgtggcattcgactacaaccagggtgtgctggaaaccaactcgttgtgcgtcctcaaaggctcgccgcacaaggtggccgccatgaaattcgtcaacgaggccatcgatgccaaactgcaagcggcgttgccgatgatcatcgactacggcccgctcaaccccgaagccttcaagaccggggtaatcccggccgagcgcgaggccaagctgccttccgcacccggcaacatctcgcgccaggccctgctctcggcgcaatggtgggcctccgaagccggggtcaaggccgaagaacgctggttgtccttcgtccagaaaaaatag

SEQ ID NO: 338301 - DNA, 930 bp, Pseudomonas aeruginosa
atgtccaacgcctatctcgccaaatccatgcccgactccagcgaccagcagcaccagccgcccatgaccagcgaagacgccctggcccgtgaagaacgcaaggagcacacctccatgctgttgctgctcaccccggcgctggtcatggtcgtggtgctgttgatcatgccgctgtgctggctggcctttcagtcggtccagaccgaggaagggttttccctggccaactacatccggattttccaggaaagcatttactgggacaccttcgccctgaccttcaagatcagtttcctggtgacgatcctgtcgatcgtcatgggcttccccattgcctacgccgcttcgcgcctgcagggtttctgggccaacctgattctgatctgcgtgatcctgccgttctggaccagcgtgctggtgcgggcctatgcctggctggtgctcctgcaacgccgcggactggtcaatcagacgctgatggaccttggcatcatcgaccaacccctgacgctgatgcacaacaccactggcacggtaatcggcaccctgcacgtcatgctgccctttatggtcctgccgctgtattcggtgatgaaaaaaatcccccaggacctcatgcaagcgtccgagagccttggcgccaaacccttctacaccttccgccgggtcttcctgccgatggcagcgccgggggtcatggccggttccatcctggtgttcgtcatctgcctaggcttcttcatcaccccggaactgctcggcggtggccgcacgatcctggtgtcgatgctggtgcaacgcaacgtcgagctctatcacgcctggggcgcagccagcgcagtcggcctggtgctgctgtttgtggtgttcctgatcttctggggcatcaatcgcttcatccccatcgaacgcatcctgggagcgcgctaa

SEQ ID NO: 338302 - DNA, 795 bp, Pseudomonas aeruginosa
atgaacctgcttgccaacctgcgtcaccttcgcctgtcccacgtgctgttcacggtgctggtcgcggcgatcctgctgtacctgatcatcccggtgctgatcgtggtacccatgtcgttctccgaggcgcgcttcctgcaattccctcccaagcaatggtccttccactggtacgaggcgttcttcaacagcgtggagtggatgtcggcggcgcgggtcagtctgatcacggcatttttcaccatggccatcagcctgccgattggtatggcggccgcctacgccatcaacaactccagcctgaaggtggtgcgtacgctgcagatcatcctgctgctgccgatgatggtgcccatcatcctgatcgccgccggcgtgttcttcgtttacgcccgggtcggcctgatcagcacgctgaccggcctggtgctggcgcacatcatgctcgccttgccctacgtgatcatcgcgctgctggccggtctgcgtaacttcgacatgtcccaggaaatggtggcgcgcagcctgggcatgaaccgctttcgcgccttcatggccgtgaccctgccgcagatcaagcccagtgtggtctcggcgacactgttcgccttcatcacctcgctggatgaaactgtggtggcgctgttcatctccggcggcgacaaccagactctgaccaagcgcatgttcacggcgctgcgcgacgagatcgatccgaccattgccgctatcagttcgatcctgatcctggcgtcgctgatcctggtggtgattgccggtcgcaacaaacaataa

SEQ ID NO: 338303 - DNA, 627 bp, Pseudomonas aeruginosa
atggattacgaacaactgccgagggccgccttggtccgtatgctgcaggagcatgatgcggcgcttgccgatgctggcaagaatggcatcgttatgagttacaccgggcgggctgctccctggcagatcatccgccaggtcaagccgaagctgcatcgtattatcaagaaagtatcctttggagaggaaaccgcccagtcagagaatgagatctgggacggtgaaaacctttctgcgatggtcacgctctataaatatcgtggtcaagttgatcttgtagtaacagacccgccgtacaacaccggcgaggacttccgctataacgacaagtgggacaaggatccaaacgatccagatctcggcgatgtagttcctaaagatgatgggtccaagcacagcaaatggttgcgcttcatgacacccagaatctggatgatgcgtgagatgctaaccccaggcggggttatggctatctgtattgatcatagggaactatttagacttggcatgctcatggacgaaatcttcggcgaagagaatcgcattggcataatcaattggcagaaaagctattcacctcgcagtgataataagggggcggcggcgaaaactgagtgcaacacctga

SEQ ID NO: 338304 - DNA, 930 bp, Pseudomonas aeruginosa
atggcaagtcctcttatattcatcgacggcgaccaaggcaccaccgggttgcaaatccatcaacgtctacgcgaccggaccgatctgcggcttatcacgctcagccccgaacatcgcaaggatccgcaacgtcgcgccgaaatcatcaacgcctgcgacatcgcgattctctgcttgcccgaccaagccgcacgcgacgctgtagcgagcatcgaaaaccccgccgttcgggtgatcgatgcgagttcggcgcaccgcacccatccagactggacctatggtttcgcggagatgaactcgcagcaggcccaacgcatcgccacggcacggcgggtcagcaatcccggttgctatcccacgggggcgatagggctgctgcgcccattgctggaggccgggttgctgcccagggactatccgacgaacattcatgctgtgtcgggctattccggaaaagggcgcgttggcgtgcaagagcatgagggagagggcgcatcacaggcgcccgcgtttcaggtttatggtctggggctggcacacaaacatattccggagattcagcagcaaagcggtctgatggagcggccgatgtttgtgccggcttatggggcttttcggcaggggatcgtgctgaccataccgttgcaacttcgcttgttggcgccgggcgtggatgcggtgcggttgcatgcgtgtcttatgcagcactacgtcgatgcggaccatgtacaggtgatgtcgatgcaggaggccaaagggttgacgtgccttgatcctcaggcgcttaacgggactgatagtttgcgattggtggtgtgtgaaaatgatgagacggggcaggttttgttggctgcggtgtttgacaatcttgggaagggagccgctggagcggcggtgcagaatctggatttgatggttgcaggaacatga

SEQ ID NO: 338305 - DNA, 1437 bp, Pseudomonas aeruginosa
atggtcgcgctcaacagcaactatccagacgttcatcaggacgacacattgaagcgggatctcagcctgtcttcgactttctccctggccttcgccttcatttcccccattgtcgcgctgtactccatcttcggtcttgggatagcggaaatcggtccggcgttctggtgggggctcatcattgccatggctgggcagctcctggtagccctatcttttgcgatgctcgtttcgcgctttccctacgagggcagtatctaccagtggtccaaacatctactgggacacaagtacggctggttcgcagggtggacctatatctgcacattgcctatcacaatggctgcagttgccctcggtggtgcggatttcctcgctcagttgctgagccttgacccggactccaaggttgtcggtgtctcactagccctgggcctgatagcattcgcgacctggggaaatacgcaaggtcgaaagatattcgccaccatcgtctggctgtgtatcgccgccgagatcatcgggtccgttggggtgggcatcctattgctggcgaagttccagataaatccgctttcgattgtcttgccctccgcggatatgttcacgggcgacgggagccttgatgggtttttcagttccaaagcagcattagcgatcgcttactgcggctgggctttcctggggttcgaaagcgcaggtgctgtagcggaggaggtgcggcggccggagcgggcggtaccgaaagcaatgctgctctgcctgctttccgttgggggtatcgttgcgttctcagcgctgtcgctaattctggcgctgccggcgctcgacattcctacgggctccgatccagtggccgacatccttgtccatcatctcgggcctatggcctacaaggggatgttggtgttgttcgtgatcggctttctcgcttgcatgctgggcatccaggcctcggtatcccgggtaatttgggccttcgcacgcgaccgtagcctgccatgccacaaatggctgagcagacttagcgaaggtgattcgttgcccacgaatgcaatcgttctcactggaggcttggcgtcgcttctgttcctgctgtcctttaccaatatctattcgctgctgttgagtttcaccatctccggcttttacatcgccttcgcatttccccttgttgcagcctgccattcggcaatgagtggaacctggatcaacggcccattcaacctgggacggttcagcatccctctactgttcaccgccacgatctggacgcttttggaggccatcaacatctcctggcccagatctccacagctgccttggtacgagaattgggccgtaccattgatggttggggttttgtccataatcggactgctaatctacaaaagcgtatgcgccggcaggcaatctaatgccctgggagtcgcatag

SEQ ID NO: 338306 - DNA, 939 bp, Pseudomonas aeruginosa
gtgctggctctgctgggtgccttggtcgattacgagcggcggctggtcatcaagtacagccgcttctcctcgcccgagttcctggttaacgaatcgctggacgatgagtccactcgcaactacctcggctggctctatcgactcgacccactgctacgcctagtcagcgaaggcaacgtgcccacggtcacgacctttgcgctgatgcgcagcgaggatcattcgaacgctttctacgacgaaattttcaaatcgggaaaaatcttcgacgaactggttctgttcctagaggcgcccggcggggcctatatcgcattctgttttgaccatggctcacgattggccacacccgaggagatcgccgcatttcgcgcggtagaacctgtggtggcggaggcccatcgactacatgtgcaaaatgcgattgccggtggcctggaatctatctacggcgaccgtcgcgtaggtgtgctggtgacagacgcagagggacaagcgatataccggaacagtgcctgggaaacgtctgttcccgatgatcaatgcgacgaattgatccaattggcgttctcaggcggggaacgcgaaccgagtaactggcacgagcatgtattgcattgggagcacctggaccttgatgtcgcgcaggtcaggtccagtcgaattctgttccttgaaagtcacgcaccgggttatttgaaaaccgacatagaaacggcattggctgccttctgcagccactaccggctaagtcatcgtgaacgccagatcgtcgagaagacgatgcttggatatcccaccagtctcattgcagagaagctcgagctcagcgccgggaccatcaaaaactacaagcagcggctctatctgaagctcgatatcacttcggaacgggaaatcttctcgctcttcatgagccacctgctcggtcagatctga

SEQ ID NO: 338307 - DNA, 1218 bp, Pseudomonas aeruginosa
atgacaatcgaacgcatgaattatcccgacggctactttccggaggatgaatatctgtcccgctgggagaaagttcacgctgaaatgcgcttgcgccagtacgacatcgccatcgtctggggtaagactgccgggcactacgagcgcgcgatggaaacgctgtggttgaccaacttctggtccgagcattctgggcaggagccggattcgccgatctggaatgcgcgaggtttctgctgtgtaattctggagccaggcaagaccccggagctgcacggcgatgtggccgaggttcggcgcagcctcgtgcgctgtggcgactaccacttcagcgatgatcccatcagcagcgtcgcccgctcgctctcagctcgtaggccgcaaggctcggtggtcttcgttggaaccgattgcctgccggtcaaatacgccaagcagctggaggctctcacgcccggtatcaggtacacctacgacgacaacctgatccgccgctgccgtcgaataaaaagcccgcgtgaactcgatctgttccgcgaggccggtgaaatggtttccagcgccctctatcgggtatgcgacagcctgtacgcgggcaagacctgtgccgaggcggcggccgagggtgcctatgaactaacccgtcgtggcggtggctggttgcgcattccgatcaactacggaaccgacgatgatagccgcttcttcgagcgggacccaatgtatggctactcccagcaggctccgcagaagggcgacatgttgcgcacctggatctacggaccgacgcaccaggggtactggctagaccccggccgctctctggtatgtggcggcaaaccgacagatgcacagaagagtcttctgatcgactcctattccatcacggactctgtcctcaagtccgtaaggcatggtgtacgtgtactcgatgtggttgaggaggcagagcgggtgcagcggtcggtggcagacgaacacgatctggcgagcaaccagtggccttacttcgggcacggcaacggctccatgtgggagcacccgatcatcaatcgcgattcggtgacgccggatgactacttcgaggaaggaatggtggcttccggtgagtccttcatgacgcgatccggagtcggaagcgtcggctgggaacagaactttatcgtcacccgcgatggtatcgaactgctgacgacgactccggtgttctggttctga

SEQ ID NO: 338308 - DNA, 840 bp, Pseudomonas aeruginosa
atgaatgttctgttggcgcagatgccgatcgtcgatgccgacgtcgggcgtaacttggaagcgatgctggagatcatcgagagcgcgggaggctccgcggatctgattgtgttccccgaaaccacgctctgcggatttcctgacaagaccgaagtcggcgatgtcgccatgactgtagagtcacaagcgatccaactgctcaaggcagccgcccgccgggggagcgtcgccttggcattcggctttgccgagcaggatgggggggctttctacaacactgcggtcctgctggatcgagaaggccgtattgccttgcgctaccgcaagagccacctttggccgcacacggaccggggagtatttacggcgggaaatgccttcttcgtgagcgaaatcgacggtgtgaagatcggacttattgtctgttatgacgtggagttcccggaaactagtcgcgctctcgcgcgtttgggggcgcaactgatcttggtgctagatggcaacatgtctccgtatgggccagtgcatcggcgtgccgtaactgctcgtgccatggaaaatcaatgttatgcagtcctcgtcaatcgggtaggagccggacgtgaactagagtttgcaggtgagagtcttgcggtcgatccatatggagaggtcattgatgaagtcgacgggacggctccactgttggttacgctcgacctgtctgcggttgaggccagccggaaggactatcactatcttcaggacgcgcgattacccatcgcgaatgtaagcgagtctgcgtctgttgatggcgtgacaaaccgtgtgctgaagatcggggctgaacacctccgctaa

SEQ ID NO: 338309 - DNA, 243 bp, Pseudomonas aeruginosa
atggtggtggactacttcagcgacatcagcccggtgtcgctgacgcctagcaatccgctctatcagttgtatcagtacgtgattggctacgaggtgcacctgtatctgcgggccatgaacagcgctctggatagaactgcgcggttgatcctggccctggatgatgaagatccaagccagccgatcgcgacaggcagaaaccggcgaaaagcgatctttggcctatcgagagaatcaaggtga

SEQ ID NO: 338310 - DNA, 699 bp, Pseudomonas aeruginosa
atgacaaatcgacatgataaagctgaagccgacgaggatttagcacagctggtaataggccacggaccctgcacttatctaatgctgctcctactgggcttgatcctcctgtttccctttcttgaggaaggtatcttcgcccgcacattgctcggcattctgttttcaatcgtgctgctcttgggcgcttttgccaccaggcagactcggtgggggttcagtctcaaactgggcttggcgttgctcggggttggccttcaatgggcggcattgtcgactgcgagtatcgcgattcttaaacttgccggggtagcttatgcgacgtctcttgccgtctcgttcagcggagtgcttcgctatattctcaagcgcgggccaattacagccgacaagctgcatggcgcgctcgcgggctacatcatgctggccttcatgtggtccttcatctatgccatggtcgagatatccagcgctggctcatttggccctggacacctcgatttcacacagcccggcacttttttcaaactgatctattttagcctgacgacgctcacgaccaccggtttcggtgatgttcttccattgaccaatcacgctcgctcacttgtgatggtcgaagaattttcaggcgtcttttacgttggtgttgtgatagcgcggctcgccggtctttatccgtcgaatcagactaagtga

SEQ ID NO: 338311 - DNA, 576 bp, Pseudomonas aeruginosa
atgttcacccttgtaaacctggacacatcgccgcccgaatctctgaagagtcaggttctacaaatggtggtggactacttcagcgacatcagcccggtgtcgctgacgcctagcaatccgctctatcagttgtatcagtacgtgattggctacgaggtgcacctgtatctgcaggccatgaacagcgctctggatagcaccgcgcggttgatcctggccctggatgatgaagacccctcccaggtgctgggttttgccctgtacctgcctagccaggatgatgccgaggcctgcacgctggcctatttggccgtcaaggccagccaccgccgacgcggtattgcccgggctttgttgcagcagatggtcaagtgtcggccccacgccgagctggcctgcgtggcgagcaaggtgccgactttcgagtcgatggggtttcaggtactggcagcgcaggggccgcacgtgctgctgaacatgcggattccacggtcatctggccacccattccatgagcatctgaccaccgattccacgctgatccggccacccattccacgcgcatccggccactga

SEQ ID NO: 338312 - DNA, 1725 bp, Pseudomonas aeruginosa
gtgcagaccctgcgcgagatgaacgccgacaacctgcgcaaggtgccggcggatgcccctaccgccttcatcaagccgcgctggaagccgctggtgatcaccccggaaggccacgaccgacgcttctacgaaatctgcgcgctgtccgagctgaagaacgccctgcgctccggtgacatctgggtcaagggttcacggcagttccgcgacttcgacgactacctgctgccggcagagaagttcgccgcgctcaagcgggaacaggccctgcccctggcgatcaacccgaacagcgaccagtacctggaagagcgcttacagctgctggacgagcagttggccaccgtaacccggctggccaaggacaacgagctgcccgatgccatcctcaccgagtccgggctgaagatcaccccgctggattctgcggtgcccaataccgcgcaggcgctgatcgaccagaccagtcagctgttgccgcgcatcaagatcaccgaactgctgatggatgtggacgactggacgggtttcagccgccacttcacccacctgaaggacggtgccgaggccaaagacaggacattgctgctgtcagcaatcctgggcgatgcgattaacctcgggctgaccaagatggccgagtcgagccccggcctgacctacgccaagctgtcctggctgcaagcctggcacatccgcgacgaaacctattcggcggccctggccgagctggtcaaccaccagtaccgccatgccttcgccgcccactggggcgacggcaccacctcatcctccgatggccagcgcttccgggcgggcggccggggcgaaagcaccgggcacgtcaacccgaagtacggcagcgagccggggcgactgttctacacccatatctccgaccagtacgcaccgttcagcacccgcgtggtgaatgtcggcgtgcgtgactccacctatgtgctcgacggcctgctgtaccacgagtccgacttgcggatcgaggagcactacaccgacacggccggtttcaccgatcacgtcttcgccctgatgcacctgctgggcttccgcttcgcaccgcgcatccgcgacctcggcgaaaccaagctgtatgtgccgaatagcgtccaggactacccgacattgcgcccaatggttggtggcaccctgaacatcaagcacgtccgcgcccattgggacgacatcctgcgcctcgccagctcgatcaagcagggcaccgtcactgcctcgctgatgctgcgaaagctcggcagctatccacgccagaatggccttgccgtggccctgcgcgagctgggccggatcgaacgcaccctgttcatcctcgactggctgcaaagcgtcgaactgcgccgccgcgtgcatgctggactgaacaagggtgaagcgcgcaactccctggccagggcggtgttctttaaccgcctcggcgagatcagggatcggagcttcgagcagcagcgctaccgggccagcggcctgaacctggtgacggccgccattgtgttgtggaacacggtgtacctggagcgcgccactcaggggttggtcgaggtcggcaagccggtgaacggtgagttgctgcaatacctgtcgccgctgggctgggaacacatcaacctgaccggcgattacgtctggcggcagagccgcaggctggaggacgggaagttcaggccgctacggttgcccggaaaaccttag

SEQ ID NO: 338313 - DNA, 156 bp, Pseudomonas aeruginosa
atgaagacgacgacgaagtactccccggaagtccgcgagcgagcggttcgactggtattggaacatcaaggcaaccacgagtcggaatgggcagcgatttgctcgatttctgccaagatcggttgtaccgccgtgttggcgctgatggaaaattga

SEQ ID NO: 338314 - DNA, 510 bp, Pseudomonas aeruginosa
gtgatcgacaacgtcggcctcggcctttccggtgaatggcgcgcccaggccgaggaagcgctggaagcggtcggtctggccgaacgcgcccacgactggccagcggcgctgtccggcgggcagaagcagcgcgtggcactggcccgcgcgctgatccaccgcccgcacctgctgctgctcgacgaaccgctcggcgcgctggatgccctgacccgcatcgagatgcagcagctgatcgagcgcctgtggcagcagcacggcttcaccgtgctgctggtgacccacgacgtcaacgaggcggtggcggtcgccgaccgggtgatcctgatcgaggacggccgcatcggcctcgacctgccgatccccctcgcccgcccgcgcccgcgcgcctcggcggcgctggccgcgctggaagcccgggtgctcgagcgcgtgctggccctgccggccagcgccgagcaaccggaacccgtttcaccgttgcccacgcagctgcgctggtccctgtaa

SEQ ID NO: 338315 - DNA, 282 bp, Pseudomonas aeruginosa
atgagcgcccatgacctcaaacgcggcatcccgctgcacctgcatggcgtgatcaaggccttcggcgcccgcacggtgctgcacggcatcgacctgcacatccccgccggccagttcgtcgccgtggtcggtcgcagcggctgtggcaagagcaccctgctgcgcctgctggccggcctcgacgaggccagcggtggcgagctgcaggccggcagcgcagcgctgaacgaggcgcgcgaggatatccgcctgatgttccaggactcgcgcctgctgccgtga

SEQ ID NO: 338316 - DNA, 669 bp, Pseudomonas aeruginosa
gtggccgttgccggctgggcgctgctgaccagcggcgaactctggcagcacctggcgatcagcggctggcgcgccggcatcggcttcgccatcggcggcggccttggcctcgcgctcggcttcgtcaccggcctgtcgaagtggggcgaacgcctgctcgacagctcggtgcagatgatccgcaacgtgccgcacctggcgctgatcccgctggtgatcctgtggttcggcatcgacgagagcgcgaagatcttcctggtcgcactcggcaccctgttccccatctacctgaacacctaccacggcatccgcagcgtcgacgccgggctggtggaaatggcgcacagctatgggctgtccggcttcgccctgttccgccaggtgatcctgcccggcgccctgccgtcgatcctggtcggcgtgcgcttcgccctcggtttcatgtggctgaccctgatcgtcgccgaaaccatctcggccaacgccggcatcggctacctggcgatgaacgcccgcgagttcctgcagaccgacgtggtggtgctggcgatcctgctctacgccgtgctcggcaagctggccgatgtcgccgcccgcagccttgagcgcgcctggctgcgctggcacccggcctaccagcaaggaggtatccaaaatgagcgcccatga

SEQ ID NO: 338317 - DNA, 270 bp, Pseudomonas aeruginosa
gtggccgagaagatcgccgacgtgcgcgcccgcgcagccaaacacgggcgcacggtgaagttcggcatccgcctgcacgtgatcgtgcgcgagaccaacgaagaggcctgggctgctgccgagcggctgatagccagcctgggcggctatctggggcgcaagcacgatggaccgcccggccccaaggcaatgtggaccgggctgcagcgcttgcgggaatttgtcatcgcttttgaggctcgcgatgcgctcaccgggacttgtgtataa

SEQ ID NO: 338318 - DNA, 591 bp, Pseudomonas aeruginosa
atgagtctgaacatcttctggtttctccccacccagggcgacggccactatctgggcaccgccgatggcgcccgcgccgtcgaccacggctacctaacccaggtggcgcaggccgccgaccgcctcggcttcggcggcgtgctgatccccaccgggcgttcctgcgaggactcctggctggtcgccgcctcgctgatcccggccacccagcgcctgaagttcctggtcgccctgcgcccggggatcatctcgccgaccgtcgcggcgcgtcaggcggcgaccctcgaccgcctgtccaatggccgcgcgctgttcaacctagtcaccggcggcgacccggacgagctggccggcgatggcctgcatctctcccatgccgagcgctacgaggccgccgacgagttcacccgcgtgtggaggcgcgtgctatccggcgagaccgtcgacctcgacggcaagcacatccgggtcaagggcgccaagctgctctacccgccgatccagcagccgcatccgccgctgtacttcagcggttcctcggcggccgcccacgagctggccgccgaacaggtcgacctgtacctgacctag

SEQ ID NO: 338319 - DNA, 885 bp, Pseudomonas aeruginosa
atgcgcactacttacctgcgtcgaggactggtcgccctgctggcagcagcgatctcctccgccgccctagccgtcgacgacgcgcacaccctgcacatcggctaccagaagtacggcaccctggtcctgctcaaggccaagggcagcctcgagcagcgcctcgctgcccagggcgtcaccgtgaaatggaccgagttctctggaggcccgcagctgcgggagggcctcaacgtcggctcgatcgacttcggcgtgaccggcgaggcgatcctggtgcccaaggactcgccgatcacctcggtggccgaactcaagggcaagaaggtcgccctgaacaagggctccaacgtgcactacctgctggtgcgcgccctggaggatgtcggcctgtcgatcaccgacataacccccgtgtacctgccgccggccgacgcccgcgccgccttcgagcgcggcagcgtggacgcctgggtgatctgggacccgttccaggcggccgccgagcagcagctcgaagcgcgcaccctgcgcgacggcgccgggctggtcgacaaccaccagttctacttggcccgcggcgactacgcgaagcagcacccgcaggtggtcggcaccctgatcgaggaaatccgcagcgtcggcgcggaggccaaggccgacgtgcagcaggccaccgcgcagatcgccccgctgatcggcctgtcagcggagatcaccgccctggccctgtcgcgccagcagtacgacacccagttcatcacacccgggggggtggaggcccagcagaagatcgccgacaccttcgccgacctgaagctgatccccaggcgcctgaccatcaaggacgtggtctggacgccgccggccaggaccgcccagcactga

SEQ ID NO: 338320 - DNA, 261 bp, Pseudomonas aeruginosa
atgacgctgaaccacaagcattggcacctgccgcactggacaccggcccctctgattgagatgaacctactcgcagctctaaactccactccgccgccccaatcaagcccctcactcagcctctaccacggtgttttcaaggtaaccaagcccctcgacttcgacacgcaccacatccccgatattgaggaactgtggggggttcataagagcaccaacacccgccggggttcctgtagcaataaggtcacctggctctaa

SEQ ID NO: 338321 - DNA, 1620 bp, Pseudomonas aeruginosa
atgaaagagatccaagtccgcatgccagataactctaaaatcgacgacctcaatagctcacctgccttctggcgctcacaggaaatgctcctgctgcagcaggtcatggccctggcgggcaagagcctcgccgtcgagccggtgttcaaggaaatgctccacctgctttccgagctgctgggcctcaatcgtgggcggatcgtcctgctcgatgaggatgggcgtggagggaccattcgctatgcgtatggcctgaccaaggaggaggtggtgctcggccgctatgccttggacgagggggttaccggcagggtgctggcgcatggccaggtgaccatcgtgcaggacatcgacaaggagccgatcttcctcggccgcatggtcgaacgcagcaagctgccggcagggccagtgtccttcatcgccctgccgatccagatcggccagaagactgtcggcgtgctggcctgccatcgcatccgcatgcgagcccggccgctggccgacgacctgaccatactgcgcatcctggcgacgctggccggacagatgctgcatctgcacagctacatcgaggagaagactctggccctggaacagcgcaacgacatgctgacccgtgccctgcatgccgatgcaacccgttatggcatcgtcggtacttcccccgaactgctgcgggcgatttccgagctggagcgggtatccagtgccactgccagcgtgctgctgctcggtgagtctggcagcggcaaggagctgttcgcccgcgccctgcacctggccagtccccgccgcgacaagccgttcatcaaggttaattgcgccgccattcccgataccctgttcgagtccgagctatttggttacgagcgtggtgccttcactggtgccacggcgttgcgtgcgggctggttcgaacaagctgacggcggcaccatctttctcgacgagattggcgagctgccgttgggaatgcaggctaagctgctgcgcaccctgcaggaaggcaccatcacccgcctggggggcaagcgggaaatcccggtcgacgtgcgcctggtggcagcgaccaaccgtgacctggcgatcgaggtcgcgcggggccagttccgccaggacctctactaccgactcaatgtcatcccgatccacctgccgtcgctagccgagcggcgtagcgacattccagccttggccatgcactttctcaaccgggtcaaccaggccaaccagcgcaacatcagcctgacctccgatgccatcgcccgtctgcagaatcacccctggccaggcaacatccgcgagctgtccaacgtcatcgagcgtgtggttttgctggccgataagtcgccgctgaatgccggcgatctcgaacccttcttgaacactggcgagacggtcgaggaggtgcaggtacagccggtcagcagccggctgcaggcagagccattgatgatgtccttgccaatgcgcccctacgccccggctggctcgcactccgctgatgcgttgcagcaggcgctgctccagtgcgggggcaacaagtcgcgtgcagcccagcttctcggtctgacttcgcgccagttcaactaccgctggcagaagctcggcctgtag

SEQ ID NO: 338322 - DNA, 558 bp, Pseudomonas aeruginosa
atgaccgcagcaaccgccacttgcccgagcaccgtgaaaacctacctgaagccgatcgatcgcaacgggctgatggccttcgccgagaaggggcgcaacaacccggccacccgtggcaccaacaaggtccactccgttatgcaaggcatgtatcgcagcctgagctatgtcggtgatcaccagccggtagtggtcgacgagccgctgcacctgttcggcgaggacaccgcgccggccccgggcgagatcgtcctctccggcctcggtggctgcctggccgtgggcatcaccgcggtggccacctggaagcaggtgaagctgagcaagctggaaattttcctcgagggcgatatcggcaacccggcggcctggggtgccggtggtgccgagatggcgcctgagcagatgggcttccaggcgattcgcgtgaaggtgctggtggagggcgatgcgagccgcgaggagctggacgaaatcgtcaagcacgccaacttctactcgccggtggccaacaccatgcgcaacccgattccgttcagcatcggccttgccgactga

SEQ ID NO: 338323 - DNA, 1143 bp, Pseudomonas aeruginosa
atgaacagtcttgcaatcgcagttcccaccacaaccaccgcctggaccgacgatgcccgcgtgctcgccgacgtgggccgtatcgcccgcggtccgctggcccaactggtcaaccgcatcgaccacgagggctactacccgctcgatatcatggctgccctcggcgagagcggcgcactgggtgtgcatctcgacagccacggcggccgcttcggcctgtcgctggcggctatgcaggaggtcagccgaacctgcggctcgaccggtttcctgacctggtgccacgacgtctgcggcctgtacatggagcagtcgggcaacccggcgctgctgtcacggctgaacgaccatgccatggggcggacgttcggcggcaccgcgctgtccaacccgatgaagtcgctggccggcatcgaaaacatgctgctgcgcgcccgcaaggtgccgggcggctacaaggtcagtggttcgctgccctgggtcagccacatcgccaagggccagtactgcggcgcgatcgccgcggtggagcgcgacgacggctcgcgctcccacgagatcatgttcctgctcgatctcgacgagcgcgccgagctcaaggcctgcccggagttctccgcaatggagggcaccagcacctggcgcatccagctcaatgactacttcgtcggcgaggacagcatgatcgccgacccggcccgcccgttcatcgcccgcatccgcgccgccttcgtgctgctgcaagccggcatggccaccggcatcgtccagggcagcctcgactcgatccgcgaggtcgagccggtgctcggccacgtcaaccgcttcctgcacgaccgcccggacgagctgcaggccgagttcgacgagttgggcgggcggatcatgaagctggcgcaaagccccttcgacggcagcaaggacttcatgctggaggtgctcgacgcccgcacccagggcgccgagctggccctgcgcgcctcgcagtcatccctgatgcaccagggggcgcgcggctacctgaagagcgccgcgccgcagcggcgcatccgcgaggcgcagttcgtcgccatcgtcactccggcgatcaagcatctgcgctgggagatggcccgcctgatgaaagaggagatgccggcatga

SEQ ID NO: 338324 - DNA, 1335 bp, Pseudomonas aeruginosa
atgagcgccatcacccaagcctggcggcagttcatctgtcgcgcctgcggcctgatttacgacgaggagatgggtgatccggacagcggcctggcccccggcacccgcttcgaggacatccccgaagactgggaatgcccgctgtgcggcgtgaccaagctggacttcgagcctttcgtcagacgcgatgccgcgcccgcctgtgcggtgcagggcgcgccgcagggcaggggagtagtggtggtcggcgccggcctagctggctgggccaccgtcgaagccctgcgtgagctgtctgccgaggtgccgatcaccctgatcagcgcctgtaagggcgacctctaccacaagccggaactgtcggtggcgctgagccgcggccaaacgcccgaggcactggtccgcgagacggcggctgacgccgcccgccgcctgggggtgcgcttgtacacggagaccttcgtggtcggcctggccccggcgctccaccaactgcgtaccacccgcggcaccctggcgtacacccagctggtgctggcccagggcgcgcgtcctgcactgccggccgcgcttccgccggcgctgtgctggcgagtcaacgacctggccggctggagcggcctgcaggcacagctggccaaggcgccgcagcgggtggccatcgtcggcgccggcatggtcggttgcgaactggccgaggacttcgcccgcgccggccatcaagtgaccctgctgaaccgccttgccctgccgctggcgggcctgttgcctgagattgcggcacagcgcctgcgccagagccaggagcgcctcggcgtcagctatctcggtgctgtccaggtcgcaggcatcagcgcccaggacgatggcagcaagctcatcaccacccagtgcggccagagcctggtcgtcgatcaggtcgtcgccgccaccggcctggtgaccgatgaccgtctggcgcggattgccgggctggccttcgacaagggcatccgggtcgacccctgcaccctgcagaccagtgccgcggatgtctacgcgctgggcgactgtgtcagtctggacggcgcagcctgccgcttcatcgaaccgatcgctcggcaggcgagggcgattgcccatgccgtgctcggcagggctggcgagagctacgcccacagccagccagtgatccgcctgaagacccgctccctgcccatcgagatgcatggcacgccttgtgctgagggcgagtggcttgtggtgcgtgaagacgacagctgcctgctgatggagcagctggtcgacggccgtaccgcttcaaccttgcgtgtaggtcaggccaaagcagcttga

SEQ ID NO: 338325 - DNA, 1395 bp, Pseudomonas aeruginosa
atgaccgataagaatttctaccgcccctattcggagcacagcagcctgtcgggctgcacctgcggggcccacggcagccagcaggagcatgacctgcaggccgagcgggagcgtctggcccgcggccgcgacagtgaagccctgtcccgcgatttcgtcgaggcagccgccgtgcgcgcgctgttccctcacgatgccacccgccgccgtttcctcaaggcggtgggcatgggcaccgcgatggcggccatcgccagcgtgctgccgctgcagtcgctgcaggcgatggctgaggaaaagggtccgctggagaagaagaacctgaagatcggcttcattccgatcaactgcgccacgccgctgatcatggctgacccgatgggcttttatagggagcaggggctcaacgttagcctgcagaagactgccggttgggcgctggttcgcgacaacatgctcaatggcgaactggatgcctcgcacttcctcgccccgatgcccctggccatctccatgggcctcggctccagcgcccagccgatgcgcgtggcgaccatccagaacaccaacggccaggccatcaccctggcactcaagcacaaggacaaccgcgatccgcacaactggaagggcctcaagttcgccatccccttcgagttttccatgcacaacttcctgctgcgctactacctggccgagcatggcctggatccggatcgcgatgtgcaactgcgggtgaccccgccggcggaaatgatcgccaacttgcgcgccggcaacatcgacggtttcctcggcccggatcccttcaaccagcgcgcggtgtacgacggcatcggcttcatccacatcctctccaaggacatctgggatggccatccgtgctgctccttcggcacctcgcaggcgttcatcgagcagaacccgaacaccttcgccgcgctgtaccgcgccatcctcaatgccgcgtcggcggccagcgacccggccaacctgccgacgatttcccaggccatctccacgccgaactacctcaaccagccggagatcgtcattcgccaggcgctgaccgggcgctatgccgacggcctcggcaatgtgcggaacgagccggaccgcgccggctttgatgcgatgccctggtactccatggcgacctggatgctgacccagatgaagcgctggggttacgtgaagggcgagatgaatttcaacgcgctggccgagcaggtgttcctgatgaccgacgcccgcaagcagatggccgcgctggcgatgagcgaggccaatgccgaaccggcgtccggctacaagagcttctcggtgatgggccgaccgttcgatccgcgccagccgcaggcctatctggatggcttcgccatcaagcgcagctaa

SEQ ID NO: 338326 - DNA, 855 bp, Pseudomonas aeruginosa
atgagcaaatcgataaacatgaaagccgcgctgctgtccttcgtgatgctgctggtgctgctgcttgtctggcaggcggcgaccctgccagccaagcagactgccgcaagcgagatggatgaggagtacgcgctgctgatgggccatgccctcggcggcgaaaccaaggcggtcaacggcatgccgaccccggtgcagttcgccggcctggcctggaagcagctcagcgaccccttctatgacaacggtccgaacgacaagggcatcggcatccagctggcccattcgctggggcgcgtggggctcggctacctgatcgccgcgctggtggcgatcccgctgggcttcgtgatcggcatgtcgccgctgctctacaaggccttcgatccgttcatccaggtgctcaagcccatttcgccgctggcctggatgcctatcgcgctctacaccatcaaggactccaccacctcggcgatcttcgtgatcttcatctgctcggtctggccgatgctgatcaacaccgccttcggggtcgccggggtgcgcaaggactggctcaacgtcgcccgcaccctggaggtcggcccgctgcgcaaggccttccaggtgattttgccggccgccgcgccgaccatcatcaccggcatgcgcatttccatgggcatcgcctggctggtcatcgtcgctgcggaaatgctgatcggcggtaccggcatcggctacttcgtctggaacgagtggaacaacctgtccctgggcaacgtgatcttcgccgtcctgatgatcggcgtgatcggcatgctcctcgatctcctgttcgccaacctgcaaaagaaggtgacttatgccgaatga

SEQ ID NO: 338327 - DNA, 924 bp, Pseudomonas aeruginosa
atgccgaatgaagcccacacgcacaacgtccccttcatcaaggtcgaagggctgaccaagcgctaccgcgacgacctgccgccggtgttcgagaacatcaacttcagcatccagcagggcgagttcatctgcgtgatcggccactccggctgcggcaagagcaccatcctcaacgtcatcgccggcctggaagaggccagcagcggcggggtggtgatggccggcaaggagatctccggccccagcctggaccgtggcgtggtattccagagccacgcgctgctgccctggctgagcgtggagcggaacatcgccttcgccgtgcgctcgcgctacccggactggtcgcgcaagcagatcgccgagcatggcgcccgcttcctcgacatggtcggcctcaaggccgccgcgcagaagaagcccagcgaactgtccggcggcatgaagcagcgcgtcgggatcgcccgcgccttcgccgtggagccgaagatgctgctgatggacgagccattcggcgcgctggatgcgttgacccgtggggtgattcaggacgagctgctgaagatctgctccgccacccggcagacggtgttcatgatcacccacgatgtcgacgagtcgatcctgctggccgacaagatcatgctgatgagcaacggcccccatgcgcgggtggccgagatcgtcatcaacaccctgccgcgtgatcgcagccgcgaaaccatgcaccacgacccgcagttctaccgcatccgcaaccacctggtggacttcctggtgcgccgttccaaggtcatccagcagagcggggcgccggcgcaggccagtggcgagccgttgatcgtgcggccggggctggagagtgacgaaccgccgcccggccccgagcaaccgcagacctccaggatgcgcgtcgtcgcctga

SEQ ID NO: 338328 - DNA, 1242 bp, Pseudomonas aeruginosa
atgcgtgccaaccccctgctgctgtgccccctgttgctggcctcgactgcgccagctgtagcccagcccgaagaagcccttgccaacctgcttacccagggcaagccgatcctcgatctgcgttatcgctacgagcacgtcgatcaggacaacgccctcgaccatgccaacgcacagaccctgcgcacacgcgccggcttccagagcgggagctggtacggcttctccggggtgctcgaggtcgacaacctcaaccgcatcggcgacgagcgcttcaacgatacccgcaatggtcgcggcaattactcggtggtgggcgaccccgacggtactgaaatcaaccaggcactgctgcgctacgaccatgcgcagggaagcgctgtggccggccgccagcgcatcgagctggacaatcagcgcttcgtcggcggtgtcgcctggcggcagaacgagcagacctacgacggcttccttggccagctcaagccgctggaccagctgaccctgacctacgcctacctcgacaacatcaacaccacgttcggccccgacggccagcacggctatccgaccaatccggcgaacatcgaggggcacagtcacctgttcaacgtcgcctatgcttggcgcccggagctgaaggtcaccgcctacagctacctgctcggcctcgacaacctggcggtggcgccaaccgcggcgccgggcagccagtccagccgtaccagcggtgtgcgtctcgccggcgcgcgggagggcttcagctacaccctggaatatgcccgccagcgcgactacggcaacaatccgctggacctgaacggccactacttcctcggcgagctgggctaccagcagggcggctacctggccaaggtcggctacgaggtgctcggcggggaggaaggtgccggcaatcgcgccttccagacgccgctggcgaccaagcaccagttccagggctgggccgacctgttcctcatcaccccggcagccggtatccgcgacagctatgtcggcggcagcgtgcccctgctgggcggcagcctgcaggcctggtaccacgacttccgggccgaccaggggggcgacagctacggccaggagctggacgtggcctacagccgaccgatcccctatgtgaagaacctggtggccatggccaagtacgcccgctacgacgccgacgagttcgcggtggataccgacaagttctgggtacagatgcagtaccgctactga

SEQ ID NO: 338329 - DNA, 816 bp, Pseudomonas aeruginosa
atgttgctggaaagcctttacggcctgggtgtgggcctggcgctgggcatgaccgggggaggcggggtgctggccgtgccggcgctggtgctcggcttgggctacagcctgcccgaagcggcgccggtggcgctggtcgcggtgggtgcttcggccttcctcggcggtcttgatggcctccgccgcgggttggtgcgctacaaggcagcgctgctgatggcgctcggcggcgcactctgcgcgccgctcgggctgcggctggcggccgttctgccggtggcggcgctgatgctgctgttctgcgccgtgctgctgctgatcgccgggcgcatggcgggccaggccctgaccagccctgcgccgggcgcggtacccgaggccttgcgcagaaactgcatgctcaacaccgagaccgggcgcttgcgctggaattcgcggtgcttcttcagcttgtccgccatcggtggcctgtcggggctgttcagcggcctgctcggcgtcggcggcggcttcctggtcgtccccggggtgcgccagttcagcaacctcggcatgcacggcatcgttgccacctcgctgatggtgatcgcgctgatctccgccagtacggttgccggtttcctctggtccggcggcagcctgtccgccgcggcctggatgttcatcgccgggtccggctgcgggatgctcggcggccgcctgctggccccacgggtgccggcccgctacctgcaactgggtttcgccctgctcgccggcctggccgcgctgatgctgctgggcaagacgctcatgtccctttttccgcttcactga

SEQ ID NO: 338330 - DNA, 864 bp, Pseudomonas aeruginosa
atgcagccccatgtggaaagctttttcgacgcgcaaacctcgaccttcagccatgtgctgcacgccgggccaggcacgccctgcgccatcatcgattcggtgctcggctatgacccgaaatccgcgcgcaccgatacccgggcggccgatggcattctcgcttacgtccagcagcaacggcttgtggtgcactggctgctggaaacccatgcccatgccgatcacctgtccgccgccgcctacctgcgccagcgcctgggcggcaggatcggcgccagcgaggcgatccgtaacgtgcagaaggtattcatgggcatctacaacctgcccgccgactactgcgcggagcacggccagttcgatcacctgttccaggccgacgaggccttcaccatcggcgaactgcgtgcccgcgctctgcacgtgcccgggcatacgccggcggatctggcgttccagatcgaagagcgtctggtattcgtcggtgacaccctgttcccgccggatgtcggtaccgcccgctgcgacttcccgggaggctgcgccgcccagctatatcgctcgatccgccgccttctcgccctgccgggagagacccgcctgttcatgtgtcacgactacccgccgtctgggcgcaagccgattgccgagtgctcggtggccgagcagcgcgcggcgaacattcacatgcatgatggcgtgggcgagggggacttcgttgccatgcgcaaccagcgcgacgcgcagctcgacatgcccaacctgctgctgccctcgatccaggtgaacatccgggccggcgtgctgcctgagcctgagggcaatggggtgcgttatctgaagatgccgcttgatgtgctctga

SEQ ID NO: 338331 - DNA, 480 bp, Pseudomonas aeruginosa
atggtcagcaagaacacgatctgcctctggtacgacggcaccgcagaggacgcagcgaagttctacgccgagacctttccggacagtgcagtgggagccatcgttcgcgctcccggcgactatcccgccggcaagcagggcgatgtcctggtggtcgagttcaccgtgctgggcattccttgcatgggcctcaacggcggcccggggatcaagcacaacgaggctttctcattccaggttgccaccgacgaccaagccgaaaccgaccgcctgtggaacgcgatcgttggcaacgggggccaggaaagcgaatgcggctggtgcaaggacaagtggggggtgtcgtggcagatcacgccacgcgtcctcatggacgcgctggccgatcccgatcatgaggcggccaagcgcgcattcgacgcgatgatgcagatgagcaagatcgacatcgccgcgatcgaagcggctcggcgcggctga

SEQ ID NO: 338332 - DNA, 558 bp, Pseudomonas aeruginosa
atgtctgcagcaaccgccacttgcccgagcaccgtgaaaacctacctgaagccgatcgatcgcaacgggctgatggccttcgccgagaaggggcgcaacaacccggccacccgtggcaccaacaaggtccactccgttatgcaaggcatgtatcgcagcctgagctatgtcggtgatcaccagccggtagtggtcgacgagccgctgcacctgttcggcgaggacaccgcgccggccccgggcgagatcgtcctctccggcctcggtggctgcctggccgtgggcatcaccgcggtggccacctggaagcaggtgaagctgagcaagctggaaattttcctcgagggcgatatcggcaacccggcggcctggggtgccggtggtgccgagatggcgcctgagcagatgggcttccaggcgattcgcgtgaaggtgctggtggagggcgatgcgagccgcgaggagctggacgaaatcgtcaagcacgccaacttctactcgccggtggccaacaccatgcgcaacccgatcccgttcagcatcggcctggccgactga

SEQ ID NO: 338333 - DNA, 450 bp, Pseudomonas aeruginosa
atgatttccagccgcgaagaagtgaccaaactgatcctggccgccaaggtcagcaaaggcctgaagtggagccatgtggccgaggctatcggcctgtccaaggagtggaccactgccggctgcctgggccaaatgaccttcgacaagacccaggcggaaaccctcggccaactgttcgatctgcccgacgaggcggtggcctggctgcagatcgtgccgtacaagggctcgctgccgagcgccgtgcctaccgatccgctgatctaccgctggtacgagatcgtcagcatctacggcaccaccatcaaggagctgatccacgaggagtttggtgacggcatcatgagcgccatcgacttctccatggatatccagcgccaggccgacccgaagggcgaccgcgtcaacgtggtgctgtccggcaagttcctgccgtacaagagctactga

SEQ ID NO: 338334 - DNA, 933 bp, Pseudomonas aeruginosa
atgctctcggccagtttcaggctggccggagcaaaccggagaggatggaaccatgagcaacaaagtgcttttcgggcccgacgaagcggcagccttgatgcagctggcaaggccgtgctgatcgacatccgcgaccccgaaagttatcaggccgggcacatcgtcggcgcggtcaatgtgccggatgtcttttcctacctggcgcaaaccagccccgaggggctgcaggccttgcaggcgcaattcgccgagctgttcggcaacgccggtctggatggcgagaaagtcgccatcgtctacgaagatgcgctgaatacccgctatggcggatcgtgccgcggcttctggctgttgcagtacctcggctacccgaaggtcggcatcctcgatggtggtctgcgggcctggaaggcattcggcggcacggtcgacatcgcgacggtaacccccgcagcggcgtgcttccccgttctgccgcaggctgagctgctggtaaccacggagcagatgctggcggcactggccgatccaacgatcaagctgctcgacaatcgcgacaaggatgaatggctgggggaaagctcctcgccctacggcaaggacttcgctccgcgcaaggggcgcatccccggtgcggtctggctcgagtggtacgagctgatggatacccgcaaaccggtcgcggcattcaagtcggctagtcaggtacgcgccctggcggccgagcgaggcctgacgcctgatgacgagatcatcatttattgcttcaagggcgcacgggcggccaatacctacgttgccatgaagctggccggcttcgacaagctgcgcatctatctcggttcctggaacgaatggtcgcgtgacgagcgcctgcccatcgaaaccggcctgcccaaaggggccgtgcgtctgctgccgctggtggtctga

SEQ ID NO: 338335 - DNA, 1269 bp, Pseudomonas aeruginosa
atgacaggcgttcgcttgggcctgcgggaaaacctcggccagtttggcctgctggtactggttaacgccttcgtcggcgccatgatcggcctggagcgcagcattctcccggccatggctgagcaagagttccagctggtggcgcgcacggcgatcttctccttcatcgttgccttcgggatcagcaaggcgctgaccaactatctcgccggacgctgctccgatcgtttcgggcgcaagccggtgctggtggccggctggctggtcgccgtgccggtgcccttcatgctcatgtgggggccagactggagctgggtgctcgcggccaatgtgctgctcggggtgagccaggggctgacctggtcaaccacggtgatcatgaagatcgacctggtcggccccaggcggcgcggcctggccatgggcttgaacgagttcgccggctacctggccgtcgccggtagcgcactgctgaccggatggtgcgccgccgagttcggcctccggccagagcccttctacctgggggtggtctatgtactggccgggctgctgctgtccgtgttgctggtgcaggaaacgcgtcagcatgtggcgctggaggcgcgcagccaacctgctgtcgaggggatggggttgagtcaggacgagattttcctccgtacttcattgcgtgatcgcaacctttccagcgtgagccaggccgggctggtgaacaatctcaacgatggcatggcctgggggctgttcccgctgttgttcgctgccgccggaatgacgttcggccagatcggcgtgctcgtggcgatctatccggccgtctgggggatagggcagatcttcacgggcgcctggtccgatcgggtcggccgcaagtggctgatcgtctggggcatggccctgcaggccataggtatcggggtgacggcgctggccgggcagttcacggggtttgccctcggcgccgtgctgctcggcgcgggcacagcgatggtctatcccaccttgctggcagccatcggcgacgtggcgcacccgacatggcgtgcttcggcggtgggcgtttatcgcctgtggcgcgacctgggctatgcggtcggtgcgctgctcgccggattgctggctgactggcagggactgtctgtggcgctttgggtggtggcagccctgaccctgctttcaggattattggttgccatgcgcatggtcgagcgccgacaggacgcggcaggcggtaatcccattgccgcgaaggaggtagcagcatga

SEQ ID NO: 338336 - DNA, 330 bp, Pseudomonas aeruginosa; identical to SEQ ID NO: 338296

SEQ ID NO: 338337 - DNA, 1272 bp, Pseudomonas aeruginosa
atgcttgttttcgaacctttttatacagacggcctggcgcagatttcctatctgatcggcgacagcaaggccgcggtagccgcggtcatcgacccccgccgcgacatcgatatctacctgcaaatggccaaggcgcgaggcctgcgaatcgcctacgccatcgaaacacatatccatgccgacttcgtgtccggcgcccaggcgctggcgaagcgcaccggggcacagatcatcggcggtcgcgcggataactacgagttcgagcttcgccaggtcagcggtggcgagaccatagagctcgggcaggccacgttgcaagtcatgcacacgcccgggcatacgccagaacacatctccctgcagctgttcgacgcccagcagggcgaccagccgatcgcgctgtttaccggcgacaccctgttcaacctggacgtcgggcgccccgacctgctgggcgaaggcagtgaacgaaaactcgccggcgcgctgtaccacacacttttcgatcactacctgccccttggcgaccggatcgaaatctacccctgccacggcgccggctcggcctgcggcaaatccatcggcgaccgacgccactccacgctcggcagcgagcgtctcttcaaccccgcgttgcgcgagcagcggagcgaggacgagtttatcgattggctactggcggacatgccggaaccaccccgtcactacgcgcgcctgaaacagctgaacgtgcgttcggccgtacagatggagggcgcttccctaccaccgccactcgcgccgtccgagttcgagacactggcggcgcgcggcatgcaggtcgtggacgtccgctcgatcctcgcgtttggcggcgggcacgtgcccggggcgatcaacattgccctgcgcaacgagttcgtgaactgggctggctggatgctcgacgacgctcgcccgatcctgctggtgggcgaatcggccgacgatgttcaccaggctgtcacccagctctaccggataggccttgacgatattcgcggctatctacgcaacggcatgacggactggcagaacgcggcgctaccgctgaacaggcttcaggaatggacggttcatgaactgaatgcacgtcgtgaagcgcccgatgtgcaggtgctggatgtacgcagccctcaagaggtcgcggcgggccgggtgcctggcgctaggcacatcttcgtcgcgcaccttgctggggcgaatagagaaaacggaaaaaatcgtacgctaaggttttccgggcagccttag

SEQ ID NO: 338338 - DNA, 1329 bp, Pseudomonas aeruginosa
atgagcttgcgcctgcgcctgaccctcacccttggctcggccttcgtgctgctctgggcgctggccgcgacctggatgctcttcgatgttcgcaatcaattgatgcagtccctcgatcagcgccttgctgcgtcggcgcggatggtcgcgggtctgctggtgcaattgccgcaaccgcaactgggcgaaggcacccgtctgagcgccgaacaactgggcatcgagaacggcctggcctgccagatcagctctctacggggtgaaatcctggcgcgcagccatgcgacgccagacagtgccctcgacgctcagcgcaccggatttcacgaccagatgatcggcgataccgcctggcgtagcttcaccttcatccagaacggcatgcgcatcaccacggccgatcgccttgacgagcgcagcgcactccagcgttcggtgctcctggccgcggcgctgccggttttcgtcgcgttgctgggcagcctgatcgtgttgtggatcggaatcggcaacggcctagcgccgctcagacgaatccgcacggccctggcgcaacgcagcgccgactcggtggagccgttgcacatcgagcggctgccgcgagagctgacgcccctggtcgaaacccagaaccagctgttcgcgcggatcgcgcacatgctcgaacgcgaacgccggctgaccgatgacgccgcccatgaactgcgcagcccgctgaccgccatcaagacccacctgcaggtggcggccatgaccgagggcgataccgcgaaacgggcattggcccaggccgaggtcggcacggatcgtctgcaccggatcctcgaacagctgctcatgctggcgcgagtggaaggccgcgtgtcctttgatgacgggctcagttgcacggcgctcgaagtcgcgcaactggcgatcgctgacgccagccagcagcctgggccgcacatcgagctgtgcggggcgcaagaggtctcccttcgcccactggcgatgccgcccaccctggcggtcgcggcattgcgcaacctgctcgacaatgcccgccgccatacccaggacggcacgaccatccgcttgacgatctcccagctggatgaaagccgggttcgcttcagcgtgcaggatcacggctcggccatcccgccggaaatgctcgagcgtctgacggagcgcttctggcgcagcggcgaaggtgaaggcagtggtctgggcctgtccattgtcaaggcgatcgccgagcgctgtgcctgcgatctgcgtttcgtaccgcaggcggatggtctcgtcgtcgagctggtggtcagcctgcaggctcccgctccctga

SEQ ID NO: 338339 - DNA, 696 bp, Pseudomonas aeruginosa
atgcacgtactgctgacagaagacaacgcactgatcgccagtggcatcgtcgccgggctcgaagcccagggcttcagcgtggcccatgccgctacggccgggcaggccgactcgctgctgcgcacagccagcttcgacctgatgattctcgatctgggtctgcctgacgaagacggcctgcgctttctgcagcgcctgcgccgccgcggcctcgagctgcctgtgctgatcctgaccgcccgggatgcggtaaccgagcgggtctccgggcttcaggcgggcgctgacgactacctcgtcaaacccttcgacctgcgtgagctcgccgcccgcctgcatgccctgctgcgccgcgctgccggtcgggcgacacagatgatcgaacacggcccgctgagctacgatcccgccgcctgtgcggcgttcatggcaggcgaacccgtggacctgtcgcgccgtgaacaggcgctgctccaggcgctactgcagaatcccggccgcgtgctatcggccgagcagctcaaggacgccgtgtacggactgggcgatgacgttgaaagcaacgccctgaatgtccatatccaccatctcaggcgcaagctgggtaacggcatcgtcgaaaccgtcagggggatcggttatcgcctgggccctgccggccatgcgtcggctcccaccgaggcacccgacccatga

SEQ ID NO: 338340 - DNA, 1746 bp, Pseudomonas aeruginosa
atgcgagcgctttttatctttctggcctgctgcctatggtccgtgcagctggcgaacgcttcgccgttcaccttcggtcagaagcagcaggactttctgcccgtggacgaagcgttcacgctgcacgtcgagcagcctgacgctggcggagtcgtgctgcgctgggacattgcgcccggctattacctctaccaggagcgcctacgattcgcagggctggcaccggggaccgagccccagttgccgcctggcgagccctaccatgacgagtattttggtgattcgcgaatctatcgcgacagcctggaagtgcagctccccgatgcgaatatcgcgtcgcttgaactcggctggcaaggctgcgccgatgccggcctgtgctatccgccgcaaacccgcacggtagacctgggcggcagcagcacgcctccgtccacgccggttcaggccgacgaccaggccttggccagcgggctacagcagcagtcgctgggctggagcctgctgatcttcttcggactcggcctgctgcttgcctttgcgccctgttcgctgccgatgctgcctatcctggccggcatcgtggtgggtagccaggccgggcctcgccgcggcatggccctggctggcgcctatgtattcagcatggcgctggtctacgccgcccttggggtggtggcggcgctactgggtgcgaatctgcagggatggctgatgcagccgtggctgatcgcaagcttcgctggcctgttcgtgctcctgtcgctgcccatgttcggcttcttcgagctgcaactgccggccggcctgcgtgatcggctggagcaggccggccgccagcgccggggcggcagcctcgccggggccagcgcgttgggtgtgttgtccgggctgctggtgggcccttgcatgaccgcaccgctggccgcggcgctgctgtacatcgcccaaagcggcgacgccctgaacggtggcctggtgttgttcgcgctgggcctggggatcggtacgccgttggtgctgctggtgacagtgggcaaccgcttcctgcccaagcctgggccgtggatggatcgcgtcaaggtgtccttcggtttcctgtttctggtcgccgccctctacgtgctgcgtccgctgttgtccgacccactctgggtagggctgtggggcgcgcttctggtcgtgggcgccagcgggctgttgcacctgtcgcgggaactggtgcggcatcaggcgctcagccgcgcggtggcgtcgctggctggtatatggggcgtagcgttgctgctcggagcggctggcggcgcacaggacgtcttgcggccgctcggtgtattcacgggcagcgttgcgtcctcgcaaggtgcagagcctgcacacggatttgtcggcttcagcgagccggccgaccttgatcgtgagctggctgccgccagggccgcgggccagtgggtgctggtggactactacgccgactggtgcgtgtcctgcaaggtcatggaaaaggaggtgttcggcgacgcgcaggtgcaggcggcgctaactggcgtgcggattctgcggccggacgtgacgcagaccgatcccgccagtcgtgagctgctgaaccgctatcaggtcatggggccgccgacgctgctcttcatcggcccggacggggaagagcgacgtacccagcgcatcactggcgaggtcgatgcgaatcaatttctgaacagatggaaccagactatggagcgtggctga

SEQ ID NO: 338341 - DNA, 183 bp, Pseudomonas aeruginosa
atgggcgagccttggttcaaggttcgtaagtcctacgaagcagctggaggagttgcgttcagttcaaactatgcgctgtacggcgacatcagcgaacgggtcatgaccgtcatcgaagggctggtaccgaagctggagatttacagcatcgataagagtaagttgtatagtgcggacgcctaa

SEQ ID NO: 338342 - DNA, 1254 bp, Pseudomonas aeruginosa
atgaagctgattcaatgccgtttctcgtccggtcagcgcgtgccgctgctggtgcaggatggagacgcggcgccgttgcccatacttgtcccgttcatctacgttcaactcaagctcagataccgcgcttacaacactgctgcggcacatctgcgcgcgatccaggctttctatatctatgccaaaagccgtgacctcaatattgatgacgccatcttggcctgccacttcgagtcgattctggctttgttggacggttacgccatctggctccaaagcggccgtcaagccgacaacctggtcgcccgaatcggcacagctgaaacggcaccttttccgcagatcgatccgcgtacccgtgaccagtacctgcggttgctgaagcagtacctgtcctggtgcgtcacccgttacattccgcgcgcccgtcagaactcaaccaccctggctaacatcgaagtggtatttgcagatgtcgccgacgtcattgagcggcgctttgagagccatatcatcaatgctcggccagaccgcactcgttaccgaagcctgacagatacgcaactccagatcattcgcacactgattcgcccgggcgacgcagagaatccgtttccggaacgactgcagttgcgcaattggctaatgattgaattgctgctggagaccggtatccgtcgcggagagcttctgaagctctacaccacggatatcaatcagggatctctgcatgcctatgtcagcatcaatgatcgcgaacatgatcccggcgacccgcgtgctgaagagcccgcgctgaaaacgcacggacggaccgtaggtatctcagcgcagttgtatgaggtctacgagcgttatatccaaggcgagcgacgccctctgcgtaacggcaaaccaatgaaattgctgtaccgttatttgttcatctctgaccgaggccgtccgctgtcgatccgcgcgttgtcgaatgtccttgatcggctgtttctgaccattgaactggctcatccgaggttgttgcctacactttccgcgcatgactttcgccacacctttgccgaccggtttttggcttacctggtcgagaagcgtgggtatgacctcgagcgggccacggacgaactccgacgagtctgcggttggtctgacacttcgacgatgccacgccgttatgcaagtcgttatctagccgagtcggccaacctccacaacgcccagcgtgcctcggcagcctggagccgacttgacagttaa

SEQ ID NO: 338343 - DNA, 1521 bp, Pseudomonas aeruginosa
gtgaccaaatcagccgatcaagaactcgcttcaccctcctcctcttttccggcctacgtgttcgagggcccggctcaggttgcgattcgaacccgcactaatgaccagccacgctacgtcgatactcgattgagcgtttggacatggtacgacggcggaacggctatgaaaatagattgggctgcgctccacctgaatccgaacctcatgcaaatcgccaaagcgttcgtggcctatgcactggaaaagtatgcaccggtaacggcattcaaagcatccggggtgttcggacgactatctgagagcgatatctcagccaagtttccttggactcgacaagaggtggtcacgaccataagtacttgggcgaaatttcgcgagagcactattttttttagaacgttttatcgctgggcccttaatcgaggaatattgggctttgacaaaggaacatatttagcacttaaagaaatcaagacgaaccgccttgatccgtacgaacgtatatttctatcccagtccggtctagctcttgatgaagagatccggctactgcagcgaattgagcgcgatatccagaccaaagactggattgaagctcagctcaacatgatgctccacttaagtttcgagttaggcccgcgttcgattcaattccattcgcttgacattgcggattttgagttcatcgaaagcgctgatcatgaaaggtactacaccctctggctacccatggccaaaaaggtcggtcaacgcagacctgagcgacgaccccgcaaaataacaacccggctgggggagaaaatctcgcagcatgtttcggaaatgcgacgccgctttggcggcgactgcgaaccactgtttttaagtcctaacggaagacgaatgtctgcaaccgaaatcggtgtaagcctcaaacacgagctacgggaagctgggatagacaagccgaaccaggtaaccatgttgttgcgtcatcaccttggacaaggattggctgaccagggtactccggcagacttgattgccgaactgctcggccataacagcacggttgcggcgcgtgcttacgtaacggcaacccccaacattgcccggattaaagagaaagcactcggtaagagcccttcctatcagcgcatcatgcgcagtttattaaccggggaaatcgtccagcgtcgaaatacagccccagaaagagccatccgtggcgtcatcgatacgcagtacatcggggacatcggtgcctgtgccctgccagttcatacgcactgcccctacaatcccgtctatgcctgctacacctgcaagaagtttcacccctttgctgacggccgccatgagcaggtgaaagaggcgctgcaacgagaagcccaacggttcattgacatggcagaacaagccggagacctcattcacaaccggcctctcgcccagcatcagacaaccatcctggcggtaagcgctaccatcgagcgctgccggcagcacacggaggatgccgcagatgacgctgtctag

SEQ ID NO: 338344 - DNA, 2109 bp, Pseudomonas aeruginosa
atgacgctgtctagggcaaggccaaatctcgagggctttattacacaggaacaagtgttttttcagtcgttaccaatttcaacaccgtgggcgtcaccggtgtggggcgtcggaagttggttgccacaacggaataaccaacatgctcttaccttcgaaacgcatcggcaagccctcgagaagacaggctatcccgccccgcctaagggaccactcccctgcaatttccaagattttagcaaggccttgatcgtgtatctgcaacgcatccggaacctgaagttttcgatggtcgcggcctacaatattgccgtccgacggctttacaatcccttgtttgaacgatgcgtatccgaccccacacagttgacgcgaggcgattttgatcgagtcgtaggatttctccgcgaaagtggttacaagaacttttacgacgcgatctctcaccttcaagtagtagcggatacgatcgatagtctgcaaataaccgagatcgccatccactttgagcatgatgcaaaaccagaaaagcgccgtcacgattacatttcattgcacgatcctgatcgtgcggtaaaacagcgtaaatctgatgacatactgccttctcgcgaggcgatggaagcctacgccttatgctcgaaccacccgctcagtgagggtgaagaaattttgctgcgtgtgatcgatttgttgatcgcgactgggcaacggggtaatgaggtagcagtaattccctatgactgttgggtcgaaaggccaatcaaagggacggcaggaaaggtggttgtagatgccaatggtaaacccatagtcgagtgcgggatcaggtactttgcggaaaagcaatttcaatcccgtgttcattggttcgcagaaagcgacgttcctttagccaggcgcgcggtcgaacgattgaaggtgctgacgcaagagcagcgagaaatcgctaggtggcaagaagcgcatcctggccgtctctggaactactcaccacaaacagcaatgtcggaggttgaggttctagattggctcgggtttagcgaaaaccgagaaacccttaggaatctctctgtgtatttttcccgaaacggagttcaccccctagacgagactagccatcagaataaggcgatcaaacgcagatacttggccggtgatattgagcgttttctcgttcccaaacttcgcggtcatgcagcgcttactgaaaatgttggaggtaagctctgtgttgtcctaaaaaccagcgaaacattagccatggcgtttgatggtcaattccgcctcaatgggcgggaagcaaatgtgtttcgggcaatcccgcgtcgggtaaccctcgtggatatcaatcgcgcgctgggtaatgatgaaaagtatccgtccattttttcgcgtcggtcattgaccgagtctgatggagctccgattaggctaacaagtcaccaacctcgacactggcgaaacaccatttaccacctgaccggtatgagcgatgttcagcaagcgttggccctggggcgaaaacgtctcgaccagaatgtctattaccagcacacgagcattgaagaaaacaccgccgcccatcaggagttcttggcgttcaatagtcatcacgagcgtatcgactttctacatagcggcataagagataaacgcattcagggcgctttgaccgacagttaccatgctttgctgtcagataaaggcacgaccacagcagaagcattccttgccgtacacgccacggcgctgcatgtgacacccttcggaggttgcattcacgatttctcccaagcgccctgccctaagcatcttcagtgctggaatggctgctcgcatctccatctgatgggcactccatcggaacgggtcaaccttgagaaacaagccgagaatcttacgaccgcaattactatcatgcgcgatgccggcgccggagaggcaggcagcgatgtatggctggcggaccaggaggacaaactcaacaatttaaaatccgtcctcgcacgcgataccaatgcaggtgtgcaacgcgtgtttccaaatgggcatccaatgacggttgcggacacggacaaacgacacagttcggtttcagacgattag

SEQ ID NO: 338345 - DNA, 396 bp, Pseudomonas aeruginosa
atggcgcaacgacagactttgaggggcagcacgttggacgaggcgatcgacgccctcctcgcccaaatggttagcttgggattggagcttgcgcctatctcacgccccgaagtgcagcgtcgattgggcctgacgagccgcgcgaccttagtgggagatcgtggtcggcgaatcgaggccgcccgtatcgcacaactgaaggaaagcggaagagatccagacggtgcccgccggcgaaaaagccttgaagagcgtattgctcatctacaggcggaaaatgccgccctgattacacagcgcgataggctctacgaagcgctgtccgtaattgcgcataactgcctattgaaagggttggacgtcgaaggcgtactggatccgttgcgaaagcagtga

SEQ ID NO: 338346 - DNA, 270 bp, Pseudomonas aeruginosa
atggagttgaaacaagccttcggatcagcgcttcgcgccttgcgtatcagcagaggtctaacccaagaggattttgctttagtcagtagccgcacgttcatgagctcgctggagagaggtatcaaaggcgcgaccttagagaagatcgacgagctagcaggtacaattggagtgcatccggtatccgttatcgtcgcctgttaccttgagaaagacccagccgttaagctggaggatctgcttgagcagatccgcagcgatctcaagtag

SEQ ID NO: 338347 - DNA, 1437 bp, Pseudomonas aeruginosa
atggctttcgatgcttcaccctcctggagtggtttcaactaccagggcaaggtcgctctacattatgcgctgacgctgataaattctcagccggttgacttcgacttttcgacaacagatttaatgctagaggccaatgaagattttgaaatcatcataaatggctcgtctacctcttaccaccaggttaaggcatataactccagtacattcgaagagtactcggacgcgctatttggactaacacttgagttatacaaaagaaaggatgtaaaaggctacatccacacgtggaaaaaggtcaatgacaggccggactgcaaaggcctgcttgaatccgtcaaaaacgacttttctttagtacttaaagagtatcacgacgcagaaccaaaaactggcgattccattctagaaaaagcagccagcggggcaagcaaccccaaaaagaaaacttcaatccttaaggcagcgctcccggagaagaacgctgaacaattggcaaaaatcataaacgaaattatttttattgaaaacgatgcactgaatcgactagcttgctacgtttatgatgacgacaatgcattctgcgacctcaaggcaattaacaccaagataaagcaagagctttctgttgctctcggcgctcgccggattcctattactgaagaacagctggaaaaatcattcgattattttcttggcgtcatagatagctacataattgaacggcataaaaacaaacaagccgcaactgcaaagccaatcaaattcctggaaatcatcgaagctctagacttcgaccatgaggatgtcggaaagaaatatatcgcttgccgtttcaaagatcgattttcacgtttgatggacgagtaccttggggacgaggatgattacccgcagccggaatcctcggagccatgcaatctaaaagctgcacaaaaactgctgctatcacttccaccgcttgaactgtgggagcactataggcatttttcgccccagatagacctcgccagtgataacaacacggataatgcgttgagttacaacgacgagggcattcgcttatgtctgttgaaaatacttcacggaatcaacttttctcgtctatctcaggatgctgagcgttatagattctcctataaatgctccacaagcccaccccaaaacttccttccaacaaccatcacacctatcggcagaatcagccaaactgtaaggcagctaaacgccaatccatgcctaagcgaacttctgtatgaggttcataacttaatctattgcggatatgaggttcattcattctccccaaactcagaaaaaagcactgaagcgcctccatcgataggtgcagaccctcgttctaaacgagacgatatcttacctacaattaccctcctccccttagagaacgcgaaggacttgcttgcaaaatga

SEQ ID NO: 338348 - DNA, 705 bp, Pseudomonas aeruginosa
atgataacaattctaaacaacatcatggcaagcaacggattctctttagtggatgttgacttggccgatgacgcaattcattttagcctttacaaggctcagaatcgacgtcgggaggaatacttcctgacgcttgaaataagcaaccctagtaatgaggagctgcagttacttcttgatgagaaggcacaagggattttcgaagacattcaaaaaactgacaaggttgaaagattctttgaaaagaactgcaccatgttcatttgcctcaactccacgaagctggatcagaatcttgtgttggctcttgaggaagatccctacaactttaagaagaatgtcattacctactcgactgtagagctcgtagcgctcaatggatacctcaccagcaattccatacacgccattagtaacggtgttatcaatgacattctcaactcaaacagtggtaaggattttttggatttcaagctgcaaactcgcactagaaaccacctgtacgacctgatcataagagcaacactaaaactaccatttttggtatacagtccacaagaacaaaaattagagaacctctcactgcaaatcaataatgccatacccacccagctggctgaaacctacaacaacgtactttcagctgaatggacggatgagaacatccttgcgaatgttgaatctatctggggggataaagcatga

SEQ ID NO: 338349 - DNA, 2391 bp, Pseudomonas aeruginosa
atgatcacgctgagtaagctgacgcttagaaacttcaaagtgtatggtggcgaaccgtatactataagcttcgaagacaaccgacttgtgctgctggatggcccaaatggctatgggaaaacctcggtctttgacgccatcgagctcgcgctcaccggcaatatccgtaggttgatagtccttgaaagtcgtcaaattccttcggacattgttgtagcccacaacggtaaaagagacgttgagataattattgaattcaaggatgaagatgctaacagacgagtctttcagcgtaaactaaaacgcacaatcccaaatgctgcaagacgcatcgggaacttctccgccctatgggaggttcacgagattataaacaatcaagcagtaccagtcgacgaagacacgcttaacctgtactttaacagcaaagactttgcgcgggacttcttgctttttcattacattgaacaagaggacacttctcgattccttaaatctcaaagtgagcagcgtcgcgctgaagaactctctaaactattcggcgacacattagaagctgatcagaacctattgaaactcgccgagatcaagaagaagcttttcgcgagtaaaagaaacgtcaataccaagatagagaacattaaaacccttcacaaaatcgacgacatcaacaatgtttcggcaggagaagcggaatcacatacctacgctctcccttgggtttccgaaaccgaggccccattttgggatcgtcccactatagcccagctgaatgaagaacgattgagcaaggcgcttactgagctagcaaaaatccgcgccctcatcgctcatcagaacttcttctttagatccagacgttacaggcttgcgattggcgaaagggaaataatagagctacatattggttatgcaaaaacatttgagaatcatgagaaatttgaagccaattataaaaaatatcagctagtaagcagatctaaggatctattgggaagcggtgaactaaaagatattgatcgcaatctagatattactgagctattcagctcattgggccttggcgcccctacggacttcaccaagaacatcaacaccctattagagctaacagaaaaatcgcaaggtttgagttccatttactcagagatcctcaagcatcatagcgctatgcatcaacgaatcgacatgatgcccaccgagaccgcgtgtgggctctgcgggcacgatcataaaacccatgaagtcctaacacaggcaatcactgatcacggtcaactattgcgcgccgaattgggcgaccaagaccgtgcattagtggcagcccgcgaagcattcgaaacctatcatctgactccgctgatcaaggcctgcaacagtttccttgacgtgcaggaaccggcatcacaggcagatttgtcgatgctcgcgaaagcagtcgcggagaaggcgcgtttggagcgattgcgggcatggttagaaagcgaaggcatagtcgacgaagacctggtagccgacttcccagtgaaggggggcaaatccttcatttcggagaacgctgacatcctgtgtgaacgcatacgcgcgcgaatcggaacaccaccagaaggctatcatgagtcgttcggagagaacgtctttgaaagaatatactccgattactttaacagtgaatctgacaaacttcggagactcgaatcatccacactggctcagaaagaacgtttcatcagagcgcaatacttcagttcattgagcgaaatctctgcgcagctgctcaagctgcagaagcaagattctcttctggaaaaggcactcgacgatactggcaaccttataaccatcgtcaacaaccaaatcggaatgtaccgtaagaaacttattactgacatcgagatcccgttttatatctactctgggaaaatcttacaaagccatcaggctggtctgggtcaaggggtgttcatcaaggatccattgggtgaagatatcctgaagaatgtgcgcttggtgtctgactggaagacagatcacgacataatgaacactatgagttccgggcaaatttcagcggtggtcatcgcactcacactggccctgaatcgggtttactctaagaacttctcgacgattcttattgatgatccggttcagaccatggatgacatcaatatgtcgtcattggtggaacttctacgcaacgatttcagcgacaaacagattatcttgtctacccatgaagataaggtcgcgcggtatttcacgtacaaatacatcaagcacagcggaaaggtgaaaatcgtcaacctgatgcaacggaaggaatacacacctgctaacagctacgtgtatcgtggagccgtgaagtcggatgctccagcggctgagtaa

SEQ ID NO: 338350 - DNA, 933 bp, Pseudomonas aeruginosa
ttgaccgaaaatcccgagtcgccctcaaaacatcatgtatttggtcgtgctttgaatgatgtcgagcatgccataggcatgtatgcctacagttattgcacgatgcccgctgaggctatttacgataaagccattttgcaatctatgatgaacgtcattgaaacgtgtcacatttactgcatcggatacacaccaactgtggatttcactggtgcaagccaaacgggagatgagcttaatatacaattgaatgtattgggtaaagagtatactgtcacgtattcaatacctggtttaatctacaagatggaagacggttataatttcctagaggatgcgaccggcgaaaggttttggcctgacatggagcatgtacaagcccgcctaagtaatgaatttaaagctgttactttcgacgtaaagtacattggccaggcatacggtcaagacggttcaagaaatgccattgatcgacttctaaaacatgaaaccttgcaaaaaatagcgctgaagggagttccatcagggcacaaactgactctgcttttgctttccattcagcctagcaatcaactaattacaatgatgaacccatttgctaaaaatggtgatagcggtgatgcacggataaaacaaggattggacaaagcgcaaaacactacagaagcggaaaaaatttctctgtatgaagcggcgctaattaggtatttttacccagaatttaataaagaattcaaggacagttttccttctaccaatctaaaaattcttcaagattgctatgacaaggattttggcgccgttgtagctgaaatctgcatagatgaattacctttcatgttgttttcagataagattgagccaaaattttatcacatcgcaaagcataacttgcataagagtgaagatcgaaaaatgttctttggcatttga

SEQ ID NO: 338351 - DNA, 489 bp, Pseudomonas aeruginosa
atggacaccctgctcggtgcctcgcatgacaaggcagcctttcgcagagccatcaacgaacattttgacgagctaccgaatccgcccatctggcataagggttacctggacgagtcgtggtggtgcaagcactgggacagcaacgttgagcgcccgctggacgcctgggttcatgatttcagtgcggctcggaacgccgctgctcatggccccgctaaaggtcagaagggaagcatctggtctcgtcataaccatctgattttctctacgtggctaacgcccctggtcatcaagaagctgctcgcccaggcggggttgtacgagctcaacgccgaagacaaggtggcacgggcgggcttcgaagtattcctcgcgcatgacctactggcgtttaccgacaaggatgaggacacggttgggtggcaaaaagctgaagccgagctttttctgccgcttttcgcgcagcaactgcgcgagttatgcgaatga

SEQ ID NO: 338352 - DNA, 240 bp, Pseudomonas aeruginosa
atgccaatcgccccctccacgtgcgcccttgtcggagtctttgccgacaacgtacgacgccatcgccttgagcttggactctcgcaagaagagttagccgagcgggcaggtgtgcaccgcacatacgtgggcatgctagagcgcagcgagaagaacgtgacgatttacaacatcgagcggattgcgctggcgctgggcgtagagccggcacttctcctgaccccaacagaaaaccagtga

SEQ ID NO: 338353 - DNA, 750 bp, Pseudomonas aeruginosa
atgatgccgcaacacaccctgaatcaactgcaccagctacgcctggaaggcatggctcgcgcgctggaggaacaatggacgctgccggccagccacagcctgagcttcgatgaacgcctcggcctgctgctcgaccgcgaactggcctggcgtgacaaccagcgtctggtgcgactgcgcaagaaggccaagctcaagtacgccaacgcctgcctggaagatctcgaccgccgcccgggtcgcgccttggacgagcgcctgatcgccaccctggccagtggcgactggatccgccagcagcacaacctgctgctgaccggcccgaccggtgccggcaaaacctggctggcctgcgccctgggcaaccaggcctgccgccagggctatagcaccctgtacctgcgcaccccgcgcctgctggaacaactgcgcatcgctcatggcgacggcagcttcggccgtaccctgcaacagctggcaaaggtcgacgtcctggtgctggacgactgggcgctagccccgctggaggaaggagcccggcatgacctgctggaggtgatcgacgaccgcgctggcagccgctccaccatcctgacgagccaactgcccatcgagcactggcacggctggatcaacgacccgaccctggccgatgccatcctcgaccgcctggtgcacaacgcctaccggctgacgatgaaaggcgagtcgctgcgccgaaaaaaagccgaggaacaagccgcatcgtga

SEQ ID NO: 338354 - DNA, 330 bp, Pseudomonas aeruginosa; identical to SEQ ID NO: 338296

SEQ ID NO: 338355 - DNA, 4959 bp, Pseudomonas aeruginosa; identical to SEQ ID NO: 330271

SEQ ID NO: 338356 - DNA, 1314 bp, Pseudomonas aeruginosa
atgagcaataacacacacatgaagcaggcaatcagcctgcgcatccaggcatttgcagcccagcccctgcgccaagcggcgctgtcactgttcgctactttgggatacgaatccgaccgcaccatggaaaccccatcggtggccgatttccgcaagcagttcgatccggaatccaagctggaacacccggcggcactgatcgcaagctggcagtctgccgacctgctattccagcttaccgacgaagagctttcccgcagcaccgcactattcaaggatgagtccgtcaagacctcccttctccagtcatacgtcttcatagccatcgagctggttgaaggtgactatgtgcgcggcaaactcgctggcattgcgcgccagatcaaccgcatctttcccatgcctgtcatggtgctattcaagatgggcgggcgactctccatcgccgttatcaaccgccgcctgaacaagcgcgatgacagcaaggacgtgctgggtaaggtcacgctgatccagaacatcaccatcgaaaatccacaccccggtcacctggacatcctggcctcgttctcgctcgccgagctgacagagggccgccgaatcatccagaacttcgaccagctccatgccgcttgggaagaagttttcaacgtcgaactgctcaacaagcgtttctatcgcgaactcgccaactggtacttctgggcactcccgcaagtcgatttccctgccgacattgagaaagatgatgagaaacgccgcgccaccggtctgatccggttgcttacccgtctcatcttctgctggttcctcaaggagaaaagccttgtccccgaaaagctctttgccgaagctgacctgaagaatattctcaaagatctttcacccgatgcctctacctacaacgaggccatcctgcaaaaccttttctttgccacgctcaatcagcgcatgggcaaggacaccaagggccagccatttcgcgcctttgccaaggatgaaggattccagaaaaaccgcgccacctatggcgtggatactctttatcgctacgaagagcatttccgcgatgctgccatcgcgctcgaacacttcgccgatgtgccatttctcaatggcggtcttttcgaatgcctagaccatattgaggaaggaacgaacaagaagctttatcttgacggcttttcacgcaatgcgaagaagcgcccaaccattccgaaccgcctcttcttcggcagtgagcatgaagaagacctttcgggtgcttacggcgacaaaaaacgcaagaaagagaaggtgcggggccttctgtag

SEQ ID NO: 338357 - DNA, 3306 bp, Pseudomonas aeruginosa
atgacggttaatggatcgagcaatttcggtattcgcgacaatcactctcgcggcaaagttgccgatttccttgtcaagaagattgcctccggtagccagctatccgttgtctcggcgtatttcaccatctatgcctacgaggcgctttcagccgaactcgaccagattggtcaactgcactttctcttcggcgagccgcgattcatcgcctcactcgatccggacaagaccgacaagaagtccttcaagattgaggatgagggcttggaactggccattcgcctgcagcaaaaggagatcgcgcgtcgttgcgctacctggatacgcgataaggtagaaattcgttccgtcaggcaggccaatctacttcacggcaagctctaccacatcgatgacgggcgtcgtgagcacgccatccttggcagctctaacttcacccggcgcggtcttggcctttccgcgactcccaatcttgaacttaacctgatcgtggatagcgaccgtgatcgcgccgatctcaagcaatggttcgacgacatctgggcagacgacaaactggtggcggacgtcaaggacgaggtactgcgctacttggagcagctatacgtcaatcactcccccgagttcatctacttcaagacgctttaccacgtcttcgagcgcttcctgtctgggcaggaagccgacgccgcgctgttcgaccagaccgccatcatcgacaccgacatctggaaagccttgttcgacttccagaaagatggggtcaaaggcgccatccacaagatcaaccagcacaacggctgcattctggccgacagcgtgggcctgggcaaaacctactcggcgctggcggtcatcaagtaccacgaactgcgcaaccaccgcgtgctggtgctctgccctaagaagctgcgcgacaactggacggtctatctcgcccagaacaacagcgaactcaaccccttcctcaaggatcgcttcgcctacaccgtgctctcgcacaccgacctgtcccgtgacagtggccgagtggatggcatcgatctcgcaacgctcaactggggcaacttcgacctgatcgtcatcgacgaatcgcacaacttccgcaacaacaccaaaggcaagcacgacgaagacggcaacctcatccgcaagagccgctatgagcggctgatggacgacatcatcaagacgggcgtcaagaccaaggtactgctgctttccgcaaccccggtcaacaacgacctaaaggacctgcgcaaccagatctacttcgtcaccgaagggcgcgataccgctttttcgcagaacttcggcatcaacagcatcaaggacacactcaccgtcgcccagaaaaccttcatggaatgggccaggcgctccggcgaaagggatgcccgtgacctgatggaacggctctccgccgggttcttcaccttgctggacgaactcaccatcgcccgttcacgcaagcacatccagaagtattacaaagcctcgatggcgcagatcggccagtttcccaagcgcaggaaaccggaatccgtgttctccgaaatcgaccttaaaggtcgctttctctcctacgacaagctgaacgacgagatcgacaactatcagctttccatcttcaagccatccaagtacgtgctggataagttcaaagcgcagtacgaagaccaccgcgtcaagaacttcagccaggaaaaccgtgagcaattcctgatcggcatgatgaaggtgaacttcctcaagcgcctggaaagctcggtgcgcgccttcgccatcaccatggagcgcactgtcagcaagatcgaaaacctggaagaacggctcaagcaattcctgcaacaccaggccaatacggcggaagatatccagcccgatttcttcgcggaaccagccgaagaagacgaagagctcgcccaagccttccaggccggcaccaagctcaagtaccgcatggagcacatggacgtggccgcctggcttgcagatctggccaccgacaagcaacagctttcgctactggccgacgcagctcaggccgtcgatgccgcacgcgacgcaaagctggccgaactcaagcgcctgatcgaacacaaggttcgccaccccagcaccaatacactgggtgaggaaaaccgcaaagtcatcgtgttctgcgcttttgccgataccgctgcctacctgtatgaagaattggaagactggtcgcgcaacacgctgggcattaacatcgccctggtgtccggcggagcgcgccccaaccgcagcacctttggccaggccgagttcacccgtatcctcaccaactttgccccccgcgccaaacagcgggccaagatgaagtccatgccgcaggagggtgaaatcgacctcctcatcgccaccgactgcatttctgaaggccagaacctacaggactgcgactacctcatcaactacgacatacactggaatccggtgcgcatcatccagcgcttcggccgcattgaccgcattggcagcctcaacctagccatccagctcgtcaacttctggcccacgcccgacctcaacaagtacatcaacctcaagaaccgcgtcgaagcgcgcatggcactggtcgatatcgccgccacggcagaagacaacatcctgcaagcggaagacctggaagacctcatcaagcaagacttgcgctaccgcgacaaacaactgctccggctcaaggacgaagtgctggatctggaagacttcaacgaatccgtcgcactgggtgaattcacgctggacgatttccgcatcgagctggccacctacattgaggccaaccgcgagaagctggaagaagcgccctacggcctctacgccgtggtaccgccgcacgcggaatacagcaccatcaagcccggcatcatctactgcctgatgcaacgcatagatgccgccggcaacgaagcagtaaacccgctgcaaccatacttcctcgtctacatccgcgacgatggcgaggtgcgctacaacttcaccgcgcccaaacaggtactagagatcttccgtgccgtctgccagagccagaccgaaccgcacgccaaactgtgcaagttgttcgatgaagagaccgcgcacggacaggacatgagccgctatagcggcctgctcgaaaaagccgtcgccgccattgccacgcagttcggccgcaagaacgcaggcaacctctttgcaggccgtggcggcaagctgctgagcagccaaggctccatcaaatccacgaccgactttgaccttattacctggctggtgatcaagcatgagcaataa

SEQ ID NO: 338358 - DNA, 204 bp, Pseudomonas aeruginosa
atgaatgagccttggatatctgtcgagcagattgcagagcatcttggcgtgacccgagactcgatctatcgctggatcgaagccaagaggttgcccgcccacaagatcggccgcctctggaaattcaaagtctccgaggttgacgactgggttcgtaccgggggagcgcgagacaatgatgcgaggaaaggcgatgacggttaa

SEQ ID NO: 338359 - DNA, 462 bp, Pseudomonas aeruginosa
atgagcaaagatgcgcaagcgatagtcaccctgctggatcagcagtacgagcaggtgctcgcagatgcgagacgcttgatcgagagctatgtggatgcgtccatgaagttgtacaaaaagaccggggtcaaatctgtcgtggctgccgtgtcaatcaagcaggcgagcccgaatgcgtgctcaatttactggtgcaaactggtgccactgaaaggacaaaaaaacaaattcgcgcccctgactattgccaagggtaatggcaaacataaatacccggcttcctcgttcgagtttgttaaatacccataccgtcacctcgttctgcaggttgaggggcggcttgctgagattcgcagcattgccagtgagaatcgtcagctacgtcggacgttggtcgcttatgagaagaagctatctagatatcaagcgcttgatcatggcgacctctattcgggagagtag

SEQ ID NO: 338360 - DNA, 1554 bp, Pseudomonas aeruginosa
atgcgacacttcattccgtacacgattcctgccccgcttttgagcagtgctgccgccattgacgtggaagaactgtcgatatcggacgtcggtgaagcattcacgcagcgaaccttcctcccgagcgaactcgcggcagcatgcctgatgcgcatcaatcacttggagccgtatctcaatgccttcatttggctgaatcccgacgttctcgatgacgcacgacgcgcggatgctgagatcgtcgaggggaagcagcgaggtccactgcacggtgtcccgctcgtactgaaggacaacatggacatcgctggcgttagaactacggccggctacgcagggttcgcctctgaggaccgagtcgttgactctcagctgggagcgttcaacggtcttgatctgatgcccgggcatgacgctgagttggtgagccggctgaaggcggcaggcgccatcattttgggcaaaagcaacctaccggacttcgggcttgatggcctgcgtgccgattcgagtcatgcgggagataccctcaacccttacgaccgccgttacgctccgggcgcatcgagttccggcagtgcggctgcggtcgcaaccggcatgggcatggtcggcatcgggaccgatacagccgggtcgatactcttccccgcttctgcgcaaagcctagtgggcctgaagccgtctttcaatctggtgccgacggcaggcatctttcccggtcttgccaatcacgacgtcgcggggcctattgctcgtactgtgaccgacgcggcaatcacgctggatgtgatagcgaatgaatcgacggacgtgtccgcgttgaggtatgccgactcgcttcgtcgcgggtcgtttaagggcaagcgcataggcctgttcgaagccgggatatgggctggcgccttgcaccctgaagttcagtcgcactactcgaaaatgattcgaatcatcgaggaccttggcgcggagacggtcccggtggtctttggtgataccgattggaagtctcgctggtcgtcgcgcaagagcttcgtagacacgaactgttatctcgctggggtagacgcctacctcgctgccctgggtggagacaacccgaactcacgcctcgctttcagggctcgaaccggattcgacattggcctcgggaccactgcgcctttgcacgggttgctggccaacaccggaatcaacgtggcaatttccggtgcagagatggatcgggtgatcgagatagccaagagccttctccggcactatcaaacaatcttgaaggacaagcgtatcgacgcccttttcatgcctcgctcgataaatcctctgccagacctcgacggtgacacaccgaaatacttgggcgaccagtcggtcgctacagaagtcaacgaactggggcttcctgcaatcacagttcccgccggatacctcgacgacggccgaccaatcgccgtcgacatcgttgggacaagcttaggaagcgatcgcgagattctctccttggccttcgatttcgagcagcacacacgattgcggaggcggccagcgatctga

SEQ ID NO: 338361 - DNA, 423 bp, Pseudomonas aeruginosa
gtgcgcttctactccacggtcgatctggtcaatctgctggagcgcgaaaaacacgacggcaaagccgggcggatcgcccaggcactgctgcgcatggatctggtcatcctcgacgaactgggttatctgccgttcagccaggctggcggtgcgttgctgtttcacctgctgtccaagctgtacgaacacaccagcgtggtgatcaccaccaacctgagcttcgccgaatggtcgagcgtgttcggcgacgccaagatgaccaccgccctgctggatcggctgacccaccactgccacatcgtcgaaaccggtaacgagtcctatcgcctgcaacacagtagcttggcggcccaggccaagatcaaatcacgggagcgaaagcgtaagggcggccaggaaccggaggacgatgagtcgttctga

SEQ ID NO: 338362 - DNA, 2193 bp, Pseudomonas aeruginosa
atggtggacgaatcgctcaaggcacaccttgcaggcgcacttaccaagacgggcgtaagcgaacaggacgcgcacgctggtctcgacaccctcttcacctataccgagagggcgcaccctttctcggagaaagaggccgcaacactgctcgatgccatccatacctgcaagattctcgaccctgcttgtggttccggcgcattcccaatgggaatgctgcacaagctcgtctacataatccacaagctcgaccccgacaacgcgcgctggaagcaactccagattgatgccgctgcgaagattcctgatctttccgcgcgtgaagccgccattgctgccatcgagcgcgacttctccgagaacgaagacgactatgggcgcaagctttatctgattgagagttgcctttatggcgtggatatccagccaattgccattcagatttcaaagctacgtttttttatttcgctcgtctgcaaccagcgaactaaccgcaacaaaagggacaaccacggcatccgcgcgctgccgaacctcgagacaaagttcgttgccgctgactctcttatcggtttgccggatatggatcagctcgcactggttccgtatcgggttcatcaaatcgaagctgaaatcgaagttctctaccatagccactttggcatccagcgccgcgaacagaagcttgctcttcaaaaaaagatcaagggtctgcgggaagagctcggaagactccttgctgagagtcttggctcatccaggaaggctcaacatcttgtcgactgggatcctttcgaccctcaagaaagttcggatttttttgattctaagtggatgtttggctcgtcactatccgagggatttgacatagtcataggcaatcccccttatggcgcagcggttggagatgatttgagtgaatatgtatcacgaaattattcacaccaagattatcagctcgatacttacctgctcttcattgagcacggtatgagacttgttaagaaaaatggcatccagtgcctcattattccgaacacatggcttaccagcttaatgtttaaatcgatccgcaagttcgtatttggagatactaaattaagcagcttagttgatataaaaacacaggtattctcggctgtagttgacaacaacatcatcactcattgcaaaagcactcccagcggaaatcagtttccagttataacatacactgaagatggatttgagactcagtacattcaaaatcaaaacgagtggaactcaacacagggagtggcagttagtatcgcattgactccagcattgaagtcaatttcttcgaagattgagactaacccaaccttagagaaatttttcgtgataacccctgggtgcaagccatatcaagtgggaaagggtatcccgaagcaaacaagggaaatcgtctcggagaaaccattcacctccgacatccaagaaagcgaagagtttcggccgctcttacgggggcgcttaatcaataaatatgaaatactttggaatcaaaatttgtggattaagtttggtggctggctcgcagaaccaagactaacagcaagctacgactctccagaaaaaattgtcattcgacagaccggagactcactgatcgcggcacttgatgaccaccagtttatcgtaatgaacaacatgttcaccatagttcctcgtgaggcaagcgcccccacgaggtttgcattagcagcgcttaattcgagcgtcttaaattggtattatcagacctgcatcaaccccgaaaaaggcgaggcactcgctgaaatcaaaaagggacatctgacacgcttaccccttgcaataccgaacgattcgcaactcgcaacaatttcttcgctttctgatttgatcacattatcaaagcagcacggagaggctgtgacgtcagtctttctcgaggatttgattgatgcctgtgtgatggagtgctacttctacgatcacatggtcgagcgcgacctgctgttccttgacgatctcgccccgcatctcgccgcctatgcttccgacgcatccgaatcgcatcaacgcgatttcattgcccagctttaccatgcactgaacgcacccgcatcgaaaatccgcaaccgcctgctgcgtatttctgccgatagcccagacctccttgccataatcaagggagaggggaaagcatga

SEQ ID NO: 338363 - DNA, 1677 bp, Pseudomonas aeruginosa
atgaaagctcgtctgcatcacattgctataaccaacttcaaggctttccgcgatttccaactcagtctggaaggccgtcacctgttggtctatggtgccaatggtgcgggtaagtcttcactgtattgggcgctttacacctttcttcaaagcgctaaaaagccaaggaatggaatcgccaagtacttcgatcctggaacacaggaaaacttgctcaatatccatgagcaaaaagaagaacagccaaaatccggcgagattgcactaaccctgcgcgaggaggcaacccgcaacgacaccacttacagaatcagccagagcaatcatggcaccttcaatcagcccactatcctaaagggtgatctggcgagtgacttcatcacttaccgtttcttctttggcttctcgcactttcgtaattcacaggccttcgacctttggccgctgttcgagaaagaaattttaccgttctgtgtttctaccagtggcggtaaccctttgcagatgtgggatgcaataaaatttgcaatgccaaaccctcgtggattgagtggtgttgcagggacaagtgcctatgatcttttcaggcgaaaaacggaagctttcgccgctgctcttcctgagatagtggactcaatcagtacacaggcccaacagttctatgacgagcacttcgcggccgatgatcctgcaaaggtaaccttgaaaattggagtcacgacactgccacaagcctttgggtcaacccagagcacatttatatttacgaaaccagtaatttccttcggcatccagatcgacggcgaagaaattaagcgacctcaaagctttttgaatgaggcaaagttgactcaactggcgctatccgttcgtttcgcagcctccctggtcaatctgcacgactccgatctcaaactcttggtgcttgacgacctgctggtgagcctggacatgagcaaccgtatgagggtagtggatattctgctttccgacacctttgccaactaccagaagattatcctgacccatgaactgggctttttccgcgagtttcgccgtcggatcggcagcaatcacgccgattggtgttttgtacgtctgcaaggtaatgcctcacaaaacatcgaagccaagaacgaaaaaaacgatatggagagggccggtgactatctcaacggccatgacattgaagaggccgcaatgttcttacgcaaggcagcggaagacactgcaaaacgctaccgggagtgggcagaaggtaaggccctgccaccaagtcagtttttctctctgaccgagaatctccgagcagcacgaaacaagttgctggaggacatccccgcgaccctttacaaaaatattctgaagaacactcccgtggagcaccgagggcttttgctttcgtccgacgacacggacttagacactaacgccgcgctacagcttgccgacaagggaaaactgaaatcaaagcgtcgggatctccgcaatgctctgaaccacgaagggtggaagaaaatggaagcggttgaggccgttgaccgtgtactggaaatgaccgagcgcgtgctgaatccagcatctcatggtaatgcgacaccactctatgaggaggaggtgcgtcgagccatgcagatcatcgagcaactagtgcaagtgctggaagcacagcaatga

SEQ ID NO: 338364 - DNA, 273 bp, Pseudomonas aeruginosa
atggaagagtctggaatagtggggttcaccgtcacaggtgctgtggaaaaggtcacggacttccgcactgcgccgttctgctcgcaggcggtattcgcgcagatgctgggcctggaagacatcacggaagacgtggtgcggggctgggtggaaaccaagacgatcccgactgccaagattggccgtcgccgcgtggtgaacctgcaccgcatccgccgtgacctcgaccggggcaagtcgatcttctgccagggggattacgacggtgactaa

SEQ ID NO: 338365 - DNA, 1218 bp, Pseudomonas aeruginosa; identical to SEQ ID NO: 320835

SEQ ID NO: 338366 - DNA, 564 bp, Pseudomonas aeruginosa; identical to SEQ ID NO: 320834

SEQ ID NO: 338367 - DNA, 432 bp, Pseudomonas aeruginosa
atgcaagaaacctccaaagctctcggactctcgaaggatcagggcggcgtaattctacgcacggcactgagaatcctggagaaatggaaggccactaccgagcaggcgagcagtgttcttcgtgtctcgcgcagcagcatttcccgtgctcagcagggcaaaggcgttgaactcgaccgtgatcaactggagcgggccagcattgtattgaactgccatgccagcctgcggctggtatttgataaccctgaaaacgtctacggctttatgggtcttgagaaccacaacgaattctttaatggccgtaaaccgttggaaatcatggcgcagggcgacctcatgccactgttcgaggtttacaagcggatcgacgctttttgtgggggaggtgaacttgtctactcttccagtccttgggatggtatgaagtag

SEQ ID NO: 338368 - DNA, 243 bp, Pseudomonas aeruginosa
atgaagcatcatgtggtgatcgaagactgggacggcgacggcgctattcgcttgcctgacgacgttttgcaggaaatgggcgtcgacgttggggatacgctctaccttcttgaggaatacataggcagcacccgctgcctagtaatcagtaagacaccacgtgttcctgatcgcgttgatgagctggttggccactgggagtccttcggcaaggtcgcaagcgattcggccaaggatgaataa

SEQ ID NO: 338369 - DNA, 132 bp, Pseudomonas aeruginosa
atgaagtgtccgcagggggaggcagcggcgagccgttgccaactaagtcccgcggcgcaggccggcagcatagcaaaaagctgtctgtcagagagtggcaacgacggtgtgctgcagccgatgctcttttga

SEQ ID NO: 338370 - DNA, 615 bp, Pseudomonas aeruginosa
atgtccaacactgattgtgccctgtcggtatccacccgtattgcgcaacgggtcaagcgcttacccaaagggcagcccttctgcatcagccgctttgcggaacttggaacgcgtggcgccatagccaaggcagtagctcggctggtcagccgaggcgagcttgagcgtgttactcggggcgtctacatgcggccgaagcagagtaagtacatcggcagggttcgctccagcccgctggctgttatggaagtcatcaccaaggcaaacggagagacgatacagatgcacggcgcagaggctgttcggaggctgggcctcagcacgcaaatgcaggtgctaccgactttctacaccagtggttctactcgcgaaattaaggttggcaatgcggtgattcgtctcaggcatgtctccagtgatcgcttgcagcatgccagtacgaaggtagggatggtgctcaccgctctctactacattggaaaagaggggctgtccaagcaggtgatttccaagatcaccagtgcgctgagcagcgaagaattgatcaagctccgggcctgcaaaatgccgaaatggatgcgctctgcattgacccttgccgctaaggatgcttag

SEQ ID NO: 338371 - DNA, 2301 bp, Pseudomonas aeruginosa
atgggtgatctggcgcagctcgccgccctgggcgaacaggccgatgtcgctgccggcgttgatcaccaccttctgcccggcggtcacctgctggttctgccgggccacgctgtcgacgtgctcgccggcggccagggtcaggctcgccggcgtcgccgcggcgatccctgccggaccgctcaaggcgatcgccggcttgcctccgttgctcttgccggactcgtcgttggcgccgtggccgaggtcgcgcacggcttcctggagggtttgctgcggcgccgcgtcgtgccccacgccctggtgctccccggcgtagtcgcccagctcgcgggccagctccagcgcggcctccagcacctgcaccacgacgcctcggtcgagatggccggcgccggccctgagctgctcctcggtgctcagcagcagccccttggccgcacgcaccgcgccatgttcgtcggtgcgcagttcgaagccctcgccgcgcggcttgccgccttcgggccgaggatgggtcaggtagcccaggtgcagcgcgctggcaccgtggtcgctcatcagcgccgcactgatctgcgccgtggtgtcgtcgatgcgcagctcgttggcccgactgcccttgtactccttgctcttgatggtgctgaggatcttgtggtcgggcagcgcgtagggcggtcggttggtcgcccggtaggtgcgcccggtgacgatcggctggtcgcagtcgccgtccaggtaatcgacgatcacctcctggccaatccgcgggatcgccatgtgtccccagtcggcacccgcccagttctgcgcgacccgtatccagcaggtactgaactcatcgtgacgtccctcgcgatcccaggggaactggactttcacccgtccccactcgtcgcaatggatctcttcccctgccgggccgactaccgtcgcgatctgcggaccatcgatacgcggccgaggcagcggtgcgggacgccattcgacgtcctcgggtaccagttcggcgcgcaggtcgtagctcacccccagaggggcgtcggcggactcttcctcctggccggcatactgggtgccgcgatggaccacccgcaccggccgccaccaggcgttgaagtcggcacgcggatgaccttccagggcaaaggcgtggcccgggatcagccgcgggtcgtcgccgctgaccgatgccacccgtgcatcgcgccgatgtcctctgaggcggctttcgctgaaaggccggcccgcgccgctccgcttgtagcgaccggggtagtcgtagcgctcgtaggacgagtcctgatgctcgagcgcctcgccagcgagatgatgctcctggtcgtaggtcgggcgcttgaagctgtagtcccgctgggtctgtcgagccgtacgaacattttcgctgtagcggaaagaatgaagcaccggctgcgggttgtcgccctccggctgggcgctgaacagcaccgggccgccggcgatacgctcctggacgtagagccggtcgctgcagaccagggtgtggcggtgttcgtcgaagcggaagtagtagaccaggccttcctcgaaggccagccggtcgtgcaggtagtgatcgctgtcgccggcctgcacgcagtattcgcgcggcaggtgctcatggtagatgcgctgttcgtagtcgagcacccggtgttccttgagcagcgcctggagaatctccggaacactcttctcctggaagatccgccagttgcagcacagctccaggcgcgccaactgtggttccagcagcagttcgtagcgggtccggcgaaaacccgagctgccttgggtgaagtggctgacgatgccatggacgtagcgggccggacggccgtcctgccagagggtgaaggtgcccggctggtcgagtacctgcctgaaatcgatggcgttcttgtcgctggccagcttcaggttcaggcggaaaggctcgcagagcgcttcttccagttcgaactcgacgacatcgaacgcgagtttcccttcgccaacgacgaaggtgaatttcaggtctctttgacgcatggatcgttccctgttccgggtgggcagttcctttccaatccattggaggagcaagccccacgttactcttgctcagccgctgccgaaagtcttggctcggtgtctatttcgcgaagtagcggacattttcggctcgacggagaaccggccgcacaggtgtacgaccggtgtgcctgtcaactcaccctgcgaccggcgagcgccagtcgtcggaaccggaggtgccggagacttcgtgggtccaggtga

SEQ ID NO: 338372 - DNA, 336 bp, Pseudomonas aeruginosa
atgatccgcatcgactccatctggcttgccaccgagccgatggacatgcgtgctggcaccgacaccgcaatggcgcgggtggtggcggtgttcggtgcggcgcagccgcactgtgcttatctgtttgccaatcgccgcgccaatcggatgaaagtgctggtgcacgacgggttgggtatttggttggcggcgcggcgcctgcatcaaggcaagttcttctggcccggttctcgacacggctctcagatggaattgggtgccgaacaactacacgccctggtgctgggtttaccctggcaacgacttggcccggatagcgcaatttctattctgtga

SEQ ID NO: 338373 - DNA, 666 bp, Pseudomonas aeruginosa
atgcagcccacctcgtccacccgcaagccccgcgccagcagccaggcccggatcgccgcgatcctcgacgccgcccgcggcctgctcgccgacgaaggcatcagcggcctgaccatctatagcgtggccgaacgcgcggaaatgccgccatcgtcggtctaccacttcttccccagcgtgccggccctgctccaggggctgaccggcgaggtccacgccgccttccgcgcgtgcctcgaacagccggtggaccatgcaggcctgcgctgctggcgcgacctgtcgcggatcgtcgaggagcgcatgctggcggtctacgcccgcgacgcggcggcccgccaactgattctcgccagccacggcctggccgaagtcacccaggccgatcgccagcatgacgtgcaactcggccaggccatgcgcgccctgttcgagcggcatttcctgctgccaccgctgccgaccgatatcgagatcttcagcctggccatggagctaggcgatcgcgtctacgcattgtcggtccagcgtcacgggatcatcgacgcacgcctggcggaagaaggcatgcgggtgttcgacgcctacctggggctctacctgccgccgatcctggaaaagcgtagcgaaccattatccggatttatatccgatttaaatcgatag

SEQ ID NO: 338374 - DNA, 1485 bp, Pseudomonas aeruginosa
gtggcagccaaggatggaaagtccgccaaaagtaccgtgatgaagaggttgctcctggtcgagaagttgtatgcgcaggtggggaagatcgatgactacctgccatctcatccctggccatttgaaagtgctgccctgctggccggcatggaccaacgcatggcccaccgagtgccgaaaacgccggtgattcccgagtcggtgttcgtaccgcttgctcagaaagccattgagtacgttgagcagcgtgcgccggcgatcttggtcgttcaggccgaggcggagcaggccatggcggcagccgaggcgcgtggcgtgaaagggcatgcctatcgacaggtctttggtacggaagtggccagggcacacggctatgcagggctcagagaactgcatgccgaaatggcgctactcaggacggccagctacatctgcatcaacatgttctccggcctgcgcaactccgaaatgatgtccttggagtccgggtgcatctcaagggagcccggaatcgatggcagctacgagtgcatctggttgcatggcacgatctacaagaccggcgagcgaccacacaaatggctagtgccgccgatcgtggtgcaagcggtcgatctcgccgagcgcatgatcgagcctttccaatcgatgctccgggacgaagagcggaagcttcgcaagctggaaaccatcgagtcgaagcatgcaaagcgcttggcggaaatatccaggagcaagaacaagctgttcttggcgacgcactatagccagcagggaccggtggccgtgatgccgggcggcgccgccgtcaacaggtggctgaaggacttctgccggcatttccagatccgagccgacaacggcgaagtgtgggacctggcttcccaccagttccggcgcacgttcgcctacaactatgctcgttcggagctgggggatctgctgtacctaaaagagcactatgggcactggagcctcgacatgaccatgttgtatgccgacggcggggccgacgagtaccagatcgataacggtctgctggacgacgtggtgcgcgctaaacaggaacgccaagcggagatactggccggttacctcgactccgatacccccttggccaaaggtgaggattggctgggcacgtggcgccccatggttcgcaccgccaagaacaaggacgagttgattcaggagttgagcagcacgatcaccctcaacggtaccgggcatagttggtgcgccggtaatgccaaagggggcagctgcggtgggctgtgtctgttcgaggccgatatgtgcgtcgactgcaatatggcgctgatcggccctgaacaccttcctgtttggaaagaaattgctgagcagcaactagtggtgctgcaactacccgatatgggcgtaccggccaagagccgggccaaccgcattctggagaaagcgaatcaggtgatcagcaaactcgatggcagtaggtcggaagcatga

SEQ ID NO: 338375 - DNA, 561 bp, Pseudomonas aeruginosa; identical to SEQ ID NO: 324397

SEQ ID NO: 338376 - DNA, 219 bp, Pseudomonas aeruginosa
atgaaatacctaagactactgctgatagttggtgcgactctgctgtcatccaccgtatgggccgagagcgggagcgaccgttcaatcgagcgaatcgccgctatgcgcgacaaggctgaggcggccttggtggcggaaaccgccaagaagattgagcaactgggggccacggcggctggccgggtcgaggcgcagcccggctgtccgcctgcaaagtag

SEQ ID NO: 338377 - DNA, 279 bp, Pseudomonas aeruginosa
atgaaaaaactgcttgcatccttcgccctcgccaccctagtcgccgcacctgcctgggcggccacgcagaccgtcactctggcggtgccgggcatgacctgcgccgcttgcccgatcacggtgaagaaggcgctgaccaaggtcgagggcgtgaccaaggccgaggtgagctatgagaaccgcgaggccatcgtcaccttcgatgatgccaagaccaatgtccaggcgctgactaaggcgaccgaggacgccggctacccgtccagcgtcaagcagtag

SEQ ID NO: 338378 - DNA, 1272 bp, Pseudomonas aeruginosa
ttgaaaattgtacaaaaaataaccagccagctcgattgtcccgacttcatcgatacccaccgccagcgccctcacgactttacccgccgacgccaactgaccttcaagaacctcgtcctgtttttgctcaatcagccacgcaccgccctgcaaaccgagctcgatcagttctatcgtgtgctcaaccaggcctcggccgagacccaggtggtcaccgcgcaggccttcagcaaggcgcgcggcaagctcaagcccgaggtcttcgagagcctcaaccaaacccttcagcaacagctcgacagcctcgggctgcgccagacgtggcgcgggttacgggtactcgccgtggacggctcgaccgtccatttaccgctggagtcggtcatgacgcgctttttcggctgccatagcgagtttcccgttgcccgtctgtccatgctctacgacgtcgccgacggccagacgctacacagcctgatcgtgccatcctcagtcggcgagcgcgattgcgcccatctgcacctcgagcatctgcccgctgacagcctgacgttgtttgatcgcggctaccccggacactggctgtttgcgctgttcgagcagcaccggcgacatttcctgatgcgcctgccgtgtggctacaacgcgcaggtcaaacagtttctccgctcggggcagacagaagacacgcagttcttctctgccagtcatcccgaggcgcgtctgttctgtaccgaggccggcgtcgatcccgcgggccgggtcgaattgcgcctgatccgggtcgagctagccagcggtgaaagcgaagtgctgctgacctccctgctggatcgacaggccttcccggccgaggtgttcgcggatctttaccaccgccgctggggcatcgaaacggactaccgccgcctcaagcagaccctctgcctcgacaactttagcggccgtagcgtgacggccgtgaagcaggactttcatgccgggcaactgctgaaaaacctagcgctgctgatgcaacatctgctgcaaccggtcatcgagcagcgccacaaaagccgcaagctgcgctggaaggtcaacttcacccaaggggtgtcacgcctcaagaacaccctggtcgacctgctggtacgccccggtgtgcaggggctggccaacgtgatggagttgatggccaacagcctcagcgctgtgcgcccgggccgcagcttcccgcgccagcgtaagcgcctggccagtcgcggctgcgagggctacaaaccgacgcgctaa

SEQ ID NO: 338379 - DNA, 1299 bp, Pseudomonas aeruginosa
atgaaagctcacgcacgcgtgattttgcccaaccgcacccagatggagtttcgcgccagcgacctcgagtcgctgctgccggaaggtcatcgggcgcggctggtgtggtcgtatgttgccgggcaggatctggcgcgcttctatgagcggatccgggtgcgtgagggcggggttggtcgggcggcgattgcgccggagattctgttgtcgctgtggctttacgcgacgctcgacggggtgggcagcgcgcgcgaggtggcgcgcctgaccgatgcgcatgatgcgtatcgttggctgtgcggcggggtgcaggtcaattaccacacgctgtcggactttcggaaggatcacggcgaggcgctcgacgagttgctcagcgctaatgtggcaacgctcattgccgccggggtggtgaagctgcgccaggtggcgcaggatggcatgcgggtgcgggccagtgcgggggcgggatcgttccggcgcgaggacaagctcgcgggctacctggaggcggcccgcgagcgggtcgcgcagctcaaggccgagcttgaagccgacccgggcagggccgagcgggctcgtcaggcggcgcggctgcgcgcggcccgtgagcgcgagacccgggtggccgaggcgctggcgcgcttgcccgaactcgaagcgatcaagcgccgccagggcaaggcggccgatcaggcgcgcgcctcgacgaccgatgcccaggcgacggtcatgaagatgggcgacggcgggtttcggcctgcgtacaacccgcagttggccagcgatgtcgactcgctggtgattgtgggcgtcgaggtggccacgattggaagcgatcagggtcagatggtgccgatgatcgagcaggtgcgcgagcgttgcggtcagacgcccgaggcctggctggtcgatggcggctttgtgggtcacgagcaggtcgaacaggccagcgcgcacaccacggtgtatgggccggtgccggcggccaaggacaaggcggtggacccacaccagcccaagcccgacgacagtcctggcgtggcggcatggcgcgcgcgcatggggaccgatgaggccaaggcgatctacaagaaccgcgccgcaaccgccgaatgcgtcaatgcccacagccgcaaccggggactccagcagttccgcgtgcgcggactggccaaggtcaagtgcgtggtcctgttctttgccttggcccacaacctgatgcggatggccagcctcgcgccggagatgcttgccttcgggaaaggtgcgtctgcagtgtccggaatcggggcttga

SEQ ID NO: 338380 - DNA, 981 bp, Pseudomonas aeruginosa
atgagccagatgagcttttccgactttgagtacgccggcaagcgcaagcagacccgccgagagcgcttcctcgccgaaatggatcaggtggtgccctgggcaggcctgctggagctgatcgaaccgttctaccccaaggccggcggcggtagaaaaccctatcctctggaaaccatgctgcgcatccatctgttgcagaactggttctccctgagcgacccggccatggaagaagcgctctacgaaatcacgcccatgcgccagttcgcactcctgacgctgagcgcgccaatccccgaagacaccacgatcatgaacttccggcacttgctggagaagcatcagctcgcaccggcaatccttgcggtcatcaatggttatctgcaggaaaaaggcctgtcgctgcgccaaggcaccatcgtcgatgccaccattattcatgcccccagctcgaccaaaaataaagaaggcaagcgtgatcccgagatgcaccagaccaagaaaggcggtcagtatttcttcgggatgaaggcgcacatcggtgccgatgtcgagtccggcctggtgcatcacgtccatggcaccgctgccaatgtggccgatgtcacgcaggtggctgaactgctgcatggcgaagaaaacgccgtgtatgcagatgccggttacaccggtgtcgaaaggcgcgaagagcatgaaaatcggggggtgatctggcagattgcagcgcgtcgcagcacctattccaagctgaaccagcgcagcgtactgtacaaagccaagcgcaagatcgagttctgcaaggctcagacacgggccaaggtcgagcatccgtttcgcgtgatcaagcggcagtttggttacgtgaaagtacgttttcgtgggctgatgaaaaacacggctcagttgaccacgctgttcgccctggcaaacctgtggagggttcgaaaacagctcatgggtatgggtgaggttcgcgtttaa

SEQ ID NO: 338381 - DNA, 903 bp, Pseudomonas aeruginosa
atgaaggcgttcgtcgacgagcatcgtgcggtttatggagtcgagccgatctgccgggtactgccgatcgctccatcgacctactacgcccatgcacattgccaggctgcccccgagcggcgttccccgcgagcacggcgtgacgaggtgctgagcgggcatatccagcgggtctgggaagagaacttccaggtctacggcgtgcgcaaggtctggcggcaacttctgcgggaaggtgtgatggtcgcgcgctgtacggtggagcggctgatgcggcgactgggcctacaaggtgtcgtacgcggcaaatcggtcaagacgacgatcagcgacaaggccaacccgtgcccgctggacaaggtcaaccgccagttccgcgccgagcggcccaatgcgctctgggtgtcggacttcacctacgtcagtacgtggcagggcttcgtctacgtcgcctttgtcatcgacgtattcgcccggcgtattgtcggctggcgcgtgtccagctcagcccgcacagactttgtgctcgatgcgttggaacaggcgttgtatgcccgccgaccggtcggccagagcagcctgatccatcacagcgaccgtggcgtgcagtacgtctcgatccgctataccgagcgcctggctgaagctggggtcgagccctcggtgggcagcgtgggcgactcctatgacaatgccttggccgaaaccatcaatggcctgtacaaggccgaggtgatccaccgtcgctcctggcagaatcgggaggctgtggaactggcgacgctggaatgggtggactggttcaaccatcgacggctactggagcccatcgggaacatgccgccggcagaagccgaagcaatctactaccagcaactttccgagtcggcccaagcggcgtga

SEQ ID NO: 338382 - DNA, 369 bp, Pseudomonas aeruginosa
atgcagaccaatgtggaggtgatggggtggtacacgctactcatccggcattttgcccggccttttctgccctttgttttcccaggcagacgtgtgcagggtttcgactatgaggggcaacccagccgtttcgcaacagaagaggctcgtttcttcaatccttccggagcactgtatgccgctgagcttgagaagctcgccaatctgctggtggagcagagccaaggagccttgttgtaccgcctggaaagcctgtacgacgagatattggtggatgaggttcaggatctcagtggctgggactgggagttactggagaagctgttcgcgtcccgcatcgacattcggatggggtttggtctgcgctga

SEQ ID NO: 338383 - DNA, 246 bp, Pseudomonas aeruginosa
gtgcagatcgaccagctcatcaatcacggtcgccgtactctccagcaccacggcggccagggtcgcgtagcgccgctgcggctcgaacttgccaaggtctttgggcgtcatctgccccccttcgcgggccagcttgagcaggcggttctggtggatgtgccggcccagcccttcgggcaagtccaccagctgaaatgtcttcagccgctcgatgtgttcgagcatgtgccgggagttcggttttag

SEQ ID NO: 338384 - DNA, 381 bp, Pseudomonas aeruginosa
ttgcgctacgagccggactggcaggagcgaccgctgttgctgatggccgccggcaccgggctggcgccgctctgggggatacttcgcgaggccttgcgcgcggaacaccaggcgccgatccagttgctgcacctggcgcgcgaccactacctggcgagcgagttggcggagttggccgggcgtcatccgcaagtgcgcgtcaacctggtgtcggcggcgcagttgccctctgccttggccgatctccgccttgttccgcggcgcagcatggccttactctgcggccaacccgccagtgtcgaacgcttcgcccggcatctctacctggccggcgtaccgcgtagccagaccctggcggacctgttcctgccccacgcctga

SEQ ID NO: 338385 - DNA, 804 bp, Pseudomonas aeruginosa
atgactaactttaagaccggagttttgctgggaagaattccctatattcgtaagggagatcaaattgaccccgtgatcgtgatcaatggcggacagggctttgtacgcaaacacagctttgacaggatgatgcgtgacgcaaagcgtgtcgcacgtatgctgccgccaacacagggctttatcctgatcggctacgatcagcagcccgatgcaaaggcgacaattgaaacgattgtgtcagattatgagcacgccatcagagaactgaaggtctcggcgttttcgctcatggggatatcctatggcggactgctagcgacaaggcttgcggcagcgcgcgaagggtgggttaagaagctgattctggtggcgagcgctcacaagttcagcatgaatggagaaatcaggattcaacgacaaatccagtttgctcaacaggcgcagtactacggtctgatcaatgattttgcggcaatattccgtaatcccttgttgaacttattattgaagataaatctctgggttgaccgcaacaaacttcccgaaaaaatgaattccggtgaggttattgtccggtatcttcaattgataatgctggccgagccagtcgatctaaactcaattacagcaaggacattgattatcggcggggaactggatcagttttttggcgatggcatgatggaagctgcccaaaatggtatctcccacgctacgctgcagctcctcaaagggcaaacccatatggccccggttgaatgcagtagacaatttcgacggatcctgacggagtttctcgattaa

SEQ ID NO: 338386 - DNA, 822 bp, Pseudomonas aeruginosa
atgaccgagcgcggcatgggtatcacccgggcctgcgggctcgtagggatttctcggtctctgtttcactacgagagccggcgcacgggcgatgcggcgctgactgaacgcatgaaagagatggcggcggtcaagcggcgctatggttaccgtcgcatccacgtgctgttgcgccgcgagggctggcattcgaatcacaaacgagtttggcggctgtacagccaagctgggttgagcgtgcgtcaacgcaagcgcaagcgcatcgcggcaaccgagcgcgtggttcgtccagcggcgaccgggccgaatcagagttggtcaatggactttgtcgccgacggtctggcctatggtcgccggttccgctgcttgaatattgtcgatgactacactcgcgaatgcttggccatcgaggttgatacgtcgctgccgggactgcgggttaccaacgtgcttgaacggttggcagaaatgcgtggcctgcctcgatccatcaccgtggacaacgggccggagtttgccggcagggcgttggatgcctgggcctatcaggcaggagtcaccctgtcgttcattcggccaggcaagcccgtggagaatgcttacatcgaaagtttcaatggcaagttccgcgacgaatgcctcaacgagcattggttcctgtcgcttcgcaaggccaaaaccttgatcgaaaactggcgggtcgagtacaacaccgatcggcctcacagtgcgctaggatatttaacccctacgcagtttgcgcaggcacatcaggaaaaaatgcttttaaccccggactctatgtcggcgccgtactaa

SEQ ID NO: 338387 - DNA, 267 bp, Pseudomonas aeruginosa
atgaagaaacgattcacggaagaacagatcatcggcgtgctcaaggaggccgatgcgggtgccaagcctgctgaactgtgccgcaagcacgggatctccgaggcgacgtactacaactggaaggcgaagttcggcggcatgacggtgtcggacgctcagcgcctgaaggagctggagctggagctggagaacaacaagctcaagaagctgttggctgagtcgatgttggacaaagcggcgcttcaggatctcttaggccgaaagtag

SEQ ID NO: 338388 - DNA, 861 bp, Pseudomonas aeruginosa
atgaaattcactggctgtccaagcccctcggccatgcgtgtcgccacttcacgagcagcgcaccagattctcgaagacgacctggtattcaaggaccccttcgccatagcgtctttgggaagtaccaatgctgcatcactgatgcgcgaaccaatggtgcaaaacgatgtcccgtcacgctccatgcgggcgggcatcgtagcccgctcacgattcgcggaagaccatttgctgaaagccattgccaacgggactgtgcaatacggcgtagtcggggcaggtctggatacatgggcactgcgcagtgcgtccacgcttcctgccgtcaccacgtttgaactggaccagccttcaatgcagaaatggaagacagacctttatacagacaacggatgggctcagcccgcaagcctgcgctatgtagccaccgatttgcgggagatgaccagtgttgatggtcttctcgcaggtggagcagaccttgccaagcctgtcagcctgtctgtgctgggggtgctcgtctacctttgcaacgatgtggttgagcgcgagattgctgcgttacagcaacttgctccaggctccaccgttacgctggactaccgcctggatgaggcccaactgcatcctgtggagcgagtcatgatgcagttcacggccagcatgatggctgcgggaggcgagccgtggcaatcatcttgcacgccggagcgcatgcgtgaactgctgtcatttgcgggctttgaagtcgatgaagacttggggccggcagaactcaacgcccgctatttcgcgggccgcagagatggcttgcagattgcaggcggcggcttccgttatctgagtgcggtcaagcgatag

SEQ ID NO: 338389 - DNA, 150 bp, Pseudomonas aeruginosa
atgagtctcaaggaggcgaatgccgtcgagcaaatcaccggccgatgcgttttggcgagagacagcgtgctccagaaacagcagcttttctttgagctcctggatttccaccagcttgcgcgtagcatcttctacctggcgacgcagtaa

SEQ ID NO: 338390 - DNA, 4203 bp, Pseudomonas aeruginosa
atgcccactctcagtaaaaatccccgcgacattcatccggcctacaaggaagccatggtcgacagtctgctcaatgggctatcggcacgactcgcgggtcgaggcgacttctacaaggttatctacggagccaagccaagcgcggcattgatgtcggagttcatcgtgccaatgccaccagaagagcgcagcggcgacgaggaagcggaccccattcgcatcagtgcacacggtatggacgtccagattcgcgcagctgctacggacagcaagatggatgtgtcccttactggcgccgtgtacgtacgcattctgccggccgaggacgacatcaaacccggtggacggttggaagctacattccccctgacgcgagaagcccgcaccgaaatccgcgccaagatcaaggatgcgctgggcaaacttgccactgagctgccaggcggtaagacgcatccagagtgggccacgaagagctatgacgcccgtaaagccgtatacgagtcgctgggcctgccgttcgacaacctgctggaccgtgcaccagcggagggagactcagaagccgaggatgccgaaggagagaacggcgaaggcggagaggaagatgaagggcgcccagtccaggaggttgccgtcggcctgacaactcctgacggtctagctgaagacatcccgcctccgccgaagtggcttaggctcgagctcactctgccctccttcaagttcacgccggcgacagccgagatcgacgccaagagggcaacggatgcgctgaacgaaaccattgccatgcaactagcggactgggcggccagctccgacccagagacaggcggcaggtcatggggatatcggcgcacacgagtccgaccgtccgacgttcgcgactggaatcattacctggatcgggtacgcgcgtcaggccttacggtcatcgtgcccaagattgagctgcgctgggtcgttcaggcggtgcccgatccagtcgactcgactcgcatgaccgtccatgtggcgttggagaactggacacctcccctcacgaagaccaactttaaggagctggagccctcgctattccaagtctcggtgactatcgagatgcctgcggctgaccatcagttcctgcgcctggatcgagtcaagccgtcctaccgatacaaccaatacctcagatacccagcgcttggattcaacggcggcgtcactatgactgtcgatggcgcactgcaccggctgaccacaacgtgggcaccacgatacgtgctgccccgaatcatccccaccgatggtgccgttgaacgcaatattgagaagctgtcccaacctgactgtctagctggcctgaaaccgctagtgacagcctacgaggcatggttgaccagggtcgaaaagcatccagtagcccagggtctcgacggcctcaatgcagcggagcaactggcagcggagaaggagaaactgcacctagacctcgcggcgtggcgcagtgagctgggcgccatccgctgcggtctggcgatcctcgagaagtctcgagcgaactggagcgggcctggcgttcagcactcaccacttggcatcccgtttgaggcatgggtgtcgatgaacacagccatggccaaggtggccaagtcgaagggctatgacgagtggcgactattccaactcgctttcatcttggcgtccatcccagcttttgcgacgcgtatcaatgagttccatgacttttatacacccgaggttgccaagcacgccaacgcagtaacgctactgtacttctccaccggtggtggcaagtctgaagcgttcctaggcctgcttgcgtacgtgctatttctagaccgccttcggggcaagcacaggggagtgtcggccttgatgcgatacccattgcgcctgctcaccctgcagcaggcgcgccgcactttcgcaacgatgggggcagccgaggaggtccgtcacaagcgcgctcatcccggcgagccattctcgctcgggttctgggttggcggcagcaacacgccaaactggcattcagaggacggctataccgaagtacccagcgacaatgaaattgccccaagcgcagagtccaagcacaaagatgtccagccctacaagagcgcccgcgagcgatggctaaaactgtcctcgtgtccattttgtaacaacacggatggcagcctgctagctctgcgccgccactcgggcaccggtgccaatgcgctggggcactactgcactgcccccaaagaaaagtgttcctggaacgcccgattcgccaagccgacaccgctgcctttctacatagtcgacgaggatatctatgacctagccccctgcgtcctcctgggcacagtcgacaagctcgccgccatcggccagtcacagggcactattcgcaagttcttcgccatgtttggctttgctcccttgatgaagactgacagcgagcgtctgtacgtcccaatgaaacctaaggattgggatggacacccgggcgcaggcacccgcgcactgttcccctcgttcgcttcaggcgaaaaaagattcttcgacccgttccccgccctgctgattcaggatgaggctcacctgctggacgagtcccttggtaccttctcgggcctattcgagtcagcattggaggcagcgctcgaccaactatcaccgcttctaaaggactacctttcatacgaacccgagtcagccgtccgccgaaaaataaaggttattgccgcatcagccacggtcagcgagccgcagcgccagatgcgcaacctctaccagagagacaacaccgtacagttcccatatccggggccgacactctatgactcgttctacgcaacgcccctacagcccgacgtttcgtcagatgacgccgagcgcgcggccattcccgtcggcgacgtggagctacgcagccactgggcccgcgtctacgcctcgatcttgaccaacggacaccgtcacaccgtggcgatggcttcagtgctcggccactaccacgtgatgctcactggcttatatgagcgcctgcgcagcgaggatcctactaaggaggaaaccgcgcgcaacgagctcattcggtgggtatctcctgggcccttacaggctcaattcgttcggatcctggcgggcgcagatgccgccacgctgttgacgctggtggacttgcaccgcatcgcgctgacgtacgtcacgaacaaaaaaggtggcgaccaggtcatcgataccgagaaggtccagttcgagaagctgcaccagtccgagggatacgccgaccagtcgctgagctcagaactcatctccggggcggtgtcagccgcggacattcaggacatcgttaggagagccgagacgcgcgttggtgccaacaaaccgttcccggaactgaacgatacccttcgatcggtcatcgccacctcggctatctcgcatggcgtcgacgtggaagagttcaacgcgatgttcttcgcgggcatcccatccgacatcgcggaatacattcaggcatcatcacgcgtggggcgcacgcatgtgggcttctcgctgttggtgcccgtgccgcagcggtatcgcgatcggttcgtgctggaaattcacgacatcttccaccggttcctggagcggatgattctaccggcagctgttgatcgatgggctgagaaggcgctagtgcgggtgatgccgagcttcttccaggagtatgtctgtggaatgaacgccatcgagcggttgtgcgccgcggacgatgacaagaagcgcgacagcccgacgtttgccatggcgcccgatgtgcgcgacttcctgaacgtgccggccaacatgaagactaccgaggccttcatagagaaggcgctcggtctgtccttctcaccatctcctgaggggaagaattactactgctcactgatcaaggcgcagctcgcccactaccaacaagacttggatgtcgaccgacttgtgaatggcactcgcctggtccagttcttcgcagcgcgcaacagtctgctgcggccgatgacgtcgctgcgcgacgtggaccagcccggccttatccacgagtcgggcactgatgcgtcatatagacgtgtagccgacggtatgactaagcgtgcgatggaattcattcggcgcggctctggagccgatatcgactcgaccgatagtgcgacagaagcgcggagctga

SEQ ID NO: 338391 - DNA, 1479 bp, Pseudomonas aeruginosa
atgtatgtcctgcggctttccaacatgccggctggatacaccgacctcactgcgttttcaaaggaaaccggcgaaggcgactacaccagccaacagaacgcctggacacccgtgaagctcaaactcgcttcagcgctcgactccggcgcgttgaacacggtgcgcgactccgttgaacaagccatcgcacgagccgagaagctcctcgacgactggaacgatgccacgccaatggcatctcgtatgctggcagaagttcgcaaacacgcagttgccagccgacaaggcatctcgctgatactgccaagcaatcggtatgtgctgctcgcacatcacttcctgcagcggaagctgggagcggattgggccgttgttcaagagtgcatcgagtggcacacgctatccagtgtgggcaagacacttgctgctgactgtaatggcaagcacttcaccttcgtcggcatcaatccagacgtgctccgcattctggtgacacatccggaagtaccacacggaactgcagtgctggtggcctatcgtcaggccgaatccacgctcactgtgctcaccaacatgaaggaagtaggcgcgttcaaggcctatcgcgaacgtatcggtctgctagctcaagagctgaatcggcgccttgcggaagtaccgaacccgttggccatcggcaaactccgtgagatgcccctcacattcaaatttgacgactatggccacaacagccagagcagcgaacaagcgtactacaagttcgagctggaagatggcaggcgggcatatgcctctggctgggtctatcgccatatgcccgacgaggaccctccgttccgccgctccgccgcaggcgctatccagcctggcaacttcatcttcgacatgagcgacgagctgcgcaccaaactcgaatcgtcactgcggctgaacggtgaaggagtcagctccgtggtggatccggtgcgtatgctgctaaagctttaccacgacgacgtccaacggcgctgcgcattgatgttcaagtcctcgaaacggtcagcgctggcgcgcgagattcacgctcggatggtcgaactggacccaaaggccgcggaatgccaaccgggccgggtgtactactggttagcccttcaagccaatgacgacacgcgaccacatgcatccagggacgccaagtatttcaaaatcttctgtaaggccttggacatcaacgacgaggctgccgaacagcactggggcttcgtgcgcaatgctcgacgtctgagccagtatttagggcgagagctggtcgctcggtatgccgagattctgttccagcctgggagcgccgcgacctaccgcaagattcccgaggatgttatccggcagctgcaggaggaggcgttgcgctgcgtctatcgcgtcgaacacgtggtgccaccactggtgcgcgaggccacaatcaagaagggggagacaaatgcccactctcagtaa

SEQ ID NO: 338392 - DNA, 1755 bp, Pseudomonas aeruginosa
atggggttgactacgcctccatcgaaacaatctatcaggagacatattcaaaccctcggcttattggctcatcggtgcaatgccgatgcggcaacgctcgtagggacgatcctgcacctttggtgcaacattgagtttcccgctcttcctaagtcatccctaccttattcggaggcgttggcctccgaacaggaagtcgtcacattcgtcgcgatgctgagccagctgggcttcctcgaagccacgtactggctcagctcgtcctatgcgatgcttgccgaagaaggctatcgcaaaaagctggcaatgtttttcacaccagtgtctctaacggagggactactcgacgacttagccgaacaaggcaccgattttggaagtttttccttcatggatccagcttgcggaggggcagccttcctggcaccgattgcacttcgcatgcgaaaagcgctggcgaccaaaggcctccctcctatcaaattgctcaagcatgtcgagaagcacctttacggcaccgacttagacaagagtttgtgcgagttatccaagcattttctgtgcatggccctccacgccgaaattcaaaagactagctacatccccacattcaacatccatcacgctaactcactgaccgagctgtccgccagcttaggtcgggtcgacgtcgttgtctgcaacccaccatatcgtaagatgactgccgaggaattagaacctttgcgggccacatatacggacgttatcgaagcccaacctaacctttactgcttgttcatcacgctctgcgtgcgcctactgcgtaacggcggtcgtgccgcgctcgttacgccgaccagctttctttctggccagtactttagccgactgcgtaaatttctaatgcgccacactgacgtcgagcacataggtatggtcagcgatcgaaagggcgtattcatcgacgtcgagcaagaaacggcgatgaccatcttgcgtcggcgcgccgaagaggatcgcacgcaggctcgagcgaacatctcggtcgtctctggtacaggtcaatataaaagcgttggcgagtgtctacttccaaacgccggcgctatatggcccattccgcgctctaccgaagacgtaactctcgtcaagattgttagctcatccaagttccggctatcagactatggctacaaagtgcgtattggtgcctatgtctggaaccgcgacaagcgacctaagttcgaatcgcttcaggacgcgaggcaggcaaacgcatgcaccactatcccgcttctgtggtcaagagacattactgcagggggagtcgtccaactagaagtcacctccgcctacaacggcgaacaccgctttgttgatgttggtaataaaaagtgccaatcggtgattaagtcaccttgcgtagttatgcagcgagtgacatcaaatgatcaaccccgccgcctcgtggccgcggctgtatcaccgtctgtttttgctgcatatggtgggtttataggcgaaaaccatgtggttatcgtggagcaagtaaccgataaaccggcgctgtccccgacgaagttagcagcgctcctcagcacgtatgccgtggaccgctacttccggtgtatttctggcgctaccaatgtttcagttttcgagctaagccaacttgcgttaccagatccgatagcgctcaaagaagctctgaccaatggcagcaccttagatgatgctgtgaatgagacatttcaactcatatctgagagctga

SEQ ID NO: 338393 - DNA, 186 bp, Pseudomonas aeruginosa
ttgctcagcggcttccgcggtcgcccggcagtgtgcatggaggccctggtggcggcgatccgcgcggtcgccgaattcgcctgcgaacatgccgagcgcttgctggagctggacgtcaatccgttgctggcggatgccgagggagcgctggcggtggatgcgttgatccggctggccaatggctga

SEQ ID NO: 338394 - DNA, 1611 bp, Pseudomonas aeruginosa
atgcaaccacagaagaccctcaccgccggccaggccctggtccgcttgctggccaactacggcgtggataccgttttcggcatccccggcgtgcataccctggagctgtaccgcggacttccgggcagcggcatccgccacgtgctgacccgccacgagcagggcgccggcttcatggccgacggttatgcgcgggtcagcggcaagccgggagtgtgcttcgtcatcaccgggccgggcgtgaccaacgtcgccaccgccatcggccaggcctacgccgactcggtgccgctgctggtgatttccagcgtcaaccacagcgccagcctgggcaagggctggggctgcctgcacgagacccaggaccagcgtgccatgaccgcgccgatcactgccttctccgccctggccttgagcccggaacagctgcccgaactgatcgcccgggcctacgcggtgttcgacagcgagcgtccgcgcccggtgcatatctcgatcccgctcgacgtgctcgccgcgcctgtggcccatgactggagcgctgccgtggcgcgccgccctggtcgtggtgtgccgtgcaccgaggcattgcgggcggcggcggagcgcctggctgcggcccggcgaccaatgctcatcgccggcggcggcgcgctggcggccggcgatgcgcttgccgcgctgagcgagcgcctggccgcgccgctgttcaccagcgtcgccggcaagggcctgctgccgccggacgcgccgctcaacgccggggccagcctgtgcgtagcgccgggctgggagatgatcgccgaggccgacctggtgctggcggtgggcaccgagatggccgacaccgacttctggcgcgaacgcctgccgctgtccggcgaactgatccgcgtcgatatcgacccgcgcaagttcaacgacttctatccctctgccgtagcgctcaggggcgatgcccggcagacccttgaggcgctgctggcgcgcctgccgcaggaggcccgcgacgccgcgccggccgccgcgagggtggcgcgcctgcgcgcggagatccgcgcggcacacgcgccgctgcaggcgctgcaccaggcgatcctcgaccggatcgccgccgcgctgccggccgatgctttcgtcagcaccgacatgacccaactggcctataccggcaactacgcgttcgccagccgagcgccgcgcagctggctgcatcccaccggctacggcaccctcggttacggcctgccggccggcatcggcgccaagctcggcgccccgcagcgcccgggcctggtgctggtcggcgatggcggcttcctctacaccgcgcaggaactggccaccgccagcgaggaactggacagtccgctggtggtgctactgtggaacaacgacgcgctcggccagatccgcgacgacatgctcggcctggacatcgagccggtcggcgtgctgccgcgcaaccccgacttcgccctgctgggccgcgcctacggttgcgcggtgcgccagccgcaggacctggacgaactggagcgcgacctgcgcgccggcttcgggcagcccggcgtgaccctgatcgaactgcggcacgcctgcgcgcgctga

SEQ ID NO: 338395 - DNA, 597 bp, Pseudomonas aeruginosa
atgcctcatccgctcacccttttgcagatcagcggacgcggctacccgccagccccccttcggcagagcaccttgctgatcatcgatgcccaggaagagtaccgcagcggcgccctgcgcctgccaggcctcgacgccgccgccgcggagatcggcgtgctggtgcaggcggcccgcgccagcggtacgcccatcgtgcatgtacgccacctgggtatccagggcggcctgttcgatccgcaagggccgcgcggccagttcctcccggaactgcaaccggaagccggggaaaaggtcgtggagaaacgcctgcccaatgccttctccggcaccgagctgcacgacctgctgcagaaccacggccgtctcgacctgatcgtctgcggcttcatgacccattccagcgtcagcaccaccgtgcgcgcggccaaggactacggctaccgctgcaccctcgccgatagcgcctgcgccacccgcgacatacccaccctgaacggcggggtcctgagcgccgcggacctgcaacgcgccgagatcgccgccctcggcgacaacttcgcggcgatcgtcgcccaggcccgggaactgctctga

SEQ ID NO: 338396 - DNA, 984 bp, Pseudomonas aeruginosa
atgaagacctccatgccgcgcgccctcctcgccctgttctgcctgctcgccagcctggcccacgccgctcccaacagcatcctgcaccgcccctacgacctggacaccgggcacggcgtgctgcgcggctccttgctgctgccgcgcagcgccgtgccgccgccggtggtcctgctggtcgccggctccggtcccaccgaccgcgacggcaacaaccccttcggcggcaacaaccgctacctactgcgtctcgccgaggccctggccgaacgcggaatcgccagcgtgcgctacgacaagcgtggagtcgcccgcagcctggcggcggcgccgcgcgaggaagacctcagcgtcggcgtctatgtcgacgacgtggtcgcctggagcgagcggctggcccgcgacccgcgcttctcccggctgatcctggtcggccatagcgaaggcgcgctgatcgccagcctggcggcgcctcgcacgccggccgaggaattgatcgccatcgccggcagcggccaacccatcgaccgggtgctgcgcgagcaactgcgcggtcgcctgccgccggcgcaactgcgccaggccgactcggtgctggcttcgctgaaggccggcgagacccgcggcgatatcccgccggcgctcgccaacctgctccgccccagcgtgcagccgtacctgatctcgctgttccgcgaagacccggcccgcgcgttcggcagcctgcgcatcccgaccctgatcgtccagggccgcaatgacatccaggtcggcgtcgccgacgccgaggcgctccagcgagccaagcccgactcgcaactggtgctcatcgacggcatgaaccacatcctgcggatcgccccgagcaccggtctgcagcagctttccgcctacaacgacccgaacctgccgctggcccggcaactggtcgaggcggtcagccgcttcatcctgcgcggcgcagaggcggaaaaaggccgctga

SEQ ID NO: 338397 - DNA, 1092 bp, Pseudomonas aeruginosa
atgtccggcaacacctacggcaagctcttcaccgtcaccaccgcaggcgaaagccacggcccggcgctggtcgccatcgtcgatgggtgccccccggggctggaactgtccgcccgggacctgcaacgcgacctcgaccggcgcaagcccggcaccagccggcacaccacccagcgccaggaagccgacgaggtggagattctttccggggtgttcgagggcaagaccaccggcacgccgatcggcctgctgatccgcaacaccgaccagaagtccaaggactactcggcgatcaaggacctgttccgcccggcccatgccgactacacctaccaccacaagtacggcgtgcgcgactaccgcggcggcggccgttcctcggcgcgcgagaccgccatgcgcgtggccgccggggctatcgccaagaaatacctggcgggcctgggcatccaggtgcgcggctacatgagccagctcgggccgatcgagattccgttcaggagctgggacagcgtcgagcagaatgccttcttcagccccgacccggacaaggtgccggagctggaggcctacatggaccaattgcgccgcgaccaggattcggtcggggcgaagatcaccgtggttgccgaaggcgtgccgccgggcctgggcgagccgatcttcgaccgcctggacgccgaactggcgcatgcgctgatgagcatcaacgcggtgaagggcgtggagatcggcgccggcttcgccagcatcgcccagcgcggcaccgagcaccgcgacgaactgaccccgcaaggcttcctgtcgaacaatgccggcggcatcctcggcgggatctcctccggccagccgatcgtcgcccacctggcgctgaagccgacctccagcatcaccactcccgggcgctcgatcgataccgccggcgagccagtggacatgatcaccaagggccgtcacgacccgtgcgtcggcatccgcgccacgccgatcgccgaggcgatgatggccatcgtcctgctcgaccagttgctgcgccagcgtgggcagaacgccgacgtgcgcgtcgacaccccggtcctgccgcagctgtga

SEQ ID NO: 338398 - DNA, 1152 bp, Pseudomonas aeruginosa
gtgaccagcgcggttccctactggcgcctgtccagcttctatttcttctatttcagcctgctcggcgccacggcgccgttcctcgccctgtatttccatcacctgggcttccccagcccgcgcatcggcgagctggtggcgattcccatgctgatgcgttgcgtcgcgcccaacctgtggggctggctgggcgaccgcagcggccagcgcctggctatcgtgcgcttcggcgcggtatgcacggcgctgggcttctcgctgatcttcgtcagccacagctacgcctggctggccttggtgatggcgttgcacgcgttcttctggcacgccgtgctgccgcagttcgaggtcatcaccctggcccacctgcgcgagcgcagcgccagctacagccggattcgcctgtggggctcgatcggtttcatctgcaccgtggtcggtctcggcgcgctgttcgagcgcctgagcctggatgtctacccggcgacgctgctgggtatcatgctcggcatcgtactgtgcagctggtgggtgcccaatgcccagccggcccatcgcgaaccgcgcgaaggcgagggcggcttcctcgcccagttgcgccagccgggcgtgctggcgttctacctgtgcgtgtgcctgatgcagctgtcccatgggccgtactacaccttcctgaccctgcacctggaatcgctgggctacagccgggcgctgatcggtctgctctgggcgctgggggtggtcgccgaggtcatgttgttcctcgccatgccacgcctgctgcaacgcttcagcctgcgccaggtgctggccgcgagcttcctgctggcgtcgttgcgctggctgcttctcggcaacctggccgacagcctggcgctgctggtctttgcccagacgctgcatgccgccaccttcggcagttttcatgcggctgccatccatttcgtgcagcgtagcttcggcccgcgccagcagggccagggccaggccctgtatgctgcgctggccggtaccggcggagccctgggcgcgctgtattccggctatagctggaacagcctgggccctgcctggaccttcgccatcgccagcctggcagccttgctggcagccgctatcatcagtacccgtttgcaagaggtgcgggcatga

SEQ ID NO: 338399 - DNA, 618 bp, Pseudomonas aeruginosa; identical to SEQ ID NO: 323475

SEQ ID NO: 338400 - DNA, 546 bp, Pseudomonas aeruginosa; identical to SEQ ID NO: 323474

SEQ ID NO: 338401 - DNA, 678 bp, Pseudomonas aeruginosa
atgaccatcaaagccatcctcaccgacatcgaaggcaccaccagcgcggtcagcttcgttttcgacgtgctgtttccctatgccgcccggcacctgccggacttcgtccgcgaacacgccggagagaccgaggtagccgcacagttggcggcggtgcgtgccgagagcggtgaggcggacgccgatgtcgagcgggtgatcgcgatcctcctgcaatggatcgccgaggaccgcaaggcgacgccgctgaaggccctgcaaggcatggtctgggcccagggctaccgcgacggtcagttgaagggccacgtctacccggacgcggtgcaggcgctgcgcgagtggaaggcccgtgggctggacctgtacgtctattcctccggctcgatccaggcgcagaagctgatcttcggctgttccgaggccggcgacctgggctcgctgttttccggctacttcgacactaccagcgggccgaagcgggaaagcgcctcctatgcgcggatcgccggggccatcggcctgccggccgcggaaatccttttcctttccgacgtggtgcaggaactggatgccgcgcgcgacgcgggcatgcgcacgctcggcctggcccgcgaaggcggcagcctggacggccatccgacggtggccagcttcgccgacatcctcgtggagtga

SEQ ID NO: 338402 - DNA, 192 bp, Pseudomonas aeruginosa; identical to SEQ ID NO: 323472

SEQ ID NO: 338403 - DNA, 894 bp, Pseudomonas aeruginosa
atgagccagcctacctctcccctcgtcctgcacctgccctaccagtcaccctgggaatggcgccagttccaccagcatttcgccctgcgcctgctcgccggtgtcgaaagcctgggtgacgaccactatgcccgcagcttccgggccaacggtcgcccggcctggttcgaggtgcgaccgctggcggaacgccaggtcctggcgctgagcctcagcccgtccgcccatgccctggccgccgaactcgaggcacgggtccgccggatgttcgacctggacagcgacccggccgccatcgcccggcatttcgccggggatcccctgctcggcccgctggtggccgccaatccgggactgcgcctgccggtggccttcgatcccttcgaacaggcggtgcgcgccatcgtcggccagcaggtcacggtgaaggccgcggtgaccatcaccgggcgcctgatccagcgcctcggcgagccgctggaagatctcggctacgacagcatcagccacctgttcccgacgcccgccgcgctggcgcaagccaacctcgacggcatcggcatgcccggcaagcgggtacagacgctgcaacgcttcgccgcggcgatcgcctcgggagagctgagcctggacctggcggacggccccgaggccctggtggagcgcctctgcgcgttgcccggcatcggcccctggaccgccgaatacatagccctgcgtgccatgggcgaagccgacgccttccccgccgccgacctcggcctgctgaaatccacggtctgggggccgcaaggcatcgatgcgcgcagcctgaaggcccgcgccgaggcctggcggccttggcgcgcctacgccgcgatccacctgtggaaccactacgccgcaggcggctaa

SEQ ID NO: 338404 - DNA, 861 bp, Pseudomonas aeruginosa
atgagcgattatcaggaaactctgtaccagggctacggccagcgcttcagcatcgacaacatgctgcatgaggtgcgcaccgagcaccagcacctggtgattttcgaaaacgcccggatgggccgggtgatggcgctcgatggagtgatccagaccaccgaggccgacgagttcatctaccacgagatgctcacccacgtgccgatcctcgcccacggcgcggcccggcgcgtgctgatcatcggcggcggcgacggtggcatgctgcgcgaggtggccaagcacaagagcgtcgagcggatcaccatggtcgagatcgacggcaccgtggtcgacatgtgcaaggagttcctgcccaaccactcccagggcgccttcgacgacccgcggctgaacctggtgatcgacgacggcatgcgcttcgtggctaccacggaagaacgcttcgacgtgatcatctccgactccaccgacccgatcggccctggcgaggtgctgttctccgagaacttctaccaggcctgccggcgctgcctgaacgagggtggcatcctggtcacccagaacggcacgccgttcatgcaactggaggaagtgcgcaccaccgccgcacgtaccgacgggctgttcgccgactggcatttctaccaggcggcggtgccgacctatatcggcggcgccatgaccttcgcctggggttcgacccgcgaaggcctgcgtcgccttccgctggaaacgctgcgccagcgcttccgcgacagcggcatcgccacccgctactacaacgccgatatccacctgggcgcgtttgctctgccgcagtacgtgctgcaggccatcggcaagcaggacaacgactga

SEQ ID NO: 338405 - DNA, 870 bp, Pseudomonas aeruginosa
atgctgaccaaacgattgcgccagagcggcgtagtagtctcctgcctgctcggtagcgtcctcttcatcgccctggccttcctcggctggcagcgtttcgccccggcagccaccgtatccggctggacctaccgggtagtgctcgaggacattccccacgtcagcgccctggcccgcgacccggacggcctgctctacgtgagccaggagttgcaggacggcaagggcctggtgttccgcatcgccgccgatggcagccgcgatacggtgctcgacgggctgtccaagcccgacggcatggccagcttccgcgacggcatcgcgatcagccaggagcagggcgcctcgccggtgttctggtggcatgcccagcaggcccggccgctgttcgacggcatccaggtggagggcgtcgccagcgacggccgctacctgtacgccgccgaggatcgcgacctggacgggcggattctccgctacgacccggagaccggcggactgacggtactgcgcgagggattgcagcgctccgaaggggtggccgcctgcccggacggaagcgtcttctacacggaaaagaaacgtggccacgtcatgcgtctgcatgagggggccgaggacgaggtggtgctgaacggactgaatgcaccgagctttttgctgtgcgacagcgaaggcctgtggatcaccgaggactcgacgcataacgcgcgagccttgctgctgccgcccgacgggccgctgcaggtgatcgtacggcgcctgcgttccgcacagtccctactgcccatcgggcccggccgctacctgctggccgagcaggggcgggaccgcattctcgaaatcgaacgacagaagagcgaattgtaa

SEQ ID NO: 338406 - DNA, 2103 bp, Pseudomonas aeruginosa
atggaccaaacggaagtccgaaccacccaatcgcccccacggctgttccagcccaccatccgcagccacctggcgttcaccgcgctcagcgcgctggtgctgctggtcatgttcagcctgctgcgcctggccttgctgatctacaaccgcgaactgatcggcgcgaccccggcgagtaccttcctcgaggcgttcggcaacggcgtgcgtttcgacctgcgggtcgtcgtctatgccgtggcgccgctggtgctgtcgttgttcgcggtacgcgcgatggccgctcgcggcctgttccgtacatggttgacgctgttcgccagcatcaccctgttcctcggcgtactcgaactggacttctaccgtgagttccaccagcgcctgaacagcctggtcttccagtacatgtcggaagacccgaagaccgtcatgagcatgctctggtacggcttcccggtggtccgctacctgctggcctgggccttcgccacctgggtgctgtaccgggtgttcaaggccatcgacctggcgacccgcccgagccagcgcaagccgcgcgaagacagcgtgatcgcccggccgagcgctgccgcgccctggtacgtgcgcggcgtggtgctgttcctctgcgtgctggtctgcgtcctcgccgcccgcggcaccctgcgccagggcccgccgctgcgctggggcgatgccttcaccaccgagtccatgttcgccaaccaactgggcctgaacggcaccctgaccctggtcaaggcggccaaggagcgcttctccgaagaccgcgcgaacatctggaaggccaccctggacgacaaggtcgccctggagaccacccggcagatgttgctgacccccaacgacaagctggtggacgccgatgaggccgcggtgcgccgcgagttcaccccgccggcggcgaatgccctgccgatccgcaacgtggtggtggtcctgctggaaagcttcgccggccactatgttggcgccctgggcgcgccgggcaacatcacgccgtatttcgacaagctgtcgaaggaaggcctgctgttcacccagttcttctccaacggcacccatacccaccagggcatgttcgccaccatggcctgcttccccaacctgccgggcttcgaatacctgatgcaaaccccggagggcggccacaagttctccggcctgccgcagttgctcagcgcccgccagtacgaggacgtctacgtctacaacggcgatttcgcctgggacaaccagtccggcttcttcagcaaccagggcatgaccaccttcatcggccgcaacgactatgtcgacccggtgttctccgatccgacctggggcgtctccgaccaggacatgttcgcccgtggcaacgaggaactggacaagctggcgagcaccggcaagccgttctatgcgctgttgcagagcctctccaaccacgtgccctatgcgttgccgaaggacctgccggtggagcgcgtgaccggctacggttcgctcgacgagcacctgaccgccatgcgctattccgactgggcgctgggccagttcttcgagaaggcgaagaagtcgccgtactacaaggacacccttttcgtggtggtcggcgaccatggcttcggcagccccgagcagctcaccgagatggacctgcaccgcttcaacgtgccgctgctgctgatcgcccccggcatccaggagaagttcggtacccacctgccgaccgtcggtacccaggtcgacatcgtgccgaccatcatgggcctgctcggcggcgagaccgtccaccagtgctggggccgcgacctgctgaacctgccggaaggcgacaagggcttcggcgtgatcaagccgtcgggcagcgagcagaacgtcgccatcgtctccggcaaccgcatcctggtgcggccgaaggacggtgacgtgcgcgtctacgattaccaactgggcggcgatgccaaggcggtgatcaccaaggaagtgccggaccaggccgagctgcagaagaagctggagtcgttcatccagaccgcgaccaagagcctgttggagaataccgcgggcgtggtacacgggatcccggacaaggactga

SEQ ID NO: 338407 - DNA, 1050 bp, Pseudomonas aeruginosa
atgagcgccgagaagaccgagcagcccacggcgaagaagctgcgcgacgcccgccggcaaggccaggtggtgaagagcaaggaaattgtctccagcgcgttgatcctgtcgctggtggcgctgctgatgggcttttccgactactacctggagcatctcggcaagctgctcctgctgcccgccgagtacatcgacctgccgtttcgccaggcgctggagaccatcctggagaaccttctccaggagctcctctacctgctggcgccggtcctgctggtcgcggcgctggtggtggtgctcagccatgtcggccagtacggtttcctgctcagcctcgacagcgtcaagccggacctgaagaagatcaacccggtggagggcgcgaagaagatcttctcgatccggagcctggtggagttcctcaagtcgaccctgaaggtcgccctgctctccctgctggtctggctgaccttgcagggcaacctggccagtctcctgcggattcccgcctgcgggctggactgcgtggcaccggtgagcgggctgatgctcaggcagctgatgctggtctgcgcggtcggcttcctggcgattgccgtcgccgactacgccttcgaacgccaccagcactacaagcagttgcgcatgagcaaggacgaggtgaagcgcgagtacaaggagatggagggcagtccggagatcaagagcaagcgccggcaattccatcaggaactgcaatcgagcaacctgcgcgcggatgtccggcgttcctcggtgatcgtcgccaacccgacccacgtcgccatcggcatacgctatcgacgcggcgaaacacccctgccgctggtcaccctgaagcacaccgacgccctggccctgcgggtccggcgcatcgccgaggaagaaggaatcccggtgctgcaacgagttccgctggcacgggcgctgctgcgcgacggcaatgtcgaccagtacataccggcggacctgatccaggccaccgccgaagtcctgcgctggctggaaagccagcagacggatacaccctga

SEQ ID NO: 338408 - DNA, 789 bp, Pseudomonas aeruginosa
atgagcgtccaggacctgcagcaactgctgctgacctacagcctgctgctgccgcggatcatcagttgcttcgtggtcctaccggtgctggccaagcaaaccctgggcggcggcctggtgcgcaacggcgtggcctgctcgctggcgctgttcgcctacccgatcgtcgccggcagcctgccgccggccctcgacgcgctggacatcgccctgctgatcggcaaggaagtgctgctcggcctgctcatcggcttcgtcgccaccattcccttctgggccatggaagcgaccggcttcatcatcgacaaccagcgtggcgcggcactcgcctcgaccttcaaccccagcctgggcagccagaccagccccaccgggctgttgctgacgcagacgctgatcaccctgttcttctccggcggcgccttcctcgcgctggtcggctcgctgttcaggagctatgccagttggccggtgagcagtttcttcccgcagctcggcagccaatgggtggcattcttctacgcgcagttctcgcagatgctgatgctctgcgcgctgttcgccgcgccgctgctgatcgccatgttcctcgccgagttcggcctggcgctggtcagccgcttcgccccgtcgctgaacgtgttcatcctcgccatgccgatcaagagcctggtggccagcctgctgctggtgctctacctgggcatcctcatggagcacgcctacgatgccctgttgctcgccgtcgacccgctgcgcctgctgcgtcccgtgctggagacgccatga

SEQ ID NO: 338409 - DNA, 267 bp, Pseudomonas aeruginosa; identical to SEQ ID NO: 323465

SEQ ID NO: 338410 - DNA, 654 bp, Pseudomonas aeruginosa
atgatccagttgcccgacgagctcggcctgatcctcggcctggccctgctcgcgctggtcccgttcatcgcggtgatggcgacctccttcatcaagatgaccgtggtcttctcgctgctgcgcaacgctctgggcgtccagcagattccgccgaacatggcgatgtacgggctggcgatcatcctcagcctgtacgtgatggcaccggtcggcttcgccacccgcgactacctgcgcaaccacgacgtcagcctgagcgactcggcatcggtggaacgctttctcgacgagggcatggcgccctaccggaacttcctcaagcggcagatccaggagcgcgaacacaccttcttcatggaaagcacccgccaggtctggcccagcgaatacgccgagcggctcgacccggacagcctgctgatcctgctgccggccttcaccgtcagcgaactgacccgtgccttcgagatcggcttcctgatctacctgcccttcatcgccatcgacctgatcatctccaacatcctcctggcgatgggcatgatgatggtgtcgccgatgaccatttccctgccgttcaagctgctcctgttcgtcctcctcgacggctgggcgcggctgacccacggcctggtcatcagctacggaggctga

SEQ ID NO: 338411 - DNA, 930 bp, Pseudomonas aeruginosa
atgaacggtacggacctcgacctgccgctcgccagccgcgccgaactggatctccagcgacgtctcgcgcgttgccgtcgccactatgccggcaacgctttgcaagcgcgcctggacatcgcccaggccgcccccgacgtcgatctcgaactgagcctggcgtgggacggcctgcccctgcgctttctctgccaggctccggcactggcccactggctcgcgccgaacctgcaggaggcagccttcgccagcctgccggcggccctgcaactggccttgctggagcgcgaaggcaacgtctttcccggcctggtctggtacggcctgagcccggcgcaaccacgcgctgcgatgggcctgcgcctgagcctggaacgcgacgaccagcgcctggcgctctggctcgacggcgatcccgcgacgctgctggcacgcctgccgccgcgcccctcggcgcaacgcctggccataccgctgcgcctgtcgctgcaatggcccggcctgccgctggacgccggcgagctgcgcaccctggagcccggcgacctgttgctgctgcctgccggtcatcgccccgacgcagcgctgctgggggttctcgaaggacgcccctgggcgcgctgccaactccactccacgcaactggaactgctcgacatgcacgacaccccctccctcgccgacggcgaggacctgcacgaactcgaccaactgccgatcccggtcagcttcgaggtcggccgccgcaccctggacctgcataccctctccaccctgcagccaggctcgctgctcgatctcgacagtgccctggacggcgaagtgcgcatcctcgccaaccagcgctgcctcggtatcggcgaactggtcaggctccaggatcggctcggggtgcgcgtaacccgcctgttcggacacgacgaagcatga

SEQ ID NO: 338412 - DNA, 399 bp, Pseudomonas aeruginosa
atgcaaacccccggcgaccgcctgctggcacgcctgctggcatcgagcgggagccggccactgccgctggccgatctcgcgcgcctgctcgatgccgtgcaggggcgcatccaggtcgccagcgcagccgaaagccatgcggcgcgcctgcaggtgcgactgccccagctcggcgccgtggaggtgcaggtcctgcatggccatggccagttgcaggtcgagatcagtgccagccccggcagcctggcgtttctccagcaagcccgtggcgagttgctcgaacgcctgcaacggctgcatccggaacaaccggtgcaactcaccttcaaccagcagcaggacagcggccagcgctcgcggcaacgtcgctacctgcatgaagagtggcaagccgaatga

SEQ ID NO: 338413 - DNA, 1290 bp, Pseudomonas aeruginosa
atgcgccacgccatcgaaggctgccggccgatccagatccgcgggcgggtcacccaggtcaccggaaccctgctcaaggccgtggtgcccggcgtgcgcatcggcgaactctgccagttgcgcaatcccgaccagagcctggcgctgctcgccgaggtcatcggcttccagcagcaccaggcgctgctcaccccgctcggcgagatgctcggggtttcctccaacaccgaagtcagccctaccggcggcatgcatcgcgtggcggttggcgagcacctgctcgggcaggtgctcgacggcctcggccgccccttcgacggcagcccgccggccgagccggcggcctggtatccggtctaccgggatgccccgccgccgatgagccggcgcctgatagagcggccgctatcgctgggtgtgcgcgccatcgacggcctgctgacctgcggcgaaggccagcgcatgggcattttcgctgccgccggcggcggcaagagcaccctgctggccagcctggtgcgcaatgccgaggtggatgtgacggtactcgccctggtcggcgaacgcggtcgcgaagtccgcgagttcatcgaaagcgacctcggcgaacaggggctgcgccgctcggtgctggtggtcgccacctccgaccgaccggcgatggagcgcgccaaggccggtttcgtcgccaccagcatcgccgagtatttccgcgatcagggtcgccgcgtcctgctgctgatggactcgctgacccgcttcgccagggcccagcgcgaaatcggcctggcggccggtgaaccgcccacccgccgcggctacccgccctcggtgttcgccgcgctgccacgcctgatggagcgtgccgggcaatccgagcggggctcgatcaccgcgctctacaccgtactggtggaaggcgacgacatgagcgagccggtggccgacgagacccgctcgattctcgacgggcacatcgtgctgtcgcgcaagctggccgccgccaaccactatccggccatcgacgtgctgcactcggtgagccgggtcatgaaccagatcgtcgacgacgatcagcgccatgcggccggacgcttgcgcgaatggctggcgaagtacgaggaagtcgagttgctgctgaagatcggcgaataccagaaaggccaggacagtgaagccgaccgggccatcgagaagatcggggcgatccgccagtggctgcgccagggtacccacgaaaccagcgattacgcacaggcctgcgcgcagttgcggagcctctgcgcatga

SEQ ID NO: 338414 - DNA, 867 bp, Pseudomonas aeruginosa
atggacatcctccagagttcctccgccgcgcccctcgcgccgcgggaagcggccaacgcccccgcgcagcaggctggcggcagcttccagggcgagcgcgtccactacgtttccgtttcgcagtcgctggccgatgccgcggaagagctgaccttcgccttttccgagcgcgccgagaaatccctggccaagcgccgcctgagcgacgcccatgcgcgcctgagcgaagtccaggccatgctgcaggagtactggaagcgcattccggacctggaaagccagcagaagctcgaggcgctgatcgcccacctgggcagcggtcaactgagcagcctggcgcagctcagcgcttacctggagggcttctccagcgagatcagccagcgcttcctggcgctgtcgcgggcgcgcgacgtcctggccgggcggccggaggcgcgggcgatgctggcgctggtcgaccaggcgttgctgcggatggccgacgagcagggcctggagatcgaactcggcctgcgcatcgagccgctggccgccgaggcttccgccgccggtgtcggcgatatccaggcgctgcgcgatacctaccgtgacgcggtactcgactaccggggcctgtcggcggcctggcaggacatccaggcgcgcttcgccgcgacgccgctggagcgggtcgtggccttcctgcagaaagccctgagcgccgacctggacagtcagtcgagccggctcgatccggtgaagctggagcgggtcatgagcgacatgcacaagctgcgcgtgctcggcggcctggcggagcaggtgggggcgctctggcaggtgctggtgacgggggagcggggccatggcatacgggccttctga

SEQ ID NO: 338415 - DNA, 372 bp, Pseudomonas aeruginosa
atggactgggttgagctggccgtcgcgcagttctgccaggacctgcgggtgagcgtaccggtgccgctggcgcgcgtggtgcaactggatttcgaggacagcggcaccttgcagctggaacgccatggcgaacagttgtcgctctggctggcctgtgacctggcctggcaccaggcctatcgcggcaccctgcgggcgttgcgcctgtgccatgcgcgcgcggccgggagcctgccgctgcgttgcgcctggagcggcgaatcgcgcctgctgctgtgcatcaccctggaagcccggcaggtcggcatcccgacgttgcaccaggccttgcaggcgctgcgctcggcgcgcagcgaagtgctcgccgcatga

SEQ ID NO: 338416 - DNA, 366 bp, Pseudomonas aeruginosa
atgagccgggtcggtgcctggcacatcggcatcgaacgactcgacctggcgcatgccgagccgttcgcgccgcccctgccggagcgccatctgctggcgcccgacggccggccggtggagacccacgtcgccagcctgtatcccgcgcagcaggcgcaacagcgcctgttcgactacgcccggccccagctggagttccacggcctgctgcgccccggcgacttccgccaggcgctgcgcgatctccgcctggccctcacgctgccccgccagccggccctgcaggccgcggcctgcctgctcggcgagcgcgatgaagacgagcgactgctgcaaatggccctgaacctgttgcacaaggtatga

SEQ ID NO: 338417 - DNA, 330 bp, Pseudomonas aeruginosa
atgacgttgaaaccgacgcaacagcgcctgttgctgatgctgggctggttgcacctgcaatgcggccagccgcgacgcgcccaggtgttgctggaggccttgctgagcgttgcgccggagcgccgcgacgggcgccgcgccttgctcctggcgttgctccagcaaggcctcggcgagcccgccgtgcgcctgtgccggcagttgcaggaggatggcgaggaggagcccggtctgtggctttgcctgagccgtgccgaacagctcgccgggcgtctcgacgcggcgcgtgccgcgcacgcccgggcgctggagctggaggcgcgggaatga

SEQ ID NO: 338418 - DNA, 2121 bp, Pseudomonas aeruginosa
atgaacgacctgagcgggcttctcggccgggtcggcgagcgcaaggacatcctgctggtggtgttgctgctggcggtggtgttcatgatggtgctgccgctgccaccgctgctgctggacatcctcatcgccgtcaacatcaccatctccgtagtcctgctgatgatgtcggtgtacatcggctcgccgttgcagttctcggtgttcccggcggtgctgctgatcaccacgctgttccgcctggcgctgtcggtgagcaccacgcggatgatcctgctgcaggccgacgcggggcagatcgtcaacaccttcggcagcttcgtggtcggcggcaacctggtggtgggcatcatcatcttcctgatcatcaccatcgtgcagttcctggtgatcaccaagggtgccgagcgggtcgccgaggtcagcgcgcgcttttccctggatgccatgccaggcaagcagatgagcatcgacggcgacatgcgtgccggcgtgatcgatgtcaacgaggcgcgggcgcggcgcgcggtgatcgaaaaggaaagccagatgttcggctccatggacggcgcgatgaagttcgtcaagggcgacgccatcgccgggctgatcatcatcgtcgtcaacatcctcggcggcatcgccatcggcgtcacgcagaagggcctgagcaccgccgacgcgctgcaactgtacgcggtgctgaccgtcggcgatggcatggtctcgcaggtgccggcgttgctgatcgccatcaccgccgggatcatcgtcacccgggtgtcttccgacgaatcggcggacctcggcagcgacatcggcgaacaggtggtggcgcagcccaaggcgctgctgatcggcggcctgttgctggtgctgttcggcctgattcccggtttcccgaccctgaccttcctggctctcgcgctgctggttggcggcggcggctacttcatgctctggcgccagcgggcccaggccagcgccggttcccgcgacctgccggcgctgctcgcgcagggcgccggagcgccatcggccaaggcgcgtggcaaggctggcggcggcaagccgaaggccgggcgtctcgccgagcaggaagaattcgccctcaccgtgccgttgctgatcgacgtcgatgccagcctccaggaacgtctcgaggcgatgtcgctgaacgaggagctggtgcgggtacgacgcgcgttgtacctggatttcggcgtgccgttcccgggtatccacttgcgcttcaacgaagcgatgggcgatggcgaatacctggtgcagctacaggaggtcccggtcgcgcgcggatgcctgcggccgggctggttgctggtgcgcgaacgcgccgcgcagctggaactgctcgcggtcccccacgagccggcagagctgcaggtgccgggagaagaggcgagctgggtggagcaggcgcatcaggatcgcctggagcgttccggctgtgcctgcctgggcctggagcaggtgctcacctggcacctgtcccatgtgctgcgggagtacgccgaggatttcatcggcatccaggagacgcgctacctgctggagcagatggagcagggttacggcgagctggtgaaggaggcgcagcggatcgttcccctgcagcggatgaccgagattctccagcgcctggtcggcgaggacatctcgatccgcaacatgcgggcgatcctcgaggcgatggtggagtgggggcagaaggagaaggacgtggtgcagctcaccgagtacatccgcagcagcctcaagcgctacatctgctacaagtactccagcggcaacaatatccttcccgcctatctgctggaccaggcggtggaggagcagatccgcggtggcatccgccagaccagcgccggcagctacctggccctcgacccggcgataacccaggccttcctcgagcgcgtgcggcagaccgtcggcgatctcgcgcagatgcagaaccggccggtgctgatcgtttccatggatatccgccgctacgtgcgcaagctggtggagagcgactatgccgggctgccggtgctgtcctaccaggagctgacccagcagatcaacatccagccgcttggcaggatcgtgttgtga

SEQ ID NO: 338419 - DNA, 435 bp, Pseudomonas aeruginosa; identical to SEQ ID NO: 319124

SEQ ID NO: 338420 - DNA, 297 bp, Pseudomonas aeruginosa; identical to SEQ ID NO: 319123

SEQ ID NO: 338421 - DNA, 885 bp, Pseudomonas aeruginosa
atggaagtcagaaaccttaatgccgctcgcgagctgttcctggacgagctcctggccgcgtcggcggcgcctgccagtgccgagcaggaggaactgctggccctgttgcgcagcgagcggatcgtgctggcccacgccggccagccgctgagcgaggcgcaagtgctcaaggcgctcgcctggttgctcgcggccaatccgtccgcgcctccggggcagggcctcgaggtactccgcgaagtcctgcaggcacgtcggcagcccggtgcgcagtgggatctgcgcgagttcctggtgtcggcctatttcagcctgcacgggcgtctcgacgaggatgtcatcggtgtctacaaggatgtcctgcagacccaggacggaaagcgcaaggcgctgctcgacgagctcaaggcgctgaccgcggagttgaaggtctacagcgtgatccagtcgcagatcaacgccgcgctgtcggccaagcagggcatcaggatcgacgctggcggtatcgatctggtcgaccccacgctctatggctatgccgtcggcgatcccaggtggaaggacagccccgagtatgcgctgctgagcaatctggataccttcagcggcaagctgtcgatcaaggattttctcagcggctcgccgaagcagagcggggagctcaagggcctcagcgatgagtaccccttcgagaaggacaacaacccggtcggcaatttcgccaccacggtgagcgaccgctcgcgtccgctgaacgacaaggtcaacgagaagaccaccctgctcaacgacaccagctcccgctacaactcggcggtcgaggcgctcaaccgcttcatccagaaatacgacagcgtcctgcgcgacattctcagcgcgatctag

SEQ ID NO: 338422 - DNA, 507 bp, Pseudomonas aeruginosa
atgaaccagcaagcgaccccttccgacaccgaccagcaacaggcgctggaggccttcctgcgcgacggcggcaccctggcgatgcttcgcggactcagcgaggacaccctggagcagctctatgcgctgggcttcaaccagtaccaggcgggcaagtgggacgacgcgcagaagatcttccaggcactgtgcatgctcgaccactacgacgcccgctactttctcggtctgggcgcctgccgccagtccctcggtctctatgagcaggccctgcagagctacagctacggcgcgctgatggacatcaacgagccgcgctttcccttccatgccgccgagtgccacctgcaactgggtgatctcgacggagccgagagtggcttctactcggcccgggccctggccgcggcacagccggcgcacgaggccctggccgcgcgtgccggcgccatgttggaagccgtaaccgcgagaaaggatcgaacatatgaatccgataacgcttga

SEQ ID NO: 338423 - DNA, 1173 bp, Pseudomonas aeruginosa
atgaatccgataacgcttgaacgcgccggactgccctacggggtggccgacgccggggatatcccggcgctcggcaggccggtcgcgagggatgtcgagagtctgcgggtggagcgcctggcggcgccggccgcggcttccgcgagcggcacgggggtggcgctgacgccgccgtccgcagccagccagcagcgcctggaggtcgccaatcgtgcggagatcgccagcctggtgcaagcagtgggcgaggatgtcggactggcgcggcaggttgtgctggccggcgcttcgacgctgttgtccgccggcctgatgtcgccgcaggcgttcgagatcgagctggcgaaaatcaccggcgaagtcgagaaccagcagaagaaactcaagctgaccgaaatcgagcaggcgcgaaagcagaacctgcagaaaatggaggacaaccagcagaagatcagggaatcggaagaagccgcgaaagaagcccagaagtccggtctggcagccaaaatctttggttggatcagtgcaatagcttcgatcatcgtcggcgcaatcatggtggcaaccggcgtcggcgcggccgcgggtgcactgatgatcgcgggcggtgtcatgggagtggtctcccagtcggtacagcaggcagccgcggacggattgatcagcaaggaagtgatggaaaagctcggcccggcactgatgggtatcgagatcgccgtcgcgctgctggcggcggtggtcagcttcggcggctcagcggtcggcgggctggccagactgggcgcgaagatcggcggcaaggcggccgagatgaccgccagcctggcgagcaaggtcgccgacctgggcggcaagttcggcagtttggccggccaatcgctgtcgcactcgctgaaactcggcgtgcaggtttccgacctgaccctggacgtcgccaacggcgcggcccaggccactcattcgggattccaggcgaaggccgcgaaccgccaggccgacgtgcaggaatcgcgtgccgacctgaccaccctgcagggcgtgatcgagcgcctgaaggaagagctgagccgcatgctggaagcattccaggaaatcatggagcggatcttcgccatgctccaggccaagggtgaaaccctgcacaacctgtccagccgaccggcagcgatctga

SEQ ID NO: 338424 - DNA, 888 bp, Pseudomonas aeruginosa
atgatcgacacgcaatattccctggcggctacccaggccgcgatcccctccgagccgatcgctcccggcgccgccgggcgttccgtcggcacgccgcaagcggctgcggacctgccgcaggtgccggccgcgcgggccgaccgggtcgaactgaacgctccgcgccaggtgctcgacccggtgcgcatggaagcggccggcagcgagctggacagcagcgtcgagcttctgctgattctcttccgcatcgcgcagaaagcgcgcgagctgggcgtgctccagcgcgacaacgagaaccagtcgatcatccacgcgcagaaggcgcaggtggacgagatgcgcagcggcgccacgctgatgatcgccatggcggtgatcgctggcgtcggcgcattggcctcggcggtggtcggcagcctcggcgcgttgaagaacggcaaggccatcagtcaggagaagaccctgcagaagaacatcgatgggcgcaacgaactgatcgacgcgaagatgcaggcgcttggcaagacctccgacgaggatcgcaagatcgtcggcaaggtctgggcggcggaccaggtgcaggacagtgtggctttgcgtgcggcgggccgtgccttcgagagccgcaacggcgccctgcaggtggccaacacggtgatccagtccttcgtccagatggccaacgcctcggtccaggtgcgccagggcgaatcgcaggcgagcgcccgggaaggagaggtcaacgccaccatcgggcagagccagaagcagaaggtcgaggaccagatgagcttcgatgccggcttcatgaaggacgtcctgcagctcatccagcagtacacccagagccataaccaggcctggcgtgcggcggccggagtggtctga

SEQ ID NO: 338425 - DNA, 438 bp, Pseudomonas aeruginosa
atggatttaacgagcaaggtcaaccgactgcttgccgagttcgcaggccgtatcggtttgccttccctgtccctcgacgaggagggcatggcgagcctcctgttcgacgaacaggtgggcgtcaccctgttgctgctcgccgagcgcgagcgtctgttgctggaggccgatgtggcgggcatcgatgtgctgggcgaggggatctttcgccagctcgccagcttcaaccgccattggcaccgtttcgatctgcatttcggcttcgacgagctgaccgggaaggtccagttgtatgcgcagattctcgcagcgcaactgaccctcgaatgcttcgaggcgaccctggccaacctgctcgaccacgccgagttctggcaacgcctgctgccgtgcgacagcgatcgcgaggcggtcgctgcggtcggcatgagggtttga

SEQ ID NO: 338426 - DNA, 246 bp, Pseudomonas aeruginosa
atgaaaatcgaatcgatttcgccggtgcagccgtcccaagacgcaggagccgagacggtggggcatttcgaggggcgttcggtgacccgcgcggccgttcgcggcgacgaccgttccagcgtggccgggctggcgcgctggctggcgcgcaacgtggctggtgatccgcgcagcgagcaggccttgcagcgcctcgccgacggcgacggcacgccgctggaggcgcgcacggtccggcgcaggtga

SEQ ID NO: 338427 - DNA, 414 bp, Pseudomonas aeruginosa
atgctgttgccgctggcgttgctgctcggcggttgcgtcagccagcccgcgccgatgtcgccgaaggtgacggtgggcggttcggtgggcggcgtttccctgcaggcgcgccaggcgcaactcaggctgcgcctgtatgccgtcgttcagggaaggatgcaaacgattgccgagcggcgctaccgggtgtccgggttgccgttgcgctatgcgttcgatctggaggtcgacaggttggagggcgaggcattgtacctgcgtaccgagctttcctgggtgggcgtcgcggcggtccaggcgagtgcctggcaacaggtggcggcgggcgtcgatgagcgggtccggctggttcggcgcgactgttttccgaattgtacggccgctcgcccggaagaaagatctggcaacgattga

SEQ ID NO: 338428 - DNA, 897 bp, Pseudomonas aeruginosa
atgcctctccgctcggcggggcattcaaggtacgacgggaagtgttggggttcttataatatgcaaggagccaaatctcttggccgaaagcagataacgtcttgtcattggaacattccaactttcgaatacagggtaaacaaggaagagggcgtatatgttctgctcgagggcgaactgaccgtccaggacatcgattccactttttgcctggcgcctggcgagttgcttttcgtccgccgcggaagctatgtcgtaagtaccaagggaaaggacagccgaatactctggattccattatctgcccagtttctacaaggcttcgtccagcgcttcggcgcgctgttgagtgaagtcgagcgttgcgacgagcccgtgccgggcatcatcgcgttcgctgccacgcctctgctggccggttgcgtcaaggggttgaaggaattgcttgtgcatgagcatccgccgatgctcgcctgcctgaagatcgaggagttgctgatgctcttcgcgttcagtccgcaggggccgctgctgatgtcggtcctgcggcaactgagcaaccggcatgtcgagcgtctgcagctattcatggagaagcactacctcaacgagtggaagctgtccgacttctcccgcgagttcggcatggggctgaccaccttcaaggagctgttcggcagtgtctatggggtttcgccgcgcgcctggatcagcgagcggagaatcctctatgcccatcagttgctgctcaacagcgacatgagcatcgtcgacatcgccatggaggcgggcttttccagtcagtcctatttcacccagagctatcgccgccgtttcggctgcacaccgagccgctcgcggcaggggaaggacgaatgccgggctaaaaataactga
